(19) United States
(12) Patent Application Publication
(10) Pub. No.: US 2006/0135758 A1
(43) Pub. Date: Jun. 22, 2006

(54) Soybean polymorphisms and methods of genotyping

(76) Inventor: Kunsheng Wu, Ballwin, MO (US)

Correspondence Address: MONSANTO COMPANY, 800 N. LINDBERGH BLVD., ATTENTION: GAIL P. WUELLNER, IP PARALEGAL, (E2NA), ST. LOUIS, MO, 63167, US

(21) Appl. No.: 11/216,545

(22) Filed: Aug. 31, 2005

Related U.S. Application Data
(60) Provisional application No. 60/606,062, filed on Aug. 31, 2004.

(51) Int. Cl. C07H 21/04

(52) U.S. Cl. 536/24.3

(57) ABSTRACT

Polymorphic soybean DNA loci useful for genotyping between at least two varieties of soybean. Sequences of the loci are useful for designing primers and probe oligonucleotides for detecting polymorphisms in soybean DNA. Polymorphisms are useful for genotyping applications in soybean. The polymorphic markers are useful to establish marker/trait associations, e.g. in linkage disequilibrium mapping and association studies, positional cloning and transgenic applications, marker-aided breeding and marker-assisted selection, and identity by descent studies. The polymorphic markers are also useful in mapping libraries of DNA clones, e.g. for soybean QTLs and genes linked to polymorphisms.

### CROSS REFERENCE TO RELATED APPLICATIONS

[0001] This application claims the benefit of earlier filing date under 35 U.S.C. 119(e) of provisional application Ser. No. 60/606,062, filed Aug. 31, 2004, which includes CD-ROMs of sequence listing and table, all of which are incorporated herein by reference.

### INCORPORATION OF SEQUENCE LISTING

[0002] Two copies of the sequence listing (Copy 1 and Copy 2) and a computer readable form (CRF) of the sequence listing, all on CD-ROMs, each containing the file named SoySNP2005.5T25.txt which is 17,727,488 bytes (measured in MS-DOS), all of which were created on Aug. 31, 2005 are herein incorporated by reference.

### INCORPORATION OF TABLES

[0003] Two copies of table, i.e. Table 1 named as SoySNP2005_Table 1.txt, on CD-ROMs which is 2,230,272 bytes (measured in MS-Windows), all of which were created on Aug. 31, 2005 are herein incorporated by reference.

### FIELD OF THE INVENTION

[0004] Disclosed herein are soybean polymorphisms, nucleic acid molecules related to such polymorphisms and methods of using such polymorphisms and molecules, e.g. in genotyping.

### BACKGROUND

[0005] Polymorphisms are useful as genetic markers for genotyping applications in the agriculture field, e.g. in plant genetic studies and commercial breeding. See for instance U.S. Pat. Nos. 5,385,835; 5,437,697; 5,385,835; 5,492,547; 5,746,023; 5,962,764; 5,981,832 and 6,100,030, and U.S. application Ser. No. 09/861,478 (filed May 18, 2001), Ser. No. 09/969,373 (filed (Oct. 2, 2001), and Ser. No. 10/389,566 (filed Mar. 14, 2003), the disclosures of all of which are incorporated herein by reference. The highly conserved nature of DNA combined with the rare occurrences of stable polymorphisms provides genetic markers, which are both predictable and discerning of different genotypes. Among the classes of existing genetic markers are a variety of polymorphisms indicating genetic variation including restriction-fragment-length polymorphisms (RFLPs), amplified fragment-length polymorphisms (AFLPs), simple sequence repeats (SSRs), single nucleotide polymorphisms (SNPs) and insertion/deletion polymorphisms (Indels). Because the number of genetic markers for a plant species is limited, the discovery of additional genetic markers will facilitate genotyping applications including marker-trait association studies, gene mapping, gene discovery, marker-assisted selection and marker-assisted breeding. Evolving technologies make certain genetic markers more amenable for rapid, large scale use. For instance, technologies for SNP detection indicate that SNPs may be preferred genetic markers.

### SUMMARY OF THE INVENTION

[0006] This invention provides a large number of genetic markers from soybean genomic DNA. These genetic markers comprise soybean DNA loci, which are useful for genotyping applications involving at least two varieties of soybean. A polymorphic soybean locus of this invention comprises at least 20 consecutive nucleotides which include or are adjacent to a polymorphism which is identified herein, e.g. in Table 1.

[0007] One aspect of this invention is a method of analyzing DNA of a soybean plant comprising the steps of accessing a set of polymorphic soybean DNA sequences comprising one or more of the polymorphisms identified in Table 1, e.g. where the set of polymorphic soybean DNA sequences comprises any one of SEQ ID NO: 1 through SEQ ID NO:8783. Such a method further comprises assembling a selected set of DNA sequences from the accessed set of polymorphic soybean DNA sequences and storing the selected set on a computer readable medium. A sequence of DNA extracted from a soybean plant can be analyzed by comparing the extracted DNA sequence with sequences in the selected set of DNA sequences, e.g. to identify polymorphisms in the DNA extracted from a soybean plant. In one aspect of the method the selected set comprises all of the DNA sequences of SEQ ID NO: 1 through SEQ ID NO:8783. In other aspects of the method the selected set can comprise significantly fewer of the polymorphic soybean DNA sequences, e.g. a set of limited to a single chromosome or QTL or a set which is relatively evenly distributed over the genome, or a set which is informative for a trait.
[0008] Another aspect of this invention provides a method for determining the genotype of a soybean plant, e.g. by determining the sequence of DNA of a soybean plant, its transcribed mRNA or its translated amino acids, and comparing the determined sequence to the sequence of a selected set of polymorphic soybean DNA sequences, their transcribed mRNA or translated amino acids. Such comparing allows the identification of allelic character of polymorphisms in the genome of a soybean plant. Still another aspect of this invention provides a method for genotyping a soybean plant by assaying DNA from tissue of a soybean plant to identify the allelic state of a nucleic acid polymorphism in a polymorphic soybean DNA locus identified herein in Table 1. Such assaying can comprise amplifying segments of soybean DNA using a pair of oligonucleotide primers designed to hybridize to the 5′ end of each of opposite strands of a segment of soybean DNA including a polymorphism which is identified in Table 1. The assaying can further comprise hybridizing an oligonucleotide detector, e.g. having a sequence which hybridizes to the sequence of the DNA at or adjacent to the polymorphism. In such assaying the oligonucleotide primers and oligonucleotide detector can be designed to hybridize to segments of one of the selected set of DNA sequences. A useful assay includes Taqman® assays for SNP detection. Such a method of analyzing a soybean plant more particularly comprises the steps of
   [0009] (a) acquiring a set of one or more oligonucleotide primer pairs and cognate oligonucleotide probe pairs for detecting one or more of the allelic SNP or Indel polymorphisms identified in Table 1, wherein a primer pair is useful for amplifying a segment of DNA including said allelic SNP or Indel polymorphism and said cognate oligonucleotide probe pair is useful for detecting allelic forms of said SNP or Indel polymorphism in said segment of DNA; and
   [0010] (b) analyzing the genome of a population of soybean plants using said oligonucleotide primers and probes to identify the presence of allelic forms of said one or more of the allelic SNP or Indel polymorphisms identified in Table 1.
      An aspect of the method uses a set of oligonucleotide primers and probes for detecting at least a polymorphism in each chromosome. Another aspect of the method uses a set of oligonucleotides primers and probes for detecting polymorphisms in a plurality of sequences of polymorphic soybean DNA sequences which includes at least one sequence in the set of sequences consisting of SEQ ID NO: 1-8783.

[0011] In another aspect of the invention the polymorphisms are used to identify haplotypes which are allelic segments of genomic DNA characterized by at least two polymorphisms in linkage disequilibrium and wherein said polymorphisms are in a genomic windows of not more than 10 centimorgans in length, e.g. not more than about 8 centimorgans or smaller windows, e.g. in the range of say 1 to 5 centimorgans. Especially useful methods of the invention use such polymorphisms to identify a plurality of haplotypes in a series of adjacent genomic windows in each soybean chromosome, e.g. providing essentially full genome coverage with such windows. With a sufficiently large and diverse breeding population of soybeans, it is possible to identify a high quantity of haplotypes in each window, thus providing allelic DNA that can be associated with one or more traits to allow focused marker assisted breeding. Thus, an aspect of the soybean analysis of this invention further comprises the steps of characterizing one or more traits for said population of soybean plants and associating said traits with said allelic SNP or Indel polymorphisms, preferably organized to define haplotypes. Such traits include yield, lodging, maturity, plant height and disease resistance, e.g. resistance to soybean cyst nematode, soybean rust, brown stem rot, sudden death syndrome and the like. To facilitate breeding it is useful to compute a value for each trait or a value for a combination of traits, e.g. a multiple trait index. The weight allocated to various traits in a multiple trait index can vary depending of the objectives of breeding. For instance, if yield is a key objective, the yield value may be weighted at 50 to 80%, maturity, lodging, plant height or disease resistance may be weighted at lower percentages in a multiple trait index.

[0012] Another aspect of this invention provides a method of genotyping further comprising identifying one or more phenotypic traits for at least two soybean lines and determining associations between said traits and polymorphisms.

[0013] Still another aspect of this invention is directed to the use of a selected set of polymorphic soybean DNA sequences in soybean breeding, e.g. by selecting a soybean line on the basis of its genotype at a polymorphic locus has a sequence within the selected set of polymorphic soybean DNA sequences Another aspect of this invention provides a method of breeding soybean plants comprising the steps of:
[0014] (a) identifying trait values for at least two haplotypes in at least two genomic windows of up to 10 centimorgans for a breeding population of at least two soybean plants;
[0015] (b) breeding two soybean plants in said breeding population to produce a population of progeny seed;
[0016] (c) identifying the allelic state of polymorphisms in each of said windows in said progeny seed to determine the presence of said haplotypes; and
[0017] (c) selecting progeny seed having the higher trait values identified for determined haplotypes in said progeny seed.
   In aspects of the breeding method trait values are identified for at least two haplotypes in each adjacent genomic window over essentially the entirety of each chromosome. In another useful aspect of the method progeny seed is selected for a higher trait value for yield for a haplotype in a genomic window of up to 10 centimorgans in each chromosome. In another aspect of the invention, the breeding method is directed to increased yield, where the trait value is for the yield trait, where trait values are ranked for haplotypes in each window, and where a progeny seed is selected which has a trait value for yield in a window that is higher than the mean trait value for yield in said window. In certain aspects of the breeding methods the haplotypes are defined using the polymorphisms identified in Table 1 or are defined as being in the set of DNA sequences that comprises all of the DNA sequences of SEQ ID NO: 1 through SEQ ID NO:8783, or as being in linkage disequilibrium with one of those polymorphisms.

[0018] The methods of this invention characterized by marker identification can be carried out using oligonucleotide primers and oligonucleotides detectors. Thus, another aspect of the invention is directed to such oligonucleotides, e.g. sets of oligonucleotides functional with a marker. More particularly, this invention provides a pair of isolated nucleic acid molecules comprising oligonucleotide primers for amplifying soybean DNA to identify the presence of a polymorphism in the DNA, e.g. oligonucleotides comprising at least 12 consecutive nucleotides which are at least 90% identical to ends of a segment of DNA of the same number of nucleotides in opposite strands of a polymorphic soybean DNA locus having a sequence which is at least 90% identical to a sequence in a subset of polymorphic soybean DNA sequences disclosed herein (or a complement thereof). More preferably such a pair of oligonucleotides comprise at least 15 consecutive nucleotides, or more, e.g. at least 20 consecutive nucleotides. More particularly, when hybridization to a SNP is contemplated for marker assay for identifying a polymorphism in soybean DNA, a set will comprise four oligonucleotides, e.g. a pair of isolated nucleic acid molecules for amplifying DNA which can hybridize to DNA which flanks a polymorphism and a pair of detector nucleic acid molecules which are useful for detecting each nucleotide in a single nucleotide polymorphism in a segment of the amplified DNA. In preferred aspects of the invention such detector nucleic acid molecules comprise at least 12 nucleotide bases and a detectable label, or at least 15 nucleotide bases, and the sequence of the detector nucleic acid molecules is identical except for the nucleotide polymorphism (e.g. SNP or Indel) and is at least 95 percent identical to a sequence of the same number of consecutive nucleotides in either strand of the segment of polymorphic soybean DNA locus containing the polymorphism.

### DETAILED DESCRIPTION OF PREFERRED EMBODIMENTS

A. Definitions:

As used herein certain terms are defined as follows.

[0019] An “allele” means an alternative sequence at a particular locus; the length of an allele can be as small as 1 nucleotide base, but is typically larger. Allelic sequence can be amino acid sequence or nucleic acid sequence. A “locus” is a short sequence that is usually unique and usually found at one particular location in the genome by a point of reference, e.g. a short DNA sequence that is a gene, or part of a gene or intergenic region. A locus of this invention can be a unique PCR product at a particular location in the genome. The loci of this invention comprise one or more polymorphisms i.e. alternative alleles present in some individuals. “Genotype” means the specification of an allelic composition at one or more loci within an individual organism. In the case of diploid organisms, there are two alleles at each locus; a diploid genotype is said to be homozygous when the alleles are the same, and heterozygous when the alleles are different. “Haplotype” means an allelic segment of genomic DNA that tends to be inherited as a unit; such haplotypes can be characterized by two or more polymorphisms and can be defined by a size of not greater than 10 centimorgans, e.g. not greater 8 centimorgans. With higher precision, from higher density of polymorphisms, haplotypes can be characterized by genomic windows in the range of 1-5 centimorgans.

[0020] “Consensus sequence” means DNA sequence constructed as the consensus at each nucleotide position of a cluster of aligned sequences. Such clusters are used to identify SNP and Indel polymorphisms in alleles at a locus. Consensus sequence can be based on either strand of DNA at the locus and states the nucleotide base of either one of each SNP in the locus and the nucleotide bases of all Indels in the locus. Thus, although a consensus sequence may not be a copy of an actual DNA sequence, a consensus sequence is useful for precisely designing primers and probes for actual polymorphisms in the locus.

[0021] “Phenotype” means the detectable characteristics of a cell or organism which are a manifestation of gene expression.

[0022] “Marker” means a polymorphic sequence. A “polymorphism” is a variation among individuals in sequence, particularly in DNA sequence. Useful polymorphisms include single base substitutions (single nucleotide polymorphisms SNPs), or insertions or deletions in DNA sequence (Indels) and simple sequence repeats of DNA sequence (SSRs).

[0023] “Marker Assay” means a method for detecting a polymorphism at a particular locus using a particular method, e.g. phenotype (such as seed color, flower color, or other visually detectable trait), restriction fragment length polymorphism (RFLP), single base extension, electrophoresis, sequence alignment, allelic specific oligonucleotide hybridization (ASO), RAPID, etc. Preferred marker assays include single base extension as disclosed in U.S. Pat. No. 6,013,431 and allelic discrimination where endonuclease activity releases a reporter dye from a hybridization probe as disclosed in U.S. Pat. No. 5,538,848 the disclosures of both of which are incorporated herein by reference.

[0024] “Linkage” refers to relative frequency at which types of gametes are produced in a cross. For example, if locus A has genes “A” or “a” and locus B has genes “B” or “b” and a cross between parent I with AABB and parent B with aabb will produce four possible gametes where the genes are segregated into AB, Ab, aB and ab. The null expectation is that there will be independent equal segregation into each of the four possible genotypes, i.e. with no linkage ¼ of the gametes will of each genotype. Segregation of gametes into a genotypes differing from ¼ are attributed to linkage.

[0025] “Linkage disequilibrium” is defined in the context of the relative frequency of gamete types in a population of many individuals in a single generation. If the frequency of allele A is p, a is p′, B is q and b is q′, then the expected frequency (with no linkage disequilibrium) of genotype AB is pq, Ab is pq′, aB is p′q and ab is p′q′. Any deviation from the expected frequency is called linkage disequilibrium.

[0026] “Quantitative Trait Locus (QTL)” means a locus that controls to some degree numerically representable traits that are usually continuously distributed.

[0027] Nucleic acid molecules or fragments thereof of the present invention are capable of hybridizing to other nucleic acid molecules under certain circumstances. As used herein, two nucleic acid molecules are said to be capable of hybridizing to one another if the two molecules are capable of forming an anti-parallel, double-stranded nucleic acid structure. A nucleic acid molecule is said to be the “complement” of another nucleic acid molecule if they exhibit “complete complementarity” i.e. each nucleotide in one sequence is complementary to its base pairing partner nucleotide in another sequence. Two molecules are said to be “minimally complementary” if they can hybridize to one another with sufficient stability to permit them to remain annealed to one another under at least conventional “low-stringency” conditions. Similarly, the molecules are said to be “complementary” if they can hybridize to one another with sufficient stability to permit them to remain annealed to one another under conventional “high-stringency” conditions. Nucleic acid molecules which hybridize to other nucleic acid molecules, e.g. at least under low stringency conditions are said to be “hybridizable cognates” of the other nucleic acid molecules. Conventional stringency conditions are described by Sambrook et al., Molecular Cloning, A Laboratory Manual, 2nd Ed., Cold Spring Harbor Press, Cold Spring Harbor, N.Y., 1989 (Now onwards referred as Sambrook et al.) and by Haymes et al., Nucleic Acid Hybridization, A Practical Approach, IRL Press, Washington, D.C. (1985), each of which is incorporated herein by reference. Departures from complete complementarity are therefore permissible, as long as such departures do not completely preclude the capacity of the molecules to form a double-stranded structure. Thus, in order for a nucleic acid molecule to serve as a primer or probe it need only be sufficiently complementary in sequence to be able to form a stable double-stranded structure under the particular solvent and salt concentrations employed.

[0028] Appropriate stringency conditions which promote DNA hybridization, for example, 6.0× sodium chloride/sodium citrate (SSC) at about 45° C., followed by a wash of 2.0×SSC at 50° C., are known to those skilled in the art or can be found in Current Protocols in Molecular Biology, John Wiley & Sons, N.Y. (1989), 6.3.1-6.3.6, incorporated herein by reference. For example, the salt concentration in the wash step can be selected from a low stringency of about 2.0×SSC at 50° C. to a high stringency of about 0.2×SSC at 50° C. In addition, the temperature in the wash step can be increased from low stringency conditions at room temperature, about 22° C., to high stringency conditions at about 65° C. Both temperature and salt may be varied, or either the temperature or the salt concentration may be held constant while the other variable is changed.

[0029] In a preferred embodiment, a nucleic acid molecule of the present invention will specifically hybridize to one strand of a segment of soybean DNA having a nucleic acid sequence as set forth in SEQ ID NO: 1 through SEQ ID NO: 6578under moderately stringent conditions, for example at about 2.0×SSC and about 65° C., more preferably under high stringency conditions such as 0.2×SSC and about 65° C.

[0030] As used herein “sequence identity” refers to the extent to which two optimally aligned polynucleotide or peptide sequences are invariant throughout a window of alignment of components, e.g. nucleotides or amino acids. An “identity fraction” for aligned segments of a test sequence and a reference sequence is the number of identical components which are shared by the two aligned sequences divided by the total number of components in reference sequence segment, i.e. the entire reference sequence or a smaller defined part of the reference sequence. “Percent identity” is the identity fraction times 100.

B. Nucleic Acid Molecules—Loci, Primers and Probes

[0031] The soybean loci of this invention comprise DNA sequence which comprises at least 20 consecutive nucleotides and includes or is adjacent to one or more polymorphisms identified in Table 1. Such soybean loci have a nucleic acid sequence having at least 90% sequence identity, more preferably at least 95% or even more preferably for some alleles at least 98% and in many cases at least 99% sequence identity, to the sequence of the same number of nucleotides in either strand of a segment of soybean DNA which includes or is adjacent to the polymorphism. The nucleotide sequence of one strand of such a segment of soybean DNA may be found in a sequence in the group consisting of SEQ ID NO: 1 through SEQ ID NO:6578. It is understood by the very nature of polymorphisms that for at least some alleles there will be no identity at the polymorphic site itself. Thus, sequence identity can be determined for sequence that is exclusive of the polymorphism sequence. The polymorphisms in each locus are identified more particularly in Table 1.

[0032] For many genotyping applications it is useful to employ as markers polymorphisms from more than one locus. Thus, one aspect of the invention provides a collection of different loci. The number of loci in such a collection can vary but will be a finite number, e.g. as few as 2 or 5 or 10 or 25 loci or more, for instance up to 40 or 75 or 100 or more loci, e.g. selected because they comprise a set which is limited to a single chromosome or QTL or is relatively evenly distributed over the genome, or is informative for one or more traits.

[0033] Another aspect of the invention provides nucleic acid molecules which are capable of hybridizing to the polymorphic soybean loci of this invention. In certain embodiments of the invention, e.g. which provide PCR primers, such molecules comprises at least 15 nucleotide bases. Molecules useful as primers can hybridize under high stringency conditions to a one of the strands of a segment of DNA in a polymorphic locus of this invention. Primers for amplifying DNA are provided in pairs, i.e. a forward primer and a reverse primer. One primer will be complementary to one strand of DNA in the locus and the other primer will be complementary to the other strand of DNA in the locus, i.e. the sequence of a primer is preferably at least 90%, more preferably at least 95%, identical to a sequence of the same number of nucleotides in one of the strands. It is understood that such primers can hybridize to sequence in the locus which is distant from the polymorphism, e.g. at least 5, 10, 20, 50 or up to about 100 nucleotide bases away from the polymorphism. Design of a primer of this invention will depend on factors well known in the art, e.g. avoidance of repetitive sequence.

[0034] Another aspect of the nucleic acid molecules of this invention are hybridization probes for polymorphism assays. In one aspect of the invention such probes are oligonucleotides comprising at least 12 nucleotide bases and a detectable label. The purpose of such a molecule is to hybridize, e.g. under high stringency conditions, to one strand of DNA in a segment of nucleotide bases which includes or is adjacent to the polymorphism of interest in an amplified part of a polymorphic locus. Such oligonucleotides are preferably at least 90%, more preferably at least 95%, identical to the sequence of a segment of the same number of nucleotides in one strand of soybean DNA in a polymorphic locus. The detectable label can be a radioactive element or a dye. In preferred aspects of the invention, the hybridization probe further comprises a fluorescent label and a quencher, e.g. for use hybridization probe assays of the type known as Taqman® assays, available from Applied Biosystems, Foster City, Calif.

[0035] For assays where the molecule is designed to hybridize adjacent to a polymorphism which is detected by single base extension, e.g. of a labeled dideoxynucleotide, such molecules can comprise at least 15, more preferably at least 16 or 17, nucleotide bases in a sequence which is at least 90 percent, preferably at least 95%, identical to a sequence of the same number of consecutive nucleotides in either strand of a segment of polymorphic soybean DNA. Oligonucleotides for single base extension assays are available from Orchid Biosciences, Inc.

[0036] Such primer and probe molecules are generally provided in groups of two primers and one or more probes for use in genotyping assays. Moreover, it is often desirable to conduct a plurality of genotyping assays for a plurality of polymorphisms. Thus, this invention also provides collections of nucleic acid molecules, e.g. in sets which characterize a plurality of polymorphisms.

Identifying Polymorphisms

[0037] Polymorphisms in a genome can be determined by comparing cDNA sequence from different lines. While the detection of polymorphisms by comparing cDNA sequence is relatively convenient, evaluation of cDNA sequence allows no information about the position of introns in the corresponding genomic DNA. Moreover, polymorphisms in non-coding sequence cannot be identified from cDNA. This can be a disadvantage, e.g. when using cDNA-derived polymorphisms as markers for genotyping of genomic DNA. More efficient genotyping assays can be designed if the scope of polymorphisms includes those present in non-coding unique sequence.

[0038] Genomic DNA sequence is more useful than cDNA for identifying and detecting polymorphisms. Polymorphisms in a genome can be determined by comparing genomic DNA sequence from different lines. However, the genomic DNA of higher eukaryotes typically contains a large fraction of repetitive sequence and transposons. Genomic DNA can be more efficiently sequenced if the coding/unique fraction is enriched by subtracting or eliminating the repetitive sequence.

[0039] There are a number of strategies that can be employed to enrich for coding/unique sequence. Examples of these include the use of enzymes which are sensitive to cytosine methylation, the use of the McrBC endonuclease to cleave repetitive sequence, and the printing of microarrays of genomic libraries which are then hybridized with repetitive sequence probes.

[0040] C.1. Methylated Cytosine Sensitive Enzymes:

[0041] The DNA of higher eukaryotes tends to be very heavily methylated, however it is not uniformly methylated. In fact, repetitive sequence is much more highly methylated than coding sequence. Coding/unique sequence can therefore be enriched by exploiting this difference in methylation pattern. See U.S. Pat. No. 6,017,704 for methods of mapping and assessment of DNA methylation patterns in CG islands. Some restriction endonucleases are sensitive to the presence of methylated cytosine residues in their recognition site. Such methylation sensitive restriction endonucleases may not cleave at their recognition site if the cytosine residue in either an overlapping 5′-CG-3′ or an overlapping 5′-CNG-3′ is methylated. Methylation sensitive restriction endonucleases include the 4 base cutters: Aci I, Hha I, HinPl I, HpaII and Msp I, the 6 base cutters: Apa I, Age I, Bsr F I, BssH II, Eag I, Eae I, MspM II, Nar I, Pst I, Pvu I, Sac II, Sma I, Stu I and Xho I and the 8 base cutter: Not I. For example, DNA cleavage at the site CTGCAG by Pst I is inhibited when the C residues are methylated. In order to enrich for coding/unique sequence soybean libraries can be constructed from genomic DNA digested with Pst I (or other methylation sensitive enzymes), and size fractionated by agarose gel electrophoresis. Regions of the genome which are heavily methylated (i.e., regions with a high fraction of repetitive sequences) have a higher number of Pst I sites that are methylated. Therefore, most of the Pst I sites in repetitive DNA will not be cleaved during Pst 1 digestion, and the repetitive sequence will tend to consist mostly of high molecular weight, uncleaved DNA. In contrast, regions of the genome that are not heavily methylated (i.e. regions containing a large fraction of coding/unique sequence) should contain a large fraction of unmethylated Pst I sites which will be cleaved during digestion, producing relatively smaller fragments. When digested DNA is electrophoresed through agarose, relatively larger fragments from heavily methylated, non-coding DNA regions are separated from relatively smaller fragments derived from coding/unique sequence. Coding region-enriched DNA fragments (commonly between 500-3000 bp) can be excised from the gel, purified and ligated into a Pst I digested vector, e.g. pUC18. The ligation products are transformed by electroporation into a plurality of suitable bacterial hosts, e.g. DH10B, to produce a library of clones enriched for coding/unique sequence. Individual clones can be sequenced to provide the sequence of the inserted coding region DNA.

[0042] In order to reduce the sequence complexity of any particular library, the DNA in the range 500 to 10,000 bp can be further size-fractionated by incrementally excising fragments from the gel. Useful ranges of size-fractionated fragments include 500-600 bp, 600-700 bp, 700-800 bp, 800-900 bp, 900-1100 bp, 1100-1500 bp, 1500-2000 bp, 2000-2500 bp and 2500-3000 bp. A series of size-fractionated reduced representation libraries are constructed by ligating purified DNA from each size fraction separately to the vector. A small sample of clones from each library (for example about 400 clones) is sequenced to determine the fraction of repetitive sequence present in each particular library. Comparison of reduced representation libraries prepared from a variety of different soybean lines indicates that many fractions contain less than 10% repetitive sequence and some fractions contain more than 20% repetitive sequence. Preferred reduced representation libraries contain less than 20% repetitive sequence, more preferably less than 15% repetitive sequence and even more preferably less than 10% repetitive sequence. By determining the fraction of repetitive sequence throughout the whole series of size fractionated reduced representation libraries, the libraries with the smallest fraction of repetitive sequence can be selected for deep sequencing (usually 10,000-20,000 clones). Since the purpose of obtaining sequence is for polymorphism detection, the equivalent libraries representing the same size fraction for both soybean strains are sequenced, or alternatively a library consisting of a mixture of DNA from different soybean strains is sequenced. Another advantage of using reduced representation libraries for polymorphism detection is that it increases the probability of recovering the equivalent sequences from both soybean lines. Polymorphisms can only be detected if the equivalent sequence is available from both lines.

[0043] C.2. McrBC Endonuclease

[0044] An alternative method for enriching coding region DNA sequence enrichment uses McrBC endonuclease restriction. As a defense against invading foreign DNA from phage/viruses, E. coli contain endonucleases, e.g. an McrBC endonuclease, which cleave methylated cytosine-containing DNA. This feature can be exploited to enrich DNA with regions of the genome which are not heavily methylated, e.g. the presumed coding region DNA. Reduced representation libraries can be constructed using genomic DNA fragments which are cleaved by physical shearing or digestion with any restriction enzyme. DNA fragments are transformed into an E. coli host that contains an McrBC endonuclease, e.g. E. coli strain JM107 or DH5a. When the bacterial host is transformed with a DNA fragment which contains methylated DNA region, the McrBC endonuclease will cleave the inserted DNA and the plasmid will not be propagated. When the bacterial host is transformed with a DNA fragment that is not methylated, the plasmid will be propagated, and a colony will grow on the agar plate allowing the clone to be sequenced. A small sample of clones from libraries generated in this manner are sampled, and the fraction of repetitive sequenced determined. McrBC endonuclease can also be used with methylated cytosine sensitive endonuclease to further reduce the fraction of repetitive sequence in libraries that are not suitable for sequencing, e.g. sequences that contain more than 15% repetitive sequence.

[0045] C.3. Microarraying Reduced Representation Libraries

[0046] Another method to enrich for coding/unique sequence is to construct reduced representation libraries (using methylation sensitive or non-methylation sensitive enzymes), print microarrays of the library on nylon membrane, and hybridize with probes made from repetitive elements known to be present in the library. Clones containing repetitive sequence elements are identified, and the library is re-arrayed by picking only the negative clones. This process is performed by randomly picking clones from a reduced representation library into 384-well plates and culturing them. Micro-arrays can be prepared by printing clone DNA from the collection of 384-well plates in determined patterns on supports, such as glass supports or nylon membranes. The fabrication of microarrays comprising thousands of distinct clones, e.g. up to about 25,000 clones or more, are well known in the art. See for instance, U.S. Pat. No. 5,807,522 for methods for fabricating microarrays of spotted polynucleotides at high density. A small sample of clones from the reduced representation library, e.g. about 400 clones, can be sequenced to identify repetitive sequence elements. Clones containing the repetitive sequences are retrieved, and the clones used to make radioactive probes which are hybridized on the nylon arrays. Radioactive isotope label elements include ³²P, ³³P, ³⁵S, ¹²⁵I, and the like with ³³P being especially preferred. The arrays are analyzed for hybridization by detecting radiation, e.g. using a Fuji Phosphoimager™ imaging screen. After an appropriate exposure time the array image is read as a digital file representing the hybridization intensity from each array element which is proportional to amount of labeled repeat sequence. This radiation image identifies all the clones on the array which correspond to repetitive sequence clones, and also identifies the 384-well plate and well location of each repetitive sequence clone. With this information, all the non-repetitive sequence clones can be picked from the original plates and relocated onto a new set of plates which do not contain repetitive sequence clones. This method can be used to lower the fraction of repetitive sequence in reduced representation libraries from approximately 25% to about 1-2%.

D. Detecting Polymorphisms

[0047] Polymorphisms in DNA sequences can be detected by a variety of effective methods well known in the art including those disclosed in U.S. Pat. Nos. 5,468,613 and 5,217,863; 5,210,015; 5,876,930; 6,030,787 6,004,744; 6,013,431; 5,595,890; 5,762,876; 5,945,283; 5,468,613; 6,090,558; 5,800,944 and 5,616,464, all of which are incorporated herein by reference in their entireties. For instance, polymorphisms in DNA sequences can be detected by hybridization to allele-specific oligonucleotide (ASO) probes as disclosed in U.S. Pat. Nos. 5,468,613 and 5,217,863. The nucleotide sequence of an ASO probe is designed to form either a perfectly matched hybrid or to contain a mismatched base pair at the site of the variable nucleotide residues. The distinction between a matched and a mismatched hybrid is based on differences in the thermal stability of the hybrids in the conditions used during hybridization or washing, differences in the stability of the hybrids analyzed by denaturing gradient electrophoresis or chemical cleavage at the site of the mismatch.

[0048] U.S. Pat. No. 5,468,613 discloses allele specific oligonucleotide hybridizations where single or multiple nucleotide variations in nucleic acid sequence can be detected in nucleic acids by a process in which the sequence containing the nucleotide variation is amplified, spotted on a membrane and treated with a labeled sequence-specific oligonucleotide probe.

[0049] Length variation in DNA nucleotide sequence repeats such as microsatellites, simple sequence repeats (SSRs) and short tandem repeats (STRs) can be detected by mass spectroscopy methods as disclosed in U.S. Pat. No. 6,090,558 The advantages of using mass spectrometry include a dramatic increase in both the speed of analysis (a few seconds per sample) and the accuracy of direct mass measurements.

[0050] Target nucleic acid sequence can also be detected by probe ligation methods as disclosed in U.S. Pat. No. 5,800,944 where sequence of interest is amplified and hybridized to probes followed by ligation to detect a labeled part of the probe.

[0051] Target nucleic acid sequence can also be detected by probe linking methods as disclosed in U.S. Pat. No. 5,616,464 employing at least one pair of probes having sequences homologous to adjacent portions of the target nucleic acid sequence and having side chains which non-covalently bind to form a stem upon base pairing of said probes to said target nucleic acid sequence. At least one of the side chains has a photoactivatable group which can form a covalent cross-link with the other side chain member of the stem.

[0052] D.1. Primer Base Extension Assay

[0053] A preferred method for detecting SNPs and Indels is a labeled base extension method as disclosed in U.S. Pat. Nos. 6,004,744; 6,013,431; 5,595,890; 5,762,876; and 5,945,283. These methods are based on primer extension and incorporation of detectable nucleoside triphosphates. The primer is designed to anneal to the sequence immediately adjacent to the variable nucleotide which can be can be detected after incorporation of as few as one labeled nucleoside triphosphate. The method uses three synthetic oligonucleotides. Two of the oligonucleotides serve as PCR primers and are complementary to sequence of the locus of soybean genomic DNA which flanks a region containing the polymorphism to be assayed. Using soybean genomic DNA as a template the primer oligonucleotides are used in PCR to produce sufficient copies of the region of the locus containing the polymorphisms so that allelic discrimination can be conducted. Following amplification of the region of the soybean genome containing the polymorphism, the PCR product is mixed with the third oligonucleotide (called an extension primer) which is designed to hybridize to the amplified DNA immediately adjacent to the polymorphism in the presence of DNA polymerase and two differentially labeled dideoxynucleosidetriphosphates. If the polymorphism is present on the template, one of the labeled dideoxynucleosidetriphosphates can be added to the primer in a single base chain extension. The allele present is then inferred by determining which of the two differential labels was added to the extension primer. Homozygous samples will result in only one of the two labeled bases being incorporated and thus only one of the two labels will be detected. Heterozygous samples have both alleles present, and will thus direct incorporation of both labels (into different molecules of the extension primer) and thus both labels will be detected.

[0054] To design primers for soybean polymorphism detection by single base extension the sequence of the locus is first masked to prevent design of any of the three primers to sites that match known soybean repetitive elements (e.g., transposons) or are of very low sequence complexity (di- or tri-nucleotide repeat sequences). Design of primers to such repetitive elements will result in assays of low specificity, through amplification of multiple loci or annealing of the extension primer to multiple sites.

[0055] PCR primers are preferably designed (a) to have an optimal annealing temperature for PCR in the range of 55 to 60° C., (b) to have lengths in the range of 18 to 25 bases, and (c) to produce a product in the size range 75 to 200 base pairs with the polymorphism to be assayed located at least 25 bases from the 3′end of each primer. The extension primers must be chosen to contain minimal self- or inter-primer complementarity, or the efficiency and/or specificity of the PCR reaction will be reduced.

[0056] The extension primer is designed to anneal immediately adjacent to the polymorphism, such that the 3′ end of the annealed extension primer immediately abuts the polymorphic site. The extension primer can lie either to the 5′ or 3′ side of the polymorphism; however, if it is designed to lie on the 3′ side, then the sequence of the extension primer must match the reverse complement of the sequence adjacent to the polymorphism. The extension primer must contain no self-complementarity that will enable self-annealing, or the incorporation of the labeled ddNTPs may result from self-priming of the extension primer, obscuring the results of polymorphism-directed incorporation. If the nature of the sequence adjacent to the polymorphic site makes it impossible to design an extension primer that is fully non-self-complementary, the extent of self-annealing may be limited by replacing one or two bases of the extension primer with abasic sites, as long as the abasic sites are not introduced into the three 3′ most positions.

[0057] The labeled ddNTPs chosen for inclusion in the reaction are determined by the nature of the polymorphism, and whether the extension primer lies those that match the first base of the polymorphism. For example, in the case of an AG polymorphism, the ddNTPs would be ddATP-label(1) and ddGTP-label(2) for one strand as template or ddTTP-label(1) and ddCTP-label(2) for the other stand. Labels can be chosen from among a wide variety of chemical moieties, including affinity or immunological labels, fluorescent dyes and mass tags. In the most common embodiment of the process, affinity and immunological labels are used, followed by appropriate detection reagents. In the present example, ddATP-FITC and ddGTP-biotin might be employed, followed by incubation with anti-FITC-antibody conjugated to the enzyme horseradish peroxidase (HRP-anti-FITC), and streptavidin conjugated to the enzyme alkaline phosphatase (AP-streptavidin).

[0058] D.2. Labeled Probe Degradation Assay

[0059] In another preferred method for detecting polymorphisms SNPs and Indels can be detected by methods disclosed in U.S. Pat. Nos. 5,210,015; 5,876,930 and 6,030,787 in which an oligonucleotide probe having a 5′fluorescent reporter dye and a 3′quencher dye covalently linked to the 5′ and 3′ ends of the probe. When the probe is intact, the proximity of the reporter dye to the quencher dye results in the suppression of the reporter fluorescence, e.g. by Forster-type energy transfer. During PCR forward and reverse primers hybridize to a specific sequence of the target DNA flanking a polymorphism. The hybridization probe hybridizes to polymorphism-containing sequence within the amplified PCR product. In the subsequent PCR cycle DNA polymerase with 5′→3′ exonuclease activity cleaves the probe and separates the reporter dye from the quencher dye resulting in increased fluorescence of the reporter. A useful assay is available from Applied Biosystems as the Taqman® assay which employs four synthetic oligonucleotides in a single reaction that concurrently amplifies the soybean genomic DNA, discriminates between the alleles present, and directly provides a signal for discrimination and detection. Two of the four oligonucleotides serve as PCR primers and generate a PCR product encompassing the polymorphism to be detected. Two others are allele-specific fluorescence-resonance-energy-transfer (FRET) probes. FRET probes incorporate a fluorophore and a quencher molecule in close proximity so that the fluorescence of the fluorophore is quenched. The signal from a FRET probes is generated by degradation of the FRET oligonucleotide, so that the fluorophore is released from proximity to the quencher, and is thus able to emit light when excited at an appropriate wavelength. In the assay, two FRET probes bearing different fluorescent reporter dyes are used, where a unique dye is incorporated into an oligonucleotide that can anneal with high specificity to only one of the two alleles. Useful reporter dyes include 6-carboxy-4,7,2′,7′-tetrachlorofluorecein (TET), (VIC) and 6-carboxyfluorescein phosphoramidite (FAM). A useful quencher is 6-carboxy-N,N,N′,N′-tetramethylrhodamine (TAMRA). Additionally, the 3′end of each FRET probe is chemically blocked so that it can not act as a PCR primer. During the assay, soybean genomic DNA is added to a buffer containing the two PCR primers and two FRET probes. Also present is a third fluorophore used as a passive reference, e.g., rhodamine X (ROX) to aid in later normalization of the relevant fluorescence values (correcting for volumetric errors in reaction assembly). Amplification of the genomic DNA is initiated. During each cycle of the PCR, the FRET probes anneal in an allele-specific manner to the template DNA molecules. Annealed (but not non-annealed) FRET probes are degraded by TAQ DNA polymerase as the enzyme encounters the 5′ end of the annealed probe, thus releasing the fluorophore from proximity to its quencher. Following the PCR reaction, the fluorescence of each of the two fluorescers, as well as that of the passive reference, is determined fluorometrically. The normalized intensity of fluorescence for each of the two dyes will be proportional to the amounts of each allele initially present in the sample, and thus the genotype of the sample can be inferred.

[0060] To design primers and probes for the assay the locus sequence is first masked to prevent design of any of the three primers to sites that match known soybean repetitive elements (e.g., transposons) or are of very low sequence complexity (di- or tri-nucleotide repeat sequences). Design of primers to such repetitive elements will result in assays of low specificity, through amplification of multiple loci or annealing of the FRET probes to multiple sites.

[0061] PCR primers are designed (a) to have a length in the size range of 18 to 25 bases and matching sequences in the polymorphic locus, (b) to have a calculated melting temperature in the range of 57 to 60° C., e.g. corresponding to an optimal PCR annealing temperature of 52 to 55° C., (c) to produce a product which includes the polymorphic site and has a length in the size range of 75 to 250 base pairs. The PCR primers are preferably located on the locus so that the polymorphic site is at least one base away from the 3′ end of each PCR primer. The PCR primers must not be contain regions that are extensively self- or inter-complementary.

[0062] FRET probes are designed to span the sequence of the polymorphic site, preferably with the polymorphism located in the 3′ most ⅔ of the oligonucleotide. In the preferred embodiment, the FRET probes will have incorporated at their 3′end a chemical moiety which, when the probe is annealed to the template DNA, binds to the minor groove of the DNA, thus enhancing the stability of the probe-template complex. The probes should have a length in the range of 12 to 17 bases, and with the 3′MGB, have a calculated melting temperature of 5 to 7° C. above that of the PCR primers. Probe design is disclosed in U.S. Pat. Nos. 5,538,848; 6,084,102 and 6,127,121.

E. Construction of Genetic Linkage Maps

[0063] Genetic linkage maps can be constructed using the JoinMap version 2.0 software which is described by Stam, P. “Construction of integrated genetic linkage maps by means of a new computer package: JoinMap, The Plant Journal, 3: 739-744 (1993); Stam, P. and van Ooijen, J. W. “JoinMap version 2.0: Software for the calculation of genetic linkage maps (1995) CPRO-DLO, Wageningen. JoinMap implements a weighted-least squares approach to multipoint mapping in which information from all pairs of linked loci (adjacent or not) is incorporated. Linkage groups are formed using a LOD threshold of 5.0.

[0064] Alternatively genetic linkage maps can be constructed using the MAPMAKER/EXP v3.0 software described by Landers et al (Lander E. S., Green P., Abrahamson J., Barlow A., Daly M. J., Lincoln S. E., and Newburg I., Genomics 1: 174-181, 1987). MAPMAKER/EXP performs full multipoint linkage analysis (simultaneous estimation of all recombination fractions from the primary data) for dominant, recessive, and co-dominant (e.g. RFLP-like) markers. Public SSRs, e.g. approximately 1 every 20 cM, can be used as frameworks prior to SNP placement on the 20 linkage groups of soybean (Cregan P. B., Jarvik T., Bush L., Shoemaker R. C., Lark K. G., Kahler A. L., VanToai T. T., Lohnes D. G., Chung J., Specht J. E., Crop Sci. 39:1464-1490, 1999). MAPMAKER/EXP's “group” command can be used at LOD thresholds of 20.0, 10.0, 5.0, and 3.0 for gross linkage group assignment. Next, “order” command (LOD threshold 2.0) is used to order markers within the linkage groups. The “try” command is used to place all remaining markers onto the linkage groups. Then the “ripple” command is used to verify local order. (group”, “order”, “try”, and “ripple” commands are described in MAPMAKER/EXP). Centimorgan distance is calculated using the Kosambi or Haldane mapping function. (Kosambi D. D., Ann Eugen. 12: 172-175, 1944; Haldane, J. B. S., J. Genet. 8:299-309, 1919.).

[0065] The ordered linkage groups, defined by soft wares JointMap v 2.0 or MAPMAKER/EXP, are arranged in Microsoft Excel in accordance to the software's output. SSR and SNP loci, cM distance (Kosambi mapping function), and genotypic scores are arranged, from top to bottom, to detect possible errors in scores(double-crossovers and misscores). After verifying genotypic scores for accuracy and consistency, the loci can be once again mapped using JointMap v 2.0 or MAPMAKER/EXP to finalize map order, cM distance, and the addition of previously unmapped loci.

[0066] Jansen discloses an alternative approach for linkage map construction based on finding a locus order to minimize the total number of recombination events (Jansen J. et al. in Theor Appl Genet. 102: 1113-1122, 2001). Under many conditions this approach yields a close approximation to a maximum-likelihood map. A map estimated by this approach agrees quite closely with the map obtained using JoinMap 2.0.

F. Use Of Polymorphisms To Establish Marker/Trait Associations

[0067] The polymorphisms in the loci of this invention can be used in marker/trait associations which are inferred from statistical analysis of genotypes and phenotypes of the members of a population. These members may be individual organisms, e.g. soybean, families of closely related individuals, inbred lines, dihaploids or other groups of closely related individuals. Such soybean groups are referred to as “lines”, indicating line of descent. The population may be descended from a single cross between two individuals or two lines (e.g. a mapping population) or it may consist of individuals with many lines of descent. Each individual or line is characterized by a single or average trait phenotype and by the genotypes at one or more marker loci.

[0068] Several types of statistical analysis can be used to infer marker/trait association from the phenotype/genotype data, but a basic idea is to detect markers, i.e. polymorphisms, for which alternative genotypes have significantly different average phenotypes. For example, if a given marker locus A has three alternative genotypes (AA, Aa and aa), and if those three classes of individuals have significantly different phenotypes, then one infers that locus A is associated with the trait. The significance of differences in phenotype may be tested by several types of standard statistical tests such as linear regression of marker genotypes on phenotype or analysis of variance (ANOVA). Commercially available, statistical software packages commonly used to do this type of analysis include SAS Enterprise Miner (SAS Institute Inc., Cary, N.C.) and Splus (Insightful Corporation. Cambridge, Mass.). When many markers are tested simultaneously, an adjustment such as Bonferonni correction is made in the level of significance required to declare an association.

[0069] Often the goal of an association study is not simply to detect marker/trait associations, but to estimate the location of genes affecting the trait directly (i.e. QTLs) relative to the marker locations. In a simple approach to this goal, one makes a comparison among marker loci of the magnitude of difference among alternative genotypes or the level of significance of that difference. Trait genes are inferred to be located nearest the marker(s) that have the greatest associated genotypic difference. In a more complex analysis, such as interval mapping (Lander and Botstein, Genetics 121:185-199 (1989), each of many positions along the genetic map (say at 1 cM intervals) is tested for the likelihood that a QTL is located at that position. The genotype/phenotype data are used to calculate for each test position a LOD score (log of likelihood ratio). When the LOD score exceeds a critical threshold value, there is significant evidence for the location of a QTL at that position on the genetic map (which will fall between two particular marker loci).

[0070] F.1. Linkage Disequilibrium Mapping and Association Studies

[0071] Another approach to determining trait gene location is to analyze trait-marker associations in a population within which individuals differ at both trait and marker loci. Certain marker alleles may be associated with certain trait locus alleles in this population due to population genetic process such as the unique origin of mutations, founder events, random drift and population structure. This association is referred to as linkage disequilibrium. In linkage disequilibrium mapping, one compares the trait values of individuals with different genotypes at a marker locus. Typically, a significant trait difference indicates close proximity between marker locus and one or more trait loci. If the marker density is appropriately high and the linkage disequilibrium occurs only between very closely linked sites on a chromosome, the location of trait loci can be very precise.

[0072] A specific type of linkage disequilibrium mapping is known as association studies. This approach makes use of markers within candidate genes, which are genes that are thought to be functionally involved in development of the trait because of information such as biochemistry, physiology, transcriptional profiling and reverse genetic experiments in model organisms. In association studies, markers within candidate genes are tested for association with trait variation. If linkage disequilibrium in the study population is restricted to very closely linked sites (i.e. within a gene or between adjacent genes), a positive association provides nearly conclusive evidence that the candidate gene is a trait gene.

[0073] F.2. Positional Cloning and Transgenic Applications

[0074] Traditional linkage mapping typically localizes a trait gene to an interval between two genetic markers (referred to as flanking markers). When this interval is relatively small (say less than 1 Mb), it becomes feasible to precisely identify the trait gene by a positional cloning procedure. A high marker density is required to narrow down the interval length sufficiently. This procedure requires a library of large insert genomic clones (such as a BAC library), where the inserts are pieces (usually 100-150 kb in length) of genomic DNA from the species of interest. The library is screened by probe hybridization or PCR to identify clones that contain the flanking marker sequences. Then a series of partially overlapping clones that connects the two flanking clones (a “contig”) is built up through physical mapping procedures. These procedures include fingerprinting, STS content mapping and sequence-tagged connector methodologies. Once the physical contig is constructed and sequenced, the sequence is searched for all transcriptional units. The transcriptional unit that corresponds to the trait gene can be determined by comparing sequences between mutant and wild type strains, by additional fine-scale genetic mapping, and/or by functional testing through plant transformation. Trait genes identified in this way become leads for transgenic product development. Similarly, trait genes identified by association studies with candidate genes become leads for transgenic product development.

[0075] F.3. Marker-Aided Breeding and Marker-Assisted Selection

[0076] When a trait gene has been localized in the vicinity of genetic markers, those markers can be used to select for improved values of the trait without the need for phenotypic analysis at each cycle of selection. In marker aided breeding and marker-assisted selection, associations between trait genes and markers are established initially through genetic mapping analysis (as in A.1 or A.2). In the same process, one determines which marker alleles are linked to favorable trait gene alleles. Subsequently, marker alleles associated with favorable trait gene alleles are selected in the population. This procedure will improve the value of the trait provided that there is sufficiently close linkage between markers and trait genes. The degree of linkage required depends upon the number of generations of selection because, at each generation, there is opportunity for breakdown of the association through recombination.

Prediction of Crosses for New Inbred Line Development

[0077] The associations between specific marker alleles and favorable trait gene alleles also can be used to predict what types of progeny may segregate from a given cross. This prediction may allow selection of appropriate parents to generation populations from which new combinations of favorable trait gene alleles are assembled to produce a new inbred line. For example, if line A has marker alleles previously known to be associated with favorable trait alleles at loci 1, 20 and 31, while line B has marker alleles associated with favorable effects at loci 15, 27 and 29, then a new line could be developed by crossing A×B and selecting progeny that have favorable alleles at all 6 trait loci.

[0078] F.4. Fingerprinting and Introgression of Transgenes

[0079] A fingerprint of an inbred line is the combination of alleles at a set of marker loci. High density fingerprints can be used to establish and trace the identity of germplasm, which has utility in germplasm ownership protection.

[0080] Genetic markers are used to accelerate introgression of transgenes into new genetic backgrounds (i.e. into a diverse range of germplasm). Simple introgression involves crossing a transgenic line to an elite inbred line and then backcrossing the hybrid repeatedly to the elite (recurrent) parent, while selecting for maintenance of the transgene. Over multiple backcross generations, the genetic background of the original transgenic line is replaced gradually by the genetic background of the elite inbred through recombination and segregation. This process can be accelerated by selection on marker alleles that derive from the recurrent parent.

Use of Polymorphism Assay for Identifying Gene of Interest.

[0081] The polymorphisms and loci of this invention are useful for identifying and mapping DNA sequence of QTLs and genes linked to the polymorphisms. For instance, BAC or YAC clone libraries can be queried using polymorphisms linked to a trait to find a clone containing specific QTLs and genes associated with the trait. For instance, QTLs and genes in a plurality, e.g. hundreds or thousands, of large, multi-gene sequences can be identified by hybridization with an oligonucleotide probe which hybridizes to a mapped and/or linked polymorphism. Such hybridization screening can be improved by providing clone sequence in a high density array. The screening method is more preferably enhanced by employing a pooling strategy to significantly reduce the number of hybridizations required to identify a clone containing the polymorphism. When the polymorphisms are mapped, the screening effectively maps the clones.

[0082] For instance, in a case where thousands of clones are arranged in a defined array, e.g. in 96 well plates, the plates can be arbitrarily arranged in three-dimensionally, arrayed stacks of wells each comprising a unique DNA clone. The wells in each stack can be represented as discrete elements in a three dimensional array of rows, columns and plates. In one aspect of the invention the number of stacks and plates in a stack are about equal to minimize the number of assays. The stacks of plates allow the construction of pools of cloned DNA.

[0083] For a three-dimensionally arrayed stack pools of cloned DNA can be created for (a) all of the elements in each row, (b) all of the elements of each column, and (c) all of the elements of each plate. Hybridization screening of the pools with an oligonucleotide probe which hybridizes to a polymorphism unique to one of the clones will provide a positive indication for one column pool, one row pool and one plate pool, thereby indicating the well element containing the target clone.

[0084] In the case of multiple stacks, additional pools of all of the clone DNA in each stack allows indication of the stack having the row-column-plate coordinates of the target clone. For instance, a 4608 clone set can be disposed in 48 96-well plates. The 48 plates can be arranged in 8 sets of 6 plate stacks providing 6×12×8 three-dimensional arrays of elements, i.e. each stack comprises 6 stacks of 8 rows and 12 columns. For the entire clone set there are 36 pools, i.e. 6 stack pools, 8 row pools, 12 column pools and 8 stack pools. Thus, a maximum of 36 hybridization reactions is required to find the clone harboring QTLs or genes associated or linked to each mapped polymorphism.

[0085] Once a clone is identified, oligonucleotide primers designed from the locus of the polymorphism can be used for positional cloning of the linked QTL and/or genes.

H. Computer Readable Media and Databases

[0086] The sequences of nucleic acid molecules of this invention can be “provided” in a variety of mediums to facilitate use, e.g. a database or computer readable medium, which can also contain descriptive annotations in a form that allows a skilled artisan to examine or query the sequences and obtain useful information. In one embodiment of the invention computer readable media may be prepared that comprise nucleic acid sequences where at least 10% or more, e.g. at least 25%, or even at least 50% or more of the sequences of the loci and nucleic acid molecules of this invention. For instance, such database or computer readable medium may comprise sets of the loci of this invention or sets of primers and probes useful for assaying the polymorphisms of this invention. In addition such database or computer readable medium may comprise a figure or table of the mapped or unmapped polymorphisms or this invention and genetic maps.

[0087] As used herein “database” refers to any representation of retrievable collected data including computer files such as text files, database files, spreadsheet files and image files, printed tabulations and graphical representations and combinations of digital and image data collections. In a preferred aspect of the invention, “database” means a memory system that can store computer searchable information. Currently, preferred database applications include those provided by DB2, Sybase and Oracle.

[0088] As used herein, “computer readable media” refers to any medium that can be read and accessed directly by a computer. Such media include, but are not limited to: magnetic storage media, such as floppy discs, hard disc, storage medium and magnetic tape; optical storage media such as CD-ROM; electrical storage media such as RAM and ROM; and hybrids of these categories such as magnetic/optical storage media. A skilled artisan can readily appreciate how any of the presently known computer readable mediums can be used to create a manufacture comprising computer readable medium having recorded thereon a nucleotide sequence of the present invention.

[0089] As used herein, “recorded” refers to the result of a process for storing information in a retrievable database or computer readable medium. For instance, a skilled artisan can readily adopt any of the presently known methods for recording information on computer readable medium to generate media comprising the mapped polymorphisms and other nucleotide sequence information of the present invention. A variety of data storage structures are available to a skilled artisan for creating a computer readable medium where the choice of the data storage structure will generally be based on the means chosen to access the stored information. In addition, a variety of data processor programs and formats can be used to store the polymorphisms and nucleotide sequence information of the present invention on computer readable medium.

[0090] Computer software is publicly available which allows a skilled artisan to access sequence information provided in a computer readable medium. The examples which follow demonstrate how software which implements a search algorithm such as the BLAST algorithm (Altschul et al., J. Mol. Biol. 215:403-410 (1990), incorporated herein by reference) and the BLAZE algorithm (Brutlag et al., Comp. Chem. 17:203-207 (1993), incorporated herein by reference) on a Sybase system can be used to identify DNA sequence which is homologous to the sequence of loci of this invention with a high level of identity. Sequence of high identity can be compared to find polymorphic markers useful with a soybean varieties.

[0091] The present invention further provides systems, particularly computer-based systems, which contain the sequence information described herein. Such systems are designed to identify commercially important sequence segments of the nucleic acid molecules of this invention. As used herein, “a computer-based system” refers to the hardware, software and memory used to analyze the nucleotide sequence information. A skilled artisan can readily appreciate that any one of the currently available computer-based system are suitable for use in the present invention.

[0092] As indicated above, the computer-based systems of the present invention comprise a database having stored therein polymorphic markers, genetic maps, and/or the sequence of nucleic acid molecules of the present invention and the necessary hardware and software for supporting and implementing genotyping applications.

### EXAMPLE 1

[0093] This example illustrates identification of SNP and Indel polymorphisms by comparing alignments of the sequences of contigs and singletons from at least two separate soybean lines. Genomic and cDNA libraries from multiple soybean lines were made by isolating genomic DNA or mRNA from different soybean lines by Plant DNAzol Reagent or RNAzol” from Life Technologies now Invitrogen (Invitrogen Life Technologies, Carlsbad, Calif.). For genomic libraries, genomic DNA were digested with Pst 1 endonuclease restriction enzyme, size fractionated over 1% agarose gel and ligated in plasmid vector for sequencing by standard molecular biology techniques as described in Sambrook et al. cDNA libraries were made by using “SuperScript™ plasmid system for cDNA synthesis and plasmid cloning” kits from Life Technologies now Invitrogen (Invitrogen Life Technologies, Carlsbad, Calif.) by following manufacturers' instructions. These libraries were sequenced by standard procedures on ABI Prism® 377 DNA Sequencer using commercially available reagents (Applied Biosystems, Foster City, Calif.). All sequences are assembles to identify non redundant sequences by Pangea Clustering and Alignment Tools which is available from DoubleTwist Inc., Oakland, Calif. Difference in sequences from multiple clones on assembles contigs is identified as single or multiple nucleotide polymorphism. Sequence from multiple soybean lines is assembled to into loci having one or more polymorphisms, i.e. SNPs and/or Indels. Candidate polymorphisms are qualified by the following parameters:
[0094] (a) The minimum length of a contig or singleton for a consensus alignment is 200 bases.
[0095] (b) The percentage identity of observed bases in a region of 15 bases on each side of a candidate SNP, is at least 75%.
[0096] (c) The minimum Phred quality in each contig at a polymorphism site is 35.
[0097] (d) The minimum Phred quality in a region of 15 bases on each side of the polymorphism site is 20.

[0098] A plurality of loci having qualified polymorphisms are identified as having consensus sequence as reported SEQ ID NO: 1 through SEQ ID NO 8783. Qualified SNP and Indel polymorphisms in each locus are identified in Table 1. More particularly, Table 1 identifies the type and location of the polymorphisms as follows:

[0099] SEQ ID NO: refers to the sequence number of the polymorphic soybean DNA locus of the invention, e.g. a SEQ ID NO.

[0100] SEQUENCE NAME refers to an arbitrary name for identifying the polymorphic soybean DNA locus.

[0101] LENGTH refers to the length of the consensus sequence of the alleles.

[0102] SNP_ID refers to an arbitrary name for identifying each polymorphism.

[0103] POSITION refers to the position in the nucleotide sequence of the polymorphic soybean DNA locus where the polymorphism occurs.

[0104] “A” refers to the total counts of sequence reads in the contig that contain an “A” at the position specified at “POSITION” column. A also refers to nucleoside Adenosine.

[0105] “C” refers to the total counts of sequence reads in the contig that contain a “C” at the position specified at “POSITION” column. C also refers to nucleoside Cytosine.

[0106] “G” refers to the total counts of sequence reads in the contig that contain a “G” at the position specified at “POSITION” column. G also refers to nucleside Guanosine.

[0107] “T” refers to the total counts of sequence reads in the contig that contain a “T” at the position specified at “POSITION” column. T also refers to nucleoside Thymidine.

[0108] “−” refers to the total counts of sequence reads in the contig that contain a missing base or nucleoside at the position specified at “POSITION” column.

### EXAMPLE 2

[0109] This example illustrates the use of primer base extension for detecting a SNP polymorphism. Reference is made to SNP_ID: GmSNP2004_{—}10958_{—}1_t827, in the polymorphic soybean locus of SEQ ID NO:359. Three polymorphisms in that locus are described more particularly in the following Table 2A which is extracted from Table 1.

TABLE 2A

| | | | | |
|---|---|---|---|---|
| SEQ ID | START | END | ALLELE 1/ | ALLELE 2/ |

| | | | | | | |
|---|---|---|---|---|---|---|
| NO: | SNP_ID | Position | Position | TYPE | STRAIN 1 | STRAIN 2 |

| | | | | | | |
|---|---|---|---|---|---|---|
| 359 | GmSNP2004_10958_1_g521 | 521 | 521 | SNP | A/PI507354 | G/WILL |
| 359 | GmSNP2004_10958_1_a735 | 735 | 735 | SNP | A/WILL | G/PI507354 |
| 359 | GmSNP2004_10958_1_t827 | 827 | 827 | SNP | T/WILL | C/PI507354 |

[0110] TABLE 2B

| | | | | |
|---|---|---|---|---|
| Description | Name | Probe | SNP | Sequence |

| | | | | |
|---|---|---|---|---|
| PCR primer | 359-827 F | | | GGGTACCTTTGTTATTGTGGCTCTT |
| PCR primer | 359-827 R | | | GATAATCTAAAATATAGAACAAGTGAACCGTCTA |
| SNP probe | 359-827 V | VIC | C | VIC-TTCAGGGTACATTTAT |
| SNP probe | 359-827 M | FAM | T | 6FAM-ATTTTCAGGATACATTTAT |

[0111] With reference to Table 2B, forward and reverse PCR primers (“359-827 F” and “359-827 R”) and reporter dye-tagged probes (“359-827 V” and “359-827 M”) are designed to hybridize to template DNA sequence in the polymorphic soybean DNA locus of SEQ ID NO:359_around the C/T SNP polymorphism of SNP_ID: GmSNP2004_{—}10958_{—}1_t827. The assay was designed from the lower strand in this case. A marker name, NS0115455, was assigned to this assay. Such probes can be designed and provided by Applied Biosystems for their proprietary Taqman® assay (Applied Biosystems, Foster City, Calif.).

[0112] A quantity of soybean genomic template DNA (e.g. about 2-20 nanograms) is mixed in 5 microliter total volume with four oligonucleotides, i.e. “359-827 F” forward primer, “359-827 R” reverse primer, “359-827 V” SNP hybridization probe having a VIC reporter attached to the 5′ end, and “359-827 M” SNP hybridization probe having a FAM reporter attached to the 5′end with appropriate amount of PCR reaction buffer containing the passive reference dye ROX. The PCR reaction is conducted for 35 cycles using a 60° C. annealing-extension temperature. Following the reaction, the fluorescence of each fluorophore as well as that of the passive reference is determined in a fluorimeter. The fluorescence value for each fluorophore is normalized to the fluorescence value of the passive reference. The normalized values are plotted against each other for each sample to produce an allelogram. A successful genotyping assay using the primers and hybridization probes of this example provides an allelogram with data points in clearly separable clusters.

[0113] To confirm that an assay produces accurate results, each new assay is performed on a number of replicates of samples of known genotypic identity representing each of the three possible genotypes, i.e. two homozygous alleles and a heterozygous sample. To be a valid and useful assay, it must produce clearly separable clusters of data points, such that one of the three genotypes can be assigned for at least 90% of the data points, and the assignment is observed to be correct for at least 98% of the data points. Subsequent to this validation step, the assay is applied to progeny of a cross between two highly inbred individuals to obtain segregation data, which are then used to calculate a genetic map position for the polymorphic locus.

### EXAMPLE 3

[0114] This example illustrates methods of the invention using polymorphisms disclosed in Table 1 and in the DNA sequences of SEQ ID NO: 1-8783.

[0115] A breeding population of soybeans with diverse heritage is analyzed using primer pairs and probe pairs prepared as indicated in Example 2 for each of the polymorphisms identified in Table 1 based on sequences of SEQ ID NO: 1-8783. Closely linked polymorphisms are identified as characterizing haplotypes in adjacent genomic windows of about 8 centimorgans across the soybean genome. Haplotypes representing at least 4% of the population are associated with trait values identified for each member of the soybean population including the trait values for yield, maturity, lodging, plant height, soybean cyst nematode resistance, brown stem rot resistance, soybean rust resistance, sudden death syndrome resistance, drought tolerance and cold germination. The trait values for each haplotype are ranked in each 8 centimorgan window. Progeny seed from randomly-mated members of the population are analyzed for the identity of haplotypes in each window. Progeny seed are selected for planting based on high trait values for haploytpes identified in said seeds.

What is claimed is:

1-18. (canceled)

19. A set of four oligonucleotides useful for identifying a polymorphism in soybean DNA identified in Table 1 comprising
(a) a pair of isolated nucleic acid molecules according to claim 16 which can hybridize to DNA which flanks a polymorphism identified in Table 1;
(b) a pair of detector nucleic acid molecules which are useful for detecting each nucleotide in a single nucleotide polymorphism in a segment of DNA amplified by said pair of nucleic acid molecule primers of (a), wherein said detector nucleic acid molecules comprise
(1) at least 12 nucleotide bases and a detectable label, or
(2) at least 15 nucleotide bases,
and wherein the sequence of said detector nucleic acid molecules is identical except for said nucleotide polymorphism and is at least 95 percent identical to a sequence of the same number of consecutive nucleotides in either strand of said segment of polymorphic soybean DNA locus said polymorphism.

The application's sequence listing, which the Patent Office published only in electronic form, follows.

SEQUENCE LISTING (8783 sequences)

SEQ ID NO: 1 - DNA, 2061 bp, Glycine max
gccggaattcccggctcgacccccgtcagctacgtaggccccccccccgtgttgttccttggtaatcgtgagtggtactattcccgaatagcagcaagcaaggcaaggcgtgtgtccgagcagagcaggagtgaaggagaaaaggacccttgtccgtccagtccttattctcttttctcctccctccctcacgcaaccgccaattcctgaaccctaagctagcgccatggctgtcgtttcgcgaagtgcgacgacctatacgcgccactacttaatacgacacgagtttgataggaaaacgaaaacctgcgttgccaataatagtttgtgttactctgctaagaaggctcctccaccgcagaggattgttggtggccgtagagtgattgttgctgcgagccctcccaccgaagacgctgtagttgccactgaccctctcacgaagcaggatctcgtcgattatcttgcctccggttgcaagcccaaggataaatggagaataggtactgaacatgagaagtttggttttgagattggaagcttgcgtcctatgaagtatgaccaaatagcagaattgctgaatggcattgctgagaggtttgactgggataaagtaatggaaggtgataaaattattggactcaaacaggggaagcagagcatatcattggagcctggtggtcagtttgaacttagtggagctcctcttgaaaccttgcatcagacttgtgctgaagttaattcccacctttatcaggttaaagctgttgctgaggaaatgggaattggatttttggggattggtttccagccaaagtggggaatcaaagacatacctataatgccaaagggaagatacgacatcatgaggaactacatgcctaaagttggctctcttgggcttgacatgatgttcaggacatgcactgtgcaggtcaatctggactttagttctgaagctgacatgatcaagaaatttcgtgcaggccttgctttgcagccgatagcaacggctctttttgcaaattcaccctttaaagagggaaagccaaatggttttgtcagtatgagaagccatatttggactgatactgataaggaccgcacaggcatgctgccttttgtttttgatgactcttttgggtttgagcaatatgttgattatgctcttgatgttcctatgtattttgtctatcggaaaaacagatatatcgactgcactggaaagaccttcagggttcccatctatctttaatattcttgactttttggctggaagacttccttgtatccctggtgaattaccaactctcaatgattgggaaaatcacttgacaactatatttcctgaggtcaggctgaagaggtatttggagatgagaggtgctgatggagggccttggagaagattgtgtgctttaccagcattttgggtagggttattgtacgatgaactttctctaaaaagtgttttggatatgacagctgattggactccagaagaaagacaaatgttaaggaataaggttcctgtaactggtctgaagacaccattccgagacggtttgctgaagcatgttgctgaagatgttctaaagttggcaaaggatggcttggagagaagaggcttcaaggaatcgggatttttgaatgaggttgccgaggtggttagaacaggtgtcactccagctgagaggcttttggaattgtatcatggaaagtgggagcaatccgtagatcatgtgtttgaggaattgctttattaaggtagtattgtctttcaaatgtctgtggaagattaattgtgtaatcctttggttatagttctggttatctctcatttgagcttcatttagatataggaaataatataaatgtaatttttgccttgaggcttctcatatacctttcttggaaaacatgatctgatcaagctgacattcaatgtcacaaatttgaaaatccatcaatataatcattttaataagagtgtcaaaaaaaaaaatgtttgtggtaggccctaggcgcaaatgttgcttgaataaacacaaatttttcttt

SEQ ID NO: 2 - DNA, 986 bp, Glycine max
actgataaggaccgcacaggcatgctgccttttgtttttgatgactctttgtttcagctacgtgggccccccccattatgctcttgatgttcctatgtattttgtctatcggaaaaacagatatatcgactgcactggaaagaccttcagggactttttggctggaagacttccttgtatccctggtgaattaccaactctcaatgattgggaaaatcacttgacaactatatttcctgaggtcaggctgaagaggtatttggagatgagaggtgctgatggagggccttggagaagattgtgtgctttaccagcattttgggtagggttattgtacgatgaactttctctaaaaagtgttttggatatgacagctgattggactccagaagaaagacaaatgctaaggaataaggttcctgtaactggtttgaagacaccattccgagacggtttgctgaagcatgttgctgaagatgttctaaagttggcaaaggatggcttggaaagaagaggcttcaaggaatcaggatttttgaatgaggttgccgaggtggttagaacaggtgtcactccagccgagaggcttttggaattgtatcatggaaagtgggagcaatccgtagatcacgtgtatgaggaattgctgtattaaagctgtattatctttcaaatgtcagtggaagattaattgtgtaatcctttggttatagtcctggttgtctctcatttgagcttcatttagatatatgtaatttttgccttgaggcttctcatatacctttactggaaaacatgatctgatcaaaagctgacattcaatgtgtcacaaatttgaaaatccatcaccataatcattttagcaagagtgtcaatagattaaatgtttgtggtaggcacaaatgctgcttgaataaacactgttgtttctttatttctagactcggactcattcagtcaccattttttaaaattctttttgtact

SEQ ID NO: 3 - DNA, 4061 bp, Glycine max
cggtccggattcccgggtcgaccacgcgtccgaaaaacggcagtttaatatttgacccagttgttccactccctctcacgagcaaaagaccgttactcaattaactgttgcaagaagtacaatttttcctacactcaaagccttcatctagaaccagtcatcagttttgttttttgtttggtccaggacgaggtcttagaaatatcatcgtgcttttttacgaggtccacacacaccttcctctcttggtctctttccacgaaattccattcaaagaagttggtggtgccaaacttccaagaaagggtgctattacttgttctgctattagtaccctgtttagaaaccggggaagagacatgtcaaacataccatcatctctttatatgacctgtgtccgggagtccatttgatatttcattactgataacgaaggtagcaacaaaatattacagttcatagcaaagcatagtgtacgtgttgttattgttgttgaagggtgatggagagttatttaaatgagaattttgaagtgaagtccaaaaattcccccgaagaggttcttcaacgatggaggagactatgcgggatcgtcaagaaccccagaagacgctttcgtttcactgcaaatctctccaagagggacgaagctgctgctatgcgtcgtaccattcaggagaagttgaggattgcaattttggtttccaaagcagcacttcaatttatccaaagcgtgcaactaagcgattacaaactgccagaggaagttaaagatgcaggttttcaaatctgcggcgatgaattagggtctattgttgaagtccatgatgtaaagaagttcagacatcatggtggggttgatggcattgcagagaagctttctacatcaaccactgagggtcttaacagtgatactgagttactgaataggagacagcagatatatggaatcaacaaatttactgaaagtgcagctacaagtttctgggtttttgtttgggaagcctttcaagacatgactctgatgatacttggagtgtgtgctatcgtgtctctgctagttggcattgcaacagaaggatggccaaagggtgctcatgatggtcttggaattgttgcaagtatcttgcttgtagtctttgtgacagcaacaagcgattatcgccaatcgttacagttcagggatttagacaaggagaagaagaaaatttccattcaggtcacaagaaatggatacagacaaaaaatgtcaatatatgaattacttcctggtgacattgtgcaccttgccattggtgaccaagtccctgctgatggactatttgtctcaggattttctgtgttgatagatgagtcaagcttaacaggagagagtgagccagtgatggtgaattctgaaaatccatttcttctttctgggaccaaggtccaagacggatcatgcaagatgttggttactagtgttggcatgaggactcaatggggcaagttgatggctactctcagtgaaggtggagatgatgaaaccccactacaggtgaagttgaatggtgttgcaaccattattggtaagataggcctattctttgcagtggttacttttgcagttctagtgcaaggactcgtaagcctaaaactccaacaagggagcttacggagctggaccggggatgatgcattggagctgttggagttctttgcagttgcagttaccatagttgttgttgccgttccagagggtctgccattggctgtgacacttagtcttgcatttgcaatgaagaaaatgatgaatgacaaagccctgttgagacattatgcagcctgtgagaccatgggatcagccacaactatatgtagtgacaagactgggacactaacaaccaaccacatgactgttgtgaaaacatgcttttgcatgaacagcaaggaagtgagcaacaacaatgcttctagtttgtgttctgaactcccagaacctgctgtgaaactgctgctagagtcaatattcaataatacagggggagaggttgtggttaaccaaaatggaaaacgtgagattctagggactccaaccgaggctgcaatattggagtttggtttgtcattaggtggagattttcaaggagagaaacaagcatgtaaacttgttaaagttgagccattcaattccactaagaagaaaatgagtgtggtggttgagctccctggtggaggcttaagagcccactgcaaaggtgcttctgaaataattctggctgcttgtgacaaagttctcaactcaaatggtgaggttgtaccccttgatgaagaatcaactagccatcttaaggctacaataaatcagtttgcaagtgaggcacttagaacactatgccttgcctatgtggaattggaaaatgggttctctcctgaagaccctattcctgtttctggatatacatgcataggagttattggtatcaaagatcctgttcgtcctggtgttaaggaatctgtggcaatgtgtcgttcagctggaataacagttagaatggttactggtgacaacattaatactgcaaaggctatagccagggagtgtgggattttaactgatgatggcatagctattgaaggtccagagtttagagagaagagtcagaaagagttgcttgaactgattcccaaaattcaggttatggctcgatcctcacctttagacaaacacacattggtgaaacacttgcgtactacttttggggaagtggtagctgtaacaggtgatggaactaatgatgccccagcccttcatgaagctgacattggacttgcaatgggaattgctggaactgaggttgcaaaagaaagtgcagatgtcataattctggatgataacttctccacgatagtaacagtggccaaatggggacgttcggtttacataaatattcagaaattcgtacagtttcagttaaccgttaatgtggttgcattaatagtgaatttcacatcagcctgcttaacaggaactgcacccctcacagctgttcaactcttgtgggtgaacatgataatggacacactgggagcacttgctcttgctactgaacctccaaatgatgatttaatgaaacgttcacctgttggaaggaagggaaatttcatcagcaatgtcatgtggaggaacatcttaggtcaatccttgtatcagtttatggtgatatggtttcttcagtcaagaggaaaatcaatctttttacttgagggccccaattcagatctagtcttaaacacgcttattttcaactcatttgtcttctgtcaggttttcaatgagataaattcacgtgaaatggagaaaataaacgtttttaaaggcatattggataactatgttttcgtgggtgtcatcagtgctactgttttcttccaaatcataatagttgagtacttgggaacctttgcaaacacaacacctctcaccctgtcacagtggttcttttgcttattggttggatttatgggcatgcctattgctgctcgcttaaagaagattcctgtttgaagcacctgaatggataaaaagttgtagttggttatcgttagttgttagttgttgcattgcttcaaggtccactattcctgtacattcactaactcacctggtattgctcgaggctttcttgggttggaatcagaaatggagcagcgaaataaatcactggagtctcggagcagtttgacaagctaccattaaccattttattttaatacgttgtttattttctaggcagcagaatgattaatgacttgctgtaaataagttactagccttcctcagtttgtttcaatttttatatttataaatcccatttgtttctttatgttctaaaaaaaaaaaaaaaaaaaaaaaatggtgatcctgaactgtccgttccgttattttaaaagctctgcgtagtcataatcttgttgtgccagcacaattgactgagacatgacaaactgcaatatataaaacaagaacctttccttaaaaaaaaaaaaaaaaaactcgagactagttctctctctctctc

SEQ ID NO: 4 - DNA, 1822 bp, Glycine max
gttagaatttcttgtcattgaaggtaccctctttttgttgcttgaccctcaatcaaagacccatcttttccgtttggcgtagggaacttcaccactgaagccctaatccaccgtatccatccaccgcagcacacactccttttgctgcttcttctccaacatgggtcgcgaaactatgtgcctttcaaccccaccaccaaccactgccaccaccacagtgaacccagtgccgccaccgccaccagcaccacctacctctcttgctccaggcttcaggttccacccaactgatgaggagcttgttatttattacctcaagcgcaaggtttctggcaaaagcttccgatttgatgccatatctgaggttgacatatacaggagcgaaccctgggacctagcagacaagtcaaggttgaagactagggaccaggagtggtattttttcagtgcattggacaagaaatatgggaatggtgggaggatgaacagggctaccagcaaagggtactggaaagccactgggaatgatcgaccggtgaggcatgaccaaaggaccgtggggctgaagaaaacgttggtgtttcatagtggcagagctcctgatgggaagaggactaactgggtcatgcatgagtacaggcttgttgaagaggagcttgagagggctgggactggatcctctcagcctcaggatgcgtatgttttgtgtagagtgtttcacaaaaataacataggacctccaaatgggcaacggtatgcgcccttcattgaagaagagtgggatgacgcatcaggaatggttccaggggcagaccatgtggataaccgctcttttgcccaccaaccacgtgttgaaggcaatggtggtgttttatgcgctgaagggagaaatggtgttgtacaggacactcaatctttcaacaaagctccatttgatgtgaacaagcttcctatagaaactcaaaatcttctagctgtgtgcaagagggaaagcatggctgagtatccatcacctgaaaaggatgataataattgtaagcacatggatgactacccttcacctcaaacagataatccaaagcctttctctcaaatatacaaacgaaggcgtcataacttgaactccaacaactctaatgtttctggagattcagtccgaaccagccaggatccgtgctcctctacaataactaccgctgcaactgcactcccaaccgcaactgttgctggcacggccaccaacactgcaccgaaaaaacattttctgtctgcactggtggagttttccctgctagaatcccttgaatcaaaggacaaccttgcttcaattaaggcaccggattttgacactgaaaatctcgagtcatccatgcctccaagttgcgcaaagttcatcaagcaaatgcagagtgagatgcagaagctttcagttgaaaaggagacgataaggtttgagatgatgagtgcacaagcgatgattaacattctccagtctcgcatcgacgttctcagcaaagaaaatgaggatttgaagaggatggtggcccaaaatccataggaattggcaatgccatgcccttgtatcagtgtaagttagttacaactgagtaatgaagctcggtcttccggatattttcttatttttctgagtaagaattgtagttcgtttctttggctaaacttattttaaacttgtcatcgtgtatcatatgactttcagtttcccattgttgtgaaaatatggccatgttagcatctcaatttaaaaaaaaaaaaaaaaaaaaaaaaaaaaaaaaaaaaaaaaaaaaaaaaaaaaaaaaaa

SEQ ID NO: 5 - DNA, 555 bp, Glycine max
gtttatattcagggttgtatattgatatatctaggtgtgggtggtacgtaattaattagccatggacaaggcacgatttgggtttttcttcatgttgctcattctcctttcttctcagatggtggtacaaacagagggaaggcactgtgagtcaaagagccatcggtttaaagggatgtgcctcagtaagcacaactgcgcttcggtttgccatcttgaaggcttcacgggtggcaagtgtcgtggatttcgtagacgctgtttctgcaccaggcactgttagttggtccatgaaattttatccttgttggttgctcttttcacctttctgtttctgggattaagaaataaatactccttagtgagtcgtgtttttctaggttcatttgggttggctttatatcttatgctttgatctacctcgcttctgtttcaatttgtttggccagtgttgcaattttaatttctagtgttgtatgtttctcttttgtggtgtacttgccataaaaaataacagtgaaaccacacctttttcatttcttcaaaaaaacttta

SEQ ID NO: 6 - DNA, 806 bp, Glycine max
ggtgttagctgaaacattcagagtagttgcaggcgtgaagaatggtactagaggagctccacaagagatcagtgtggtctcaagattctgtatcataggcaatataagagctcccattgggctgctcatgacttcattgggcagctggagaatatattcaggaatggacgcaccaaccaaaaattgagcaacctcattgctgaagtggtggcaattatgagtaagcagactatatgtttcaggcaggtactgcggactgatttcctccaaatccatttcaaagacatccttgggaacatgtgtcacacctaagtctaccactcttagtggagttccatatggagttgatccagcaggagagtgttgaatacccccaccaaagtaatactcattaccataaacaacaactcctgtgtgccatatgccttcaatagctttccccaaaaaggacattgaaagctgccgtgcaagaccttggctcaagtcataaacatttagagtaaccctgtgaccctcctcagccatctgctgtggtccaattgaaaattaattagcctctttagttaaacttacaaaggagtgttgtaaatactccaacagaaagatcacaagaacacgaagaattaaccacgaagcaacgcagaaaattacaagattagaaagcacggttcttctgcaacaaggaagacaaatctttggagggtaagtcctaatatattttacctttccgtaagcccccaggactttctagaacctaccaccgctcgctaatttcatatccgcgtgtttcggctcgagctcgagcc

SEQ ID NO: 7 - DNA, 1372 bp, Glycine max
ttttttttttttttttttgctacatgaaaagagcctgcttaaaaacattataatccaatagttatattcagaaaatgtggtgaaatgattcccttaatcagcatttcatccgacatgcacattaacttgaaaccattaagtaaactcatagaataggtgctacaagttgatcatgtttttcccggttcaaataataaccaatgatatgaaacaccgcaattattgcagtgatagtaagtagaggttttagacccacaaatcgttttctgatgaagaaaagtagctaattctgagacacagcagtagtatggccgtatctttgcatgactcttttagtggctagagctgcagcctcactagcacgcattgtcccacttgccataattgcagcaaactctttgagaatctcatcttgaaccttgttgcgtgcatctccaagagggtctgctgtgaccccatttagtgatggcttttgtggttgccctgttgtgtttgcagaaggtgctgccttagagttttcatctttgcccttcacttccttgttcacctctctgctcaccccattctcactggatgagttggaggtacttgagttcttttgggtgttagctgaaacattcagagtagttgcaggcttgaattgtggtacttgaggaactccaccagatttcagtgttgtctcaagattctgtatcataggcaatataagagctcccattgggctgctcatgacttcattgggcagctggagaatatattcaggaatggacgcaccaaccaaaaattgagcaacctcattgctgaagttgttgcaattatgagtaagcagactatatgtttcaggcaggtactgcggactgatttcctgcaaatacatttcaaagacatccttgggaacatgtgtcacacctaagtctaccactcttagtggagttccatatggagttgatccagcaggagagtgttgaatacccccaccaaagtaatactcattaccataaacaacaactcctgtgtgccatatgccttcaatagctttccccaaaaaggacattgaaagctgccgtgcaagaccttggctcaagtcataaacatttagagtaaccctgtgaccctcctcagccatctgctgtggtccaattgaaaattaattagcctctttagttaaacttacaaaggagtgttgtaaatactccaacagaaagatcacaagaacacgaagaattaaccacgaagcaacgcagaaaattacaagattagaaagcacggttcttctgcaacaaggaagacaagggtgccgagggtgcggcctaatatattttaccttccgaagcccccaggatttctagaacctaccaccgctcgctattct

SEQ ID NO: 8 - DNA, 1567 bp, Glycine max
catgtcatcgtttatggaacggtagatttctcatggtcaatgctgcagttataatcctctcatatcttctttagaatatgctttttaacctatgcataagctaaacaattttaactgacgaagaaccccttctcaatttttgttccagaagttttggatatcttatccaaagctgaattggagcgaccattaaaaccactttatatacttcttttctgccacgtgttttgtgccttcttaaaaacttataatccaagagttatattccagaaaatatgtcgaaatgactcccctgatcaacatttcactcgaatccacttaatccgacatacacattaccaataaagtagtctcctcatagaatagatgttacaagttgatcatgttttccccggttcaaataataaccaatgatatgaaacactgcaattgcgcagtgatagtatgtagggattttagacccacaaatcgtcagaatgatgaagaaaagtagctaattctgagacacggcagtagtatggccgtatctttgcatgactcttttagtggctagagctgcagcctcactagcacgcattgtcccactagccatgattgcagcaaattctttgagaatctcatcttgaaccttgttgcgtgcatctccaagaggatctgctgtgaccccatttggtgatgacttctggggttcccctgctggctttgcagaaggtgatgctgccttttcatctttgcccttcacttccttgttcacctctctgctcacaacattctcagtggatgagttggagatactagagtttttttgggtattagctgaagcattcagggtagttgaaggcctgaattgaggtacttgaggaactgcaccagatttcagtgttgtctccaagttctgtatcataggcaatataagggctcccattgggctgctcatcacctcattggggagctggagaatatattcaggaatggacgcaccaaccaaaaattgagcaacctcattgctgaagttgttgcaattgtgagtaagcagactatatgtttcaggcaggtatcgcggactgatttcctgtaaatacatttcgaaaacatccttgggaacatgtgtcacacctaagtctaccactctaagtggagttccatatggtgttaatccagcaggagaatgttgtatgccaccaccaaagtaatactcattaccataaaccacaactcctgtgtgccatatgccttcaatagctttccccaaaaaggacattgaaagctgccgtgctagtccttggctcaagtcataaacatttagagtaaccctgcaaccctcctcagccatctgctgcagtccaattgaaaattgattagcctctttaattaattaaacttgcaaaggagtgttgtaagtactccaaaatagaacagatcacaagaacgagaagaatgaaccacgaagcgacacagaaaattacaagattagagaacacggttcctctgcaacaacgaagggggggcctacgtagctgactcctaataaatagaaaaaatattgttattgtattgtccattggag

SEQ ID NO: 9 - DNA, 1774 bp, Glycine max
  misc_feature (1766)..(1766): n is a, c, g, or t
cgaagaagcagtttcgggcccgcggcgggtgcccccccccccaaacatagaccaaaaatgtgctcttcgactctatcgtcctattctttcctcacaatcagctccacatttttcaaatcccaattttgccctcctcccttcccctctcgcgtggtggcgtgtcacgttggatccaattccaatgttcaaaagcacgttgccaccgacctcaagttcgtcctccacgacgccctccatgactctggaatcaacaccactcatgccagagaagctagggagcatttctgctcacaaattaggagattcactgatattgagaagggaaccagtatttgtatcaacaggtgtgttgatttggggagaactgctctctacatagctgcagaggatgattctctagtgtcacattcatcagttccacttcctgtcgatgattttattacgagattagatgatctttcgatggactactgtccgcactacagccccaaatatgattcatcgccggagaagttcttagagagcatagagagatttctatatattcacaagggtttcaggagagccaatgccaatgtattggagccacgagcactttatctccactcggttttgacccatcgttcaggatcagctgcaatgctatcacttatatactcagaagttctgaaaatgcttcggttgtggagccttttgcattttgatgctgaaattttcttccctcgtgatgctcttacccttcccacaggctatcataagcagaaaagcaaggagtcagaccaagctcacataatgacttcaggaaacctattagttgagatcttaaatgatctgaagcatgcattctggccttttcaacatgatcacaccaaaactttattcttgagggcggcaactgctgctaactgtgttgacagatctgattttgttggagaaagtggctcacaaattgcattagctaaggctgctcaacataggctagatcgaggtgtttggaccagtgtgcgttttggggacatgaggcgatctttgtcggcatgtgaacgtcttatcctgttgaaaaatgatgcaaatgagttaagagattacagcattcttctctatcattgtggattatatgaacagtcactggaatacctgacgaagtaccgagatctgaagaactcatctacgcaagaattatcatcatcaaactctcttagcagcctggaggaagatgccgtggataacctgatgatgcgcttgaatcttgtactgatggagcaagggtggagtcggccatcttatgccaagaattttcttggtaataattctgaaccatggtagttcctcttcttccatgtttattgagacaacatcacagaagatttgcatcaagccatattggaaatgaatgctgatggttcacggctgcggcaacttcatgaaaaggaaaaggagaatgagaaaaggagatggaaagatcaacatcataatcttggatgataagatgaggatgattcgtcacaaagaatagaattgttcgataagaatctaaggtttcacaccaaaaaaccaagaaacacatcattttaatggtgtatctgatctgaatattggcaactaagtgttttaaagagtctatttatatctttctaggcacaataactattctaataattaaaagacttgcaaataatcataaaaagtcctcagtccattgcaagtcaacaaatagacgtaagatacaattaaaaacacaaataaatcttattctaaaagttgantaaaatgt

SEQ ID NO: 10 - DNA, 2169 bp, Glycine max
tcagctacgtaggccccccccccaagttacttagcctctttgctagttgatttaaattatgcatactatatagtcttgttgctacagttgttgtggttatgaactgtatgcaggtaaagttttggggatgcttggaagtgtgcagcttgaacttcagaagcttgttgatagctatcgttctcacatagtactgacaataaccaatccatcagagtctcttcttaatgagctaagaactgttgaggacatgaagaggcaatgtgatgaaaaaagaaagagaaaggaaagtcaaaaagtggtaaaggtgaaagtttcaccctacagcagttgcaagcagctcatgctgaatatgaagaggaagcaacactctgtgcctttcggttgaaatcgctgaagcaaggccagtctcgcagtctcctaacacaagcagcacgccaccatgctgcccagttgaatttcttccggaaaggacttaaatcactagaggctgttgagccacatgttaggatgattgctgtgcgacaacatattgattaccaattcagcggcctagaggatgatggtggtgaaagtgataataatgatgatggaaatgattttgacatcattgaaggtggtgagttgagttttgactacagagcaaataagcaagggccatatattgtttccacatcaccgaacacagcagaggtggaagaatcaggctgttcatatgttcgagcttcaaccccagaaactgcagagacaagtttagacaagaaccaaggagattttaaagtttcaaatagagtcagcagttattcagctccaatacttgcagaaaagaaatttgacccagctgaaaaagtaagacaacttttagcatcatctgcagcaaagtctaatgcatatgttctccctacaccagtcaacatcaaagaaaccaaaactagctcagccccccacattagtgcaagtggatctttgcataatttgtggcattcttcccctttggatgaaaaaaagaatgagaaagatgttgatagtaaattgtcagagccgactatccctagagctcactctgttctcaaagaaagtaacagtgatactacatacacccagttaccacgcccttcagctgatggactctcacctccacaagttgatcttttcagtgctactgatactaagaaaataaaaagacaagctttttcaggtccattgactaataaaccattatcagtaaaacctgtttctgggggttttccacgtttaccagtgccccagccttcatctccaaaagcatctcctaatgcttcacctcccctggtttcttcacccaggataagtgagcttcatgaacttcctagacctcctggtaatcaatctagcaagccacgagtgggtcactctgctccattagtattaaaaaatccagaggctgccatgactaataaatttccttcagttgtatttagtgcagcatctccacttccaactccacctgtctctcggagtttctctataccttctagtggtcagagagttgtggcattaaatgtctctaatactaagtatttggatactccccaagtttcaaaggttgataaagccgtgtcacctccactaacacccatgtcccagagagcatctaatatatctgacctggcttctcactctagcgaaatccaagtggatgcaggtgggagctaaatctcttgcgcacatactgaggttgagttctgctgaatcttagtttaagtgtctttattctatgtgggagctaaatcacttgcattgtggagttatagggttttcccaacaaaaaggttcaggctaatatatgtaaatatgctgtttatgtattgtttagcttctcatctcaatttgtatctattatttttactttaactagtgatgatgggaactaaactctacatgattgtcattataatgtgttgtgtacatattcggatgaaaaattttgttcacttcccaagtccaacatgacgacaatgaaagaactttagcaacggaaaacgctcctgaccccatttatttattttttccattttcctggtgctcaaatttcaaactgatttctattggccgtgagatgacacttgaatattcatcaatatgaacttattacacttaatttgggtattgacttttggattatgatttgag

SEQ ID NO: 11 - DNA, 1088 bp, Glycine max
atgaagaacctatgtactgtattttacaagaccaaaggttcttcatatcatccatatatatagactcttgatagacttggtagggactgttccctagcattataacaagtgtcttcatatcatccatatatatagactcttgatagacttggtagggactgttccctagcattataacaagtgatgcaacttcctagacattaatacacatgaggccatgaagattgcatgcatttagtaagtgatttttttttttttttttttgacacacaactcaaactaatgcccattaattaatttttaaataacgactaaaatcacaaacaaaacagaattctaatacaacaaacacaaaaaaacctaggcatgaaatatgtaagaaataatcactagaagaaacatctacaaatatacattccttatgtttcaatcatcttcaacaagagcaccaatttgaagtgattgtagagtctttcaagcctcccccaatgctgtcttgatgtcattttcaatggacaacggtgaggtggttggaccataacgagcgaggacatgcccttccttgtcaaccaaaaacttagtgaaattccactttatcctactacccagaaatcctgttttatttgctttaaggaatttgtagacaggtgctgtatcaggtccattgacacgtacctttccaaaaatgggatactcagccttgtaccttgtacaggcaaattcctctgcctcctggctactcccgggctcttgtttcagaaactggttgcatggaaatgccagtatctcaagacctctgtctttatatttgctgtaaagctcagttaactgggtgtaattggaatttgtaaatccacattttgaagcgacgttaactacaagaagaaccttccctttgtaggtgctgaggttcacgtctctgcccttagcatccttgaccatgaattcatggatggatttttctgtgaccgatgccgaagcacccatttctcaaagacgtgaacacttctctctcaactttctgtctctttgatttcttaatttatgtctatgctaatattttgggggggcggccttacgtagccgat

SEQ ID NO: 12 - DNA, 839 bp, Glycine max
aattcggctcgagcagcgcagagagaaacagacacacatggataaaccacaccccaccaaccgtttccctctccattcatttcctggccacaacaaaaaaacaacaaacacagcaatatagcatcgcataaacgttctcacttctcacttttttttttccctcttctccgttttcatgaatatggagcgctacacgctaccggcaccacccaatattattcccgaggaagaagaaaacattgccattgccatgggtgcccctcttatcccttcctttaaatccatgcttcaacaacaccctcaacaacttgactcttactttaactcttcaattagttctactactatcccttttgttcctaacatggactcttttctctctcttgaccctttctcaccttctttcttcaacaacagcagcagcagcagcaacatggccctcgacccgggttttgatttgggcctggacactgggcttcactcttctgctcctgctccccatcttttttcccaggcccagatgatgggcttcgagttctcggagctcgaagccctggctggacctgggaatgtaaatgtcccgtttgcggacggggcaaaggcggctgctctgctgcggtctcctcatttcgagccgccgcagcagcagccgacgctgtaccggaagcggagggggacagccgcggagattccggggctggagatggtgagaaggaaggggaggaagtggcacgaaggaggaggggagggtgaagaaaggagcagtgctgacgtgggccggtccgggtttgactatgagtctgatgagcagaatgagagcaatgggttgaagctgagtg

SEQ ID NO: 13 - DNA, 975 bp, Glycine max
tcgagtcagctacgtaggccccccccccccagaggatagataggcctcagaagaagaagagagaggtctctcaacaatggccactgccactgtttcaatttcaactttatgcgctactttcggaacccattgcgccatttcccacaacccaaaacctctattttctcaacctttcaatctcaatcactttccttctaactcttacaagctcgctttctcgcctcgctcacctctttcaccccttcccaaggcctctgaatccgcggtagccgaaaccgaacccggttcggccgagcccgaaccggcccaaatttccccggcccaacctccctcctgggaacccggtctcttcgctgtcgtaatgattggcggacgccaatatattgttcacccggggcgacatcttactgttcagaggttaaaaggtgctaatgttaatgataagattgccttacacaaggttttactggttggcactgatacatcttgctacattgggaaaccaattgtaacaaatgctgtagtatacgcaacggtggaagagcagggtctagaccctaaagtaattgtcttcaaatataaaaagaagaaacattatcgcagaaacattggacacagacagccaaatacacgtatacggataaatagcattatgggctatgaaaactacccaaaagttactatggacgatatcaaatcagacgaacccgaatcatgaacatcttgtgcactgtgcctatactgtagcttcttcctctttaaatatgtaatcatttggtcatcattagttttgctttaattagaaatgtaatgtattgtaatattgtattgttgtaatctcccgcttacaaacacattgcaatttttctctccaactttctttcacgtgcgaattttaactcttctataatgagcttgttagtttagtaaaaaaaaaaaaaaaaaaaaaaaaaaaaaaaaaaaaaaaaaaaaaaa

SEQ ID NO: 14 - DNA, 1536 bp, Glycine max
tcgagtagctacgtaggccccccctcagctacgtaggccccccccccaaaaggaagcagtgattgaattggggatttagggattgtgtacagtaacaatgaatttcaagatggattccgatagcgcgaagctgttcgtaggaggcatttctcgcgacactaccgaacacgttctcaaactccacttcgccaagtacggcgtcgtttcggactccacaatctccgtagaccgcaccacccgaagccctagaggttttggcttcgtcaccttctccgacctctccgcagctgataaagccctccaagacacccacgtcatcctcggaagaacggtagaagtgaaaaaagcaattcccaggagtgaacaacatcaacaccaaaacccattacagagtagagggggtggttattattataataataataataataataatgatgataataataataatagtaatgactattgcagtgaccacaacgttaggactaaaaagatatttgtagggggtttacctgctggtatatccgaggaggagtttaagaactactttgagaggttcggtcggataaccgatgtcgtggtgatgcaggacagtgtaactcaccggccaagggggtttgggttcatcactttcgagtccgaggaatcggttcaaaacgttatggtgaagagttttcatgacttgaacggtagacaggtggaggtgaagagggctgttcccaaagaggggaaccatggctatgatgggtttagtaaattaagaaataagagtgaaagaggagttcctaagagttttcctccttttagtcatagggatatgctcccgctcccaggtttcacacctttgccgtggtatagtggtgatggagtatatgcatatgggtctaatgcgtatggttgctggtaccctgtggttggttatggggggaatggatacgcagttccttctgatgctcctagtaacctctggtatgggccaatgatgactggtcctcaggcatgtcaggtgccttacgctagtgctgttccaaatgttgtgtatgtggggggtaggattggaatagtaggtagtggtgctggatcttgggggtacactggcattatgggatctgcaacaaattttaaatttgatcaagcttttaatgccaatgaatttgttcctggcaatgtgacatcacctcatggtgtaaagcaggatgttattgactcttcaagtttgaaaggaagcaatggtggaatttctagttgacagactaaaagggtccttcaaccttaattcatgtaggtaaatacttactgactgcttcagggttgtgaaaggttggcatattctttcgcaagatgttgtaagggctagtcactcttcttttttgttttaatttgtgaagatacttttttatgtgtcacaaacatgtagtttagcaactcgtcatgtttagttatggatatttattagtgtagaggtttcatgcatctgtaaaataatttcatgcaaatccttctctattgttcttcaaaaaaaaaaaaaaaaaa

SEQ ID NO: 15 - DNA, 847 bp, Glycine max
  misc_feature (649)..(649): n is a, c, g, or t
  misc_feature (720)..(720): n is a, c, g, or t
  misc_feature (723)..(723): n is a, c, g, or t
  misc_feature (755)..(755): n is a, c, g, or t
  misc_feature (771)..(771): n is a, c, g, or t
  misc_feature (774)..(774): n is a, c, g, or t
  misc_feature (781)..(782): n is a, c, g, or t
  misc_feature (784)..(784): n is a, c, g, or t
  misc_feature (790)..(791): n is a, c, g, or t
  misc_feature (794)..(795): n is a, c, g, or t
  misc_feature (819)..(819): n is a, c, g, or t
  misc_feature (842)..(844): n is a, c, g, or t
atttttccctttagcgacccatttacgaagatggtaagataattattggggccatttttgttctgggcagtggaagttgtggttgattcagaatggccggaaagaacaacccgcgatccaattcgcgaatgaccatctttctcttcctcctcgctttctctctcctcctattcctcttctctctctctcctctccgcaccccttctcccacgcagcatttccacgtttccgatgccgaaacctcgttcttggcctccctcgaccacttcctcctcgcccacgctcaaacgtccctcaaagacgacgacacagcgccccgcgacgaaccccaaaacgacgacatgacgaagaagctcgacgacgccgtttttcactccgagatggacaggctcctctcggatccttactacccggtgtcccttccccttagggtttacgtctacgacatgcccccaaaattcacccacgatttgctctggctcttcaaaaacacctaccgagacacctccaatctcacctctaatggaagtcccgttcaccgtctcatcgaacagcattccattgattactggctctgggcggatctcattgctccccaatcggaaaggctcttgaccagtggtcgttagggttcaccgacagggagganggctgactggttctacatacccttcttcaccactatcagcttcttcctcatgggaaaacaacaatgcaggnccntttttaagggggaaggttttgaagggggatcnctggatcaacctgcanggnaagggtnntngggggnnaannaaaaataattcccgggggatcatnccgggggcttttaaaggctggtnnnaaa

SEQ ID NO: 16 - DNA, 955 bp, Glycine max
aacctttcttcgctatagtcagtgataccgagccgtcacctccattcattcatgccttcatgggggacactggcatggaatgctctttatgactcgctcttggaacgttgctgttgattcttgattgttttctatctcaactttacgtctgaagtgtcttttgagcaaggtgatgggtctggaaaagaatcctcttgtgtttttcgatgtctcaattgatggggaccctgtggaaagaattgttattcagctttttgccagtatagttcctaggacagcggagaattttcgggcactttgtacaggtgagaagggcattggagaatcaacggggaaacctttgcattataaagggacaagccttcatcgtataattagaggttttatggctcaaggtggtgatttttcaaggggtaatggcacaggtggagaaagtatatatggggggaaatttgcagatgaaaatttcaaactaacacatgatggacctggcattctttctatggctaatagtggtcctaacacaaatggatctcagttctttattacattcaagcgccaacctcatcttgacgggaaacatgttgtttttggaaaagttgtcaacggaatagacattttgaagaaaattgagcaggtgggaacatctgatgggaaacctacccagccagttaaaattattgattgtggtgaagtctctgaaacaaaaattcagcatactgcagagaaggagaaaggaaaaaggagaaaatctgggaagtccttatcttctgatgatggttctgacaaaaaatcaaggggaaaaaggaaaaaatcttccaaagacacaaggaagagaaggaggagatactcaacatctgatagtgatagctattcctcagattctgagtcagattcagattctgaatcggattcatcagtttctgattctagttcctctagtgatgggaaacac

SEQ ID NO: 17 - DNA, 1373 bp, Glycine max
  misc_feature (228)..(254): n is a, c, g, or t
cttgatctacaatatgcaggtacgtaagaggaaggtgagattccaaataagtcatgtaaacgaaacagcattgataggagctaaagtcatcaccagaccaataaagttaaacttcccatttggatgtggaatgaaccatcatatcctcacaaacaaagactaccagagttggtttgtctcaaggttcaaattcacaaccttcaccaatgagatgaagtggtatagtannnnnnnnnnnnnnnnnnnnnnnnnnnacactatcgccgcgcccccgctgaaatttaccaaagagaatggcatttctgtgagaggccataacattttctgggacaatccaaaacttcagccggaatgggttaagaatctatcacctgagaaattaggagaagcagcagctgaaagaatgaaatctgtggtttcaagatacaaaggagaactgattgcatgggatgtgatgaatgagaatctccacttccacttttacgaggacaaattcggtgaaaatgcctctgcagcagcatatgcaacggcttacgagcttgatcaagagccgaagttgttcctgaatgagtttaacaccattgagtatagtggggatgaggcttccagcccagccaaatatataaaaaaacttcaggagattctgtcatttccaggagtttctggaatgtcagcagcaatagggttgcaaggccatttcgctagtggccagccaaatcttgcttatatgaggtcaggtcttgatcttcttgctacaactggacttccaatttggctcacagaagcaagtgtggatccacaacctagtcaggcagagtacctggaagagatactaagagaggcatactctcatcctgctgttgaagggattataatgttttctggtccagctcaagctggtttcaacgccacgacgctagccgatgagactttcaaaaatactgctgctggagatgttgtggacaagctgattcaagagtggggaactgggcctaatattgccacagcagatagcagaggaattgtggatatttcactgcaccatggagattatgatgtaactgttacacatcctctaatccactcccctataacgctgaatctaagtgtaaagaaagatttttcactagaaaccattcatgtgaaaatgcatgcataaaatgttatacttctgttgaagcaagccgtcattgattgcatatgtaaatttgaatgattgtaataaaatggcttgcagcattgtggttgattaaaaaaaaaaaaaaaaaaaaaaaaaagcggccgctcttgtggttccatatattctttttcacatttttttttcttttacttttttcttctctatattgaataaaaacttattttttttttta

SEQ ID NO: 18 - DNA, 913 bp, Glycine max
caggacgttgatttgacgctatcatccaatcccaattctctgtgaactttctagaatctcgttcttcctttcttctctcagattccccctttgcctccttcttcaaccccttttctttctctctctgtctttcgcactttcattctctcttaaaaatctaaatcccctttggtcttcatctttgcctctgacccaggtatggcttcgaaacgcatcctgaaggagctcaaggatttgcagaaggatcctcctacgtcatgcagcgcaggtcctgtggctgaagacatgtttcactggcaagccacaatcatgggacctgctgatagcccatatgcaggtggtgttttcttagtttcaattcattttcctcctgactatcccttcaagccaccaaaggttgcttttcggactaaggtgttccacccaaacatcaacagcaatggcagtatatgtcttgacattctcaaggaacaatggagcccagctctaaccatttccaaggtccttttgtcaatttgctcattgttgacggatcccaaccctgatgatccacttgtacctgagattgcacacatgtacaagaccgacagggccaagtatgaggctacagcccgcagctggacccagaagtatgccatgggatgaccgtattgagtttttagctgttcaatgaagctgcaaaatcataatttatgtaaaagaacaaaagatattttgaacggaatttgaatgctttcttttattattagtgaaactccacaatggtaagaagagacccggttgccaatttgtgaatattttctttgctatggaagaatgtaatgttatgcaaacttttctgcatgttgatttgatattccaaaagtgaaaaatgcaagcattaccaattaggcactaaaaaaaaaaaaaaaaa

SEQ ID NO: 19 - DNA, 2496 bp, Glycine max
tgaggctcgaggtgagactgagggctcacgggaacaaaccacccaacaagtccaagtccgaggcgaagaagacaacctggattttgtcatccccaccgtgccgttgatccctacagtttcggaagtttgtggggttaaacaaatggatcacataaaatcactttttatttttatattttaaattttctggcaccactcaaagattcagatagcggaaaatctttcggatttgaggaccatgtagggataagtcgatggggttgtaacagagccacgaaaggagaggagtttttggtttccaaaacctcgtttcttctcaacacacaaaaaaaatgatgcagaaactgtgtttgattgcttcccatggatgccctccggggctaactttgcagcaagagctggccatggttggctgcaccattaccaagggttgtcaaccattattgccttcatctgtactgaaacctgaaattatcagatacggatccccactaaatccatttgaggagtcaagcaagtcccggaaagagtggttcaattctaatcagattgtcaacgtgaacttgtcgactcaaaggcctatgcttattgatgttcaagatatgatgcattgctagtttctagaatgataaacctatccaagcccagtagattttggctttggcatcgttgaacaatgcagtgagcacgataaaattttgcagtgtatcatgtctgagagtgctgaagctgggataggtggagtacatatatctttgttgtctgacttgatggatttgcaattgtcaagcattgatgaacctcaaaaaccattgacacctcttatcccaaaaagcaaattcttcatcccgaagcttttgcttgatatttttcaagattcgccctttagttcaaagattacagttcatccagatggtcaagtcacttttatggacactgcaattgagataaaagatcttctttctgtagttgctgactcatacttattacgtaagggtgaaaaacaatctatgcttgttccacacttcagcaggatgagtatcaacgaagtagaagtcagaagtctttcctccacattggatattcattctacattgactgttcctttaaagagtcctgagaaagtgaaagtcaagccatcacaaaagaagaacaagaaagtagccagagagagggatctcttcaagaagaactacttacatgcatgtgagagccttctgtccctaatggttgacaagaggcgacaccggaaaacagcaattctctccctgaagaaatctggtcccgagcttcctgagctcctcacacaattttctgccagcattgccggtactggccttgctgtcctgctatctgtgatctgtaagctagcttgtggaaggggggttcccttttgtgcttataagctcctcaacactgggtttggatttgggctggtttggctttcttgggcagttaataagctaagggatacaattgtctgcatgaacaagaatgcaggaaagcttggactgaaagatgaggaaatgattcaaaaggtcgacaagagcctaagagaagtttacttcagagccgccgcattgctagcagtggcagtgctaaggcttgcttgagtactacctctgaagacatgatcgcttgagtttgaagagcggtaagcgttgcaaggccacacattggaacatccattgtacctgatcagttggatgtccgttgccatgggtactgaggatgtgatagcaaagcaatcttggtttcaaaccaaatgaacctttgcttgatcttggaagcacaagattgtggatgattggcttgatcagcacttgggtggtgtacttacggtatggttagtacctcatttcaataatcaaagcaaagaacatactcgtttgcttggtactagggcggtaagacaaattgtaaaaagtaatgtaaaattttgcaatgaaatactgttttggtgaaattgttgtttggtgtcatcgctaccaaatgatgcaatatctttgcatggattatctctgcaaaaagattaacgcgtgctgtaatgctagtgtcactaatgttcatcacatatagcagtaatcttcgatctaagatatgaaactataacatgaaattttttattctttttaatagctaaaatctagaatttacgagagtgacagaagtcagtggaggtgaactttggtaatactggttctgaaagaattgatgttaaagagaaattaattcctgtctgcaaattacggagtattctatgaatttcattttgactggatagcaaagtagcatcatgttttaagagaaaatgttgtatgttttgtggatttcttttaattgtagttcacgtaattaattttttttcagttgattgagcagaatatatcaattgttataaatccttttgtagtgtttttgattccttggatatttttttaaggtgtttttgttaaaaaaaaaaaaaaaaaaaaagggcggctggagacgagttag

SEQ ID NO: 20 - DNA, 1356 bp, Glycine max
ccgccggagctcgaattcggctcggcattgacataggagactccgttttggacgggggcccaactgtaatggggggagttattttaagcagccgggattgccaacaccaggagggcttataagagcacacaacaaccttcctacctggcgttccacgctgaaagaggtattcgatgccataatatgtgatcctccttacggagagcgagctgggggacgcaaatctggtggtcggaagctgctaaagggggctgtggaaccttacaccgttcctgatgaaaaaagaacaaatcacataccatcaactgcagcttacagtttagttgagtgcgtgcatgatttgcttgatcttgcagccaagatgcttgtaatggggggcaggcttgtgtatttctatcctgtattgagagaagatggttttgcagaaaaccatttcccagagcacccatgttttaaactgatttcttcatcggagcagatccttagttcacgatatagcagggtgttactgacaatggtcaagacaggtccttacacagaggaaatagctgaggcggctagggaaaaacacattgaatttaaggagaaccatgtaaaatggttagaagatggtaatcttcattctgcagttttcagtcctgctgatgctcagttaacggaggctggtgatcccaagttaattaaggatccaaagcctaaatacagaggaaagtatgtttagagttttaaggtgatggtcttgtccctcaccattacaatagacagcactgtatttttcaatgtccaagcggaaaacgtatttcactctatggaagccaatgtgccctttttaattcaatctagtgatatttttcagaaaaaaaaaaaaaaaaaatgttttttttttaatattatttcatagatatgtccttttcttacattttaagcagtgtaaaccccattaggtctcaaatgcagtgtaaacagtcaataaaacatatagttccagcaaagttgagaatcctaataaaaattcaaatttcaacagatttcagaaaaaagaaaaacagatgtctgagctccgaaagagtgttaaaaaggaagtagaaaataatctttttcatgaatcaatggagacttgtatatcagaactagtaatgatatcagaaacagaattctacttgctaatctttctatccggatcgatattagtgtgatagcatattaaacagattggtgtgcactaaatttactctctcaattcacgttggaaaggcaaattgagcactaaatttactctctaaatatatatatatatatatagtaagagggaaaactttgctttcatgagttgccttacgcccttacctgctgcag

SEQ ID NO: 21 - DNA, 619 bp, Glycine max
agggtacggctgcgagaagacgacagaagggtacggctgcgagaagacgacagaagggggataaagaaatccatgttgagaggtggcaacagagaaaccctaaattgaagagaagagtgaagattgagagttagggtttaagcgagatcagagaagaaggcatcatgtttccgggaatgttcatgcgcaagcctgacaaagctgcagcactgaagcagctgaaatctcatgcggccatgttcgggacatgggttgttgttattcgagtcaccccttacgttcttcattttctctgcgccgagaaagaggaacttaagctcgagctttagcttctcaatcttccccgccagtggatcttcaggagtaggatgtgtccttgggtttgggacaataatggagtaatgtttttatgtaaccttgaaattgtgaggccatgatgatatattgagtttaatcatatttccttttgcatttggaatataaatgtgtttggactagttgtgaaaagataaacaacttcaatagtcaattatagatatactcaattattgttataattgattatatgaaatttaatctttggacgtgtttggctagttctctctctctctcctcgtgc

SEQ ID NO: 22 - DNA, 2417 bp, Glycine max
ggctcgagaaagggctctctccttctccccatgttttcttttctttacttctttgtctgataaaactgtcatcaacctcctcctcttcccactctctctctctttcttcccccctcttttttttattcttcttttttcccttgcaaatattttataaaattgatatgtgttgaaggcatatttgcttaagagctgaaccacatcatcgtcttgaacgtttgaatctatggaacagcttgtcaacttcatcatccggccaccaagagctgaatatgaccccaaaagtgatttattggatcaggagttcatgctgaaaggaaaatggtatcaacggaaggatgtagagataaaaaacagtcggggtgatgttcttcaatgcagccattacttgcctatagtcagccctgaaggaaagcctctgccgtgtgtaatatattgtcatggaaatagcggatgtagggctgatgctagtgaagctgctataattttacttccctcaaacattacagtttttactctggatttttctggctctggaatttctggaggggagcatgtcactctaggctggaatgaaaaggatgatctgaaggctgtcgtcaactatttgcgggatgatggaaatgtctctttaattggcttgtggggtcgctcaatgggagctgtaaccagccttatgtatggagctgaggatccttcaattgcagggatggttttagacagtcccttttctgatttggttgatttgatgatggaacttgtagatacatataaagttcgtctgccaaagtttactgtgaagtttgcaatccagtacatgcgaagagcgatccaaaagaaggcaaaatttgacataacggacctcaatacaattaaggtggcaaaatcttgttttgttccagctctactaggccatgccattgatgatgattttatacagccccatcactctgatcgaatatttgaggcttacatgggagacaaaaacataattaaatttgacggagatcacaattctcctcgtcctcagttttactttgattccataaacatcttttttcacaatgttttgcaacctccggaagatgaggttggggaatcattttttgaccccatgaatgattactttggtaaggatgtttggagatctgtgcacgaattaggctacagcaatgaatcatcatctaaaaacaaagatgcagaaccatcaacaagcagcacgataaatgccattgagcaggtccgttcaagacgaccaatgagtaggatggaggttccatctgatatttcttcgaaagatgaacatcgtgaacatgaggagaagtgcggcaatatttccccatcatcatcatcaatgataagctttgaattgtcaaatggtgatccctttgggtcccatgttccagccacattggaagatgatcagtatgtagaatatcaactagatgaccttgcaggttttccatctactgcagaggaggaagaaagaatgttcatggaagcagtgatggagtcactgaaggacctggaagtacgaaatccaaatgcagaacaaccaacaagtagtgttagttctgtgtatgtagatgctgtagagccgtctgataaagatgcttcttcaggagagatttcgagaccggtggagacagaatcttcctcactcaaacacaccacagagtcaaaattcaaaaccacttcctcgacatcagaagaatttgagccattgaacggtgagtcaaattccatttcagtgaaacattcccaaaatgtggtgtcggagccaagtccagtaccaagtgtttcattagaaggaccagcacatctgcagctgcagccaccaccatcggcacctactgacacatcatcagtaactgagtccagcaatacaagtggttctgctagtagcgatagttctgctagtttacaaagttcatcagagactgatgtatcacataacacgaaagccacagtaactgttgttaggaatcccgcaggccatgtcatggatggcttaatgcgtcgatgggatttcaattttttcaagaacaaatagtcacaaccgatgatcagatgagagattctcatgtatacattgtttttgtaactacaagaaaacaaaaatcatagtttgtaccaaagaaaataggttgctcgtgtgtaaattttgtatgtttagattctcaactaacaaatcatccaatattctttgactgtaagtgagaattgtcatattttgttgtttttatgaacgatgtctacaccattgtacgcatcatttgaacaaaggccctcgtctttcgttccctttatttgccgaagctcaagcttatatacatgatgcacttgccaggatgctatgcttgtatttgtatcctagtgtggatggaaatgtattccctacatttaattgtttcatt

SEQ ID NO: 23 - DNA, 1352 bp, Glycine max
tcgttcagctacgtaggccccccccccccccccgaacaagcttattgataattagccatacaaagatgaatctcaatagcacagaagcacttcttgtgctttttgcatttgtcttcttggcatggggcaatgcacaaaatacccttgtgccagcaatcataacatttggtgactcggctgtggatgttgggaacaatgattatctgcctacccttttcaaggctaactaccctccttatggaagggactttatcaaccatcaacccactgggaggttctgcaatgggaaactagctactgatattactgctgaaacactgggttttaagagttatgcacctgcgtaccttagccctcaggcatcagggaagaatcttcttattggagcaaactttgcttcagctgcctctggttatgatgaaaaggctgctattctgaatcatgcgattccattgtcccaacagttaaaatattacaaggaataccgaggcaagctggccaaggtagttggcagtaaaaaagcagcattgattattaagaatgcactctacatattgagtgctggcagcagtgactttgtgcaaaactattacgtcaatcctttgatcaacaaagccttcactcctgatcagtactctgcataccttgttggttcattttcaagctttgttaaggacttgtataaattgggagccaggaaagttggagtgacttcactcccacctctgggttgcctacctgctgcaagaactttatttagtttccatgagaaaggttgtgtctcgaggatcaacaatgacacccaaggatttaacaagaaaatcaagtcagctgcagcaaatctccaaaagcaacttcctggtcttaagattgtagtctttgatattttcaaacctctctatgaccttgttcagtccccttcaaaatttggttttgcggaggcaaggaaaggttgctgtggtactgggatagtggagacaacatctttattgtgcaatccaaaatcactaggaacttgctctaatgcaacccaatatgtgttttgggacagtgtccatccttcacaagctgctaaccaagttttagccgatgctttgattgtacaaggcatagcccttatcacttaagggctcatgaggccataaacgtacgttctagcagtgtaccactaatcatcatggaaatgatgcacgcaccagtttgttatttttccagtccgcagaagcctgtattgtagtatttaataaaattctaagaaatttcattttaactcaaaaaaaaaaaaaaaaaatatattaaaaaaaaaaaaaaaaaaaaaaaaaaaaaaaaaaaaaaaaaaaaaaaaaaaaaaa

SEQ ID NO: 24 - DNA, 1439 bp, Glycine max
cggttttggtggtagttctggtggtggtggttttggtggtggcggcggttttggtggtggttttggtgggggcggatttggaggcgcgtctagggctgatgatgtggacaattgggcggttggtaagaagcctgctcctgttagatcttccaatttcggttccagttttcgcgattccggcgtggagcctgatcgttggacgagaggggatccgccgcgtgaggttgagcagcggacggagaggccaaggctggtgttggatccgcctcgaggcgatggtttggtgaatgagtctccggtgaaggcgatggataaggcgaatccgtttggggcggcgaggccgcgggaggaggtgttggctgagaagggtttggattggaaaaagctggattcggagattgagactaagaagacgagccgtcccacgagttcgcactctagcaggccttccagtgctcagtccaatcgttctgagggtcccgggttgcaggggaccgatgctgtggttaaatccaggcccaaggtgaacccctttggggatgccaagcctagggaggctgtgctgggcgagcgaggcatggattggaggaaaattgatcttgaattggagcgtcgctctgttgccaggcctgagacaatggaggaaaaattattaaaagaagaaattgataatttaaagaaagaacttgagaaagagtctacaataaattcaaacaaggaatctgtggatgaggctggtggagaccaaaccagtacacatgcaatattacaacagaaagaaaaggagctggaacttcttatccgtgatttggacgacaaagttcgttttgggcagaaagccattgaaaggccaggttcatcggcagggaagtcttctactttttctgatcggccaccttctagatctggttcctttgaggattctagaagtgtggattttacagacagacctcgatctcgtggtacaggagatatgtggatgcgtcctagtgatgacagaagacagtttcaaggtggtagcagggaaaggggatggttttcttctggcagcagaaataggtcaacgtcaagagagagatggtgaacagcagttttgtgtggattaagagttatcttcaacttttgatgaccagaacctaatactactattttattacttgtcttttctaatcgttttgttcattttactccaggcaattggagcaacaatcattgagtactggcactaaaacttttgcctaatctgttattgcatctcgaaacattgtaaatttgtttttccccttctggtaattttttgggtgtctggatgaaggcagaaagccttgtaattttattaggactaaattgttattgagaatcatggaacttcctagttaatgttaatgtgatattgttctgaatactgatataaaattatttttcttcaaaaatcggca

SEQ ID NO: 25 - DNA, 2036 bp, Glycine max
gtgctggtcactcatggaggccaagggggacattccgcttcctcgcccccccccccgtgttgttagagcgagctctgttttaatattgtttggtggtgaggatgcaaaaaggaggaaattgaatgatctacatatgttcgatctcaagtccttaacatggcttccacttcactacacgggaacagcaccttctccaagattcaaccatgtagctgctctttatgatgataaaattctttatatatttggaggatcatcaaaatccaggaccttaaatgatttatattcacttgactttgaaactatggcatggtcacgagtgaagatgcgaggttttcatccgtcacctagagctggttgttgcggtgtcctttgtggtactaaatggtatatcacaggtggtggaagccggaaaaaaagacacggagagactgtgatatttgatattgtaaaaaatgaatggtctgtggcaatcacttcgcctccatcttctatcactacaaacaagggtttcagcatggtactcgtgcagcacaaggaaaaggattttcttgttgcatttgggggatccaaaaaagagccatcaaatcaggtttgacagaaagtatgaagttaatattttgagttcattctttaacctttttcttcttgacctcaaatcaggtagaggtgttgataatggaaaagaatgaatcagcactagggagacaatcagctcccagtaaatgttcagcatctgtactacttgaaaaacattcatcatccactagattggccccccaacttaatgattgttctcaacgtttagttgactcagttgctagacaaaatctagcttctgcaattgaacatggttccggcaggagatctctatcagaatccctggttgttgatcccaattttccccctcccctcccctccctccccccccaatttgatcacgatgaagaatacaatactgatctcaagatggacaagaactcagatgaaaattctttccctcgggcagtagatcacagaacaaacgaaaatgaccatggtaaacagatgaatagtagtggagccaagaacattacggaggaacaacaggcactgttatctggaattccaatccaacaaaacctagtatttgaaaatgacatgctagaaagtgataacgtgtcatttactgaaaacattaaatcaggatcactgactacttcaaatgtctatcattgctatgaaagtaaattggcttccctgataaggaaaaatggaattctggagggacaattagcagcttccttagcaagcaaagaagccgcagagaaaagtttggcatctgttctcaaaagtagacaggaaatggagaggaaattggcggaatcacataaggagatggaattgatgagagagaagctgaccagtctagagttggcccaggaagaggccaacaacctatcaaacattgtgcactctgacaatgtacggcttgagcatgatgtggccttcctcaaggctgttttagatgatacacagaaggagttgcactcaacaagaggagttattgcaggagaaagagcaagagcattccaactacagtatgaagtttttcatctcaaacagagattgcaatcaatggaaaatcgagcatctactacaccgagaaaaccgttccatgtgcagtgaggtgatgtttgtttgaagttgcttattccacttaattcgatgtgtacatatatttgaaccaatgaatcaccgttagtagttcttctggaaggttctaaaagtgagagcaacttgttttagaatgtcaagtaaattattgataagaaaattaatgtttaatattacgtattcatgcattggatattaaaaaaaacctcttcttatcattgactaaaattatttattttacttatttactttacaagactcaaattctttcttaaattatgtactttcaactttttttcttcttccattacatccaaacttacctatagtgtaaacctatgtgaatgcaagattagtatgtaaaattattcactaaaaaa

SEQ ID NO: 26 - DNA, 1180 bp, Glycine max
tttttttttttttttttttttttgttttttgttttcccgacatctaaatgtcaaacatcagtgacttttattacgcaagagtctagacattatacccgtgtcaaacatcacagacgtatttttttacaagcaacagcaggccattcactcactgatgcattctaaaattaaaattaaaaataataaaaaaatatctccaaataacatgtggctggcatgggcaaacactagtagcctccaataataataataatttttaccgagagaaatccatgaaccttaaccaaccaaacgcgccacccttgttcgttttgtcagcctctcttgaacacgaaccaaacggcgtcgttccactaccctcgtccccattaccaccacacttcctcggacacagaaaaaagtttctcgatccaatatccatcagcttctcctccctatccaaactttgtaggctgaactgagaataatggaggtcgaagtgcgaagggtcgttcgacggtaaaattggccggcgaccttccttcacgtattgcctcaccgtcaccgccactaaatctccgaccgtcgattccggcgtcatcacaacctgcaccggtcccaagcttcccatgggagtaaccttcaacaacaactttggcggctgttttggcacaacatccgtcgccggcgtcgctaaagccgcgcggtgcctctccgacaaaagatccggcaccgtcttcggccgccggatcggttcgccggacatggaaggcggcgatgagtgaccgtagaaggacgacgatttctttgtcaatttctcgcggcggtgaggctcgccgtgtccgttacggttgttcttcgaattaggcatggtggaagtaaccgttaaaagaaaacaatatttgcagggaggggtaaagttggaatttgaggattggctcggctggcttggaggctttgtatctcaatcgacggcaccgaaagtatgtgtggaagccaagagcttcggctctctggctgacgccgaatggaagctatcataaccagaagggtataagcgtaaatagggcactggaagggcttaaaaaccagaaaaacgtgaaagaaaggcaatagaataatatgaagatggtagggcaacggcggcgctaagaacactgtctctgtgttttttatgcgtttggggtttttaaggaagagg

SEQ ID NO: 27 - DNA, 737 bp, Glycine max
  misc_feature (25)..(25): n is a, c, g, or t
  misc_feature (58)..(58): n is a, c, g, or t
accttctttcacgtattgccgcacngccccagccactaattctccgaccgtcgattcnggcgtcatcacaacctaagctgacctgagaatcccgaagcttcccagtgggaagtaaccttcaacaacaacttcggcggctgttttggcacaacttccaccagcggcgtcgctgccgcacgatgcctctccgacaaaagatccggcaccgtcttcggtcgcaggattggatcgccggacatggcagccggtgatgagtgaccgtagaaggacgatgattttttcgttaacttcccccggcggtgaggctcgccctgtccgttacggttgttcttcgaatttggcatgatcgaaatagccgttaaaagaggagaatattaaccggtaggggtaaagttggaatttgaagattggctcggctggcttggcggctttgtatctcaatcgacagcaccgaaaatatgtgtggaagccaagagcttcggctctgtggctgacgccgattggaagctatcataacaagaagggtataaccgtaaatacgccactggaagcgcttcaaaactgaaaaagtgagggagttaaagaaaggcaatagaataatatgaagagagggtagggctacggcggcgatactcacactttctctgtttctatgtgttcgggtttttttttaaaagagagtttgggttatttttggagtgggacttgggttttggggggggggcctacgtagctga

SEQ ID NO: 28 - DNA, 1607 bp, Glycine max
tcacataggagagacacagatgttgaaggtgtacactgtgacttactgagaaaaggaacaacattatttgattagctatgtcatcatccttaatgttaccagctgcttcaatgctgagaccatgtaccacttcatcatcatcatgtacttcatcaagaagacttgctctctttcaccttgtctccactggtagcattgctctcccacaagctcagttatttggtgcaaaaggaccagagttgttaagagtagtagaggcttctgctgcagaaaaactagcccaaccagagaaagatttgtttgactgggtcaaaaatgacaacagaaggtttctccatgttgtgtaccgtgttggagacttggagaagactataaagttttacactgaatgccttggcatgaagctattgagacaacgtgatatacctgaagacagatattctaatgcttttcttggatatgggcctgaagattccaattttacagttgaacttacctacaattatggagtggataactatgacattggaagtggctttggtcattttggtgttgcagttgaagatatttacaaaagagtagatctagtaaaggcaaaaggaggaaaggttacaagggaacccgggcctgttaaagatggcagtgcagttattgctttcattgaagatcctgatggttataagtttgaacttttggagagaagacctacatctgaacccctatgccaagtgatgcttcgagtaggtgatcttgatcgtgccatagccttctatgaaaaagctgttggaatgaaacttctccgcaagagggacaaccctgagcagaagtacacagtagcttttatgggctatggtcctgaagacaagaatactgttctagaactgacatataactatggcgtcactaattatgacaaaggaaatggttatgcacagattgccataggcacaaatgatgtctataagactgcagaagcaatcaaattatgtggagggaagattatccttgaacctgggcccttgccaggtatcaacaccaagattgtagcttgcttagaccctgatggttggaaattggcatttgttgataatgttgattttctgaaggaattagagtgacaataggcatggttctagatgactagatcccttacatctccactgaaatggtagtctcaacaattttgtcagtgaaatcttacagtggcactgtcaactctactccttaataaagtaacccctccaatcactgtgtgagggaaagggaaagaaaaaaaaaaggcatatatacagcaatctcaatgtcaatcgtatttttttttataatgttactttgacacggcaattcaacatatactggatcccctcaagccaaaaaaaaaaatctcctttacttccacattcaaattctattgccctgtctgtggtttttattccaaaatatgccctcttttcactgatgtcttccctctcccttccgggccaagctgggatatcattgcaaactccagggactatatatttcttctttttcgggaatgttcctgccatatgcttgcttttcattttgactacaacctgttggcagtttggattaacccaaataac

SEQ ID NO: 29 - DNA, 1533 bp, Glycine max
cccccaccagtcttattcagctacgtaggccccccccccccccatggtgtcgacggtttggtaacatgtcactttcttatagctcatttactcgtcaatcaagttgagatctggtctatattaacctcctttggggtacatcccaatgtcaatcttggtacaagttgaaactttatggtcctgaagctatggaattgtgtaaacctgacttggaggagagaatgaaagtgttggcaatgagcacaacagaagaagaagaaatgggagacacttttgctgaaagagcagaaacttactaccaaaagaggcctcagctactgtcccttctgcaggacttgtacaatggctacataaccttatctgaccgttacatccaaacactggccaagcacaagcaccatagtagacactcttctcaagtttcaactgtagatgaaggcttctctgaccaagaagaggctagtggtgtgagccacagtgattcagacattgaaagctcaatctcctaccaacaccccccacccatgatgatgatgccaataggcctcccaaggagtagttccatgcttcttgatgttgatgccatttatgctgagcttgtgatgaggaatgttgagtatgacttgttggtgcatgaggttggtgtcatggagaggaggtactgtgagtcctcaaggaaaagtgagcttcaaaagagccttcttgaggtgttggagtctgagaggattgttctgttgaatgagaatgctagcttgagctatagggtcaacactttggtggaagagaacaaggagctggcatctgagtcagtgttcatcaagaggaaggctggtgagcttgcaaagtgtgtgctgaagatgagggaggatcatagagtgtacttgctgcataggaaaattgaagatcttcaggctcagatacatggcttggagaagaggaacaaggagtactatgagaagcttctgagaagagatgttcaagaagatgatggtaaaaaaggggtggctttggaggtttgtgttcagttggacaagcataagaggttcaagtggaaagatggcaacacttctgggaagaaatttcatgggaagaagtccccaagtttgtggaaaaagctgaagaacatggatttgttgttgtgtggagctaatccaacatgtgcttgatgatgatagatgactggtagtttttttgagtccacaaaaagttttatttaaagttaaatatgtatactttttggcactttataaggtagcagcagtaggttactaggttatttacttactcataagccatggtgtacattccaacatgaggcctttaacttagaaatgcatgaatagtgatggcatgcccctctagctaaatccttggaaaactaattgtagatcagtttaacatcatcttgtaaaagctagagtggatttgtacttttgcctccgttattttagatgatctattctactatattattattatgtaagaggcttatctcaaaaaaaaaaaaaaaaagtgagaaattattcagttact

SEQ ID NO: 30 - DNA, 1827 bp, Glycine max
  misc_feature (1827)..(1827): n is a, c, g, or t
cccactttttcgcccacgcgtccgcccacgcgctgataaaaataaaaatcattgtaactcatgtctaataatgcactaataactctgtaacaccaccttcataattccgattccagttcaaagcgactcaagcacttgttcgactcttttatcctacgcactcctccctgcttatcctgcgcatctttcacctagatcctccccttcactccttcactttcctatttcagtgggaaagaatcatgagttgtttcagctgttgcgaagaggatgacctccataaggctgctgaaagtggaggaccctatgttgtaaaaaatccagcagggaatgatggaaattatcatgcttctcaaactgcaaagcagggcactcagcctgttaaacctcagcccattgaagttcctaatatatcagcagatgaactgaaagaagttacggataactttggtcaagattctctgattggagagggatcctatggaagagtatattatggtgttcttaaaagtgggcaggctgcagcaatcaagaatttggatgccagtaaacagcctgatgaggaatttttagcccaggtttcaatggtatcaaggctgaagcatgaaaattttgttcagttgcttggatattgcattgatggaacctcccgtattcttgcttatcagtttgcatctaatgggtctcttcatgatattttacacggcagaaaaggtgttaaaggagcacagcctggtccagttttgacatgggcacaaagagtaaaaattgctgtaggggctgcaagaggacttgaatacttgcatgagaaggctgatccacacattattcaccgggacatcaagtcaagcaatgtgctaatctttgatgatgatgttgctaaaattgcagattttgatttatcaaatcaggctcccgacatggctgcacgtcttcattctactcgtgtccttggaacctttggttatcatgctccggaatatgcaatgactggacaattgaatgctaagagtgatgtatacagttttggcgttgtccttctggaacttctgactggaaggaaacccgttgatcatacactaccacgtggacaacagagtctggttacttgggctacaccaaaactcagtgaggataaagtcaggcagtgtgttgatacaagactaggaggagaatacccacccaaagctgttgctaagatggccgctgttgctgcactgtgtgtgcaatatgaagctgatttcagaccaaacatgagcattgtagtcaaagctcttcaacctttgttgactgcacgacctggacctgccggtgaaacaccaaattaatctttgtatcactttctctctatatttgtgagtatgtgcacaagtgtgcatgcaaaatataagagactgcttcagaagctggtggtaaattgctcagacatgactctatatcccattgtttacactgcattcattttgttcataatccatgaggttctttgcggttttcttgcttttattcattttattgtatttgctttctctattttttcccccttctatccttttacttctgggatgattgtcatctttacgatgaagtgttgggaaaaactacaaaacagaattgtgtatactcaaagctaagagcaagtcaatggactatctctactggaaacagttattcaccaagagccgttcttatcagattgattcttttaattttttcttaaactgtttgtcaaattgagacttgtataaattactcataatttcaattccaatgttttaggaaaaaaaagaaaatatcgtttcactgccaaaaaaaaaaaaaaaaaan

SEQ ID NO: 31 - DNA, 1465 bp, Glycine max
aaattccaatctagtcaaaatcttggaccgctttatcctacgccctcctccctacttatcctgctcagctacgtaggccccccccccgagatcttgaactatctcctccgtgttctcactttctcaactacacaatattcttattgaattccagcggaaagaatcatgagttgcttcggctgttgtgaggaagatgactaccagaagactgctgaaagtggaggacagcatgtggtaaaaaactcaacaggaaatgatggaaacagtcgtgcatccgaaactgcaaagcaggggactcaagctgttaaaattcagcccattgaagttcctgaattacaagtggatgaactcaaagaaatcaccgatggctttggagaaagttctttgattggagagggatcctatggaagagtatattatggtgttcttaaaagtgggcaggctgcggcaatcaagaaattagatgccagtaaacagcctgatgacgaatttttagcccaggtttcaatggtttcacggctgaagcatgacaattttgttcaattgcttggttattgcattgatggaaactcccgagttcttgcttatgagtttgcatctaatgggtctcttcatgatattttacatggcagaaaaggagttaaaggagcacagcctggtcctgttctaacatggactcagagagttaaaattgctgtaggggctgccaaagggcttgagtacctgcatgagagggctgatccccacattatccaccgggacatcaagtcaagcaatgtactaatctttgatgacgatgttgctaaaattgcagattttgatttgtcaaatcaggctcctgacatggcagcacgtctccattccacccgtgtccttggaacctttggttatcatgcaccagaatatgcaatgactggccaattgaatgccaagagtgatgtatacagctttggtgttgtccttctggaacttttgactggaaggaagcctgttgatcatacactaccacgtgggcagcagagcctggttacttgggctacaccaagactcagtgaggataaagtcagacagtgtgtagatgcaagactaggaggagaatacccacccaaagctgttgctaagatggccgctgttgctgccctgtgcgtgcaatatgaagctgatttcagaccaaacatgagcattgtagtcaaagctcttcaacctttattgaatgcaagacatgggcctgctggtgaaactccaaactaatctttgtctatatttatatctgtatcaatgagtatgtgcataagtgtgcacgtgagatataagaaagtgactgcttcagaagcggatggaaatttgcttgaacatgtttatatatcccattgtttacattgcatttattttgttcataatccataggttctctgagatttacttgcttttatttttcttttttgtcaaaaaaaaaaaaaaaaaa

SEQ ID NO: 32 - DNA, 1370 bp, Glycine max
  misc_feature (36)..(38): n is a, c, g, or t
  misc_feature (40)..(40): n is a, c, g, or t
  misc_feature (51)..(51): n is a, c, g, or t
  misc_feature (74)..(75): n is a, c, g, or t
  misc_feature (111)..(111): n is a, c, g, or t
cctaacgcataccactctagccagtacaatttcccnnncnaaatctgcgcnctcaactcacacactcattctannaattgtggcgatttgaccattgtgccttttggtcanaccaccaaccattagcttattggagaaaatcaacctgtcataatagtctatacccccttttgcaagaggtggctgtgagatgcaacaaactaaatcaccatggaactgcccatagtcaaatacccattttttatatataaaacccaggtaaggtcaccagtagagccttaaaagtcccatcttttcttaatccgaaacatcaaagcagaagattttatgtcgtcctgtggcacttgtagcatgaattgaactttcatctgcatcggagctgttttggctttcccaccttcatctccagcccaaagagatgcccagccaaggcgaatctctgaatcataaccagctttaaatttgaaatctttaccataggtgcgcttgtagacagcactccaatagttggaatcgcaattgtaccagtaacttaatttgtcggaaggaccaaaccgacgcttaaatgcaaatgacagggcatttgaaggaagtgaaagtattggaagaaatgagatttcatcgtccttatagccatatcttaatttcagttcttcgtccttgtaatgggcagagcagagcccattaaacaattgtcctttaagaaccccatcgactgacaacaaattattgacttcctcctcttgtttctcctgcagcgaaagttcacccagaggaaatctgaaggtagcttttggcaatccaacggatggaagtggagtagatagttgaagtgaataggcaggatcggcgaggtttgcaagcacggtaacctctccttgttgagccttgagatcatgagaagcagtgagttgcaaactgggagcaagatcgatggaggtcttaacgagagcattatggtcttcgaggtcgtagtggaggctaaggtgcttggagacaaagctgaattgaggttcggagatgtcgccgcccttaccgctgtggttgaacgaaaacttgaacttggcaaggctgtccaacaacttgcaggaaatcttatggaagaagactgcgctttcactatcgaactcggatgtaactctgagggcgggcctccgaggaaatgacaagatggaaggtcgcttgtagtccaccgccgggtaattagggttttcagctgccgattccatttccaccatccaatcttcccttagtcttgtcagcttgcttcactttatctagtcccacccagcagatccgttcccctccactcctccttcctcaacattttctcttctcctgttcggggcggggactttcgttgctgcaat

SEQ ID NO: 33 - DNA, 1409 bp, Glycine max
  misc_feature (232)..(232): n is a, c, g, or t
  misc_feature (268)..(268): n is a, c, g, or t
  misc_feature (357)..(357): n is a, c, g, or t
  misc_feature (365)..(365): n is a, c, g, or t
ttaacggccccaaaagcccttttatttcccttttttggccccttaaagggggggggggggcccccttaaacaattttcctttaagaaccccttggtgggcaacaaataatagggctcccccccctgtttcccggcagggaaatttccccccagggaaaattaaaggtagctttggccatcccacggaggaaaagggggtaaataattaaatgaataagccggatcgcggggnttgcaagcacgtaacctttccttggtgacgctgggntcccgggaaaccagtgagtgccaactggagccaagatcgattgagggtctaccgagagcattatgtcttcgaggtcgtagtggaggctnaagtgctnggagacaaagctgaatgagggttcggagatgtcgccgccctaccgctgtgggttgaacgaaaacttgaactttggcaaggctgtccaacaacttgcaggaaatcttatggaagaagactgcgctttcactatcgaactcggatgtaactctgagggcgggcctccgaggaaatgacaagatggaaggtcgcttgtagtccaccgccgggtaattagggttttcagctgccgattccccatttccacccatcccaatcttcccgctgccttggccgcccggatgttcccacctcacattccaaaccgacgtcaatggcagcctcatcctccttctccaccctcttctccttcctcctccctccaaagccacaccctcctcccatcatcactcgcttcccactccagaagctacgtgccaagcatcaggaccaggaccaccactcgtcggcggagctgtccgccgtggcgaacccgtcccacgcgcatgcgaacacgctcttcttccggtcggcgtacaacgtgcaggtggtggtggacgagaacgagccggaggagaggctcctcaaccggttccggagagaggtcatgagagccggagtcattcaggagtgcaagcggagacggttcttcgagaacaagcaggaggaaaagaagcgcaagaaccgcgaagctgccaagcgtaagagcagaagcaggcgctctcaatcgagatttcaaccacaaaacaagccggatgttgcagcaaccaagaaggaagaggatgatgataactgggatcttccagaagtagacgctccatatatttcaaccgcatgatccactcacattctgtacggttcttcacttgggagaggctttttatgcatgtgagttctgttatgtaaaatcaattccttggacgcagttagtgcaatgttcaattcacatttcattttaagttatgctatttattcattgtccatctaaattttgttctgcccttgattttctaaaaaaaagaaaaaaaaaaaaaaaataaaaaaaaaaaaaaaaaaaagaaaaaaa

SEQ ID NO: 34 - DNA, 1267 bp, Glycine max
tcagctactaggccccccccgagaagaaacgagagcgagagagagaaagaaatggcgaccaacattgggatcatggatgcggcttacttcgtcggcagatctgagattctttcttggatcaactcaactctgcaactcaatctctccaaagtcgaagaggcttgttccggcgccctcccgtcccacggctgcgagaagacgacagaagggatcgtgcctatgcacaaggtcaatttcgacgccaagagcgagtacgagatgattcagaactacaaggtccttcaagatgtcttcaacaaactcaaaatcaccaagcacatcgaggtcagcaagctggtgaaaggaaggccactggataacctcgagttcatgcaatggatgaaacgatactgcgattctgtcgattccggccttcagtacaattataatcctctggagaggagagaggtttgcaaaggaggaagagaaacgagcaagaaatctgcaaactcccaagcctcaaccaagggttctactgcacagagacctcattcttctcataatgctcgaagaaatgaggtttctaatgcaaaccctacaaatcaagctgcaaaggttgcgagagcagcaccttctgccggaaaccctgcctatgaagaaaagataacagagttgaagttgtcgattgatagccttgagaaggaacgggatttctactttgcaaagctgagagatattgagatactgtgccagactcctgagatagaacactcaccgattgttgctgcgatacagaagatattatatgctacagatgacaatggaacggctgtggctgaagctcaagctatgatttctgttggtcgtaaggaaatagagggattgagccccattgctgaggtttcggaggagaagagcagttcagaaactcacaagagaaagaatattgccaatattgattttgatgttgccgggcttgcaacgttgtctcccagacagaggctttctgatgtttcagatgttcattgtagcgagtcacctcttatgacttgttagggatcacgttctgttgttaattcaattagcaacttgttagaactgtttttggtcacagtaattcctgtttcatgtgtgaattgaccgcgatattcataatgattaggggtttttagggagactattctgttataaagtatcagtatcagcccagaaaaatgtaaccagatatgttttgctctaaaaaaaaggcaaaaaagaactataggtagcggccgctctacaggatcca

SEQ ID NO: 35 - DNA, 912 bp, Glycine max
cccacgcgtccgcccacgcgtccgtacggctgcgagaagacgacagaaggggaatgaataaaaccaacttgtctactcgtaaatcgtaatctcctaagctataacaacgtcctctctctctctccctccctctctctctctctcatggcaacttgtttcgctccgttctccgtttcaggtggatctcatgagctgtggttaacaaagcgagttggacctaagctcactgttcaaaggagatcaaaccttgtgatcaagaggaaccacacttcttcaattagtgcagaataccgtgataatagaggaggtggaggtggggattttgttgctggctttcttctgggtggtgcagtttttggaactctagcttatatctttgctccccagatcagaagatctctgctaaacgaagatgagtatgggtttcgcaaggccaaaagaccaatatattacgatgaagggttagagaggaccaggcagaccttgaatgagaagataggccaactaaactctgccattgataatgtatcttcccgtttgagaggtggcaacaacgtacctgctgcaaagatagaaagtgatcctgaggtggaagcaaccatgtgagacgcattcagtttgatactgtggtcgatgatgttttaaattggtggaaatataatgaattgaaaatgaaatctcttcttttttttgacggtttgaaggataaaatcttgctgggactaatgtagtttttctaaagactggactaaatagttaaagctgtcaaatttttaccttcccccccatcccccctttaataatggatgatttttgtttctgtgcatgaagcaatttgtaaaaaaaaaaaaaaataatcaaaaaaaaaaaacaatacaataaaaaaaaaaaataaaaccactaaattaaaaa

SEQ ID NO: 36 - DNA, 785 bp, Glycine max
ccccccctccggcggcgcccgggacatttcacctggatctaaaaacaatctctcgttctccctcaccagtcaccacgcaacaccccgtcattcccttcacctcgccaaccgtggttctcagcagcatcgccatccgttctcccccctcagcacgtcatgaatccacaaatccgaaccttggttgccatcgtcgtttgtcgttgcaggttcacacgcaggagacgaggctctcgttgtgggttcccgtgataactgtcactggttagcgtgaacatccatggtttctcgtacgggcgctctctgtccgcttcttcactggcggctccgtgcccctccgcatcttctgctctcatatcctttcttgtttccttgaacttattcactgcttagtcagaaactcatgtcttccggcgaagacaacatggcggcgatagagtggaagtgatagcaacagagatcagaacatacctgaggcccaagctatggatgaagacagacccgagacccacgatggaaggcccaagagaagtaccaagccacctgcgtatctggacaattacgcataacagttattggggaagaattaagggagttatttacaactgtttttccatttcagaattctgttagaaaagctgctaggaacccgttattgcaatcatgctttgtaaattttattacacagaatcaccccacgaaatgtatttaaataagattgcaatgaattaaatggtaagaagaattccagcaaaaaaaaaaaaaaaaaaaacggaaaaaaaaaaaaa

SEQ ID NO: 37 - DNA, 1924 bp, Glycine max
tcgtacggctgcgagaagaagacagaagggggggtgaagcttgtctagcaagtcgcattgaaaattgtaagctgcactgcagagagtgagagcgaatggtaagagtatcagcggttcgattaagcgccaccatgttctcctcaacctctctcagaaaccctaacttcctcctccttccaactcgcttcgacgcacccgttcttcgctcccacacgctttccttctccaatcgcctctcgcttcgatgctacgctgctcgcgccgccttcgacagagttcccgttctcaatcccatcgtcgaaatggacggtgatgaaatgacgaggattatatggaggatgatcaaggataaacttatatttccttacctggatttgaacataaagtactttgatttggggcttcaaaatcgtgatgctactgatgacagagttactgtggaaagtgctgaagccactctcaagtataacgtcgctgtgaaatgtgcaacaataactcctgatgagacccgagtgaaagaatttggactgaagtctatgtggagaagccccaatggcacaattaggaatattttaaatggtactgttttccgtgaacccataatatgctgcaacataccgagaattgtttccggatggaaaaaacccatttgtattggtaggcatgcttttggtgaccagtatcgggccactgatgcaataattacaggaccagggaagcttaagttggtatttgtcccagaagatggtgatgctccaatggagcttgatgtttacaatttcaaaggcccaggtgtagcacttgctatgtataatgttgatgagtctattcgagcatttgctgaatcatcaatgtcacttgcatttgcaaagaaatggccactttacttgagcaccaaaaacacaattctaaagaaatatgatggcagatttaaggacatattccaggacgtgtatcgagtcggctcgaggcaaaagtttgaagaacactcaatatggtatgagcataggctaattgatgacatggtagcatatgcactcaaaagtgaaggtggatatgtttgggcttgcaagaattatgatggtgatgtccaaagtgatttacttgctcaaggttttggctcattgggtctcatgacttctgtgctgttatcttctgatggcaagacattagaagctgaggcagctcatggaactgtaactcgacattttcggtttcatcagaagggacaagaaactagtacaaacagtattgcttccatatttgcatggacacgaggactggaacatagagcgaagctggataataatgaaaaattacgggattttactcaaaatttggaggctgcatgtgttgagacagtggaatcaggaaagatgactaaagatcttgcaattctgattcatggacctaaggtatcaagggaattttacttgaacacggaggaatttattgatgctgtggcacataatcttcagaaaaagctccgagagcctgcagtggtctagacattatttttgcaggggggaagaggaacataagttggaaaagctaaaaagtggtttgatgggtgcttaattttttggcctgagatgctgcttttggttggaatcatgggaccctaggatctgaggaaaattttaattggtggttgggtggataattgattcttggatttttggccactgactgtcccattcttacacacaccaccattacagttatttaaaacggtaaaaatccgtcagtacggaccagcagaattaggaaagtacaaaattttgatgtgaataatgcagatgatggatcatgtttttattgtaatttgattggtttatatatatatatatatatccatcccaacctcaagttactctaaaatcatgtttacttaagattaattctataaattcacgttgatttc

SEQ ID NO: 38 - DNA, 1359 bp, Glycine max
gttctttatgacggtcggaatgtcaattgatccaaaacttcttctttcaaactttccagtcattacagggaccttgggactcttgatatttggcaagactttgttggttactttaattggcagagtttttggtatttctctcatttctgccatcagagtgggtcttcttcttgctccagggggagaatttgcatttgtggcttttggtgaagctgttaatcagggcataatgtcttcccaaatgtcctctttactgtttcttgtcgtgggaatttcaatggccctcactccatggctagctgaaggaggtcagctccttgcttcccgttttgagctgcatgatgttcgaagtttattgcctgtggaaagtgagacagatgatctgcaaaatcacatcataatttgtggatttgggcgagttgggcagatcattgcacaacttctttctgagcaacttattccctttgttgcactagacgtgagaagtgatagagtggcaattgggcgttccctagatctccctgtgtactttggagatgctggtagtcgagaggtcctacacaaggttggggctgaaagggcaagtgctgctgcggtaactctagattcccctggagcaaattatagaacagtttgggctctgagcaagcacttcccaaacgtgaagacttttgtccgtgctcatgatgttgatcatggattgaatttagaaaaggctggagctaccgctgttgtcccagagaccttggaaccaagtcttcaactagcagctgccgtgcttgctcaggctaaacttcctacatcagagattgcagcgactataaatgaattcagatcccgccatctttctgagctcactgaactatccgaaacaaatggaacttcttttggatatggatataatagaactacgagcaaagccaaatctcattccccagattcatcagatgatactcaagtctctgaaggtaaactggcgacatgaagattgccccatatatacaaagtggaaggtaaaagaaaacagaaaagtgaaaaattgtatagcagcagagtaaatgttccatcatgatgtacagaaatatatatatctgcataaaaaaatttgattaatcatccttaaatttcagctgaggatggtgtccttgttttatgtaacattgattttgtttcatattctttggatttcgaaaagcgtgtataatatgaagtcatatttccattttttttatcaagagtatgacatccctgaacaagtagtgcaactctagggcggccggctcccgttctcgtgcgtagttttagtagttattatcactcacattgaatcacatgtcgtatcctaatatcatttatcga

SEQ ID NO: 39 - DNA, 986 bp, Glycine max
aaaaaaaaattccctcaaaatgagtagtttaggcaagtaagtctcagcgtgagtcgagggtttaccaagtaagccgcagcgtgagtcgagggtgttcaccacagtttacactcacgagagtacccattttctcttctcaatttctcaagtgtgccgagaaaatcatggtggacgcagcagaacgtagatacttggaggatgatgattcatctctcatgaaaactatcaagggcgcaacaactggtttagtggctggaactatctggggtactgtagttgccacctggtatgatgtcccccgtgtcgagagaaatgttgctcttccagggctgattaggactatcaggatgatgggcaactatggtttgacctttgctgccataggaggagtctacataggtgtagagcagttggtgcagaactataggatgaagagggatttagtcaatggagctgttggcggatttgttgcaggtgcaactattctgggttacagaggaaggagcatcaaaactgcactttctgctggatcagcattggcattcacatctgcattccttgatttcggtgatcagacattaaaacatgatgctgggaaggagtatgcggcttacaccacaaagaaaagacccagtactgatgcataattgttaatgtatgcacttttaagatcgaagacatttcaagttgataggaaagagtggatcactcttttgttgacccagttgtttgttttgagttggaattacatactcggctatctttccatatttttcttttgttaagttgctggtgctgaactggttaaattccaataaatgtgctattgtgggttaatctatattacataagttctccataaccgtatattactcaatagttgatgttcttccttggatggagtgaatgaaatttgtaagattttgttatattattattctattggacgtcatttgtcttaaaaaaggccaggccggggggtgggt

SEQ ID NO: 40 - DNA, 2252 bp, Glycine max
tacgctgcgagaagacgacagaagggggcacacaactcgagccgttcgtgtgtgtttgaagtggaagaaagagaacgcataacacagaacacagtgcagacagcaagtgatgacgtcgaaacagacatacagcgtgtgcttctgctggcggcggcggttcaagctggcgctggcggaggcgccgtcggaaatcaagaccctattcaatgagtactccgagaatgagctcatgacaccttcgcatcttaagagattcctggtcgatgtgcagaggcaagagaaggccactgaagaagacgcgcaagccatcatcgatagcttcaggcatttccatcgcagaggcgctggcctcaatctcgaaactttcttcaagtacctcttcagtgacgataatcctcctcttcttccttctcatggggtgcaccatgatatgactttacccttgtcacattatttcatatatactggccataattcctatttaactgggaatcagctgagcagcgactgcagtgacgtccccatcataaatgcactgaagaaaggtgtgcgggtgattgaattagacatatggcctaatgcatcaaaggatagtatagatgttcttcatggaaggacattgactactcctgtagagcttatcagatgtttgaggtctattaaggatcatgcctttgtggcatcagaatatccagttgtaataaccctagaagaccaccttacaccagatcttcaggctaaagtggctgagatggttacccaaacatttggagacatactatttactcctaactcagaaagtgtgaaggaattcccttctcctgaatcacttaagaagagaattattatatcaaccaaaccacctaaggagtaccttgaggcaaaagaaaaggaaaaaggggatgattcacagcacgaaaaggagaaaggggatgattcagagcatggaaaggcatcaggtgaagatgaagcttgggggaaggaagtcccaagcttgaaaggtggtactatagaggattacaaggacaacaacgtggatgaagatcttaatgatgaggaagaatttgatgaatcagacaagtcacatcataatgaagctccagaatatagacacctaattgccattcatgctgggaagcctaaaggtggattagtggaatgcctcaaagtggatcctgaaaaagtgagacgtctaagtttaagtgagcaacagcttgaaaaggctgctataaattatggacaacaaattgtcaggtttactcagcggaatatactgagggtgtatccaaaaggtactcgcattgactcatcaaattataacccattaattgggtggatgcatggagctcagatggttgcatttaatatgcaggggtatgggagatctctttggttgatgcatggaatgttcagagccaatggagggtgcggttatgttaaaaaaccaaattttctattggagactggtccagatgacgaggtcttcaatcctaaagctaagttacctgtgaagactactttgaaggtgactgtatatatgggggaaggatggtactatgatttcaagcatacacactttgatcaatattcacctccagacttctacacaagagtggggattgctggagtccctaatgatactataatgaagagaactaaggcaatagaggataattggttacctacatggaatgaggcatttgagttccctctcactgttccggagttggccttgcttcgcgtagaagttcacgagtatgacatgtctgagaaagatgactttggtggacaaacatgcctacctatctgggagcttagaagtggcattcgagcaattccactgcatagccaaaagggagataaatacaacactgtaaagcttctcatgcgctttgagtttattaataattgattctgtgcaatgtgcatccttctgctccccattattattattattattatgtacagtcattaagatgtgttagtagcaagagtttgtatgtagtagctggatgatatcgtgaattatgtgccccgttaaatgatgtaagaaacaaaatgtgttgtgtattttgttttcttgaggagacttgttggtcttgtaaggcttgtcaatatatactacttatatatatatatatatataaacataaggaaattgttcgtgttttgtatgagaatactttttaagtcatctgtactcaaatgttggttttgatcaaaaaaaaaaaaaaaactcagactagttctcc

SEQ ID NO: 41 - DNA, 2278 bp, Glycine max
cccacgcgtcctgttgttttgttttgttttgttttgttaaacacttagactccacaacctctctctcctgttccacttccgaattcggcacgagccacattccaacacaacaacaacgttaaagcagaaacacacgcacatattcgtgttcgaagtgaaacccaaagagaacacagagcagagagcaggagcgaagcatgacttcgaagcagacatacagcgtgtgcttctgctggcgacggcggttcaagctggcgctggcggaggcgccgtcggagatcaagaccctcttcgaggagtactccgagaatgagttcatgacaccttcgcatctcaaaaggtttctcgtggaagtgcaaaggcaagagaaggccaccgaagaagacgcgcaagccatcatcgacagcttcaggcatttccctcgcagaggcgctggcctcaatctcgaaactttcttcaagtacctcttcagtgacgataacccccctcttcttccttctcatggggtgcatcatgatatgactttacccttgtcacattatttcatatatacaggccataattcctatttaactgggaatcagctgagcagcgactgcagtgacgtccccatcataaatgcactgaagagaggtgtgcgggtgattgaattggacatatggcctaatgcatcaaaggataacatagatgttcttcatggaaggacattgactactcctgtagagctcataagatgtttgaggtctattaaggatcatgcctttgtggcatcagaatatccagttgtaataaccctagaagaccaccttacgccagatctccaggctaaagtggctgagatggttactgaaacatttggagacttactatttactcctaactcagaaagtgtgaaggaattcccttctcctgaatcacttaaaaagagaattattatatcaaccaaaccacctaaggagtaccttgaggcaaaagaaaaggaaaaaggggatgattcacagcacgaaaaggagaaaggggatgattcacagcatggaaaggcattaggcgaagatgaagcttgggggaaggaagtcccaagcttgaaaggtggtactatagaggattacaaggactacaatgtggatgaagatcttaatgatgaggaagaatttgatgaatcagacaagtcacatcataatgaagctccagaatatagacgtctaattgcaattcatgctgggaagcctaaaggtggattagcagaatgcctcaaagtggatcctgataaagtgagacgtctaagtttaagtgagcaacagcttgaaaaggctgccataaatcatggacaacaaattgtcaggtttactcagcggaatatactaagggtgtatccaaaaggtactcgcattgactcatcaaattataacccattaattgggtggatgcatggagctcagatggttgcatttaacatgcaggggtatgggagatctctttggttgatgcatggaatgttcagagccaatggagggtgtggttatgttaaaaaaccaaattttctattggagactggtccagatgacgaggtcttcaatcctaaagctaagttacctgtgaagactactttgaaggtgactgtatatatgggggaaggatggtactatgatttcaagcatacacactttgatcaatattcacctccagacttctacacaagagtggggattgctggagtccctaatgatactataatgaagagaactaaggcaatagaggataactggttacctacatggaatgaggtattcgagttccctctcactgttccggagttggcgttgcttcgcatagaagttcatgagtatgacatgtctgagaaagatgactttggtggacaagcatgcctacctatctgggagcttagaagtggcattcgagcaattccactgcatagccaaaagggggataaatacaacactgtaaagcttctcatgcgctttgaatttattaataattgattctgtgcagtgcatgtgcatccttctgctctacattatcattattattattatgtacagtcattaagatgtgttagtagtaagagtttgtttgtagtagctggatgatatcgtaaaatgatgtaagaaataaaatgtgttgtgtattttgttttcttgaggagacttgtttgtcttgtaaggcttgtcaatataaacacaaggaaattattcgtgttttgtatgagatactttttaagtcatctgtactcatatcttggttttgatctttaaaaaaa

SEQ ID NO: 42 - DNA, 905 bp, Glycine max
  misc_feature (71)..(71): n is a, c, g, or t
  misc_feature (138)..(138): n is a, c, g, or t
  misc_feature (143)..(143): n is a, c, g, or t
gcaaagaaatttttcatttttgtgatccatgttcatgataaagataaccaactatttatccctatgtttcntggatacttcaatgtagtaaaatatcagaacttgtgaaaaaggggcttggtcattgttgacttttancactnttctaggagggctttgcagcttttctaaccaatcactttctacagaacatattttttttttttaaggaactaaaacactaccataattcttttattgcatataaggtcacaacatagcaagcatacacactaacacacatgggatatgatataaggtcataattacctacctactcatttgcagaaactgaagagaaagcctgattctagtcatctgcaaattgagtgttatggacaacacaagttggtatgtagcttctcaaaggaagaacatctttgtttattaatacattctaccgaaacaaagaagaagaactacaatagaatcaatacatacatagccataaggaccctttaatgagagagagtccattgcctttttgtgacttgccggtttgctaagatgtggccatagcttctctgcttcatgccactcagagaattatgttcctccatgtatacccttttgtggtgattgattagagaaaccaatggctaaagcataagcaaactgtaggaggtggagtgtgaagggtgagaaccctctcacacaaaatcctccaagcttctttaagagccatggatggatttttgccaacaaagctccatgcttataccaaatagatagatagattggttttgaacgattttcaaagggctctatagaaggctagtgggggcgaacttagccgcccccccgccctctaaatagctgatgattgagaaactcagaagtggtatgatctattcattatacaaaat

SEQ ID NO: 43 - DNA, 1999 bp, Glycine max
atctatcaacctgtttcaatttaaatattttttcattcatttttattttaataaaataactttattttctatttttttttcaaattttttgtttacacttctgaccaaacacaatgttaagaattgcaaagaaatatccatgaactataattacaaacttcctagggtattatttacacgccccataggccataaatggctttatttgaattttatcttcccatatcttacagtttaaatactcactcaagaatctgttcactcccagacattcacaacaataaataacttgaataaaaagaacatatacgaacgaagttgtcgagcaggcagagacgagaattcacaatttcacaccatctggacccaaataccgtggcttggaacttcttgatggaccacaaacagcagatagaaacccggtggcgcaagaacagcggaagccggcgcggtaacttcaacctcgtgcgttgattctccaaccccactcaaatggtgcggcttcagcaccaacagcctctgattcatggagaacgagtgcgtgttaaatggcggcgccagcatggtaacagacaccgaatccccaaccaaagtcgcgctcaccttaaaccgaagcctcaacgtctgaccgtacttgagttttgtttgggacgcaggagatactattgcgggacgcacgttagagaatccgggctcaagataccaaggagaaaacgcttctaaccgcagttccgttggaaacaacactttggtgaaattgtaatacgtgtgagggttgctcccagcgagaagaactcgcccatcgcgaagcaaaacggcaccggagtggtacatcctcggaatatgagacgggttctggacctcaaatctcatcccgacccgcttgttgggtttataaagaaacgggtttaacaccgggttacggcccaattcccagcccgcagtccccacagctgctccattaacaatcaaaacgtcgccgttggggagtaaaaccatgtcactcataactctcgcacccggcatggtttccatcacccaattcgctttcgggtcggttattttaatccgagcgcaagttctcaacgctccaacaaacttacccgagagagtattccgaaaagcccctctcggggctccaccacaaatcagaacctcagcctccacattaggttctcgaagaggaagcaaaactgcggaaccggtgctaggataacaccgtggatctccaccgggtatttgagggtaggttctcacgacactgttcttattgtaatcgaacaagatagcgcggttgttggcaaagataaaaaggttgccatcgacgtttagaaaaacaaacgggtagagattgttttcagcgttagcgtcgttggtttgagcaagaaaaggtaaactgtaagtattcttggcttgtgtcttggggtaaaactcgtagttgaattgtcttcttcctccgataattatttgacgtccatctggcaagatgtgattggtggcgtaccatctctgcgccgcgagtccatgctgaacttctgcccagtcgcacgagcggcacggggtgaaggttctgaccgcacggtagccgtcgttgaagccaccggtttggactaatgttccgtcgggagagaccgaaccggaggagcaccagacattggtttggacaaagagagcgcggaatgtgttggctgcgacgtcgtattcgatggagtgcgcggtgcagtcgcgtttgacgaccaactcgtttgggttgttgcggcatcttccgtcggggagggttaggttggagagtccgaagtcggtgcggtcgaagatgatgacgcggtcgttgtggagaagctgcatgtgcatggcgacaatgccgatgtttttgtggaggagctgccactgtcccttggcttccgccgcgtgaaagaggagaataaggagcaggaggagtgtcatgggtgtggtgtgggagaacagtcaaagaagggtgagataaggtaagccgctcgag

SEQ ID NO: 44 - DNA, 2052 bp, Glycine max
  misc_feature (2049)..(2049): n is a, c, g, or t
ccgctaaccaaacccaatgttaagaattgcaaagaaatagtatcataaacaataattacaaactccctagggcattatttacatgccccgccagaaatcactttatttaaatttgatcttcccatatcttacagttaataaatgctcacctacatcggttcactccctgaataaaaagaacaaaataaaacatataggaaggaagttgaagagctcctttgttattttatagatactttgcctttcataaaaaaaataaaaatggaatgaagttgaagagtaggcagcgaggaaaattgacagtttcacaccatctggacccaaataccctggcttggaatttcttgatgaaccagaaacagcagatagaaacccggtggcgcaagaacagcggaaaccggcgcggtaacttcaacctcgtacgtcgattccccaaccttactcaaatcgtgtggctccagcaccagcatcctctgattcatggagaacgagtgcgtgttaaatggcggcgacagcatcgtaaccgacaccgaatccccaaccaaagtcgcgctcatcacctcaaaccgaagcctcaacgtctgaccgtacttgagttttgtttgggacgcaggaaacactattgtgggacgcacgctagagaatccaggctcaagataccaaggagaaaacgcttccaaccgtaactccgttgggaacaaaacattcgtaaatttgtaataaatgtgagggttgctcccagcaaccagaacgcgaccgtcacgaagcaaaacggcactggagtggtacattctcggaatatcagacgatgtttgaacctcaaatctcgacccgacccgattatttggtttataaagaaacggactcagtagcgggttacggcccaattcccagcccgcagtccctacggctgctccattaacaatcaaaacgtcgccgttcgggagtaaaaccatgtcactcatgactctagcaccgggcattgtttccatatcccatttcgggttcgggtcggttattttaatccgagcgcacgtttccaacgctggaacaaacttacccgataaagcattctggtaagctcctctcggggctccaccacagattaaaacctcagcctccactttaggtgctcgaagattcttcaaaggaagcaaaaccgcggaaccggtgctaggataacaccgtggatctccacctggtatttgagggtacgttctcaccacactgttcttattgtaatcgaataagatagcgcggttgtttgagaagataaaaaggttgccatccacgtttagaaaaacaaacgggtagaggttgttttcagcgttagcgtcgttggtttgaaccagaaaaggtaagctgtaagtgttcttagcttgtgtcttggggtaaaactcgtagttgaattgtcttcttccgccgataattatttgtcgcccatctggcaagatgtgattggtggcgtaccatctccgtgccgcgagtccatcgtcaatttctttccagtcgcaggtgcggcacggggtgaaggttctgacggcgcggtcgccgtcgttgaatccgccggtctgaactagtgttccgtcgggagaggctgaagcggaggagcaccagacgttagtttggacgaagagggcgcggaatgtgttggctaccacgtcgtattcgacagagtgtgcggtgcagtcggttttgacgaccatttcgtttgggttgttgcggcaccttccgtcggggagggttaggttggagagtccaaagtcggtgcggtcgaagatgatgacgcggtcgttgtggaggagctgcatgtgcatggcgacaatgccgatgtttttgtggaggagctgccactgtcccttggcggcggcttccgccgcgtgaaagtggaggataggaataataataataataattaggaggaggaagagtggtgaagaggtcgacattggtgtggtttgggaataacttagtgtgggcattaccctggggtggagaacagtcaaagagaggtgagataaggtgcagtgcaatatggggtcgcctcgngcc

SEQ ID NO: 45 - DNA, 2009 bp, Glycine max
ccacgcgtccgcagacacacggcgccgtcttgttaggttacctctgtgacatttgtgctgctagttcatatatttgcggctgacaccgagaaggaaagcaggaaaaaaacaaaaaggagcagatgggtagctcaggtttctcatggaaattggcggatcatccaaagcttccaaagggtaagactgtggctgttgtggtattggatggttggggagaggccacacccaatgagtacaactgcatccacaaggctgaaacaccctgcatggattcacttaaaaagggtgctcctgaacggtggagattggtcagggctcatggtactgctgtaggacttccaacagaagatgacatgggcaatagtgaagttggtcacaatgcccttggggctggtcgcatatttgctcagggtgctaagcttgtcgaccttgctctagcctctggaaaaatttttgaaggagaaggtttcaagtacataaaggaatgttttgaaaatggcacattgcatctcattgggctactgagtgatggtggagttcactccagacttgatcagttgcagttgttgcttaaaggagttagtgagcgaggtgttaaaagagtccgtgtccatattcttacagatggccgtgatgttttggatggctcaagtgtggggtttgtggaaacccttgaaaatgatcttgcaaacttgcgcgcaaaaggtgtcgatgctaggatagcatcaggtggaggtcgtatgaatgtcacaatggatcgttatgagaatgattggagtgttgtgaaacgagggtgggatgctcaagttcttggtgaagccccttataagtttacaaatgctcttgaagctgtcaagaagctgagggcagaaccaaaggccaatgaccaatatttgcctccttttgttattgttgacgagagtgggaaacctgttggtccgatagttgatggtgatgctgttgttacattcaacttccgagctgatcgtatgacaatgattgctaaagctcttgagtatgaaaattttgacaaatttgatagagttcgttacccaaaaatccgctatgctggaatgcttgaatatgatggtgaattgaaacttccaagtcattaccttgtttctccaccagagattgacaggacttctggtgaatatttagtgtataatggtattcggacttttgcttgcagtgagactgttaaatttggccacgtcacattcttctggaatggaaaccgctctgggtattttaatgcagaattggaggaatatgtggaaattcctagtgattctgggattacattcaatgaacaaccattaatgaaagcattgcagattgctgaaaaggctagggatgctattcttagcgggaaatttgatcaggtacgcgtcaaccttccaaatggtgacatggtggggcatacaggtgacattgaagcaacagttgtggcatgcaaggcagctgatgctgctgtgaagatgattcttgatgcaatagagcaagtgggtggaatttatgttgtcacagctgaccacgggaatgctgaggatatggtcaagagggataaatctggaaaaccacttctaggcaaggatggaaaaatccagattcttacttcccatactcttgagcctgtgccaattgctattggaggtcctggattggcccctggtgtcagattccgcaacaatgttccaactggtggacttgccaacgttgctgcaactgtgatgaatcttcatggatttgaggctcccagcgactacgagacaactctgatagaagtagttgataactaggaaccaatagatgattttttttttttaatttgcaaaaactcagggtaagcattgcagcccacaaaataattgaaagttttcatccttccacatgtgtggtggttttgttcttatgagttaccaaatttcagtctggagttgacagaacagtataaccaattaatggcattttgacactttctcctataaatttctttcattgtgctg

SEQ ID NO: 46 - DNA, 1412 bp, Glycine max
ggctcgagcgtagcgcaacaaaagcgcacacacagcgacattaacttccacgagaaagttgggttgtagcgtagcacaccgaaccaaaaatggatgtcgccgtcgccggaaactccacaccctataaccgtttgcaagaactaaaggccttcgacgaatccaaagctggagttaaaggcctggtcgactccggcatcaccaaactcccaaaaattttcgtccggccgccggaggacctcgccgccgccgacccagtatccgacaaccctgccggtgcccagttcacgatccccgtaattgacctcgacggccttaccggcgagcgctccggcgtggtggctggagtccggcgggcggcggagacaatggggttcttccaggtggtgaatcacggaattccgctgaaggtgctggaggagacgatggcggcggtccatgagttccacgagctgccacaagagttgaaggctgagtattatagcagggagcagatgaagaaggtgaagtatgggagcaactttgatttgtatcagtcaaagtatgctaattggagggacactcttttctgtgtgatgggtcctgaccctcttgatcctcaagaactgcctccgatctgtagggatgtagcaatggaatactctaggcaagttcagttgttggggagagttttatttgggttactatcagaagcacttggactcgaccctgaccatcttgaaggcatggattgtgcaaagggccactcaattttgtttcactattatccatcatgtcctgagcctgaactcactatgggcactaccaggcactctgatcctgatttcctcacaattctgcttcaagatcacattggagggctccaagttttgggcccttatggatgggttgatgttccccctgttcctggagctctagtagtaaacattggagatctgctacagctaatatccaatgacaaattcaaaagtgtggagcaccgtgtgcttgcaaaccgcatagggcctagagtatcagtggcatgttttttcactcttcatctctacccaacaacaagaatatatgggcccatcaaggaactattgtcagaagaaaaacccccggtttacagggaaacatcactgaaagatttcattgcttactatgataataagggacttgatgggaattcagctcttgaccattttatgatatcgcgttaaatatggaagtgtaagtctgattattcattggctttcacaatcagttattaagttgtcttaaattgcaatgatcatgcttcttatgagcaacatcaaccggttacagacataattttgaatgtaaatttgtgcacactttgacatacaaagtatcttctaaatgagaaatccaatccagctcaaactttcggctccagaaaaaaaaaaaaaaaa

SEQ ID NO: 47 - DNA, 1793 bp, Glycine max
tcagctacgtaggccccccccccccccgttttgtgagtctcgattccaaatctcttcctctttagtctttataccgaaatggaatgcgttgaatcacgattcattaccttctcgactgttgctaggttatgttaactgttaccttttattcttcgtttacttcacactgcgcgttacttcatcaccaatcgtgccacacttagaactccggggtcaattcggatatgtcttctgatagtgcaaaggaaaatgcatcagtagttgattcatcagtcactgaagggaggaatgacattggaaattcagatgatccagagagctcaggttacaagtttaatgaaaacattaatacaactagggcagataaagggggacattctcatggtcagatagggcatcctacaggaattggagtggaaaaatggcacaatataaaatactttatcattaagagtttgaaccatcaaaacatccatttgtcaattgagaaaggaatttgggctactcaaatcatgaatgaaccgattctagaagaagcttttcataattcaggcagtgtaatccttatatttagtgtcaacatgagtggttccttccaagggtatgcacaaatgatgtcctccattggaagggggagagacaatgtttggagtgagggaactggtaaaagtaatccttggggtcgcagttttaaggtcaaatggatgtgtttgaatgatttgcctttccacaagacactgcatctcaagaatccgttgaatgactataagcctgtcaaaattagcagagattgccaggagttatctccagacattggtctagctctttgtgaacttcttgatggtaagaattatacagattgcctgccgaccagtttatcaagggatgaattttctttgaaagggctttatgcgaatactccaagttcaatgggagatgaagactgtaactttcctccactgcatacatcgtggtcaatgcccttgccttattctgccttgttttaccaaaatcaaccagaagtaaataactatcattcaacaaaccagagaatcagtgggacaatgttcactgaaatattgccaaccacttctgagtcatcacaagtgtcagggattaaacgttctaaggatgtggcttctcaatctgatttttggggtctatcttctgaaagccctttagctagtaccctaactgaggatgattttcttgacatgtcctatgaagaatacctggaggtccatagcagatgcaagaaacagcaactaaaccatcttggaaacaactggaattgttgagaagtaattcccatgatgatgataggaatacagaagatggggttgatagagacaggagcaactctcatgggaggatacatcagtcatctttgccatggatataactgctcctccaatatgtgaacatgttaacttttcgtcagctaaactttgcacttgccttgtggtgtcatcatctgcaaggaggcccttttcctgttttcgtatagcaaagacgcaagtggaagttaattgtaattgtctaaaatcagtacttgatattgaacctcatattaatgcgattcaattgcagttaatttgaggcttgtttaccaattgtacaaaatttagatttagattggggttagattgaccaaaacatacttgtggtgtgtatataatatgccccctatccctatgctaaactagcatttttcccctctggaaaattgtcggcaaagatgctgatattggtaatgagagtaagaatttcaaatgaaaaaaaaaaaaaaaaaa

SEQ ID NO: 48 - DNA, 823 bp, Glycine max
  misc_feature (802)..(802): n is a, c, g, or t
  misc_feature (807)..(807): n is a, c, g, or t
  misc_feature (813)..(813): n is a, c, g, or t
  misc_feature (817)..(817): n is a, c, g, or t
taaaaatcgcgtcagctacgtagccccccccaggtaagcaagcggagatctgatggcgctagagtgggttgtgctagggtacgtcgcggccgcagaggccataatggttattctcctcaccatcccgggcctggaagctctccgaaagggtctgatcgcggtgacccggaaccttctgaagccgttcctctcggtggtgcctttctgcctgttccttttcatggacatatattggaagtacgaaaccaggcctagctgtgagggagattcctgcaccccttccgagcaccttcgccaccagaaatctatcatgaagagccaacgcaacgccctcctcatcgccgccgcactcctcttctactggctcctctactccgtcaccaacctcgtcgtcaggatcgaccacttgaaccagcgtctcgaacgcttgaagaatcgcgattgagatttcacccttgcagataagtcggttaatcaatccctcggatataaacttggtgttttctttcttgtgctaggaaggatctatttctatctcctttttttgtcttttcttttctttctttctaaatcgatgtttgagtgatgacgattattgagtctttttttagtattattactcttgctataactatgctacttgaatttccgccacctagggttccttttggggattttcttattgttgcgctcagggatccaattccgtgcacctcgtcgctcccttgtatcataggaaaacacgatttcgattattgttgagtgttatctgaaagaattattaaggggttggaaaaaaaangaaanaaaaanaaanaaggat

SEQ ID NO: 49 - DNA, 865 bp, Glycine max
tgcgaagcggtgggatataaaaggcttgtgcggaggaagaaaagtaaaagagatctgatggcgctagagtgggttgtgctagggtacgccgcggccgcagaggccataatggtcattctcctgaccatcccggggctggacgctctccgaaagggtctggtcgctgtgacccggaacctgctgaagccgttcctctcggttgttcccttctgtctgttccttctcatggacatatattggaagtacgagactcgtccaagttgtgaggcagattcctgcaccccgtcggagcaccttcgccaccagaaatccatcatgaagagccagcgcaacgccctcctcatcgccgccgctctcctcttctactggctcctctactccgtcaccaacctcgtcgtcaggatcgacaacttgaaccagcgtctccaacgcttcaagaatcgcgattgagataattcggttattccatccatccttccctccgatatacacctccactttctgtcttcttctttgtcttaggaaccatctatttctatcaccttttttgttgtgtctacctcgtcgttctcttatatcatagcaaaacaccgtttcgattattgttgagtgctactttgattttgcgcattgttatgatttgttgttattgctgtttattgacgtgagaatgcccgtattggaagtctgttctgttacttgaaatttgacatggttgtaagagaattatcaaaatttcaacctcaatttgttgattgtcaacaacttcagcaaaaaaaaaaaaaaaagcattgaatccggttatttagttataaggagttcgagcatcttgctatcaatttctcttttcaagttcatagagctg

SEQ ID NO: 50 - DNA, 1268 bp, Glycine max
  misc_feature (4)..(4): n is a, c, g, or t
aganatatttgaaatgatggttaaagagtattgatataacaaggcgtggttgcttagagctaaaaccctttctttcagactagagagtgagaggtgggaaatggcgtacctgaacgctaggcgcaccttagcatctaccctgtcacgagctctttcttcttcatccgctagcgcctctcgctttcgcttcgcattcgcattcgcgttgctccccgccaaacaaaccgcacccaaccctcactgggcgagtttcgcggttcggactcaatcttcgggttcgggttactcgcccctgaacgacccgtccccgaactggagcaaccgtcccccgaaggagaccattcttctcgatggctgcgactacgagcactggctcatcgtcatggagttccccgataaccctaaaccctctgaggaccacatggtcaacgcctatgtcaaaaccctagctcaagtccttggaagtgaggaggatgccaaaaacaagatatactctgtttccacttctacatacacaggtttcggcgctctcatttccgaagagctttcttataaggtcaaagagttacctggagttctttgggtgctgccagattcatatcttgatgttcccaacaaggattatggtggtgatttatttgttgacgggaaagtaattcccaggccacagtatagatattcggataggcaacccagtaggagtagacctcggccacggcatgacagacggcgggaaacgatgcaggttgaaaggagagatcaacagaactggaaccaaggtcaggggggacctatgcagccatccactgcaatgaatggccaaaactttgcttccggtggagagcactaagaaatgcttaataggaactctgctttagaaatcatcacatatagaaaacagaaccatgtttttcttatgggggagtgatgatttaaggttctgaggtcatattttacttatgtcttttttgtgtggagaatggctgtgcctgaccatgaaggactttgataaataatatacgctcataaagttaatattttacttttgagaagttgtgtatgctctgctgatgggaatgaatttcgtttcagtcttttccctacatgttttaatatgtgatgtgtaatttggatcactggctgttaaagttgatagactttaaacaaactttgtttttgcatctgaacctgttctcaatgtcaatgccctgtgttatgtttaaagtgtatcataaaaccttaaatttcaaggtaatctcgttcctttt

SEQ ID NO: 51 - DNA, 1380 bp, Glycine max
  misc_feature (1323)..(1323): n is a, c, g, or t
  misc_feature (1327)..(1327): n is a, c, g, or t
  misc_feature (1361)..(1361): n is a, c, g, or t
tcagctacgtaggcccccccccccccccatcgagctaaaacaaaaagaagaggggagcgaagaaaagagaagagaagaagaagatggaggtgagtttatcctcaacatcatgtatacccttaagctcgaagttgaagcataagcatggccttttccactctcaaattcccattcacacagcttcaaccaaaaccagaagaaccaaacctttgtccgttgttaacgcctccagacaaaccttgtcttccaattggctcgtttctccacacgatttttctgcatccaccgcttccccatggcttcccagattcgaagagctcgacgccaccaacatgcttctccgtcaaagaattatctttttgggttctcaggtggatgatatgactgcagattttatcattagtcagcttttgtttttggatgctgaagactccaagaaggatatcaagttatttataaactcacctggtggttctgtaactgctggaatgggaatttatgatgccatgaagttatgcaaggccgatgtgtcaactgtttgccttgggcttgctgcatccatgggtgcatttatccttgcttctggtacaaaaggcaagaggtattgtatgccaaattcaagagttatgattcatcaaccacttggaacggctggtggaaaagctacagaaatgagcattcgcataagagaaatggcatatcacaagattaagataaacaagatactatcacgaattacagggaaacctgaagagcagattgaattggacactgatcgtgataattttatgaatccttgggaagccaaggaatatggtttagttgatggtgttattgatgatggaaaaccaggattggttgcaccaattggagattcatcaccaccaccaaaaactcgggtatgggatctatggaaaattgaaggaagccggaaagccaagaaaaatttgccctcagagcacaagtttttgcagaatgcatccaaaggaagtgatggtgataagggcactggacaagaaggggaaacacccgttgctgtataagttaggggagaatgattgtactgcttctatactcaatagatctgtttattttaatttgttaatcacctcatcctgaagataaaaagggtttttctcacttagacacagaagatcatattctacgtagcatccatactgtatattaattatcttaaatttctttatatgcttcaagtgttagatgcaaacttaatgaatatgtttacgtgtttaattggcctgctttggaatgaaacttctgatagtgcttagaaagcaaaaaaaaaaaaaaaaaaaaacncganggggggccggtacccaattcccctatatgagtcnttttacaatccctggccgc

SEQ ID NO: 52 - DNA, 1305 bp, Glycine max
gcgtccgacaaaaagaagaggggggcgaagagaagaagatggaggttagtttatcctcaacatcatgtatacccttaagctcgaaccggaagcccgggccggccctcgcccccgctcaaattcccattcccacagcttcaaccaaaaccagaagaacaaaacctttgtccatagttaacgcctccagacaaaccttgtcctccaactggctcgtttctccacacgatttttctgcatccaccgcttccccatggcttcccagattcgaagagctcgacgccaccaacatgcttctccgtcaaagaattatttttttgggttctcaggtggatgatatgactgcagattttatcattagtcagcttttgtttttggatgctgaagactccaagaaagacattaagttatttataaattcacctggtggttctgtaactgctggaatgggaatttacgatgccatgaagttgtgcaaggcagatgtgtcaactgtttgccttgggcttgctgcatccatgggtgcatttattcttgcttctggtacaaaaggcaagaggtattgtatgccgaattcaagagttatgatccatcagccacttggaactgctggtggaaaagctacagaaatgagcattcgaataagagaaatggcatatcacaagattaagataaacaagatactatcaagaattacagggaaacctgaagagcagattgaattggacactgatcgtgataattttatgaatccttgggaagctaaggaatatggtttagttgatggtgttattgatgatggaaaaccaggattggttgcaccaattggagatgcatctccgccaccaaaaactcgggtatgggatcagtggaaaattgaaggaagccggaaagcgaagaaaaatttaccctcagagcacaagtttttgcagaatgcatccaaaggaagccagggaagtgatggtgataagggcactgtacaagaaggcgaaacacccgttgctgtataagttagggggacaataattgtattgcttctatactcaatagatctgttgattttaatttgttaatcacctcatccaaaagataaaaagggtttttctcacttagacatagaggctcatattctacgtaacatccatactgtatattaattatcttaaatttctttatatgcttcgagtgttggatgccttaatgaatatgttttctcatgggggttggttggtttacgtgtttaattggcatgccttggaatgaaacttctgatagtgcttggaaagtaatctgtttgtttactttagt

SEQ ID NO: 53 - DNA, 1291 bp, Glycine max
aaaaatcagctggcatttgcccaaatttctaacacgccattctcctccttttcaatcctctgttcatccgtcgatcggctcggctggaccatccttgccgccgtttgccgcggcatctccggccactctctctcatcgccattcagtgtattttggtttagttgcaaagttttagagttggattggaagattgtgaactaagaaagatggtgaagttgactatgattgcccgtgttactgatggtcttccgctagctgaaggactggatgatggtcgtgatcttaaagatgcagaattttacaaacaacaagtcaaggctttgtttaagaatctctcaagaggacattatgaagcatcaaggatgtcagttgaaactggcccttatgtttttcattatattatagaaggacgtgtctgttacttgacaatgtgtgatcgtgcataccctaagaaactagcctttcaatatcttgaagagctgaggaatgagtttgagcgtgttaatgggtctcaaattgaaactgctgctagaccttatgccttcattaagtttgaagacaaagaaactttaccaggatacacatactcagcgcaatattgcaaaattgaatgatgaactctatgaagttcaccagataatgactcggaatgtgcaggaagttcttggtgttggtgaacagttggaccaggtcagccaaatgtccagtcgcttatcatcagaatctcgcatatatgctgataaggctagagatttaaatcggcaggctttgattcggaagtgggcccctgttgctattgtttttggagttgtcttcgtacttttctggatcaaaaataaactatggtgatcgagctcagtatgacatttaaaacatggattgcgatgctgtggcttcttgcttttctcgcatgattgtccagatttgcacagattggtgagaaccctttatgcataagatgatgccgaccttttcttgacaactttggtttagaaaaaacaaaaaagactatcctttgttacatctggatcagtctttctggaacagaaacctttgacctttatagtaaggagccaggatatgagaaaactttatccccgtggggatgcatataggcatttcttctttataattctcaattattttcaggattattgcgttaatgaattacaaaaaaaaaatcttggttcttattgtttccgtttgagccgctgaatgagtataatgatagtgagtagtgtggaatacttgttctaaaacggggaaagtctatttcatttcatttttttac

SEQ ID NO: 54 - DNA, 1333 bp, Glycine max
tacggctgcgagaagacgacagaagggggtagtgatgttattatctgttctaaaaatttctgaagtgtttgtcctgtgtcccccttcactttctttcgaggttgcatttactttccctttcgacttcgaaacgatccaaaatactacaaagcaaagcaaccagctaaaaagcaatcacgcccgaaaacgaaagcatctccctctcccctaagcaaacaactgcccttaaccctcaaaaacaagccacccaaacccatccacttcaaccccccccccctcaaaatcacctccctctctcaccggcattgattctccatggacgaatcagagcaatacccaaaggagtattaccctaacgaccaaaccctccccagaagagtctcctcatcctcgtcctcttccacgacgagcgtccacgtgacagccctagacggcctggtgaacgtgaactccctcttcacgatcgccgtcttcgtgggtctctccctcaccaccccgggccagcgcagcctcgagaaccgctcctcctgcgacgccgacgttgacgtagccaagaagctcctcgtcttcgaagtggtgtcgtttagcttcttcctcttctcgtcgctggtagcgcaggggctgaagctggcgctgaatctgctcaacagcaaggacgccgacgaggccttccgggcccacatcaacctcagggccctaaggcttggcatgctgggctccgccattggctccgtcatgggctgcctcttcctcgttctctccatggtcaacgtcatcgagatccgattgggaatgctgtcgtgcgggagcaaggccgccgcgcacgctgtggccgcgatggtcgtgttggtctcctccgctctcgtgctttatatttccactgctatctatgcttttactcactgaaactattataaaaatggaggaagaagataaatttgttgtttgtgtttttatgtggaatggttcttgtttcattgatggttttgtgattgcttgaatcggtgtttgttggagcgagcaagtggatactggagaggaaataatttagtgctttctctctcgtttggtttcgtttcataaaaagaaagaaagaaagatagaaacatttgcggaagattgtatatttttttcttgctttggtgttttgttattggtgttggtagggatttttctaacaagtagaaatcgaaggcaaattctaggaatttacaacaacttatgcacctgctcaacaaacagctaagctagaccccctgttgctagggatggggtgaaatgagattttgtaggagagaattctgaagtatttgggttttagttaattgcttcg

SEQ ID NO: 55 - DNA, 1332 bp, Glycine max
  misc_feature (9)..(9): n is a, c, g, or t
ccacgcgtncgtacggctgcgagaagacgacagaagggggtctataaagtaagtttcattttatcctttgaagtgtgtgagagagtgaaaacatggccactatcaagccaactggaaagaaggcatgtgtgattggagggagtggatttatggcctctttgttgatcaagcagttgcttgaaaagggttatgctgtcaataccacagttagagacccagataatactaaaaaaatacctcaccttttggcactgcaaagtttgggcgaattgaacatatttggagcagatttaactggtgaaaaagattttgatgctcctatagcaggctgtgaacttgtcttccagcttgctacacctgtgaactttgcttctgaagatcctgagaatgacatgatcaagcctgcaatcacaggcgtcttgaatgtgttaaaagcatgtgtgcgagcaaaaggagtcaaacgagtcatcttgacatcttcagcagctgctgtgaccataaaccaactcaagggaactgatctggttatggatgaaagcaactggactgatgttgagtacttgagcactgcaaagccacccacttggggttatcctgcctccaaagcactagcagagaaggcagcatggaaatttgctgaagaaaatcacattgatctcatcactgtgatacctactctcacaactggtccttctgtcactacagacatcccatcaagtgttggcatggcagcgtccctcataacaggcaatgatttcctcataaacgctctgaaaggtatgcagttgctatcaggttcaatatccatcactcatgtggaggatatttgccgagcacaaatatttgtggcggagaaagaatcggcttctggtcgatacatttgctgtgctcacaatactagtgttcctgagcttgcaaagtttctcagcaaacgataccctcaatataaaattccaactgaattcgatgattgtccctcaaaggcaaagttaataatctcttccgaaaagcttgtcaaagaaggattcagtttcaagtatggaattgaagaaatttatgatcagactctggagtacttaaagagcaaaggggctctgaataactgaattttgaaaattctaatgctctagcaaactctccacttgttatgtagtagcatcttgcgaataattaatcaaggggaatagcaaccatctctgttaatccactactttattaccacctccttaaattactgattatgatattccccactttgttaaaaagagagctcagtcgctttattaagtttggatttgattatgcttgttgttcaaaaaaaaaaaaaaaaaa

SEQ ID NO: 56 - DNA, 892 bp, Glycine max
aatttatataatcagcgatgtaggccccccccccagcagacggtaagggtccggtgtggcgaatgattactatttgagctcttccctctcacaaactcagaaaacaagtccaatgagcaatttccagagaatatcacacgaatcccaccctcccccagggtacggatctccttaccctccaccccaaccgggttacccatccgcaccgcctcatgaagggtaccctccgccgccgccgccgcctcacggatacggtgggtaccctccgccgcagccgccgcagcgtccgccgtacgactcctatcagggttacttcgataacgggcatccaccgccgcctccgccgccgcactaccactaccagcacgtggatcaccatcaccaccatgaggagcctgggtgcttttcgttcctccgaggctgcatcgcagcgctttgctgttgttgtgtgctagaggagtgttgcttctgataatcacatcgtaaaagttgtttcttcagtttgctgcacttggttatggctctatagagaaatgtggctacaattctagataataagtgagaggtggtaagtcttggtcattcttgtaactctttggtctttcccctctaccctaaatcctggtctgtgcatagcttctgtgatgtggtctatatcatatatgaattactttgtacgaacactatattggaaagtgtaaaccgtttcttataaggtgtaacagacaatgatatggttaaaattgtttcatattactcgtcttcagtaaaaaaaaaaaaaaaaaagaaaaaaaaaaaaaaaaaaaaaaaaaaaaaaaaaaaaaaaaaaaaaaaaaaaaaaaaaaaaaaaaaaaaaaaaaaaaaaaaaaaaaaaaaaaaaaaaaaaaaaaaa

SEQ ID NO: 57 - DNA, 1991 bp, Glycine max
  misc_feature (693)..(693): n is a, c, g, or t
cttttcaggtggtgaatttcagagatttcacattcactggcgaagaaggggtttcttctgttcatataactcaacacacacacacccgtgtctctttcttccttcttcaacagtgttgttctgatgcgtgtttttttctcattttttttatcattcccttatttttattttccccaaaaaaaccaaacctgcaatttccgaacccgaaaatcaccgtctttcgaatcacacaaccatatacccctttttcgtccctcttcacgcgcgagacctttcgaatcgtggtggaagcctcagattttgacccttcaatcgctgaatcgaagtacgttcagcggtgggctcgttcgggagtggttgaacgcgttggtgagatgagaagaagaacttgcatgttttgggcttgcaaagagttgttataagaaggagttgttgcagcagagcttcttcttcttcttcttaatggcaccgaagcgcgtttatgaagcatggaaaggaagtaataaattcctatttggaggaaggttgatatttggaccggatgctaggtcactgcttgtcaccttgttgctgatcattgttccagttattgtcttttgtgtatttgtagcaaggcatcttcggcatgaattttcttcatataatgcaggatatgctattttggtggtggcagttctctttaatatttatgtngttgattcttctctttcttacttcctctcgtgatccgggcgttatcccaaggaatttacatccaccagaggaagagttccgttatgactcttcagtttctgttgaaattgggggacgccaaactccgagccttcagttccctcgaacaaaagaagtaatggtaaatggccattctgtgaaggtgaaatattgtgacacttgtatgctctatcgtcctcctcgttgttcacattgctccatttgcaacaattgtgttgaacgttttgatcaccattgcccttgggtgggccaatgtattgggctgaggaactaccgttacttctttctgtttgtttcttcggcaactattctatgtatctatgtgttttccatctcagctttttacatcaaggttctgatggatcattataaggggacagtttggaaggcaatgaaagaatcccctgcatctgttatattaatggcatattgtttcatctctttgtggtttgtcggtggactaactggctttcatttgtaccttattggcacaaatcagactacctatgagaacttccgctacagagccgataacaggatcaatgtttacaatctgggttgttttaacaatttcctagaagtattttgtacaaaagtgaagccctcaaggaacaatttccgagcttttgttcaagaggaggtaccgaggccaccccctccggtcatttcccgggaacccgaaccagatctgggtggtggagatccacgttctaaagttgaagacgatctagatatcggtgaagacctgttaaagatatcacagcgtcggaatattgaagaaattgacgaggacatccggagcagaggaagcaatggacctccccataatacttctgaagtagattcagttttgggttcagatcgccgggccccaacaattcgatctgaagcaaggcactcaagtgagggaagaagtgaaagctgggaaatcgggtctgaggtccttgccaattcaactgtaactgaaagcagaagctatgttgtatcaaaggaggtgcgccaaaaacttgggggttctttctgagatgtggggtttcttagatattaaaaatggaaaaggaaatggtgtttgatcagattataggaatgggaattgaattgattgaggcattaagtacaaaacttatttgatctttttttgtggtaaggttagctcttttggaaagaatagaaatgtgtgtaattttcgagataaagcaatagtgtcttttttttctcctgtcaattttttttcctacaatatggcattcataaataag

SEQ ID NO: 58 - DNA, 2004 bp, Glycine max
aggctggtagattccaaccatgggcaacagttgtgcatatgggtatgatgatgtgggcaaagatgggtggtcaggtaataattccatgccatcatcagatcctaatatgctaagcttttcaacaaagccacttgatggacagtacacaaatgcatcttctcaagaggaggttggttatggtaaaaaaattgctcttaatgttgctgacagtaacaaagcagcctctgttaaaagtgattattctcagctacgtaggcccccccccccccgatggcaccatcatggtttgagcggtatggaacttttaaaaatggtaagatgttgccaatgtataatgtacagaagatgactgctgctaagattatggaccagccattcattttaccaaaccaatcagatagtttgtgctttcataattcagtagagcaaattcagagtgtcagtgatgctcagctaagtaacgctagcgaaagtccaatgtctgcctctgctgcaagtaagcatgtagaccctcagttattgacacctgctgttgaacctggcttacttgttacgagaccgaagaagcgaaaaagtgccacatctgaactcataccatggcataaagaactgttacagggttctgaaaggcttcgagatatcagtgtggcagaattagactgggctcgaagtgcaaacagactgatcgagaaggttgaagacagtgtggaggtagttgaagatttgtcagcagtggtgaagtcgaaaagaagacttgtcttgactacacagcttatgcagcaactacttagccctcctccagctgcagttcttgtagcagatgtgaagttgcatcatgagagtgtggtctactcagttgcaagattagcattaggagaagcatgcagttcaatctcatggtccagatgtgatacactttttcctcctggcaacaagaacctgctgcctgagaagtgtaaatcatccgacaaaattgatcattacattttgaaagttacggacttcgttggtagagcaaggaaattggaagatgatatattgagattaaatagtaaagcctcaattttggacttgagagtggaatgtcaggatttggaaagatattctgtcatcaaccgatttgccaagttccatggaaggggacaaaatgatggggcagaggcctcatcatcttctggtgcaaatactaatgctcaaaaatcgttccccctaaaatatgttactgcagttccattgcctaggaatctccctgacagggtacaatgtttttcactttgataattaattaattcatttttccatcttttttgatcaattgactccacaacctccagtttctggtccttttttttcaactattattgcgtttcatcgccatagaaccatacaactggcaatgtaggagaagaatggtactagattgcctctccaatcaccggaggatgtagatctttgcaatctatatatgtatgtatgtgtagatcttttcaatctagttatcttttacttttgattttcaggttccaagccatttgtatatagcaaaaattatatatgcagtctattaaggtttaatcataccatttggcttggttttgtctaattaagcatagattccttcactaatcattttgtctcaatatcaaatcattttctgtatgctttcctgtgtagtccttcccattgcaaaacccctttggcaggggatgttatgaagcaatgccatcagcaagtgtaagggcctctaaaatagtggacttggtttacttatggcatttagctagtattgattgatagtggactatattatatacaccaatttgtagtttacataaatctccatgtattactaattattgtgtcttccgtagtgttggatacaaattggtgttaaattattaagcttagttgatgtcgtcgtacagaaaattgtcttgtggacatctagtcattggatatatcaatcaaaaccattactgatactaaaaaaaaaaaaaaaaaaaa

SEQ ID NO: 59 - DNA, 1221 bp, Glycine max
caggactgggcctgccttgctgtgatctacacctagaatattaggagaatccaaatcaacaattagatcggtatttcagcagcttccgggcgcgtagcgggaaatcgtcctttatcagagttacgaactgctgatgaagctgctgcagtggcaggagttgcttcagaggctactggccaagctactgagggagaagttcatcctgatggtgcagagcgttctcctaaatctgtaagtgctggcttaacagaagcagaagagttggagaagtatatcgccattagagaagagatgtataagaaagctaaagagttcgattctaagatcattggttttgaaacagctatcaggaggccctactttcatgtacggcccctcaatgttggagagcttgagaattggcataactatttggactttatagaaagggagggtgacttgagcaagattgtcaagttgtatgagagatgtgtcattgcatgtgccaattatcctgagtattggatacgctatgttttgtgtatggaagccagtggaagcatggatcttgcaaataatgttcttgctcgggcaacccaagtctttgttaagagacaaccagagatacatattttttgtgctcggttcaaggagcagactggagatatagatggtgctagagctgcatatcaacttgtgcatactgaaacttctcctggtcttcttgaagcaattatcaaacatgccaatatggaataccgactggaaaaaatggaggatgccttctctttgtatgaacaggccattgccattgagaaagggaaagaacattcacaaacattgccgatgttgtttgctcaatattctcgatttgtatatttggcttctgggaatgcagagaaggcaaggcagattctagttgaggggcttgagaatgttttgttgtcaaagccactacttgaggctatattgcattttgaggctattcaacccttgccaaagcgcgttgatattgactttctggagtcatgggttgtcaaattcataatgcctaactcagagagtcctggtgtagcaagtgcaacagagcgtgaggaactttctagtatctttctggagttgttaaatctctgcggtgatgttaaatctatcaagagggctgtagatacgtatgccccattgtatgtgccacgcacgaggctgtctcacttggaaagacgtcatgctgaggatgtcttatct

SEQ ID NO: 60 - DNA, 1262 bp, Glycine max
  misc_feature (22)..(22): n is a, c, g, or t
tcgagtcagctacgtaggcccnccccccgaaacttctcctggtcttcttgtccctatgctcggtcttcccctcgtggaataccgactgggaaaaatggaagatgccttctctttgtatgaacatgccattgctattgagaaaggaaaagaacattcacaaacattgccgatgttgtttgctcaatattctcgatttgtatatttggcttctgggaatgcagagaaggcaaggcagattctagttgaggggcttgagaatgttttgttgtcaaagccactacttgaggctttattgcattttgaggctattcaacctttgccaaagcgtgttggtgtcgactttttggagtcatgggttgtcaaattcataatgcctaactcagagagtgctggtgtagctagtccaacagagcgtgaggaactttctagtatttttctggagtttttaaatctctttggtgatgttcaatctatcaagagagctgaagataggcatgccaaattgtttttgcctcacagaagcatgtcagagttgaaaaaacgtcatgctgaggatttcttagtttcggacaaaacaaaagtgccaagatcgtattctgctcagtcacctgcgcaatctgcgatgggtgcatatccaaatgcgcagaaccagtggactaattatggagttcaacctcaaacttggcctccagttactcaagctcaagggcaacaatggactgctggctacacccagcaggcttcctacggggcttatgctggatatgggagcaactatgtaaattcgcaattgcctacatcagttccacaaagtactgcatacggagcctatcctcctgcatatcctgcacagccggcggttcctcaacaaaactatgcacaacctgttgcagcagcagcccctgcacagcaaccttctgcggttcctcaagcctattacgggagttattattgagctgacctgacaaaatgagatggccactgttttcgcttcctgtaatttttttccttgatattataggtaatttgatgatattagggaatctggagcataggtgtagtgtaaactttcaagttatactactgaagatagaaaatcattttgactaattcgcaattgtattttagctattttgatgtacattttttctgtaattttcttttcaccggttaatgcatgcctgttttttaatgtggaactaagtaaatatgggtttctcaaaaaaaaaaaaaaaaaaaaaaaaaaaaaaaaaaaaaaaaaa

SEQ ID NO: 61 - DNA, 1373 bp, Glycine max
tcgagtcagctacgtaggccccccccagtttgtgtatggaagccagtggaagcatggatcttgcaaataatgttcttgctcgggcaacccaagtcttgttcagcgacgtccgcccccccccattttttgtgctcggttcaaggagcagactggagatatagatggtgctagagctgcatatcaacttgtgcatactgaaacttctcctggtcttcttgaagcaattatcaaacatgccaatatggaataccgactggaaaaaatggaggatgccttctctttgtatgaacaggccattgccattgagaaagggaaagaacattcacaaacattgccgatgttgtttgctcaatattctcgatttgtatatttggcttctgggaatgcagagaaggcaaggcagattctagttgaggggcttgagaatgttttgttgtcaaagccactacttgaggctatattgcattttgaggctattcaacccttgccaaagcgcgttgatattgactttctggagtcatgggttgtcaaattcataatgcctaactcagagagtcctggtgtagcaagtgcaacagagcgtgaggaactttctagtatttttctggagtttttaaatctctttggtgatgttcaatctatcaagagggctgaagataggcatgccaaattgtttttgccacacagaagcatgtcagagttgaaaaaacgtcatgctgaggatttcttagcttcagacaaaacaaaagcgccgagatcttattctgctcaatcacctgcccaatctgggatgggtgcatatccaaatgcacagaaccagtggtctaattatggagttcaacctcaaacttggcctccagttacacaagcacaagggcaacaatggactgctggctacacccaacaggcttcctacggggcttatgctggatatgggggcaactatgcgaattctcaattgcctacatcagttccacaaagtactgcatacggagcctatcctcctgcatatcctgcacagccggcggttcctcaacaaaactatgcacaacctgtggctgcagcccctgcacagcaacctgctgcggttcctcaagcttattacgggagttattattgagctgacaaaatgagatggccactgttttcccttcctgtaatgtttttttttttccttcatattataggtaatttgatgatattagggaatctggagtataggtgtagtgtaaactttcaagttatactactgaagatagaaaatcattttgactaattcgcaattgtattttagctattttgatgtacaaaaaaaataaagacttgctctctccctctctctctctctctctctctctctctctctctctctc

SEQ ID NO: 62 - DNA, 2468 bp, Glycine max
gtctaattatcttcggctaaactttgattgggttgtgaatattaaatatctagccgaaacttgttttaaggagaagctactgagagagctgttatatgaggttcgaagctttggctatgccatgaaaattttgaattgtacaatatgggtagcaacaggactattgtttggtttagaagggaccttagaattgaggacaatcctgcattaactgctgctgcaaaggagggttctgtactccctgtgtatgtatggtgccctaaagaggaaggacagttttatcctggaagagtgtcaaggtggtggctgaagcagtctcttgctcacttggatcaatcactgaagtctcttggatccagacttgtgctcatcaaaacccacagtactgtcacggctctcgtggagtgcgtaaaggccattcaagcaacaacagtagtgtttaaccatctgtatgatccggtttcacctgtccgtgatcacaacatccaagaaaaactagtggaacaaggcatatcagtccaaagctacaatggagatctgttgtatgagccatgggaagtatatagcgagagtggacgtgcctttactacctttaatgccttttggaagaaatgcttgcacatgcaaatggatattgtttcagttgttcctccatggcaattaattccagctgaaggaaaagttgaggaatgtccactggaggagcttggtcttgaaaatgaatcagaaaaaccaagcaatgcattactaggacgggcatggtcgccgggttggagaaatgctgacaaggctttaacagaattcgtggagcagcatctactagactactccaagaaaaggctgaaggttggtggagactccacctcactcttgtccccatatcttcattttggagaattgagtgtgaggaaagtttttcaagtgacacgtatgaagcaaatattatggacaaatgaaggcaacagtgctggtgaagagagtgtaaatcttttcctcagggccattggacttagggagtactcacgctatctttgtttcaactttcctttcacccatgagaaagcacttctgggacacttaaagttttttccttggaatcctgatgctgatatctttaagaattggagacaaggtaggactggctttcctttggttgatgcaggaatgagagaactttgggcaactggctggattcacaacagaataagagtaatagtttccagttttgctgtgaaaatgttgcttctaccctggaaatggggaatgaaatatttctgggacacacttcttgatgctgaccttgaaagtgatatcttgggttggcagtatatctcaggaggcttaccagatggccatgagcttgagcgcttgcacaatccggaggtttgtcatgttttccttcattcaaaggatttacagtttgcttggtatcactcagatgtgattattttatattccctagtttaattaatttaaatttctgtacatttttttaagtttatttaatcatcatatcgtgtataacatatcactacctgttatactatttgattttactgcagcaaaaaattcttgtttccttaccattcctctctcctcatgtgccattttttgagatctaaggagtttgattatgctaaacgtaatagtaacactgcataaaactagaagatattaattttgtgtagtgaagcaaaaactgacacaatctgagttaccttgatgccagttggaaaataagagacttactttttcatattttcttcaattcattttatacctggtgaaatttatctgttcatatttcttttaccagttttaaaaggaataattctccaacaaccaaagtatatctcgtttctgtctaacatggataatttgaagttctgtttcatgtattagtgtagggcatgccaatatatttgtgttttgatattttacttgcccacgcgtccgattgaatatccatggttctcttagttcttttatccattaaaaaactctagattaatatttctaagaagaactatagtagttgaaagatatcttttgcaaatatgcatatttaactgaggttgttataacttgttccttccctcaaaaaaaaaaaaaaaagaaagaaaaagaacctattagcctccttcattggatatattacatctataaggagtaaattctaccggttcagagaatagaaaaataatcaaaataaaagtcagcagtctcacatctctaattttggtgacagattcaaggggttaaatttgatccagaaggtgaatatgtgagacaatggctacctgagttggcaagaatgccaactgagtggatccatcatccttgggatgcaccgcttactgttcttagagcagcaggagttgagctgggtcaaaattatccaaagccaataattgatatagatttggccagagaaagactcactgaagctatattcaagatgtgggagt

SEQ ID NO: 63 - DNA, 762 bp, Glycine max
agcaaaagctgcaggctctcagccacgggggcccccccccctagacaactctaactctcttgaaaatttggacactcgaaaagttgtcgttctgggaaaggctccatgttctactatttcagctaatgatcaaaaggtgccagcacttcaggattccaagaatgaaccgcctacgcggaagaggccaaaacatatggtagaggaggggcagaaccaggataactctcaaaatcataacaaagatactggcatgtcaagcattgaccaagacatttgctccacagctgattcttcatcatgtaagaagcagtgtgccagtacaagctcatattcattttcagttccacagcagtgctcctcatcttctaatctgaagtggccatggcaagatcagactgacatggagcagagttcaagcaaagatggagctatgtgaggttaatgttgttcttgttgataaaaccagtagcagctacattactcacggaaagaaaatggtgccatatttaaatactgcagtttgtttagcccatgctatcaatcagttgtgtaataggttatgaaatccaacaggaagaacacggattaaaacaatagtgaacattgtatattatgaacttgtgctgatgggctggtccatacacattctgacaagcccgtaattacaaactatataaaccaaatactctacacaatgtattactctgatatcacttgcattttatccttattactcgagctttttttgctgctcaattactc

SEQ ID NO: 64 - DNA, 2380 bp, Glycine max
gtctaattatcttcggctaaactttgatagggttgtgaatattaaatatctagccgaaacttgttttaaggagaagctactgagagagctgttatatgaggttcgaagctttggctatgccatgaaaattttgaattgtacaatatgggtagcaacaggactatcggctgcgttggccccccccccccaattgaggacaatcctgcattaactgctgctgcaaaggagggttctgtactccctgtgtatgtatggtgccctaaagaggaaggacaattttatcctggaagagtgtcaaggtggtggctgaagcagtctcttgctcacttggatcaatcactgaagtctcttggatccagacttgtgctcatcaaaacccacagtactgctgtggctctcgtggaatgcgtaaaggccattcaagcaaccaaagtagtgtttaaccatctgtatgatccagtttcacttgtccgtgatcacaacatcaaagaaaagctagtggaacaaggcatatctgttcaaagctacaatggagatctgttgtatgagccatgggaagtaaatagtgagagtggacgtgcttttactaccttcaatgctttttggaagaaatgcttgcacatgcaaatggatattgtttcagttgttcctccatggcaattaattccagctgaaggaaaaattgaggaatgttcattggaggaacttggtcttgaaaatgaatcagaaaaaccaagtaatgcattgctaggacgggcatggtcaccgggttggagaaatgctgacaaggctttaagagaatttgtggagcttcatctacttcactactccaagaaaaggctgaaggttggtggagagtccacctcactcttgtccccatatcttcattttggagaattaagtgcaaggaaagtttttcaagtgacttgtatgaagcaaatattatggacaaatgaaggaaacagtgctggtgaagagagtgcaaatcttttcctcagggccattggacttagggagtactcacgctatctttgtttcaactttcctttcacccatgagaaagcacttctgggacacttaaagttttttccttggaatcctgatgctgatatctttaagaattggagacaaggtaggactggctttcctttggttgatgcaggaatgagagaactttgggcaactggctggattcacaacagaataagagtaatagtttccagttttgctgtgaaaatgttgcttctaccctggaaatggggaatgaaatatttctgggacacacttcttgatgctgaccttgaaagtgatatcttgggttggcagtatatctcaggaggcttaccagatggccatgagcttgagcgcttggacaatcctgagattcaaggggctaaatttgatccagaaggtgaatatgtgaggcaatggctacctgagttggcaagaatgccaactgagtggatccatcatccttgggatgcaccacttactgtgcttcgagcagcaggagttgagctgggccagaattacccaaagccaatcattgatatagatttggccagagaaagactcactgaagctatattcaagatgtgggaatctgaagcagcagcaaaagctgctggctctgaaccaagggatgaagttgttgtagacaactctcacactgttgaaaatttggacactcaaaaagttgtcgtcctgggaaaggctccatgtgctactatttcagctaatgatcaaaaggtgcctgctcttcaggattccaagaatgaaccgcctacgcggaagaggccaaagcacatgatagaggaggggcagaaccaggatcactctcaaaatcataacaaagatactggcttgtcaagcattgaccaagacatttgctccacagctgattcttcatcatgtaagaagcagtgtgccagtacaagctcatattcattttcagttccacagcagtgttcctcatcttctaatctgaagtggccatggcaagagaagattgatatggagcagagttcaagcaaagatggagctatgtgaggttgatgttgttcttgttgacaaaaccagtagcagctgcattgttcatggaaggaaaatggtgccatatttaagttttgcagtttgtttatagcctatgctatcaatcagttgtgtaataggttatgaaatcctgcaagaggaacacggattacaacaatagtgagcattgtatattatgaacttgtgctgatgggctgttccatacacattctgacaatcccgtaattacaaaccatataaccaaatactctacacattatattactctaaaatggcttgcattttatccttcttaaaaaaaaaaaaaaaaaaaaaaaaaaaaaaaaaa

SEQ ID NO: 65 - DNA, 1446 bp, Glycine max
tcagctacgtaggccccccccccaaaacttcagattgaagctaaagctgatacaaaaaataaagaatcagggaaaaaaggcgtaaaaaaattgaacttgctttcatttggggaagaagctgaagaagaggaaaaggaattggcatcggtgaagcaaaagattaagagcagtcacgatgtcttgaacgatcctcgtcttctaaaggaagatactcttaataatgaactgagttcatcaagaagagatatgcaattatctgtaagggatgcacttaactcaaagaaagacgagcctcagaaagattcagatgctggtagcacggcatgtcttgatttcagtgatgatgatgaagcagattttgatgcaagaatgcgcatgcaaatactcaaaaagaggaaggagttgggtgatctccctcccaagccaaagttgcgaaatgcaggaaggtccagtccagagaaccatgatacgtcgtctgcagccaggtccaatgctgtaagtgttgatgaggatcaaccaaaggtggaaaaattgtccttgaagaaaaagggagttggatctgaagcaagagctgaacgaatgtctaatgcagatgcagatttgcaactattgaatcaagctgagagaggaagacaattgcagaagcagaagaaacgcagacttcaagggcgtgaagatgaagttctggctaaacttgaaaaatttaagaattctttatcagcaaaggcgacacccccaactgatgaatctgaagacgttagtaatgaggaattgtcagactggaaaggtgttagtttaaagtttgccccacagactggcaaggaccgcatgtctcgcaatgaagacccaaacgactatgttgtgcatgaccctcttctggagaaggggaaagagaagttcaataggatgatagccaaacaaaagagacgagaacgagagtgggctgggagttcccttacttgaccttacatgtgccaacatggctgtgtaaatatacaaagctgattggttttcaaggctagcacatcactgtgctgctgggaaagtaaacttgccctaataggaacccaggagaaaaatgttgcatggaggagtttagcaaacatggttggcaagtacattgatattggtgagtgagatgtggggttactcatgaaaggacctactttgaattgttcgtatttttggtccaatgtcaaaagatgtattgtgtagattttaacacaccaagttgttgtgttttatatatttaggattcaagagaatattgtattattgtggaactaacgatttcggcagatgaagtcgttactcagaattatgctagttgagatgggttttacgttgcactattttatatgggtattcaaattaatagcaaaaaaaaaaaaaaaaaatgcacatggtttttcacatcggattagaagttcctagttcgaggttttt

SEQ ID NO: 66 - DNA, 1911 bp, Glycine max
ctactccactcgctctctctctctcgctccgtcgccgttttaccaaaacacgccaaccctctcttccaaactaactaatctctctatcttcttctcttcgcgtagcgcgtcgtcccccgcaacgacgtcgtttcatggttacgttattgttgttgtgctgattctctctccgaaaatcttctgagggcttctcggcgatgagtggagtaatacattctctggtgtttgattccgcgtttccatttttcaatttctctgtctcgcatgtaagaaatgtttgattggaacgacgaagagctcgctaacatagtatggggtgaggcgggtgagagtgatgatcatattgtgccttatccggaggcaagtgaagatcttaatgacaagaaagaatggaatcaggaagcttctgctactaaactgattgagcagaggagaatagaggctaaaactgattttcatcaaggaaagctaggaagcagttccaaacttgatattattgagggatcttctgcctcagaatctggcacaaagtcatggcctgactttatctttatccaatgcagctaaaactgatcagggttccctgggtgcagaagtatctaaaaatttagaagagactacccagcttgaaaaggatgtagaaaagcaaggtgattttgtcaactatgcctgggataacataggaagctttgatgatcttgatcgaattttcagcaatgatgaccctatatttggccatgtaagtcttgagaattctgatgagctgtggtcttccaaagacgtgagtaacagtgcagtacccatactcttggaagctccaaacccaacaagtgctttaagcaacagatctgagcctttggaaattaaagcagaatatgttcaacagaatgatcaatcattttcccctagatttaagaagattggcaattcttcatctcatgatattgcgaatgctcctgcaaacacattcaatgtaggatatgatagagatagaattgccccagctgataaggagcaacaggattttgggcaaaataatcagttgaaagctcggaaaaaatcacaaggtaaacaagaggtaaaagcattgcaggagttttatggtagctggtctccttcatcaactacatgtggacaatttcagaatcagcagtcttcagtcatacagtcttctccctcttcaattcttgggaaacggaaccagcttcaaggacctgagacactataccaggacatcagaaatacatatgtgacatcctctgcatatgagaaccttacaaatacatattcttctatgtcaacgctaccacaagcacagtcaggagttcttatgcgacagcctctgctttctgggtatgaagcatctcttggtgttatgaatcctgtgagcaagtctgtggacttagttaagcctcttacaatgactccccaggaaaaaattgaaaaattgaggaggcggcagcaaatgcaagcaatgcttgctattcagaagcaacagcaagaattcagccatcaagttcctagctctaataaatcaatgaatgaaaaatgtgccatagaaatgcatagtcaactttgtgatggggctgatcctgaaattgaagatttaagaacagctctagatccaccaactgagcatgatgattctaatacaatctctctggcaattgatgatctttttgttgaagacaccatactgtacatgcttcaggatgctatatcaaagatagatgtcaaaataagactatgcattagagatagcttggtccggttggctcaaagtgcaatgcaaaggacatatgctacagatacaagcagttcagacagcactagcagagaagaacttaaagttgctgcaagagaaagaagcaatagcccaaacagatatgctaggattgctgatgtttaaac

SEQ ID NO: 67 - DNA, 1663 bp, Glycine max
tccccctaggagcaacaggatttgggcaaaataatcagttgaaagctcggaaaaaatcacaaggtaaactagagggaaaatcatgaaggagttttatggtagctggtctccttctcagctacgtaggccccccccccagaatcagctggtgtcttcagtcatacagtcttctccctcttcaattcttgggcagtggaatgagcttcaaggacctgagacactataccaggacatcacaaatacatatgtgacatcctctgcatatgggaaccttacaaatacatattcttctatgtcaatgctaccacaggctcagtcaggagttcttatgcgacagcctctgctttctcgctatgaagcatctcttggtgttatgaatcctgtgagcaagtctgtggacttagttaagcctcttacaatgactccccaggaaaaaattgaaaaattgaggaggcggcaacaaatgcaagcaatgcttgctattcagaaacaacagcaagaattcggccatcaagttcctagcactaataaatcaatgaatgaaaaatgtgccatagaaatccatagtcaactctgtgatggggctgatcctgaaattgaagatttaagaacagctctagatccaccaactgagcaagatgattctaatacaatgtctctggcaattgatgatcattttgttgaagacaccatactgtacatgcttcaggatgctatatcaaagttagatgtcaaaataagactatgcattagagatagcttgttccggttggctcaaagtgcaatgcaaaggaattatgctaatgatacaagcagtacaaacaacactagcagagaagaacttaaagttgctgcaagagaagaaagcaatagccaaaacagatatgctaggattgctgatgttgaaaccaagacaaatcccattgatcgaactgtggctcatttgctctttcataggcctttggagttaactgggaattatcctgataagcttgagtcacctatttctgctaagatacaatttgaaagcagagaagctaacatggagaagtttcatatgggatgcttgccagatgaggacttgaaaagtaatcaacaattttctcaccaagggcttgaggcccagcctgaggaccaatttaaaaacagtcgttgcatagacacctcagagaatgcttctaacaatgttctagctgatgctggagatcaggtgcttgaagccttgcaatgaagaaaaagtctcccctggaattggaggctgtctggatcataatcaaggcaaccgttgaagtctatcatcacataactgaacacctgtttctcatgtgtatgttatcattaatatttatgtttcgtctgtcaaaatcttgacagtatatgtatctcagcatatgaacttattcagcttggtgagtgacttatgttaataatgactttgtcagacttgtctagtagtaagtaaatgccaataatgttaaagactacgccagatttgtgcagtagtaatgccactcatgtcaaatagtcaagtcttcaccagactggtttggaccaagcttaaagttggtgttgtattcctgtactatttaactcgttttagttgccccacatcaatagctaacctgtggactgtcatattgagattaaaaaaaaaaaaaaaaaa

SEQ ID NO: 68 - DNA, 2536 bp, Glycine max
ccacgcgtccggttgaattgaaggtttttgcgactgagagcttcttcgtgttctctttttttgcatgttcgtttttctcgactagatttgatggagtgcgtttctctgtgatctcgaggggaattcggcgatgtgtgagctaattcggtgcctggtgtttgattctggtttcgcttttgcgcatttgtttgctagagttatatgaaatgtttgattggaacgacgaagagctagctaacataatatggggtgaaggaggtgagagtgatgatcatattgtgccttatccagaggtaaatgaagatgttagcaacaaaaaagaatggaatcaagaagctgctgcgactaagctcactgagctgaagagaccggaggctaaaactgattttcatgaaagaaagctaggaagcagctccgtccgccccccccccggagaactacctacctcaggatatggaacaaatgcatggcctgacttggctttatccagttcagctaaaattgatcatggttccctgggtactgaagtatctaataatttaagtgaacttagcaaattgagttcatcaagaggtgaagaaactacacaacatgaaaagcatgctgaaattttccaaaatgctcatgaaggtaaagagcaaggtcattttgttgattatggatgggccaacataggaagttttgatgaccttgatcggatttttagcaatgatgaccctatatttggccatgcaagtcttgatagttctaatgagctttggtcgtctaaagatgtgagtaacaatgcagcacctttaccattggatacaccaagttcatctggtgctttaaggaacagaactgagtctttggaaatcaaagaagaatatgttcaatgtagtgatgaatcattggacctcagcaatgagaagattgggggtcctggatcccaagttatagaaaattcatgcacaaccacagctaatgtgggaaatggtggagttagaagtaagcctactggaaaggaacagcaggtttttaggcaaaagaatcttttgaaaactcggaaaaaatcactggtaaaacaagaggagaataccttgcaggatttctatggtaattggtctccttcagcagcaccagcaaaacaatttcagaatcaattggcaccttctgtcatacaatcttctccctcttcaatttttgggcaaccaaagcagatccaaggagctgaaaccctatatcagaatatcataaatccatatgtgacttcttctgtgtatgggaaccttactaatacatatcctgctatgccaatgctatcgcagactcagccagcactttctggctacgaagtgtctcctggtatagtaaatcgtgtgaacaattctgtggactcagtcaagccccaaatcatgactcctcaggagaaaattgaaaaattgaggaggcggcagcaaatgcaggcaatgattgctattcagaaacaacgccaacaattgggccatcaagttcctagtaaatcaagcactcaaaaatgtcctccagaaattcaaagtcaccttagtgatgggactgatgaagatctaagaacttttcctgcgctagatccaccaattgaacaagatgattctaatacaatgtcagtggcagttggtaatgatttcgttgaagacaccgtactgtacgggcttcagcatattatatcaaagttagacatcaaaataagactctgcatcagagatagtttgttccggttggcacaaagtgcaacacaaaggcattatgctagtgatactagcagtacaaacaaaagtagcagagaagaacttgaagttgctgcaagagaagaaagcaatagccaaaacagatatgccaggatgcctgatgttgaaacagagacgaatcccattgatagaactgtggctcatttactttttcataggcctatggagttgacccaaaactattctgacaagttggagtcgcctatttctaccaaggtgcaatgtgaaagcaaagcagctaacccagtgaactttcccatgagttactcacaagatgaggacgcgaaaaacaatcaacaactttctcaccttgggtttaagaatccttgggttgatgcccagtctatggatcaaattaaaaacaatccttgcatagacatgtcagagaatgcatccaacacacatgaacttgaagcctctcaatgaagaaagaggttgtcccgaaatctgagggtaaatccttccttaatacatctatgcttattggtatgcttccctctttcaatatatatggatttactggtaatgcaaatgttttattttattgtcagccattcggatcataagcaagtgcaactatcactgtagaatcctgggaaacagtttcatgcatgcatgttatcagtattattagtttttctgctgttttaaaacatgacaatgtatatcagtatctatgttgttttaatcataacaacaacaaaagtgtcttgcaaagccacttatatgtcaaatttaagtctttgcctgactcacttagaccaggcttt

SEQ ID NO: 69 - DNA, 1288 bp, Glycine max
tttcttcattctttttctatataagctaaccttagcctcagttatctccttcttcttctttaccatagagccctttcttctcttcccccattttttcctctttcttcctcgcctagctagctccagaaaattaggatctgcttcagatctagtgtttccctgtcccaaatcacgagtccattgagtttgattttgtggatgaaaagcatagatagggcttttgcaaaactctccaatgtttcttgaaattatatgaccatgcgtcgaattcgtatgctgcactccttctccgtcgtgttcctctactggttctacgttttctcatgaactccctcttaaatccgtgattaattagatctatctccttagttaatccttgtcttttccaataattaattagatctgcgtctcctttttggattagtttcttttttggttctgttatcaaatcaaataaaaaatctccttctcggaaatggcatcaccgatccaacaacaacaacgctcgactactacaagttctggatctgaaggaggagatccgcatatcatcgatgagaggaagcggaagaggatgctgtcgaaccgcgagtcggcgcggcgatcgcggatgaggaagcagaaacagctggaggatctgaccgatgaagttagcagattgcaaagcgcgaacaagaagcttgcggagaacatagaggccaaggaagaagcgtgcgtcgagaccgaagcggcgaacagcattctgagagcacagacaatggaactggccgatcgattgcgcttcttgaactccatccttgagatcgctgaagaggtcgaagggttatccgttgagattcccgagattccagatcctctcctcaagccctggcagattcctcatccgatacaaccgattatggccaccgcaaacatgtttctgcgttgatcattcctgaggattttactttaattagggttattcagtgcggtagtaactttctctgttatgtgtattatattactattagtgttatctgtctgcatcaaaagtatcgtgtggtcatcaatgcattgggttcctgagagagatgaatgtgaggtacagggtgttgatggctggtagtggcagtgtgtgtccctttgcgcgacttgtaatcattttttatggtggctgttttattttaattaaaagtaatctcatcttctatgtttgttgttttatttttataattaaatctaatcatcgttatcctaaaaacataccgctttctttccattgttctaatacaagcggcggaccttctat

SEQ ID NO: 70 - DNA, 845 bp, Glycine max
gcgtccgttcactttccttcttctctcccgctgaaacctttcttcacaaaatggcctcaactacactaacaaccctctccctccgcaacctctcttatcctacaccctcctcctcttcttaccctacgcacctctccgccaacccctcctccctccaattccccaacttctcccaccgcgccaccaccacgcgccgcgcccgcgtcgtcgtcgtctccgccgtcgaggcaccggagaaaatcaccaagctcggcgacgaaatcgcgggactcacgctcgaggaagccaagaacctcgtcgacttcctccaggacaagctcggcgtctccgcggcagcgttcgcccccgtagccgtcgccgcgggtgccgtcggcgccgtggcggacgctccggcggcggtggaggagaagatggagttcgacgtgttgatcgaggaggtgccgagcaacgcgagaatcgcggtgattaaggcggtgagggcgctgactaacctggcgctgaaagaggcgaaggagttgatagaagggttgccgaagaagttcaaggaagggatttcgaaggacgaagctgaagatgcgaagaagcaacttgaagaagccggtgccaaggttaccattgcttagtactgtttagcagcagcatttgttttgcttcttcttttgttgtagctgagttcactagtacactgtaatctcctttccattttgtctggagttcaatcttatttgtaatgaggaaaaaatgagttcttatttttttttcccaacgcctctgagggggcggccgccgtggaggtgaagggttttaaattgctgaattggaaattggaaacatagtacttaact

SEQ ID NO: 71 - DNA, 938 bp, Glycine max
ataaccgaccagatacgtagccccccaccctatcttgatccttcacttcacttcttccattctctccctccctcaaatcccaaaccagcaaaaacctttcttcacaaaatggcctcaacaactctaacaaccctcaccctccgcacgctatcttatcctacaccctcctcttcttaccctacgcacctctccgccaaaccctcctccctccaattccccaatctctcccaccgcgccgccaccacgcgccgcccccgtgtcgtcgtctccgccgttgaggcgccggagaaaatcaccaagctcggcgacgaaatcgccggactcacgctcgaggaggccaagaacctcgtcgacttcctccaggacaagctcggcgtctccgcggcggcgttcgcccctgtggcagtcgccgcgggtgccggcggcgctgtggcggacgcgccggcggtggttgaggagaagacggagttcgacgtggtgatcgaggaggtgccgagcaacgctcgaatcgcggtgattaaggcggtgagggcattgacgaacctagcgctgaaggaggcgaaggagttgatcgaagggttgccgaagaagttcaaggaagggatttcaaaggacgaagctgaagatgcgaagaagcaactcgaagaagctggtgccaaggttaccattgcttaaacactgtttagctgcagcatatatgttctgcttcttcttttgttggttgtagttgagttcaccagtacactgtaatttcatttccattttgtctggatttcaatcttttatttgtaatgaggaaatatgagttcttatttttatattattttttttaatgcgtatgaagtgtttgttgaaaaaaaaaaaaaaaagaataaaattactgaaattgaaaatatgctactcttaactacttgctgaacttgtcagcatcataatcc

SEQ ID NO: 72 - DNA, 1031 bp, Glycine max
  misc_feature (17)..(17): n is a, c, g, or t
tcgagtgagctacgtantgcccccaccctccgccgccgttgcaagcagagcacaacatcgattatccaaatgggcgaagcaaaggccttggttccggaatcggtggtgaagaaggagaaaaggaacgaggagtgggctttggcgaagaagcaggaactcgatgccgctaagaaaatgaggttcgaaacgcggaagctgatttttaacagagccaaacaatactcaaaggaatacgacgagcagcaaaaggaactgattaggttgaagcgtgaagccaagcttaagggagggttttatgttgaacccgaagctaagctcttgttcatcatcaggatccgtggtatcaatgccatggatcccaaaacaaggaagattctgcagcttctgcgtttgagacagatttttaatggcgtctttcttaaagtgaacaaagctacagtgaatatgctccatagggtagagccttatgttacctatgggtaccctaatttgaagagtgttagagaattgatctacaagaggggctatggaaaagttaacaagcagagaattgctttgacagacaactctattattgaacagactttggggaagcatgggatcatttgcgttgaagatctgatccatgagatcatgactgttggacctcacttcaaggaggccaacaattttctgtggcctttcaagctcaaagctcccctgggtggtctggagaagaaaagaaatcattatgttgaaggaggtgatgctggcaacagggaggattacataaatgagcttattagaaggatgaattagttttttttccccataccgttagtgttaattttgacgctaaaacactctttttgtttatgcttttattattttgaatgatgtatgtgctgattgagatattaattcgttgcttgccattcaatgaaatgttccttagctttttgagataagttaaaaaaaaaaaaaattgaaactaaaaaaaaaaatcaaaaaaaaaaaaaaaaaaaaaaaaaaaaaaaaaaaaaaaaaaaaaa

SEQ ID NO: 73 - DNA, 2235 bp, Glycine max
ctcgaccccgcccccgccgactaggaacaagagtttatttcagtttagctcggttcttcaaaaggcctcatcacttgaagggttagctatatatatatatatacttctgtgcctcaaaattgagctgagttgtatacctgcaatgggtgttttgtggtggaagctgttttttgctgctcttgctgggattctcttctcaacccaacattgtgcttcccaaaaagttccgaactacacatttatgcacaatgcaacaacagcaccagacgtatcatactacgactacatcgtaattggcggcggcaccgcagggtgccctttagctgcaacactgtcccaaaattacagcgtattgctccttgaacgtggtgggtcgccctacggcaaccctaacatctccgacttagctgctttcggtgctgccctctccgacacctcccctacctcccccgctcagcgtttcatctccgaagacggtgtcatcaactcaagagcccgcgtcctcggtggtggaagttgcttgaacgctggcttttacactcgcgctagccctcaatatgtaagggaagcggggtgggatggaagggtagtgaatgagtcgtacgaatgggtggagaagatagtggcatttgagccacaattgaagcagtggcagtcatctgtgcgggatggactaatagagataggtgtggtgcctaataatggcttcacttatgaccatattgatgggactaaagtagggggcaccatctttgaccagaatggcttcaggcacactgctgctgatcttctgcaatatgccaaacccactggaattaccctgcttttggatgccactgtgcataggatcttgtttagagtcaaagatagatcaaaaccaatggcccatggagtggtgtttagagattcattgggtcgtaggcacaaggcgtacctgaagcccgatccaaggaacgagataatcgtttcggccggtgcacttggaagcccacaacttctaatgttgagtggaattgggccggaagagcaccttaaagcccacaacatcagaataacattggatcagccattagtaggacaaggaatgtcagataaccccatgaacgccatctttgtcccatctcctgtccccgtagagatctctctgattgaggtggtgggcatcaccacttttggcacctacattgaagctgccagtggtgaaaactttgccggtggttccccaaaagactacggaatgttctcccccaagattgggcaactctcaacggtgcctccgaagcaaagaactccggaggccctagccaaggcaatagaagtgatggaaactctggaccaagcagcattcagaggtggattcatcctggaaaaaatcatgggtccaatatcaagcgggcatttggagctccgaagccgtgatccgaacgacaacccctcagtgaccttcaactacttccaggacccgcgagacttgcagagatgcgtgcagggcctgagcaccgtggagaagataatcgagtccaaggcattctctcccttcagataccccaacatgcctgttcctgtgctgctcaacatgaccgcaagtgcccccgttaacttgttgcccaagcacaccaattcttcactatctttggaacagtactgcaaagacactgtcatgaccatttggcactaccatggaggctgccaagttgctaaggttgttgatagggactacaaggttcttggtgtggacgctctgcgtgttattgatggctccacctttaactactcccctggaactaatcctcaggccactgtcatgatgcttggcaggtatatgggagtgaaaatattgagcgagagactaggtggtgcggctgctgctgatgaaacagagcaataagttgtatagtttttctccgtgtgaagttttcatcaaagtgtcttcgtgtcactgaggaaaaccaaaattcttgtgagaatgatttgtgaagtaacctttcaacgaggaaaataacaaattaaacattgttcatgtaattgatgaagtgaaactagaagggggacgagggaaatcttctcttgtttgggaaatcttctcttgttttgattacgaccgtggtgtggatgagttatttttgtaagaataaaatttaggtataacattttaagtatttcctgaggttttaaaattaaaattagaattttattttgataaaaaaaaaaaaaaaggggcgcccccggtcaaga

SEQ ID NO: 74 - DNA, 746 bp, Glycine max
gcacggcggcgcgcgagcgcccccgccccgagtttctgttctccctctttcaccgcagtgttagggtttctgtagcctccaaccagaaagagagggaaatggctcccaaacatcctagtacgggtttgtttgttggattgaacaagggtcacgttgtcaccaagaaggagttgcctccacgcccttcagatcgtaaggggaaaacaagcaagcgagtgcactttgtgaggaacctcattcgagaggttgccggctttgcaccttatgaaaagcgaataactgagttgctcaaggttggaaaagataagagggcactgaaagttgccaagagaaagcttggaacccataagcgcgcaaagaagaagagagaggagatgtccaatgttctccggaagatgagggctggtggagctggagacaagaagaaataagtcttgtttactttttctagtttcactagactgtttcgatgtacgagttgtcttatttttgttttagttcaagattttgctttgagaaatatgttttacctaatcgagacatgatttactgaaaaagtacaattggcttattttcgacatgcattccaaattgatgttttattgttacatattgaaaaatgttgtaagcctgtctgaggaggtttatcatatattcatttgtgtatatttttgaaaatgcaaattcaaaacttctttttgtgttatctggattaagtaataaggaaatcaattgttttagattac

SEQ ID NO: 75 - DNA, 1565 bp, Glycine max
tcaaacaacagtgtgaacacctcccaaacagaaaacgggggtgattggttactcatcattctccattctacgcatacacactaccggcttttctctctcaaacatcgttatcgcccttcgctccgattcgacgccgttattcccgccgccgtcgatctcgacggcacgaaacctgagacgaacaactccatttctcagttatttgcttatattttgagaggagcacaaggaaccgttttgtactaaagagaaagtgagagggggagatgaaataagttcttacagaagatggcgtcgaggcaaatggaagagattcggaagaaattggctgacctaaattacccgagagcgaatgcgcctgcacagtccctcctatttgctggcatggagcgctatgcccttctagagtggcttttctttcggcttttaggtgataagtcacccttttctcaacaaaacctacaaggggatggccatgatcgtgacgaggagactggtcgaattcagtatttagcagagattgctaagtttttgggtattacaacaaccgtagatacagatgccatccaggggcatggaagctatgaagaccgtactgaaatgcttcgtcttattgttgatctagtggaggcaacaatatgctcagataatccagaatggagtgttgacgagcaggtagccaaggacatccaattgatagactccattgcagaaaagcaagctcaaatattttctgaagaatgtaaattgtttcctgcagatgttcagattcagtccatatatccattgccagatgtttctgagctggagttgaaattttccgaacaatcaaaaatattgttgaatcttcaacaaaaagttgatgacttggcatccaagcatgcttacaatccagatgaggagtatactgaggtggaatcccaattgcgggcacatctggaatctttcctagaaacagctagaacattcaatttgatttacaccaaggaaattcgtccatggacacacatgatggaggttccgcaacttcatggatttggaccagctgccaatcgtttattggaggcctataaaatgcttttgaagtttttgggcaacctacggaatcttagagactcacatgcagctcttgccttcggctcttctgagacatccgacgggccttcatctgtcacacgaataatctctgaatgtgaatctgcattgacagtcttaaatcgtgatcttggaattctctcggcttccattgctcgtgaacagggagagaagatgaacatttgatgaaacatgataaacaagttattaatcattattcttttgaattttgtgaacttgtgcataatgttcatattgttgacatgagatgtgttaatttgaagtaagcatagttgttagactgggtctatgtaaacttgtggagggtctaaagtgtgacacatagacttgtaaactgataagagtatacctaatacaaaaatattattaaaaaacctaatcattatccaaataatatataaaactataaaataatgtaaattatgaataaatgaaataaattaaggttt

SEQ ID NO: 76 - DNA, 965 bp, Glycine max
gaaaaaaaaaagagtggaggaaaattgttatccacaacacaacatcatcaacgttacacaagtctctctgatggcaacctcgacctctttctctccgacagcctctgtccgctccatcatcttccaaaagcaaaaccctcccaaagcccttcttcttctctcccagcagcgctccttcgcctcttccgcaagctatgcaactctcaagctccctcgcagacccctcctttccaaagggagaacgccacttgtgagggctgctactatcgaagaaattgaagccgaaaaagcagcaatcgagaaagatgctaaaagcaggatggataggactattgataatgtccgtacaaatttcagttccataaggacagggagagcaaacccagccatgcttgacaaaattgaggtggaatactatggaagtccagttagcttgaagagcattgctcaaattagcactcctgatgccagttctcttttggtacagccatatgacaaatcaagcttgaaggctatagagaaagccatagttagctctgatcttggtatgactccaaataatgatggagaatcgatacgactgagcatcccacagttgacatctgataggaggaaggaactatcaaagatagtggctaaacaagctgaagaagggaaggtggctttgaggaatataagaagagatgcattaaaagcttatgataaacttgagaaggagaaaaagctctccgaagataatgtgaaggatttgtcaagtgatttgcagaagctgacagatgagtatatgaagaaagttgacaccatcttcaaacagaaagaaaaggagttgctgacagtttgatattttgatacaaaaaaagacaaatctttgaattaaatagatgttctcaaattgcaaaggtgagttcatatctgtaaattggatttattttacataatgcttcattgcaaaaaaaaaaaaaaaa

SEQ ID NO: 77 - DNA, 1917 bp, Glycine max
attttccaccagtccccaaaagcgaaagcgatcttccagtgaacaaccgggcggttgtcgccgacaatggcggccacgccaccccctccgtctttctcgcttcattcaaacaaaccctctcactctcactctcagctacgtaggccccccccccttttctctttcaattcgaatctgaggtgcgagatcaaaggcttcgagagccaccgtggctggaccatcgagcgcgtctccgacatgagcaaagactccgccaattctcacatcaccaacccttcttctcccttcctctctgtctcctctgtcacctccgcttcccaattccccaccaaaaatgccaaaagagtcgtgcttttctactgccccgagaccaaggttctcgccgagaaaatcgccgcgcaaactgattccattgaacttcgtaacatctcttgggggagcatttcttggaggatgtagcattactttatgctaccccattgtgaatcttgatgcctgagattatctgggttgtttattttttatttttctagctagtttgtgttatgagtgaattgtatgatttgtttcactgaagtactctgtgcaactgaaacttcagcaagtttccggatggcttccccaacattttcattccgaatgctcaaggaattcgtgggatgcacgtggcttttctagcctcattcagttctccagctgtgatttttgagcagattcctgttatttatgcgttgccaaaactgttcattgcttcatttacccttgtccttccgtttttccctacgggcacttcagaacgtatggaggatgaaggagatattgccacagcttttactttggccagacttttgtcaaacatacccatttctaggggaggacctaccagtctggtgacatttgacattcatgccttgcaggagagattctactttggtgataacattttaccatgctttgagagtggcataccattgcttaaaagaaggctccaggatcttcctgattctgataacatatcagttgcttttcctgatgatggtgcttggaaacgatttcataagcaactgcagcattttccaacgatagtttgtgcaaaggttcgggaaggagatcaacggatggttcgtattaaggagggagaccctaggggtcggcatattgtaattgttgatgatttggttcaatcaggtggaactctgatagaatgccagaaagtcttggcagctcatggagcaacgaagattagtgcttacgtgactcatgggattttcccaaataaatcatgggcacgctttggacatgataatggggggcatccagagtctgcatttacttatttctggatcacagattcatgccccttaacagtgagagacgtgatgaataggccaccatttgagattctcagccttgcaagctccatatctgccagtctccaaatctgacaggaacatactgtcattttcatttcatgctcaaaataatatggagaaacaaagcgacccagttaataataatagtcaaagttgagctcttagacattagtatgcggcttatagtaacaggtagacaagggagtagaagaccgcacaaattggttcaatctttaataatatctcccctcaactttgtcatctagttttgccaaggttgttgctgcaacatctacctgggttgctttcatctagaaattattgctgcttaatggtagtccatagaattctgttgtgttaaaaacaatgtactctatcttgtggattttggtagtatcaatcgtgtgtctcatccttactctatcttgtcaaattaaataaattatgatttcaaatgtccatcttaaaatttttgtaaagaactttctgaaaaaaaaaaaaaaaaaaaaattcctgcggccgcgaattcttctggtgccgaatt

SEQ ID NO: 78 - DNA, 1304 bp, Glycine max
aattcggctcgaggcgagagagagagagaaagggtcgctttaaggcacagaagctttaaatgcgagttggttgattgtagcttcctttcaatcttctcctaatgcttatggactaagcatttgcccaagagcgcgttttttattctcaatatccttcttcttgttattattattattggctacgtaggcccccccccccatatattaataactctttcttaaacccaaatcttgtgacatcacaaaccgtaccctttttgtttatttcctttgtgggttttcaattcgtgcaaatttctgcgacacccagatggattttgcgctgaatccgtgtcctttgcgatcttctacgttcgtgaatttcgtcgagagggttaaacagcttggtaccctcgccttttctgcagtcattgggaacatcttctccgcgatcttgaccttctgcttcgcattagttggcactttgttgggggctttgactggagctttgataggacaagaaactgagagtggcttcattcgaggggctgctgttggtgccatatcaggagctgttttttccattgaagtgtttgaatcctctcttgttctctggcaatctgatgaatctgggattggctgtgtcttatacttgattgatgttattgccagcttactgagtgggagacttgtgcgtgagaggattggtccggccatgttgagtgctgttcaaagtcagatgggtgctgttgaagccagctttgatgaggttcaaaacatcttcgacaccgggggttccaaaggtttgtctggagatttggttgaaaaaatccccaaaataaaaattacaacagacaacaattttgatgcatccggtgatagagtctcttgttcagtttgcctgcaggactttatgcttggagagacagtaagaagcttacctcattgccatcacatgtttcacctaccttgcatagataagtggctcttcagacatggttcttgcccattatgcagaaggaatctgtaattttgtatatgcttagtacagaccgctaataatgtccctattttatttttgtttttgtttataagcttatttaattctaggacttacatctagtgggagccattgcagtttgagtggtatcattgtactaaattagtgtaaagaaaattttgagatgaaacagcttccacttgtatatggaggagagtgattgacccattttctagcccgtctccactctttttctgctctttttttttttttttttgaataaagaacaagagacggtgatataactagtgttttgattcttgcc

SEQ ID NO: 79 - DNA, 1739 bp, Glycine max
aaccctactctctctcttctctctctctctctctcttcagctacgctttcccgttgaacacacacaggcacaagaaaacccaccaaattctctcgttccgaataatcaagaaaattttgaaaaaaaaaaagagaaaactttattcacacacattcattcatttatcataatggggaagcttctctgtgactcaacctccgtcgccgaaccattccaaggttcgccgccggccgcgcttccgtggcgggaacccaaaccagaacctataggaaccgtagatctcgtcgttccggccaacgtcggtggcgcgccgttcgccggcggtgggtgggaagacgtcgtcggtttggaggagcagcagcggcgccacctccagaggctccacgcgaagggagtgctctggaagccaccgccggaggaggaggattcgtcgtctccgctgtcgtcctccgccctcagatctgttgtcttccggctctctcacggcggtgaggtctccgccgacggaaactgcctgttcacggcgtcgcggaaggcaatgggcggcgaggacgttgacgcgcgcgagctgcggcggcggacggtggcgcggttcttggaggatctcggatctgtgagttttgaggagagagaagcgatcgacaacgcgattcggcacatgtactcgccggatctgaagaacggttgggggattcatgtcgttcaggaggtgaaattgttggcgaagaaggaggatcgatttgctcttgattcggctatcgaagagcttgttcacctcggcatgcaaagagaaatggcggcggagtctatttacaaagagagatgtgtttcggtgaatgatggtccaagttgggccaaatacatgttgatctctggttctcctgatgatgaatatgatatcatcactttgcaatatactgaggagggtttattatctgtagatgagaatagagagggtcgtgctgcagctttcggtgatgatattgcaattgaatgccttgctacagagttcaagcgagagatatatgtggtgcaagcacatggttcagatgccatggtcgatgaagaaaattgtgttttcttccttccacatcgtccaaggagccgaattactgaacctccatttttccttttcatgaaaggaacaggttggtgcggtgctggagctgaccactatgagcccctcattgctcatccttccgcctttgtttcccaagaaaaggttgctgtggtactgtgaggtttcgcggcctgcaattttgtggagtagagatcgagtagaattagaattttcttcaccctattttatgggccactctcaactgtttggcctcctgcattatggttcttctccgtcccaagggagaaaccaccacctaatcgggtagccatttgttttgttactgacatttagaatcaatcatctttgactctcttgacattggacaagcaggtttgccattgccgttgcctgctgtttgagcaaccctagagtattattgtattagtttcaccggcttctgttttgttgttcctgttgttgagttaattagagggtagtgtgttgttcaaattggaagagttgagttgcatcacatattaatgatgtggctttatcttattttctgggcatctgcatgtgtgtcattttacattgcattccagaacgtgacatgttatccactcttcactgcctagtggataatgtctcccttctcggtaaaaaaaaaaaaaaaaaa

SEQ ID NO: 80 - DNA, 1929 bp, Glycine max
ggtacggctgcgagtagatgtccatgcatgtgtgtggtagtgagaaggattgagaaaaagaaagtggtgtccaagcaatggcaattatctctggtatcccttaatttatatgaatgttgtcacagaggcctttcttttccttatgatgttgctcttgttcctaccaaagcagcaacattaaaattaaaacatggcatcttcaccggacaccagcaaaaccataaagctggtgcgtaacaacagctacctccgcagactcaacatatccttcaaaatcctcttcctcctcctcgccctcctcctcctttacactctttccacccaccaccaccacctccccctctcctccgcctgggagaatcaggtccgccactccgccctccctcgccgccccaacggcatgtcggtgcttgtcaccggcgccgcgggcttcgtcggctcccactgctccctcgccctcaagaagcgcggcgacggcgtcctcggcctcgacaactttaacccctactacgacccctccctaaaacgcgcccgccaacacctcctggcgaaacaccgaatcctcatcatcgaagccgacctaaacgacgcgccgttgctcgccaagctcttcgacgtcgtttccttctcccacgtcctccacctcgcagcacaagcgggcgtccgctacgccatgcagaacccccagtcctacgtggcatccaacatcgccggcttcgtcacccttctagaagcttccaaaacctccaacccccagcccgccatcgtttgggcctcttccagttccgtctatgggctcaataatgaaagcccattctccgaactccaccgtacggaccagcccgcgagcctctacgccgcaactaaaaaagccggcgaggccatcgcgcatacctacaatcatatctatggactctccctcaccggattgcgcttcttcactgtttacgggccctggggaaggcccgacatggcttactttttcttcactaagtccatcctccagggaaagcccattgacgtgtaccagacgcaggacgaaagagaagtggcgcgcgacttcacttacatcgacgacgtcgtcaagggctgcctcggcgctctagacacggcggagaagagcaccggcggcggcgggaagaagcacggcgccgcgcagctcagggtttacaatctcggcaacacctcgccggtgccggtggggaaactcgtttccgtgttggagacgttgctcagggtgaaggcgaagaagcacgtgatcaaaatgccgcgaaacggcgacgttccattcacgcatgctaacgtgagcctggcgtggagggacttcgggtacaagcccaccactgatctcgccactggtctcagaaagttcgtgcagtggtacgttgggtattacggggttcgcttaggggtagaaaaggaaaagatttcgcttgattgatccttaccgtgccactccattcattttcacatgggttttcttttcttctttttttgtgaataattattattattattattatctactcttttttttttttgagtggtgctggtggttatagttgtggcggcccatgtgagaatgcataatcatgacatgacccggtggatggaaggacatgaatatgaagatgaacctaggaatataaacgtggtagagaaggaagagacaaatgttgaagaaatagaaagtaataaaagcaaggacaagagcaagtgtatatatctaatctatgtgtgaagtggtggaggggaactgagctgtaataatgatgggtgggctctactttaagcttttggaacttattcaatttattatggtattttcaaagttaagtaaaattgtgtataaacaataattatatgatatagacatgcaattttcttacaattacattattatattaattttctgtttacctcaaaaaa

SEQ ID NO: 81 - DNA, 1429 bp, Glycine max
gatatatcctttatcttgtgttcagctacgctggccccccccccgtgaaactttaacccgtgtatgtgtgtgcatctgttgctttgtatacttgtactatgtggaaccttggttgaattcaatctttatttttggtttcaatggttgtctccacagaatcgtgttataaatcctgcaatgtctggtggttatcctcaacaaggttaccaatctcgaccaccctctgattgggctccccctgccccaatgcagcaagctggttatggctatgtgcaacctggagcatactctggtccatcaccccagtataacatgcctcagtaaccatatgcaggctatcctgcccagcaacctggtggatattccaccaattgggaccagtctactgcaccacctccaccagcagtctactcatggtggtggttattattactatagtcaacagccacagcaaccacaaaatcctgggggtcctgcccctccagctgatggctctgcatacaattacagtcagccaccttcctctggttataaccaatcagcacagcagggttatgcacaggacagctataatgcatataatgcgcaatcacaatcagggtatgggcagccacctacatatgatcagcagcaaggctatggtagtgaaagcaacccggcacaagagggccacactgcaaactatgcagtacagggagattcagcccaagctccttctgcccaaccaattaccgtagcgcagcaaggttatcctaccaaccaactgcccagttcaaacactgccaactacccacctcaaggaactcctcagccaggttatggggttccccctacatcccaagcagcttatggcaatcaatcacagcctggttatggtggtgcagtgcaaccagggtacggtcctcaaacatatggtgctccgcagggtggccagcctggttatggtcaggcgctgccttcatacagcaacagttcttatggtgctggttatacacagactccggcgtataccggtgatggtaatgggaatgctcaggcaccccagagtgccattgctaaagcatccccttgatattttggccacccttcccctccccttctcatagacgatttttattgtgtttcaccgtttatggtactagtgacaccaatgtagcattgcattgtttagatggaagaaatggtgtattgttttttttttttttactttttgaatatcttgtacggttaaatagaaactcattttggaggcgactgaaaaaactagttgggaagcttatttgaacttgtgacaataatttaaaatgttcattatctttaatttatttcaaaaaaaaaaaaaaaaaaaaggccggccgccggattttttcccttgtttttatccaagtaacgattttttcgttatttttatttatttatcaaaaaaaaa

SEQ ID NO: 82 - DNA, 1615 bp, Glycine max
acgcttattattctgcttcgccgtgcatttgcagagcacagggaaagcaaaatatctgatctttctccctcccttgcactgagtaggcaatggcggaggaagcacagtactcatcgggacccgattccgcgcccctcaagcgcaagtacgaagaccaaccctccggcatcgagcttgccaagcagcgtgctcaggaagtcgccgcacgcctcctcaacgccgctcctcctccgccactcgacgccaagcgtcccaaacccgacaccggcttcgattctctcgatttgaagcctctgtattccgcatctcctcctcccgtctcctacggtcaccaaggttccagcaagaagattgatatccctaatggcagggttggtgtgattattggtaaaggcggagagactattaagtatctccagttgcagtctggtgccaaaattcaaattactcgtgatattgatgcggaccctaattcttccactaggacggttgagcttatgggcactcctgaagcaatttcctctgccgagaaactcatcaatgaagttcttgctgaggctgaatctgggggttctggcattgttactcgaagattcacgggacaagctgggtcggatgaatttgtcatgaaaatcccaaataataaggttggccttataattggcaaaggtggagaaactataaagaatatgcaagcttctactggagcacggattcaggtgatacctctgcatcttcccccgggtgacacatcaactgaaagaacattaaaaattgatggtactcctgagcaaattgagtctgcaaagcagttggtttatcaagtcatcagtggcgagaatcgtgttagaaatccagcaatgtctggtggttatcctcaacaaggttaccaatctcgaccaccatctaactgggctccccctgctccaacgcagcaacctggttatggctacgtgcaacctggagcatactctggtccatcaccccagtataacatgcctcagcaaccatatgcaggctatcctgcccagcaacctggtggatattccaccaattgggaccagtctactgcaccacctccaccagcagtctactcatggtggtggttatgattactatagtcaacagccacagcaaccacaaaatcctgggggtactgcacctccagctgatggctctgcatacaattacagtcagccaccttcctctggttgtaaccaatcaggacagcagggttctgcacaggacagctataatgcatataatgcgcaatcacactcagggtatgggcagccaccgacatttgatcagcagcaaggctatggcccagctactggctatggcagtgggagtaacccggcacaggagggccacactgcaaactatgcagcacggggagattcagcccaagctccttctgcccaaccgactactgttgtgcagcaaggttatcctaccaatcaacagcccagttcaaacactgtcaattactcacttcaaggaactcctcagccaggttatggggttccccctacatcccaagcagcttatggcaatcaaccacagcctggttatggaacccctcaatctcaaaagccgactggcaattcacctg

SEQ ID NO: 83 - DNA, 1342 bp, Glycine max
tcagctacgtaggccccccccccccgggagtgagatcatacaacacctcaactactctcccaatttataaagagaaactatagactatagtctatagctgccacacattgacacaatagctaaaagcatcaaaagtatatattttatgtttcagtaacaacactaccaaaaaaaggcaaaatggatctgcaaaatgtgcaaaaccatagcatgatgcgtttggttctgtccactgatgccaagcctaggctgaaatggactcctgagcttcaccaacggttcactgaagctattaatcagcttggaggtgcagaaagggcaactccaaagagtcttatgagagtgatggggattccagggctcactttgtaccacctcaagagccatttacagaaatataggcttgggaaaagccaaccgctagaaacctgttctgacaacaagcaacaaggttactgtgaaatccagaacagtgatggtcatttcagcaaggaaatcagcattgggacccagaatcagatgactgaaagcttgaagattgctgaggctctccaaatgcaaatggaagtacaaagaaaactcaatgaacaaattgaggtacaaaaacatttgcagcgtaggattgaagctcaagggaagtacttacaatcagtactaacaaaggcacatgaagcacttgcaagacacagttcttccacaactggtatggaacttgcaaaagctgaactttatcagttagagtcaataatcaacaatgcatgtccagactctcccctttcagaactgacagaaacaagagggctcagtttgaactgtggagagaggaaacaagacagaggaaccatgtgttcacttgaaagctctttgacatcatctgaaagctctgaacaacacaccatggatgaggcagaaaaccctcaaaagtttaatggtgtttcagttgaattgccattgatgtccattcatccagaagaagataaagcattcaagggagatacaagtgatggtagaaagagaagtgcagcaactgattctgatcattgtgttgatcaaccttgtggaaacaagttgaggaaatctgaagtgtcagaaatgcttgacttgaactgccaataccagagagacattgactcaagtgtgaaagaaatagatttaaatttcagttcaagcttttagggacaataaagatgtgtctggttatatcaaaagcatataaaaagtcattctcagaagaaaatatgtttataaacaatgtatatttttataacgagaaagaaaaaaaaaatacacatatatggcacataagaaaaaaaaaaaaaaaaaaggcttcctcagccgggca

SEQ ID NO: 84 - DNA, 1086 bp, Glycine max
taatttcgggttggcccacctcccgtacggctgcgagaagacgacagagggggcaccacaaaccacataattcgacaacactctctcctaattgttcaacttctggagctacttccaccccactagctaccttcattgtattttcagtctccaaactccaaagggaaaatgagcagaccaggagattggaactgcaggacatgcaaccacctgaacttccagagaagagagtcgtgccagcgatgcggggagcctaggagtggtggcggcggcgactacggcggaggcttcggtggtggcagaggctcttcctcctttggcttcaccactggcccggatgttcgccccggtgactggtactgcaccgtcggaaactgtggagcccacaacttcgccagccgctccagctgcttcaagtgcggtgcccccaaggaggactcctccgccggaccattcgacgccgacatgcctcgaatgagaccatacggcttcggcggcggctcctccgcccgtcctggctggaagtccggcgactggatatgcaccaggtctggatgcaacgagcataacttcgccaatagaatggagtgttaccgatgcaatgcaccgagggactctagtagtgccaggtctccctattcatcgtagagttcctcatcaatccatgtggtttgctgtctaaggagagaatcgagaggccatccctatttcctagtgatagttaccttttcttttttgttctcttgcttccatatatgctactttcttcatcatctcatgcggatatttatttttgcttttttttttcttttcttccagctaggaagctttaggtgaattatgattttgaggttttgttggccctgagtgagtctggtatatgatgactcagcagctagctcatgtacttttttaagtatcaacaatttaatatcagtgttaatgtgtatgtttcgagagggggctagcttctaagcctcatcatgactatgatttggtgcaaagatgttctttatctaactctccgagatgtgttcagttatggagaaaggatattataaaagggttagcggccgctctagagga

SEQ ID NO: 85 - DNA, 2488 bp, Glycine max
  misc_feature (1771)..(1775): n is a, c, g, or t
acttcagttgtccccaagcttgcttcccaatttttattaattttgttcatgttaatgtgtgagttgaatctcccccgcgaggtctttttggtttgtgagaggtttttataagaaccaaaatgaatgtcttaaactatagggactaaaacaaattatcacaactataaggactaaaaggataattaaatcaaaataaaataaactagagcaaaataatggtggtgtggttaggcacttttaatcctaaatgtctccttgtagacatatatacctctacatatgtgtgcattttgcaaccaccaccattagtggagtaaaattttaaatgctaacccttctacggtatatatcctacataggcattgttagtagtaaataccaaccgtgaaccagaaaattgtggattcaacctttttcgtcttccttcttcttcatggcagtgctatttgcaactcatgttcttctcttgatattgtccactgcaacaactctccacttcagtgcaagcaaggcagcaaggctcaatatgacttgcagcgagaaggaaaggaatgcactcctcagcttcaagcatggactagcagacccttcaaacaggctttcatcgtggtctgacaaatcggattgctgtacatggccaggggttcactgcaacaacacaggtaaagtcatggaaatcaatcttgacacacctgcgggctctccctatagggagttgagtggagagattagtccttctttgcttggactaaaatatttgaatcgtttggacttgagttcaaattattttgttcttactccaataccaagcttcctaggctcattggagagtctgagatacttggaccttagcttaagtgggttcatgggattaatccctcatcaactaggaaacctctcaaacctgcagcaccttaatcttggatacaattatgctcttcagatagataaccttaattggatatcaaggctatcttccttggagtaccttgatttgagtggttcagaccttcataaacaaggtaactggcttcaagtactgagtgcacttccatctctttcagaactacacttggagagctgtcaaattgataacttaggaccaccaaaaggaaaaatcaacttcacacatctccaagtccttgatctttcaattaacaatctcaatcagcaaatcccttcatggctatttaatctcagcacagctcttgtccaacttgatttacacagtaaccttttacagggagaaattccacaaataatatcaagccttcagaacataaaaaatctagacctgcagaacaaccagctcagtgggccacttccagattcattaggccagcttaagcatcttgaagttctaaatctcagtaataatacctttacttgtccaattccctcaccatttgcaaacttgtcatccttgagaactttaaacctggctcacaaccgactgaatggaaccattcctaagagttttgagttcctcagaaacctgcaggtattaaatcttggaactaattctttgactggtgatatgcctgtaactcttggaactctctcaaatttagtgatgttagacctttcatctaatttgttagaaggatctataaaagagtcaaattttgtaaaacttttgaaattaaaggaactacgtttgtcttggacaaacttgttcctcagtgtcaactcaggatgggttcctccttttcagcttgaatatgttttactgagctcctttggaataggtcctaagtttccagaatggctnnnnnggcaaagttctgtgaaggttttgacaatgtctaaggcaggtattgcagacttggttccaagttggttttggaattggactttgcaaattgaattcctggatctgtcaaacaatctgttaagtggagacctatctaacatctttctaaattccagcgtcataaatttgagttctaatttgttcaagggtacattgccaagtgtgtctgcaaatgttgaagtgctgaatgttgccaataactcaatttccggaacaatttctccctttttatgtggaaagccaaatgctactaataagttaagtgtgcttgatttttcaaataatgtcttgtctggtgatcttggtcactgttgggtgcattggcaagctttggtgcatgtgaacttgggcagtaacaatttgtctggtgaaattccaaactccatggggtatctgtctcaacttgagtctttgctgttagacgacaaccgcttctctggatatattccttcaacactgcaaaattgctctacaatgaaattcattgacatgggcaataaccaactttctgacacaataccagattggatgtgggaaatgcaatatctaatggttcttcgtctaagatccaacaatttcaatggcagcattactcaaaagatgtgtcaactttcttaccttatagtgctggatcatggcaataacagcctgtcacgatccatttccaatcgtttg

SEQ ID NO: 86 - DNA, 1850 bp, Glycine max
tcgagtcagctacgtaggccccccccccatgtatctaaattgttataggtttcaacctccctgaattcatcgtattgctacattctgcaaaataaagcatctatctatacttgcattggttatttttcattactaactatttcaatatcctgttcttattgaatatggactaaaatactaagcacttaagtccaacctattgtgctctattaatgctgatctattggctgatatatatgttaaatctttgatgactttcatctgttggctggaaccaaaataaaattataatcagaataatctattttttccgtctgttgtgctcgaaatggtagctttgaaacattttgtttgtatcctgttttatttttttatgtaaaattttatattttatgtaagcatttattgactatgtatctaaattgttataggtttcaacctccttgaattcatcgtattgctacattctgcaaaataaagcatctatctatacttggattgggagcctatcttcagctagagaccataatcttcttgatagaatggtggagctacttaatccaacatggctgcctgtttctgtgagggaagggaatgagcctgatattttctgggatgctctcggtggaaaggcagagtatccaaagggcaaagaaattcaaggattcatagatgatccacatttgtttgcattaaaaatagcgagaggtgaaagagatatacaattatacacaggatgacttaataactgaagacatcttattgcttgattgccaaagagagatttatgtttgggttggcttacattcggctatcaaatcaaaacaagaagttcttcatcttggcctgaaatttctggaaatggatgtccttgttgaaggcctatcaatgaacatccctatttatattgtaacggaaggtcatgagccaccatttttcactcgtttcttttcatgggatcactcaaatgaaaatattgttggtaactcatttgagagaaagcttgcaattctgaaaggaaaaccaaaaactttagagggacataatagaaccccgttgaaagcaaactccaggccttctactcctaatggacacagaaacatttctgttttcgcctctcgccctcgctctcgctctccccctctcctgagtagtgcaggctcagatcttaggcaatcaggtgataggcttctttctagctctactccagttgtcaagaagctccttgaaggatctccttcccatggtagtgccgaaaaaacaatgccacagtctggttctccagcaacagaactgagctcatctgacgagactgtgagtttccctcagaaggatagaaatgtggatggtgagaatatggcaacatacccctatgagcgcctgagagtggtttctgctaatccagtaactggcattgatttgaccaaaagagaggtatatttatctaatgaagagttccgcgagaagtttggaatgccaaaatctgctttctataagcttcctagatggaaacaaaacaaactgaagatgtcactggatctattttagagcaagaccaactaatggctgtgttttgtggcactatgttacaacattttaggatgatacaaattttacctcatttgtgcattaagcgtttgagcttgagttgctcacctttttgatatacgagtcgttgtatttttaccaacttactacatatttatctcttcattttatctcataatgtaatattataaatatgatgcttttggctcatgcaagtggaactatgttctattttatgcttgacccatccataacacttatttttcacgtgcgtgtagttcaacaaaaaaaaaaaaaaaaaa

SEQ ID NO: 87 - DNA, 1643 bp, Glycine max
caagaaaaaagggcacctaagaataaagatcaagaatcccatcttctatcaaataagcgaacacggttagtagcggcagagaaaggagatggaatcggcgggggagtggctggagaaggcgttggtggagttgtgctccaagattgaaactggcttgggtttaggtttggaccaagacatcatcaaaggcctcgtgtcttactgtgaccttgccgagccacgagatgccaaagagtaccttgacaatataatcggtcaggatgcagggaaaactgtgattgaagaatatttacgacggagaggttactcagaatccagcatcggctcaaatgttccaactaccaaattacatgcgtatgtcaaaccgccttcagttgagacatctgctagtggaactaagaaatcatttaaaacaccgaaagtggcaggccgcggtaatcatgcagaaccgaacaagaatgcgagtagcagtaatcaggaaaatcagactccaactgtagttagtgaatcaaaaacatcgcaaaaggggaaccaattgaattccaagaagaagaaagccgggaaagttgtctcacttgctgaggctgccaaaggatccattgtgttccagcagggaagaccatgctcctgtcaagcacgtcgtcacaggctggtcagcaactgcttatcttgtggcaaaatagtctgtgaacaagaaggagaggggccttgccatttttgtggtgcacttgtgttaagagagggcagctcgtatgctggtctggaagaaagtttgcctcccttgtcagagtctgaggctgttgctgaagcttatgcaaagagactggttgaatatgaccgaaactctgcagctcgtacaacagttattgatgaccaaagtgactactatgagattgatggaaacagttggttgtcaaaggaggagaaagaactgttgaagaagaaacaagaggagatggaagaagctgagaaagccaaacgtaatagagttgttgtgacttttgatctagttggccgcaaggtccttgtaaataaagatgaagcttcagaattacagtttgaaaatagaatattgcgtcctccggatgcaagggaagtgaaccgtatcaaaccaaatccaactctaacgtttcaacctgtttttgtggacctgggctttggtaggaaatccactaaagataagcaatcacataaaggcataagcaagggcttgtgcttggagattacagggcgagtgcagcatgatagaaatgaccagaagtatgttatgatggaaaaccaattggcaacagcttcaaatgaaaatgtttggcaagtatcttcaggaaatggaatgcacatcatggaagatgatggtcaatgtttactgaactatgataagtaaagtgccttatccagcttttagcgattactgttacattcttcatttgctttctcccattttctttttgatttgcgcgtctaagccatgaaattgatggtcctaattacttttttcagaaagaaagttaagaattttaggcagcgctatttttgtttatacactgctcagatattaaatatcagtcaactactattatctatttgtatttaaaaattacagtgattggtttaatgtaacttcaggttttcccttgccttcc

SEQ ID NO: 88 - DNA, 1477 bp, Glycine max
accagtggacactccccaatgtttctctgcggagatgtattcggcagatcttaacgttgtaggcaagcctgaagatgataagtctgcttcggcgccccccccccccaaagggctactggctcattggctgagaaaacgaaagcaaagaatgggatccccagctccagctaatggggagttattatctggaaaggatatttcttctaggagtcttgcccattctagaattgaggttgatggtagttctgagaatgatgctatggtttatcctccgtttgaattctcagttacttcccctccttccattattactgagggcactcatggaggtccgtggagaaaaaaaattactgatttaaatggaaccaaggatgagaaagacttcccctggtggtgcctggactgtgttttgaataatcggttacctcccagagaaaatactaaatgcagtttctatttgcaaccatgtgaaggctcttcagtccagatcctcacacaagggaagctaagtgccccacgtatattaagagttcacaaagttattaattatgtaatagagaagatggtgcttgacaaacctttggatagtttaagtggtgatggtagttttgcccctggacttactggatcacagtcacagcttcaagcagttggggatggatcttttcgatctggatttaagccttggcaaaagcttagaccttctattgaaatattgtgcaacaaccaggtgctgtctcctgaaatgagcttagccactgtgcgagcttatatatggaagaaatcagatgacttggttttaaattaccaactacttcaaagcaggtgactacaaattgcatatgcatcagaggttttcttgtgattatgtaaaatacttctgagcgccgattcttcttgtgttgcctgcattgatcggtggaattataggaatttgtaaattctgagccgtcatttattaccaaatttagtgacattctccaaacctgcttggatagttttttctttagtggagagctgttactgtaaattttgaactgtatctagctggcatgcatacttctgcggacatggcggaatcgtctgcatctggcatgatgatgaaggttcttaattgactgtgttgagaattagtgggaatcatactggcacagtggggtgtttttcaggaatcaggtagttgatttagagatgacaacgaaaacattgtaaatttaaattgtgcgttaaatatctgggcatagaaattatgctgtccaggtgcacatttacatcataaaattttgttagttgttaattgctaataatattaatctcatttgttcaaattagtcatttgatatccagtcacgtgctcagctagcactgtgtttgggtcctgtgatgcctgtgtatgcatatttgactttattcaatatgcaattctgaaaggcaacgttaaaaggaattagcattactcaaaaaaaaaaaaaaaaaa

SEQ ID NO: 89 - DNA, 1886 bp, Glycine max
cggatttccgggttggaccaacccttcggccaccgcttttgcccgcggctcggccgtccttgtattaaaaactcaatatcaaattctttgtcccacaaaagatggggttcactcccacaagtactgcaacatgctttctcataatagcacctctggttgtgctatggtgttggaagctactaaagtgggtgtggctgaggccaaagagattggagagagcattaagggcacagggccttcaggggaatccctacagcctcttgattggggacactaaggaaatgtacacagtgctcatgcaagctgccagatctcaacaatctacaagttcttttctctctaaggataaggatgcagcaccacatatcacaacctttaaccatcacattgtcaacaaattcggcaagaattcatttttttgggaaggtaccaaaccaaaagtggtaatcactgaccctgagcaaatcaaagaagtcttcaacaagatccaagactttgagaaacccaagttgagtcctattgtcaagttgttgggctctggacttgcaaatttagaaggcgagaaatggcgtacacatcgaaagattattaaccctgctttccatttagaaaaattgaaggttatgttaccaatatttcttgaatgttgtgacgatatggtttccaaatgggaaaggttgttgtcttcaaatgacaaatccgaaattgatgtgtggcctttccttcaaaatttaacatgtgatattatatctagaacagcatttggaagcagttatgaagatgggaaacgtatatttgaacttctgaaagagcaaactggacttatgatgaaattgcagaacgcttacattccaggatggtggttgctgccaacaactacaaataagaggatgaaaaaaattgatactgagatacgagcattacttaaaggtgtcatcaacaaacgagagaatgcaatgaaggctggtgaagtcttgaacaatgacttgttgggcatgcttttggaatcaaaccgtatggaaatacaagatcatggaaagaataacattattgcaatgactagcctagaggtaattgaggaatgcaatgcattctacatagcaggacaagaaaccacatcggttttactagtttggacaatggtgttattgagtagatatcctcattggcaagaacgtgcaagggaggaagtattgcatgtttttggtaaccaaaagccagactataatgggctaagtcaccttaaaattgtgaccatgattttatacgaggttcttaggttatacccacctttaatttattttgctcgagcgatcaagaatgatgtgaaacttggaaacctttccctacctgcgggagtgcaagtttccttaccaatactattgattcaccaggatcgtgatatttggggtgatgatgctacagagttcaacccagaaagatttgctgaaggagtagcaaaggcaacaaaaggccaagttgtgtttttcccatttggatggggtcctagagtgtgcttaggccaaaattttgctttattagaagcgaagttggttttgtcattactcttacaacgcttctcatttgagctttctcctacctatgcacatgctccagtcactgtgctcactcttaatccaaaatttggtgctcatatcatcttacataagttgtagtgtcatctattaatttgtatcctgcacacctaattatctccattcctttcttatgttctaatctcttgtatttatagagggaaacctctttattatattgaatgctatttttatttcctaaaaaaaaaaaaaaaaaaaaaaaaaaaaaaaaaaaaaaaaaaaaaaacacaaaaaaaataaaaaagataaaaaaaaaacaacgataagact

SEQ ID NO: 90 - DNA, 518 bp, Glycine max
cggacgtactctctctctctcccaaacactttctctctctaaagctgaaacttcgacactgcaacaagacaagcactcagagtgcttcgaattcgtcactgatcacgtttctgcaatgcaccgcgtgggtagtgcaagtaacggaaacaattcaactcgccctcgtaaggagaagagattaacctacgtgttgaatgattctgatgactcaaagcattgtgcaggcataaattgtctggctctacttacgtctgcggcatctgatgggtctgattatctcttcaccggcagccgtgatggcaggttaaaacgatgggcactaggtgtggatagagcaacatgcttggctacttttgaatctcatgtcgattgggttaatgatgctgttcttgttggtgatagtacacttgtttcttgttcttcagatacaacccttaagacatggaatgccttgtcctttggaacctgcactaggactctccggcaacactctgactatgttacttgcctcacagcag

SEQ ID NO: 91 - DNA, 854 bp, Glycine max
gaagtaatgtgcttttagccagctgtttggtttatttccaggtgctgtctcctgaaatgagcttagccacagtgcgagcttatgtatggaagaaatcagatgacttggttctaaattacagactagttcaaggcaggtgactacaaattgcatatgcatcagaggttttcttgtgattatgtaaaaatacttatcaacaccaattcttcttgggttgcctgcattgatcggtggtattatagaaatttgtaaattctgagccgtcatttatcaccaaatttagtgacattctccaaacctgcttggatagttttttctttagtggaaagctgttactgtaaattttgaactatatcttgctggcgtgcatacttctgctggatatggcgaaatcttctgcatctggcatgatgatgaaggtttttaattgactctgctgagaattagggggaatcatactggcacagtgggatgtttttcaggaatcaggtagttgatttagagatgacaacgaaaacattgtaaatttaaattgtgcgttaaatatctgggcatagaaattatgctgtccaggtgcacatttacatcataaaattttgttagttgttaattgctaataatattattctcatttattgaaattagtcatttgatatccagtcacgtgtatgcatatttgagtgtattcgatatgcaattctgaaaatttggcaataagtaggcattagcattagttgaaagttgaaactgtgactgtattaattgtagatatggcatcatttgctttgtggtttgtgttccaaaaaaaaaagcttatcgataccgcccacccttccaggggggggcccggtacc

SEQ ID NO: 92 - DNA, 977 bp, Glycine max
tcagctacgtaggccccccccccattcccttcgcacaataacgaagaaatagaaaaaaaaaatgttgcagcttctgtacgcggtgatattcggggaaatgttcgtgatcgcgagcttcctcttcaaaactccggcgaggaagctggtcatcatcacattggatcgggtcaagcgcggtcgcggccccgtcgtcgtcaagaccgtcgccgccacgctgctggtggttctcgcttcctcgctctacagcatcgccaagatccggcgtcggaacctcgacgctcccgtcgttaaccccaccgaccaagtactcgtgtccaagcacatgctcgaggcttctcttatggggtttgtgctgttcctgtctttgatgatagatagattgcaccattacatccgagaacttaggttactaaggaaggccatggaggctgctaagaaacagagtcggagtttcgaggatggtaaaagtgtcagtgcagcagagcacaaggcgttgttggaagaaaacgccatgttgaagcccaaaattgagaaactggaatctgagtgtgaggtggaagcaagcaaggctaaggccttggaaaccgaggtggaagctcttagaaagcaatctgaggggttccttatggaatatgatcgcctcttggcagacaatcagaatcttcggagtcagttgcaggctattgaccacagctctcctcattctgttaacaaaaagagcatgtgaaggttcagatatgcagagcaattttctcctttgattcagctgtttctgcttatacgaatgctattaggccatgtttggagcatgtgatgaggataaaataatagaatgggctaatggtgtaaaaatatgaaatgcttggtgttattaacatatagactttttgtgtatacaaatttaaatttatgaagtttcccttttatgtaaaaaataaaatctcccatggttttttccgaaaaaaaaaaaaaaaaaa

SEQ ID NO: 93 - DNA, 1244 bp, Glycine max
ttacgattctccagctggttatgacattccttacttcagacccacttcagctacgtaggccccccccccccacattattgggtgaatgcaggctttgatctcccatccaaccaacactcctgcttccacaattgccatggtgcaacaacagcaacctcctgtgccacagatgtatccacaagttcatgtttcacacttcgctaatcttatgccatatcgtcagtttctgtccccggtctatgttccacccatggccatgcctggatattcaagtaatcctccctatcctcacccaacaaatggcagcagttacttgttaatgcctggaggtggttcacatcttaatgccaacaatctcaaatatggagttcaacagttcaagcctgttcctgctggaagtcctacagggtttggaaattttgctaacccaactggatatgccatgattactcctggtgtggttgggggtgcaacggctttagaagattcatctcgagtcaagtacaaagataatctttatgtcccaaatcctcaggctgagacatcagaaatttggttacagaatccaagggaccatcctggcatgcaatctactccatactataacatgccagggcaaacacctcatgcggcttacatgccatcacacactggtcatgcttccttcaatggagccacagctcagtcttctcacatgcagttccccggcatgtaccacacccctccacagccggcagccatggctagtcctcaccatttaggaccaccagccattggcaacaatgttggagttggggtggctgcagctgctcctggagcacaggttggtgcatatcagcagcctcaattgggccacatcaactggacaacaaatttctgaaatgggataacagaaaaaaggaaagtgaatttaacctgtgtacaagggactgactgaaagtaggtatagaagaaaagtgccagttttcattgtgaaatgaatgacttatgctttttttgttttttcgttttacaaatgcaatgaggcattaaattttagtctccattgtttgcagtaggtgtgggaaatagagtttttggcttcaaaagttgaaatctcagtcattttctgaaaattccttcagataatgctgaaaagctttaactgataggatatgctgtattttttaactgatatcaattactcacaagttacttataaaaaaaaaaaaaaaaaaaaaaaaaagaaaaaaaaaaaaaaaaaa

SEQ ID NO: 94 - DNA, 1128 bp, Glycine max
  misc_feature (27)..(27): n is a, c, g, or t
tcgagtagctacgtaggcccccccccngacaacacaaccctcttcttcttcttcttctttttcttttcctctctctttgcaagaaggaagattcagattattcaccaacacaaccctcttcttcttcttccttctttctttctttctttctttctttctttctttctgcaactcaaaattgttagtcgttcaatcctcacaatatggctgccaataataatattcatgggaacactgaatctgctcaatccaacattgctcctcccgctaagcagcctctacatcctgctaaggctgttgattctcaatctgtactcaaaaggctgcaatctgaattgatggctttgatgatgagtggagattctgggatatctgcgtttcctgaggaggacaacatattcttctggaagggaacaataacaggaagcaaagatactgtgtttgaaggcacagagtataagctatcactctcctttcccaatgactaccctttcaagcctccaaaagtaaagtttgaaacaacctgcttccaccccaattttgatgtgcatggcaacatatgcttggacatactccaggataaatggtcatctgcttatgatgtcagaacaattcttctttccatccaaagtctgcttggagagccaaacattagttcaccactaaaccaacaagcagcacagctttggagcaatcaagaagaatacaggaagatggtggagaggttgtacaaatctgcaaattgatatcagtcttgcaggagagaagaagggtccattcctgtctgcttcggagaagagaaagggatgaagccattatttgtttttagggtgcccttttctgatgggcctgcttttatatattacaatttacgaattgttgcatgtttctctcttctttacaattgatagttaaaaaaaagatttcgtttttcctacattttgtgttctttgtgtgatcatgtttacgaattaaatttaagttttaacaatcataaaagacaattttgaggtgtttagggcttattgaaattgaaataagcgtttgtataaacactttcaagcacttgttaaaataatttggaagtattttatataaattgttaattttttttaaaaaaaaaaaaaa

SEQ ID NO: 95 - DNA, 1129 bp, Glycine max
gagtcgcgtcagctacgtaggccccccccccaagttctctcatactcctctcactatacgttatccgagcgagatagagaacagatagagataacactaggcagcacaagagaatggcgctgctgtgtggttcaacttccgtgactccattcctttctcacaagaacgttggtttcacaacctcagcaaaatcttcctttgttggctttcaattgccgcttccaaagctcacattatcttcttccgttcgaacccttctgccggcaacatcccgtgtccgttgccagcaagagtctactactgttacccctgtcgcagaagaagacccgcgcttcgcgtgcgtcgaacccgaaccccgattcaaaggcccggacatttggaacaagagctggtatccaaaagctgcagatcatgtgaatacagaaaaaacatggtatgttgttgatgctacagacaaagttcttggaagactagcatcgacgattgctattcacatccgagggaaaaacttggcaacctacacacccagtgtggacatgggtgcgtttgtaattgtggtaaatgcagaaaaggttgctgtatctgggaaaaagaggacccaaaagctttacaggaggcactctggacgacctggtggtatgaccgtggagacatttgcccagctgcaaaacagaattcctgaaagaattattgaacacgctgttcgtggcatgcttccaaaaggaaggcttgggaggagactattcacccaccttaaggtttataaaggcccagatcatccacatgcggcgcagaagcccgttgagttgccaataagggataagagaatacatttgcagaaataggtcataggtgtagcagagaacatggaatgaaatatgaaaattttatgtctatctatttcacagaacttcgagtttcctgctttggttgctaccttgctgatgtttccattaaatgtttatattgtctgtagaggtaactgattattgtgttacttgtttttgtcaaggtcctttgtggaatcttcataatatttttgttgtagatttgaaccttgccatgcaatattttttaatatttgaatttattggcaactttttcatttgaaggaaaaaaaaaaaaaaca

SEQ ID NO: 96 - DNA, 598 bp, Glycine max
  misc_feature (537)..(542): n is a, c, g, or t
  misc_feature (544)..(545): n is a, c, g, or t
ggctcgtgccgtcattcgtcgtcatcatatttctgatttcggcgccgggccgcctgcaagttttcgcacactacacacagaaaaaaagagagagaagatgacgcggggaaagcagaagatcgaagcgcagaagcgaaacgcagagaggaatcagaagggaaagggctctcagctcgaggccagagccgttggcctcaaagtcatctgccccatctgcaaggcccaacttgcaaatcaaaaccaactggttgatcattatgcttccaaacatccgaaggagaaacctcctgcagagtcaagctagttatatttgagcaaatggtacaaaaagtccccaaaaaaaattgctctctaggtgtgccttcgtgcttttaatgtaattctccctgcttgcaggcaggttgcaacatgttttaagttaatcatgttaatgtgcattattgtgagatcctaaaggatcataaaaactgcgtctatcattataagaatatcatcatgttgctaacttgggggtggtcataaaggaatttacttttnnnnnnanngttttaaaaaaaaaaaaaaaaaaaaaaaaaccgagactagttctctctctctc

SEQ ID NO: 97 - DNA, 775 bp, Glycine max
  misc_feature (745)..(745): n is a, c, g, or t
ccacgcgtccgctgaaacgccatttttttttttatcattcttgctttctgtcatttctctctcccgagttgctttctctcatttctctctcccgaattgttatctcccccttctttgttccttctttccatttttttcattcttcccgtttttctgtattttcttacatctaaagctgtgattttttacatcaaaattgtgatttttatctcagattccatgacaacgatatcatatttgcgttcctctccaagtttgtatttctatttgaccgtgactaactattgttcttcctttgcaacacaaaagcttcaatttttttgtgttttctgtttttttgtgttataatgacttttcgcaggacaagaggttaaattttttggtgtttctgagccttctccgacgtacccaaaggctggagcttttttgctgggtttgctagttctttgcttgatttgatcgaaaaatgatttatgggttcttttctctcctatctttctacgttttcttttttcatttgatttatttgactgtgactgactattgttcttcctttgcaacacaaaagcttcaattttttttgcgtcttatgtctttgttttgtgttataatgacttttcgcaggacaaaaggttaaattttttggtgttcctgagccttctccaacgtacccaaaggctaaagcttttttgctgagtttgacagttctttgcttgatttggcctaaaatggtttatgggtttgntttctctcctatctttctacgttttctttt

SEQ ID NO: 98 - DNA, 3292 bp, Glycine max
aaacaactctctttctctctctctctctctcagttccctcgcgcccggcgcttcgcaacgcaacgcaacgcaacacaaacgcacccttcctatactccgcagatcactctggcaccgttaattcggcgtcgccgtttcaaggaaaaaaggcattaaagaaaagattcccttggatcattcatggcatcaagatcatatgttaatctactagacttagctggaggtttactggatattcctcacacgccaaaaactattccaaggattatgacagttcctggagttatttctgatctggatgtttgtggtagatatgatggggattctgatgttagctcttctggttatcgggagcggaaaatccttgtggcaaacatgttgccattgcaggccaaaagagatattcaaactggtaaatggtgtttcagtttagatgaggattctattctgttacattaaaagatggtttttcttgtgacactgaggtgatctatgtgggatccctcaaggttgaaatagatgctcatgagcaggaagaagttgctcagaaattactggaggactttaattgcatacctacctttctaccccatgatgtccagaagaagttttattatggcttttgcaaacagcagctttggcctctctttcattacatgctacctatgttccctgatcatggtgaccggtttgatcgctcgttgtggcaggcttatgtttctgcaaacaaaatatttgcggacaaggttatggaaataatcaatcctgatgacgattttgtttgggttcaagactatcacttgatggtcttgccgacatttctgaggaagcggtataatcgcgtgaagcttggattctttcttcacagtcctttcccttcatctgaaatttaccgaactttgccagtaagggatgaaattctgaggggattgttgaattctgatttaattggtttccatacatttgattatgctcgccacttcctttcttgttgcaaaagaatgctaggtcttgactatgaatctaaacgaggacatataggacttgattactttggccgtactatatttatcaaaattcttcctgtaggcattcatatgggcaggcttgaatctgtattaaatcttcaatctacatcagctaaattgaaagagattcgggaagagtttaagggtaggaaggtgattcttggtgttgatgacatggatatctttaagggcatcagtctgaagcttctagctgttgagcagctactgcagcagaatcaagatttgaagggcaaagttgtcctagtacagattgtgaatcctgctaggagttcaggcaaggatgttcaggaagcaaagaaggaaacaaatttaattgcccagaggattaatgatacttttggttcaaacaattatcagccagtaattctcattgatcgtcctgttcctcgttttgagaagagtgcctattatgctgtagccgaatgttgcattgtcaatgctgtgagggatggtatgaacttagtcccatacaaatatattgtttgtcgacaaggaactgcacagatggataaagctttggctagaaaaagtgattctcctcgtacaagcatgcttgttgtgtctgagttcattggttgttctccttctctaagtggagcaatcagggtcaatccatggaacatagatgctgtcgctgatgctctgtattcagctgttactatgaatgattcagagaagcaattgaggcatgagaaacactacaggtacatcagttctcatgatgtggcatattgggcacgcagctttatgcaggatttggagagagcatgcaaagatcattacaccaaaagatgctggggaatgggtttgggcctagggtttagagttgtttctctttctcctggtttcagaaaattgtctgttgatcacattgtttcagcttacaaaagaaccggtagaagagccatatttcttgattatgatggtactatcgtaccaaaatcttccataaataagacccccagccctgaagtcatatccgtgctaaatgatatgtgcaatgatcctaaaaatactgtgttcattgtgagtggaaggggaagagattctttaagtgagtggtttacttcatgcaaaatgattggacttgcagccgaacatggatactttctaaggtgtgtatttaagtgttagaaagattcgggtaccttgtcgcctgagcttgattggaagagcattgtggaacctgtcatgcagttgtatacagaggcaactgatggatctaatattgaaactaaggaaagtgctttggtctggcatcatcaagatgcagaccccgactttggctcatgccaagccaaagaattgttaaatcatctggaaagtgtcctcgctaatgaacctgcagttgttaccaggggccggcatattgttgaagtcaagccacaggggttaaacaagggcttggtagctgaaaaggttctttccaatatggttaatgatggtaatccaccagattttgtgatgtgtgtgggagatgacatttccgatgaagacatgtttgagagcatattaaggacagtttcatgcccttcattgccagtagttccagagatctttgcctgcactgtaggtcagaaacctagcaaggccaaatattatcttgatgaccctgctgatgtcatgaagttgcttcaaggccttggtgcttcatctaagccaaagccaaggcatctagcacaattccaagtttcttttgagagcacggtttgagttattggttccttgtgcttcttctctagttgggaggattaatattcttcacatgtgaatcagggaatgttaggttattaatggttcccctgacatatatggtgggaccttgctgttgcagataggattctttgcacctgaacgggtttttaatggcttgtttttttgtgttcagtagtgcggttcatgaatgagctttgacaaattcttctcacgtacatggttacatcaaattgttgtatttgctggtgcctagaactgtagaacatgtagttgtttgcattgaacatgaggcaccaaatagcttgtacagttacactatttttctttactatacataatggcgatctggtttgagatatcttgcttcggcctaatggtaaagggtaatccctgaccttgataaaataaatgaaattgctaggagtggttatggatacatgagaagtgaggggttacagttgtattaaaaaaaaaaactattaagatagacttgacccactttagaaaataaataaaggagttgcaat

SEQ ID NO: 99 - DNA, 2327 bp, Glycine max
aattttgagtgggattgttgaactctcgtccgctcgcctccgatacatttgattatgctcgccactttctttcttgctgcagtagaatgctaggtctggacggtgaatctaagcgaggacatatagggcttgattactttggccgcactatatttattaaaattttgcctgtaggcattcacatgggtaggcttgaatctgtgttaaatctttcttctacatctgctaaactaaaagaggttcaggaagagtttaaggataagaaagtaattcttggtgttgatgacatggatatttttaagggcattagtctgaaacttctagctgtggagcatctgctgcagcagaatccagatttgcagggcaaagttgtcctagttcaaattgtaaatcctgcaaggggctcagggaaggatgttcaggaagcaaagaacgaaacatattcaattgcccagaggatcaacgatacatatagctcaaataattatcagccagtcattctcattgaccgccctgttcctcgctttgagaagagtgcctattatgctgtagctgaatgttgcattgtcaatgctgtaagggatggtatgaacttagtcccatacaaatatatcgtctgcagacagggaactgctcaactagatgaagcattgggtagaaaaagtgattctccttgtacaagcatgcttgttgtgtctgagttcattggttgttcaccttctcttagtggggcaataagggtcaatccctggaacatagatgccgtagccgatgctatgtatgcagccctgactatgagtgattcagagaagcagttgcgccatgagaaacactatcggtatgtgagttctcatgatgtggcatattgggcgcgcagctttatgctggatttggagagagcctgcaaagatcattacaccaaaagatgctggggatttggtttgggcttggggttcagagttgtttctctttctcatggtttcaggaagctgtcaattgaccatattgtttcagcatacaagagaaccaatagaagggtcatctttcttgattatgatggtactgttgtacctcaatcttccataagtaaaacccccagccctgaagtcatctctgtcttaaatgctctgtgtaacaatcccaagaatattgtgttcattgttagtgggagggggagggattcactgagtgaatggtttacttcatgccaaatgcttggacttgcagcagaacatgggtactttttaaggtggaacaaagattcagaatgggaagcaagtcacttatctgcggaccttgattggaaaaagatggtggaacctgtgatgcagttgtatacagaagcaactgatggttctaatattgaagttaaggagagtgctttggtgtggcatcatcaagatgcagaccctgattttggttcttgccaagccaaagaattgttggatcacttggaaagtgtgcttgctaatgaaccagcagctgttacgagaggccagcatattgttgaagttaagccacagggaataagcaaggggttggtagctgaacaggttcttatgaccatggttaatggcgccaatccaccagattttgtgctgtgcattggagatgataggtccgatgaggacatgtttgagagcattttgaggacagtttcgtgcccatcattaccatcagctccagagatctttgcctgcactgtgggtaggaagcctagcaaggccaagtattttcttgatgatgcttctgatgttgtgaagttgcttcagggccttgctgcttcatccaatccaaaacccaggcatcttgctcattctcaagtctcttttgagagcacagtttgagttatagataagttaagacagcattattggtcttctcctgtgaatcaatgaaatttttggttattaatcttaacctgacaaacaaatggcgcggatctaattcttttttgggctcctgatccggtttgcgtggcatcaatctcggggggttttgttaaatactgcggttcattgatgcctgacaattcttctcttgtacatggtaacatcatttgttatatttgctggtgccaccgagagctttagttgtgcttagaactgttagatcttatcatcgctgtttgcactgaacaatggggcaccaaaacctgtatagttacaatatatttttgttgcaattcataatgcatttctggtttggcatctcttcaaaaaaaaaaaaaaaaaaaaaaaaaaaaaaaaaaaaaaaaaaaaaaaaaaaaaaaaaaaaaaaaaaaaaaaaaaaaaaaaaaaaaaaaaaaaaaaaaaaaaaaaaaaaaa

SEQ ID NO: 100 - DNA, 1482 bp, Glycine max
atctttgtaatccctggaacatagatgctgtggctgatgctctgtattcagctgttactatgaatgattcagagaagcaattgaggcatgagaaacactaccggtacatcagttctcatgatgtggcatattgggcacgcagctttgtgcaggatttggagagagcatgcaaagatcattacaccaaaagatgctggggaatgggtttgggcctagggtttagagttgtttctctttctcctggtttcagaaaattgtctgttgatcacattgtttcagcttacaaaagaaccggtagaagagccatatttcttgattatgatggtactatcgtaccaaaatcttccataaataagacccccagccctgaagtcatatccgtgctaaatgatatgtgtaatgatcctaaaaatactgtgttcattgtgagtggaaggggaagagattctttaagtgagtggtttacttcatgcaaaatgattggacttgcagccgaacacggatactttctaaggtggagtaaagattctgaatgggaaaccagtcccttgtctcctgatcttgattggaagaagattgtggaacctgtcatgcagttgtatacagaggcaactgatggatctaatattgaaactaaggaaagtgctttggtctggcatcatcaatatgcagaccccgactttggctcatgccaagccaaagaattgttaaatcatctggaaagtgtcctcgctaatgaacctgcagttgttaccaggggccggcatattgttgaagtcaagccacaggggttaaacaagggcttggtggctgaaaaggttctttccactatggttaatgatggcaatccaccagattttgtgatgtgtgtgggagatgacatttctgatgaagacatgtttgagagcatactaaggacagtttcatgcccttcattgccagtagttcctgagatctttgcctgcactgtaggtcagaaacctagcaaggccaaatattatcttgatgatcctgctgatgtcttgaagttgcttcaaggccttggtgcttcatctaagccaaagtcaaggcatctagcacaattccaagtttcttttgagagcacggtttgagttattggttgcttgtgcttcttctcttgttgagaggattaatattcttcacatgtgaatcagggaatgttaggttattaatgttgcccctgacatatatggtgggaccttgctgttgcagataggattctttgcgttcagtagtgcggtaatgagcttgacaaattcttctcacgtaaatggttacatcaaattgttgtatttgctggtgccacctatagctgtagttgttcctagaactgtagaacatatagttgtttgcattgaacatgaggcaccaaatagcttgtacagttacactatttttcttcactatacataatgacgatctggtttgagatatcttgcttcagcccgcggccgccgaaga

SEQ ID NO: 101 - DNA, 1330 bp, Glycine max
gagaccattacctaggtcagctacgtaggcccccccccaggcacataaccaagatcgaagggaaggaaaccgtatccaagcgtgtgacagtcaaaagaaaagacgttacagcatagcatgggattgataagcaccagtgttcccacgaacatcgttcctcaattcgggtctctccgaacatccatccgggtcggaaacccaaacccttccgggttgagtttcccacggaagaggaataacagttttgtttgcttggccgtcgatgacgagctgagacagaagcagcaagacttgagtactagcgccactgggctgggctccgcccttgaagaaaggcccgaaaatgcagatctttttgagagtacagctgaagaaacgcagggaaattttgggcaagatggtgaccgaggtgctatctatgattttctttatcctgataaagagcttcttcccgatgacaaagaaatgagcatatttgatcatcttgaagagctgcgacagagaatctttgtatcagtcctggcagttggagcaagcattttgggatgctttgcattttcaaaagaactaataatgattcttgaagctcctgttaaaacacagggtgtaagatttcttcagctagctcctggtgaatttttcttcactactttaaaggtgtctgggtactgtggccttctcttgggaattcctgtcatcctctatgaaatcatagcctttgtacttccaggacttacaaaagctgaaagaaggtttctagggccaattgttttaggctcatcggttcttttctatgccggaataactttctcctacttagttctgacacctgcagcattaaatttctttgttacctacgctgaaggtgctgttgaatcattatggtccattgatcaatactttgaatttgttctggtgcttatgttcagtacaggcttatctttccaggtacctgtcatacaatttctattgggacaacttggactggtgtctggagaccagatgctatcaatttggaggtatgttgtggttggtgcagtagtggcagctgctatagttacaccatctactgatcctctcactcaagttcttctagcggcacccttattgggtctttacttaggtggtgcatggatggtcaagcttactggacggtgaccctagccgcatcataataatgtgccagaattttcagtatgaacagatgttaatgtacattcacatagcaatctagcgtatatttttacacgtaccagagcactactcttctatattctaattgatttactagtcattcccaaagttcgtcgtgtcttggcatttggaaaaa

SEQ ID NO: 102 - DNA, 1871 bp, Glycine max
tgttgggtttggaatttgattcttcacctaccgctgttgtagtttgaaaattatataatgaaatgaagagtttgaaaataaaaatctagagtttgtgaggaaggaagatgagtttgagggcatcagagatagcgaagaagttgaatctgcaacctcacccagaaggtgggttttacgtggagacattccgagaccattccgtccagctttcgacctctcagctcccccccgaatacaaagtggatcgccctgtatcgacctccatctattttctcgttccttctgggagtgtgtctcgcctccatcgcataccctgcgccgaaacctggcatcattacatcggcgaccctctcaccgtagtggaattgaatgagaaagatgggagcgtaaaattcacttgccttggatcagatctgactcagaatcaggtgccgcagtacacggtgcctcccaacgtctggtttggctcttttcctaccaaggactttacctactctgcggacggggtattcggaagtgctgaagctgaagctgaagctgaagctagagatagtgagaggaactacactcttgtaggatgcacttgtgcccctgcgtttcagtaccaggacttcgagctcgctaagccttcttatctcctcgctcgttttccccaattccaccctctcgtcactgctctcacattccccgagtgactcacactatctatctgttctgcttttcggctttctaataatcatatagacgccttccttctatttctaattaatgcctctttcaacgcgagaaataaacattactatgttgttgttgttgttgttgttgttgttcttttcgacggaaaacttatcttattactagttttgattttaggtattggtccctgcctctttagagcgttgaaatgttttacttgtcaactagtattctgtttcctgtcttagcagtagtacttattcttccattcactttcctaatgagataattattgggtaggaatttgttttaacccaaatggaggattggagattgtagatcatttactgcatccagagtcattaattattgaatcagttagaaagctgatatgtggacaatttgcatcaaatatttaacttaattcctctgctatttataattctgccaagcgtgattttactggtgaaaaattaaggcaagtatctggaagaaaagtgaagctgagctagagccccaacattttgaactcttaggcagttcatttggcactgagactcccgggcaaatgaaggcagctcgtagctctatgcttctggttcttcaacttcttattgtcccaagcatatggttattttattttataggacatgtggggttttttatttgtaggatacctacctaccaataataatctgtatggggttggtggcatgtcatgcaaattctgtgtgtcttgcaaatacttgtatcatagaattagtaatcttagtgaatactaatctagatgcttgtttctaaagttgtacaaatactactcgcttgttcaagacagctatatatacaggaaaacagccatgaaataatcaaacgcaaaagtgcaaaacattattatttagaaaatttcgagtcaacggagttgtacatcatcagataatgaaatgccagaaggaacatccaatgaaccccaaagaggggagaaaaaagtttctttgagcacaaacaccaagctccaagtttctaagattttgggattttcttgacacatgttcaacttactaaacacagaaacaacaacacaacttaaccgtattcttatcacggaaaagaaaggggaaacgacgatcgagcctcaccgcaccacatgtgcatttcctttcattttctcagtcctg

SEQ ID NO: 103 - DNA, 883 bp, Glycine max
ccaaaatcagcacttagaagaatttaacggaagattagtaaaaaagaaaagagagagagcgtgaaggtcgggggatagggtttgccttgactcacgttggcaaattttccttttgcttcttcttgtccaaacggaatcatttatttttggattcaactttctttctctcggcgcggtgttattagcgattggaacagtgcgagcgatgccggaagaagaagtgctggagctcaagttccgtctctacgatggatccgacatcggacccttccgttactcccctgcctccaccatcgccatgctcaaggaccgcatttttgcagactggcccagagacaagaaaattataccaaaggcagcaaatgatataaagctgataagtgctggcaaaattttggaaaacaacaagacagttggccagtgtagagtaccttttggcgagcttcccaaagggggggttataaccatgcatgttgtggtgcagccatctttgctcaaaacaaaaacagagaaaaaagttgatgaggtgcccagaaaacataaatgtgcatgttcgatattgtgagaatccatcatcatcatcatcatcatcatgaagagttaagctgctgatcttgccttgctgggatatccgaaggtcatggatatgcctagctgggaagacaataatttgtaaaacagtcccaaccccatcatagttgagtgttgttggagggccttcctgtgtagcaatgcttgtcattgatgattttctcatgttctataaaatggatgtttgatgtaaaaaaaaaaaaaaaatctatatcataaaatcaaatatatatagaaaaaaacagttcagtcactattttattttctaaggatattcaacagtattcactac

SEQ ID NO: 104 - DNA, 1899 bp, Glycine max
tgactagtgatccccgggctgcaggatcgccccgcgcccgccctcgccgccttcccctgtaaaaaccctagattttcaaatctagggttttgttttcttaacttgttacggttatggttatggttctggttcaggaactgaactcccacccttgctaatttcacttttctcttctcaatcttagcctctggtttttctacattttccctccctcgctaacctctgccatgggattttcaatgctgattttgtttcacctctaaagccactccctctcttattttcttcaaccttttggcattcgcaactcatcttctttgtggtgtttctaggtaaacgagacccttgtacgtgcattcacttgacaaaatctccgagcttgttacttgaatatctggagctagcttctgggctttagatcctcttctttcttctttgcattagggttaaagatctattttttccatcattgtgaaagctatttgcttttgactagtagaagggtacctagctaaacccctgtttttacatcttcactagtttcatagtttaagaagttagtagcaccagtgaaagggtttgaagttgaggaggaaaaattatcacaattgacaaacctgttagtaaatgcatggatgggagagaaggcatggcatttcctggtggctctgctccatattacatgcagcatagaggaggaggggttggtgggtctgttccaggaaccgggacacagagtggagggtttcaaccaccctctggctttagagctttgtcaaatgtctctccaggttctgcatttaaagtagagtctcagcctcaacatgctagttttagtcatggcattaacacaggttcctctcctgatggtggaagtggagtgccttcttctggtgagcctgtgaagaagaaaagagggaggcctaggaagtatggccctgatggatctgtttccttgatgctctctcccatgtctgccactgctagttccacgccgggatcaggcacttcttcggagaaacggcccagagggcgcccacctggaagtggaaggaagcaacagcttgccactctaggtgaatggatgaacagttctgcaggactggctttttcacctcatgttatcaccgttggagttggggaggacattgtagcaaagttattgtcatttgcaaggcagagaccaagggctgtgtgcatcttaacaggaactgggacaatttcttcagtcactctgcgccaacccgcttctactagcatcagtgttacatatgagggccgatttcaaatattatgcttgtctggttcttacttggttgctgaagaaggtggacctcacaatagaacgggtggcatgagtgtttccctttctagtcctgatggtcatatcattggtggtggtgttactaggcttgttgctgcaagcccagtgcaggtggtagcatgcagtttcgtatatgggggctccaagccaaagactaaagaagtgaccactaccactactactacaaaagatagcagttcagagcctcagagtagtgataagttagcgtctccagccagtgctcctccacctaatcaaaactacacctcttcttctccgttcccaggcatttggcctgcatcgtcaaggccagtagaggttaaaagtgcacatccacatactggtattgacttgacgcgtgggtgaagaccatttattattctataagagactttgtagttttgtatagagatctcttgtaaatgaaccgaatttgtgagcattgtgactcttcctatctatcactgttgatgggtgacaagttcgcgctaacctatgctgtaaccaatggatttcagggttaagtaacagtcttgactttgcaaaaaatgtttgatgaaaaaatgaaaggcaaa

SEQ ID NO: 105 - DNA, 1706 bp, Glycine max
cattaacatggaccaaaatgattaacattcaggtaaagactcgaaaatgattaagaaagaagtgagaatacgaaagaaggggttttattgccaaatgaagaaggctcacgagacacgcatggggtcagccacatgctatccctcctcctcctccttctctctccggtggtggtgactcgccggaaaacacccactgccacctctaacgccgccgccggcgaacacccttctcaaaatctcacccgacccaattcacctttctcctctctcttctcaattccccatctgggtatccctgtttccctcaaagttctcttctttttcgtgattcagaagtgctcagtgatacccttttcttagaacaatgagagcggggaaagggagtcaggaagaggatgagtacgaggaagaagagtttggttcttccaagaaacagggcacttcctctgcccctaacaccaataaagcagatggaaaagccatcgataaggctagtgcgataagatcgaaacattctgtgactgagcagcggagaaggagcaagataaatgagagattccagatattgagggatctcatacctcatagtgatcaaaagagggacacggcatcatttttattagaggtgatagagtatgttcagtacttacaggagaaggtacaaaagtatgaaggttcatatcaaggttggggtcaagaaccctcgaagttgatgccatggagaaatagtcattggcgtgtccagagctttgccggtcaacccacggctgtaaagaatggtttgggtccagtatcaccttttcctggaaagtttgatgaaagcaatgttagtatctctccaactatgcttaatggctcccagaatacaatagatcctgatcagagcagggatattgtcaacaaaacggctgagaggcaacctgatttagtaagcaagggaatacctcttccccttgctatgcatgcaaacatgtctgttcctgtcagaagtgatggcgtacttgcacatcctcttcagggaactgtttctaatgcacaatcaactgaatgcccaacaactagtgaaccacagaatcaacaggatgaactctcggttgaaggagggacaattagcatctcaagtgcatactcccaagggttgttgaataatctaactcaagcgctacaaagtgctggtttagatctgtctcaggctagcatatcagttcagattaatcttgggaaacgggcaaacaaaggactgaattgtgggacctcttctctcaagcatcatgacaacccttcttcaaacaatcaaacaattgcacattttagagatgcaggcagtggagaagactctgatcaagcacaaaaaagaatgaaaacatataagtgatatatatgtggcattttcatgagaatccacttgcatccagatttctcacttattcttggtgcagcatataacttgtggttactgtacatccttccccatttgtttgacttttaatggttattttaaaactatttaaaccttgaacacgatcatttgtggagatattgaggcttctactgtagggagcatgtcatctatttcgcttgtatgatacatattataattataattattcagtattattgagcttttggatggcaattttatgatatatgtatacttaggaaaaaaaaaaaaaaaaaaaaaaaaaaaaagcggccgctttagagga

SEQ ID NO: 106 - DNA, 1259 bp, Glycine max
tcagctacgtaggcccccccccccccccccggaagaaaatgagaaagaagcccggtccaaagaagatgtctgagtctgacatttaaagaataaacaaaagtactggacaaaaagcccactccaaactctctctctcttctgtttgtgttctctatccacattcgttatctagtgagtgtggtggcacttctggtgttgctcaacaatggcgtccgttgcagttatggctacaagcagcgacagcaggtggtctatggcttccttgcgctctgctttgccctctcattctcctcctgtttcctcttcattgcgcttccctgtattgccatcttcaccgtcttcttcttcaacgaaactccgaatttctcgaaccaaacccaaatcccttctcacctctttcaccggcctcgctcctcttaaccccatcttcctctccgctccttcttcagaatataccggctgtgatcactcttttaccattattgacaatggtggtcgagtcactgccatgagacatgggaggcgagtgcccaaactcaacaggccccctgatcagcgtcgcgcactcatccgaggtcttacaactcagctccttaaatatggtcgcatcaagaccaccagagcaagggccagtgcaattcggaagtatgttgataaaatgatcactttggcaaaggatggttctcttcataaaaggagacaagcccttgggttcatctatgagaagcaaattgttcatgctttatttgcagaggttccagaacgttatggtgaaagaaatgggggttatacaagaattataagaaccctaccaaggcggggtgataatgcacctatggcatatattgaacttgtgtagccatcgcctttatttgggtgcatttattagcaatctcactgcaatcttgagcttggctatgtatccagtggtaaacaatgattctacagtttttcctatatttagttgtatttgtatttatgcttttttgactagttttcagtatgcatctatttctgtactcatggacaaacaaccatctttgaacttgagtgatcatctaccaaaggtcatagattcacttattttttaagattgagatgttttaagtgtgtatttgtaatatgccttatgactacttctctgtttgcggctcttgctgtaataattatttgacaaacaatcatctttgatctcaagcgatcatctgcaggtcacacattcacttattttttaagagtacaaaaaaaaaaaaaaaaaa

SEQ ID NO: 107 - DNA, 1294 bp, Glycine max
  misc_feature (1199)..(1199): n is a, c, g, or t
cgcagacgcgtcctgagtggacccagagggtgatgttagcagggcgagttgagttcttcgaacacttaagtcggagggactgctgaagacgcaacccaaccaaccatggctgcttctgatcccaacaagttgatggccaaagctgataaacaaacaagactcagtctcacgaggtggagtgcggattggaaaagtgctactgttctatatgagcaggcagctaatgggtttagagttgccaaggactatgagaatgccaaaatagcatatgagaaagcttcgaaaggacaagagatgctttcttcaccttgggatgcagctaagcacatggaatctgctgctgctctagcgaaggatctaagacactggcaagaagttgtggacttctatcgaagggcatctgaattgtatatggagtgtgggagaccccaacctgcatcagacgctcttgcaaagggagcccgtgctctggaagatagtatgtctgaagaagctattcagttatatacagatgcttgtacaattcttgaagatgatggaagagaacaaatggcctttgatctttatcgtgctgccactaatgtttatataaaacttgaaaaatatacagatgcagcatctttcatgttgagattgggcttggcagctgacaagtgtaatgctaccaatagccagtgcaaggcatatcttaatgcaattgttatctacctttatgcccatgactttatccaagctgagaagtgttataatgactgttctcagattgatgcttttctgagaagtgaccagaatcgttgtgctagcaagctacttgctgcctacagagatggagatgttgaagaaatcaaacgtattgcgcagtcaagtgttatttcacatcttgaccatgtgatcgttaagcttgcgaggaaacttccaaccggtgatgtgagtgcattgaaggctgaagatgaagaggaggcactcgatgaaaatgacctcacttaacctctgactctttttctatctgtttattaataggagtcttgatgaacccatttccatttgatgtgtgaattgaattgatcagtatatattggtttttgtataaaaaaacattttgttcttgttatacatgtggaatgcaggtaagaggagcattgttgtttatccataagaattgaacatggtaccaagggatgtacaacatgcaaacattnttttcaatcaactgagtaaaccaaaattttggacatttatcttctaattataatttaaataagattcaatgattaataaaaaaaaaaaaaaaaaa

SEQ ID NO: 108 - DNA, 1145 bp, Glycine max
gtacactatcccaagatcttcccactaattcaaccatcgaatacactattgaccattaactagaaaattttgaaatctcatctgatttttttcaattgaaacggagcttcaaagcatggcagcttttacatcaattgttgtgcagtactcatccacatcatctttacagtctttggtaccttctttagaagctacacgcgatcataattcatggtgggggagagtgagatcatacagatccacaggaaaaaattcactccaacagaatatcacaagaggcttaacaatccaaaatgcagccacaaaaccagctaagtcaccagctgaagaagactggaaggttaagcgagaatatctgctggaaaaaagggtaagaagtgtggatgcaaaggaagctttccgtcttcagaaagaaaataattttgtgattctcgacgtaaggccagaagcagagttcaaagaggctcatcctccagatgctatcaatgtgcaaatatataggcttataaaagagtggacagcatgggacattgccagacgtgctgcatttgcattttttggtatttttgctgggactgaagagaatcccgagttcatccagtctgttgaagcaaaattagataaaaatgcaaagataatagtagcttgctcagcagggggtacaatgaaaccatcacaaaatctacccgaaggtcaacaatcaaggtctctcatagcagcttacttgctggtccttgatggttataccaatgtcttccatctcgaaggcggcctttactcatggtttaaagaggatctgccaagtgtttcagaggaatgaatctagtgccaagaatgtgtgtgtagtgaagcctagacctagttttggccatgatgagaatgctgataaaagcatatgaagaatagaaccaacgaattgaaatgtcattattgaactagtgcagaaaattcttaagcaagaattggcaacaaaaatgccaggttacattctgtaaaggttgcattcctagcttaaactggaaaatgcccatttatttatcagcagtgtgtgatcagcatttttgtgatttaaaaaaaaaaaaaaaaaaaaaaaaaaaaaaacaactgaagcataatgcttcaatgaaaaaccaagttttgcattc

SEQ ID NO: 109 - DNA, 1064 bp, Glycine max
  misc_feature (1053)..(1053): n is a, c, g, or t
  misc_feature (1061)..(1061): n is a, c, g, or t
  misc_feature (1064)..(1064): n is a, c, g, or t
tttgtttcgtgggtgcaagggcagggtacacatgttgctattgcttttgaagtgcctggtggctggcaaaaggagaaagatgctattgctttgactgttttacagatgcttatgggaggaggtgggtcattctcagcaggggggcctggaaaagggatgcactcaaggctatatcttaatgtgctgaatgaatatcagcagattcaatctttttctgcattcaacagtatcttcaataatacaggactgtttggcatctatgcaagcactagccctgattttgtgccaaaaactgttgatatagcagccaaagaactaatagcaattgcttcccctggacaagttacacaggtacagcttgaccgagccaaaaaatccacaaagtctgcagttctaatgaatctggaatctagaatgattgcatcagaagatataggaaggcagattttgacttatggagaaaggaagcctgtggaacagttcttgaaggccgtagatgaaatcacgttgaatgatatcactaaaattgctcagaagattatttcctcacctttgacgatggcatcatatggggatgtcatgaatgtgccaagttatgaatctgttaacagcaagttccatgcaaaatgaaattgcatgtgatccaccttcggctcatcatattttctggatcacaagcatgcctacttccaattttcaagagcaatatacaccgaatcagcaatgctgaaaataaatcccagagaatttttttgtgcggatctgaggaaccattgttcttgttccatgtttgttttttttttttataacgatttgccttactgtattaggtgcatcggtcttatggctaatgtgcaccttaattttttattttatgaactaattctcaagagagcacgaaagccaagccacgcatgaatagatcaagaaaaatgcaagtaataattttctaacatgttctacagtttctcttggatatatttatttagggtttattaaatattaaatataatccattaaataaaaaaaaaaaaaaaaaaaaaagaaaaaaanaaaaaaanaan

SEQ ID NO: 110 - DNA, 1495 bp, Glycine max
  misc_feature (2)..(2): n is a, c, g, or t
  misc_feature (20)..(20): n is a, c, g, or t
tnttttttttttttttttgngctttatgcatgagaatcatgcattagatgataaagatcaaagtgaattttcttaaggaagtttctaggtctcattgctgctctacattaattagaaagggtgaaataaacagcattatgaccaattccatgtcacagaattaataaatcagtttaaaagactgtaattgttgctagcacaataactacaaacaaatcccactgtaatgtaaacaaaagttgtatggattacacagtttggcctggttgcctgctatatttttgaaaagcttaaaggagagaatctaaatcaaaatatcacaaaattcttctaaatcttcacaagtttgacccttcagttgagatactcacgcttgatgcttgtatcttgtatctctgaaattatctatttgaacttgacagaacttcaaacaatccacagcaactcaaccaggaggtcttttgcaccaaatctggagccaatgctacatgaggctgattttcagaacgttttgcagtcttacaatccttaatgtgttctgcaccattggtaaatttagtgaaaggactagcagacagtgaagttaacattttactatcacattcctttggcttaggctcctccacacttgacattgtcacattctcattggttaaggaatatgcgttatcctcatttatcttcattgcgacattggtcacttctacaggatggactactgacttctctagtaacacacttccagtgtcactcttttccacctcagacacagaagccatgtcagtaactaaattaacagaagagtcagcagctgaattaacagtctcctcagctggtgccatttcagtaatcaaagtcattttggaaggggaagaatcaatggagttaacaaactcatgacttgcaattgcctcttcaactgaattacaattcccatcctctgagttcttctcagcgagggattcaccctttgaagtatcgccaccattcccattctcataacataattcttttgaagtatcattagggagttcttccagggtctcgacatccgaagcacacggttgagtagctgatggtctctcttccagatcttcacttccatcattgaatggattacgatggtcaccatgttcatgaaatgcaggagaattaccctcaccacgatcacttcctttcccatctcgtgacttcaaaccatcgtttccttgggggttgttggttgatgggttgatgttgttttcctttgccttctttttcctggcagcttttctcttcctagcacctggaggcatggtgtggagagtgaaatgggatggtgggctgctatgctacccctcactattcagtggggacaatgaacacaaaccaaatctacagagattgaaagtgaactgctaatagctatgtatgtatgaatgtttctcttgtgctctgaatatatattgtatgtaatgcagtgacacagcaaagagaattattaggcttgtgaaaa

SEQ ID NO: 111 - DNA, 1292 bp, Glycine max
tcagctacgtaggcccccccccccccggtactctatctgtcatcgaccatatcactttcgtcaccttcacagatacattcgttgcaatcatccatctcacttccacaaattcctccaaattctaaccaaacccttcactactccaaattccaaaacttcttcacactccttcttttccctcttctgttgcccgatcttctgcctccaagattttggtatttgggattgatcacctggagttggaaatggttaaaagttatggagtgttctgatttgcaaaagatatcatgttgcggtgcttagagggacttaagcctttatttgcttccatattacgatgttgtgacctggatatatataaccagccaagaggccttgaagatcctgaacttcttgctagagagactgtgttcagtgtaagcgaaatagaagcactttacgagctcttcaaaaagattagcagtgctgtaatcgacgatgggttgattaacaaggaagagtttcagttggcattgttcaagacaaataaaaaagaaagtctgtttgctgatcgggtatttgatttatttgacacaaagcacaatgggatactaggttttgaagagtttgctcgtgctctctccgtttttcatccaaatgcccctattgatgataagatcgaattttcctttcaactatatgatctcaagcagcagggttttattgaaagacaagaggtgaagcaaatggtagttgctactcttgctgaatctggcatgaacctatcagatgacgttatagaaagtataattgacaagaccttcgaggaagcagatacaaagcatgatggcaaaattgacaaggaagagtggagaaaccttgttttgcgccatccgtcacttttgaagaacatgacccttcaatacctcaaggacatcaccacaacattcccgagctttgtatttcattcacaagtagacgatacttgaagataatttctcccatggcttcttcctttgggctgcatggccacttttgtacaaaaaagggcatggcagacagccttgcttttaccttacatttgttatatctttgaataatgtattttgttttgtggattcttttgctgggattttactttcattttttcttcaaacttctagacacatttggttcccatttttcaaatttcaaaagcaagattccaaggttgtgtagagtttgttttaaattatgagtatgtcatgacctcagaatattttgaaattctttatggtcaaaacttgtctaccgcatgtgacgaccaaaaaaaa

SEQ ID NO: 112 - DNA, 974 bp, Glycine max
aattcggcaccagaaacactccaaaaccaccaccttcccccgagagcacaatccgccaccaacccatcaccggaaccatgctccgcctcctaaagccgcaaccttttccctccgggcaccacctcatccaacgctgcgccgtgagcggcaccgcaaagggcaaagcgaagatcaaagcaggccaagcgctaaaacgctcccgcatcaccacgaagaaacccggatccgcgaccgcaggcccacccatgtcgcgtgagcgccaagaacgtgagcgcctctacgaacaatgccttcaagccccaacccctctccgccacctcacccaaaaggagcgcgaacgcgaagcggagcgcgagaaattgggcctcatcagcaaggatcggcagcgagaaatcgacatgatgaagcgaaaagacgacaaatttaaggtttcggagaagcccacgattattgggacacctgggttggattacgtgagtttaggtttggtggatgtggacaagttgccgaagtatgatttgacggtggaagatgggaggaggttggcgaaggagtatagtagggttttgatgaggaagcatagggcgagacaggctgcggagtccaatcttttgaggatgaagaaggaggctctggagggcgaataggatcagtggaaaggagaagattaggtgattttgtgtttatgaattttgttcactgttgaatggaatggattggaataacaaatgtcattggtttgttgttggactgattggaatgggatgcaatgtgatcaaaatgaaatatatttagttttgatgcttttattgttgttcctgttgttttgagagtttgtggaatggaactatgggatgaaactaacttactatttgtttagaggttggggatgaaatgaaatgctgtaagctgcttcgcattgtttgagattggatgaaataaaacccgacgtgatgatggttttgttttcaaaa

SEQ ID NO: 113 - DNA, 1280 bp, Glycine max
ggctcgaaaaaaaatcatgagccgcgtcaaatcacatcactgccaattcgaaatttccaatttcacagaacttttgttgcattgatctccgattttgttttccaacgcttcttcgtattctcaccaatctcaaatggcttctatctcccttcttctcgccctgttcgtgttcttcctaattgccacttctcttaccgaaagtaggaaggaattaaggaacaagcaggaaactgcattacagatgttagagcgctcaattcatttttccaacagaattaatccatcacgtgttgtccaaatctcttggcaaccaagggtttttctatacaaagggtttttgtcggacaaggagtgtgactaccttgtttctttggcatatgctgtgaaagaaaaatcctcagggaatggtggcctttcagagggggttgaaacttccttggatatggaagatgatattcttgcaaggattgaagaaagactttcagtttgggctttccttcctaaagagtacagcaagcctttgcaggtcatgcattatgggcctgagcagaatggtcggaacttagattattttacaaacaaaacccaattagaattaagtggacctttaatggcaacaattattttatatctctcaaatgatgttactcaagggggtcaaattctttttcctgaatcattgcctgggagtagcagctggtcaagttgtagtaatagcagcaatattctccaaccagtaaaagggaatgcaattctgtttttctctcttcacccaagtgcttctcctgacaagagtagcttccatgctagatgccctgtccttgagggtgatatgtggtctgcaattaaatacttctatgcaaaaccaattagtagaggtaaagtctcagccacattagatggtggtgaatgcactgatgaagatgacagttgtcccgcttgggcagccgtgggagaatgtcaacgaaaccctgtgttcatgattggatctcctgattattatggtacatgtaggaaaagttgtaatgcatgctgatcacaagttgattttacttttacactttttgtttatataattattctccctagagaaatacatgtggaattatcaattgctttttttaaaaatttcctcaagttcttttgagctgcacatcaaaaggtgctggaaatagtgtataggaaattagaacttgacacgatttagatttcaatttgatgtaatttttttgaatattcttttagtgatgtattgagtgttgacaaaaaaaaaaaaaaaa

SEQ ID NO: 114 - DNA, 759 bp, Glycine max
aacacaagtcatcccattcctgaagtatcagaactcaaatatttcttccgcatacgagttctttgatatcagtatgatacttgttgtgtggagcaacagaaaataatgggttttcgcatagtaggtattgttaggcggacttcgttttctacaacccaagcagcctccaagagggttgacgtaccaaaaggctatgctgcagtctatgttggagataagatgagacggttcacaattccagtatcatacttgaacgaaccttcatttcaagaattactcagtcaagcagaagaagaattcggatatgatcatccaatgggtggtctaacaataccatacaaggaagaggagttcctaaacgttaccgctcacttgaatgagctgtaattcaggctaacggagactgagatagattagatgaggcaaatttgtacagatggcattttcttttttgtacagaatttaaaacctgttggctgaatgagaatgcaacaaaagacattctttaagaacttttttctttttccaaatctcaattatatattgaaccgtaacattatcatatttaatttgatatatgtcagcatcaggctatcagctaattaatattgggaattaagcacagtaatcatgttggagatattgaccaacctggataagggttgttaattaatgcttcccttccttatttttcaatatatgtccgtgatctgaacaaggaacgcacaacacattatttttcctgaaaaaaaaaaaaaa

SEQ ID NO: 115 - DNA, 1381 bp, Glycine max
tccacgcgtccttctatttctttcgcgcctcgagccgaatcggctcgagttattacattagaggaatgtaacattgaagaggttgcggatgaagaggatcctccatccaaaagctcaaaggacaagaagtccaatggacctgattctggcaaagtcaaccttgtatttaaaattaccagtagagttccttataaaaccgttctgaaagcacacagtgctgttgttttgaaggctgaaagtgcagctgataagattgaatggattaaaaagataagtcaagttatacaagcaaagggaggacagataaggatctcatctgatggtgcccctactatgaggcatagcctctctgatggttccttggacacaatggctcgaagacctgctgaccctgaggaagaactccgatggatgtcacaagaagttcgtggatatgttgaagcagttttaaatagtttagctgctaatgttccaaaggcagttgtcctttgtcaagttgaaaaggctaaggaagacatgctgaatcaattatatagctctgtcagtgctcaaagcacagctaagattgaggaactgcttctagaagatcaaaatgttaagcgcagaagagatcgaatccagaaacaatcctcccttctctcaaaattgacacgccaattgagtattcatgacaaccgagcagctgctgcctctggctggtcaaatggtagtgcagagagtagcccaagaagcagcagcggacctggtgatgactggagatctgcctttgatgcagctgccaatggccctgttagtcgaagtggttcatcaagatcgggatccaatggtcacagtcgacattctagcgatcctgcacaaaatggtgatgtgaactctggttccaactctagcagccgccgaacacctaatcggttgcctcctgctcctccaggttcttcaggttacaaatattaacaggtggctgattggtgattgcttgacagttgctgttttgatacatttttggagggtgaggctgctcccgccccatttcatacggtcatcccaattctttgtttctgccggtatatgtacctgaggatatgtttgtgtaaatagaagactatagtttattagtatatgttttccgggcatttgtgtcattatccggaagtttggtatcaaggtggacttgaatgcatttatcatgttttgctattcaatattcttttcactttaatatcttttactgtttcctttttttcttgtctagaatttgcactcattttggatgcaatcgatgtatcttgttttgtaatgattgaaataatacacaatcgctgatgggtttgtgacgaccattttggggtatctcaattatgggcatattttatgtaggtct

SEQ ID NO: 116 - DNA, 1273 bp, Glycine max
  misc_feature (1077)..(1077): n is a, c, g, or t
gccgagcccaaatgtgtatcaggcaatggcatagcccgtatgagacacaaacccctattgactctactcggcagtagcagtgtctttgatggctttatcatttgttggtgttccacactggctttgtcctactcctacagctgcaaaactgcaacactttcacaagccttctacttccactcttacacccttctttccttctttttcatatccctttgttgttttcgttcgggctccgcgggccattgcgcctgccgggtcggcccgcccaagcccagccgacgacgaccctccggaagccgacgaggattcctcccacggcttttccaccttccaacaaatccagcgccaagcccaacgcgctcgccaaatcgaagaagaagactacaagaacaaccagtccacgtacctcgccgccatcgccgacgtcgaagacgcccccgacaacgcccccttcgactcctccgaggatgacctcttcggcgaaatcgacaaagctttagctctcaagcgcaaagaattcgtctcccaaggccttctccaacccaatccccccaagcaggaccaactccccgtcgccgccgtcgacgagctccaaccggacgagctcggcgacttggaggaaatcgaacgcctccagggactcaccggtgacggtaacggaagctcaaccgattctccgtttgaattcgattttgacagttatggtaaaagtaaggttaggattgtagaagggaaatttaagatgactctggctgagcttcttgacgagagtaaggtcgtgccggtgtcggtttccggtgatttggagattgaaatcaccggaattcagcacgattcgaggattgttagttctggtgatttgtttgtgtgttgtgtggggagaaaaaccgatgggcatttgtttctgtctgaggctgataagagaggtgccgttgcggttgtggctagtaaagagattgatattgaggacactttggggtgcaaggctttggttattgtggaagatactaatgctgttcttcctgctttggctgcctcgttttttaaacaaccttccaccaaaatggctgtgantcgcgataactgggacttatggcaaaacgaccaccacctgtttgattaaaagtttgtatgaggcgatggggctgcgcaccggtatgttgaactcggctgcttcatatgtacatggggataataagatggacctgggtaacctggtgccggattctgttttggttcagatttggtgggccaacatgattcacaattg

SEQ ID NO: 117 - DNA, 1379 bp, Glycine max
  misc_feature (1313)..(1314): n is a, c, g, or t
  misc_feature (1361)..(1363): n is a, c, g, or t
tcacccacacccatacaaattacaatacaattatccgttttccattcacatttgtcagttagttagcagagtgcagtgacttgagaatggccttgccagtggtcgtcgacgcagagtacctcaaagaggtcgacaaggctcgccgcgatctccgcgcactcatcgctaacaggaactgcgctcctctcatgcttcgattggcctggcacgatgccggaacttacgatgctaagaccaagactggtggacctaacggttcgatccgtaacgaggaagagtattctcacggcgccaacaatggcttgaagaaggctattgatttctgtgaggaagtgaaggaaaaacatcctaaaattacatatgcagatctctaccagcttgcgggtgttgttgcagttgaggttaccgggggtcccacaattgatttcgctcctggtagaagggattcaaaaatatctcctaatgaagggcggcttcctgatgctaaaaaaggtgtttcacatctccatgatatcttttatcgaatgggcttgactgaccgagatattgttgcactatctggaggacatacactggggagagcacatccagagagatcagggtttgatggcccttggacagaggaccctctgaagtttgataactcatactttgtggaacttttgaaagaagattctgctgggctgcttaaacttccaacagacaaggctttattggaggatgctgaatttcgccgttatgttgagctatatgcaaaggacgaggatgcattttttcgagattatgctgaatcacataagaaactttcagagctaggctttgtgccaagttcaaagccgatttctattaaggatgggaccatactggcacaaggtgctgtaggagttgtagttactgccgcagtggtgatcatcagttacttgtatgaagttcgcaaaagagggaagtaaactggacttgttcatttcacttggctgttacgtttgcgtgaccctgacccataatgtgaaaacagggttcatttttgcagcttcagattctgtttacttagtaccaataaagaataatgccacagccattcagacttttttttatatgaatagactaaaactatccctaaatactcaatttggtagcaacttcctaatatgttaatacaaattttagcattcccagttaaaaaaaaaaaaaaaaaaagttagagggtagacatgctcaaagagactaatttgttgtgtttgttacgcgcgaggaaatcagaattatgaaacccgtgactgcactagccgagagaattgtgaaaatcatgctcnnaattacactgcagtagcatagagaattctcctgttaagtgttacccnnngtgtagatagtgtttt

SEQ ID NO: 118 - DNA, 1398 bp, Glycine max
tacggaagacgacagaagggggaagcttgtgagccaattaagtaacgtgacgtggcaagagagaagtgggaaggcatgggaatagaataagcgatgggattgggaaatgggaacaccacccatacaatacaacacagttatccattcacatttcacagttagcacttagcagactctgctgcagtgaggtgaggggaggtttgtttgttgtttcgtttttcctttcctttccgccagaatccgttgagaatggcgttgccggtagtcgtcgatgcagagtacctcaaggaggtcgacaaggctcgccgcgatctccgcgcactcatcgctaacaggaactgcgctcctctcatgctccgattagcctggcacgatgccggaacttacgatgctaagaccaagaccggtggacctaacggttcgatccggaacgaggaagagtattctcacggagccaataatggcttgaagaaagctattgatttctgccaggaagtgaaggcaaaatatcctaaaattacatatgcagatctcttccagcttgcgggtgttgttgcagttgaggttactgggggtccaacaattgatttcgttcctggtagaagagattcaaaagtatctcctaatgaagggcggcttcctgatgctaaaaaaggtgttccacatctccgtgatatcttttatcgaatgggcttgactgaccgagatattgttgcactatctggaggacatacactggggagagcacatccagagagatcagggtttgatggcccttggacggaggaccctctgaagtttgataactcatactttgtggaacttttgaaagaagattctgctgggctgcttaaacttccaacagacaaggctttattggaggatgctgaatttcgctgttatgttgagctatatgcaaaggatgaggatgcattttttcgagattatgctgaatcacataagaaactttcagagctaggctttgtgccaagttcaaagccgatttctattaaggaagggaccatactggcacaaggtgctgtaggagttgtagttgctaccgcagtggtgatcctcagttacttgtatgaagttcgcaaaagagggaagtaaactggatttgttcatctcttggctgttacggttgcgtgaccctgaccctgacccatagtgtgcaaaacagggttcatttttgcagcttcagtttctgtttacttagtaacaataaagaataatgctacagacattcagacttttatatgaatagactaaaaacatccctgagtactcaaattgagagcaacttcattatacgtaaatacaaattttaacattcccagttaaaaaaaaaaaaaaaaaaaaaaaaaaaaaaaaaaaaaaaaaaaaaaaaaaaaaaaa

SEQ ID NO: 119 - DNA, 1538 bp, Glycine max
gaattcggcacgagatttgggaccaggtattgatgtaatgttgccagttgccatcttactaatgtcttatgacttaaattaactaaaatactttcttgaaaacaatttaatacatattatgatcgaggttgccacgtcggccccccccacatccgccttcttttttctctctccatccaacatcgaaacgaggtcgttttgtgttccgccgaaggcaccggaggttgtagcaggctagcagctatggatttggcatccaatctcggtggcaagattgacaaagccgaagttctctctgccgttcagaagtatgagaagtatcatgtttgctatggaggtcaagaggaagagaggaaagctaattataccgatatggttaataaatactacgatcttgttaccagcttttatgagtttggctggggggaatctttccattttgcacccagatggaaaggggaatctcttcgagagagcatcaagcgacatgaacacttccttcctttacaacttggactgaagccagggcagaaggttttggatgttggatgtggaattgggggaccattaagagaaatttctcgatttagctcaacttcaattaccgggttgaataacaatgagtaccagataacaagaggaaaggaactcaatcgcattgctggagtggacaagacttgcaattttgtcaaggctgacttcatgaaaatgccattcccagacaacagttttgatgcagtgtatgcgattgaagccacttgccatgcaccggatgcttatggatgctataaagagatttttagagtgttaaagcctggtcaatattttgctgcttatgaatggtgcatgaccgattcttttgatccccaaaacccagagcaccaaaaaatcaaggcagaaattgagattggtgatgggctacctgacattcgattgactgctaagtgtcttgaagctctgaagcaagcaggttttgaggtaatatgggagaaagatctagcagtggactctcctcttccttggtatttgcctttagacaaaagtcacttctcactgagtagcttccgtctaactgctgtcgggcgacttttcaccaaaaacatggtcaaggttctggagtatgttggactggctccaaagggtagtctaagggttcaagacttcctggagaaggctgcagagggactagttgaaggagggaagagagagattttcacaccaatgtacttcttcctggcacggaagcctgatttagacaggaactaagctggctgtacaaataggttgctgttttcatcagttacggtgattctggtagggtgaaccgtaagctaggattgtttttggccttgttgccttagtgattcttgctgtttctttgttttgtttaggttaccaacacttcattttgctgcttgtttcgatgaagcagtgctcctccatattttgtttaccctacatattatatgctcttttactttgtttaaaaggatttgcagtttttgtctttggttgaaaaaaaaaaaaaaaaagtcttc

SEQ ID NO: 120 - DNA, 1456 bp, Glycine max
ataaaatattgtggtagtaatactaataaccagtgactaagcaaaaatggttcagatatcagtttcggtggtttcactctatcgccacccagttccgatggctctcctcgccgtcacttcgcgcgctcccttcctcttctccccaaaccctaaaccactttctccatcctctttctactcccacctctctctctctcctcgctctcccaggttcccttctctccgcttccgctctgccaccggagacgccagcgacgccggcaagcccgccggtaagatctccgacgagtggggcgaggactacgatcccgaggccgaagcattgacctccaagcttcccgactcggaccctcccaaggacgaggacgagtggcaggaaggaggggcgcccgacgccggcggctacgtcgacggcgggaacggaactccggtcaccggagctgaggatccggcggaggaggaggtggacgataagttggaggcgctgaagcgtgctttggtggatactttgtatgggaccgagttagggattcgggccgggtcggaggttcgagctgaggtatccgaattggtgagtcagttggaagcggcgaatcctacactcgcccccgtggaagaacctgcccttctcaatgggaattgggtgttgctgtacactgcatcttctgaactgttgcctcttctagccgcgggaagattgcctttgttgaaggtggacaagattacacaaacaattgatactagtagctccactattataaactccacaacattgtctagcccttttgcatccttgtctttcagtgcatctgcctcatttgaagttcgaacccctacgagaattcaggttacatttaaagaaggttcaatacaacctccagagataaagtctaatgttgaactaccagaaaatgtagacatttttggccaaaagcttagcctacagcctctgcaacaatcccttggcccacttcagggtctggtggaaaacatatcgcgtgtcatttctggtcagccacctcttaagattcccatccctggcgaaaggacaagctcctggcttcttactacatatcttgataaggacttgcgaatatcaaggggggatggtggtcttttcgttcttgccagagaagggagtccacttcttgatcagtaggaaagtaatcatactcctttcttcttcccccatgtcatccccgtcccctgagaataatgtgaacggcgtattcaaaatctctccattctttttgtttattttcctcttctcaagctaatgtatatttaaaggagtgacgggttatgttgtcaggatgcaattctacaatctataaataatcagatagataatgtcaagcccttgttagctttggcgaaatattgatttggggatggaatatgaaatcgattttctgaagttactcttgagattaatgattatgagactgttctcagc

SEQ ID NO: 121 - DNA, 1446 bp, Glycine max
cccccccctcagctacgtagaaaaaaatcttggtccctcttatctgtaatgctactgggtgttgggagttgagagtgaagctcctgggtgtggtgtggtgtaggtgaagtgcaatctgtgttgatgcgttccacgttttgctgtcacttgaacctttcacccgtcatgattatgaagggcttctctgctcccatttcatcatatgtttcgcctcgagctcaagccgtcactgagccaccggcgcggattggctttttgggcctcggaatcatgggctccccaatggcccacaatctccttaaagctggtgttgatctcactgtttggaataggaccaagagcaagtgtgaccctctaatcagcctcggagcaaaatataaaccatctcctgaggaagtagcagcatcttgtgatgtcacctttgccatgctcgctgatcctcaaagtgcagtggatgtcgcttgcgggaagcatggggctgcaaatggaatgggtccagggaaaggatatgtggatgtttcaactgttgatggggacacttctaaattgattaatgggcacatgaaatccactggagccttatttttggaggctccagtttccggatcaaaaaagccagcagaagatggacaattgatatttcttacagcaggggacaaaaatctttatgaagcagttggttctctcttggacatcatggggaaatctaaattttatcttggtgatgttggaaatggagctgcaatgaaacttgttgtcaatatgatcatgggcagtatgatggcatccttttctgaaggcttacttctcagcgagaaagttgggcttgatccagatgtgctagtgcaggtagtttcacagggtgccattagtgctccaatgtactcaaccaaaggtccttccatgatacagtcgctttatccaactgcgttccctctaaagcatcagcagaaggatctaagactagccttggggttagcagagtctgtttcccaacctactccgattgcatcagctgctaatgagttatataaagttgcaaaatccaatggccttagtgatcaggatttttcagctgtcattgaagcattaaaatccaaatttcagcactcggaaaccaagtgacattcttatgagagacaagttgaagttgaaaaccgtagtaagctaggtgatatgaatcaaatatagacgtacattgtgaggcttgaccatttaaattcattccctgaattgtagaaatatatttgaatatttttccaatgttgtaaaatttttggttaaaaattgttttcaatgaacatctcgtatagatgttctcctcttaacccttttcaattgaaaaaccacgcatagcatacctacttctcaaggggattaaaatgtacagcccaggttacacacgtaatactaagtaagtagtaaaaaaattctcagtgtatggga

SEQ ID NO: 122 - DNA, 839 bp, Glycine max
  misc_feature (814)..(814): n is a, c, g, or t
  misc_feature (818)..(818): n is a, c, g, or t
aacttaagaaaaaacaagcactgccttaatacccaatcctcactctattttcctctttcacgagccaaacgcgcagcaacaagaatcaaatccacagacaagcttgaaaccatttcagggttttgttcgttctgatacgagttttcttatttcttatcatctgccttacatcattaacaaacaacaatgaccacctctttccctcgctcgctgtcctgtgtagtcaacactgctctccgccacaccaaatccgtttccaacgcagtgacacggctcctctgctcttcttcaactcagccacaacatgaaaaccctgtcagggaacaaacacagacaccacctcaagaatctctccatgatgagaacaaacaaagatatgagcccaaagaagatgacggagatggtgacagtattaacaaagaaaccggtgagattggtggacccaaggggcccgagcccactaggtatggtgattgggaacgcaatggtcgctgctctgatttttaagtataaccattatagtgtgtttggatccactttatacatgcacatctcaaactaaaatcactcaaattgaaggaaagacgagaatagtagctttcactttgacgtcgatccaaacgtgcagatgataaattaaatttcactaatattgtgccattttttctttagttctgatttgatgaccttatgattaatgattaagggtgtgtaaaaatcgaattgaagtgatttcaaactgtcttaaccggtttgattttatattccaatagttgaacggtttgacatctgattcagaatcaaactggtttcnaacnaaaaaaaaaaaaaaaaaaaaa

SEQ ID NO: 123 - DNA, 910 bp, Glycine max
aaatgaggagagaaaacgtgtcccctgggttgcgtgcttcgtttgacagcaaattcgtggtttcagcacggtaagtgctatcggttcggtggccttaacttaagaataataacaaaacaaacacagcctaatacccaatcctcactctactttccccatttatctgtcaaacgcgcagcaacaagaatcaaaatccaagggcgagctttaaaccatttcagggttttgttcgttctggtacgagttttcttatttctgatcatctgccttacatcattaacaaacaacaatgaccacccctttccctcgctcactgtcctgtgtagccaacactgctcttcaccgcaccaaatccgagcagttaactcattttgtttccaacacagtgacacggctcctctgctcttcaactcagccacaacacgaaaaccctctcagggaacaagcacagacaccacctcaagaatctctccatgatgagaacaaacaaagccatgagcccgaagaagaccacgaagatggtgacagtattaacaaagaaacaggtgagattggtggacccaaggggcctgagcccactaggtatggtgactgggaacgcaatggtcgctgctctgatttttaagtttttacttcactctgcataccataatagtgtgtttggatccactttatacatgcacgtctcaaactaaaatcacgtcaaattgaaggaaagacaagaaagctactaatagtaggtttacctttgacgcttatccaaacatgcagatgataaattaaatttcattaatattgtgtatttttttttcctattcagttctgattggatgactatatgtgaggattatgtaacgacattgtcttttgattcattcttattatgcagttaaaattgtgagaattggag

SEQ ID NO: 124 - DNA, 1539 bp, Glycine max
tcgagtcagctacgtaggccccccccccgattccattaaaacacaaaacgtagcaagagcagttacaaacgttcagtgttgttttttcaattcagattcagaaggagacgatggaagaacccgtgaaggaacagcccctctctgctgggaactctgcgcgacccaagcttcagagatacgcgcttcgttcgtcctctaaatccaaggaaaacaagcaagacaccgcacccgatctctccatttcttctgaatctaagagggggttaagtactccacacgtaagcagaagtgtaggtggtcttgatttctctggcaacaaggataagtctactagtgctaaaccaccaagaaggctctccaatcctgtgaaagcagcatctcccactccaaaccctaagttggttggcaacattaccccaatctcagagagcagaacaatgaggtctggtaaaggtcaagtgtctcaaagcagaagccagacaccggcctctgacatttccagaacatcgagcagaatgaagttcaatctcttatcttcctcttcatattggctaaaccagatcaagctctctgagtctgctgataagcacacagtttcacttggattcttcaaacttgcctcggaggcaagatgtgagcttgctgaacttggagaagtgaaagagctgcttcaaacctatgacattgctgaaaatatagagcagccacaagtgtctgagagcatttcacaggtgccagaagagggaactcgatcctctgatgatgaagaagttcactgcagttctgcatccaccatggagactgtaaaactgaaacccgaacccttggacactgaatccaccgaacctgctcctgttataatagagtcaaccaagaaggaaactagccaaaagaaaaatcccttggacactgaatcaactcaacctactcctgttaaaatagagtcaatcaagaaggaaagtagccaaaagaataaccctggatccaggttgagagaaaatctcaagaagaactctgcaaattcaagacctgcttctgacaatgggagttctaggttgtttaaaaaaccagaaaaaccaactaagcaactaaccaataagggaaaaagcgaggtcaagaaagaaggaaagaaatctgatgttattaaagctccaatcagccctacgcatgctgaaaataataatgcacagggaaacaaagaaaatatggatgttcagaccactgatgagatgagtttgacagaaatcgcgtaaacaagctgaatttttacattctcaaactttttctatgttttatgtgtgtgcagttgtgcctctctacaggaaaacagatgaaaattgttttctcaccgtttgctttccaaggccgcattacatttcatttaatcagctggaaataggcatgttttgtgcttgtaatgtgtaattgttaatcaaaccaaactaaattgaatattctggtttgtcttgtctatgcgcttttataatagtatatgcaaagacttagatttatgacataatttgcgtgtttcgttaaaaa

SEQ ID NO: 125 - DNA, 2055 bp, Glycine max
atgaacaatactttttcttacatgagaaccggacaattgcgaataaaatattttatagcaactatggcgtttcaactataaccctaaactctggaaaaaaagttataaccctaaactttaaaataattttattttgtcactatgtttttttatctactttccgtgacattatgattgatttttctccctatcctttttacttttatctccttttccgaaccgatgaccgaagtgtgccattacattgggtaacagtaaaaacctgctctgaaggccggaactttttctttataaagttgttctagaactttcaattttttcgtatctctgattcatatcacgaattcacgatggaggaccatgaggaccaaactcacccacttctcacgccgcgacaccacacaccggaccccgccgtcgtcttcacggcgaaatccgatgacatcgctccgatcgccggcgccggcgacttcgccagagagttcttcgccgagtcgaagaagctctggtacctcgccggccccgccatcttcacctccgtctgccagtactccctcggcgccgtcacccaagtcttctccggccacgtcagcaccctcgccctcgccgccatctccattgaaaactccgtcatcgccggcttctgccttggcatcacttttggaatgggaagcgcgttggaaacgctatgtggacaagcgtacggagcggggcaagtgcacatgctgggcgtgtacatgcagcgctcgtgggtgatcctgaacgccaccgcgatcctgctgacgctcctctacatcttcgcggcgccgctgctgcgggcgatagggcagacggaggcgatttcggcggcggcgggggatttcgcggtgtggatgatcccgcagctgttcgcgtacgcggtgaactacccggcgcagaagttcctgcaggcgcagagcaggatcatggtgatggcgtggattgcggcggcggcgctggtgctgcacaccgtgttcagctggctgctcatgctgaagctccggtgggggctcgtcggcgctgccgtggtgctgaacgcgtcgtggtggttcatcgaccttgcgcagctcgtttatataatgggtggggcctgcggggaggcctggtctggctttaccttcaaagcctttcacaatctttggggctttgttcgtctctctcttgcctctgctgtcatgctctgccttgaagtgtggtattttatggccctcatcctcttcgctggatatttaaagaatgcagaggtttcggtcgatgccttgtccatctgcatgaacatattgggatggaccatcatggtatcctttggaatgaacgcagccgtaagtgtgagggtgtcaaatgaactaggagcatgtcacccaagaacagcaaagttttcacttcttgttgctgtgattacttcaactctgatcggtgtcatgctctcgatggtgctgataatcttccggaaccagtaccctttcttgttttcaaatgattcagaagtgagaaagattgtggtagagctcacgcccatgttggccctttgcattgtcatcaacaacgtgcaacccgttctctcaggtgttgctgttggcgcagggtggcaggctgtggttgcttacgtgaatattgcttgttactactttttcggtattcctctgggtcttattttagggtacaagcttgacaagggggtcatggggatttggtctggaatgttgttaggaactatcttacaaacttgtgttttattcttcatggtctatagaacagattggaataaagaggcatcccttgcggaagatagaataaagcagtggggtgggcatgaagattcaaaaacgcatgctatagcgaagaataatcaagaaacatgaaaatttgaaaattctagaagcagggtgtaccttcttttattgattttttttcaagccatgacttagttgtttgctgtttctctttcccatggatcaggtggacgatcctgcattcatttttttccttaaaaaataaatgagtaatgttatgtttttctcaataaaaaaaaaaaaa

SEQ ID NO: 126 - DNA, 1289 bp, Glycine max
ccctcagctcagctacgtaggcccccccccccatatatatccctcactcactctatctcttttctccagcagcaccaaaaccacccaacactcgaactcaatatccattattaccaaaaaaaaagaaaaaaggatatcaaacacccttttcatcattaaaactctcagttccctctttccctatcaaaaccctttcccacaacactactcactccagtacaagaaaccctttttcaatttggtttcaacagcacacacacacacacatatatatatatatagcatgtttaccttgaatcattcttctgatttgtaccatgtttcccctgagctctcatcttccttggacacatcctcgccggcttcggagggctctcgtggcgtggcattttccgacgaggaggtgcggctggcggtgaggcacccgaagaagcgggcaggtcggaagaagttccgggagacgcgccacccggtgtaccggggggtgaggaggaggaactcggataagtgggtgtgtgaggtgagggagcccaacaagaagaccaggatttggctggggactttccccacgccggagatggcggctcgggcgcacgacgtggcggcaatggccctgaggggccggtatgcctgtctaaactttgctgactcggcctggcggttacctgttcccgccacggccgaggcaaaggatatacagaaggcagcagcagaagctgcccaggctttcagaccagatcaaaccttaaaaaatgctaatacaaggcaggagtgtgtggaggcggtggcggtggcggtggcggagacaacaacggcgacggcacaaggggtgttttatatggaggaagaagagcaggtgttggatatgcctgagttgcttaggaatatggtgctcatgtccccaacacattgcttagggtatgagtatgaagatgctgacttggatgcccaagatgctgaggtgtcactatggaatttctcaatttaataatgtgttttggtttggtttttgttgttagttttttggagtgaacagtgtctgtactggttttttattagtagtacggatactagttataggtggaaagattgcgagggaccaaaaggaattttcttttgaacccttttttgtcaatgtaatcaatatcacgtatatcatgaagtgaatcccttcaagtttatgtataaattaaataaaagaaaaatctagttttggtaaaaaaaatttgttaaagtagaaatcgttctttggagagtctgcaggccaatgtgcataggctcaaaacagg

SEQ ID NO: 127 - DNA, 1077 bp, Glycine max
  misc_feature (751)..(751): n is a, c, g, or t
atttgattgatgttattatttccagaaaaaaaggaggaaaaaaaagaaaaggaaaaaactccgaagagagtccggggtcccggttcggccgccgcgtcccctttccgtttcgggtgcaaatcattgacaggagagagaacctgcgcgcggagagatattttaaacgcggcggaaccctaacgagtcgaacggcagcgggggcggcgaaggcagatcggagcgcgagcgaggaggatgagcggcaaaggcggtggcggccagaaggcagggattcctccggccagtcggaagatggttcagagcttgaaggagatagtgagcaacatccccgaacacgagatctacgccactctcaaagactgtaacatggaccctaacgaagccgttagtcgcctactctcccaagatacttttcacgaggtgaagagcaaacgtgagaagaaaaaagagggtaaggacacaacggattccaggtctcgtgtggtaagcaatacatctagccgtggcggtggtgctagggttagcgctgaccgatatgttgggcgtggaggcgctactcaatttagtagtggtggtgattctggtctcctgcagggaaaacctgtactcaaaaaggaaaacggaacacctgcttatggaggtcttactgctcctgcttctagcgcattggacaataatgtaaacaggcaactaccatcctacagtgattctgtccgtgtctgtgatggtctatcttcatcacaatatggtngggatgcaatctccatgggtgggcgaacccaggtcaagtatcaatggctgacattgtcaggatgggtaggccacaggccaaggcatccatgcataactcttctctccacagtggcagccatcagaatgtttttgcacccccagaagcttcacataacaatttgcattcattgcaaggtcatgcttccaaggtgtcagaaacaaataatgaccgtggctttgctattaactccaatgttgaacagaatgatgaatggccattgattgagcatcaaccagctgtttctgtatcctcagttgtagatgatcatccaacatctgagtacc

SEQ ID NO: 128 - DNA, 705 bp, Glycine max
aattggtttttgaggtctcactctcattcccgagagataaaaaacagaaaaatcaaagtcatcatcgatgccgcctcccacgcccctgagcagcgcctccgccgcgctccgtcggcggctgcagcagtccctccgcacccgcggcggcgcggagtccgggccgagccggtggacgagcccgggccacgaagaaaggcccaagggttacctcttcaaccggacgcctccgcccccgggccaggcccgcaagtgggaggactgggagctcccctgctacgtcaccagcttcctcaccatcgtcatcctcggcgtgggcctcaacgccaagcccgatctcaccatcgaaacctgggcccacgaaaaagcccttgaacgcctcaagatcgagaactccctcgctgccgctgctacaactaataacaacaacgacgagtcatcctcctccgacgaatcggactgagtcgactcggatccctccaagttaggttttgttaaagtgaaaagaaaataggtttcttcgctgtaataagggtataacaactctttgaatttgaactccttggttacacttaattatttttcttgtgttttgaattttgcattgtgatgatgatgatgatgagattgtcgactcgcttgttattgttgttattgactctttcttgaatgtggataaagctttcctgcgctaaaaaaaaaaaaaaa

SEQ ID NO: 129 - DNA, 2066 bp, Glycine max
  misc_feature (6)..(6): n is a, c, g, or t
tcgagncagctacgtaggcccccccccccaacctttgccactgggctccgacttacatccaacgcacaaagcgagtcactcactcatggcatcctccgctctcatctccgacacccagcaatggaaggacctcaaggcacatgtggaggacatcaataaaacacatcttcgcgatctattgagcgatgataagcggtgccagtccatgctcgttgaattcgatgacattctgttggactattcaaggcaacaagccactcctgaaactatccagaagctatttgaattagcggaggctgcatcgctcaaagaaaagattatccgcatgtacagtggggaacatataaatagcacagaaaatagatcagtgcttcatgtcgctcttcgagcttcaagggatgctgtcatacagagtgatgggcagaatgttgtccctgaagtttggaaagttcttgacaagatccaggagttctctgagcagattcgcaatggttcttgggttggtgctacaggaaaggctttgaaggacgttgttgcaattggtattgggggaagcttcttaggtccactgtttgtacacactgcacttcaaacagaccccgaagctgttgaatctgcaaggggtcgtcagctgcgctttcttgcaaatgttgatcctattgacgtggctagaaatatcacaggattaaatcctgaaacaacacttgttgtggttgtttcaaagacttttacaactgctgagactatgctgaatgctcgaactcttagagaatggatttcatcagcacttgggccctctgcagttgcaaagcatatggtggctgttagcacaaatctcacgcttgtggaaaagtttggtattgatcctaaaaatgcttttgcattttgggattgggtcggtggtcggtatagtgtttgcagtgctgttggaattttgccattatctctacaatacggtttctctgtgatagagaagttcttaaggggggcttcaagcatggctcgacatttctattcgcagcccttggaaagcaatatacctgtgcttctgggtggggtgagcatatggaatgttacttttcttggatatcctgccagagccatcttaccttatagtcaagctctggagaagtttgccccacacattcaacaggttagcatggagagtaatggaaagggtgtctcgattgatggcgtccctctaccatttgaggctggtgaaattgattttggtgaacctggaactaatgggcagcatagcttttatcagctcatacatcaggggcgtgtaattccttgtgattttattggagttgtgaaaagtcagcaacctgtctttctaaaaggtgaagtggtgagtaaccatgatgagctaatgtccaactattttgcacagtctgatgcccttgcatatgggaagacagctgagcagctacaaaaggagaatgtttccccacaccttattcctcacaagacattcagcggcaatcgaccttctctcagcctactgcttccatcattgaatgcttataatattgggcagttgttggcaatctatgaacacagaattgctgtagagggtttcatttggggaatcaattcttttgatcagtggggagtagagctggggaagtcgctggctactcaagtcagaaagcaacttaatgcatctcgtactaaaggagaaccagttcagggctttaatttcagtactacaacaatgttgacaagatatcttcaggcaagttcagatgtcccagcggatctgccaactgttttaccgaagatctaagcacctttttgcagattgttattttgatgattaagaagaaaataatctggtcttgtatagcatgaccacggacatgtttattaactggtttagcacgatacttggttatccttttctcttgccgttgagttatgttctgctgaaaagtggaaagcattttggattctaaattttgtttggagcttgtcctctgacatgtttcgatatcctcattatttttttaaaaaaaactggtttagcaggataaaaaaaaatttagcaggataaaaaaaaa

SEQ ID NO: 130 - DNA, 1168 bp, Glycine max
tcagcttcggcggccccccccccccccccagcagcactcacagcgctaaccccttctcctctctctctcactgtccggttctccgatcgccgtctttgccctgcccattcctgatcaatatgtctcgaagatatgatagccgtactacaatcttctcccctgaaggacgtctttaccaagtggaatatgctatggaggccattgggaatgctggtactgcaatagggatcttgtcaaaagatggggtagttctggttggtgagaagaaagtcacatccaagctgctgcaaacctcaacttccaccgagaaaatgtacaagattgatgatcatgttgcatgtgccgtggctggaattatgtctgatgctaacatcctaatcaatactgctagagttcaggcacagcgctacacgtatgcttaccaagagccaatgccggttgagcagttggttcaatctctttgtgacactaagcaaggttacacacaatttggtggtcttcgtccatttggagtctcgttcctctttgctggctgggacaagaattttggctttcaactttacactagtgaccccagtggaaattatggtggttggaaagctgcagctattggtgccaacaaccaggcagcacagtcaattctgaaacaggactacaaggatgatatcacaagggaagaagcagttcaacttgcactgaaggtgctaagtaaaactatggacagcacaagtcttacctctgaaaagcttgagcttgcagaggtatttctctcaccctctggaaaagtcaagtatcaagtttgctccccagaaaacctgactaagctgttggtgaagtttggggtgactcaaccggcagcagacactgcttagcttctagtttcatgtaatatgccgtttaattatgcctatacagtgcatttgaacgttcttcctttcataatagacgtcagaaagtgtcccatgtcccaaatttatttcaaagttcaaactttaagcattgtgtatcttggtgtaatgctaattgctttttagttcgtatttgttttaaaaaaaaaaaaaaaaaaaaaaaaaaaaaaaaaaaaaaaaaaaaaaaaaaaaaaaaaaaaaaaaaaaaaaaaaaaaaaaaaaaaaaaaaaaaaaaaaaaaaaaaaaaaaaaaaaaaaaaa

SEQ ID NO: 131 - DNA, 1169 bp, Glycine max
ggcctcgagccgagtcggctcgaggggcaattcgagtcttgaatccctctttcaaccttaacactcctcacttcgtttccgtcgcagctttttacacactccaccgctgcttccccttcacctccgatttcgttaatcagagatcaaaatgtctcgaagatatgacagccgtacaacaatcttctccccggaaggacgtctttaccaagtggaatatgcaatggaggctattgggaatgctggtaccgcaatagggatcttatcaaaagatggggtagtgctggttggtgaaaagaaggtcacatccaagctgctccaaacctcaacttccaccgagaaaatgtacaagattgatgatcatgttgcatgcgctgtggctgggataatgtctgatgccaacatcctaatcaataccgcaagggtccaagcccaacgctacacatacgcctatcaagagcccatgccagttgagcagttagttcagtctctctgcgataccaagcaaggttacacccaattcggtggtcttcggccatttggagtttcgttcctatttgcaggatgggacaaaaactttggctttcagctttacatgagcgaccctagtggaaattatggtggctggaaagctggagccattggggcaaataaccaggcagcacaatcaatactgaaacaggactacaaggatgacatcacaagagaagaagcagtacaacttgcattgaaggtgttaagtaaaaccatggacagcacaagtctaacctcagaaaagcttgaacttgcagaggttttcctttcaccctctgggaaagtcaagtatgaagtttgctccccagaggccctgactaagatgttggtgaagtctggtgttacccaacctgcaacagacactgcctagtttgctattccatgcctggtgcactttaattatccctatcttatttatttgtggtgcttttggcattagaagacagatattggctcaaacatttttcaagcttaaacattttgcatgttggtaatgctaatggctttgtattgggtacatcttgattttaaagagagattgatggtatgcgttctatttgattaaccaaaaaaaaaaaatacacgagtttttttttttttttttttttttttgtttttgtttttttttaaaaaaaaaa

SEQ ID NO: 132 - DNA, 1238 bp, Glycine max
gcaggcttcaactgatcctgaatctgttgctgtgcttccatgggttccactaacgactgcagctttgtctctcagtcagctactaggccccccccccatcagctatgtaaagcttgaaagacttgagccttgtgaggagaaagaagcaagagaatacataaagcttccatcaagatatactcacatgaaatctaatagggaggttgaaccagccgaatttgtccatgatgaattcactaaagataaatctgttcctaagaaaattgtacgaaatggcaacaaacgtggtcgagggactaatgaacaaggacggggtaaaaagctggctaaaagagtgtgcaattctaaacgagatggtggtcgtaagaatgctaaggtcactgacaatctaagtcacagattaaaacagcaggctcgaggaacacaaggacaaggtgctgggcgaggtcgccgaaccataaggaagcggagaatgggaaagagagctgttgaagatttgttgcttggccatacgacagccagtcatagctacaagattgatagagaaccggtgagaaacttggatgaggaatgggatggagaaaaggcgagtcccatgactccggtacacattggggtggctgctgacaatagtaacagtgctgaagaggtggagtctgatgacgacaatgctcaagctgtggaatatgatcaaggaaactgggaggtaggttttaatggtgttccccccaacagatggagtaggggtttggttggaatgagtgatgaagatgtggatgcttttgaagaacttaatgacaatggcattgaggagaatgaagaggaagattcagaagcagatgttatgagtgagggttcagatgggatcccaaatacggtagtaaatgttggaggctcagactcggctttgtccgaagattcttctgattagaacatgaatttttaattggtcaatgaagggatttgcacctgaaggctgcattacatttttgatattgcagctttacaaacacctgagccccaagtcatgtcatggcttgaagagtttatggttgagtagatttagtgtatattatccatgcaaaatggagccttgtatttttaagaatcttgaagcagagggctttgtagccaacctcattttgtttttgtatttttttaacctggccttgtaatagactcattaattaataaatttttattatgccttaaaaaaaaagaaaaaaaaaaaaaaaaaa

SEQ ID NO: 133 - DNA, 742 bp, Glycine max
atataacattaggagcatagtagagaagcaaggtgctgagtaccaagagatagctaaaatgggacttgggactctgccactgaccccttcttacagcggtttctcttcaaactcaggacttatacatgacaccaccaatcacagaagggtcaatagaagcatgaaattcagagtttcagcaaaacaagagaagcaagaagagaagaaaaagcaatctttgttcagcagtgtgactgaagctcttgatttttctcaagtgagatccgctgaggatgctcagcttatagaagaggctagagaagccacaaaatcaggagaaagaatgagtagggaacagtatggagctcttagaaggaaaattggtggtacatacaaggattttttcaaatcttacgttgaagtggacggggcatatgttgaagagggctgggttgacaaaacatgcaaggtgtgcaagaaggacactaagggagaggcaaggcaagtggacaagtttggaagatatgttcatgtagcatgtctagagaaggccaacacagggaacttctttacaagactgttttctagataaagagcagcattccagagtcatggcatgaaatggtggggggaaaactcattttctcatatagtctttatacccaatgattctatttagtcatccaattatcacattagatattcagcttgtgtgtattcttgtatacaagagtgagaattaattatagtttccacgttggtc

SEQ ID NO: 134 - DNA, 537 bp, Glycine max
gtgcggcgctcgaggcggccccgccgcaaaagagaactctcactgcccccaacgaaacaaaccccaaaccctaaacagtttcagcaaaattcaccaatggctttctccaaagcattgttcctcgccgtcgtaatgtcggtgttcgtcgccgtcatctccgccgctgaagctccggctccgagccctacctctcccgctgccgccgtgtcgccgtcattcgtcgccggtgttctcgccgccggagccgctctcgcgttcggatctacactccggatctgagcgtagctcatggattttatttgtggatttttagtagaagccgagatttgagtagcattagtatataattctctctattgatattgctatgtagcgattattgctagatatgttgatttctggatctatattgcttttatggtttgactagtattcttattgttgttatcattggttctagtacataatcgatttgttttatattcaaaaaaaaaaaaaaaatttgttttctgttttaatagcttgatttctttgttt

SEQ ID NO: 135 - DNA, 934 bp, Glycine max
tccacgacggctgcgagaagacgacagaaggggagaggaaacatttgcaatggctaacaacgtcgttgttgttcttaaggtagctcctgtttctctgcctccatttcccataacaaacaatgctctcactttcaagagccaaagacacacacttcatctgaattgcttccaaaccaaaaacagaacaacctcattcccttcttcctcgtcaatcctcagaaacaaagctagttgctctgtgttggcgtgtctccctcctgaatcctcaacctcatcttccactgctaaaccctcttttccttctcctcaaactaagctttatgtcagtgggctatcatttcgtaccactgaagagagtttgcgaaatgcatttaagaattttggtcaacttgtggaagtcaagctggtgatggatagaattgctaatagaccaagagggtttgcttttcttcgttatgcaactgaagaagagtcgcagaaggctattgagggaatgcatggaaagttcttggatggaagggtcatatttgtggaagttgccaaaccgagatcagagttagcgccaaggaaacaggaagacactagattgtaatgaagatccaatcaaaggatacagtagccatatgttcatcttggattcttggtgtgcaataggaagaatcattgcagcattgtacttgacattttataaaagacccctacttgattaaagttttttgcctcccttattttccaccccactgacactcttaggattcagcaatgaaaactcttttaagcaccacggccatttctgcaatatattgccaaatttatgccatttgtgcataatgtactcgttgacaatgttacaaatgtcaatggcgtttcttgaagtagttgttatcagaaaaaaaaaaaaaaaagctgacttgcccccccgaccctcgagggg

SEQ ID NO: 136 - DNA, 1686 bp, Glycine max
agtattttatttatgttcacagcttcaaaactagggtccactgaggaaaaaaaaggagcagggagcatccgcaagggtttgttcgatttcattgtcttgtttgtctcgctgatcggagaaacataaacaataaacaatcctaaacgcacagcacaatcgcaattcgccgaatcctaaacgcagcgtttcgcgctaaatgcttctcaacagtgtgcgctagctagtttgctaagactcactggcgccatggctctttcactcggcaagctcgtcattctcgtcagcgcaggaattgctggttcagtaattgcaaaagaagggcgtctgccagatgtctctggtctcgcctctggtgcttttaaggttgttttgaggcaacttaaaagcgatgatcctgctccaactgttaaaaagcagccgcataatgatgctttgttggctcaggtaaacagtcttcggcaggaactgcaacttcttgctagagatagatcgatcactattgtaaatgcaagtggaacaggtggaagaaaatatataacagtgattgttattgttgtggtaggatatggatacgtttggtggaagggatggaagcttcctgatctgatgtttgcaacaaggcgtggtttgtctgatgcttgcacatctattggtaatcagatgggaaagctttatgaatcaattggggataccaaaaagaaattatctgcaagaatcaacggtctggataaaaatttagaagaatgtgctgccattactgaaagtaccagggaggatatatatgtaattcaacggaaagcagatacaataagtgaagattcgaagtcttttcatgttgcagtccatgttctggaatctaaaattaaagaaatagaagagaagcaggtggccacaattgaaggagtgaacatgttgtgtcaatttaccaagactttggagaatagcagatccacagagtatattcaggcatcttcttccagttcttccaggccagcccttgagcttccaccagtttcaccctcttccaggggttcacagtcaggttccgctaggctatctcttgagccaccatcagttacgccatcatcaaggactgcatccttgccaccgacattgtctacggatccaccatctccatcaatttctggtggatctttccaggaacctaaagtagacaaaagcaatggatctagttctggcttgtttgggttgatatctggcgtctatggtccattgctgacaagaactcgcagtgcgacagatgcagtagtccaaaaaactcgttcgactagttaacagtagcatgtctctttttccttttttggaccgcagtaaactatatatagattattggacctatggtggggttgaaaatcttcaccagttggtgactgttcagaagaattatgaaccgttaattatagtatgcccgagccaaattataaacgactgggcattaaattttgcagcagagaggctgtttctctcgagtttcattaggattaaaattaaaataagaatttgtccgatattcaactgggaaagctggtaaaggaaagagtcactattgaattgttctaaacccttttgttcaccgtattatttttgaattttgagaattagatgtaaaatcttgttaagcataaaaaaaaaaaaaaagaactcgagactagttcaactcgtgcc

SEQ ID NO: 137 - DNA, 1011 bp, Glycine max
ggccgtttcaagacagcaaaagaattaaattgagtcagctacgtaggcccccccccccacccttcagatttgacttactctccggcgctgccattctttctttctatcttcaatcaatttcaagatcgtaacactggtattatatggcctccttcagagcattctggaacagtccagttggtcccaaaacaactcacttttggggacctattgccaactggggatttgtggcagctggattggctgacttgaacaaacctccagaaatgatctctggcaacatgacaggagcaatgtgtgtctattcagcattgttcatgagatttgcatggatggtacagccacgcaactatctactttttgcttgccatgcctccaatgagactgttcaactctatcacttcacccgatgggcaaaggcacaggggcttctgtcggaaaagaaggaggaagcttcatcccagtgatttggtgatgctaacacattcttgagtggagcgattttaaagattttgcatttgaacttggcgatgtatgaataattgattactgattgtaagaaggggctcgtggaaactgtaaaagattgtggctgtaccagagtattcggattagaaaggattgctcagaagtctaaactatttgttgaaggcacatgggtgggtttaatatgtctaacatctggctggcccaaaagtctttaaacttataccataggcaaaggatttgtctattatatctcatactgaaattccgctcaattactctacacagttgggcgttaagaattgtactgtgactatttattcattgaaacttggatgtcatgttaataatttttaatgccctattctttctaaattgtaatctgagcatgaggaatgaataggtttctcggcataaccaaactgctagtcttcaagatcctctttcagttgcaccttacttaagcaaaagcggccttgaaaagatgattattcggttactctcatttttcttattaatatcaag

SEQ ID NO: 138 - DNA, 760 bp, Glycine max
aaaaaggcgatgccgtttgaagacgacaaaagcattaaaggtcacactgccacctttcagatttgacttcctctccggcgctgccattctcttccacggcagtgtttctctttctctctctctctatcttcaatttcgagaagtagctccagtattatatggcctccttcagagcattctggaacagtccagttggtcccaaaacaactcacttttggggacctattgccaactggggatttgtagcagctggattggctgacctgaacaaacctccagaaatgatctctggcaacatgacaggagcaatgtgtgtctattcagcattgttcatgagatttgcatggatggttcagccacgcaactatctactttttgcttgccatgcctcaaatgagactgttcaactctatcatttttcccgatgggcaaaggcacaggggcttctgtcggaaaagaaggaggaagcttcatcccagtgatttgatgatgctaacacattcttgagtggagcgattttaaagattttgcatttgaacttggtgatgtatgaataattgattactgattgtaagaaacggctcgtggaaactgtaaaagattgtggctgtaccagagtattcggattagaaaggatttctcagaagtctaaactatttgttgaaggcatatgggtggttttaatatgtctaacatctgactgacccaaaagtctttaaacttatagcacaggcaaaggatttgtctatatctcacaccg

SEQ ID NO: 139 - DNA, 1101 bp, Glycine max
cccacgcgtccgggtagattttaaagaaaggggagctccgggttgcccgcgtcgacccgcgcgcccggttatcgagtcagttcagggatattgcgaccatcgtgatgcacaagacttacaatcccgagactcagcgtccatacactatcagtatgattgaacgcctcatgcgggaaatccattttgctgttgatccacacagcacctccaagaagcaggctctggagttaattcaagaacttcagaagcacttccctataaaacggtgtccgttgagaatacgtgctactgctcctgatgaccaagtgcctgaacttttaggaaagctgaatgaatggaatgctattgttatttctaaagaaggatcttctgctcagttatccgttatttttgaattggaacctggtctatataaggattgtcatgactttgttatgaataagatgcatggaagatttgaagttcttgcacactctctttatgtggagggggatacccaagtggagcaatacaatgattatgaggatatacctgaagccttgcccaaagaaccttatgattctgtgcttcaattgaatgagaaacttcaaaagcaaacaatttcatctactagtaggcctaccgagggacaacaaaagcaaaacaagtgcagcacatgtaatgtttctttcgatgactctaagctgtacagggaacatcacaagagtgaatggcacaaacacaatatcaagcgtaagacaaggcaactcccaccacttactgaggaagagtgcatggcagacatggaattgggtgattcaaaatctgatttgaaggattattcattttaagatgatgataagtgagttggtgtaatcactttattgaagtcttgtgtgtatacttgggtcaattttgtcagcataatctgtgttatggtataaactattcacatggaaatccttaagtatggtgcaatacaaattgcaaagactaatgcatttcaattttctttgtctgagtaatttaatgtaccaagtaagtgcacctaaagatggttgtatgcaggaggtttgcttcatcgagcggttgctgtttaaggaaatgaagcagattgtctac

SEQ ID NO: 140 - DNA, 1044 bp, Glycine max
tcagctacgtaggcccccccccccccccccacgttaaccatcttcctctgttggcacgctgctagagaaatttggcgccgcaattgtcatgacccaaaattatatttttctatcgagtaacctttacaaccttgtgtcgtcaaccaccctccaccgcatcgtcgaacacccgtatgtcgtcgtcgtctcaccaccacagcgcctcgcattagagcaccgggccgtcggagcaggttttaaggttcaacccaaccaagtgtggtgtgaggaagaggtaaaaagtaacaaagaggtgaaagagaaaggaagagatgtctaggacgctagtgcagccaataggacagaagaggctaacaaatgtggcagtggtgcgtctgaagaaacatggcatgcgcttcgaaatcgcttgctaccctaacaccgtcctctcttggcgttctggcgtggaaaaggacctggatgaagtgctgcagtcccacactgtttataccaatgtttccaaaggggttcttgccaagtccaaggatttaatttcagcttttggcaccgatgaccactccaaaatttgcttagatattttaaagaaaggggagcttcaggtagctgggaaagagagggaatcattgttatcgagtcagttcagggatattgcgaccattgtgatgcacaagacttacaatcctgagactcagcgtccatacactatcagtatgattgaacgcctcatgcgggaaatccattttgctgttgatccacacagcacctccaagaagcaggctctggagttaattcaagagcttcagaagcacttccctataaaacggtgtccgttgagaatacgtgctactgctcctgatgaccaggtgcctgaacttttaggaaagctgaatgaatggaatgccactgttatttctaaagaaggatcttctgctggtatttttgaattggaacctggcctatataaggattgtcatgactttgttatgaataagatgcatggaagatttgaagttcttgcacactctctttatgtggagggggata

SEQ ID NO: 141 - DNA, 1350 bp, Glycine max
aatatacatgcacagctagagttaagagaggagatgggagaaatagaaagagaggagatgtcgtcgacaaggtgggagaaggaggaggaagaagaagaagaagaggcccaaatggatatctggaagtacatatttgggtttgtggaactggcagtgataaaatgtgcgattgagcttggcatagctgaagccatagagaagcatggaagtcccatgacactatcggagatatcatcaagtttagggtgtgatacttcacatctgaagcgcatcatgaggttcctggtgcaaagaaagatattcaaaggcgacgggtgcagcaggggctattctcaatcagctctgtctcgtcgattgatgagaaacggcgaacacagcatggctagttttctcttgctggagagtagtcctgtaatgctggcaccttggcacagtctgagtgctcgcgtcatggccaatggcaacccctcatttgcaaaggctcacggtgaagacgtgtggcgctatgctgccgcaaatctcgatcacagcaacctcatcaacgaagcaatggcatgtgatgctaagcttgttatgcctatcatcattcaaagttgcagcgaggcatttcatggcctcaagtccttggtggatgtcggtgggggcaacggcaccgccatgcgcatcctggctaaggcttgcccttccattcgacccatcaattttgatcttcctcatgtcattgccctctgcgatggcgatggcgatggcgtccaacacgtgtcaggcgacatgtttctaagtgttcctaaagctgatgctgcttttcttatgtgggttttgcacgattggtcagacgaagagtgcatccaaatcttaaagaagtgtagggaagccatatcaaattcaaaggaaaacggaagggttattattgtggaggcggtgattgaaggagaaggagaaggagaaggagggaagcatgacggattgaaggatgtgggattgatgctggacatggtaatgatggcgcacactaacttcggcaaagagcgcacactcaaagagtgggaatatgtcatcaaaatggcaggatttagctcatacactgtcaaacccattcatgctgtgcagtccgtcattatggctttctactaaaatatatccaccaaaaattacccttgcaagtttgccactaaaatgcattaaataatttaataaaaaataaaacatattgtgtgatccatcttgcacgtgtaaaacagtgtatgttaatttgttgtaacaatatgaaagcatttcattttctgtatgtttgttcgagaggagaataaaacgtatctttaaatcaaaaaaaaaaaaaaaaaaaaaaaa

SEQ ID NO: 142 - DNA, 1062 bp, Glycine max
aatctcagacagagaaaccaatcggaggaaaatgaaactagtttggtccccagagacagcatccaaagcatacatcgaaacagttcaatcttgtcggattttccgggaatccggggtggcggagctggtgtcggcgatggcggcggggtggaacgcgcagctaatcgtggagacgtggtcggaggggggagtgatagcgacgagcgtgggtttagccgtggcgagaactcacacgtgcgggaggcacgtgtgcgtggtgcccgacgagaggtcgagggcggagtacgcggagagaatgggggaggcggggatgtcgccggagatcgtggtgggggaggcggaggaggtgatggaggggttgggcggcgggatagacttcatggtggtggattccacgcgcggaaacttctccagagtgctgaggctggcgaagctgagtaacaaaggcgcggttcttatatgcaagaacgtgaactccgccaccaatattgcttcttcttcgggtttcagatggcggagcgtgctcgaagaagggtcagggtcgcgtcgtgtggttcgttcggtgtttcttcctgtggggaaggggcttgacatagcacacgtgtcggccattggggggggctccgctgctaagagatggttcaagcatgttgaccaacaatcaggggaggtgcacgtcattagacgatgaatttgtgcatatttcatttgcagttatgaggtgcattttcaatgcagcttcaacgaataaaaactaaaacaaatgttctgattctttggccgaatgagttttgtctcataattattttgtaccagatttttaacatgttctttgtctcactagggttacgtacgtttttagttttagcagcacttctattagggacagattgggacaaaagttaagtatagttgcctaggctttctcatgtccgtaactagtattcaattttgctctttcttgtgtaaatacgctgatacaatacagcatgaattgtgtatgccacagaccatcctatttgttttatgattcgttataatatagatatatcaccttactct

SEQ ID NO: 143 - DNA, 1000 bp, Glycine max
tccacacagcgcttatgagaggctcttgttcatgtcaaccaagcaataacgataaagaaagaaattttatggttatggaggtctcagcatacatttgcaacaacaacttcatcttctcttcttctcgtgccataacacaaaaatcttctgcttctttctcatcacctatgcttgtcaaatccatggccactcccaagcctcttccctcagtctctagaactgtaggctctagaaagaactcaactgtgttcccacttggggaacaacctaggagcagccccgcgacagccacgcctcccataaagcttttgacaaggatggagcagctgaagctgctgagcaaagcagagaaagcagggttgctatctgcagcagagaagtttggattctccctctcaacaatagagaggcttggactcctctcaaaggcagaagagttgggtgtgctatctgctgcaactgatcctggaactccaaggacactcttgaccctcagcttggggttgctgatccttggacccttatttgtttacttcgttcctgaggacaaccttggattggtggggttgcaggttgtggttgccttggtcagtgtaattgggggttctgctggcttggctgcctcaaattttgtatccaacttgcagaaattgaaataaatttgatgaccttttaatgtctcttaatagagccgaagacatgagtatgcagttatgttgaatatttgaagggagaactttgtcaattgtaatgatcttacctagttcgagtaggatggtctctcgtagaggatgatccaattatgttgaatatttggagagaaaactttttcacatataaatagtcttacctagtttgagtaggatgacttcttgtagagggtgcgtgtggtctttgtaccaaaatcacatgaaagaatagattaagtgaccttagcttactagtaaaaaaaaaaaaaaaaaaaaaaaaaaaaaaaaaaaaaaaaaaaaaaaaaaaaaaa

SEQ ID NO: 144 - DNA, 892 bp, Glycine max
cacacagcgcttatgagatcagctacgtaggccccccccccgaataacgataaagaaagaagtttatggttatggaggcctcggcatccatttgcaacaacagacccttcatcttctcttcctctcgtgccataacacaaaaatcttgcactctctcatcacctatgcttgtcaaatccatggccactcccaagcctcttccctcggtctctagaactgtaggctctagaaagaactcaactgtgttcccacttggggaacaacctaggagcagtcccgccacagccacgcctcccataaaacttctgacaaggatggagcagctgaagctgctgagcaaagcagagaaagcagggttgctatctgcagcagagaagtttgggttctccctctcaacaatagagaggcttggactcctctcaaaagcagaagagttgggtgtgctatctgctgccactgatcctggaactccagggacactcttaaccctcagcttagggttgttgatccttggaccgttgtttgtttacttggttcctgaggacaaccttggagaggtggggttgcaggttgtggttgccttggccggtgtaattgggggttctgctggttttgctgcatcaaattttgtatccaacttgcagaaattgaaataaatttgatgacccttttgatgtctctttaggtctcttgggacctgaaagtacttttctttgctatctcaccaagcattgttgcctctagagtgcttaatcaaggatttttgttacacttatgttgttacaaccaattctgcttatggtttttacaatcgattcctagcccggacaaaggaggaacgttgtgttagaccattggcagctaacataaaactagtccatttcaatatatt

SEQ ID NO: 145 - DNA, 1026 bp, Glycine max
gccattcaaaacaacatcggaatctaaggtgcgccagagcgcgctacgctcgactccgaagttgtccaaaacctaatcctcgtaataatccttgtataatccgaaattctccgtctacttttttttgtttggtttccggagattttgtcgtagagggatccctctggtgtaggattgtgtgtatcttcggcgatggaagctgtttcggatcaagacactagtatatgcactcactgtgatcgggctattcctgctgcaaatattgacttgcattatgctcattgctctcggaagcttgaaaaatgcaaagtttgtggtgatatggttcccagaaaaaatgcggaggatcactatctaagcacccatgcaccggtttcttgttcattatgcagtgagacaatggagcgtgatattttagatatccataaaggtgaaaattgccctcaaaggattgtcacttgtcagttctgtgagtttccattgccagcaattgatctggccgagcatcaggaagtatgcgggaatcgaacagagctttgtcacctttgtaacaaatatgttagactgcgtgaaagattcagccatgaagctcgatgcaatggcatccaagatagttctgtgggtacttcaaggaatgtgagggaagctgagagagagcaaggtgctagaagaaggccgctgccgccacagaatgacttctcaactaaacgccttcttttcacaatagccatcactggtattgctgtcatactgggatctttttttctacagaggaaagcagatcccagtgacgtgcattagcaacaaagtcaaaacattttaggatcctgcattttctgtataatccattcccctgcatcagaagccggatgagatatacttttgctaatgttgatgtattggaagtgtataacacatcggcattgtcattttataaaatatatatttaattatagactcattgaaaatgactgtagctctgcatttgatgacaataattgaaagttttaggaaaaaaaaaaaaaa

SEQ ID NO: 146 - DNA, 501 bp, Glycine max
cccacgcgtccgttccaaagcccttgtttcactttttccaatccgatatggccgccgcgaccgccttgctccgctctctccgccgccgcgaccttccctcgtcttctctctccgcctttcgttcgttgacgagtggcacaaagacatcatatgtagggaacaagtgggcaagtttgtctcggccgttcagttcaaagcctgctggtaatgatgtcattggaattgatctgggtactaccaattcatgtgtttctgttatggagggaaagaatcccaaagttattgagaattctgaaggagctcgaacaacaccatcagtggttgccttcaaccagaaagcggagcttcttgttggtacaccagccaagcgtcaggctgtgacaaacccaacaaacactctttttggaaccaagcgtttgataggtaggcgttttgatgattctcaaactcagaaggagatgaagatggctccatacaagattgtaaggcgtccatggagat

SEQ ID NO: 147 - DNA, 716 bp, Glycine max
  misc_feature (7)..(7): n is a, c, g, or t
agctccnccgcggtggccgccggttccatcttttttgtttttctctttttttttttttttttttttttttttttttttttaaccaaatccacacgcttcatagtaatgaatatataatcttcatagacaatagctataataacggagaaaaacattcgttcaaatgaacgtctaaaccgtaaggaaaattctcaaaaagttgacagacaacaaaattatcaaagctgaaacaaaaatccttgtgcctactattaagctgcgaattctgagcgtcttatcacctgaatctcatatattacttggatacatgaatactcttactcgagctcccatcgatctgggtggaaggtttgacttgaattttgcacggacaacaccactgttgccgtgaggcctcgtaaccttgccccatatgcagcggtaatggcttccatcctttttcaccttagccttgtagatataggccattttcttgccagcataccatcctacttcttctttggtgttcactccctcaatttggatcagggatgtgtttgggtactggttggacttggaccttttgtatccaaggattgtacccctcacgtagagtctgacgcgctctccttgacgacccttcaccatcgttggtagctgcacctgatacacacacaaacagcgacgacggcgtaaccctagactagaactccgaagtctacgccgcgctgtgcgaa

SEQ ID NO: 148 - DNA, 722 bp, Glycine max
tcaaatgtaatattcggttttttttttttttttttacgagctaaccaaatccacacttaatagtaacgaatatataatcttcatagacaataaccaggataactgagaaaaccattctgtcccatgaacgtctaaacagtaagaaaaattctcaaaagttgacagacgacaacaaaattatagaaaatgaaacaaaaatccttgtgcctacaaatcagctgggacttctactgagcgttttatcacctgaatctcatatgttgcttggatacatgaatactcttactcgggctcccattgatttgggtggaaggttcgacttgaattttgcacggacaataccactgttaccatgaggccttgtaaccttgccccatatgcagcggtaatggcttccattcttcttcaccttagccttgtagatataggccattttcttgccagcataccatgctacttcttctttggcattcacaccctcaatttggatcagggatgtatttggatactggtttgacttggaccttttgtatccaaggattgtacccctcacgtagagtctgacacgttctccttggcgtcccttcaccattgcagctgcacctacgaagaagcgacacacaaaaacagcgacgacggcgtgtaaccctagaactccggggggcttccgcagccgttcgtgtagacgaagcaggtgtgttgaagccagatcttcctcctgg

SEQ ID NO: 149 - DNA, 1658 bp, Glycine max
tcagctacgtaggcccccccccaaaaaaaaaaaaaatcacatttccaccgcaccaagcacgttgttcagacttgtctctcacaacagagttgagagtgaacactgaacagtgcagtgttgagtgttgagtgttgagtgttgagtttctctctcactctcagcttctaaggttccatcgctattctgaacaatcgaacattgtggattcaatcagctacttgcagcaggttagggtttcgaatctgtttctctcgtagcatgaagaaccacactcagactcttcctctcgatttgatagagctaattctcctgaaattgccggtgaaatctgttacgcgtttcaagtgtgtctgtaaatcatggctctctctgatttccgacccccaatttggcttttcccattttgacctagctctcgctgcaccctctcatcgactccttctcagatcaaatgaattctccgttcattccattgatatggatttcggtgcagtacatttcactctccctcctccatctcccccacttgccgattatgcatctttgtttactcctgcttttcatcaacattggattgattttcatagaaaacattggatgttgggctcatgcagaggcctcgtacttttaaactaccggaatagcagtgaactcgttctatggaatccatcaattggtgtatacaaacggttacctttctctgacgaatatgacttaatcaatggatacctatatggttttggctatgacatatcaacagatgactacttgcttattctgatttgtttaggtgcatatgctctatttttctccttcaaaaccaattcctggagcagagtcgatcttcatgctcgatatgtggatcctgacagtgaattccaagctgggactctcttcagtggggcttttcattggttggttttctctaactgtattgttgaacatgatgatcttcctttctcttttgaagaatatgtacctttcatcattgcctttgatctcacacaaaggagttttacggagattcctctctttgatcattttactgaggaaaaacttgaaatttatagtctgagggtaatgggaggatgtctctgtgtgtgttgctccgtccaaggaagtgaaatgaccgagatatgggtgatgaatgaatataaagtgcattcatcttggactaagaccattgttatccctatttctaatcgcttttccccaatattcatcactaaagaaggtggaattttcggatcaaatagcactggaatgttagagaagcgtaatggcaaaggggagctgcttgagcatttcattgataatgaatgtcaaggtttcaactgtgccaatctacagtctgctttgtatacagagagtctactgccactcccagtgtcattggtgggaccaagtgcagatgaccaacagtaataggcaagaaaaattgggaccaagaaatatgcaagaatattgaagctgctagtagaaagcataggcacttggaaaagaatggcatacatatgctattaaattatctattgttagtgtggaacaagtgtcagttttaatggttatttcagtaaagttggattcaaagtaagacttggcaaatcctaattggtgtaatacatactatttaatgcctcaaaaaaaaaaaaaaaaaa

SEQ ID NO: 150 - DNA, 3211 bp, Glycine max
  misc_feature (19)..(19): n is a, c, g, or t
ccggtccggaattcccggngtcgacccacgcgtccgcggacgcgtgggtgaatatagttcatcccctcccaccagaggtgatagcttttcacggggaatacatggaaaatgggaaactcgatcttcaggacgatctgataaagatagtgattctcaatctgaattggattcagattttggaaaacgttttggcaatcaatcgcgtagatcttggcaaggtcctgagcatgatgggcttctaggtagtggttcttttcctcgaccctctgggtatactcctgggttgtctgcctcgaaatttcgagctaatgacaactaccagctaaatcggtctaatgagccttatcatcctcctcgcccttataaggcacctcactcacgtcgggagactaatgactcttttaatgatgaaacatttggttctttggagtgtacaagtgaagacagggctgaagaggaaagaaaaagaagagcttcttttgaattgatgagaaaggaacaacataaagctttccaagaaaagcataagttgaacccggacaagaataacgacgattttgacataacttcacttgctgacaacgatgagaaaagggtagttaataggagcaacgagtatgtggagcctaatgtgactctatcagtgttaagcaatgatgagaaatcttcttccctttcacagactccttcagcagcaagaccacttgtaccccctggttttgcaagtgcaaagttggaacgcaatttggcaaccaagacatcccttaacactcattcaacagaggttggacaacctgcgcctggtgatactggaggtaaccatgtattcagtataaattctgacaataaagaaggaaaattattaaccaagcaagtgaataatgatcaacagaatcttcaaaatacaaatctaaatatttcaattaactatgagaaagaaaacattttaaatttaccgtcaattttggatattgccgacattaaaattggaatgggtgatcaattgaggaagagatctgctctttcagtagtcttggaagcatcagatgacaatgaatttattaatcttaatgctgaagtaaaaggaaaggaggctgtgggagcttttagtccagacaattcaaattctatcctatacaagctttttggtaacgcttcaacacctagaccgtgacaaatcgactagtattgttgagcctgatcagaaagcagatgagacatggagtccacacgccttccaatcttccaagtttgctcattggtttgttgaagaagaaaagaagccagtggatgacttgacacataggccgaatgacttgctctcacttatcgttggtggagaaaaaggggggttgcagacttctaatgtagaaacaccccagcctattgcagctaattttgctttcctaaattctgaaccaactggtgtccacgcgtccgcaaatgtagcacatactactattgacaactctgagctattgtacaagagtgataaacctgaggttttagcagcagttctaacgtgtgaagatttagaacagtcaattttgtctcaagttggtgaaaatggctcatcacgtccacagcccattcaggacaaagattttgatgcaaaatctgagcagttgactccagttgataatcatgcatcccaccacctcctttctttgttacagaagggaacctcactcaatgatatggaactatcatctattctagattcttcagacaaggtgcttaatactgaaggagtcactaccggcaatgttcttgataatcccggagaagcaaatgttgatgtttccaattcatcaaagacattgacactggaaacactttttgggtcagcttttatgaaggagcttcaatcagttggagcacccctttctgttcaaaggggttcagttgcatctgcagggcctgatgtttcacaggctcttttgtttcctttccctacctcagacaatgttcaccctcctacaggtgaacttacgctgaacaggcacggaagtggtgtcctgccatcagaacaaacaaatcaacccaaatctaatagatttgaagagcagtggttggggtatggtgattctcagggagatggtaattcatcgttacttcagagtgaaatttccaaagctagtggtttcaaggggcctcgtgatattcaccttccagaagaagatagcttgattacagctagtgatcctctgcaaaactttttatctgctggaaatttagttaaaacagatttgtcccaagacactacagttgacattactagaaaactggcagctctgaatcctgcatttagagatgaccgactcgttacgagaaatcaagaaggtctagctttccctcgtggtccatatgatatgagggaacctggtattccatatcagaatcttaatgtccaacgatctcctcagatccactctcagttgaatcacagtggtccaatgtttaaccaactggattctcatcctcctcatataagttcttatatgaagcttccaactcctgagagcatggttcatcatgactcaccaccaaatcatcaatttccaggaaatatgcttcgtcctcctttccatcaaacaaacaatggactagcagggtttgatcctcccgttcatcattctatgttacaacaacagatgcatatgcaaggaaaccttccctcacctcatttattacgtggattcccaagaggtgcacctatgccacctcatcccagcaatccaatgactggcttcatgcaggaaccaaaccctatgcaaggtcaaggcttcccatttaatggtcaccagcatcctacttttggtggccctggaatgcaattacaagctcctgatgttggcggtggaagaaatcatccagaagcacttcagaggctttttgagatggagctgaggtcaaaaaacccaaagccaatccatgcttcaggtcacagccaggggatgtatggtcaagagctagacttgggttttgggtatagatagtgtattgtcattgttgatgtgtatacttagtttgtattcacctgatgttgtgcttctctataccccctgcatggaagatgggtttcatatgatgctttcctttgaaaaaattagctattctgtaaatgatttttcatcaatttgcattttgctgggatttcaatttttgccgccttcttttgttcgacataattaaagtgcttatcagcagg

SEQ ID NO: 151 - DNA, 975 bp, Glycine max
accaggagaactagtctcgagttttttttttttttttttcaaggggcgccgccctcccccttaccactcttttccaccctctttccactgcacaccaagccaatctcggctccgctacgtaggccccccccgatccatcgaaattctagacacacaacacataaaagatttccttgttctttttactgcttaaccgttcggctatctcatatatgaacaacaacatgttaggaatgaagagacggagagatgataatgaagggtccttggatttggcaaaatgtcttatgctgttttcttgtccaatagaaagcaacaagacacaacagaaaagttttggttctgtggaatttgagtgcaagacgtgcaaccgcaagttctcttcttttcaagcactgggagggcacagggcaagccacaagaggcagaagctggagggggaagaactgaaagaacaggccaaaagtcttagcttgtggaacaaacccaaaatgcacgagtgctccatttgtggccttgaattctctctgggccaggctctgggtggccacatgagaaaacacagagcttccctcaacgaagggtttcctattattccttctatcgaccaagttattgcgaaaatcccggttttgaaaaggtcgaatagcaccagggttatgtgcttggacttggagttacacctgtagataatgactctgtgcttggaatcaactatgaaatcaccacctcagcttctttttctttgttctgactaactcttttttacctctttctggacacatgtagtattctttcatttttgtgtaaaaatttcattgacttttcccttataaagatcattgattctttatttgttaacacaaaaaaaaaacacatattatttagttggtgttggctaaccggtacgtcataccaccggattatcaaaaggttctgaatgttttaatagtattgatttttaattattttttt

SEQ ID NO: 152 - DNA, 1481 bp, Glycine max
tcgagtcagctacgtagtgcccccccggaacacgaaaatgttctcttcttcctcttcaatgtctatagcaagaccccatttggtatgaattatgaccatggctttaagttcactttttttctccactcgtttcattcccacaccctttgttacttccactagaaacataccttcttctccacgcacttgtgccagttgcattccccacaaaagagactttccactccctgcagtggcttcagtcccttaccaacccatcaactttgactacctgcaagaggaattcagtggacatggagtcacctttgaaggagttgaagacagttgtattgccaagatggagctgaaaaatggaagcattgtgaccatgatgctgccaagtggattgatcacctcatacaaggcccctatgtggcatggtggcaagttggagttgcttcataccaatgtgtcagagggagagtatggtgatgccatcattcaaggaggggtgtctctaaacttcaattttcaaactgatgatggtgaattttcttggtctccaactaattgggttctgcataagattcaaggcaatgctaatgaatctattcaggtagaattaacaaacagaacatcagatgacaagattggattaaaatacattgtgactttggaaaaagatgccttaaactcggaggttgaaatctcgaacaaaaagtctttacccgttcagatgacagggtccatcctaagtcatctcacagtaagctcaccagaagcaacttatgcactaggattagaaagatcaaattactgtagcaagcccttgtttgaatctgaatttatgttgagtcctccagatggccaggaagaaggctttggaaaaatagttgagcaactttttcctcaatggggtacaaaagatcagaataatggatcagaaggtagccagagtgaagaaatggatgaagaaatagacaactacaagcagttaagtgagaaactaagtcacgtgtacacagatgtgcctcgaaattttacagtgattgacaggggtagaagaaattcagtgtcagttggaagaactggatttgatgaaatgtacctcttcagtcctggctcaagggttgaaatttacagcaagtattcttacatatgtgttggccaagctgccatcctcaaaccaataatactaagtcctgaagatgtatggagaggtgggcagtatatacacaatccaaatcttgatgcgtaagcttgcctttgcgattgtcttaggcaaattaatagaatagaaaaaggcacaatgtgtaaaatttaggtgtccttttgaaactttatttttggtgatttggataaaagataagagcatagcaacagcaagttgatgaaaataaaaaaaggaccccctttatatattattttctgttaacagtttgcccaatgtacccaatattcaagtagtaaagactccaaagttcgagggtccatttccacag

SEQ ID NO: 153 - DNA, 1692 bp, Glycine max
  misc_feature (15)..(15): n is a, c, g, or t
  misc_feature (19)..(19): n is a, c, g, or t
tcgagtcagctacgntagngcccccccacacacacaaccaaagacgaaggaagaagggaacaacaaagtgccacctgcaacgacgtcgttctttgcaacttccagtttcttctctctgtctcgtttacctcgatcctgttcttgttcttgatgaatatgacaccagtatgcccctttgtcaaagcttctcgccctgatgataacaatgcctctaagaaatctggcgaaaactctatgaaacatcaggttgaatctgagagtaaagggaagaaagaggttaatgactcagctagtacctcaccaaagtgcccttttggatatgattcgcattcgtttaagattggtcctcttagctgtacggtgtgccaagcacttttatttgacaccagcaaatgtgtgccttgttctcatgttttctgcaaagcatgcatattgcgcttcaaggactgcccgttatgtggggctgatattgtgaagatcgagcctgatgctaatcttcaaggtgtagttgatcactttattgaaggtcatgcaaggatcaaaaggtctgttagttcagacaaaggagaagaagcaactgagagtaaaaaggtcatatatgaggatgtgtctttggaaagaggttctttcttggtgcaacaagccatgagggcattccgtgctcagaatttagaaagtgccaaatcaagactcaatctctgtgcagaggacattcgtgatcagttagaaaaagttggtaacacttcagagttatgttcacagctaggagcagtcttgggtatgcttggtgactgctgccgagcaatgggtgatgccagttctgcagttgcttattttgaagaaagtgttcaatttttgtcaaagttgccaaaagatgatttggagattacccatacactttctgtttcacttaacaaaattggagatcttaaatattatgatgaagaccttcaagctgcaagatcttactattttaaatctttgaatgttcggcgcgatgttgtcaaacacaattcaaatgttccatcccaggtgttagacgttgctgtctctcttgcaaaagttgcggatgtggacagaaatctaggggatgaaaagttagctactgatggatttcaagaagccatagacttactggaatcactcacgttgaaatctgaagctagtgggctcgagcaacggcggcaatcagtcctagacttccttagaagccaacttccagataaacaagaacaagctgaggcaccagtctgagataggtggtccacatgaagaaaggaaacacagattccgatgcaataaggggtttcggtatgccgtgggatgagtttgtaaaataagctcagcttaacaaaggcactactaatggaggaagaggagatttctgagtaatgaatattccaggcatttctggcactgcagtgtctgcctatgcctaagattctaaggcgcatcctctctgtattttcttgtgcaccactcttatattttttttttccgcctctttgattgttttcttggtgcatactgacaattgtgatccttgcatcattgtaactaaatatacttctctaataaactagaaacgaagtagcatgtagtatataggttgtgtagtttgctctacaacttgatggatacaattctatactgtgaaaagtgaaatttatagatatactcctctaatattcc

SEQ ID NO: 154 - DNA, 1581 bp, Glycine max
aaaattttcattttccactctcttatcccaaattttcattttccactctctttgatatctttttcttttctatcaacacaacaaacgaacagtgttaccatccagaaaacacaatacgacgtcgataagaaaaacgaaccctataatcgccattggaatttggaagctacgaagtaggaacgatgacagcgctggtgagaagtggagttgtgaagctcactctccaattccaaaccccttctccttctctgtctctcttctcttcttctctctccattcccaaaacatcaccaccctctctcttctccttccgccaccctctttcccattcgagcaacgcctccaaaacccccaccaccaaccctcttccttcttcttcctttgaatcccagctattcatccctccgggcattgaacctgacgaggtcgacgactccacggtccttcccggctccaacatcgccgtcggaccctacgccggggattcccgaatcaaggacgtccagttcgtcaagagcagcgcccgcgccagggattgccccaaagacgacctacccgaattcgctgttctcggtcgctccaacgtcggcaaatcctccctcatcaattccctcgtccgcaagaaagagattgctctcacttctaagaaaccagggaagacgcagctcatcaatcacttcttggtcaacaaaagctggtaccttgttgacttgcctggttacggctttgctaaagttcctgaagcagcaaaaacagattggtcctcattcacaaaagggtactttttgaacagaagtactctggttgctgtcttgcttctcattgatgcaagtgttccaccccaaaaagttgacttggattgtgcaaattggcttggacgcaataatataccaatcacttttgttttcacaaaatgtgacaaaatgaaggtggcaaaagggaaacggcccgatgagaacgtaagggattttcaagagttaatcagacaaaactacaagcaacatcctccatggattatgaccagcagtgtcactggaatgggtagagatgagcttctcttgcatatgtctcagctaagaaactactgggatcagtaagagaaagctcaaaattaagcaagatgtgagtatctatgagaaaacaggccatgcgggatcaaagttgaaattacaaaagatgcaactatatggaagaatcatgtgaaagagctatgggttgggttgagccttgaaatatttcagctggatctttcttcaggattcgggatctttgttcttcttgaactgcaacaagacatataacttgcatgggaatcaagtttgagttgtttctggataatgaatttccacatactgacactgagtattagggttaatggtaacgttttatgcaaatggggataaaaaatcacaggaaatgttgtatgctttcaactgggatatagtattgtgctagctttatttatctttagttgcctgaatacatgttttgggttaccaatccaaaaaaatcagtttgtcttcagttactggatttttcccgttggagggacacacccattgtgtctttctctctcatact

SEQ ID NO: 155 - DNA, 2596 bp, Glycine max
ttccacgcgcccacgcgtccgctttcttcattctcctcggagctttgctcgttattcttctttttcttttctttttttcgtttcgttcggaaaacgcgtaggctgtgccgtcgtttttagtgggtggatgggaacgacgtcgtgtgagtacgtgagctgggaggaggtgtttatgtcgaacgacaaggggaggagggaggttcattacttgcttaaacgacgaggcggtggctcggatctggccgttttgggaaaagagaagagcctcaaacacatgtcgtatcgctacgccattcgaaacacgtcgtcgtttcggccttactttaagctcaggtcgcgcagagaggttgttaattggttggattcaattgtttcagattcgtcttctggggatgcggctatggtgggaaaacatggttatgaacctgaaattggagccttgaaggataatcaattgcagaggatgcgcaattgtacaaaagaattctcatggatagggttgccatgggcgtgtaagaaaagaagaaagcactatcaggcatataagagaaatggttttcagatatccgtgcatgattttatatttgttctggcagaagaggacaagcgtctagttgcctacttggaagacctttatgaggattccaaaggcaataagatggttgtggtgcgctggtttcacaaaattgatgagtttcgtcctcagtcctgggcattacgaaaagtttcagaatgaggcccgttgtactcacttagagccattcatctgcaaccaccagttcgataatgatgatgtgaaaccctttgatataacacagattaagggttattggaaacaggaaattctcaggtacatgtatacccaattggactcgaagtctagtgggagttccaggcaatcagatgatgacctggaacttgatgaaaatcatatgactaccgtttttatcagacctaagaagaggctgcgccttaccaaagcagatgatgccaaagaagcagttgatttggttggccttaaaacagaaaatgtgaataacagtaagaataataccaaaatcaatactggaaacaattctgggaaactgattgggcacacaaacatgacagcaaccattaaagggacaaatgaacatgcttcacaccatttagttgtaggttccctagtcgaggtcctctctcaagacggtgggatgagaggatgctggttcagagcttctgtcattaagaagaataaagataaagtcaaggtgcaatatcaagatattcaggatgctgtcgatgaaaccaagaagcttgaggaatgggttttagcttccagaattgcagtgcctgacaacctgggtcttcgaatgcgtgggaggaccatggtccggccagctccaccatccaacaaacgagaactatcgtgggtcggcgatgttggttttgttgttgatgcttggtggcatgatggatggtgggaaggcattgttgttcaaaaggactcggaatctaattgtcatgtttatttcccaggggaaaaagtggtgtcggtatttggtcctggtaacttgagagagtctcaagattgggtggggaatgagtgggtatttgtgagggaaagacctgatcttgtggcttctgttttatctagcttgaaaacaaaacaaaactcatgcaaatccaattccaataacatccaatcaactggagcaatcaccagagatggaatacaatttgggcaatcggatacttgcttggattctgataaggatagaccaagaaaagctgaagtggttccagaccttttgaagaatgttttgtcatcccagttaaggtggaagaccaccagaaagaggaaacgtggaagaagcagcgcctcatatcagaagccacggtgcactgacacccatcagaaaaggtcaccgaatgttatgaaatcaaatgctcctgacagttttttgatcccggcatcattgaaagttgatcatgatgactgcaagtatgttggggatccttccatcttcagttcttcagttgtgccttctttaactaacatggttatgtgtaggtgactccatgattcatatcttagtttccgggttctttacttctctcactcctttgcttttaagtacatgtatttagcccctaaaccttagtgcatcttttcgatgcctgtcttgtccagatcttcacgtccagtatctattctcttcgtccatttcctttgataacagagaaatttatcttaggttagtctttttctttcccacctttcattagttttgtggtttgtggcatcgaagccaaggaggcaaggatgatgccatacaagttttggcataggaaaaagtgtaacgtagtggaataaccaagggtggctttgacttataggatagattgtgttcttttcatataaaatgatccaatgtaatttgtgtaaaactttctataagagtagcaattttcttgttcttttatattttgagctgaatgttgagttaaatagttaacgtttgtaaagttttatattttcatttagttttaaaattaagattaattgttgataaacatttgatgtaatgtaataaaatgactgtgaattactatt

SEQ ID NO: 156 - DNA, 561 bp, Glycine max
tactgctgcgagcacgcggcagaaggggaggtgaaggtggggtggaagaataaggataagttattgaaagaaaggtgaaagaatccattggtatgtgcgatcgatcatctcctctgcgaaatacaatggagctgacagcccagcagctgagccaatacaacggcactgacccatcgaagccgatctacgtggcggtgaaaggccgagtctacgacgttacctccggaaaatccttctacggccccggcggcccctacgccatgttcgccggcaaagacgccagcagggccctcgccaagatgagcaagaacgacgaagacatctccccctccctcgacggcctctccgacaaggagatcggcgttctcaacgactgggagaacaaattccaagctaagtaccctgtcgttgctcgtcttctcaattaattgtattctatctatcatatgacatcatctcaccctaataactaataataaaattcctctgtccaaattcttgatagaggattcttgcaaaaaaaaaaaaaaaaaaaaaaaaatatatttaaacattgaaaaa

SEQ ID NO: 157 - DNA, 669 bp, Glycine max
aaaggatgagttggttggtatttgtttttgttgttggctgtgcgatcactcatctcacctcttctcatcaacgctgcgaaagacaatggagctgacaccccagcagctgagccaatacaacggcacggacccatcgaagccgatctacgtggcggtgaagggccgcgtctacgacgtcaccaccggaaaatccttttacggccccggcggcccctacgccatgttcgccggcaaagacgccagcagagccctggcgaagatgagcaagaacgacgacgacatctccccctccctcgacggcctctccgacaaggagatcggcgttctcaacgactgggagaacaaattccaagctaagtaccctgtcgttgctcgtgttctcaattaatcatatgataacctaagtgtattttgtactctatcatgtgagtggcatgatctctttctgtaaccgaactcaatcaccctttaatccctaataatattaataaaattcctctatccaaattctggatacgggattggatttctctttcaaaaaaaaaaaaaaaaaaaaaaaaaaaaaaaaaaaaaaaaaaaaaaaagaaaaactcgatccttggaagcaaggccattttatgggtgcgcaatttatctgtggacactgcctatcagaccaacattgtggct

SEQ ID NO: 158 - DNA, 1083 bp, Glycine max
tttttatctaggactagtttatgcttcgtggttctgttctaatttaagttctttctaggcagcatgggcactaggagtggggcccaagtcattggccagaagcagatgggttcagagaaacaatgggctctgtgcttggatgcctaaccagtgatgactgagaacagtttcagttatgtctgtctgttttgttttatgcatgtaagttaaaactaccacccttatttttattaactaaaaagatgacttgtttgtgtcactaaaaatggtttgcggcgcgtccaaattgaacccacacttctagcaccccaatacaatgactttgcacctacctctctccctatttaaaacttcaatacacttcattgtgagtgtattttaatcttctttatcttcattcattggttctctctaaccaaccctctcttttcctaaatcctaattaaacacccctcaaccaaaaaaagcatgaagaagctcaatctaatactcagtaagtgcaagaacttgtcaaagcatctaggaagatcttcatcatttaatagcctaaggtccaagtttgctaaggaagacttatgggaaggaaatggcatgcaagaaggtgaacattgtgaaactgtatttgttggcagcacaaggaaacggtacgtgataagctccaagtatttgaaccatcctctcctcaaagctctcatcaacaattccaagcaaaagggcagtgatgaaagtgttttggtggtcaactgtgaggtggttctctttgatcatctactgtggatgctagaaaatgcagatcctaagtttggttctgactctttggaggaattggctgaactctatgtgttttaagagctttcaaagtgctaattgcatgcagatgcctaatgtatgaaaatatgtatgttgggttgtgcttgcatttttcagaatgttattgttaagagcaaaaaaaaaaaaaattattataccttgatctctatggtgcgttaaacgattatgtaattgcatagctggtttctgttctaactcatggttttcaagagccatatgctaaattaatgccatgaaatcattggtttaggt

SEQ ID NO: 159 - DNA, 1099 bp, Glycine max
acggctgcagctgccgacagaaggcgaatagattgatgttttgttggatctgcctgtaatggcctctagaggaactggaacgctgattttggtttgtctcttatggcttttcttcctatgcgccaccatagctttcttgcagctcaacttcgtagacaaaggaaccaccaacaacaacccttcctctcgcagtagtaacttcatcgcaactcaacagcatagcgctgatacccctttggaacaggatttggagggtgtcacccacaaggtgtattttgatattcagatccatggcaaattagcgggtcgcatagtcatgggcctttatgggaacacagtaccgaaaactgcagaaaactttcgagcgctttgtacaggagagaaaggagtgggaagaagtgggaagtctcttcattataaagggagcacattccataggattataccgagctttatggtccaagggggtgatttcacccgtggtgatggaagaggtggagaatcaatctatggtgataagtttgctgatgaaaactttaagctgaagcataccggaccgggatacttatccatggcaaattctggggaagacaccaatggctcccagttcttcattacaacagttaaaaccagctggctggatggacgccatgtcgtatttggcaaggtactttccggtatggatgttttgtacaagattgaagcagaaggaagtgaaagcggctcgccaaagaacaaggttgtcatattagacagtggagaattaacttcatgacatggtttatacaagttgagattgattccacagccatgattcacaaattcggtgtgcatacttcatcatttagtgaatgaataagtttgcagatgttcgtgtaatttaaggctatattgatgctattttgcttgtctacactagtcttgctcctagggaaggagttttattagggattgccagagtgggtactcattaacaatatacatcaggctgaagtgcgttttctgaactattttttttttttttaaatgtagtaggtacgaggataaattatttattcaagtgcatcatataccatgtcttttgctacaaaaaagaatg

SEQ ID NO: 160 - DNA, 1548 bp, Glycine max
gtgctggtattttattttgacgaatatgccctggggctctcgttttcgggtccgccgcgccgcccccccccccctcatacgatatggatagggtgttctcagtggacgatatctccgatcacttctggcagccgcctatccctgtctccgccgcccaaacttcctcccagatgagccgcagcgcctccgagtgggccttccaacgcttcctccaggaagcttccgcctccgcaccctctcctccgtcttcttcctccgccgccgacgtcgtattcgtcgagatcgaagatcaacctaaacccgcccctccccctccgacaaacggcgccgttctccccaatgcccctggtcccgtcccccttgactccgacgaataccaggccttcctcaagagcaagctcaacctcgcatgcgccgccgtcgccatgactaggggatctttggctaaatctcaagacccgtcccctttttctgaaggtggatcacagccgactaatccttctctagttgaatctcagactacttctaaaggatctattccttctgaaaatgatccatctaagttacaagataaagataccaatgtaccagttgggattccttccatacctgccatgcaaaagaaacctgctgttgcaattaggccatctacaagtggatcatcaagagaacagtcagatgatgaggacattgagggagagacatctatgaatgacaacacggaccctgctgatgtaaaacgagtaaggaggatgctatccaatagggagtcagcccgacgctctagaagaagaaagcaggctcatttaactgacctagaaacacaggtttctcaattaagaggtgaaaattctaccttgttaaagcgccttactgatgttagtcagaaatacagcgactctgctgttgacaacagagttttaaaagctgatgttgaaacattaagaacaaaggtgaagatggccgaagagaccgtcaaaagaattactggattgaacccattgcttcatgccatgtctgatatatcatcactgggcctgccatcatttgatggaagaagcccttcagacacttcagctgatgcagctgttcctgtgcaagatgatccacatcatcacttctatcaacccacatctactaatcctattcccagtcatgatccgatagtcaacaatggattggggggcatttcttcaattgaaaatgtgcagcagaatgctgcagtagtgctaggtgggaacaagatgggtcaaacagcatccctgcagcgggtggctagcttggaacatctacaggagcggattcgtggtggacctccatctaatggggagcagtgactaattagccaaatctcctggatgctttgccaggaaattattctaaaacagttatttctgttggttataactagaggcctattcttctggaatacattgtaattcaattgatggggcacatgatgttggattcaattagtgcaccccgtatttttttaaaaaataatataaaatgaactttactttctagttcaaaaaaaaaaaaaaaaaa

SEQ ID NO: 161 - DNA, 810 bp, Glycine max
tcagctacgtaggccccccccccaaaaatcaaatgaagcaaataaaagaagacaaaaaataataattgaatgtaaaagagcatgggatctgagactgagacaacaactaagggttattaagagagagaaagagatacatagttagagagagagcagagacaccgttcggtgctccgctgaattcggttgtggcccctgcgctccgctgcaattttacactcaaaaggacctcatgtctaacatagaggagaacaaagatctgggacagatggacgtggatgcatctgatgagtcagctaacatgccatcaccccaaaagcaggaggagtctgtaaagaaaaagtatggaggaatgctgcccaaaaagccaccactcatatctaaggaccatgaacgtgcttacttcgattctgcggattgggcacttggaaagcaaggcggagagaagcctaagggaccacttgaggctcttcggcctaaattacagccaacgcagcagcaaacacgttaccggaaatctccttatgctccttcaggagaagaagggggaagtgttccagccgaggatgcaccttccaaccagtaagcagcaatcagtcttttgatgatgtgctgactattgttctaatacctgagtgagtaggtatcacttctttgttttcaacaataaaggaagcttgtcatgtattcatattagcacaagacaaatgatttgatctgcacctacgcaatagacatttacttgggattttgattaaaaaaaaaaaaaaaaaaaaaaaaaaaaaaaaaaaaaaaaaaaaaaaaaaaaaa

SEQ ID NO: 162 - DNA, 1155 bp, Glycine max
  misc_feature (1139)..(1140): n is a, c, g, or t
  misc_feature (1155)..(1155): n is a, c, g, or t
tctcgagcaaaaatttgaagaaattggatatgtccgagcggctaaggaggcagacttgaaatctgccgagtttcagccgcagcaggttcgagtcccgctgtgttctttgttgtgagctgtgagcttgagtgtgttttgttctatcgctggcctctttggcagtattttcaatccttaaataaaatgttagggttttacgatttctgaatctcaacgacgttttggcgctcagaaatggaagaacaacaatccaaaacgacgcaagagttggcgatggaagggcagaagtacttggaagaaaccatagagaatgctttccagatcctttcttccatgagcgacgagctctgcaaccccgttttgtggtccacctctccctccgcctcctcctcccccaacgccgacgccacttccgaaaactccaaccaccacgccgacgccaccaccgccgctgctggcggcggaggcgccctcgaacaggcccgatcccgatacaagaaggcagtcgccgcgcttcgcaccattctcactgccattcctaactcccagaaggcaaatgcattcaatgccagttcagctgctagccctgctgatgaagctgaaatcgataagttggaggagcgagcctcttctctaagaagggagcttgccaacaagaacttgcacctaaagacactcatagatcaactgcgtgatcttatcactgatatatcaacatggcatagtcctttttcaacctgaagtttgggacgagtacttaaatttgtagagtggtaccaaaaaatggaaacctgattcagagtacagtaaatggtaataatgcttgatatttttccacctgaagttgcatcagtggatctcaagttctcaatacattctcatcctatggtttcagacctctaacgatgagaggttatctgaaaatggttatccaatgtcttgtattttgtagatttttgtcacataaattttataaaatagcaatctgccaatatctaacaactatttgatggaatcattcatttgattgtcagaaattgtaactaacaactgtcttttgaagtttagagaagggtgcctgtatttggtctgaagatgaaacttgatcctatttaccaattttgaaaaaaaataaggannaaaaaaaaaaaaaan

SEQ ID NO: 163 - DNA, 1983 bp, Glycine max
gtaccgggccccccctcgagtcagctacgtagggccccccccccgaagaaatgacacactattgatgaattaaatagaaatttatgatgctcgcgtctgtataggattggtaatttggtattagtagtggtagtaacagttgtagatgtttttttaaatttgttttcattatcttgtgtggcttctattttgcattattgtccctgctactaatgttttctctcttgcagaaaagccaaggacagagagtgcaatttcaactgtgggttctcttccccacccaactagtacacgatttattgcttatgaagagcttaaagaagcaacaaacaattttgaaccagcgagtgttcttggagaaggagggtttggtagagtttttaaaggtgtcttaaatgatggtactcatgtagcaattaagaggcttacaaatggagggcaacagggtgacaaagagtttttggttgaggttgagatgcttagccggttgcatcatcgtaaccttgtaaaactagtgggatactttagtaatcgtgactcatcacaaaatgtactttgctatgagcttgtccctaatggaagtttggaggcttggcttcatggtcccttgggaatcaattgtcctttggattgggacaccagaatgaagattgcgcttgatgctgcaaggggactttcatacctgcatgaagactcacagccctgtgtaatacatagagacttcaaggcatccaacatattgcttgagaacaattttcatgctaaggttgcagattttggtcttgctaagcaagcacctgaaggcagatctaattatttgtctactcgtgtcatggggacatttgggtacgttgctcctgaatatgccatgactggacacctacttgttaaaagtgacgtttatagctatggtgttgtcttgctggaactgcttactggcaggaagcctgtggatatgtcacagccaactggacaagagaatcttgttacttgggttagttccataccttgtgagacaatgttatttatgtcaagttcagagcaacttcccatgttttctatatttatactaggaaatatgaaagatttaatttaaatccatcctttgaaacttttacattgagtaggtagttagtaagttcatttttcctttcaggctaggccaatccttagagataaggaccggttggaagagattgctgatccaagacttggtggaaagtatccaaaggaagattttgtacgtgtttgcactattgctgcagcctgtgttgctctagaagcaaaccaacgacccacaatgggtgaagtggtacagtcacttaaaatggtgcagcgcgtcacagaataccaagattctgtgttagcctcatccaatgcacgacccaacctacgacagtcctctagcacttttgaatttgatggaacatcttcaatgttctcttcaggtccttactctggtctaagtgcctttgacaatgacaacatttctaggactgtggttttctctgaagatctttgtgaaggacgatgaaaactgagaaaacttagccattcataatgttttctttctttcccatttttgtgagcactttgcaagctttcaaccaaaatgtttttttaacctcatgaagcataaggcacataatttttccaaatagatttaagcattttgttggtgagtggaagggtaatatgattgtaataattgcttgtataaatagaacaaaattcgttagcagattagttatttaaaaagatgagttgggtaattgcttgtataaatagaacaaaatttgccaaaccggctcactagttttatttatcctttgacttgaacaaaggaagacatcacttgtattcttcgattgtgttaattgatttctttgagctgcttttgtcaaaaaaaaaaaaaaaaaaaaaaaaaaaaaaaaaaaaaaagattcctggcagcccggggatcactagtctaaggggcccgcc

SEQ ID NO: 164 - DNA, 1230 bp, Glycine max
acggctgcgagaagacgacagaagggggacaccagaatgaagattgcgctggatgctgcgaggggactttcatacctgcatgaagactcacagccctgtgtaatacacagagacttcaaggcatccaacatactgcttgagaacaactttcaagctaaggttgcagattttggtcttgctaagcaagcacctgaaggaagatctaattatttgtctactcgtgtcatggggacatttgggtacgtagctcctgaatatgccatgactgggcacctacttgttaaaagtgatgtttatagctatggtgttgtcttgctggaactgcttactggtaggaagcctgtggatatgtcacagccaactggacaagagaaccttgttacttgggctaggccaatccttagagataaggagcggttggaagagattgctgatccaagacttgggggagagtatccaaaggaagattttgtacgtgtttgcactattgctgcggcctgtgttgctccggaagcaaaccaacgacctacaatgggtgaagtggtacaatcacttaaaatggtgcagcgcgtcacagaataccatgattctgtgttagcctcatccaatgcacgacccaacctaagacagtcctctagcacttttgaatttgatggaacgtcttcgatgttctcttcaggtccttactctggtctaagtgcctttgacaatgacaacatttctaggaccgtggttttctctgaagatctttgtgaaggacgatgaaaactgagaaaacttggccattcaaaatgttttttatttttttcccatttttgtgagcactttcaagctttcaaccaaaaagttttttaacctcatgaatcataaggcacagaatttccaaataaatttaagcattttgttggtgagtggaatggtaatgtgaatgcaataattagtagttagctgattatttatttaaagatgagttggtaatagcttgtataaatagaataaaatttgccaaacggctcactagttttatttattcttgtcttgaacaaaggaagatatcacctgtattcttcgattgggttgcttgatttcttttagagaggattctttgtgactgcttttgccatcctgttttaccccaggagacagtggttccacacgcggatcaaattttgtatatttgctttgtagttgtttctactttcaaagattgactttcaaaatttcccctcc

SEQ ID NO: 165 - DNA, 1516 bp, Glycine max
  misc_feature (1513)..(1514): n is a, c, g, or t
cccacgcgtccgtacggctgcgagaagacgacagaaggggggggcaaggaggatcagaggagtaaccgtgatccattgttgttctctctctctctagagttcttatttcctctctctagaattttctatccgttcatccccctcacaaattagggtttttgcgaatcttttattgtctgaaatcgaatccaacgtttcagccatggtttccgattcaatcgccgccgtgccgattccctccgccgcaaacaccaggaacccggggaagaagaagaggaccaacaggtccgcgaaattgaagcagtacaaaatcgatgcgcgccgcgagcaatggttatctcaaggtgcggtgaagagcaaggggtacaaggacggtttggacgatgacggccatgcgccgccgtctccagcggaggtgaaacactcggtggagcctctgaacacgaggcgcagaggcgaagaggacgatggattgatccatcacgacagcgattcggagtctccaaccaactgccctgcgggcgtgttgtgcggcaccgattcggggacgaatttcaccggcagcagtagcggcggtagcagcagtagcagcagcagcagcagttccagcagcggcgggtgctgttccgggaacgtcaccgaggtggaggaagaagaggaaggtgatgacgatgacgatgatgatgatggatgtttggatgattgggaggctatggctgatgctctagcagccgatgacaagcgcgaaaacccttgtccagattcgcccccagtggtttcgccttcagagggatccaatttagggtctccgaattcgaaacccgagagtggtagattgtttccttggggctctggtaatagcagagcgtggagggcagatgatgcctttcgccctcagagtttgcccaatttgtctaagcagcacagtatgccaaatcctgatcggcgtggggtgccttggggacgcgctcccaccccatcctcgtgcccaatttgctgtgaggatctcgatttgacggacacgagtttcatgccttgtctctgtgggtttcgtctttgcctcttttgccacaagaggattctcgaggaggatgggcgctgccccggttgtaggaagccctatgagtgtgagcctgttgagacagaggccagtgtgcttggagacagcctcactcttcggttggcacgttcttgcagcatgatcgagaggtcctgagcccgcccgcagtctgtcctttttttgttgcgctgttgcatcatcgtctgtattttagggaaatctaattttcataggtttagttggcctagtgttatgaggttttgggcaccttgaaatcaagttgtatctcgtttgatcttatggtgcatgtggtaatgtagagtactcttgttggtatgtgaatacataaggtggtatagaaattcaatacatttgaaaatggttagacaaattctaatgcctctatattgaatatcatttttaattgaacatgctcatatttctgattgtgcnnaa

SEQ ID NO: 166 - DNA, 2760 bp, Glycine max
tctgagctcggctcgggcaagcatccagtcagttgcaggtacaaatttcagctatgccagatatcgctggtgtaaagatagggtgataatttcattcatacaggcaatgacccaggaaaagttttccccttggaagcaccatatcctattcctttgcagccatttgagggcaatttgcatgctaatatatcagatgcttcagctacagctgctatatcagaagggcttcatcctgcattaccatcaaagaacaagggtaagcaccagcagtctgaagatgcctcttcattaattagtagtatgaatcccacacagactcccaagtctgttgaagatgacttctttactacagccactgatgcattcagccctgctccggtggccccccccccccttctaatcgatttcagttaccttgaaccacctccacttcccaacagagtctattattcagagagaattccaagggagcaggcagatttgctgaaccgatctacaaagtcagatgatgctcatggttctcacttactcatgtcagatttgctttctgacttcagccagaaaaattcaattacagaatccactgacatgttgcacaatgggaatacatcaaatctgaacatgatgtccagctcagcaggaaagcctttgcaagcagatggccataccattgatgatggatttgccccgccacagacatacaaacagttgcctgatacaacaattaaggtgaatccaaagttatcacagcatgtgaattctgagtcgaagcaagtgctagaagataataaagtttctagaaatgaggatcaggttcttagttctgaaaacgaaaccaaaggcaccgaacatcttgcatttcatcaagttcctttctggtgaacaaaatcagaatctagcatctaaactcccgggccgcatcggctcgagcggctcgagcagggagtctgataatgatactaaggtccaatcccagacttttcctttaactggaaacacaggccaagatgtttctcaagattttcccccagaagctaaatccagacctactcagggtgacattctgattgatatcgaggacaggtttccccgtgatttcctttatgacatgttctccaaagcaataatttctgaagattcctcaagcattggtccattaccaacagatagagcaggtttgagcttaaatatggacaatcatgagcctaaacgttggtcatattttcagaacttggctctagaggggtttgataatgtatctctaattgatcaggataatcttggtttttcgtctgctgtgagaaaagtacaagagggggatagtaaatctcagccatctgctcctcaaccagctggtggtgttttggcaggacgcacagattcccacctaaatattggtgaagaaaatcagaaaaatgtacctgtagcaactaaaacagaagcaagtatctttcaccaaaaatatgagcattcccaactaaagggcaatgaaaataagaacatggatgccataatggaaaacatacgaccacaggagtctgaataccaggatgacaagaatgaaccgaggaatgtggttgtagcaggggaatttgacaccagtactgtgcagttcataaagaatgaagatcttgaagagttgcgagagctgggttctggtacatttgggactgtgtaccatggaaaatggagaggatcagatgttgcaattaaaagaataaagaaaagctgcttcgctggtcgatcttcagaacaagaaagattgaccatagagttctggcgggaagctgacatactttccaagcttcaccatccaaatgtggtggcattttatggtgtagttcaggatggaccaggagcaacactagcgactgttgccgagttcatggtggatggttctcttaggaatgttttgcttcgtaaggataggtatcttgatcgccgcaagaggctgataattgccatggatgctgctttcggaatggaatatttacactcaaaaaatattgtgcattttgacttgaaatgtgacaatttgctcgtgaacttgaaggatcctatacggccaatatgcaaggttggcgattttggcctatcaaagattaagcgaaataccttggtgtctggtggtgttcgtggaactctaccttggatggcaccagagctgctaaatggtagtagcaataaggtctcagaaaaggttgatgtgttctcttttggcattgtcttatgggagattcttactggtgatgagccatatgctaatatgcactatggcgcaatcataggaggcattgtgaataacacattaagacctacaatccctagttattgtgatcttgagtggaaaacactaatggagcagtgttgggcacctaatccagcagtaaggccatcctttgccgaaattgctcgccgcttgcgtgtgatgtctgcagccgctagtcagatcaaaggacagggccacaaggcatctaaatgaaaaccagcggatttgatctgattgccacacacggttcattcaattatgctccaaaaaagatatatattattgttatacaagggccaacaataattgtttgtattgtagttttctggtccctgctctttttgtatttgattgtgaatatgtatgtgtgcatgtgaaaaaccacatatataggctgtgcaaattaacatttgacttaatgctatttccacagtgaattttggacgccaaaaaaaaaaaaaaaccgagactagttctctctctctctctcc

SEQ ID NO: 167 - DNA, 1041 bp, Glycine max
ggaaaacataagagttcaagagtcaggatatgaggttggaaagtttgaaaaaatgaatagcaatctacctcctcctgatccttctttagtaggagagtttgatccaagtaccttccaggtcataatgaatgatgatcttgaagagctgaaggaactgggttctggtacctttgggactgtgtatcatgggaaatggcgaggaacagatgttgccattaaaagaataaagaaaatctgcttcactggtcgatcatctgagcaagagagactgactgtagaattctggcgggaggcagaaattctttccaagcttcatcatccaaatgtggtggcattttatggtgtagtgcaggatggaccaggaggaacgatggctactgttgcagagtacatggtggatggttctcttaggcatgtattacttcgcaaggataggtatcttgatcgtcgcaagagactgataattgcaatggatgcagcttttggaatggaatatttgcactcaaaaaatattgtacactttgacttaaaatgtgacaatttgttggtgaacttgaaagatcctatgcggcctatatgcaaggttggggattttggcttgtcaaaaattaaacgaaataccttggtttctggtggtgtgcgagggacacttccttggatggcaccagagctgctgaatggtagcagcaacaaggtctcagaaaaggttgatgtgttctcctttggcatagtattatgggagattctaactggtgaggagccatatgccaatatgcactatggtgcaatcataggtgggattgtgaataacacattaaggccaacaatcccagatcattgtgattctgaatggagaacactgatggagcagtgttgggcacctaatcctgcagctaggccatccttcacagaaatagccagtcgattgcgcataatgactgcagcagctagccaaaccaaaacacagaaggcatctaaatgattgaaacagatcctggtgttgcttccccccctcttacaccaatgttggtattgatgctt

SEQ ID NO: 168 - DNA, 1061 bp, Glycine max
ccttccttaatggtaaatatttcggtctgtgaagatatatgtccataagttccttaattttctcgaaccttcattttcagctcccaacaacaatggcttcaatggcatcttcaagctccttctgcaacctcaagttcatcaccaaacccaacaatggtagaagaagctctcttccccgtattgtattctgtcagaagcaccacgatagcacacccaccgaccaaatcaaccgaagagaactcatattgagaagcagcgaaatagcgaccattggtgccatcttgaacttcggtgggaaaaaacctgattatcttggagtgcagaaaaacccaccagcattagctctgtgcccggcaacgaagaattgcgtgtcaacctctgagaatatcagtgatcgcacacattatgctcctccatggaactataatcctgaaggtaggaaaaaacctgtgaacagagaggaagcaatggaggaactgatagacgtgatagaatcaacaacaccagacaaattttcaccacggatagttgaaaggaaagaagactatattcgtgtggagtaccaaagctcaattttggggtttgtagatgatgttgagttctggttcccacccggtaagggttctactgtggagtaccgatctgcatctcggttgggaaactttgattttgatgtgaacagaaaaagaataaaggcactgcgacaagagttggagaagaaaggatgggcatctcaagacaccatatgatgaataaactcaggctgaattaacatcagcatctaagcaaatattatttcatatactttgtgaccttgtatacttttgtattagatacaaatctcacaggatcattgcaagcaaacttttctttgattattggaattgtagagaaatcattgagaacagtacttcaaactctctcggggaaggaatgaaatgaagaccttgcgccatatcttcttcaagttcattaattggtccacttatttacaccttcaccgagttcaatctaataatgtatgaatcctgtttcaagaaaaataatttgtgttttgtttc

SEQ ID NO: 169 - DNA, 1500 bp, Glycine max
tcagctacgtaggcccccccccccaatttgtagtagcagaagaatggacgtatatgcttgaggattaccgcacaccacacacagacttgacctctgacctctgttttgtttaacacaaaatctaaaaggaaaaaaaaaaaaaaaaaactatatcaccgattctcgtgatctttggcctcgaatcgactcgaatcgaatcgagaggtaaaagatccaaccccgcctcgcctctgttttgtgatcgaaagccataaaaagttgtttccgatcacaacctcaatcgtattaagctgttgttgttcctcgtcgtcaatttcgaatattgaaaggttttagttgttgatttggatcaagtctctagtcaacctttgaaattcttattccagttttcaaatatatagagccatgagttttgtttttcgaggaacaagagcagatattgaaaatgggtttccagggtttatacctgagaggcgagcattgcgcgttcatgcaacacgtcctagtaattccaattcactcacttttctcgtgacagttcttctgttattcatgatactgaactctcaccagatgtccccaaactttctgctctggctggtgcttggtgttttcttgatggcaacaatgttgaggatgtatgcaacatgtcaacagcttcaggtgcaggcccaagctcatgcagctgcagccagtggcattcttggccacacagaattgaggttgcatatgccaccatcaatagctcttgcaagccgagggcgtctacagggtctcagacttcaacttgcacttcttgatcgggagtttgatgatctagattatgaaactttaagagctctggattctgataatgtttctactgcaccctccatgacggaggaagagataaatgctcttcctgtccacaaatacaaggtttctggtcctcaatgtggtggttcctcaatgcaacaagcatcatcttccactcctgctgagaagaagcaagataattcaaatgctgttgggagcatgaaagcctctgatgatgagctcacttgcagtgtatgcttggagcaagttgatgttggtgacgtactgcgtagcttaccttgcttgcatcagtttcacgctaactgcatcgatccctggctgcgccaacaagggacatgccctgtatgtaaatttcgagctggatctggttggagtgacaatggacataatgatatcatcgctgacatggtttgaatacctcatctaatttttatttatggacgtgtgattataatcttctacaactgtaacttactctcgtcatgtatcaagattagtagctcatgactagtattcgtgtaattaccctgacgtgtagggatcagaagaacggcgagtaccgtgtaacaactatacaaatcatacaatttgtttaccattaaacttacatttcttgggtcactgtgctcaaaaaaaaaaaaaaaaaatttcttttctgctatggggttctctgagtcaaaatgc

SEQ ID NO: 170 - DNA, 1887 bp, Glycine max
ccacgcgtccgtggttttgtaacacctataaaagcagaacctcctaactcgattttagcatcaattaataaaactattcaactcacttaagcctgcacaaaaacaacttaatagaagatgccttccaagaggcttcaatggagatccttagtacttggttgtttcaaggccaccaagaaccaatccttggaatctccaaacatagtttccaagaaatcatcttcaagtagaatcttcctttctgatttaagcctaagcgattattcatcagtttctatcatgagtgatttgtccaattctctcgtgggatcaaatcttcgtattttcacctaccaagagctctctgaggttacacacaacttcagcaaatccaactatcttggggaaggtgggtttgggaaggtgtataaaggatttattgatgacaatcttaaacgtggattgaaagctcagactgtggcagttaaggccttaaacttggatggaaaacaaggccacagagagtggttggctgaagtaatctttctggggcaattgaaacatcgccatctggttaacttaattggctactgctgtgaagatgagcataggcttcttgtgtatgagtacatggagaggggcaatctagaggaaaagcttttcaaaggttatttagcagccttgccttggctaacaagaatcaaaatagcaattggggccgcaaagggacttatgtttcttcatgaagaagagaaaccagtcatatatagagatatcaaggcctcaaacattctattagactctgattacaatcccaagctctctgatttcggtttagcaatagatggaccggaaaaagaccaaacacatatcacgactcatgtgatgggtacacatggttatgctgcccctgagtacatcatgacaggctatttgacaaccatgagtgatgtatatagctttggagttgttctcctagagctcctcacaggaaagaagtctgtggacaagaaaagacccaccagagagcaggatttggtggaatgggcaaggccattgttgaaggattcccataaactagaaagaataatggacacaagacttgaggatcagtactcaactgaaggggctagaaaatttgcagccttggcttatcaatgtcttagccatcatgcaaaggctagacccaccatgagaaccgtggttaggaccttagagcctctattggaactgaaagatatccctgtaggtccttttgtctatgtggtgcccagtgaagaagacaaaaccaaagtgaatgaaaatgaccatgttgagatcaaccaaggtgagttaaaaaccaaagaaaaagaagaaaagggtcaccaccggcaacgaaaaagtcgtcgcaatagacgtcgtgttaagccattgaggtctcttactgctcactctgacactgctctgtataaaactcttggtacaaatctgtactctccaaaacaagcacaataaagtgatggacatggaccagtgtttgcatcatccatcttcatttcttggtgataatacaatcatagctattcatagggagattaaaaactttggtcaaattccttgtatatttttaccataaagttctcaaattaaacaacatgtacatagttttttcaactttaaacagctccgttaaaaatgtggtggaattttgataaaaataaaaaacaaatcacgtggcaatatttaatttgagaacttgatggtaaaaatataaagaatttgatgttttgtttatgtaaaaaaaaaaaaaaaaggagaagatagggaagtgtattattgtaagtcatacagctcaaagtttttttgttttttgtgtagtttgattttgatgttttctttgcagaaattccacatgtttttttttgaaaa

SEQ ID NO: 171 - DNA, 1668 bp, Glycine max
aacaaatctaaatttataagtttttataatatatccttacaattaaagcattaaaaaaacaggggaaaatatattagaaaaataccccctctcccctccattcccatttggttcttttttttttgcatttttcgaaaggatcactactgcattatttaaacacactttctattacacaacatatatatgctgcgagaattcatatagctagtttgataaaaatccatattgtaattggaaatatcataagctggctagttgattaatttgttgatatatttatagacacgctgatttagatttatatcatgctaattaatttagaaatgaataaagggtaatcttcaatggcctaaacccatgctgaagacttgcttgccatattttctcaacgctaaacatgacatttccgcactcattgaccttccaacattctaaggcatgcaatattccagccacacgccatgcactcatcactcttcttggcagccagttctcacaagagtccacattcactaaagaagggggagctatcatggctggtgtgctatggtagaagcagtctttgcgaagtttcttcggagggaattgggaaataggtatgaacaatgatccttttggtgcctttttttgttcgacctcatcacactgatctcctactaaccatatcttagcagtataggatcctggaaaaaccaggttctttttggactcattggagatccttcattgaagtttgtcatatctcgtccattatacatactggtaaccttagtacccctttcacataaagcaactcgcaatggcatatgaaaccttattaggtttgccacaaacaagcacttgccttgcttctttaggaatactgttaacaacaatagctacgacttaagctactgccatccacattttttatcttaagctcgggatatcttttgatgtaaagttcaccatatttattgaatgaatctccctgatttgaaagtcctagacttaaaacctttactttgcttaactcagcctgaagtattgcttcttctataagtttgttcaatgtctcactttgccatttgaaaaggtattgtacatggaatcttggtataacccatgattgtaaattgagcattttgaaagcattcctctccataacaaatgtttgaccataaaaccaagtcacgagaatagaccaaagtgttaaaggccacatcaaggagaggtaccaagtagaagattgaggtctagaggctaaggaagcaaatcccaaccttagatgatagatggactctggggttgtaaggtgtgttagatgtacgacatcgggtgaactttcttctctctttaatgctatctcatatgttgtgtctgtagtcttgtccatggtaccataaatgtaatcataaataggcatgaagagtgagtaatttgtccgaaactgggtatgatgcagtgaatggaacgatggtgtatacatgagatattttaggaagggaaatgctgtgaaaatggcctttgggatgcactcgaaattgcagtgacccaaattgttcatgaagtcaatgtatgcgagataaccagcatatgatgctatagaagctgttctggcaaccacagttgggggggggggcctacgtagctgcacaaagtaggctatgtgctcagcaaaaggat

SEQ ID NO: 172 - DNA, 2186 bp, Glycine max
aaagaatgtgagtaactgagggaggcagaatagaattggaaattctatgaggatttttggaaagggagagagacaaacatctaaacaaaacaatctctctctttctctttctctctcttccttccaaataaacaaaaaaaaccccacccacaaagcaacttaatttttccatcctagaataattacccaaccattactattataaacctagttattataaaaaccctttctattttccccaaattttcgagcttcctaagtaattgtgcattcaagaggaagcatcaagcatatcattttacaacacaaaaaacagacaaaacaaaacccccaaaccccaaactcatcatcatcataattgtttgttgctcgaaagaacaatgctccacatcacctgcattcttttaatgtgccttctaagttccttctcacccccaatcaacgctcttctcaacctcactttaccccaccaacaccctcaccccgaatccgtcgtccacgatctccaacggaaggtgaatgcctcactatggagaagggaaatgctgtcaaaggaggaccaacaagaaggcatgtcgtcgtcgtcgtgtctgaccggaaaccccatcgacgactgctggcggtgcgatccgaactgggcggcggaccggcagaagctggcggagtgcggcctagggttcggcaaatacgcgatgggcggcaaaggcgggcagatctacatcgtgacggactcctccgaccgcgacccggccaaccccgttcccggcaccctccgccacgccgtcatccaggacgagcctctctggatcgtcttcgccgccgacatgaccataaacctaaaacacgagctcatcttcaacagctacaaaaccctggacggccgcggcgccaacgtccacgtcaccggccacggctgcatcacgctccagtacgtctcgaacatcatcatccacaacatccacgtccaccactgcactccctccgggaacaccaacatacgggccagtccaacgcacgtagggtggaggggcaaatcggacggtgacgggatttcgatcttcggctcacggaagatctggatcgaccattgctcgctgtcgtactgcacggacggtttgatcgatgctattatggggtccactgggattactatttcgaatagccactttgcgcaccacgatgaggtgatgcttctgggacacgacgataagtatttgccagataggggcatgcaggttacaatcgcgtttaatcacttcggtgagggtctggtgcagcgtatgccacgatgcaggctcggttacatccacgtcgttaataatgacttcacgcagtggaagatgtatgctatcggcggtagcgctaaccccaccatcaacagccagggtaaccgttacaccgctcccgcagaccctgatgccaaagaggtgacgaagcgcgtggacacagacgatagagagtggagtggttggaattggaggacggaaggggacataatggtaaatggagcgttctttgtaccctcaggggcggggcagagtgcacagtacgcagaggccaccagtgtgcaagccaaatccgctgttcaaattgaccagctcactatgtactccggtgtcttcggtgatcccagggataatggagatttatatcccggtttcaacggcggtgggaccgtgaccggagccaccagcaaaggcaacacagaggggtccagcagtgacgatggggacttctttgggatgatattcagaggcagcagcagcagccaagcagcgccaccatcaccttcttcgtccattgtatttgtttcaacctttttgtctcttttaataatttttattttggacactaccaccaaccatgccattctattatcattactatgatcacacaatttgggagtgggaaaagaaaacaactaactcccttgatgcccaaaaaaattatcaaaagcaaaagaatgatcaaagtttctaaatacttgtttttacatttagaagctaggaatcatgtttaggtatgtacacagctcttcaaagttattattaaactctaaatagagctaggtgcaatatgatttggtcattgcctcaaatgtatagtttaatgtatttaattcagtttgcttccttttaattgatagtgtatactcactccaaaaaaaaaaaaaaaaaaaaaaaaaa

SEQ ID NO: 173 - DNA, 2356 bp, Glycine max
cacgcttacctttctcggccttttggctaagatcaagtgtagtatctgttcttatcagtttaatatctgatatgtgggtcaggggaggattcttcacagtagcttgctgctggaatcatcatttagtgtcgctcaagtgttgcactacaccttcggcctgccacaccccaccatttcagttctaaccttagtaagaatctattaacagcaaggaaaccatgagtagcgccgcctttaaggtcggtgtgttggggagtggaatttcaggagccgtgcgtgcttcaactcttgccagaaatggggtttctgttactctctttgagtcagctagaggccctggtggacgcatgtcccaaagaagagagagaactgaagatgggacggagctgcattttgaccatggtgctccactttgcccccccccccccccccaagttttacatctggttcaagagtgggaatcaaggggtctcgtagctgaatggaaagagaagtttgcctcgtttgattttcacacacttaaatttaacaacatagagcaggaaggatcaagcaagagatatgtgggtgttccgggcatgaattctatatgcaaagcattatgcaatgagagtggtgtggaaagcaagttcggtgtgggtattggaagaattgaatggttgcatgatgagaaactgtggtcattgataggggtggatggacaaaatcttggtcaatttaaggggcttgttgcatcagacaagaatatagtttctcccagggttgcagaagtgacaggaaggacgccaccacttgatataaaattggtgccagagttgtcagaaaagttgcttgatcttcctgttaagccatgtttcattgtaatgctggcatttgcagagcctctatcaacggttccagtcaaagccttttcttttgaaaattctgaagttttaagccaggcttattgtgatagcagcaagccaaaccgttctactacaagtgaaagatgggttcttcattctacagcagaatacgcagaagatataattgctcaaactggactcaagaagccctcagacattacactcaacaaagtggccgaacagcttttgcaagaatttcaaagcacggggcttatcacatctcaaccatttttcaagaaagcccatagatgggggagtgcatttcctgctgctagtattgcccaagaggaaaaatgtctttgggacagaaacaagagactagctatctgtggagacttctgtgtcagtcccaatgttgaaggtgccatagacagtgccttcgcagcagcattaaggcttaaagatagtgtcagctctttatagttggagcattacaatctgtagttctccaaaccttgcatgcctttatttcagttttttctcctgggaaaacgtgttcaaaatttcttttaagacatttctgtattactaaacgcgaacaaatttcccttctacgacgaagccttgcacactacaaagtatgagaaagaggtacagggtggttgcactttgccgtgccaagtttgcaggaaaatggtgatgaaaccacctttgaaatcaaacagtgttgagtttagtcttaacaacaaaaaataaggtaaacatatgttaagtgcactagatgatggcctaatgtactgtaattctgaatttgtgatcatgttatttccttttagttataactaaaatacatttcagaaagcaccatggcttgacccaacaaatatcaaaatatcatcatcccacatgtaatggttattttcaaatacagatatgtgcgtgtgtgctaggtttatttatttcattggaataatgttatttgatttaattttatctaaaaacagcttaatttttatatgcttgagaagttggaattttcctacagggtcctgaattatatcataagttggagaagttggttttgctctaatggaggggacagagagactatgttagtatttccaatgccatcccattacaatcaggacaaaacaaccacaccaataaatccttcataagcctgatttgcaaaaactttttgcactcccactattgtttcctgcacttcccataattgcattacaaaatgaacttgccggaaaacaatgagaagcgcagaaagcagcagcctgatagctatcataccttgatcatggattgaactttcagactttgaggatcctctatggcaaggagttaagggacaagcccttttaggttttgttgccgaactaacatgtaatacaaaccatgtcaatcacaagacatcgatggcttttaaagtgtcatcggaagtacagctatgatcgtcttagagtttaacataagtctatatcctatattttagctct

SEQ ID NO: 174 - DNA, 2549 bp, Glycine max
tccggaaaccccgtcgacccacgcgtccgaaacacggagcgaaaaagcgtcacgagcgagagaggaaggaagagaagagaagagagatagggagatcagctacgtaggccccccccccttgtgagaaagaagtgtgcttgttgtgtgcaggcggcgagtgtgagatttttagagagagagaggtgaggacgctgagtgctctgctgagagattccataaccccaagaggaagaggaggaggagaaggtggatagattttttttccttttttttgtgctgtttatttatcctcagagcggtggatagggatttttcactctgcagcgttccgttccattgtgatttgttgaagtttctgatggagcagcgaaagcttgtggttttggggattccgtgggatatcgatactgagggattgagggaatatatgagcaagtttggtgagctggaagattgcattgtcatgaaggagcggtcaactggacggtctcgtggttttggatatgttacatttgcttcagtggatgatgctaaggaagtactatcaagtgagcatattcttggtaataggacgctggaagtcaaagtggcaacaccaaaggaggaaatgagggcaccggtcaaaaaagttactagaatatttgtagccaggattccacaatcagtaacagaagctactttcagaagtcattttgagaaatatggtgaaataacagatttgtacatgccaaaggatcaaggctccaaaatgcatcgtggaattggtttcatcacttttgctagtgcagattctgtggagaatttgatgtcagaaacccatgaactgggaggttctgctgtggtggttgatcgagctacacctaaggatgatgactttaagccaattggcagaatgccgctgccgccgccaacacaaggaggatatggcgcatacaatgcttatatttcagcagccactagatatgcagcacttggtgctcctactttgtatgaccaacctggcccaatttatggaagaggagacccttctcggagaactagtaagaaaatttttgttggccgtcttcccccagaagcaacttctgatgatcttcgtcaatattttggaagatttggtcgtatattagatgtttatgttccaagggatcctaagagaacaggtcatagaggttttggatttgttacttttgctgaagatggtgtagcagatcgcgtctctcgaaggtctcatgagatttgtggacatcaggtggcaatagattcggctactcctgttgatgatgcagggcccagtgggaattttatgatgaatagtatggaatcttttgggggatatggtggtcctgtgcgatcttatgggaggatgtatggtagcttagactttgatgattggggttatggaattgggagaccatcaagagcagattggaggtatagaccatactagtaggacacaacttattggtgccggcgaactgtggtgcagttgtttaactatgatttttaaagtttgtaagaactatagattggattttattttatccatcgtaaaccagaaatacttttttctttgaacatattgttatcttgtatccatttgtactggtgcagatgatggaaatatgatatattctagaacgacaaaaaaaaaaaagaaccctcagtcctatactcaccaaaattaccagtcctcattgagcatctaaccatggctgctcctcttcaattcttctttctcttcaccctcactctcttctcatcatcattctccgagcaatcccacatcgaactaccctcaaacaacaacaaccctaaccctaaccctttacaaaaactgtccaatctccacttctactaccacgacataagagacaacgaaaaccccaccattgtgcaaatcgtggacaccccaaagaacgttccgaacgggttcgggtctactttcgtgatggacgatgcgatgaccgaaggaccagagctgagctcgaagcacgttgggagagcccaggggctgtttggcttggcctctcttcaggaccttgggatgttcatgctcaccaatttcgctttcaccgaaggagcttatgctggaagcacgttgagcatgcttgggaggaatcccatatcggagcagaatagggagttgcccattgttggtggcactggcgtgtttagatttgccactggctatgccattgctaatagcgttaattccgtttctacccctcaacattttgttgtcgagtacaatgttacagtgtggcatggctagtgtgttttttttttatctataaaaataaaatatgataccagagaatttataattctgttcaaatatccgaactatatccctttgtagccgtttgtagtgagaccatgggagtatgtatgccttgtggcacctagagttagaagtagcaagtgatatggtctaacttgtgtcaacctaaaagtaattttgttagcgtatcggtattgggatttttatttcttgtatttgtttttaagtgcaaatcaaacatgtattgagtagttcaacaaaaaaaaaa

SEQ ID NO: 175 - DNA, 1304 bp, Glycine max
ccacgcgttcgtattctcggctgcgagaagaccacagaaggggagttgagagttgaaagacatgggtacggtggctccaagagttgaaagcttggcgagcagcgggataaagtgtatcccgaaggaatacgtgaggcctcaagaagagctcaagagcatagggaacgtgtttgaggaggaaaagaaggaagggctacaggttccgacaattgacttgagagagatagattcggaggacgaggttgttcgagggaaatgtcgtgagaagctgaagaaagcggcggaggagtggggtgtgatgcacttggtgaaccatgggatccccgatgagctgatagagcgggtgaagaaagcaggggaaacgttctttggtctggcggttgaggaaaaggagaagtacgcgaatgatttggagtctggcaagattcaaggctatggaagcaagctggccaacaatgccagtggccaactcgagtgggaagattacttcttccaccttgctttccctgaggacaagcgtgacctctccttctggccaaagaaacccgctgattatattgaggtcacaagcgagtatgcaaagcgactgagggggcttgcgaccaagatattggaggcactctctattggattggggttggaaggacggaggttggagaaggaagttggtgggatggaagagcttctacttcaattgaagatcaactactaccctatttgtccccagccagaacttgctctgggagttgaagcccacactgatgtgagttcactcactttcctccttcacaacatggtgccaggtctgcagctattctacgaaggccaatgggtcacagcaaaatgtgtccccgattccattctcatgcacattggtgacaccattgagatcctgagcaacggcaagtacaagagcattcttcatcggggtttggtcaacaaggaaaaggttagaatatcgtgggcaatgttctgtgaaccccccaaggagaagatcatcctgcagccacttcccgagcttgtcactgagacagagccagcacgctttccacctcgcacttttgctcagcatattcaccacaaactattcaggaaggatcaggaaggtctcccaaattgatcacatttgtatttgtttgcttgtcttatgaacttagttcttatgggttgtactaataaaataggtcatggatgtcggtgtggcctcatcaatcttcatgctaagtttgttttatcctttattaaatactattgatattattcttgtttgaaaaaaaataaaaaaaacaaaaaaaaaaaaaaaa

SEQ ID NO: 176 - DNA, 842 bp, Glycine max
atactcataccagcatcatcatcatttatcattctcttttcagcaaccatgaaatcttcaggagcattagctacccttgtgcttctgatcctacttctcgccacaacttcagaggctgcaatttcatgcagtgatgtgatcaaggacttgaggccatgtgtgagctacttggtgagtggcagtggacagccaccagctgcttgttgctcaggagctaaagctcttgcctctgctgcaacaacctcagaggacaagaaggctgcttgcaactgcatcaaatccacttccaagagtatcaacattaactcacaactggctcaggctcttccggggaactgtggaataacccttcctgtggctatctctcccaatgctgattgttccaaggttggttgaaacttggaattggagggtgttgcagagcatgctgaacatttttctgctacatatgtatggatgtataacatattctgtaataaacaggaatctacctacgtggatttctttactaagtccatctttttgtttataatatgttgcctgaatgttgtttccaatctaccttgattgtagagccacctgcggcgccttttaattaaaattcacaaatgttattttgctatctactatgtgaaggatagcgttcaagttatttgtatgccaataatagtattcaaactaaataaaaacataaggagttgggtgttattttttgtttaaaaaaagccccctcagtcctccaacgtcccgccttaattcaaccactcccctaatttagtcctttttccccccgcccccttttctaacccccaatttccccccccccatttccccccccaccc

SEQ ID NO: 177 - DNA, 1643 bp, Glycine max
cccacgcgtccggatccgcaaccccattggacttgcttttttatgatgcagttggaaccttttcctttggtcttctttccttctctgtctctctgcttgcttcttgttgttgtaactaaggaacaagagattgcttcttcttcccttttgttttcaaatttcaatttttcatcgggttctctgaaatggagagagatttcatgggtctcaactcaaaagaacctcttgctgtggtgaaggaggagatgcacgtttatggcttcgaagactctggcttcacaaagggtcggattgcacagtggccattctcgaacaaagtatctgcccttccacatttgatgtctttcaaggcttctcaagatgataagactaagaagatagtgtctgatcccttaacatctgcagggtttatgtctatcttaagtcaagaagcatttgactctagtcagaaacgctgtgctggtgaaccccagaagtctttcaatcacgatgggcaaggtcgccttcatttttcgctgactccatatcctgtacaacatgatgtgaactctgtgaatcgtcctcatgatgtgaagatgctttcagttcccaatcaagcaatttcactttccttggggaatccattcctgaagaatgattttgcaactgctggtcagaagctgttacttgggggaatacctgttaccacgcctcattctgttcttccctctgctgttgctgttgctggaatgaccgaatcatgtaacactgtgaaaccatctgcgccttctgctcaacttaccatcttctatgctggtactgtcaatgtctttgatgatatctccgctgagaaggcacaagctatcatgttgttggctggcaatagcttatctgcaggttctaacatggcacagccaaaagttcaggtgcttgtctcgaagttggctgttggtgatggtgtgcctgtgagtcaacctgcaaatacatcacctggctctggtctttcaagtcctttatctgtttcttcacataccggcatacagtcagggagtggctcaactagtactgataaaacaactggagttcccaccactcctgtttgcaatgtggagcctccaaagatagtcagtgcaaccactatgttgacatcagctgtacctcaggcccggaaagcatccttggctcgatttttagaaaaacgcaaagaaagggtgatgagtgcagcaccatacaacctcgacaagaaagtctgaagagtgtgccactgcagaatacgctggtgctaacttttctgccactaacactgttttggccaagcaaggatagtagcctgcacctttaggaaacaaagtatttcggagaaaaatattgttgtaaccttaaaaatgttgtaagcagatgcttttattttcgttgatcacaacttatgctgacattctcgggttcagcacatagataggccattaccataattatttttgtggtgtagggcttttaccttgttatttgaaaggttgtttgaatgttagcttcctacactgtaacattggaccactatgtaatgtaactcatgatttgtttaaatttgtggagtaaaagcccagtttagatatttaaaaaaaaaaaaaaaaaaaaaaaaaaacgagattagttctctctctctc

SEQ ID NO: 178 - DNA, 1597 bp, Glycine max
acgaaactcgtgtgaaacactacccaattgaacttgcctttttctgatgcagttggaaccttttcctttggtcttctttccttctctgtctctctgcttattgttattgctgttgtgactaaggaacaaggggttgcttcttcccttttgttttcaaaggaagagaattttcaattttcaatttttcattgggttctctgaaatggagagagatttcatgggtctcaacttgaaagaaccactagctgtggtgaaggaggagatgaacaatgatggctgcaaaaactctggcttcaaaaaaggtcggattgcacagtggccattctcgaacaaagtatctgcccttccacatttgatgtctttcaaggcttctcaagatgataagactaagaatacagtgtctgataccttatcatcttctgggtttatgtctatcttaagtcaagaagcatttgacactagtcagaaacgctctgctggtgaaccccagaagtctttcaatcatgatgggcaaggtgaccttcatttttcgctgacttcatatcctgtacaacatgatgtgaatcatcctcatgatgtgaagatgttttcagttccaaatcaagcaatttcagtttccttggggaatccattcctgaagaatcattttgcagctgctggtcagaagccgttacttgggggaatacctgttaccacatctcattcagttcttccctctgctgttgctgttgctggaatgaccgaatcatgtgtgaaaccatctgctcaacttaccatcttctatgctggtactgtcaatatctttgatgatatctccactgagaaggcacaagctatcatgttgttggctggcaatagcttatctgcagcttctaacatggcacagccaaatgttcaggtgcctatctcgaagttgggtgctggtgctggtgtgcctgtgagtcaacctgcaaatacatcacctggctctggtctttcaagtcctttatctgtttcttcacataccggtgtacagtcagggagtggcttaactagcactgatgaatttctggctgctaaaacaactggagttcccaacactcctatttgcaatgtggagcctccaaaggtagtcagtgcaaccactatgttgacatcaggtatgttggtgacatcatttctcacactctttgcagtttgatggttctttagttctacataatttccgtgtattgatgtcttgcttagggtatttgtccagaacttgtatactaacgagggacgaatccatctgcattctagagtttatctatgtgtttgatcattacaaatgtttcagtttgatgattctttcaatccatctgttatgcagctgtacctcaggcccggaaagcatccttggctcgatttttagaaaaacgcaaagaaaggttagtttgggtgcattatttttctgggtgggtgtactgaatctgacacaatttatatttctccaaaaaaggaaggcgtagttatcatccattggttggcaacataaaaatatatgaatgggattggaaagtacagccaatcattcctccacctgtccaccaactctttcctttacacccctttaaat

SEQ ID NO: 179 - DNA, 1288 bp, Glycine max
gtacgtccctttcatatattggcttgatccacaagatcttaccttctatgagtatcagctgatgtcttttttgaccttccttccattgattatttgatattactactatttagaagtctttcaatcatgatgggcttggtgaccttcatttttcgctgacttcatatcctgtacaacatgatgtgaatcatcctcatgatgcgaagatgttttcagttccaaatcaagcaatttcagtttccttggggaatccattcctgaagaatcattttgcagctgctggtcagaagccgttacttgggggaatacctgttaccacatctcattcagttcttccctctgctgttgctgttgctggaatgaccgaatcatgtaacagtgtgaaaccatctgctcaacttaccatcttctatgctggtactgtcaatatctttgatgatatctccactgagaaggcacaagctatcatgttgttggctggcaatagcttatctgcagcttctaacatggcacagccaaatgttcaggtgcctatctcgaagttgggtgctggtgctggtgtgcctgtgagtcaacctgcaaatacatcacctggctctggtctttcaagtcctttatctgtttcttcacataccggtgtacagtcagggagtggcttaactagcactgatgaatttctggctgctaaaacaactggagttcccaacactcctatttgcaatgtggagcctccaaaggtagtcagtgcaaccactatgttgacatcagctgtacctcaggcccggaaagcatccttggctcgatttttagaaaaacgcaaagaaagggtgatgagtgcagcaccatacaacctcaacaagaagtctgaagagtgtgccactgcagaatacgctggtgttaacttttctgccactaacactgttttggccaagcaaggatagtagcccgcccgcacctttaggaaacaaactatttcggagaaaaatattgttgtaaccttaaaaatgttgtaagcagatgcttttattttcgttgatcacaacttatgctgacattctcaggttcagcacatagataggccattaccataattatttttgtggtgtagggcttttaccttgttatttgaaaggttggttgaattttagcttcctacacggtaacattgaaccaccatgtaatgtaactcgtgatgatttgtttaaatttgtggagtaaaagcccagtttagatataaaaaaaaaaaaaactagagactagttctcaaaaaaaaaaaaaaaaaaaaaaa

SEQ ID NO: 180 - DNA, 1505 bp, Glycine max
ccctctcgtccgcccacgcgtccgctttttctttgaatcaatgaacagcaagctgcgtccgccccccccctggttgactgggggaccaggttgcagcagtgaattggctgtgttttatgagaatggccctttcaagattgctaacaacatgtccctagtgtggaatgaatatggctgggacaaggtttctaaccttctgtatgttgaccaaccaactggaactggctttagttacagtactgataagcgtgacattcgtcatgatgaagaaggtgtgagcaatgacctctatgactttctacaggccttctttgctgaacatcctgagtatgtaaagaatgacttttttattacgggtgaatcatatgctggacattatattccagcttttgcagctcgtgtccataggggaaacaaagctaaagaaggaattcatataaacctaaagggatttgccattggtaatgggcttactgatcctgggatccagtataaagcttatacagattatgcactggacatgggcataattcagaaggctgactatgaacgcatcaacaaagtgatggttccagcctgcgaaatggcaataaaactatgtggcactgatggaaaaatcgcatgcacggcatcatattttgtttgtaatacaatattcaattccatcatgtcacatgctggtgatatcaattattatgacatcagaaagaagtgtgaggggagcctttgctatgatttttcgaacttggagaaatacttgaaccaaaaatctgttcgggacgcactaggggttggagatattgattttgtgtcttgtagttctacagtttatcaggctatgctggtggattggatgaggaatcttgaagttggtattcctgcccttcttgaggatggaatcaatatgcttgtgtatgctggggaatttgatctcatctgcaactggcttggtaattcaaaatgggttcatgccatggagtggtctggccagcaagaatttgtggtctcatccgaagttcctttcacagttgatgattctgaagctggattattgaagaagtatggacctttaagtttccttaaggtccatgatgcgggtcacatggttccgatggatcagccgaaggcttcgttagaaatgctgaagaggtggactcagggaaccctttcagaatctgcagctgatgcggagaaattggttgcggagttgtaatcactttcgttattgcaattagtccagaaaagggatacaaaagtattatgcaataaagagaagggaattaaagtgatcagcatgtgttattaattataaagtgagattgaatcaaggccatgcaggaaaaaaactattcatatatagaatttcgtgtgtgcatgtatactgttttaataaaatgctgagatgtaaattgcttacacctcatattgtgcttaaaaaaaaaaaaaaaaaagctaaaaaaatatggggagttttgccaaaaaaaaaaaaaaaaaactcgagacta

SEQ ID NO: 181 - DNA, 1098 bp, Glycine max
  misc_feature (1095)..(1095): n is a, c, g, or t
cattcagcaaccataagccacgacacgaacatggtgatggcctccaagtctaattccctaacatttggagctgcttgtttcacaacttgcccattctctagaactaaaacctgctgcattcactttcttgccattccaaatgcaaaatccagagccactttttctctcggtcccactctgtccaagaggatgagcttaggtattctttctagtcccatcgagacaactcccacacatctcattacaccaatttcagctcttaattcaggtttggaagcatcaattacagattcgaacgatatttcagccatcttagcaaatgccaaaatagtagtagattctgaagatgaaaataagatacaactaagagtggacttgactggcgatcaaacacagaaggtattcgacaggatcctaacaaacttaggccgtactgccccaccagttcctggatttcgcatgcaaaaaggaggaaaatcatcaaagatcccaaaggacttccttgtacagatgcttggggaagaacgtgtcaccaagttttcaatacaagaaatactcaattctaccatggctgattatgtgaaaaaggaaaacttggatgtaaaggaccggaagataagcactacccaaacgcaagaacaactcaaaaaatcattcaagccaggaaatgaatttggctttaatgttataattgagcctgaaaattcataagattctagataacttgttatgggggatctagttgttgagcgtaaccagattggcagttattggggcaacaagatttttctctctcaatgatatacagcttaaagagttattttaatggtcagttaggtgtactcctgaaaatgggctgcaatattctattatgagctttgcaggaaaaaatgtttaaaaaactcatcttcaaatttttttcattctgattttaaagggataccaaactgactcagagttatatataactgtcttctagcgtgataaaaaaaaaaaaaaaaatctcttttatagccttttaaaaaaaaaaaaaaaaaaaaaaaaaaaaaaaaaaaaaaaaaaaaaaaaaaaaaaaaaaaaaaaaaaaaaaaaaanaaa

SEQ ID NO: 182 - DNA, 872 bp, Glycine max
gaattagaattagaatataagatagtagaaaagaaagggaataaggaaacccttcttcacttctacctctaatctaggaataggaaaaagatgggcagcactagtgcgagtgccctcaggctatcgtcgatggtcagcgtgtccccgaattgcaattgctcatcgatgacgcttatgaagaagacggcgatggcgatggcgatggctcctttttcacttgcaatgaaaatcaaaagcaaaaggggtggtattaggtgcgaggtggctattaatgcggtggatgaggagtcgaggacgtcaccggaggagacgaagatcggagcgcgtgtgaaggtgaaggaggcgggtttgaaggtgtaccacgtccccaaagttggggagcttgacctaacgggtctggaaggcgagatcaagcagtacgttggcctctggaacggtaagcgaatctccgccaatcttccttacaaggttcagtttctcaccgacatccccggtcgtggtcctgtcaagttctttgcccacctcaaggaagatgaattcgactatctttagtcactgtactgcactgcactgccctgcacgtcactgttgttgtatgtaatcaattttaatccccctgaattttttacttatgtattaccttctgtttcaagccgatagatgcctactaaatgaatgatatgaattcatcttatgcagtcacttcattcaagtattaacacttccattttctcattaattagatgatgatttgaagaaggtgtagcctgaatcctttctaatattttttagtaggtgtccctgtacttgttggtaaaagcaatggtatccttcggcaaatctgtcttttgaaaaaaaaaaaaaaaaaaaaa

SEQ ID NO: 183 - DNA, 828 bp, Glycine max
attttggaagcaataataaatgaaattttgggaggttcaaacatcaatttgtatatccaattagaattagatagaaaagaaggggaataaggaaacccttcgcctcggtgcgcatccaatccaatctaatcaacaaaagaagagtagagcgagagtggaatagaacaaagaagatgagcggcgccagcagcactataaggctatcgccgatggtgagcgtgtccccgaattgcaattgctcatcgatgatggtgatgaagaagacgacgacggcggtggctcctttgtggatgaaaagcaagagcgctaggggtggtattaggtgcgaggtggctattaatgcggtggatgagtcgacgacgtcaccggagtcgaagattggagcgcgtgtgaaggtgaaggcgggtgtaaaggtgtaccacgtccccaaagtagccgagcttgacctcacgggtctggaaggcgagatcaagcagtatgttggcctctggaacggtaagcgaatctccgccaatcttccttacaaggttcagtttctcaccgacatcccagctcgtggtcctgtcaagttttttgcccacctcaaggaagatgaattcgactatctttagtcaatcacccactgttgttgtatgtaatcaacccacctcccttttatttactcgtttctgttttaatcccctgccctgaattttgactcccttattactatgtatttcatataaatatcaattaaaataatcttgtgttggatatttgctatcgttgttgcaagttttcgacgataggctaaatgaattatatcatatgaattcatcttatacagtc

SEQ ID NO: 184 - DNA, 2227 bp, Glycine max
cggactcgtgttttaaagcttcctttattcgattaattggtataagtgttattcaaagtgctgcatcttctttcattgcaccttctataagacacttgactgcgaggctagcccttggggggcggattcgtttgacccaacatcttctcaagaactacttaagaaacaatgcattctacaaggtcttccacatggcaagcaaaaatgttgatgctgatcagaggataactcatgacttggagaagttaacaacagacttgtcaggactggtcactggaatggtaaagccatctgtggatattttgtggttcacttggagaatgaagctgttaacaggtcggaggggagttgccatactctatgcttacatgttactcggtttgggatttctaagaactgttactccagattttggtgatttgattagtcaagaacaacaacttgaaggaacatttaggttcatgcatgaaagactttgtactcatgctgaatctgttgctttctttggaggtggtgctcgagaaaaagctatggtcgagtctagattcagggaacttctcctccactccaagtaccttttaaaaaagaagtggctgtttggaatcctggatgattttatcacaaagcaacttccacataatgtgacttggggcttgagcttaatatatgccatggaacacaagggagaccgcgcatcagtaactactcagggtgagctggcacatgcactgaggtttttggcatctgttgtttctcaaagctttttagctttcggtgatattcttgaattgcatagaaagtttgtagaactctctggtggaattaatcggatttttgaacttgaagaacttcttgatgcagcacaatctgagaatttcacgagtgttagtgctatacctccagtgagggatgttcattccagtgatgtcatttccttctcaaaagttgatatcgtaaccccttctcaaaagatgttggcgagggagttaatatttgacattaagcatgggggaagcctacttgttactggtccaaatggaagtggaaaaagttccattttcagagttcttagaggactatggccaattgccagtggaagactctctagaccatctgaagttgtggatgaagaggatggatctggttgtggcatcttctatgttcctcaacggccatatacatgtttgggaaccctaagggatcaaattatatatcccctttcctgtgaggaagcagaggttaaagtactgaagatgtatggaaaagatgaaaagcatgctgacaccagaaatttgttagacacacggttaaaagctatcctagagagtgttcggttgaattatcttctagaaagggagggaagcaactgggatgcgaatttaaaatgggaagacattctttctcttggagaacagcaaagattggggatggcacgcttgttctttcataagcccaaatttggtattcttgacgagtgcaccaatgcaactagtgttgatgttgaagaacacctatatgggcttgcaaaagatatgggaatcacggttgttacttcctcacaacgtcctgctttaataccatttcattccatggaactgcggctgattgatggtgaaggtaattggaagcttcgattgatcaagcagtgagttcactaaaacagtgttgctgcatggacttggtataccatttgagatgttgtcgagtctatcacaagctggctgtttgcgagcataaattaggtttgccaacaaaggtcaatcctatatgcttttattttaagttttccatattctccaagattcaatgtttactaggggactaacaaacagctgaaacagccaaaattgttgataataagttcgagcacacaaccattgcataatctctgcagtgtataggtggtgatcaatcatgtatagttttccccctttcttcttaggtagttgatattggttcatatgttgtagtcattggatgtaatgattaatatttaaattgtttaatcaataaaacagcagaaaagaagggctcttcgagctaatttgttgccttcaaaaactcccatgctgtcgtgtaagattttttcttttttttatgttctttactcttcttgtgccacctgaactgctgtcatcccttggcgttgccttcattgttcctatgtggccatgttgtattactgaattactcgggcaataatacgaaacttcccaaaaatcaaaaa

SEQ ID NO: 185 - DNA, 1008 bp, Glycine max
  misc_feature (963)..(963): n is a, c, g, or t
  misc_feature (972)..(972): n is a, c, g, or t
  misc_feature (974)..(976): n is a, c, g, or t
  misc_feature (979)..(979): n is a, c, g, or t
aaaacaaaaatctcgcttcattcattggcttcttccactcctcacaataacatcaacatggctgataagcaatcccaactaaacggtgcgtattacggccccgcaatccctccatcggagctgccacgtcaccaccaccgtggccgacgctgctgctgttgcctcttcagcttcttctggaagcttctccttgccatcgtcgtcttcctcgttgtcgtattcctcgtcttctgggctgtggtccagccacgcaccttcaagctccatgtcaccgacgccaaactcacccaattcaacctcaccaccaacaacaataataacattaacatgctccgctacaatctcgttctcaatctcactgcacgaaaccctaacaaaaaactcaacatctactacgaccaagtggagggccacgtgtcctacgaggggatgaggttcgcctcagcggacctgatcacatggcgaaactccttccgccaatacacaaagagcacgaacaacatgagcggggttttcacggggcagcacgggttggtgttcgatggcgatcacgtgaaggatttcgaaaaagatgagagaggtggggtttttgatattgatgtgaagctttactttaacattaggtttaggcttggtgacttcataggaagtagctcaagggttagggcgaagtgcgagcttcaggttcctttggtttcgaggggagtgtttcttcccaccaggtgccatgtcaaattctgatgagggtccccgtttcacgtgcattgcatttaattttgtcactcatgtttattaaattcgttggttggattttcatttttaatttctccccttatagattgtttaaatttacatagtatggctttttcttctttcttttttttttctttgtttttttacgtggaaggcatggttgatgtataataaaaataatgtttgtgtggaactttttattatttgttnaaaaaaacntnnnatntaaataatttataaaaaataataaaaatt

SEQ ID NO: 186 - DNA, 1508 bp, Glycine max
  misc_feature (1472)..(1472): n is a, c, g, or t
  misc_feature (1476)..(1476): n is a, c, g, or t
ccacgcgtccgggagaacttcggaaacgggggccccccccccccctggaccgtctggcctggcagctgctgaccaactgaataaaatgggccatacagtaactgtgtatgaaagagctgataggattggagggcttatgatgtatggtgttcccaacatgaaagctgacaaagtggatatagttcaacggcgggtcaaccttatggcagaggagggaattaactttgtggtgaatgctaatatcgggcatgatcctttacattctctcgataggcttcgggaggaaaataatgctattgtcttggctgtaggagccacaaaaccaagggatctcccagtacctgggcgggagctgtcaggagttcattttgctatggagtttcttcatgcaaacactaaaagcttgcttgatagcaatctccaggatggtaacttcatttctgctaagggaaagaaagttgtggttattggtgggggtgacacgggcacagattgcatagggacatccattcggcatgggtgtagtagcattgtaaatctggaacttctccctcagccaccacaaactagggccccaggcaacccttggccacagtggcctcgcatataccgagtagattatgggcaccaagaaggtgcggcgaaatttgggaaagatccaagatcttatgaggtattgactaagcggtttgtgggagatgaaaatggagttgtgaagggacttgaagtaatacgtgttcgctgggagaaggatgaaactgggaggtttcaatttaaggaaattgagggctccgaggagattattgaggctgacctagttttactggccatgggattccttggccctgagtctacaattgcagagaagttgggtatagagcgagacaataggtcaaacttcaaggcagagtatggtcgcttctcaaccagtcttaaaggggtgtttgcagctggagattgtcgacgtggtcagtccttggtggtatgggcaatttcagagggacgacaagctgcagcacaagttgacagtttcctcacaaatgaagatttagagcacaatgttgccgggagtccagacgaacttatcaagaagaagcagcaaccaagggacactgtggcagtggcaaacaaacagtgattacttaggagccttctgtggtttttctattcttaaaagatggaataataaaagatgactgctggagattcattgagcattgttggttcgtagttggtgccccatataaatgtaagggggaaaataataaagaagcgatctaagggtgcaaggttagtgcacagtagaaaattaggaatgttcataggcttcgtgatggaaaggttagttcttagttaattattgtggcattgtgtggaatgaaatgtacagtttgataattaatgatttaggttattgtttccaatcttaagttgctttgaatgagtattgaggttcttgaaaaaaaaaaggngggngggggagaagagagataaaaagagagaagaaa

SEQ ID NO: 187 - DNA, 1644 bp, Glycine max
aatagatggcgtgaagcattagagaggcttcttgaagctccggactcccccgtcgtccctcgccgccggtgcccagcaccttgtgaaggttcttgtgtccttggtattattgagaatcccgtatccattaaaagcattgaatgtgccatcatagacaaggcttttgaggagggttggatggtgccacgacctccagtcaagagaactgggaaaagagtagccatcgttggcagtggaccatctggcttggcagctgctgatcagctaaataaaatgggtcatacagtaaccgtgtatgaaagagctgataggataggagggcttatgatgtatggggttcccaacatgaaaaccgacaaagtggatatagttcaacggcgagtaaatcttatggctgaggagggaatagattttgtggtgagtgctaatgttggacatgatcctttgtactctcttgatcggcttcgagaggaaaacgatgccattgtcttggctgtaggagctacaaaacctagggatcttcctgtacctggtcgggagctttcaggagttcattttgcaatggagtttctccatgcaaacactaaaagcttgcttgatagcaatctccaggatggtaactacatttctgccaagggcaagaaagttgtggtcattggtgggggtgacactggcacagattgcataggaacgtccattcgtcatggttgtagtagcgttgtaaatcttgaaactccttcctcagccaccaccaactagggctcctggcaacccatggcctcagtggcctcgcatattccgtgtagattacggtcaccaagaggctgcagccaaatttggcaaagatcctagatcgtatgaggtattaactaagaggtttatcggagatgaaaatggagttttgaaaggacttgaagtgattcgtgtttgctgggagaaggatgcaaccgacaagtttcagtttaaggagattgaagggtcagaggagattattgaggctgacctagttttactagccatgggattccttggtcccgagtctacaattgccgagaagttgggtgtggaccgagacaacaggtcaaacttcaaggctggttatggccacttctcaacaaatgtcaaaggggtgtttgcagccggtgattgtcgccgtggtcagtccctggtggtgtgggcgatttcagagggacgacaagcagcagcacaggtcgacaactacctcgtcaaagaagacaaagaccaccggaatcaggatggccttgtcaagagacagcagggcctctacaagaagcagcatggaagcagcaaacacacggtgatgacttataggtggctcctctgatttttcatactcataaagttccaaaaggaattgcacagaataaaattgttccaagtttgagcaggagattcattggtttactttaaacgggaaaaataagaagaaataaagacaagtgtagtgtagggaaatcaagaggttgtttcggtgtttggtgtggtttcagggtataaagttgttgcagattcgagtgttcagttgttcaatgattgttttattcgggcttttattgttgggaaggttagcttttagttggtaatggtgatgacgattatatgtaatgaagtgtacagtttgat

SEQ ID NO: 188 - DNA, 1416 bp, Glycine max
tcagctacgtaggccccccccccccgctgtagtgaaggggcatcacacagtgtgttttctttgaccttttggtttccaatgggaactggatttccacactttcactttccatactcctcctattgagcactataatagcaccaaccaacttgttcaaaaggactacaaggtggtccttcttcctttactttcattcatgggaaaggtcacaacttctgcaacccagcctgtatctcaagaagcttccaattatgatgaggtttttatgcagcagagcttgctctttgatgatagtctgaaggatttgaagaatctgagagcacaattatattcagcagctgaatattttgaactctcatactccaacgatgaccaaaaacaagtagtggtagaaacattgaaggattatgccatcaaagctcttgtaaatacagtggaccatttaggttctgtgacctacaaagtaaatgatttgttggatgagaaagtcgttgaagtttctgtagcagaactacgggtgtcttgtattgaacagagaataaaaacgtgccatgagtatatggatcatgagggacgtacccaacagtcattggtgatcagtactccaaaatatcataagcgttatatcttgccagttggggagaccatgcatggtgccaaccgcacaaagtcaaaacatgtggggtacaacctagatgacgaagatgaatggcctaactttaggaatgctgttcgagctactatcagagaaacaccaccatctacagcaagaagagggcgctccccatcaccatctttacaacctcagagatctggagctttttcattcacttcgaccatgcctaaaaaagatttagagaggcgatcggtttcaccataccggttcccccttctacgcactggatctcggtcatcaagtaggcctacaacacctaaaataagcagaccaaccactccaaatccaagcagacccaccacaccaaatccttctaatgcaagacaaaggtacccttcagagccgcgcaaatcatcttcaatgcgattatccgcagaaagagaccatggcaaagaactagaacaataccccagtaagagtaaacgtctcctgaaggccttactaagccggcgcaagtctaagaaggatgacatgctatacacatacttggacgagtactgatactataaaacctatagaaagcaagggaaacaagtcaattttgcttgctagtttgataggttgcactttgtcatttaaaatgaacgtttatacggtaattttcttttatctgtattttaaattaagtgtaactaagcacacaaaattatgatgtgtgataatgtaatagttcaagctttattttcaagatgaatgttatataatcgagtaaatttggcttccaaaaaaaaaaaaaaaaa

SEQ ID NO: 189 - DNA, 872 bp, Glycine max
cactatcctcattaagtatagacaagcaaacagtcccagaaggatatacattagggtggaagaaaccctcgtgccgacgacagggtggaaaatttgcagagagcaaagaacagaagaagatggcacaaacgctggcaatgcccgtggcaccttcgctagctatcatctccaattctcgcctctccaacacactctccgttcccgttctgaacaaaccaaaggttcaagggtcaagcatcaagtgcgttcgtgttggtggtgtggagattccgaacaacaagcgaatcgagtactcgctgcagtacattcatggagttggaaggaccagagcgaaacagattctctgtgatatccaaatggataataaaatcacgaaggaactcactgaggaggagctaatcacactcagggacgaggtctccaaatacatgattgaaggcgacctgagacggttcaatgcggttaatataaagagactgaaggatattcagtgctacagaggaataaggcatattcaggggcttccttgcagaggccagcgaaccaagaataattgcagaaccttgaagggtaagaaggttgccattgccggtaaaaagaaaaagtaaacggctcctattttttgtgatgttgttttctaattgtcaatgttgtaaggaaaagaataataatgttttctatataattcaattgtttttgtttaagtgttacttggaaatacatgacatcctatgaaagtatgaatcactcacacggcttggtcgtgttgaaaattcagttctgagcagacagacttagataacgtcgcatgatcttcttgagaactattatgcctgaaatattagtaatttcacatttgtctaaaaaaaaaa

SEQ ID NO: 190 - DNA, 1831 bp, Glycine max
ggctcgaggttcgagtcagctacgtaggccccccccctacattgacaataacggcatagaaaagtcccttgatgaagatcggagtaaacttgagaagataattcaaggcatggctgctagtagccttagatgtattgcttttgcttacatgcacatttcagaagataatgattataacgataaggagaaagtgcatcaaatccttagaaaagatggcttgaccttgctaggtattgttggcctcaaggatccatgccgatctgacgttaagaaggctgtggaaacttgtaaacttgcaggtgttagtatcaagatgatcactggagataacattttcactgcaaaggccatagcagcagaatgcggaatattagaccttgatggccatgtgaatgcaggagaagtggttcaaggtgtggaattcaggaactacacagaggaagagagaatggagaaagtcgagaagatccgcgtgatggcaagatcgtcccctttggacaaacttttgatggtgcaatgcttgaaaaagaaaggccatgttgttgcagtcacgggagatggcacaaatgatgcacctgctctaaaagaagctgatattggactttctatggggattcaaggaactgaagttgccaaggagagttctgacattgtgatcttagatgacaacttcaattctgtggccactgtcttaaggtgggggagatgtgtttataacaacatccagaaattcatccagtttcaactaaccgtgaatgttgcagcactagtgatcaattttgttgcagcagtttcttcgggagacgttcccctaacaacagttcaactattatgggtaaatctcattatggatactctaggagcattggcactggctacagaaaggcctacaaaggagttgatggagaaacagccagtgggtagaactgagcctcttattactagaattatgtggagaaaccttttagctcaagctttatatcagattgctgttctcttggttttacaattcaatggaaagtcaatcttcaatgtaaatgggaaggtaaaggatactctaattttcaatacttttgttctctgccaagttttcaacgagttcaactctagaagtatggagaaacttaatgtgttccaaggcactcacaaaaaccacttatttcttggaattgtggggattactttggttcttcaagtattgatggtggaactcctaaggaagtttgctgatacggagagattgacatgggagcaatggggaatttgtattgtaattgcagctgtgtcgtggccaattgcttggattacaaagctcgtacctgtttcagatagaacgttcttcagccaccacgttaagtgggtaaaattatgggtcttcaagattaagcatttgttttaattttacctcctcacacgtttaaggaatcataaattccaagcctcttgaaacacttgaatatgatatattcgtgtatacgatgtatggaaatccaagatcctttatggtttaaaaacataagagatcttgaatttccatatgtcttacacctaaatatcatatattcaagtgtttaagatactaggaatttatggaatcttagtgaacacctcctttatctagggtaggaattatgggtagaggtagtagttgaaaaattcttgtattgtgaaagtagtataatatcgttaacaacccatctctaaaatgggtaattgggatggtgggaattaggatatatgtgataaatttatgtttatactactttttgatgtaccaaaaaaatatatataaaatggtcaagtttaatgttcatgtaaaaaaaagaagggc

SEQ ID NO: 191 - DNA, 2393 bp, Glycine max
gttctcacgcctcaatttatttgatggatcatccccagatgaaaaatcatctcagtttttgcttctgggaatctgagttttctgcctcgtcggccccccccccttggtcttgtggtaggggaaacagtgacctttctcaattttgcttatttaatttgagcttagtttgtttagttatagattatgttagctagcttttcagtttagatgggtacttaaaggggtttaatttcttcttttgcttctaaatttagtcaaacagtgctttgactcaattggaatctcgtatatttggaatcatggataactcatatgattcatcctcatccttgagtttcgtatcatctcacctgtcacatggttctagtaatcacaacgtgtcttccaccaccagcaatgagcatggggaaaatattgaaattttgagtctgaataagctcagtggaagccttgagaagctattgattgaggttgagtatgattatagtgatgctgagattcttattgaggacatccctgtgggtattcatcgctgtatattggcatcgcgtagtccgttttttcatgagctttttaagaaagggactgatggatcagggaaggaaggaaagccaaggtatctcatgtcagatttgatgccttatggcacagttggatatcaagctttccaagtgttcttgtactatctgtatactggaaggctaaaggcttcaccaacagaagagacaacatgtgttgatgaaacatgtatccatgtagcatgccgccctgctatcaatcatgccctagagctgatgtatgcttctgccacttttcagatgaaagagctagttttactttttcagcggcatctcctaaattttgttgagaaggctcttgtggaagatgtcattcctattcttatggctgctttcacctgccggctccgcccccccccccctctcaggctacgtggcccccccccctctgactttgacaacacatctttggaaaagagctccctcgtgaagttgtgactgaaatcaaattgctccgactcccatttcagccagaatccacacctaatgcaatggaagtggagtccttgaatgaaaagagtataaggagaatccacaaggcattggactctgatgatgttgagctactgaagcttcttctaaatgagtctagtgtcactctagatgatgcacatgccctgcactatgcttgtgcctatagcgattctaaggttattcaagaagttcttagtctaggcatggctgatattcttcgtagaaattcccgaggatacacagttcttcatgtggctgcaaggcgaaaggatccatccattttggtagcactactgaataaaggggcgtgtgcatcagataccactccagatggacaaactgctcttgcaatttgtcagaggttgacgagatacaaggattatcaagagcaaacagtccagtgtaaggaatctaacaaggacaggctctgtgttgatgtcctggagagggagatgagaagaaattctatgactgtgaatatgtctgtttcatcacagctaacagccgatgatttgcacatgagactggattaccttgaagatagagttgcatttgctcggctgttgtttcctgctgaggctagggtagccattgagaatgctgaagcagattcatcatcactgtatgcaaattcatcggctttgaaggtcacaaatggcaacccgaaagaagtagatctaaatgaatctccctcggctcgaaccagaaaactccagttaagattgcatgcccttatgaaaacagttgagaatggtaggcgcttctttccccattgctctgaagtgcttgataagtttctggaagacgacgaaatgccagatgttttcttcctagagaagggcagtgaagaagagcagagaatcaaaaaagcacgcttcatggagcttaaagatgatgtgcaaaaggcatttcacaaggatatggctgaaaataaccattctggtttttcatctacggtgtcttcctcttcttcctcaactcgtagggaaggtcttaaccatagagtaaggagaaaatgaagtccatgttcttctatgtagagtgttgcaacttgcaagtagaagccgtggaatatttagaaaaaataagatggaatgttaaattagggggttttgctaatgaacttgggagatttttactagcttgatttagtttcttatagttgttggaccaagagaagaagaaaaataaaagaagacgaattggcttatagtaatatctttgttccttttcgaagaccctaaagtgtgtattttttacattgttatctgattatagattgttatataattgaaaatgttacctcctgtaataattactttaaagatcatatgcaagact

SEQ ID NO: 192 - DNA, 1385 bp, Glycine max
cccgcgcgcccgcctgcaggtgcaggcagatacatagatagatggcatattcatattctctttagactccccgctttcaaagctctgaaatttccgattcgggatggagaaatacgagctcgtgaaggatataggatctgggaatttcggtgtggccaggctcatgcgacacaaagacaccaaggagcttgttgccatgaaatacattgaacggggtcacaagattgatgagaatgttgcgagggaaatcataaaccatagaagtcttcggcaccccaatattattcggttcaaggaggtggttctgactccaacccatctgggtattgttatggagtatgcggctggtggagagctctttgagaggatttgcagtgctggaagattcagcgaagatgaggctcgatatttcttccagcagctcatctcaggagttagctactgtcattccatgcaaatctgtcatcgagacttgaagctggagaacacattattggatggcagcccagccccacggctcaaaatttgtgattttggctattctaagtcatctctgcttcattctaggcctaagtcaacggtgggaaccccggcctacattgcacctgaggttctttcacgtagagagtatgatggaaagttagcagatgtatggtcctgtggagtgactctttatgtaatgctggtgggagcatacccatttgaagaccaagaggatcccaaaaatttcaggaaaaccatcaatcgaattatggctgttcaatacaagattccagactacgttcacatatctcaagactgtagacatcttctatctcgcatttttgtggcaaatccagctaggagaatcaccattaaggaaatcaagtcccacccatggtttgtaaagaacttgcccagagaattaacagaagtagctcaagctgcctactacagaaaagaaaacccaaccttttctcttcagagtatagaggacatcatgaatattgttgaggaggccaaggctccacctccagcatccaggtcaattggaggatttggctggggaggggaggaagaagaagaggatgaaacaaaagaagcagtggctgagactgaagaagatgagtacgaaaagagagtcaaggaagcacaagcaagtggggaatttcatgtcagttaaaaagtgtttatttttagatagagagcaattgattcttggtttcctttgcacttagctaagttcaactaaggtgagtgtgttttgcttgtatgtataaaattaagttttccgcatgggacatatagtttaataaatggctgtacatttttttaaggttgtgcatggtaaggttgtgcatggttgttaattgtgatcatattataagtattattaacctgtccct

SEQ ID NO: 193 - DNA, 1134 bp, Glycine max
tcgatcagctacgtaggcccccccccccctctctcttccttgtttgtgggaacattatggagcccagattcgtaatctccgcatcggaggccgaatcccaatcaatctccaaactcctcccttccctcgtttcctcttctcagtccctcgcccgtccttccatctccaactttcccgtcgccgccgtcggactcgccgcctccggccgcatcttcgtgggcgtgaacgtggagttccccggcctccccttccaccacaccatccacgccgaacagttcctcctcaccaacatggccaacaacgccgagacccgcctcgactccttcgccgtctccgccgccccctgcggccattgccgccagttccttcaagaactccgcgacgcccccgacatccaaatcctcatcacctcccacaaaaaccctcacttcagccctctctcccacttcctctcccaccacttcggcccccacgaccttctccccaaaaccgtccctctcctcttggagcctcgtcacaacgctctctctcttccccaaaacgatcatttcaacgctcttgcgattgcggcgttggaggccgccaataactctcacgcgccctacagcgcgtccccctccggcgtcgcgcttctcgattccaaggggaatgtttttaaaggctcttacattgagtccgctgcttataaccccagcttgggaccgcttcaggccgccatcgtcgccttcatcgccggcggcggtggggattatgaagagattgttgcggcggtgttggtggagaaggaaggggcggtcatcaaacaggatcacactgcaaggttgctgctccattccatagcgccacgctgccacttcaacaattttcttgcttctcaatctccttcaacttgaacattgtttttttttctctctaccctaaattaataatatatatatactatttgagagtggatttggatgcacccttacctgacctcaccctgtaataatgtgattgtcacggatagacatggtgatggtctataataatccccttcctatttatgcctatgtggttctaatattttaagacaagctttttctttttgtatattgttacatctaataaaaaatattgacaagtctcactcgc

SEQ ID NO: 194 - DNA, 1526 bp, Glycine max
tcagctacgtaggccccccccgagtagtcaaagtatttgatagtgcaacccaacctaactaacgattaaccaacctgcatcacgcacgtctctctctctctctcgccatggctatggctatgcaaagcggaatcggagtctccaagatcctcatcatagcaggagcaggttacaccggcaccgtcctcatcaaaaacggaaaactctcggatttaatcggcgagcttcagttgctggtgaagggattggaaaaatctggggagcatgctgaaggtgaaggtgaatatgctgatgccatagctgctcaggtgcgtcgcctggcgaatgaagttcggcagctagcatcaaacaggccaatcacagtactgaatgggggttctgaacaaagtaatttatcatcccttgtcgttccagctgctgccttgggcgctctgggttatggctacatgtggtggaagggaatttcattctcagatcttatgtatgtgactagacggaatatggaaaaagctgttgcagatttaaccaaaaagttgcagcatgcctcagatgtcattgctgataccaagaagcatttgacccagagaattcagaatttgaatgacaaaatgctcaagctgaatgagttgcaaaggtcaactaaggatgaagttgctggagttagaagtactattactaatatccatgaagacttgggttatttgcaacaaacagtggaaacattggattataggttagctgaattgagttctaagcaggattatgcaaattatggattgtcatatctcatcgactatgtacacggaaaaagccagaaaaagcccgaattgttgcaggagcaactgaaactttcagggaagtcccctaatttgatcacatataaaggaactccaaatctaatgggtcttaaagacattgcagaaacattgtctggtttagacatgtctgcttcagatagtgtcatgccagatggcggggataaacgagagcaacagcgaaggccattgttgaggaagggcattgcaaaaacattgtccagtttagacaaatttgcttcagatggtatcatgctagatggtgtggataaactagagcaacagtgaaggccattgttgaggactagttcaaccaaccgttgatgacaaggtcttaaatcatgattaccaaccttttaagcgttcgttcctcgtttttttagcagtaactttcagttcacttgttcataaatcaaaatatacttgtgacagctattgtgattttcacactaaattttatcctacatagtatattaatagattggatacattatatattcaagcttgtgaattgtgattctaaattgtaaataaaattttgctgtcaaggtgtatgttggtttggtgctaccaaaaaaaaaaaaaaaaaattggtttgctagattcatgccttctgttgtatttgttttaccaaaattgtgatcgcctcccactgtaattttttttatcgacaaatattagttgttagattgttaattttgttaataggat

SEQ ID NO: 195 - DNA, 1167 bp, Glycine max
accagggaaatagaaggaccctacttagactacatagaaacgcaatttcgaaaaccagttttgctatctggtccactagtccccgagccatcaaccgatgtgcttgaggaaaagtggtccaaatggttagatggtgcccccccctcggctcgcgtattatgctcctttggcagtgagacatttctgagtgattatcaaatcaaagaactagccagtgggttagaactcactggcttacctttcattttggttctgaatttcccatccaatctctctgccaaagctgagttggagagagcattgccaaaagggtatttggaaagagtgaagaataggggagtggtgcacagtggttggtttcagcagcagcttgtgctgaaacactcaagtgtggggtgctatgtatgccatggtggctttagttcagtgattgaagctatggtcaatgagtgtcaactggtgctgttgcctttcaagggtgaccagtttttcaattctaaactcattgccaatgatttaaaggcaggggtagaggtgaataggagtgatgaagatgggttctttcacaaagaggatatactggaggcattgaaaactgtcatgttggaggataacaaagagcaagggaagcaaataagagaaaaccacatgcaatggagcaagtttttatcaaataaggaaattcagaacaaattcatcacagatctggttgcccagttaaagtctatggcttagtcttgtctcttccaatggaaaataaagtctaccaagactagaaagtataaactatagttcaaaatgatcatattatcatatatcaattgagatatgcgtggtcagtctcgttgttcttgtgattttgctttcccgttgtaggttttattctgtgtctcctttctcccgatcaattaatgcagttaggagattcaccttaaaaaagctaaaaattgcttttgtaacttgaagttattgtattcctactgattttggtcaagaccaagaagttgtcttataatttgtgcacatggtttgttttgaaatttagaaaggaaaaaagaaaagaaaaagtagagcatggaacaaatatcgtttgtaatataggtgaccaataaatgtagaaccattctaaataaatatggctttgaatacaaaaaaaaaaaaaaaaaa

SEQ ID NO: 196 - DNA, 1717 bp, Glycine max
tcagctacgtaggccccccccccgaagccaacatccataaggaacttgcagaaacataaacaaaaaagatgtcttgtgaagttgtgaacaatgatgagcttcatgtggttatgttcccattccttgcatttggtcacattaacgcatttgttcaactctccaacaagttgttctctcatggagttcgtatcactttcttgtcagctgcatccaacattcccagaatcaaatcaactcttaatctcaatccagccatcaatgttatcccactatacttcccaaatggcataaccagcactgctgaattgccaccaaacttggctgcaaatctcatacatgcacttgaccttactcaacctcatgtaaagtcccttttgttggaactcaaaccccattatgttttctttgactttgcacaaaactggctcccaaaactagcttctgaacttggcatcaaatctgttcgctttgcgtccttctctgccatatctgattcttacattactgtgccttcaaggcttgctgatattgaaggaagaaacatcacttttgaggatcttaaaaagcctccaccagggtatcctcaaaactccaacatttccctcaaggcctttgaggccatggacttgatgttcctcttcaaaagatttggtgaaaaaaactttactggttatgagcgagttttgcaaggctttagtgactgctcattaatagtgtttagatcgtgcaaggaaatagaagaatcctacttagactacattgaaaagcaatttgggaaactggttttgttaactggtttccttgtcccagagccatcaatggatgtgctagaggaaaagtggtccaaatggttagacagtttccctgccaaatctgtcatactatgctcctttggcagtgagcaatttctgaatgatgatcaaatcaaagaagtggccagtggcttagaactcagtggcttacctttcattttggttctgaatttcccatccaatctctctgccaaagctgagttagagagagcattaccaaaagggtttttggaaagagtgaagaataggggagtggtgcacactggttggtttcagcagcagcttgtactgaaacactctagcgtgggatgccatttaggccatggtggcttcaattctgtgattgaagctctggccagtgattgtgaactggtgctgttgcctttcaaggctgaccagtttttcaatgctaagctcatagccaaggctttggaggcagggatagaggtgaataggagtgaagatggggactttaagaaagaggatatactgaaggcagtaaaaactatcatggtggaggatgataaagagccagggaagcaaataaaagaaaaccacatgaaatggaaggagtttttattgaataaaggaattcagaacaaattcatcactgatctggttgcccagttgaagtctatggcttagtgttcaggattcggatttcttggactataagctatcatttaaaatttgaactgttcgatcgtgtattagttgttttgtgtgtgaatgtgtgtgactagtttggtcagtgctcattttcttggtctattctcttccaatattaatgtaaaataaagtctactaagactaatccaaaatcttaaaaaaaaaaaaaaaaaagtgtctcctttctccagattctactgtagttataataagaccagttagtgcatgaattctct

SEQ ID NO: 197 - DNA, 1431 bp, Glycine max
tctacggctgcgagaagacgacagaaggggacataatagtgcattgcactcacatcacatccccttgcttgcttatttcattactcatccccagttcccgattttgcttaaccttcaattccaatcgaattgaacgtcagaggtccttgcaatggcagggaattcttctgatgtactgtcgccgaagcaacctcccttgccatctcccttgcgtttctccaaattctttcagtctaacatgagaattttgattacgggaggagctggattcattggttctcacctagtcgatagattgatggaaaatgaaaaaaatgaggtcattgttgctgataactacttcactggatcaaaggacaacctcaaaaaatggattggtcatccaagattcgagcttattcgtcatgatgtcactgaacctttgacgattgaggttgatcagatctaccatcttgcgtgccctgcatctcctattttctacaaatataatcccgtgaagacaataaagacaaatgtgattggtacactgaacatgcttgggcttgccaagcgagttggggcaaggattttactcacatcaacatctgaggtatatggggatcctcttgtgcatccccaacctgaaggctattggggcaatgtgaaccctattggagttcgtagttgctatgatgaggggaaacgtgtggctgaaactttgatgtttgattatcataggcagcatggaatagaaatacgtgttgcaagaatctttaacacatatgggccacgcatgaatattgatgatggacgtgttgtcagcaacttcattgctcaagcaattcgtggtgaacccttgacagtccagtctccaggaacacaaactcgcagtttctgctatgtctctgatctggttgatggacttatccgtctcatggaaggatccgacactggaccaatcaaccttggaaatccaggtgaatttacaatgcttgaacttgctgagacagtgaaggagcttattaatccagatgtggagataaaggtagtggagaacactcctgatgatccgcgacagagaaaaccaattataacaaaagcaatggaattgcttggctgggaaccaaaggttaagctgcgagatggccttcctcttatggaagaggatttccgtttgaggcttgacaaaaacaattaacttatttttcttccttgtatatctagtcaaaatatttcgataataagtggtattggattattctataagttttcatatttatgatacttaggaagtagggatacctgtaatttcgtttcctcgatcgtactcttgtttcacaaaaaaacactgcagcaatcatgtctgtgcaaattttgccagtgaaattattattgagttaaaaaaaaaaaaaaaaaaaaaaaaaaaaaaaaaaaaaaaaaaaaaaaaaaaaa

SEQ ID NO: 198 - DNA, 831 bp, Glycine max
tttttctaaaaactccgaaatggcagtaatgattctgagatacttcaatgtgattggatcagaccccgagggaagattgggtgaggctcctaggcccgaactgcgagagcaaggtcgaatatcgggtgcctgctttgatgctgctcgtggtattgtacctggtataaaggtaagaggaacagactataagacggctgatggaacttgtgtacgagattatattgatgtaactgacctggttgatgctcatgtgaaagctctggaaaaggcgcaacctagtaaagtcgggttctacaatgttggcactggaaagggtagttcagtgaaggagtttgtggaagcttgtaaaaaggccacaggggtggacattaaagtagactaccttccacgtcgtcctggcgattatgctgaggtgtacagtgaccccacaaagatcaaacatgaattgaattggactgctaagcacactgatcttcaacagagtttgaaggttgcatggagatggcagaaatctcatcgtgatggttacggggtttcaaatgcagtgctttgaattacttagaattctaacatagcagaagactagaagaaaccccagcagcatccatttcagctgcatttctatgatatcttagaataggggttgatattatttttttcttcttttactccacagtgatttggcattggggaatttgttcttagggagcatgtagtccattcgttacatgttacatgtattgaccgtaaaatatggttcaataatataatgcagaggctctattatagcttttctctacaaaaagatgtatatcacatttcatttctctc

SEQ ID NO: 199 - DNA, 1717 bp, Glycine max
ccacgcgtccgcaagaccacccttcaattttggacctttccatattccggggcagctacgtaggccccccccccatatttccattttccactatttctctccaccgtctcatctggatgtctctcaagatctgtctggggagtggagcttgatttgattattgatattaaggaataaaatctcattcaacacactaaacaatagggattttgcaaatgctaaattttggaaggtccagaagtcagtcaagggcagccagagctacaacaatgggaggcatggattatgcagattcaaaaaagaagggcaattttgttgggaaagtatttcttgctgctgcattaacaacactgtgcataatcatgatcaagcgatctccatctttgaattcccctagcccgttttctgttcgtgaacctggggtcactcatgttttagtaacagggggtgcaggatatattggttcacatgctgctctacgacttctgaaggagaactatcgtgtcaccatagtagacaatctgtcacgtggaaatttgggggccgtcaaggttcttcaagacttatttccagaacctggaaggcttcaatttatttatgctgacttgggagatccacaatctgttaataaaatatttttggagaacaaatttgatgccgtgatgcactttgctgctgttgcatatgtgggagaaagcactgctgatcctcttaagtattatcacaatattacatcaaacaccgtgttggtattggagtctatggctaaacatgatgtgaagacattgatatattccagtacatgtgcaacatatggggaacctgagaagatgcccattacagaagaaacaaagcaggtcccaataaatccatacgggaaagccaagaagatggcagaagagatcattcttgatttatctaaaaactcagacatggcagtaatgattctgagatacttcaacgtgattggatcagatcctgagggaagattgggtgaggctcctaggcctgaactgcgagagcaaggtcgaatatcaggtgcctgctttgatgctgctcgtggtattgtacctggtttgaaggtaagaggaacagactataagacggctgatggaacttgtgtacgagattatattgatgtaactgacctggttgatgctcatgtaaaagctctggaaaaggcacaacctagtaatgttgggatctacaatgttggcactggaaagggtagttcagtgaaggagtttgtggaagcttgtaaaaaggccacaggggtggacattaaagtggactaccttccgcgtcgtccaggcgattatgctgaggtgtacagtgacccatcaaagatcaaacgtgaattgaattgggttgctaagcacactgatcttcaacagagtttgaaggttgcatggagatggcagaaatctcatcgtgatggttacggggtttcaaatgcattattttgaattacatagaattctaacataacagcagaagactagaagaaaccccggcagcatccatttcagctgcacttctatgatatcttagaataggggttgatattatttttttcttcttttactccattggggaatttgttcttagggagcatgttgtccattcgatacatgtattgaccgcataatatgattcaataatataatgcagaggctctattatacattttctctaaaaagatatttatatcaccatt

SEQ ID NO: 200 - DNA, 1691 bp, Glycine max
ctcgagccgtcaaaattgagtttaatgtttgatggaagaattttcagattttggttctcatttatctatataaggtccgctatgcccgcggcgtccgaagacaagagtgattagggttttggtctggtgtttttcttaagcttgagatcaggaattaatttcagaggttcagagaatggcaacggattcttctaatggtaatggacatcaccaaacaacaacaaagcaacctcctttgccgtctcccctgcgcttttccaaattttttcagtccaacatgagaatcttggttactggaggagctggattcattgggtctcacttagttgacagattgatggaaaatgaaaaaaatgaggtaattgttgctgacaactacttcactggatccaaggacaacctcaaaaaatggataggtcatccaagatttgagcttatccgtcatgatgtcacggagcctttattgatcgaggttgatcagatctaccatcttgcatgccctgcctctcctattttctacaaatacaatccagtaaagacaataaagacaaatgtgattggcacactgaacatgcttgggcttgcaaagcgagtaggagcaaggattttgcttacatcaacttcagaggtatatggggatcctcttgtgcatccccaacctgaaagttattggggcaatgttaaccctattggagttcgtagttgctatgatgaggggaaacgggtggccgagacattgatgtttgattaccataggcagcatgggattgaaatacgcattgcaagaatctttaacacatatggaccacgcatgaatattgatgatgggcgtgttgttagcaacttcattgctcaagcacttcggggggaaccattgacagtccaatgtccaggaacacaaactcgaagtttctgctatgtctctgacctggttgatggccttatccgtctcatgggaggatcaaacaccggaccaatcaaccttggaaacccaggtgaatttacaatgactgaacttgctgagaccgtgaaagagcttattaatccaggtgtggagatcaagatggtggagaacactcctgatgatccgcgacaaagaaaaccagacatcacaaaagcaaaggaattgttgggctgggagccaaaggtcaagttgcgtgatggtcttcctcgtatggaagaggattttcgtctgaggcttgaagttggcaaaaagaattaatttgttttcgctcttttggtgacatgtcaaagtagagaaataataagtgagatgagtctggcccattttcaaaattttcatcattatagttattattatgattatgatactgagaaagttgggggacctgaaatttggcgtctacagctatcacattgctatatatcttgttttgtttggcaaaagactgcagcatttcactacaaattttgctgtttgtaagatgattgaattgaaattttttcctgttttctgcttatcttttcaactttcctttgctaagtgtatttgagaactgagcttcaggaatgttaattgcatagtcgaattttgtaagccatttatttacactgatgcaaggtctacacacaagtggtcgaattttgttttgaattgtataattcatgcattggagaacgattttgtctgtaataaaattctattcaaaagtttatgttatcgtcaaaaa

SEQ ID NO: 201 - DNA, 1038 bp, Glycine max
tctctctctctctctctctctctcacaagccacaatttcaacgccacaccaaaaattccactgcaccaccaccctccccatttgtacttttcttctcattctctttccactcccctgcattctgcacacaatctagctttacgtgcttctgggcaaccgcataaggttaaactgttaagcatatcattgaaatccttttgggattggaacttgatatgatcatttgtattggggagtaagaccttgttacttttgcaaatgctaaattttaataggatcagaagtcagcccaggacaaccagatctatgtctttgggaggcatggattacgtggatccaaaaaggaaaggcaattttgttggaaaagtttttcttgctgcagcattaacggcattatgcattatcatgatcaagagatctccatctttgaatcccccgagtccgttttccatccatgaaccaggtgtcactcatgttttagtgacaggaggtgcaggctatatcggctcacatgctaccctacgacttctgagggaaaattatcgtgtcaccatagtggataacctgtcacgaggaaatttgggtgctgtcagggttcttcaagacttatttccagaacctggaaggcttcaatttatatatgctgacttgggagataaagaatctgtaaataaaatattttcagagaataaatttgatgccgtgatgcactttgctgccgttgcatacgtgggagagagcacacttgaccctcttaagtattatcacaatattacatcgaataccttgttggtattggagtctatggctaaatatggtgtgaagacattaatatattctagtacgtgtgcaacatatggggaacctgaaaagatgcctattatagaaacaacagaacagaaaccaattaatccgtacggaaacgccaagaagatggccgacgatatcctccttgatttttccaaaaattctcagatcggagtcgcccttctcactatcttccatgtgattggatcaaatcgacaaggcaaattaggc

SEQ ID NO: 202 - DNA, 1957 bp, Glycine max
  misc_feature (1576)..(1608): n is a, c, g, or t
  misc_feature (1871)..(1871): n is a, c, g, or t
  misc_feature (1881)..(1881): n is a, c, g, or t
  misc_feature (1938)..(1938): n is a, c, g, or t
  misc_feature (1949)..(1949): n is a, c, g, or t
tcgagtagctacgtagtgcccccccccccaaagagcaggagtctggggtctgggaggtgaaggagagagaatggatcctttgtcggctctcagagagtttacgatgagaggcgaggtggaaaagatagtgcgtgtgaacgcagagttccgattcggggaggagtacaccttcccatgctgggtggagactgcttaccgttccaccaagggcaaccgttacacccttgaaaccctagtccactacatacaaaaccaccacctcaagcacaccgagtacatccagaacaccttcgccgtcggcatcccctccgtcaccctccccgaccgcaagcccctcctccaatacctccagggcaccctctcctcctccgattccatcgagtaccgcccccacgacgacccttcttccttcccagcccccaaatccacccccaaccccccttccctgccccctgaggacctcaatttggacttcatctccatgatcaggtccgccgagaagcccttgaaggaccgccagtccttgctggagtgcaagaatcgcgacttctacagcgtcctcgtctccgccaccaagcgcgaagaggagcgccagaggatggaatctcaccagaggaaggacggcctcgttgccaagagtcgcctcatgggctccgacgaccggggtttagggttctccgacgacatgggcggctatgaccctactcccaagcccaagatgcacctcaagggcaccaaaattggggaaggtgtccccattatcttggtccccagtgcctttcagaccctcattactatctacaatgtcaaggagttcttggaggatggtgtttatatacccactgatgttaaggtcaagcagatgaaaggtgccaggcccgattgtgttaccgtccagaagaagctcagtagggatagggttgtaaccgcttatgaagtcagggataagccttctactcttaaacccgacgattgggatcgggttgttgctgtttttgtgctcggcaaggagtggcagtttaaggattggcctttcaaggaccatgttgaaattttcaacaaaattattggatttttcatgcgttttgaagatgatagtttggagtcatgcaagactgtcaagcagtggaatgtcaagattatctcgattagtaagaacaagcgacatcaagacagggctgcagcattggacgtctgggagagactagaagactttgtacgcgcacgatcacattcttgattttgtaccatatttacagatcatgtacgtacataattttttgatttcgagaactccttagggccacaatgttgcactttttgctgtcttcatgttttatcggatgatatgagataaatgtttaagattatatgctccgtgtaatggatgggaatgtttacacctgctttgagctttcaagctacatatgtcaagtttatgcccaagttcttgtccatataaagattaatttctgtgcaacgtttggaacatttagctttactagtacttctatttttcatcaggaattgctgaatttagaggttgagttgactcagagttctagatagaaaaaannnnnnnnnnnnnnnnnnnnnnnnnnnnnnnnnaagttggacatttactatgatttacagtgtgtttgggaaatggttgaaaccatcttaagcccacgttaacttcaatccaacactgatcttctctgtttagtgcattggaagtgcaaaccaacaattttggcctttgaaacagtgatccaattatccaaacacactattagttatctccgtcaaatgtcgttgtctatacctacccacctgttgtgtttcctcatatatgcgattcatggcatatgacctatttattcatctgntctactctgnctacgaggaaatcgtgttagtctgccactgcatcaggttctgtaattgaaagcctgntgatctagtantctacttg

SEQ ID NO: 203 - DNA, 2643 bp, Glycine max
tcagctacgtaggccccccccccagagtctgcaagtgaagagagagagtgagagatggcgtattgaatgggcgaagattttcacgctttgcttttgcctccaaattgatctctctctgtcacgagctttgatctgaagcgaagcacttcctctgcgaacatggaagcaagtgcgggaatggttgccggttcgcataaacggaacgagctcgttcggattcgccacgattcttctgacagcgggtctaaacccatgaagaatttgaatgggcaaatctgtcaaatatgcggtgatactgttggattaactgctactggtgatgtgtttgttgcttgcaacgagtgtgctttccctgtgtgtcgtccttgttatgaatatgagcggaaggatgggaaccagtcttgtccacagtgcaagactagatacaagaggcacagagggagtcctcgagttgagggtgatgaagatgaagatgattctgatgatatcgagaatgagttcaattatgcccaaggaaaagccaaggccaggcggcagtgggaagacgatcctgacctgtcgtcgtcttctagacgtgaatctcaacagccaattcccctcctcaccaatggccaaacgatgtctggtgagattccatgtgccacacctgatactcaatctgtgcgaactacttcaggtcctctgggcccatctgaaaaggttcactcacttccctatgttgatccaaggcaaccagttccagtaagaattgtggacccatcaaaggacttgaattcttatggtctgggaaatgttgactggaaagaaagggttgaaggttggaagctcaagcaggagaaaaatatggtgcaaatgactggtagatacactgaagggaaaggtggagatgttgaaggaactggttctaatggagaagaacttcaaatggtagatgatgctcgacaacctatgagtcgtgttgtgccaattccttcatctcagctgacgccttatcgtgttgttatcatcctccggctgattattcttggcttcttcttacaatatcgtgtaactcatcctgtgaaagatgcatacccactgtggttgacatcagttatttgtgagatttggtttgccttatcctggctcttggatcagtttccaaaatggtctcccattaatcgtgagacttatcttgaacggcttgctttaaggtatgatcgtgaaggagaaccatcacagttagatcctgttgatgtgtttgttagtacagtggatcccctcaaagagccgcctcttgttactgcaaacaccgttttgtctatactttctgttgattaccctgtcgacaaagtttcctgctatgtatcagatgatggttcagctatgttgacctttgaagcactatctgaaacagctgagtttgcgaagaagtgggtgcccttttgcaaaaagcacaatattgaaccaagagccccagagttttattttgcccagaagattgattacttaaaggacaagattcagccctcgtttgtaaaagagcgacgggcaatgaagagagaatatgaagaattcaaagtacggatcaatgcccttgtagccaaagctcagaagatgccagaggaaggttggacaatgcaggatggaactccttggcctggaaataatcctagggatcatccgggaatgattcaggtgtttttaggtcatagtggggggctggatacagatggaaatgagctgcctagacttgtttatgtttctcgtgagaagcgaccaggcttccaacatcacaagaaggctggagctatgaatgctttgattcgagtttctgctgtcttgaccaatggtgcatatcttctgaatgtggattgtgatcactatttcaataatagcaaagccctcaaagaagccatgtgtttcatgatggatcctgttcttggaaagaagacatgctatgttcaatttcctcagagatttgacggcattgacttgcacgatcgatatgccaatcgcaatattgtgttctttgatatcaacatgaaaggtcaggatggtgttcagggcccagtctatgtgggaactggttgttgtttcaataggcaagctttgtatggttatgatcctgttttgactgaggaagatttggaacctaacattattgtaaagagttgttgcggttctagaaagaagggaaagggtggcaataagaagtacagtgacaagaagaaagcgatgggcagaactgaatccactgtacccatatttaatatggaagacatagaggagggtgttgaaggttatgatgatgaaaggacactacttatgtctcaaaagagcttggagaagcgttttggtcagtctccagtttttattgctgccactttcatggagcagggtggcattccaccttcaacaaaccctgcaactcttcttaaggaagcgatccatgtcatcagctgtggttacgaagaccagacagagtggggaaaagagattggatggatctatggctctgtgacagaagatatcttgactgggttcaagatgcatgctcgtggttggatttccatctattgcatgccccctcgcccagcatttaaaggttctgcccctatcaatctttctgatcgtcttaatccagggcctccgtggggccta

SEQ ID NO: 204 - DNA, 954 bp, Glycine max
aattcggctcgcgcgatgcccttcttctccttcttcccacttgcaatctctttatcataccaacaatctagtttcatttcagtatttcatcttctcctcttctatacttgcttttttccattttccaactaaatggaggaaactttggtgccaaagaggcctagagaagaagcccaagtggaaagaggcttggactttgaagaagattactcctcctcaaagaggcacaagccatacaaccacatcctatcccttcttgattcggaggaagaggactcaacacaagacctctcccctctcatgacaaccctccaacaagaaatcacttgtgcctccaaaaataccctagatgcccttttggtgtgcccaactcaagaaaatgaccaaaacaccctcacaatcactagtttagaggacaataatgcaacaacctcacaagttttgaaggaagatgaagagagtgacaaggagagggtcatgaaacatctccttcaagcctctgatgatgaacttgggattccaaatagtggggatgggttatggggttttgaagataatgaatttactagtggggatggattttcttctttgtgtgacaagttgtgggagcttgaagatgaaagagctaactactatgctttcttgcaatctgaactcttcctaggggggtattaggatagtggaaattattattacctgggtgaaattctggatgagaaaaaaaaaaaagaaaggtgataacatagtatgtaggctcaaagatggaggaatattttttaaaattttatttagtttgattttttaaggcctcttttgtaaagatcacgggaagtctatgttgtcattgcttattatctacagttaggcagtgccacttttgcaggtcaatctgtacttccgcactggaaaaattaattagatactcacattaaaaaaaaagggaatattagacta

SEQ ID NO: 205 - DNA, 876 bp, Glycine max
cctcgtgccgaattcggcacgagggcaaggaaacaaactaaatggtggtatgctaaaagatttttgcaccctgatatagtatcagcttatgaatatatttttatttgggatgaagatcttggagtagaacacttcaatgcagacaagtatattcatttagtgaaaaaagctgcgagaagacgacagaaggggggtcttgagcctaataatggattgacatgggagatgacaaaaagaaggggtgacaaagaagttcacatggtgacagaagagaaaccaggctggtgtagtgatccacatttgcctccttgtgctgcatttgtggaaattatggcacctgtcttttctcgtgaagcttggcgttgtgtgtggcacatgattcagaatgatctagtgcatggatggggattggactttgctctcagaagatgtgtagagccagcacatgaaaaaattggtgtaattgattcacaatggattgttcatcaagtaattccttctcttgggaaccagggagagtctgacaaaggaaaaatgccatgggattcggtccgagccagatgcaaaagtgaatgggcccagtttcaacttcgcgtaaccaatgctgataagtcttatcttgaaggacataaacgtaatgggaaggattgatatgtggatccatctacctattgtatatgttttacgtacacactcggtggtagtatttgttttgcattgtttcctcccctcaggtgccatgcgaatttttgagccatatttttgaggaattaatctatagccatgtaaatcaatcacttttatgttattgaataacttttttatcagccgttagattgaaaaaaaaaaaaaaaaaaaaaaaaaggacgaccgaag

SEQ ID NO: 206 - DNA, 1503 bp, Glycine max
atcttgtccatctatcccacaactaatttttgattttccttgtttatttatctgctccctcccttaggcccccccccctttgtttctttggcttgacaagaagaagatgatgatgatgacaatggaggggatgatggacaagggggtgttggatgatgtgataagaaggcttctggaagggaaaggagggaaacaggtgcagctctctgagtccgagatccgtcaactctgcgtcaacgccagacaaatcttcctctctcagccaattcttctcgaccttcgtgctcccatccgcgtctgcggtgatatacatggtcagtaccaggacttgctgaggctttttgaatatggtggctaccctcctgcggcaaactacttgtttctgggggattatgtggatagagggaagcaaagtttggagactatatgtttgcttttggcctacaaaataagatatccagacaaaatttatctcttgaggggaaaccatgaagaagcaaagataaaccgtatatatggtttttatgatgaatgtaaaaggaggttcaatgttaggctatggaagatatttacagactgctttaactgtttgccagtggctgcactcattgacgagaaaatactttgtatgcatgggggactctctccagaattacaaaatttagatcaaataagggagattcaaaggcctactgaaattccagataatggtctcctatgtgatctgctttggtctgatcctgatgctagcattgagggctgggcagagagtgaccgaggagtttcatgtacttttggagctgatgtagttgcagagtttttggataaaaatgaccttgatcttgtttgcagagggcatcaggttgtggaggatggatatgagttttttgctaaaagaagattagtcacgatattttctgctccaaattacggtggggaatttgacaatgctggtgcattgttaagcgttgatgattctcttgtatgttcctttgagatattgaaacccgctgatagagcttcaggaagtggttcatcaaaaatgaattttaagaagccacccaaacttggaaagatatagtatttggcaaggattttcggttcaaataggaatccaatccagctaactcaacttgtacggagttgaaattgtcaagtaggagtttgacatgggagagccttccttccactctacgattgcagattgccaatgatactatattgtaaactgaactacccaggcattcttctgtgcaagagcagagattattgctttatacaccagttggttgcttgtgtttggcaaattagcatgtaatttgtgagtgcaaagagatttcatgttaccaaatgcgtaaatttctatgtcatttatctgaatgataactgctcaggaatgttgtttttggtagagaccggttcgtgtggcttaacttaacctgttgctatgccactgataacctaatcaaattatacgactaaaaaaaaaaaaaaaaaaaaaaa

SEQ ID NO: 207 - DNA, 682 bp, Glycine max
cttccaacaagttaacagccactcacttccaaaaaggaaagggttttttcagttattatttttattttccttacattcttcacactatcccctttcaccacaaaaccctaaacccgcattctccaatccaattcaacccctcccttcccatgttcttctccttctccttgcacccgaattcaacaatctcttccgatgtgacaccgcaagaactcagagcacggccacttgttccgcaagaagaagaagtagttgaagcgctgtgattcgtttgattttaagggtagcgactagcgagtgagaatggaagcgcgtgtggggatggtggtggaagggggccagagaaccctcaacgccgacagcggtggtgccgcgaaattcctggtggcgcagaacaaccgccagctcgggacggttcaccagcttctggccggcggcatctccggcgcgtttagcaaaacctgcactgctccccttgcgcgcctcactatcctctttcaggtgcaaggtatgcattctgatgtggcagcattgagcaaccctagcatattgcgtgaggcatcacgtattatcaacgaagaagggtttagagcattttggaaaggcaatatggtgactattgctcatcgtctcccatatactgcagtcaacttctatgcttatgaacgctacaagaatgtaa

SEQ ID NO: 208 - DNA, 2084 bp, Glycine max
gaaggccatgactgaaaagatagaacgcatggaactagaagcagcctcttgggtgtagcaactagtggagcttcaagaactctacaactcccagcaacttttgactgatgaattgagtgttaaacttgaaaaaactgagaaaagtctagaagaaactgagcagtcattgtttgatcttgaggaaaggcacaaacaagcaaatgcaacaattaaggaaaaggaatttttgatattaaatctcctaaaatctgagaaagcacttgtggagcgtgcaattgaactgcgagcggagcttgagaatgctgcatcagatgtgtcaaacctcttttctaaaattgagcggaaggataaaattgaagaaggaaacagaatacttatccagaaattccagtctcagttagctcaacaacttgaagtgctgcacaagacagtttcagcttcagtaatgcatcaagagcagcaactgaaggacatggaggaggatatgcagtcttttgtatcaacgaaagcagaggctactgaagatcttagacaacgggtaggaaagttgaaaaacatgtatggttctggtatcaaagctctggatgatttagctgaggagcttaaagtaaataaccagttaacttatgatgacttgaaatctgaagtagccaagcattcatctgccttggaggatctttttaaaggaatcgccttagaagctgattcattactaaatgatcttcaaagtagtctccacaagcaagaagccaatttaacagcttatgctcatcaacaaagagagtcgcatgccagagcagtggagactacacgggcagtatctaaaataacagtgaactttttttgagacaatcgacaggcatgcatcgagtctgaccgaaattgtggaagaagcacaattggtcaatgatcagaaattgtgtgaacttgagaagaagtttgaggagtgtactgcctatgaagaaaaacaactactggagaaagtggcagaaatgctagcaagttcaaatgctagaaagaaacaattggttcaaatagcagtcaatgatcttcgagaaagtgcaaattgtagaaccagtaaactgcggcaagaagcattaaccatgcaggaatctacttcttctgtcaaggctgaatggagagttcacatggaaaaaacagaattcaactatcatgaggatacttccgctgtagaatctgggaagaaagaccttgtagaggctcttcaaatctgcctcaacaaggcaaaagtaggttcacaacaatggagaaaagctcaagaatctttgcttagtttggagaagagaaatgctgcttctgtggatactattgttaggggaggaatggaagctaatcaagctctacgtgcccgattctcaagtgctgtatcaactacacttgaagatgcaggaatagcaaacaaggatattaactcatccattgatcattcgttgcaacttgatcatgaagcttgtgggaatctgaactctatgatcattccgtgctgtggtgatttgagagaactgaagggtggtcatttccacagtattgtggagataactgaaaattcagggaaatgtcttctcaacgaatacatggtcgacgaaccatcttgttcaacaccaagaaagagactcttcaatttaccttgtgtttcatccatagaagaactaagaaccccatcatttgaggaattgttgaagtcattctgggatgcaagatctccgaaacaagcaaatggagatgttaaacacatcggggcatatgaagccgctcaatcagtgagagattccagagtccctctcactgctattaattaactagagacagtcaaaattctgtaaatagcgtattttttcagatgtaattccaaaaaatgatatattcatttatttttattttttttggaaatagagggaaaaaagggctaatctttatgggaaggaggaatatgtaaaaggttacccttttctacagtaacctatattattgatgtcatctgagattggtacgtactacatattatatgattttgggagtgtttttttattaataaaattagggtattctaaactaaaaaaaaa

SEQ ID NO: 209 - DNA, 1921 bp, Glycine max
acggctgcgagaagacgacagaagggggtagtagtataaatgcatcagctacgtggccccccccccgagtagcgatggagaagaagaagggtgagctaaagtcaattttccttcctttcctttccactagtcacataatcccgctagtggacatggccagactcttcgccttgcacgacgtcgacgtcaccatcatcaccaccgcacataacgccaccgttttccaaaagtccatcgatttagatgcgagtcgcggtcgccccatcagaacgcacgttgtcaacttccccgccgcacaagtgggtctccccgttgggatcgaagccttcaacgtcgatacgcctcgggaaatgacccccagaatctacatgggcctatcccttctccaacaagtcttcgaaaaactcttccatgacttgcaaccggatttcatcgtcaccgacatgttccacccttggagtgtcgatgctgctgctaaactcggcattccgaggatcatgttccacggcgcaagttatctcgctcgctccgctgcgcactccgttgaacagtacgcaccccacttggaagcaaaattcgacaccgacaagttcgtgttacctgggttacccgataacttggagatgacgcgcttgcagttgccggattggcttaggtctccgaatcagtacactgaactgatgaggacgattaagcagtcagagaaaaagagttacggttcactttttaatagtttttatgacctcgagagtgcttactacgagcattacaagagcatcatgggaactaagagttggggaattggaccggtttcgttgtgggcgaaccaggatgctcaagataaagctgcacgagggtatgctaaagaagaagaagagaaagaagggtggcttaagtggctcaactccaaagcagagagctctgttttgtatgtgagttttgggagcatgaacaagttcccttactctcagctcgttgaaatagcacgtgcgcttgaagattcggggcatgattttatctgggtggtgaggaaaaacgatgggggtgaaggagataactttttggaggagtttgagaagagaatgaaggaaagtaacaaaggatatttaatatggggttgggccccacagttgttgatactggagaatcctgcgattggagggttggttactcactgtggttggaacacggtggtggaaagcgtgaacgcggggttgccgatggcgacgtggcctctgtttgcggagcattttttcaacgagaagctggtggtggatgtgttgaagattggggtgccggtgggggcgaaagagtggaggaactggaacgagtttgggagtgaggtggtgaaacgggaggagattggaaacgcgattgcttcgttgatgagtgaggaagaagaagatggaggaatgaggaagagagccaaggagctaagcgttgcggcgaagagtgctataaaggttggtggatcttcgcacaacaacatgaaggaattgattcgggagctcaaggagatcaagctttccaaggaggctcaagagaccgcacccaatccttaagactggttctgcttttccatcttttgaacaagagtaatgtattttgggacactcttattagtcttagcagtatcagtatcccagggaaatccatcattttctttttcttagtttcattgtttttgtaacttctagtactcaggatgtccatcatcattttcgtgagtatgtactacgaatctacgatcgtgttgacaacttagcgatttcctgacaatgcttttaataaaaatttagagttttattgtaaaaaaaaaaaaaaaaaaccgcgatagaaaggaagatgtttgatgaataaaaaaggaaaaaaaaaaaaaaaaaaaaaaaaaaaaaaaaaaaaaaaaaaaaaaaaaaaaaaa

SEQ ID NO: 210 - DNA, 1115 bp, Glycine max
gtgttgacttgttgaccattccaaacccagaaagaaacgctgcctagaagacacattttcgctattttccgcctttcagagtctctcgtctctctcgggtcatccatcgtacgctaatggccgccataatttcgcgaaggttaaggttatccaccttaacctcctcactcctaaaaccctcttcttattctataaccaatttcatctccaacaaccctaaacccccaatcttcaaaccctcccaattccttccacccatcaggtttctctcaaccaacaacaaagactcctcctccactttagattccgacgaaacccaaaagcccagcccaggcccaagcccaagcccatacccgagccaaaacccaaacttcaagcaccaggagatagaaggcccaacagtggagcgcgacctctccccactcgcgaacgagacgcgcgtggttctggaaaccatgatgaagaacatgtactcgctgagccgcgtcgtggcggcgctgggcctgctccagctcactctgggcgcgtggataacctacctcaccaaatccgaacccatcgctgaggtttcgctgcagagtttgttggcgttcgcgtttccgttctcgcttgcgttcatgctgcggcgcgcgctgaagccgatgcattttttcaagaagatggaggagctagggaggttgcagatcctcacgcttgcactccaggtcgcgaagcagttgaacgtgctctttgttagggttcgtgcggtttcggtgcttagtgttgttggtgttgttgttggggtggttgttgctgtgggttccaaatggagctgattttttttagtctatgtttggtattctgttgcaaaaatcattctgtcaacagatccaaatcttgtttttgccctttggattaaaacctttacaaccaagttaaacttctatgtctttggaataatatgttgatgcaagtagaggttttggtttttgtttttgttttggaagatgttcgtgattccggtttgtattattcattggaattttgatgaaaatagggatggtaagaaaaaaaaaataaacttcattggttgagttttgactcggatgagattgttgtatatgattttctattat

SEQ ID NO: 211 - DNA, 1886 bp, Glycine max
gctcgttcattcaatttctttcttcgcttcacgcattacatcatatcatataaccctttttcgatccttcttcttcgtcttcttcttttctctacaatgccacaaccactcaccttttccttctctccttgaatgctgttttcccttttctgcgccatgcccttcctcttcctcttccttctgcttctctgtacacttgaatcccatagcagtaatcatcttcaaggtcctgtaagactggatagccatgtgggtactatgttccccaaaccctcacctcttggttctccacaaccctttcttcctcttgcaccttcacctttggctccattcaccaataccactatcccaaagttatcaggactttgcactttgaactttactactgcggaaagtttgataagtgtgacagcaattgattgctgggaagtttttgcgccatttctggctaatgtgatatgttgtccccaattggaagccactctcacaattcttattggtcaatccagtaaacttaccaatgtacttgccttaaacgggaccgttgctaaacattgccttgcagatgtggaacaaattttgatgggccagggtgccactaataatctgaagcaggtatgttcaattcgttcttcaaatctcaccgaggcatcttgcccagtaaaaaatgtgaatgatttttatgacatggtggatactactaagctccttactgcatgtgagaaaattgatcccgtgaaagaatgctgctaccaaatctgtcagaatgctatattagaagcagctaaagcaattgcatcaaaaggctctgatattttggccatagatgcaccacatgttcaacctgagcactcaaatcgggtcaatgattgtagaaatgttgtcctccggtggttagctagtaagcttgaaccttctcatgccaagaaagttcttagaggactgtctaattgcaacgtgaacaaagcttgtccactggttttccccaacacaaagcaagttgccaagggttgtgtggatgagataagtaacaaaacagcatgctgtaatgctatggaaagctacgtgtctcacttgcaaaaacagagcttcatcacgaacttgcaagctttggattgtgcagaggctttggcaatgaaattgaaaagatcgaatattactgcagatgtttatggtctctgtcacataagccttaaagacttttccctccaagttggaaatcaagaggctggttgtctattacctagtttgccttcagatgctacatttgacagtgtttctgggatcagcttcctctgtgatctaaatgataatattccagctccttggccttctacatctcaactgacttcttcatcatgcaataaatctatcaacatccctgctcttcctgcagcagcatcaagtcaaagttgcctttacagccatgacattctgttctctgtgcttgttgctttgttgtttctcttgatgacgaccatgtaatcatatgagggtttccttgttaaatgaagctttcctagttcttcaacaaggatagtttttgcacgtgtagtatggcaaaggttaattaattgcgaccggttctatgagaaagaaatgtcagttggaggtgatgtccaatttgtttcggatcttattgattcatgattcttcttgtgtgcttgtgtaataaattttttgtatatagaaaatctagaaaccgtaggttatacaggaacttattgagattgatatgtaaacctggattgcagtcgaagaaggttttgtaatcatacatttgaagtagtataggaatttccagtgctagaagtgttctttatcttccatatagaatcttctaccatcatcatcttgccccctcttaagtgtttaaggtctgtccc

SEQ ID NO: 212 - DNA, 1751 bp, Glycine max
tcagctacgtaggccccccccccccaacacaaacccacttcctctcttttccggccaccaccccgcctcactcgcctagatctgctcagatcacaatcccaaacttctcaaatccgacgtcgttttacttcagcttatagaaacactaacagaaacgatttcctttcctcgataattcgcttactcgcgctctgtttctttctaattaaccttcgtgttcgcgcgtgtgtttgtttctctctttttgttgtttttggagcttctttgatttttccggcgacaagagaatgacgtccggcgcgaggcagccgacgtggaaggagcgggagaacaacaagaggcgggagaggcggaggagagctatcgcggcgaagatcttctccggcctcagaatgtacggaaactacaagctcccgaagcactgcgacaacaacgaagttctcaaggctctctgcaacgaagccggctggaccgtcgaagccgacggcaccacctatcgcaagggatgcaagcctcctgttgaacgcatggacatagtaggtggttctgcagcagcaagcccgtgctcatcttaccatccaagtccttgtgcttcctacaaccctagtccaggctcttcttgcttaccgagccctcgtgcatccccctatcctccaaaccacaatgctgatggaaattctctcattccatggctcaaaaacctttcatcaggatcatcatcagcatcctcttccaagcttccgcagctgtacattccaaacggctccatcagcgctcctgtcactcctccaatcagctctccatcgtctcgaaagccccgaatcaacgctgactgggaggatctgtccactcgtccggcagcgtggggcggacctgcatacaccttcctgccctcttcaactcctcctagccccggtcgccaggttgctgaaacagattggttttccaagatcaggattcctcaggtaggactaacaccaacttctccaaccttcagcctggtctcttccaacccatttggcttcaaggaagatgctatgggtggcagcggttcccgcatgtggacgacaccaggggcaagtggaacatgttctccagctgtagctgcaggctctgaaaacacttctgacattccaatggctgaagcagtttcagatgaatttgcctttggaagcagctcatcagttttagtgaatgcctggaaaggggagaggatccatgaagcttctttcggaacagatgatcttgagctcactcttgggagctcaaaaaccaggctactccataagtgaatagtcaatggtcccttcaacgacaagaactttgactctgtttattctgtagaaaaggctagaggagggaattaagatgagcagcaagtagttgctctttacataccagaaaaaaatagcagtttattttattcttttattttctcttaggttttattggttcctaagttatatatacagccttagctaggtctcgggtggttttcaaccatttcatgtggtcaatgtcttgttaaaacttttaatactctgggaaagatcatatacatgtatggattggcttggtttgatattgaaagggaaaaattactcgatttcaactgtaactgaatgatcaagaaagttatgcaaattccaactaaaaaaaaaaaaaaaaaaaaaaaaaaaaaaaaaaaaaaaaaaaaaaaaaaaaaaaaaaaaaaaaaaaaaaaaaaaaaaaaaaaaaaaaaaaaaaaaaaa

SEQ ID NO: 213 - DNA, 1986 bp, Glycine max
ttcaaccttctcttctccccattgtgcacagttcacacctaacacaaacccacttcctctcttttccggcggcttttccggccaccatgctcctccgcctccaccacccaacctccctcgcctagatctactcagatcacaatcccaaatctctcaaatccggcgtcgtcgttttagctcaccttatataaaaaaagcagaaaggatgtcgtttcctctataattcgcttactcgcgctgtgtgctgtgtttctttctaacattcgtgttcgcgtgtgtgcgtttctttttttgttcctttgttcttttcggagcttctttgatttttccggcgagaagaggatgacgtccgtcgcgaggcagccaacgtggaaggagcgggagaacaacaagaggcgagagaggaggaggagagccatcgcggcgaagatcttctccggcctgcgaatgtacggcaactacaagctccccaaacactgcgacaacaacgaagttctcaaggctctctgcaacgaagccggctggaccgtagaagccgatggcaccacctatcgcaagggatgcaagcctcctgttgaacgcatggacatagtaggtggttctgcagcagcaagcccatgctcatcttaccatccaagtccctgtgcttcctacaaccctagtccaggctcttcttgcttaccgagccctcgcgcatccccctttcctccaaacccaaatgctgatggcaattctctcattccatggctcaaaaacctttcatcaggatcatcatcggcatcctcttccaagcttccgcagctgtacattccgaatggctccatcagtgctccagtcactcctccaatcagctctccatcatcccgaaagccccagatcagagctgattgggaggatcagtccaattgtccgacagcgtggggcggaccggcatacacctttgtgccctcttcaactcctccaagccccggccgccaggttgccgaaacagattggttttccaagatcaggattcctcagggaggactagcaccaacttctccaaccttcagcctggtctcttccaacccatttggcctcaaggaagatgctatggttggcagcggttcccggatgtggacgacaccaggggcaagtggaacatgttctccagccgtagctgcaggctccgaaaacacttctgacattccaatggctgaagcagtttcagatgaatttgcctttggaagcagctcatcaggtttagtgaatgcctggaaaggagagaggatccatgaagcttcttttggaacagatgatcttgagctcactcttgggagctccaagaccaggttgctccataagtgaatagtcaatggtcccttcaacaacatgaactttgactctgtttattctgtagaaaggctagaggagggaattaagatgagcagcaagtagttgttcttattacataccagaaaaaaaaaatagcagtttattttattcttttattttctcttagtttttattggttcctaagttatatatacagctttagctaggtgtcgggtggttttcaaccctttcatttggtcaatgttgttaaaacctttattactctgggaaagatcatcatatacctgtatggattggcttggtttgatattgaaaggaaaaaattactcgatttcaactgtaactgaatgatcaagaaagttatgcaaattccaactgaatgggcctaccaaatctctcttccctcactcgtttgttttcatgattttgtttctccccatatggcgacagattcttatcattttgtaggcgtgcttatcatttttttgtagactttgataaaatacatatgatcgcatatgtaccggtatctttctatgctaaataaaaaaaataatgtatctgtatgttaaactcaccttatacatgagctaccatatcattttaatggtacttaaaaatgataactggcgtctttaaaatattattaag

SEQ ID NO: 214 - DNA, 1457 bp, Glycine max
gctattccaaatccaatgtactacgcgtgaagaagcatctatccatcggatatcaatgctttgctttggtttaatttggttccaagttctttgcctatatatatattcggccaacactgtcggtccccacggtgcgttaccgctgaatcctcgctttatcttcccttcccttcatctccgcttcaaaataatatcctcctctctatctctgttcgaaacaagtccaacaccagcaacacactgcttcaatctcaatcgggcacattgagaaatggttttgagtaatgggaaaactgaggcaccattgccaagtagtaatgggggaggtgctgagattgataacaatgagaagaagcccttcaagatcttcgtagggtatgaccctcgcgaagatcttgcctatgaggtatgtcgccactccatcttgaaaaggtcttcaatccctgttgagatcataccaattaagcagtcagatctgaggaaaagtggtttgtattggcgtgagaggggccagtttgagagcactgagttctccttttcaagattcttgaccccttgccttgccaattaccaaggttgggcaatgtttgtggactgtgatttcctctacttggctgatatcaaggaattgaaagacttgattgaggacaagtatgccatcatgtgtgttcagcatgactatgctccaaaggagaccactaagatggatggggcagtgcaaactgtgtacccaagaaagaattggtcttcaatggttctctataactgtgctcatccgaagaaccgtgttctcactcccgacactgtcaacacacagactggtgctttcctccacaggtttcaatggcttgaggatgatctaattggatccatcccttttgtttggaactttcttgaggggcacaacagggttgttgataatgatcccactacttcgcccaaggccatccattatactcgtggagggccatggtttgaagcttggaaaaactgtgaatttgctgatctgtggctcaatgaaatggaagattacatgaagcaagccaaaaaagaatctgccaattagatgaatcaaacatcagcttaggcttgtcatttatggccatgtattattctttatgtcaaattcgttgtgaaaaatccgcatctgctgatgcatgttatgatgagagtcggagtatgagcactgctagtctataacttatcttagagtatttgtagtattctttaccgtattacattacattacattacacttacattggcatttcagagaaagtactcttcgtgatgtatttcattttttatttgtttaatgacctccctaggaccttaagaggaggtacaagcaccactctgtattgaatattttaatgaagttttcaatgtaacgattatatgttgctcaaaaaaaaaaatataaaaaataaataaattaaaattaaaaagggcggccg

SEQ ID NO: 215 - DNA, 1954 bp, Glycine max
  misc_feature (1805)..(1827): n is a, c, g, or t
tcagctacgtaggccccccccccccaaagcaccaaactcaaccaaagtgcttgacgcaaaggcgatgaagcaacaaaagcaattgttaaggttgtaacttgtatcatcattcatttcatctgtgttgtgttgtacgtgtgatttccattgccgccaccgattacccaccaactgatatacataacctcttcacctttccctccttccctaatttatcactaaaaaaacaaacaaataaaaaaaaagtccactaagttggggcacgtcacccatctcgcccttcccctcgctcatctcaaatccatgcttcggaattagggtttccattcggatttcgtaagtctggtgcccaatttcgtgactccgagcgacgtaaaaggggaagggaaagggatgaggatttggggatcggagatcgtgttcgccatattgctctgtgggaccctttcatgcaccgctcaagctcatcacatcactgccagcacctgcccggctcgctccatcctcgatttcgtgttagggttttcagatttcacatgccaacttcccaattctcttggatccattgccgtcaccgagggagatgaggtttctttgcagaaggttctgaatatggttcacaagaacaatcatgagcacgtggctgtgctcttctatgcgtccttgtgtcctttctcacaggtgtctagaccggttttctccatcctctctgccctgtacccttccattcttcatcttgccattgaagaatcatcagtttggccgagcacactgtccaaatatggtgtccatagtttccctacactgtacatcttgaattctaccatgcgggttcggtatcatgggtctcggacgcttggctcgctcattggtttctacaatgatgttactgggattaggattgattcacttgatgaactatcacttgaggaaattggccgttcatctgctgataagagtcatggtaacagtgagtcagaaagttctccattttcacaggctagatctccagaaaatttactatatcaggagacttatttggctctggccactacatttgtgattttgagattactatacttgttttttcctaatcttcttatatgtattcaatatgcttggagaagggtcatccaaaatattagattagggagcttgctggaacaccctttgatttatttgaagcggctaacacagtcatttaaccgtttgaaagagccatacaagagaagtaatctgcaggaaggagcaatgaatgctagagcatgggcttccaagtcccttgccaccgtttcaattggagaggaaagcagcagcagccgtgggacgcatcagtgagttgactgtactgagcggattttccttcttaaaattggagatacgaatataccctatgaaaggcttggctgcaagttatgccatgtacttttgtttcaggatcatcttcaccccctctggcctcgtgcttagtgaggtcaattatgtttctgagtgatgtaatcgtcccttatatgtccatatgatcaacaaatacttcattcagcgctctagaagattaagacttcaatgtgtatagtttaaatgtagcaaactcgagctaaaatctgcaattttgtgacatataggttttcttgagggtcaaatcttttgatcatcagttcatatatttatttttgttgggaatgaaatgattgtaaatcccacataaaactgattggatgcattgttgatgtaattggtgcgtggttatttgctaagttctaaaataatcagatggtgataatctgatcatgtcaatatagaannnnnnnnnnnnnnnnnnnnnnntaatctgtttcaatcctttcctcaggagagatcatggatcttttagaaaaccctggtttgtaacggtgaatcccattgccaacctctaaatagtgaatacgcaccgtgtgatttgatccttccaaac

SEQ ID NO: 216 - DNA, 1244 bp, Glycine max
ggtgcttgtgcgtcaccgctgaatcctagctttatcttcccttcccttcaaaataatatctctgttccaaacaagtccaacaacacactgcttctatctcaaacgcacatcgagaaatgagtttgagtaatgggaaaaccgaggcaccattgccaattagtaatggggatgagaagaagccgttcaagatcttcgtagggtatgaccctcgtgaagatcttgcctacgaggtatgtcggcactccatcttgaaaaggtcttcaatccctgttgagatcataccaattaaacagtcagatctgaggaaaagtggcttgtattggcgtgagaggggccagtttgagagcactgagttctccttttcaagattcttgacaccttgccttgccaattaccaaggttgggcaatgtttgtggattgtgatttcctctacttggctgacatcaaggaattgaaaaacttgattgaggacaagtatgcaatcatgtgtgttcagcatgactatgctccaaaggagaccactaagatggatggggcagtgcaaactgtgtacccaagaaagaattggtcttcaatggttctctataactgtgctcatccaaagaaccgtgttctcactcctgacactgtcaacacacagaatggtgctttccttcacaggtttcaatggcttgaggatgatcaaattggatccatcccttttgtttggaactttcttgaggggcataacagaattgttggtaatgatcccactacttcgcctaaggccatccattatactcgtggagggccatggtttgaagcttggaaaaactgtgaatttgctgatctgtggcttaacgaaatggaagattacatgaagcaagctaaaaaagaacaatcagcttaggcttttgtcatccgtggccatgtattattattctttatgtcaaattcgttgtgaaaaatccgcatctgccgatgcatgttatgagagtaggagtatgaggcactgctagtctataacttatcttttagagtatttgtagtattctttaccatattacattacactacacttacgttggcatttcagaggaaatgctcttcacggtgtatttcattttttatttgtttaatgacctccctatgacctttaaggaggtacaagcaccactctgtattgaatatttaaatgaaatcttcattttaatgaaaaaaaaaaaaaaaaaaaaaaaaaactcgagactagttctctctctcc

SEQ ID NO: 217 - DNA, 1607 bp, Glycine max
taccaatttcctcgctcgaagccaacaactaagtcgtatcttgatcaaattcactcgagaaacctttattctaacgcctgttcagccaccaaataaaagagaactcttctcttttttttgtttgatgattaacattgaaatatcctattcaaatagatgtaatgggttaccattttaacaaatcgtcggtagcaaaaataactaataattagccaagtaataggataaccagcaggagttaaaaggaaaactacaacatatatgtacaaaaaatccttacatatgatataataatataataatatatacaaggtcagatttcattacttagtttcatattattggccgtttccttccactttctcttctcatccaagctctttaaggtgccttttcatttacaacctgactcttgaaaaatgtttcttcaatcctcaacttcatattcttttgattcctgctatatttctgagcaggcactgaaaaccttctaagaggagccctctgctgcagacggaggggatttttcaatgtccaactcattttcttgtctttcctggttgctaacaccagcttcagattccttggtgtcaagttttgctgcagtgttgccaaccaaatccttctcggacaagtactcatgttccatatcttccatggcattttcttgcactacttgattttcctggtcagaaacacctgcttcagattctttagtgtaaagttctgcaacagagttgccaactaaatccttctcagacaagctgtccacatgttcacttcctgctgctgaagagcacaaagatgaagccccatcatttgacacagtttctggcacagccaaacaatctggagtaacatcaattccatctcccgtaacagtttcagattcttctgatacctgcactattgcttggctgccaactataccttccttagataatccttccaccttctcaactgatactaggggttttggaacttcagatacattttccatctcagcagcacagcttttactatctgtcccatcctcaatgtcagctagtcctcttgatccatcctgggattccaagattccttccaccttctcagctgatactgaggattttgggacttcagatacatttcccatctcagcggcacagcttttactatctgtcccctcctcaatgtcagatagtcctcttgatccatcctgggcttccaagattccttcccccttcacagctgataccgagggttttgggacttcagatacatttcccatctcagcagcacagcttttactatctgtcccatcctcaatgtcagctagtcctcttgatccatcccgggattccaagattccttccaccttctcagctgatactgagggttttgggacttcagataaatttcccatctcagcagcacagcttttactacatgtcccttcctcaatgtcagatagtcctcttgatccatcctgggcttccaagatttcttcccccttcacagctgataccgagggttttgggacttcagatacattttccatctgagcagcacagcttttactatctgtcccatcctcaatgtcagccagtcctcttgatccatcccgg

SEQ ID NO: 218 - DNA, 1562 bp, Glycine max
attcgccggttcacctacgtcagtgcaaagcgcaaattaaagcgcaaaaaccattctccttcggtgctcttgaaaacatgggaaaacagagcacagaattctctgccctcaactgcatcgacctctccaaccctgacatcaaccaatccgtcaatttactcaaacaggcatgtttggattccggttttttctacgttgtcaatcatggaataagccaggaattcatggaagaggtttttgcacagagcaagaaattcttctctcttcctcacaaggagaagatgaagattctcaggaatgaaaaacacaggggatacacccctgttcttgatgagttgcttgatcctgaaaaccaagtgcatggagactacaaagaggggtattatattggagttgaaaaaggtgaagatgacccagaatcgaataaacctttttatggaccgaataactggcccgcaccaggtgttcttccagggtggagggagaccatggaaaagttccatagagagacattagaagtagggaaagcagttgcaaagataatagcccttgcacttgatttggatgctaatttttttgatcagccagaaatgcttggagagcccattgcaactctgcgtttgctgcactatgaaggtcaagtttcggatcccttgaaaggattatatggagctggagctcatactgactatggtttaattacactgttagcaacagatgatgtctcgggtcttcaaatatgcaaagatagggatgctaaacctcagaaatgggaggatgtagcaccattgaagggagcattcatagtgaatcttggtgacatgctggagcgctggagcaactgcgtttttaagtccacactgcacagagttctaggaaacggtcaaggaagatattctattgcatacttcttggagcccagtcatgattgtctagtggagtgcttgcctacctgcaaatcagacagtaatccgcccaaatttcctcccatcttatgccatgactacctaactcagcgctacaacgacactcatgctgacttgaatgtttataagaaacaacaagcttgagtagtcaacctttggaactgaacagcctggagatttctcacaaggacactcacctaagctgatttggatgtttacaataaacaacatgcttaagaagttagtcttttggagctgagcagctggggaattttggactgcattatgtgttagagttaacagcatcatattgcattggcgatgttatgtagaatttgtttgaatggcaaattagttttgttttgtggaaggggggattcagctgtatggtttggtacttaatgttaaacctaaaagaaaaacatgtatgaaattagcagatgtattttttttattcagcactaaagttgggaaatgggaatgataggaagatgaaaaatgaaaattagtattttgctttcaaaacgaccatctaggctctctactttggcgtctttatcctgattgatttgaaaatatacattacaaattgcattcctaaataaaaaaaaaaatctcgggggggccccgttctca

SEQ ID NO: 219 - DNA, 807 bp, Glycine max
  misc_feature (763)..(763): n is a, c, g, or t
tctcgagccgattcggctcgagtacggctgcgagaagacgacagaaggggagggacccaaattttaagaacttggctttgcttccttcaaagtgaggtctctaagtttcactttctttgcatagggcaacctcctttctctgtgactctgagtatcgtatcgttttattattatttctaattctctcttatcaggtccattgaatatgtctccgtcgttggatcttcctcccaagggtggcttcagttttgatctatgccgaagaaacgcaatgcttcaaaacaagggcctcaaagccccaacctttctcaaaactggcaccactattgtcggtttagttttccaggatggtgtcattcttggtgctgatactagggcaactgaaggacctatagtggctgataaaaactgtgagaaaattcattatatggcacccaacatatattgctgtggagcaggcacagctgctgatacagaggctgtaacagacatggttagctcacagctgcaattacatcgctaccatactggtcgagaatcaagagttgttacagcgctgacccttcttaagaaacaccttttcaattatcaagggcatgtctcagctgctttggtgcttggtggggttgatatcactggacctcatttgcatactatttatcctcatgggtcaactgacaccctcccatttgctacaatggggatcaggttcacttgctgcaatgtctgtatttgagtccaagtacaaaggaaagttttgagnaaaggatgaaggttttaacctttgttgttgagggaaatggctga

SEQ ID NO: 220 - DNA, 1694 bp, Glycine max
ttttattttttttttaggggagcgaaagactaatgtgcttaagcaaggcatgtaacggtacccatgcaatatataattcgtttacacccatgctcaggtcagttgtgttgatgctgtttttaggcttgatattaacaacttacacatcagaacaataaatatgaatgtgttattaaataatgtactgtttatatattgaagaatcaagccgtttagcccatctgccatcactttacatagtcatagacatattcatagcagtaaaaatcgtctgttggaaatcaaccgccatagcggtgcttgagggattcaggaggctgctcttccatgatgccagagcccgttgttgccaagtaatcgcgaatggttgttttacggtcagcaagataagtgtgatccacaaagttgttgtaggctgtttcaccaagattctttgctgctagtacactacataaaaatttcactaattctgttaatatactgggagttcgacagtagctgaagctggtactatttggtttccacaaaactgagaacctctgttgtttcccacattgaaagcaaattgagaagggatatgtggaaacattttaaagaggaaaagtagatagaagctaggaagaggaacaatgtttcccatgaatttgtgagctatgtgaagaagaaatccaattcacacaattggaaatgccactaccactagaaagaaaattgctgtcagttgcatatatgattctgtattctgcatctgacagcagcgatcattcaaccaggaaaacaatagacaactagaaatctagatgaaatgtggtgattttatacttcagaaaatgcaaagtgttcttattagggctttagttaaggaacaaaaaatagtgtttcgagggaaagtgttacaatacacttcctcaatttaaatattggcttatttaacacaatccttatactatttcccctattgaacatcaaatcaataaatgaaaaaatggtttttcacccaaaaagtgcttaccagtgtcgaagataaacccgacaaggtaacacatcatctctccaaattttatctatattccatcgcccatattgctgaaaatagatttccttgtttcctgatggaaatgtaatgtaagaatgcataaatgatgacaaaagacatgaaataagacaaacaatctaggacaaagggcatgcataaacaatcagattaatttttttatgtaaaatacagaaatcacctacactactatgattggagaaaatttctattatttagtgaattattgtacccttctgcctaatgttttcgattaggatgttctaggtacacctggtcatactttgattactgtaagcatcccattcccaccaagcagagacataaaactgatacaagaagataaattgatgtctctaattagaactttataacttgtgattacttattgcagagtcccctctcctttttttttcttctttttcataagctctattcaatttaaagaagtcagaaatttccctaaccagattctgtggtcacattgaggaacagaagaaatgaatgcaaacataaaaatccacaaacacaaaaagattggaattggacaaaaccagccttaccattttcaaaaatgatgcaaactactttcccttaacaagcacaacgctaacgagacttacctttacatctattgtcg

SEQ ID NO: 221 - DNA, 1059 bp, Glycine max
ttttttttttttctgttctttaaatatgaatgtgttattaaataatgtactgtttatatattgaagaatcaagccgtttagcccatctgccatcactttacatagtcatagacatattcatagcagtaaaaatcgtctgttggaaatcaaccgccatagcggtgcttgagggattcaggaggctgctcttccatgatgccagagcccgttgttgccaagtaatcgcgaatggttgttttacggtcagcaagataagtgtgatccacaaagttgttgtaggctgtttcaccaagattctttgctgctagtacacagtgtcgaagataaacccgacaaggtaacacatcatctctccaaattttatctatattccatcgcccatattgctgaaaatagatttccttgtttcctttacatctattgtcgaaaaattcctcatcactataacgagcacaaaggaccgctggaaaatcaaaagccttgccatcaagtgtttcaggaagaacagcaagaaaccgaaactcaacctccctcttgataaaatctggaatctccgattttctaatctcaaagactgtcaccacaagagtttctccttcacatggctccacactcaagctggaaatctccatggtttctggcttggcaatgccgcgctcgaagaaaaccggagcgacgtgcgcgaagacgcggcggaaccggttcaaccgtgcggtccggaagttggccaagtcggggaaagtgcttcgggcgcttctctcggagaggagagagccgaagccgcagatggagatgtggccgtcgggagagaggagagattcgaagtcggactcgtcgctgagttcggtgaccggagcggcggaggacatggcgggtttggagagaggaagaggagggaaagagagggagagagtggcgcgttggtggcacgcgcgagatgcgagtggtgagagttggaaggggaagtttatgaaggttgtgttggtggctatgttcatcgtccaggagctgctgctcgttgcggactcgagacgcagcgatgaggattactaaatatga

SEQ ID NO: 222 - DNA, 2386 bp, Glycine max
aagtgtgtatttgtatttatcgcaaagctaattctttcccttgctactcattcatacataggtttactttcatgataaaatatttcggtagaaatgaaactatatccagaattgccaacaaaataattgaatgctgcagctcatggtgatgctccagatcaaccacataacttttgataatatgaatatgagaaaagaaacaatggttgattgcgcctgtgtgggcttgtgcccctaaaagctatagacagtgctcacacaagcgttcactagacagaaaaatgagcatgaaacagctacaaatatgacttgagactatattactcagaccaattggtaaagtaaaacaatcatccctatatatacaacaaacctctaaactgagcaagtgcacaatccagatgggggagatcaagcaggttagtagtcaaccaggccagaaccattgcatgagctgttttgaacccatcccttcacccatttttttttcaaaacaatgcccctccagcttcctttaaacttcaacacaagaaggacaagcacaaaatggtatcttcatgccattcatgcatcaaatataaataacaaaaccgcaattgcactggctgtcagctgaaggctttgtatactccaaaggccaaaccaacaaaattttgttaatcaaccatcgtcatccacagcaccaacatatgtgaggtccgtccgtctcacccttacagcccctttaagccagctggtggctcgaatattagcatggtcaccacttcctatgctagcagtattacctgccgaagagtaagatccagtaccatcttctaagagtgtccaaggatctatttccaaatcattgtcctgttgttttgatttccctgatgcattagaagcaacccttgatagaactgggttcctctgaggaatagttgaactactggagttagacccaggatttgtaatgctgggttgaaggcaaacaagagcggaattggaaatagatggtggctggcaggataaagagcaccgcatagaggggatgagtatgggcattgcagcctggatatgccaccgaatagtgtctggcagttgcatacgatccaagtcattctgcaaagtctccaacaattctcggtcaattccagaaatttccctcgtaggttcactgattgtctttgaaacaggctttgccctaagccaacttggaggataactacttaataatccatgcaaaaccaacaacaaacgatcaaacagactcccagaagaagaatccacaaaagcagcagaagcaacttcagaagatgactccgcctcccttatcggcagagatggcacagcattcaccgaaatgtctgcatcctcatgcacaacccggctaccaaggagacgaaaaattacagtggcaagaaattgtctcatgctccgcacagatggctccctgtcagtgcaaagaataggaagaaatctcaggagcaactgcaaacgtaatgacatagaagctcgtagggctgcaggagacggtggagaagaatctgttgcaactgtttgtcgtctagttaatgcagggcttccacctctcatatttttgcggttatttactttattcggctgaccttcaactccaggaggagcacttcctactgatttacttccacctgtaacagcagttatttgttgctcaatataacttaactgtttcaccatatcacttgcaaaggaattgcgggattcgtcagaactttgatctatgcaaggaagaagcatctcgataagagccctctcagtcacttgcagctggcaccttttcaaatccattccctcttcaacaacttctccttcttcaagggatgtgctatcaaactcccccttctcccctctgcgagttaatggatcagtagacagactacaccaaccccatggctcccaaaattgggtcttgacagaaagattttttttcacagcaatgttatgtagcctttgcctaatggtcttccgaccaaagaggacatcctggcctgcaaggaaccatttaccttgcgacaacattgaatcctctagtgacctgccaaagagatgaatcaactccgaaaaaaggggtgcagcatcaggtctaaccagtaaccttgtgagaagtatttgaataaaattgttctcattctcagaagcagcagaagccttctctgtactaggtgaggacaactttatagcatcaaccaaggacacatcacgattctctagtctttcaacgagggcttgttcattaagagcaacctgagtacaacccactgccagtgaaatttggcaggttgcaaggtatccaaaacatgcacaagcaaatcctgaagcttagactcactatctgtgaatttaattttagactcaccaagtatag

SEQ ID NO: 223 - DNA, 679 bp, Glycine max
  misc_feature (654)..(654): n is a, c, g, or t
gatggacccaaattttaagaacttggctttgcttccttcaaagtgaggtctctaagtttcactttctttgcatagggcaacctcctttctctgtgactctgaggtccattgaatatgtctccgtcgttggatcttcctcccaagggtggcttcagttttgatctatgccgaagaaacgcaatgcttcaaaacaagggcctcaaagccccaacctttctcaaaactggcaccactattgtcggtttagttttccaggatggtgtcattcttggtgctgatactagggcaactgaaggacctatagtggctgataaaaactgtgagaaaattcattatatggcacccaacatatattgctgtggagcaggcacagctgctgatacagaggctgtaacagacatggttagctcacagctgcaattacatcgctaccatactggtcgagaatcaagagttgttacagcgctgacccttcttaagaaacaccttttcaattatcaagggcatgtctcagctgctttggtgcttggtggggttgatatcactggacctcatttgcatactatttatcctcatgggtcaactgacaccctcccatttgcttacaatgggatcaggttcacttgctggaatggctggatttgagtccaagtncaaggaaagtttgagtagggatgaa

SEQ ID NO: 224 - DNA, 1256 bp, Glycine max
ctggtaccgcctgcaggtaccccgctccgcccagtccccaggaaattgaggattcacaaatgataatcatctctactgaccaaatctgaagaaaattgctttctctttggttcctagctcgcactctctctacgcacgcctcaacatcccttctctgctccattcattatgtctccgtcgttggatcttccccccaagggtggcttcagttttgatctatgccgaagaaacgcaatgcttcaaaacaagggcctcaaagccccaacctttctcaaaactggcaccactattgtcggtttagttttccaggatggtgtcattcttggggctgatactagggcaactgaaggacctatagtggctgataaaaactgtgagaaaattcattatatggcacccaacatatattgctgtggagcaggcacagctgctgatacagaggctgtaacagacatggttagctcacagctgcaactacatcgctaccatactggtcgggaatcaagagttgttacggcactgactcttcttaagaaacacctgttcaattatcaagggcatgtctcagctgctttagttcttggtggggttgatatcactggacctcatttgcatactatttatcctcatgggtcaactgacaccctcccatttgctacaatgggatcaggttcacttgctgcaatgtctgtatttgagtctaagtacaaggaaagtttgagtagggatgaaggcattaagctagttgttgaggcgatatgtgctggtatatttaatgacctaggaagtggaagtaatgttgatgtttgtgtgataaccaagggacataaggaatatctcaggaaccaccttctaccaaatcctcgtacctatgtcaatccaaaaggctttgatttccccaaaaagacagaggtcctcttaacaaagattacaccgttgaaggagaaggtggaagtgattgaaggagatgctatggaagagtaacaatcattccaaaaaaaattggtgtatgagtatgaaacttgattagtgcaatggctgtgatatttgattttgtactttcacaactttggcttttattaccaaaatttatttgaattcaattagatcattgcaaattgttcctcaaatttcttcatttggttggattttggctagaaaatgcttaacaaaacaccaaatatatacaatttgattgatgaaagatgttacttgttttgtttgttaaaaaaaaaaaaaaaaaaaaaaaaaaaaaa

SEQ ID NO: 225 - DNA, 1661 bp, Glycine max
cggccgctcgagccggcctggccggaaacgtgcgggggcgggaactgcgaggtgggtagtttatctatacttcacattaatttatcttctcccatctaaaatctatatcagctacgtaggcccccccccccccccccgctaagctcacatttcctttgtgtttgtgagtaatttgcaaacacaccaaaaccatctctctctctctctctctctccaattcagacccctagttctgttggatcttgcatatagtaaccctttattgattcgcaaagatgaaggtcacagtggtttctcggagtggaagagaagtggttaaaggtggcattgagctcagtgattctgctactatagcagatctgcaggaggcaattcataagcgaaccaagaagtacccatcaaggcagcgcttgacacttccagtccaacctggatcaaaggaaaggcctgttgtccttaattacaaaaagagtctgaaagactatacaagtggaaattcagaaaccttaactgttgtattcaaggatttgggcccacaagtttcttaccggacacttttcttctgcgagtatttgggacctttgcttctctatccagtcttctattatctccctgtctaccaatattttggttacaaaggtgaacgtgtgatccaccctgtgcagacatatgccttgtactactggtgtttccattatgccaaacgaattctggaaacattttttgtgcatcgcttcagccatgcaacctcacccctttccaatgtgtttcgtaactgtgcttattactggacctttggctcctatattgcttattatgtgaaccaccctttatatacccctgtaaatgacctccaaatgaagattgggtttgcaattggaatactttgtcaaatttcaaatttctattgccatattattctgaagaatcttcgtagtcctggtggtgaaggtggataccaaatcccaaggggctttctcttcaatattgttacctgtgcaaattatacaactgagatctatcagtggttgggattcaacattgcaacacaaactgttgcaggctatattttccttgtggttgctacttttatcatgaccaattgggctttagccaagcacaggcgtttaaagaagttatttgatggaaaggaagggagacctaggtatcctcgtcgatgggtaacattgcccccattcctgtagaagccaaagcaactgatgaagtcaccactctgctcacaggattctgagatttaaattgtagcataatggaattttcgtgatctctttttataagatatggatttgtcttgcaatgcttttgactatgaagttgattgctaaatcattgaatcagtgttttgcagaatatttgtaatcatttcaagattgtagttctgaggattcttgtttcttcaaaatcttcaccttgtttctgtttaatttatgctggctatttccttttactgtctccaatgtttcattaatcattttagaaaattaaagttcaattttgtagctcatacactatgcaatgatgaggcttcaagagtcaaaatcactgatcttcctccacatttaggaacaaattttcgatgctcatgtagtacatacctctttggtagtttttatccttatttagtagttttctcatttccc

SEQ ID NO: 226 - DNA, 1753 bp, Glycine max
tttagtaactcttcaacttcaacatacacaacattttttttatgaagttcaacgtacacaacattgtaaaaggtgttttcgtccttcgtcgttttcctggctaaactgttagccaattatcaggttgcagaaccagaactttaattgagttttatgtacaatcaaattgcattacggataaattgggttcggggacaggaggaagtgtaaaattccaaccccccccccccccccaaaaaaaaaaaaaaaaccatgttcagtgaaatcctagtaacaacataacttgacgataagcaccaataagattatatttacagtcctcacctatacaattcgaaagttctaagactccaagacgaatagtacaaatttttttagcaaattcaaatctatatttttagtgttacaggagatttatagcccgcctcatagcacttttaacaggaccaatacaggtaaaagctgtgtgcaaagaacctaaagagttggatcttcggatgatgtactttcaaagtgatttgggccactatctattcttggggagtcagaatcactcgcctgattgtgtgcagagctcttttcggcttgatcatttaatctggtgtgggagttgaatggtctctcaaattctttagcattgataggatctatcacttgtttattgagtttctgctcctgattgtttacagagctcttatctgcttgatcatttaatctggcgtgagagttgaacggcctttcaaattctttagcattgataggatctatcactagtttatcaagtttctggtcattttgtagggcttcgagctttttctgcagggcctcatgttcagcttgaatccgaaaaggaactccatgcttttgatacacattgttttgtgccaagtcctcatccaaatcagtagcagtggtagcaaatggatgattagccggaatccacctgacagtgtcgggatcaacatccggaggaaccgagtccccttctctaaggaagatggtgggtcgcttccactggtaggcacgcaatctcctcttctggtgagtagcttgttgctcttgagttagagtaatgggggctaaacggtaaacctttccgcacatctcaacagttgagtcgcttttgccaaccttgacaaagggattattgaaggggtcttcatacttgagaggcctcgaaatgcctcttctatcagatctgagttggccacgtctaactagatcagccacggaaccaggacgctccttttttctggacactactaccctcattctcaccgccacaaccaaaaccacaaccgcaacacatacccaaatcggaaaattgcttccaccattttgattcaacaggaatggaggaatggtaacggaatgaacaagttgatggtgaaatttggtaatggaattgatggaatcgtgtttgagttgttgggcgcaagagtgccaattggagattcgatttctgatgctaatgcgatttctagtggcagcgctactgcaattgctactaatgtagaggcatgggcgaagagaaagagagcggaagtgcagtgtccaaacagacgccatgggaaacggtggtggcaatggcaactcaaatgaaggtttccgcttccatttccctttctctatctcctccaatccaacctcaagctaaaatgttagttagggctaaaatattataagaaataaaatgataaataatgaattttgttcctcaacatgactcgggggggggggcctacgtagctga

SEQ ID NO: 227 - DNA, 1649 bp, Glycine max
aattcggctcgagaaaaagcctccaaagttgtggttcacactaaagatccatcttatccagaaaagtcgaggagatgtgcagctcccccccgcaccaccggaagcttatcaacaaagacagggataagttctctgaccaacattagtggtgaaactgaaagctctcatgtaattgaggatagaaacattgccatctccattcaagatctacgcaaggtcaccaataactttgcttcagaaaatgagctaggccatggtgggtttggaactgtttacaagggtgagctagaaaatggtaaaaaaatagcagtgaagagaatggaatgtggagctgttagcagtagagcactggaggagtttcaagctgaaatagctgttctttccaaggtccggcaccggcatttggtatccctactaggctattccattgaaggaaatgaaagaattttggtttatgaatatatgcctatgggtgctctaagcaggcatctttttcattggaaaaacttgaaattggagccattgtcgctgtctcagaggcttacaatagcccttgatgttgctagagcgatggaataccttcatggtcttgcacgccaaaccttcatccatcgcgacctcaagtcttctaatattctactgggggatgattttcacgcaaaagtttctgattttggcctggtgaaacttgccccggatggccagaagtctgtggcaacaaagcttgcaggaacatttggttatcttgcccctgaatatgcagtgatggggaaaatcaccactaaagttgacgttttcagctacggtgtggtcttgatggaacttctgactggactaatggctcttgacgagagccggtcggaggaaagtcgatacctagctgaatggttttggcaaattaaatccagcaaagaaacacttatggcagccattgacccagctcttgaagcaagtgaagaggcttttgagagcatttctattgtggctgaactcgctggacactgcacttccagggatgcaagtcacaggcctgatatgagtcatgcagtcagtgtgctatccgcattagtggagaaatggcgacctgttgatgaagaatttgattatggctctggcattgacttcagtcaaccacgtcctcagttgctgaaagattggaaggaatcagaaggcaaagaatcaagctatacaagtgcacacagtgaaggaagcataccagctaggcctactggttttgcagactcttttacctctgctgatgcaagatgatctggaggtaactccagtgcaatttgtggaacttgttactttgtcttaccaataaaattcactttatattggctatttctgtgttggcagcaaaagggtataatttatttgtttccaagtctttgtctttggacttttagagaatacaggtatggagatgtagataaagaaacattatttttattctttttatgtttgtgtctatatacaaattccaaaatctaaagtaacgaatcttggctacaaggtacgttaataatatttatcaataatgctacatgtgctattcatgttatacgtgttatccatgttgtacaggccaattattgtattaaaaatgtttgtcaatagcataaattacaaatgtactaccaagtacc

SEQ ID NO: 228 - DNA, 1801 bp, Glycine max
tcagctacgtaggcccccccccggcagctgagacactgcaaaaagagttatatagagagagaaaagaaaaatgcactgacacagtgacacagtggttctctcacctctccttctctgtgtaactctgccaccactcttcatttccccaagagaaaaagaaaaaggaaaagaaaaaaactgttcaactttttttcaactgaatcaatcactagcttccatttcttcacaggtggaactgtgaatgtgcaccacagctttttgatcctgttcctaaaattttcctgtgaaagattctgaaggcaattgaagtaaatgccatggatcgtggggaccaaatggcgttatccgggtcttactatatgcagcaaagaggaatacctggatctggagcaccacctgagttacatatttcgcctaatatgcgtccaatctctaatccaaatttaccatttcaatccagcattggtggtggtaccattggatccacattgccattggaatcttcagcaatttcagctcatggtgtcaatgtgggagctcctactggggcacctccaggggaacctgttaagaggaagagaggaaggcctaggaaatatggaaccgacggaagtgtgtcattggcattgactccaactccaacatcatctagctatcctggagccttgacacaaagccagaaacggggcagagggcgcccacccggggactgggaagaaacagcaattggcttctcttggtgaattgatgtctggttcagctgggatgggattcactcctcatatcatcaacattgcaagtggagaagacattgcaacaaaaatcatggcattttctcagcagggacctagagttgtatgcattttgtcagccaatggtgctgtctctactgtcacacttcgtcagccatcaacttcaggcggcactgtcacatacgaggggcgcttcgagatagtgtgtctgtcaggctcttacttggtcactgaaaatggtggctcacgcaatcgaactggtggattgagtgtgtcccttgctagtcctgatggtcgtgtcattggcggcggagttggtggagtgcttattgcatcaagccctgttcaggtggtagttgggagctttctatggggaggatcaaagacaaagaacaagaaaaaggaatcctcagaaggtgcagaagttgctgtggagtcagatcatcagggagttcataatccagtttcactgaatagcatctcacaaaatcaaaaccttcctccaactcccccatctctaagtccttggtcaacatcacgtccgttggacatgcgtaattcccatgtggacattgatttaatgcgtgggtgacacactttgttgaatatacactagtgctgtgtatatatgtttcagattcatggtcgctcatctaatttttgttgtagtagtaaaatgacagaatgggaagtaccaacagcagagtagagccagctgacttttgcaaattgataaatctcacttatccatccacccttgatgattattgacttggggtttgtactcatatttttgtagttgtgaggaatttttaatttgaaaattttatgttcctgattggtaatgatacaatttatgttctatttggaaaaaataattgacattgggctagatgttttatgtggtttaggagcatcaattatatgacattgtatcatgtaatttttgtcataaaaatgtcttctagaaggcaatgacgaggggaacatgaagattttattgctgacaatgcatgatgtaaaatcattttgtaaaaaaaaaaaaaaaa

SEQ ID NO: 229 - DNA, 1152 bp, Glycine max
cttctcactttttcacactactgcactctctctctcctcctctgtgctcttgctcttctgtcacccaccgctcttttaattccaccagctacgtaggccccccccccaactctcactaccttcataagggaacactccaattctccacctccacaacatacccttttgagttttgattctctctcctcacatagctaggtggtattgaatattgggagggtcaaagtttgtgaaggaacttgaagaagtaaatgcatggatcgaggggaccaaatgacatttcctggctctgcatcttactatatgcagagaggaatacctggtgctggaaatcaacctgaactgcacaattcacctaatattcgaccgttgtctaattcgaatctaccgtttcaatcaagcattgggggtggtggtaccattggatccacattaccattagagtcgtcgggaatttcagctccatgtgtcaatgtgagtgctccttctggggctgtgcctggggaaactgtcaaaagaaagagaggaaggcctagaaaatatgggcccgatggagctgtgtcgttggcattgactccgacaccggctagtcatcctggagccttggcacaaggccagaaacggggcagagggcgcccgcctgggtctgggaagaaacagcagttggcttctcttggtgaattgatgtctggttcagctgggatgggtttcactcctcatatcatcaccattgcagttggagaagacattgcaacaaaaatcatggcattctctcagcaggggcctagagctatatgtattttgtcagccaatggtgcccgtttctactgtgacactttcgtcagccctcaacatcaggtgggcactgtcacatatgaggggcgttttgagatagtgtgcctgtcaggctcttacttggttgccgatagtggtggcacccgcaatcgaactgttgcattaagtgtttcacttgcaagtcctgatggtcgtgtcatcggtggaggagttggtggagtgcttattgctgcaagtccagttcaggtgatacttgggagcttttcatggggtgcatcaaagacaaagataaagaaaaaagaaggttccagaggtgcaaaaattgctatggagactgatcatcagacggttcataat

SEQ ID NO: 230 - DNA, 859 bp, Glycine max
cggagctctatggtgacagcagaccaagattgttcacttattggacgagtgactcgtaccgggcaaccggatgttacaaccttctttgtgctggctttattcaaaccaatagcagaatagccattggagctgccatttctcctgtctcttcttatgatggcaaccaatatgacatcacaatcctcatttggaaggatccaaaagtggggaattggtggatgagttttggtgacaacacattggtagggtattggcccgcagagctattcacacacttagcagaccacgccacgatggtggagtggggaggagaggttgtgaactcacgaaccaacggccaacacacctttacccaaatgggctctgggcacttcgcagaagatggtttcggaaaagcaagctacttccggaaccttcagaccgtagacacggataacaatctgagttctgtgcagggcatctcaaccttagccgaaaatacaaactgttacgacattaagagctactacagcaacgaatggggcacctacttctactacggtgggcctgggaacaatccacagtgcccatgattataaacgtctataacgtatatatcagatttacttcagtttcaaattagtccatctctaaatacaaaacaaaaagaaaaaaaaaatagtccatctcaagtaatatcttttctgttacattctttatttgaaaaaaaatatagaactaatattgtgctatttccgctcttgtttctaccacttccactatttttttttttgtttcgaccgatgaaagggccgggagaggaaattttgagttgtaattaactcaacaataataaggaatttgcagatttgaacggctc

SEQ ID NO: 231 - DNA, 832 bp, Glycine max
  misc_feature (815)..(815): n is a, c, g, or t
tacggctgcgagaaggcgtcccccacttccctcaccgcacagaattagggttttccaattcacagagcaacacaacgaaccaacaatggcgcagcctcagccgcagtcgcagccgcagcacgggcaagcagcgctggagcaggtgcagtgcttcggtcgcaagaagaccgccgtggccgtgacctactgcaagcgcgggcgcggtctcatcaagatcaacggctgccccattgagctcgtggagccggagatcctccgcttcaaggccttcgagcctatcctcctgttgggtaagagccgcttcgccggcgtcgacatgcgcatccgcgtcaagggtggcggccacacctcccagatctacgccatacgccagagcatcgccaaggcgctcgtcgcgttctaccagaagtatgtcgacgaacagagtaagaaggagatcaaggacattctcgtgaggtacgatcgcaccttgctcgttgcggatcccaggcgctgcgagcccaagaagtttggtgggcgtggcgcacgtgcgaggttccagaagtcttaccgttgaagaagaatggtggtggtgttttcgtgtttttggcttttggtttcggttcatgttttatgctgtggaaaaaatgaatactttcgttgctggtggtttttggtagttttataattttggtcgcttttttataattgttggatttgatgttgttttaattcaactttttttgtttaggtacaatgaaggtatgaagttattatcattattataaattctagttttaatgacctggctttttgcttgtgcttgctggaattgntctgggaatgttggaat

SEQ ID NO: 232 - DNA, 848 bp, Glycine max
tttcctttcgtccgcccacgcgtccgcccacgggccgcgccaaccccacttccctcaccgctccgaattagggttttccaattcgcagagcaactcaacacaacgaaccaaaccaacaatgtcgcagccgcagcctcagtcgcagccgcaacacgggcaagcggcgctggagcaggtgcagtgcttcggtcgcaagaagacggcggtggccgtgacctactgcaagcgcgggcgcggcctcatcaagatcaacggctgccccatcgagctcgtcgagccggagatcctccgctttaaggccttcgagcccatcctcctgttgggaaagagccgcttcgccggcgtcgacatgcgcatccgcgtcaagggcggcggccacacctcccagatctacgccattcgccagagcatcgccaaggcgctcgtcgcgttctaccagaagtacgttgatgaacagagtaagaaggagatcaaggacattctggtgaggtacgatcgtaccttgctcgtcgcggatcccaggcgctgcgagcccaagaagtttggtgggcgtggcgcacgtgcgaggttccagaagtcttaccgttgaaggagaatggtggtgtttttgtgtttttttgtttttggttcggttcatgttttatgctgtggaaaaaatgaaaacttttgttggtggttttggtagttttataattttgatcgttttttttataatggttggattatggattcttgttttgattcaactttttctgtttaggtaatatgaaggtacggattattattgttataaattctagtttgaaatgttagggccttttcttgtgccaaaaaaaaaaaaaaaaaaa

SEQ ID NO: 233 - DNA, 1500 bp, Glycine max
tttttttttttttttttttttttttttttttttttttttttacaaatttagaaactaatttgctattttatttatttcagaaaccagtttgactgatcctttctttttcaggaataacaattcacccaatattgtaaattatagtactaaagttcacacgcagttttagttgctccgcgattccaattacaactgaatcaacactttgtttatatgtaaaatcctacggctgccaaataaacaaataaaactggcgcacgatcacgaagacctccattacatttagagagattaaaatatgattttcatcctctaacatgtaatgtagctttgctcctgcattttaaagaaaacacaaaatgcaaaaacttacaataaaacaatttctgttaacaaacatgtcaagagtattaatgaaatgttgctaactatagtaaggaacaatacaatggacgatgctagctaactctagaaaacaaccgtgtcaagcatcattcccaaagtctgaacaatgtttgatgacatcaaattggaaacatgctcttcaaggtgcttcttagcatcttgcctccccacatttgcaattgcaagtttttctggtggcagttcatcttcctcctgcactgccttgttgtacttggctgctaaacttagcatctcctgaacagtctgttcattagttttagaatgtgaatcaaaatgcctgagtgtcaaaccatcagtccacttctttttgtgaaggttaagcaacatcttctcttcaagttcattctttctgtaattaattgctatggagtaataatgtctattcaagccatggatcagagcttggatagatggcttgtttagatggcccaggttggaagttgtctgtcgtggttcctgacctagcatcatagtttgtggattaatcagccggaaagcatcaattaccactttgcctttcacactctgaatggggtccaccaccacagccactgcccgttgatttaaagcctcaaaactctgttgcgtattaatgtccactccagaaagccaacacccaaatccaggatgcgagtgataccaccccacaaccatctccggccttccagtttgcttcaacatatcaagcatattagtctgaaaaacatgatcaacagcttcaacgctgacaccggtcccactctgaggcatcgcaaacacatccacaacgcgaacggtgtactcatccacgaactcccccaacatcagacccatcacttccatgggtaccccagctcttccgtgtttgagcattttgagaagggcgagggaggagatgtagacctgctcggaggaatcgagggtgggggaatccggtgggggatggcccagcgctccacctgcacccgcgaacatcctctgaagcctctccatgcccgacatcacaaaacctaatcttttgttttcttttgtttcacgaaaagaaacgaagaaatgattgcttgcttcccccttctgtcgtcttctcgcagccgt

SEQ ID NO: 234 - DNA, 1006 bp, Glycine max
gaatactactactattaccccacacaccaaaactagcaacacccttctcttctcttcacttttctttctctttctctacatagtttctttttcactctcttattcttcttttctaagcaacaacagcaacctcattcctcggatcctaagaaaatgggaaccagagtgtggtgttgtttcgtgatgttcctctctctcaatgctcttgcaatagcattggaagatcacaaccttaaaacgacgtcgaaggatgacatcaagtgcactccttgcggtcaaattccctcgccgcctccaccttctccgccgccgccagctccgaccactacctactgccctccgccgccatcgcctccaagctccggcggtggtggtgcttactattactccccgccgccaccctctcagtacacctactcctcgccgccgccgccggcgtccaccagcggaggcggtggcggtggcgcgtactactacccaccgccgagagggtactacccaacgccgcctcctcccaacccaattgtgccctatttcccgttttactaccatacccctccgctgtcgtccacggcggcgcctccgccggtgaaaggctcgttggtctgtgccagtgcaatttcattgttaactctttttattgcatttctctaagaaaaaagaaagagagaaaaaggaaaatggtgggaataagtgcacaaattagcagatctcgggaaagtgaaagtgaggtgagtccaagcaaggacagtgagcttatttcccattttgcccctgaacttgtttcaatttcaagcatcatatgacaagaagaatcacttttcttagtggtaatttaatgtaggttgatctgcaatttgttgacaatttgtaattgtatttagacttttggttttggttagtatgaaaaaatttaaaaattgaagaatgttctaattaatttccatttatttactactttgtgatgtaaattttggcctatgaggtgagtttatttattgggggc

SEQ ID NO: 235 - DNA, 1367 bp, Glycine max
aaaatccttggtagctgctgcaccagttccttccaactcaacaaaatactttttatattctattcggctacctcgctcgctccgcttcttctctgtcttctctgttctctctcatctcatcggatcgatcaagcatcagggagctttgagggttgattctctggtgtagtagcaatcagcacaatagaaaatgttttttgacggatatggatatcatgggacatcatttgagcagatatatcgatgctacccagcttcctttattgaaaagccccaaatcgaaagtggtgacaaaattatcatgcctccatcagcccttgaccgtctagcatctctgcatattgattacccaatgttgtttgaactccgtaatgatgctgccgagcgggtttctcattgtggggttctggagttcattgctgaggaaggcatgatatacatgccatactggatgatggagaacatgcttttacaagagggggacattgtcaaagtgaaaaatgtgacacttccaaaggggacatatgttaagttacagccccacacaaaagactttttggatatttccaatccaaaagctatcttagaaacaacattgaggaatttttcctgcttgactactggagatagcattatggtggcttacaacaacaagaaatattacatagatattatagaaactaagcctgacactgccataagcataattgagactgactgtgaggtggactttgctcctcccttggattacaaggaacctgaaaaacccactgcacccctttctgctgggaaggcagcagtggctgctgaggtgatccctgctgaagatgagcccaagttcaacccattttctggaactgggagacgcttggatggaaaacctttgaattatcagcctcctccagtttcctcttcagggtctaaggaccagaaacctgatgttgtcaatttgcagtcttctacagcttctagttcacaaagtaatgctcgtcaatctcagggcaagcttgtgtttgggtcaaatgctaaccgtactaaagagacaggaaaggcgaaagagtcaaaaccagagccacctaaagagaaagaagagccgaaatttcaacctttttcagggaagaagtattctttacggggttaaattaaaatggccttttacttttaaagcaagttactttgttgatctatgcatggatcgatgtctattgcaaaaacttttatttatttattgtattataagcagtagatagaccagtagatgccacagaaaatacctttgattacttgtgaacgaagctcttgacgagggttgcaatcgtgtctgaatggtaacatgctgtgtgtagaattataatatctatctccgg

SEQ ID NO: 236 - DNA, 798 bp, Glycine max
  misc_feature (739)..(739): n is a, c, g, or t
aatcaccactcttcactctcattttcccaatttcgcgataccaaaacctcagcaatcaacaatgtcgtttttctcaaggggccgtcgcgacgacgacacggtggacgactacgacgagtacgaccccaccccttacggcggcggctacgacatcgccctcacctacggccgccccatcccaccctccgatgagacctgctaccctctaggagcctcttcttctgatgacaacttcgattatgatcgccctcaatacacctctaacgctgaaccctctgcttatggtgatgaagccctagctactgagtatagcagctactctcgccctaagcccaggcctgctcctgcaggcttcaaccccgccgcagggtccgggtacggagggtccggatccgggtatgggaggaagcaggagtcggaatatggatccgggtatggtggaaggaaggaagaaggtgaatacgggtcaggatatggtggaagaaaggaggagccggaatatggatctgggtatggtagaaggaaggaagaaggtgaatacgggtcaggatatggtggaagaaaggaggaaccggaatatggatccgggtatggtaggaaagaagagggtgaatacgggtcaggatatgggtccgggtatggtgggagaaggggaggagtctgaatatggatctgggtatgggggggaaagaaaaggaagaacctgaatatggatctgggtatggtggggagaaagggnaggaatctgaatatggatcccgggtatgggtggggagaaagcaagaatctgaattatgg

SEQ ID NO: 237 - DNA, 1568 bp, Glycine max
tcgagtagctacgtaggccccacaaatcatcaatcatcacagtcttcactcccattttttcaaaacattcaacaatgtcgtatttttcaaggggacgtcgcgacgacgacgacacggtggacgactacgacgagtacgaccccaccccatacggcggcggctacgacattcacctcacctacggccgccccgtctctccttcagaagaaacctgctacccactcggagcctcttccgatgaaaacttcgattacgatcgcccccagtacacctcttacgctgaaccctctgcttatggcgatgaagccctggccactgagtatagcagttactctcgccctaagcccaggcccgctcctgcaggcttcaatcccgccgccggatccgggtatggtaggaagcaggagtcggaatacggatccgggtatggaaggaaggaagaaggagaatacgggtcaggatatggtggaagaaaggaggaatcagaatacggatccgggtatggaaggaaggaagaaggtgaatatgggtccgggtatggtgggagaaaggaggattctgaatatggatccgggtatggtagaaaacaagaagatgaatttgggtccgggtatggtggaaggaaggaggagtctgaatatggatctgggtatggtgggagaaagcaagaatctgaatatggatccgggtatggtggaaggaaggaagagtctgaatatgggtcaggatatggaggaaggaaggaggaatcagaatatggatcagggtatgatgggagaaaggaggagagtgaatatggatccgggtatggtggaaggaagcaagaatctgaatatggatccgggtatggtggaaggaagcaagaatctgaatatggatccgggtatggagggaggagtgagtatgaggagaaaccgagctatgggaggagcaactatgaaagccagggaggaggaggaggggttgagtatggttatgaggggcgtccacctcggcaggaggaggaggaggaggaggggtaccgcaagccctcctatcagaggaaggatgatgatgatgaggaaggctatggacgcaagaaatatggagatgactcagatgatgatgatgggaggaagaagcatcaccacaagcatcaccagtacaagagttatgatgatgagtaatcaaaatgccagtgcttgctgtgtgaatcaaaatcatcccataattacctactaaataaagggttgacgcattataccttccagtgtgtttagactactatatctgtgaagtcttgagctttatgaattgtttgtctaaacttaatgtgaggtctttggctttggagttttaatagtatccgttgtgtttgagttttttaaattatttctttctaagtttgaatgagtttaggtgccctgcatcatgtcatctcaccttctcattattgctggctaagttttaagggaagtttcgaaccttattgcaatattcatgcactggcgtagcggggaaaaatatgtaatattttcatagaagaaaaatattacaaatttttacaaaatgcacaatatgtaggccaa

SEQ ID NO: 238 - DNA, 1553 bp, Glycine max
  misc_feature (176)..(176): n is a, c, g, or t
  misc_feature (1241)..(1241): n is a, c, g, or t
  misc_feature (1334)..(1334): n is a, c, g, or t
  misc_feature (1424)..(1424): n is a, c, g, or t
  misc_feature (1431)..(1431): n is a, c, g, or t
  misc_feature (1482)..(1482): n is a, c, g, or t
  misc_feature (1486)..(1486): n is a, c, g, or t
  misc_feature (1513)..(1513): n is a, c, g, or t
  misc_feature (1526)..(1526): n is a, c, g, or t
aaatttaggtttgaaatgtaggccttgttccttcttaatctctcattaatatattgcttcaaactgctattatatgctactgcattcattttctgatgctatgactataattagcatcattggtgacaaaaactccacaaaatagttttctttttcacctttttagattatttacntcaatttaccatataacttgatgaacctcgtaattgtgttacttgcaacatgtcccccttttgttaggattaaggaagatgataaattgattcaagcagaaggtgtggattctctttcagaagatgaacttcgggaagattgtagagagcgaggcatgcttgggttgctttctgttgaagaaatgcgccaacagcttcgagattggctggacttatctctgaatcactctgttccatcatctcttttgatactttcaaggtcatttactgtgtctgggagattgaaaccagaagaagctgtacaggctacactttcttctctccctgatgaggttgtagatactatacaggttacatctttgccctctgaggattctgtctcagagaggaggaggaaattggagttccttgagatgcaagaagaacttattaaggaggaggaagagagagaggaggtggtgcaggcaaggatggagaatagttctagtcaagatgataaggccctgaaagagatgaatatttcaacagcaaaagaggctcaccaacttgctagagacagagcatttgaaaacaaagaacaactttgtgaacttagtcgtgcattagctgttttagcttctgcatcgtctgtaagttcagagcgtgaagattttcttagactggttaacaaagagatagaactctataacagcatggtagaggaagagggttcaaatggtaaaaaagatgcctttaaggcatataaagctgcccgagaggaacatgaacacgctactgagtcgggtgaaggggataaggtgtcatcagcactcattgggagagttgatgctatgcttcaaaatcttgagaaggaaatagatgacgttgatgcgaaaatcggtgaccgttggaggctgctggacagagattatgatgggaaagtaactcctgaggaggtagcctctgctgcaatgtacttaaaggatacattgggaaaggagggtatccaagaactcatcagcagtctttccaaagatagagatgggaaaattcttgttgaggacattgttaagttgggcggttggnggggaggtggtaatgcccctgaaggtgatcccggggggggggtatgatcccatcatttgccttccggatacatcctatttgagttccatgccncaaaatatgttgcgcaaatgtactctaggccattcgaattttccagtcattgatttttgtattcatgtattaataaatagttcaattgtngcagtcngacgaaaatgaagtgtgtgcaagctctgtaaatttttgacagctgggcacncaantttactttaaatttttaattgatacgncacttgggctgtnttggtttttggggtgtttttctgtttt

SEQ ID NO: 239 - DNA, 2297 bp, Glycine max
  misc_feature (2113)..(2113): n is a, c, g, or t
acgagcccagacttgaaaaagcgaagaacagacaacactgactagtcccagagcgacggctaagcctctttgttctctgtcccaagcttcgagcagaagaagaatcaaatatcactactttgattttgagctctattgcctttgccatcaaccggcagccatgtacagaaacgctgcttcacgtcttagggccatcaaggcccgttcgtgcagcagcagcagcagggtacctgccagtgccagatttgcaagttccgttgccacgcaacaatcctcttcttctggtttgggtggtttatttggatggctcactggagaccgaaccagttctttaccatctctgggttttccacttccaggcgttacacttccccctccattgcctgattatgttgcgccgggtaaaactattattactacactcccaaatggactcaaagtggcctctgaaacatcaccgagtcccactgcgtcaataggtttatatgtagattgtggttcaatatatgagagtccgataagttttggggctacgcatctgcttgaacgaatggctttcaagaccactagaaaccggagtcactttcgggtagttcgtgaggtagaggcaattggtggcaatgtgcaggcctcagcttctagagagcagatgggttacacttttgatgctttgaaaacctatgttcctgaaatggtcgagctacttgttgattgtgtcaggaaccctgttttccttgattgggaggttaacgagcagcttctgaaagtgaaggctgagattggtgaagcttccaaaaatccccaagacttgcttttggaagcaattcattctgctggtttttctggtgccttggcaaatcctcttttagcttcagaatcagctctaaatagactaaatggtacaattctggaggagtttgttgctgagaactatacagcacctcggatagtacttgcagcatctggtgttgaacatgaggaattgttatctgttgcagaacctctcttgtctgatctacccagtgtcccacgtctagaggagccaaaatcagtgtatactggtggtgattatagatgtcaaagtgaatcagggaggacccattttgctctagcatttgaacttcctggttggctggcataagttgaaggatgctatggttttgactgttcttcagatgctcctcgcggccggtggatcattctcagctggtggacctggtaaaggggtgtttccacggctagagcaaaatgttctgaatgaatatccacaagttcatgaaatttcagcattcaacaatatttacaatgacactggcatttttggtatccaagttacaacaggctcagattttgtatcaaaagccattgatatagctgctaatgagattcttgctgttgctactcctggacaagttgaccaggtacagctggatcgagccaaacaggctaccaaatctgcaattttgatgaatttggaatcaagaatggttgtttcagaagatataggaagacaaattttgacatatggtgagaggaaacctgtggaggatttcttgaaggcagtggatgaagtaacctcgaaggatatcacttcaatttcgcgaaagctcatttgttctcctctcacaatggcatcatatggagatgttctctatgttccaagctatgaatcagtgagtctcaaattccgtgcctaatgagattgctttcatccacccatcatattgagtcttctttatatacaatcaagtcttgtacggatgaaaggtgtaaaattaagttaaacttcctaactatccttgttgtagtcaataaattagtgattttcacatctcattatttctgggtacataaacattgatctgagagttctcacatgactattttttggactgaacttaaaactactggattattttttggattgaatctctttgggaaaccaaatcataatcgaatatcgttgttatccattggtacggtttaaactgtcctttttcatagatcctctacaagttgacatgcgaaaggtagttgtagattggcgtcttctttgtgtggattgactaattttcatctaatctgtgaccgtgaaccaagaaaaaaaatatanccttcattctatcttatgatgtcatctttatagccccacggaagttatgataattattgcatgtttgttttagttaaaacttaaaatcattacacggaaccgttataaaaaaaatcattatagctagcacttaattttactgaaaataaaatgtttttgattgtttaattcttcaaccatgcag

SEQ ID NO: 240 - DNA, 1290 bp, Glycine max
cgttcaccaatctcagacttcactttcagaagctggtcattaacctcccaaaaatccccaagacttgcttttggaagcaattcattctgctggtttttctggtgacttggcaaatcctcttttagcttcagaatcagctctaaatagactaaatggtacaattctggaggagtatgttgctaaaagatatacagcacctcggatagtacttgcagcatctggtgttgaacatgaggaattgttatctgttgcagaacctctcttgtctgatctacccagtgtcccacgtctagaggggacactgggtagatcagacaagagaggttctgcaacagataacaaagtgaatcagggaggacccattttgctctagcatttgaacttcctggtggctggcataagttgaaggatgctatgattttgactgttcttcagatgctattgggaggtggtggatcattctcagctggtggacctggtaaagggatgtattcacggctatatctcaatgttctgaatgaatatccacaagttcattcaatttcagcattcaacaatatttacaatggcactggcatttttggtatccaagttacaacaggctcagattttgtatcaaaagccattgatatagctgctaatgagattcttggtgttgctactcctggacaagttgaccaggcacagcttaatcgagccaaacaggctaccaaatctgcaattttgatgaatttggaatcaagaatggttgtttcagaagatataggaagacaaattttgacatatggtgagaggaaacctgtggaggatttcttgaaggcagtggatgaagtaacctcaaaggatatcacttcaatttcgcaaaaactcatttcttcccctctcacaatggcatcatatggagatgttctctatgttccaagctatgaatcagtgagcctcaagttccgttcctaatgagattgtttccatccatcatattgagtcttctttgtatacaatcaagtcttgtacggctgaaaggtgtaaaattaagttaaacttccctaactatccttgttgtagtcaataaattagtgattgtgcactagccacatttgcacatctcattatttcggggtacataaacattgatctgatagttctcacagactattttttggattgaatccctttgaaaaaccaaatcataatcaatggatcaggaactggttttgaataagtgtattgtattgctagttgaaattctaatttatggtgattatattacgggattatttattgaaggcc

SEQ ID NO: 241 - DNA, 2045 bp, Glycine max
  misc_feature (1619)..(1619): n is a, c, g, or t
  misc_feature (1645)..(1645): n is a, c, g, or t
  misc_feature (1660)..(1660): n is a, c, g, or t
  misc_feature (1741)..(1741): n is a, c, g, or t
  misc_feature (1802)..(1802): n is a, c, g, or t
  misc_feature (2042)..(2042): n is a, c, g, or t
agattgaaaaaatggataacctttatgggctggtgctagagcccagagttgaaaagcaaagaacagacagcacttactagtccaacagcgacggctgaacctctttgttctctctgtctaagaagaagaagaagaagaagaagaagaagaagaatcaaatatccttgagccagacatgtacaggaacgctgcttcacgtcttagggtcatcagtgcccgttcgtgcagcagcagcaggatacctgccagtgccagatttgcaagttccgttgccacacaacaatcctcttctggtttgggtggtttatttggatggctcactggagaccgatccagttctttaccatctctggatttcccgcttccgggcgttacacttcccccttcattgcctgattttgttgcgcccggaaaaactattattactacactcccaaatggactcaaagtggcctctgaaacatcaccgactcccactgcgtcggttggcttatatgtagattgtggttcaatatacgagactccgataagttttggggctacacatctgctagaacgaatggctttcaagaccactagaaaccggagtcactttcgggttgttcgtgaggtagaggcaattggtggcaatgtgcaggcctccgcttctagagagcagatgggttacacttttgatgccttgaaaacctatgttcctgaaatggtcgagctacttgttgattgtgtcaggaaccctgttttccttgattgggagggtaacgagcagcttctgaaagtgaaggctgagattggtgaagcttccaaaaatccccctcgcgtgcttttggaagcaattcattctgctggtttttctggtgccttggcaaatcctcttttagcttcagaatcagctctaaatagactaaatggtacaattctggaggagtttgttgctgagaactatacagcacctcggatagtacttgcagcatctggtgttgaacatgaggaattgttatctgttgcagaacctctcttgtctgatctacccagtgtcccacgtctagaggagccaaaatcagtgtatactggtggtgattatagatgtcaaagtgaatcagggaggacccattttgctctagcatttgaacttcctggtggctggcataagttgaaggatgctatgattttgactgttcttcagatgctattgggaggtggtggatcattctcagctggtggacctggtaaagggatgtattcacggctatatctcaatgttctgaatgaatatccacaagttcattcaatttcagcattcaacaatatttacaatggcactggcatttttggtatccaagttacaacaggctcagattttgtatcaaaagccattgatatagctgctaatgagattcttggtgttgctactcctggacaagttgaccaggcacagcttaatcgagccaaacaggctaccaaatctgcaattttgatgaatttggaatcaagaatggttgtttcagaagatataggaagccaaattttgacatatggtgagaggaaacctgtggaggatttcttgaaggccagtggatgaagtaaccctcaaagggatatcacttcaatttcgcaaaaanctcatttcttcccctctcacaatggngcatcaatatggagnatgttctctatggttccaaagctatgaatcaagtgagccctcaaagttccgtctccataatgagattggtttccataccanctcactatatgaagtctatctattgaataccaactcaaagtctttgtacggctgaaagagntgtaaaattaaaagttaaacttcccctaacataatccttgtatgtaagtcaaataaattaagtgatatgtgcactaagcacacatttgcgacgatctacatatatttcggggggtacaataaaccattgatcttgataggttctccacagaacatatttatttggagttgaatcacactttgaccaaaccacaatcaataatccaatggactcaggaactgagatatttgaaataaaaanaaa

SEQ ID NO: 242 - DNA, 831 bp, Glycine max
  misc_feature (15)..(15): n is a, c, g, or t
ggcccgctcgaggcncggccgggggccggggaaatacaaaaaaaaaaaaaaaaaaaatcaataattcggagaagattgagaaaggtaaaggtccttgttgttccggtgtgctgctagagaatctggtgaaggatgtcaattgttccaatcaaccaaggtcactcccaggactcttgggatcaattcatcgattttcctctccctccttccatctccagcttcttccccggcttcgaattcggattcggctcatcggtggttaacacacgtgtggactggagggagactcccagagcccacgtgtggaaggtcgtgcttcctggcttcacaaacgaggacgtgctggttgagctacaagaccagagggtgctccaggtcagcgtggagagtggtaacttcctgacgaggtttaagatccccgacaacggtaacctcgaacaactcaaaaccaacatgcgtcacgggattctccttgtcactgttcccaagtttcatcaacccacttctaataggaatgtcagggtcgttgagattgaaggcaccgactgaacccagttagcaaactctgtctcttccaagttgttcactctaaacaaaacaaaagacgctgtcgtgtctatgtatgtgtccgatggaactgtgttctagtattatattatgttatgtgtgcgatggaactgtgttctagtattatatatgtatctgtatgttttagagtggatgaattactcttgctaaatgtgtagacttgtacatactactacttaacattgcaaagcttattaaattaacgtagccgggtagatttacgaaaaaaaaaaaaaagggcgg

SEQ ID NO: 243 - DNA, 2581 bp, Glycine max
cttaaaattgagtggcgtgaaaccctaccccccacgcggccccgactgcgagtgtgcccaacttctgcgaaatcagttttctacaatgggaaggaaaaagacagaggatgctggcccatctgcgaaggtaaaggctggtagcaaagatcctcctaagaaggaaaaaatttctgtgtctgccatgctggccagtatggatgaaaagcctgataaacctaaaaaggtcccttcttcctccagtaagccgaagccgaaatctgctccaaaagcttccacatacaccgacggaattgatcttcctccatccgacgatgaagatgatgatgatctcttggaagagggggaagccaaaaggtccagtcagcagcagcaaagggttgatttgaagccacttgatgtgcctattgctgataaagagttgaaaaagcgcgaaaagaaggatcttttagccgcacatgctgctgagcaggcaaagaaggaggctcttagggatgaccacgatgctttcactgtggtcattggaagccgggcttcggtgcttgatggaggagatgatgctgatgctaatgtcaaagatataacagtagaaaatttctccgtgtctgcacggggtaaagaacttctgaaaaatgcaacagtgaagatatctcacgggaagaggtatggtttggttgggcccaatggaaaaggaaagtccacgctgttgaaacttcttgcttggaggaagataccggtacctaagaatatcgatgtccttctggttgagcaggaggtagttggtgatgataaaacagctcttgaagctgttgtttcagctaatgacgaacttgttaaaattcgacaagaagttgcctctctgcagaatgcagcttctgttgaagacaaagataatgatgaggaagacgatacaggagagaagctagcagagctatatgaaaaactacagctgatgggatctgatgctgctgaagctcaagcatcaaagatattagctggtttaggttttacaaaggatatgcaagcccgtcctacaaaatcctttagtggtggctggaggatgagaatttctttagctcgagcactttttgtgcaaccaactctattattgcttgatgaacccacaaatcatcttgacctgagggctgttctctggttggaagagtatttgtgccgttggaagaaaactctggtggttgtctcacatgatagggattttctcaatacagtgtgtactgagattattcatctccatgatttgaaacttcatttctatcgtggaaattttgatgattttgagagcgggtacgaacagcgtcgtaaagagatgaataagaagtatgatatttatgccaagcaattgcaagctgctaaaagaagtggaaaccaggctcagcaaaaaaaggttaaggatcaagctaagtttgcagcagctaaggaaaaaagcaagggaaagggcaagggcaaggttgatgaggatgaggccccaccagaggcacctcagaagtggagggattacagtgtggagtttcactttcctgaacctactgagctcacacccccacttctgcagcttattgaagtcagctttagctacccaaaccgggaggatttcaggctctcaaatgttgatgttggcattgatatggggactcgtgttgccattgttgggcctaatggagctggaaaatctacgttgttgaatcttctagctggtgatttggttccttctgagggtgaagttcgaaggagtcagaagttgaggataggaagatattcccaacactttgtggaccttctaacaatggatgaaacagctgtgcagtatcttctgcgtctccatccagatcaggagggacttagcaagcaggaggctgtccgtgcaaaacttggtaagtttgggctaccaagtcataaccatcttactcctattgccaaactatcaggagggcagaaagctcgggtggtcttcacatctatctccatgtcaaatccacacattttattgttagatgaacccaccaatcatctggacatgcaaagtattgatgcattggccgatgcactggatgaattcaccggtggagttgttcttgttagtcatgattcaagattgatatcacgtgtatgtgaggatgaagaaaggagtcaaatctgggttgtcgaagagggcactgtcaaaaatttcccaggaacatttgaggattacaaggacgacttgctgagagagattaaagctgaagttgatgattgagcttccttttctgaaaacaattcatttaaagtgaaatttgtccacatatatctacatttttgccttcctgtattttgctgataaagattacttgcctcccgcccatgccggattttgtccaccccttctccctgttcattttcatgtattctgcaattgagtgtaattttaggttgcgggaaatgctattaatactttagtgagacttgtttttggattaccaaagttttgtgtgttaagaatatataggagcatgtaatttaaactgttaggactaataaacatctgcattgttccaaaatttgtttcatgatgttgtctattgcttca

SEQ ID NO: 244 - DNA, 1898 bp, Glycine max
ggctcgagaaagaaatccactggtgttgtgcagtttgacacaacccaaaatcgatttttggctgctggtgaagatggccaaatcaaattttgggatatggacaacattaatcttttaacaagcactgatgcaaagggttctattcagacccttccacacttgagattcaacaaggaaggaaatcttcttgctgttactactgcagacaagggattcaaaattcttgctaatgctaatggtcttagatccttgagaacagttgaaactccaggatttgaagcattgaggtcaccaattgaatctgctgcagtcaaggcatctggctcttctgctgttaatgttagtcctgtcaactgtaaagtagaaaagagctcacctgtcgggccttctccaattcttaatggagtcgataccacaggtcaaaatgcggagaaacctagaactgtagaagatggagtagatagagctaaaccatggcagctgtctgaaattgtggatgctgtccaatgtcggttagttaccatgcctgacagtacagattcttccagcaaggttgttcgacttttatatacaaactctggtgctggtgttttggcacttggttcaaatggtgttcagaagctgtggaagtgggctcgtagtgaacaaaatcccaatgggaaggcaactgccagtgttgttccacagcattggcaacccaacagtggtcttcttatgactaatgatgtcacgggtgtcaaccttgatgaagctgttccttgcattgcactctcaaagaatgactcatatgttatgtctgcatgtggtggaaaggtttcgttatttaacatgatgacattcaaggtaatgacaacattcatgccaccaccacccgcctctacctttctagctttccaccctcaagataataacatcatagccattgggatggaggactcaacaattcacatatacaatgttagagtggatgaggtgaaatctaaattgaagggtcatcaaaagcgaattactggtttagccttttcaacctgtcttaacatcctggtttcatctggtgctgatgctcaactttgtgtatggagtattgatacatgggagaaaagaaaatcagttcctatacaactacccgcaggaaaggctcctgttggtgacactcgtgtgcagttccatttagaccaaatccggttactggtggcccatgagactcagttggcaatatatgatgcctctaagatggatcgcattaggcagtgggttccacaagatgttctggctgctcccatatcatatgcagcttattcctgcaacagtcagttaatatatgctacattttgcgatggcaacactggggtttttgatgctgacagcttgagactaagatgtcgtattgcactatccacatacttttcacctccagcagctttaagcgggaatcaatctgcgtatcctgttgccattgcggctcatccactggaacccaaccaatttgctgttggattgacagatgggtccgtgaaagtgatagagcctagtgaatcagaaggtaagtggggaaccagtccacctatggataatggaatattgaacggtagggcagcatcaacatctataacaagcaacctcacacccgaccaggcacaaagataagaacattcattgtaccataccagcatattctttccacctgtaatttgatcaccttagatttttagattttgattccccccaatttgtccctaaacaaggtcttgtcagggtcagctcggacataaaaatggcaaatgtaagctcttgtcttgtatacctgaatttgttctagtcaactcgattacattatttatactgcaatgtagtgtacaacaatgtgaatctgtccattctcgtgacttttgttgtat

SEQ ID NO: 245 - DNA, 673 bp, Glycine max
cgagactcagccctaaaaccgcgctgtgagtgctgagaacgttacttcattcaaaagcagcaacagcaggttattctttgtttcttttcgttcttccacagccgattcggctttgtccatggccaccgaaccaaaagcagccactgaggacgtcaagattgatctcttcgaagacgatgacgaatttgaagagtttgaaatcaacgaagagtgggatgacaaggaggaagggaaagaagtgactcaacagtgggaggatgattgggatgacgatgatgttagtgatgatttctctcttcagttgagaagggagttggagagcaacaccgagaagaactaaaccacctgctagttattgttgcttgatatggcatgcgttatgacttgggtgtttgagctcttcgaaggagatgaaaactatgccttgttaggaaggaaattgaagaacatagggacatgacttttctgttatttcctgaatatatgctttagaagttattgagtgcttgtactttaattgaattctgcattattaggtgctgtctggctttaaaatttgacttacaatctcgaattatttgttcttattttcattttagggttgggtgggcatgcttttctatgaaccagtctggcaaatagtgcagttgagttgcatttctccaaaaaaaaa

SEQ ID NO: 246 - DNA, 740 bp, Glycine max
tccgtccggctgcgagaagacgacggacggggaaaacagcgcactgagtgctgagaacgttacctcattcaaaagcagcaacagcagattattcttctttgtttctgttctttcttcatcagccgattcagctttgtccatggccaccgaaccaaaagcagccgccgatgacgtcaagatcgatctcttcgaagacgacgacgagttcgaagagttcgaaatcaatgaagagtgggatgacaaggaagaagggaaggaagtgactcaacagtgggaggatgattgggatgatgatgatgttagtgatgatttttctctccagttgagaagggagttggagagcaacaccgagaagaactaaaccacctgctagttattattgcttgatatgacatgcgctatgtcttgggttgggtgttcgagctcttggaaggagatgaaaactatgccttgtttggaaggaaatgtaagaacatagagacatgatttttctgtaccttcttgaatatatatgcttttaaagttattgagtgcttgtattgttcttatttttattttggggttgggtgggcatgcttttctatgaaccagtctggtgaatagtgcagttgagttgcacgttccccattttcttggtgcccatcggttccaaataggaatttcctaattgaagaattaacgtaaaggctgaaaaaaaaattactttggctaaaaatttaattctcactatgcattaaatg

SEQ ID NO: 247 - DNA, 3378 bp, Glycine max
  misc_feature (1843)..(1843): n is a, c, g, or t
  misc_feature (1916)..(1920): n is a, c, g, or t
  misc_feature (2705)..(2705): n is a, c, g, or t
atataatgcagattttggataagcatgccgcaaaacaacgtaggacaagacattagtattacgtggagatgaagcagttcatcacacacaacatgcactctcatcataatcatccacgcttcttctggttccaaagtcaacggattatgttccatgtttttgaaatccaacggtgttgatcttaggtgtaggaagtagcttgtgaagtgtttgcagattaagtgtccttctcttcagttatttatgggatgtgtaaagagaaaaaaaggatcataattaacttgtcacgcgtggcgttacagagagagagagagagagttattatggtgactatggaagagagtccaaggagcccagaggcgaagctggggttgcgagtggaggatctatgggacattcaggaaccacagctaagtcctgatgagaagttcaatgcttgctttgaaagcatacctgtctctgccttccctccacctccttcaaatcaagaaattgagataaaatcagatgccaccctagccgaggcagtaaaaatacttgcagaacacaacattcttagtgcacctgtggtggacgtagatgcacccaatgatgccagttggattgacagatatataggaatagttgagtttgctggaattgttgtttggattctgcatcagtctgaacccacatctccaaggagtccatccggtggagctgctaatacggctgcagtgaatggaataacttctgaagcattcggccttgaatctgcttcgacaacttcaggcaatttctttgaggatctgacttcttctcaactatataagaacaccaaggttcgtgacatttcagggtcattccgctgggctccatttctcgctctggagagatcaaactcatttttgaccatgcttttgctgctttccaagtacaagatgaagagtattcctgtggtggacttgggtgcaggtcgaattgacaacattattacacagtcttctgtaattcacatgttggcagaatgtgctggtcttcagtggtttgagagttggggaaccaagaaactgtctgaagttggtcttcccatggtgacaccaaatcatattatcaaggtttacgaggatgaaccagtgcttcaagcatttaaactgatgaggaaaaagaggattggagggttgccagtgatggacaggggtagcagcacggcaattggtaacataagcctgaaagatgttcaattcctcctaactgctcctgaaatctaccatgattatagatctattacagcaaaagacttcctgacagccattagaagctacttagagaagcatgaaggggcctttccaatgtcaggtgacctgattacatgcaataaggattgcacaatcaaagaattgattcaactgcttgaccatgagaagattcatagggtctacgttgctgacaatgacgggaatctggaaggactaatcacactaagagatatcatctcaaggctagtacacgagcctcgtggctattttggtgatttctttgatggggttctcccaatgcctccaaacagcagggtttgaaatgctttcaggaagaataagttctattccataagtaacaaattgatgtgtttctcatcagagctgacgacaagatcctagcccctttgtaacatcagcacctagcactttgcaagttacttgctctcgttttaccgtaggtgaaactgtgaaattttgtgtaaattttgacgtaataatttggagttttggtcacatttttcttttgaacaagttgatccttaatctcatgctactctgcaattaaaagccagggaacttaacggaaacacaagttggtgccnccgaataccaacatttggtaccctatcacagttcttcttgagtgttcgtttggaacaaccacaattaaaggtnnnnnttataccaccgtgttacaagagggaaattcatactctgtctttttgttttgaacatttgcaacttatgttccaagttttaaaagcataactattaactttaaaccagtaatccaatgcacattatgttttacagctgcaaagtaatccacaatggatgtgcaagcatcttgcttgtgtttgcaccagttcacttgagaaaacaaaaggaaaatcaagtgaaaaactgacttgcattaagttacatatgaggttgtcatatccatgaccaaaagagtttcttatttgcactggaattttctgatccaaaaagcataacactattaacagtttttcttttttaaataaagaatagtaaatgatctggtcagttgaggctttagcccgaatgataacacaactccccgccaaagatcgatcaagttttgattccccctgcctaggtctttcatttatgtcctcctgttataccagagaaaatcaaatcaaatcaatctgaaataaccatcagctttatgtatcagacatgaaataaacttcaactgcagtatttcactggtattacattgtgctatgagctataaaacatacaagagagtgaaaaattaggggaattgtgaacccaaaatggaaaaatgggtgcacagtagttgaggtttcccatatggtagagagggtggtagcagtcttgtccccaaaagtggagaggctgtttgtaggatttaaacacaatctccattcataagacagcaaccttactgttgcacaccaaaggctcattgcaagnagctagtaaagtgcaaatttgtctctattgtaagcaaagaccatcaacatagcaagcatccgtttcatttcctcctctattttcttagttaacatgacacaacatggtccctccccccaaaaataaaagctcaccagtctcccaaggcccaccttcccatgctctatagaaagaaaagttcaaatatgaaattgtaactccagattaatgatagaaaatcagaatttgctggcttagagtttgaggaggaccaattactggatccaagtcctagactcctagtaaactagccatcctggaaggcttactccagaaagacccataaggtctgaggaactgctatgtagaacggattttgtagaaagaaaatgctacaacagtaattgtagaaagaaatttctttgcaaagcagttattgtgagaggggtgagttgtgttcctatctagttattttctgtaaatagtcgtaatttcgtaagatgcaagttagttcttagagtagtgaagaactctctgtaggagccttggctccagatttgtatctaaaacagtgtgctgttggattcaataaaattcctcttttaaattcaaattggtgttctattaattaagtttcatgccttctccatccagtaagataaggctttgggggggggcctcgtagctgactcga

SEQ ID NO: 248 - DNA, 680 bp, Glycine max
aactcctttcccccctcccagttccaacttttctgtgtcttatcgaaaaataattaacttgtcagcattggcgttacagagagagagagagagttattatggtgactatggaagagagtccaaggagcccagaggcgaagctggggttgcgagtggaggatctatgggacattcaggaaccacagctaagtcctgatgagaagttcaatgcttgctttgaaagcatacctgtctctgccttccctccacctccttcaaatcaaggtaccgtttcattctgtattatcataccttatacagttgacttggcggttgaaggaagaaatatgaagagaaagtcgtggattttaatctctcccactaacaaaaactaacaacaaaccgataaaaaaaaactggattatcaccctcatatcacatatcaattctcagcaaggttttaaaaaatagtttgctattgtaattttggctgtcaaggttgttgaagttattacgactgcaattgttgctgtattgactgtatttgtttgcagttttctgcaatatcaagcatcgcgacaaaactgtaactacaatcacaatttaaaagcttggttcttagggatgacaaaaaaaaaaaaaaaaagctttatcgacccgtccactcgagggggggcccgagaccattcgccctaggggag

SEQ ID NO: 249 - DNA, 1808 bp, Glycine max
gggtccttctcttcagttatttcagctacgtgggccccccccccccaattctaaataacttgccagcattggcgttagagagagagttattatggtgactatggaagagagtccaaggagcccagaggcgaagctggggttgcgagtggaggatttatgggacattcaagaaccacagctaagtcctgatgagaagctcaatgcttgctttgaaagcatccctgtctctgccttccctccacctccttcaaatcaagaagttgagataaaatcagatgccaccctagccgaggcagtaaaactacttgcagaacacagcattctcagtgcacctgtggtggatgtagatgcacccgaagatgctagttggattgacagatatataggaatagttgagtttgctggaattgttgtttggattctgcatcagtctgaacccacatctcctaggagtccatccagtggagctgctaatacggctgcagttactggagtagcttatgaagcattaggccttgaatctgctgcgacaacttcaggcaattttttcgaggatctgacttcttctcagctatataagaataccaaggttcgtgacatttcagggtcattccgttgggccccatttctcgctttggagagatcaaactcatttttgaccatgcttttgctgctttccaagtacaagatgaagagtattcctgtggtggacttgggtgctggtcgaattgacaacattattacacagtcttctgtaattcacatgttggcagaatgtgctggtcttcagtggtttgagagttggggaaccaagaaactttctgaagttggtcttcccatggtgacaccaaatcatattatcaaggtttatgaggatgaaccagtgcttcaagcatttaaactgatgaggaaaaagaggattggagggttgccagtgatggaaaggggtggcagcagggcaattggtaacataagcctgcaagatgttcaattcctcctaactgctcctgaaatctaccatgattatagatctattacagcaaaagacttcctgacagccgttagaagctacttagagaagcatgaaggggcctttccaatgtcaggtgacctgattacatgcaataagaattgcacaatcaaagaattgattcaactgcttgaccatgagaagaatcatagggtctacgttgctgacaatgaagggaatctagaaggactaatcacactaagagatatcatatcaaggctagtacatgaaccccgtggctattttggcgatttctttgatggggttctcccgatgcctccaaacagcagggtttgacatgcatccaggaagaataacttctattccatcagtaacaaattgatgtgtgtttctcataagagctgacaacaagatcttagggcctttgtaacaagcacttagtactttgcaaattactagctctcgtattaatgtaggtgaaactgtgaaatgtgaaattttgtgtaaatttttacataataatcgggagttttggttgcatttttcttttgaaaaaaaaaaaaaaaaaaaaaaaaaaaaaaaaaaaaaaaaagacttgcctttcaacaagaacaaaaaaaaaaaaaaaaaaaaaacctgggggggggccccgggccccattttccctttatggggggtaatttaccccccccccctggcccgtgtttaaaaacggggggaatgggaaaaccctgggggtccccaatttaattgccttggaggacttcccccttttccccggtgggctaaaaaggaaaaaggccccccccaatccccc

SEQ ID NO: 250 - DNA, 2144 bp, Glycine max
atttatttttctttgaacccattcccatccgcaaactcattgagccagctgcgtttgttccttcttcagttgggtttgattgcgagtgagtgacgatgggcgcgagcagcgaccctacccaagacggttccgacgagcagcagaagcgttcggagatctacacctacgaggccccctggcacatctacgccatgaactggagcgtccgccgcgacaagaagtaccgcctggccatcgcttccctcctggagcagtatccgaaccgcgtggagatcgtccagctcgacgactccaacggcgagatccgatccgatccctccctctccttcgagcatccctaccctcccaccaaatccatcttcatccccgacaaggactgccaccgccccgacctcctcgccacctcctccgacttcctccgcgtctggcacatctccgaatcctccgttgaactcaagtccctcctcaacggcaacaagaacagcgagtactgcggccccctcacctccttcgactggaacgaagccgagcccagaagaatcggcacctccagcatcgacaccacctgcaccatctgggacattgagaaggaaaccgtagacacgcaactcattgcgcacgataaagaggtctacgacatcgcctggggcggcgtcggagtcttcgcctccgtctccgccgacggctccgttagggttttcgatctccgcgacaaggagcactccactataatctacgagagctcggagcctgacacgcctctggtgcgtctcgggtggaacaagcaggacccgaggtacatggcaacgatcatcatggacagtgcgaaggtggtggtgttggacattcgcttccccacgctccctgtggtggagctgcagcggcaccaggcgagcgtgaacgcggttgcgtgggccccgcatagctcgtgccatatatgcaccgccggggatgattcgcaggcgctgatttgggacctttcttccatgggtcaacccgtggagggcgggcttgacccgattcttgcgtacactgcgggtgcggagattgagcagcttcagtggtcgtcttcgcagcctgattgggtcgctattgctttctccaccaagcttcagattcttagggtttgaaattttattaatgattactcatcacttctgcttctgttccctgtatgtgcatgcgaaaattggggatacttcagatttgaagacacagttgtattgttgtgtcttttattgttgaaaccaatgttaaccttggtaatttctggctttgggacgaaagtagttttgattagggtttagggcgtaaaactagccttagtttgtttctgctaagttagtctgcaagtattttaaagaaattttccgtcacatcaatattggcttcaatgtcgaggtttttggattatctgtggctgcattgtgaaggattgaggcgaaactgcgactgatattttgcagtttcgccgcaattgcgggaaattgtggacaaatatggctttagagagtctaaaaccttgatattgttgtttgtcgcattcttgtttactaggaaatggaatgaccttgtatgtaaatgtttttgcttcggttttgtccatgtttcctatgtgactctttaactcaaagaaattcacttatgatgcaccacaactgtccacaagattcgtgttgtgtttgatgctgtctaaaaccttgatgttgtttggcgcattcttgtttgtcgcatttgttgcattcttgtttaataggaaatagcctttgtatgtaaatgttgtgacttttgtccatgtttccactgtgcctcattaactcaaagaaattcacttatgatgtgccacaagggttgtgttgtgtgtttgacattgactatttgtggtttggattttgatggtttctgcctgagctgtccggtgattgaatgttatggtgcagatccattgtggctgactccacctagtgggaaaaggtttggttcttgttggtgtttgttgcttaagctgttttgtgttggtttgtctggatgatggatgcacttgtgtgtgtgtgtggatgctctgatatcttaattgtttaatcttttggggggggggggctgattacgagaaagctgatccaagagtggtgtcattggagtac

SEQ ID NO: 251 - DNA, 1104 bp, Glycine max
  misc_feature (1077)..(1077): n is a, c, g, or t
  misc_feature (1079)..(1081): n is a, c, g, or t
actcagaatcttagaatatcaatcactccgattcctgttggttgttctctcaagtctcaactcccaccccccctctttgacttttctatcagaagagcttgttggagttgaaaactgagaagaaaacatggcagcacaagggcctgtggtagtagcatcacttctaattttctgtttagctggaagttgctatgggaaggttcacttctcttccttgaaaagaacccttgatgtcactgcttcccccaagcaggaacaagttctggaggctggattagacaaaatcacagtgacatgggcattgaacaagaccttacccgcggggacagactctgcctacaaaaccataaagctgaagctatgctacgcgcccattagccaaaaggaccgcgcgtggagaaagaccgaggacgagctgaaaagggacaagacctgccagcacaagatcgtggccaaaccctacgacgcttccaacaagaccgtgcagaggttcgagtggctggtcgagcgcgacgtgcccaaagccacgtactttgtacgcgcctacgcgttcgactccaacgacgaggaagtggcttacggccagaccaccgacgccaagaagagcaccaacttgttcgagatcaacgctgtcagcgggcgccacgcctcccttgacatctgctccatttgcttcagtgctttctccgtcgtgtccctctttgtcttcttctatattgaaaagagaaagggaaaggcttcttcctcaaagtgatgattattgaatcacaccagaaaaacgtgccaggtttacatttcatggtcattaataaatcatgagccacctgtttttccctcccataatagtcgcttatctttagtacaactaaatttcacgtcaacattgtgaagcatgatgtccccctaaagctgtaatatgagggaaagagcagatattttatgtatgtgattaggacatgactattagtgtaaaattacttgctgcatgtttgtttatcatgatgcatgcttcttattaatctttacataatacaaagtgttatttatcctttttcctaaaaaaaaaaaaaaaaaaangnnnaaaaaaaaaaaaaaaaaaaaaaa

SEQ ID NO: 252 - DNA, 1319 bp, Glycine max
  misc_feature (21)..(21): n is a, c, g, or t
  misc_feature (1288)..(1288): n is a, c, g, or t
  misc_feature (1307)..(1308): n is a, c, g, or t
tcgagtcagctacgtaggccnccccccccatttttaatttttccattcgcaagagcactaagagagcgtcatcttcgttatgtcgcgacagagatccagaagagtcgaactacctcccgctcaggagaatattgaaaaattggagaaggttgtaaacgatggaaattattatggagctcagcaaatgtacaaatccgttagtgccagatatgtttctgctcagaggtactgtgaagcattagatatcctacattcaggagcgtgcattcaattgtctcatgggcaggttacctgtggagcagagctagctctattgtttgtggagacattagggaaagggaaaattccttacaatgaggaaattcttgaacgtctcgacaaaatttacaaatcatttcctcgggtttcattgccacaaaacctatgggatgtcgatgacatgcagcagctttctgaaaacattggaagtgcaaagacacgtgttgagggctgctcctcattcttaaaagctgctatcaagtggtctgccggaaatggagtaaataagaatggatctccagagctgcacatcatgctagctgagtacatattttctgaaagtcctgaggtggatatggctaaagtgacacatcattttgtgagaggaaataatccaaagaagtttgcttctactctagtgagttttttgggcaagtgttatcctggtgaagatgatttggccattgctcgggcagttttaaggtacttgtcttcaggtaatttgaaagatgcgaacatactaatggaagagataaagaagcaaactgaatcggctgaggttgcatttcctaagacagagttgatgcaatttatcgcatatcttttgcaaacgttggagagagatgctttgcctctttttagtatgttgagagcaaattttaagccaagtattgagagggagcctgcgttcaatgagatgctagatgatattgcggagaggttctttggagtacagcgaaggaaccccatgggaatgtttggagatatattcaagttgatgggagctgagtaatgacaatcattatggagacactaccagatagaacagcaacttcaacagaacgttcaaataatttttcttttcttttttgttaatgatagagcaaattctcctcattgaagaaaatctatgctatctcgtgatttgtaaatgctaatttaacaattttgctaggtacccgtttcgatttcttgcatattaaaatattttaatattccgcttcaaaaaaaaaaaaaaaaaagtcttaanctgaaccaaattgatgtannctatacaataa

SEQ ID NO: 253 - DNA, 1763 bp, Glycine max
ctagcgccaggattatgtggtgcatatccaccaatcccctgtctttgtccctcacctcataatccttactatcaccactttccccccgccacgcttatttctaattgatccttttcctgtcttgttttcatgacataaactatcatcaactgttgctttccattttggctataattccacaaaatgtgccattcattgcaagtgtaatattactagcatttccatatatcagtccatggcctccttaatgctcaatggagctcatcaaaatccaaacctcattagtggcatagctccaaatggccttaactttcacaacaagtgtttattccaaaagggtgtgctgtctcatggtaacaagttaagggtggtcagaaaaaacttcactcccaaaggcagcatgtcagcatcatcatcatcatcatctaggcctggttctcagccaaggttcatccagcacaagaaggaggcattttggttctacaggtttctctctattgtgtatgaccacatcataaacccggggcactggaccgaagacatgagagacgaggcactggagcctgctgatctctacaaccgcaacctgagagtggtggatgttggaggtggaactggcttcaccactcttggtatagtgaagcatgtggacgccaaaaacgttacaattctcgaccagtcgccacaccagctcgccaaggctaagcagaaggagcccttgaaagaatgcaagattgttgaaggggatgctgaagatcttccatttccaactgattatgctgatagatatgtttctgctggaagtattgaatactggccagatccgcagcgtggcattacggaagcatacagagtgctaaggataggaggcatagcttgtgtgattggtcctgtacacccaacattttggctgtctaggttctttgcagatgtgtggatgctcttccccaaggaggaagagtacattgaatggtttaagaaggctggtttcaaagatgttaagctcaaaaggattggtccaaaatggtatcgtggggtgcgcaggcacggccttatcatgggttgctcagtcacaggtgtgaagcctttgtctggagactctcccctccagcttggtcccaaggtagaggatgtaaagaagcctgtaaatccatttgtgtttctttatcggttcattcttggtacaattgcatccacttacttcgtactagtgccaatttacatgtggatcaaagacaaaattgttccaaggggcatgcccatctaagtttggagaaagtaactcgggtaggaaggtcaagttttccctccacacatctctaaacgactgtttgtgaaggataataattcaatcttgaatctttccatcttgccaacatagtaggaaagagttacttaaggatgaaatgcttcaaaaccattagcttagttttgtgccattactagcttcactatgttttgtatttgtcattgttgctttggcagagaaatatagaatgtgtgttggcagccaattgttcaatgaaccatggcaggatcatcaaaatgttgtgcttcttttgctttgctttgtaccaaatggacaagacaaggtaaccatgacaacattcaaatatgtttgttttagcttttatttgtatatgtgcgttggtggcgagttttaactgaaaaaaaaaaaaaaaatttaatccccaaatacatttttaatttatttacccttgacaagtattgttcaatgtttaagcacgaattatcgttttcac

SEQ ID NO: 254 - DNA, 901 bp, Glycine max
ctcgagccgcggcacagagcctagtcttgtccctggtgaggaaagagcggcatggaagtagcgaaagaccctaactcacaggcggattcagattcggaactggaactctacaccatcccaagctcttcaagatggttcgcgtgggaagaaattcacgaaacggagagagcagcattcaaggaatacttcgacggaagctcgatatcgcgaagcccgaagatatacaaagagtaccgagacttcatcatcaacaagtacagagaagagccctccagaaggctcacattcagcgaggttcgaaagtcgctcgtgggagacgtcacgttccttcacaaggtcttcctcttcttggagcattgggccttgatcaactacggcaccgcagaggatgtggaggaggaccattgcaaggttcgcttcgaagaaggcgcccccagtgggattcgagtcgccgccacgcccaattccttgaagcctatgctgctgcctcgcaatgggaagagtgccgccaatgccactggggcttctctcaaattgccgcctctggcctcttactctgatgtttatggtgatttgattaggcagaaagagggcaactgtgccctctgcgctcaccaatgtggttctggacattaccgatgtacacaggataattttattatttgtgcaaattgtttcaaaagtgggaattatggggagaaaaggtccgcagaggattttgtatttagtgagtcaagtgaaaatagtgtcaaacatgacactgtctggactgacgctgaaactcttcttcttttagaatctgctttgaagcatggggatgattggggagcatgttgctccaagtgttcaaactaagaccaaacctcatgtgatttcgaatctcattgagctgcccataggg

SEQ ID NO: 255 - DNA, 1405 bp, Glycine max
tcagctacgtaggccccccccccattttgctggtagcattattagaagactattggttacaatacttactgatggtattttcgtataggctttaagacttctctgtgagtgattgagttcaccaattgccagtgcaatatactatattccaaacattgtttatattttgagaaaataggctatgcactaacagacagtgtaaaacagttttatactgtcatccaatcacaaccaaccatgtatggtaagtttgttgacttttatgataactagccctaaaagtcatatcaatggtgattggtgattggttacactgttggtacatatgatcattaaactcttatattttaattgtttgaaactcttgtgaagatacttcttagtggatggcttcgaatatgcaagcgccaacgaagagaacaagagatgatggaatatgacgtcgttgaggaagtcatctatggctttgaatctggtattttgtttggttttgtttacacctaaatgcaggatgtcatctgtaatatcaaagatgggatttctattcctagagcaaggctttcccaagctgttggttcctatgtgcatcatgatcagcgtgtgttgtagtggcacaggcatttactaccagacacgtggtctaaagcatgggagggctattgtagtttccacatgtgcagctgtggcctcaattttgactggtgttcttgctgggatgcttgctttgggtgaacgacttccttcggagccaaaagctcgcttggcacttcttcttggatggctacttattattgttggtgtgattttacttgttggttctacacggttagtaagattcctttcttgttcttcacgacaaaaaagaagcaatgtggagaagaattttggccttagaggagcctcttcttcccgtgtgagagaaccaagtccaagtgctgtcattcaagcagcaacattaaatcatttactatcatcatcttccaaagaaaaagcttgagttgacatgagctggataatgttccttcatccccaggatttctaagcattaagttgctttctaatccgtctgccaaggccaattctgtatattatagtggcgcttcttcagagggcatgacattttggtgatcattcattgcttctggctcacacattttggatgaaatgtttgttaacttcagatgccaccttgtaaaaactattcatgaacttacactatttttgctttcaaggattgtatatgacagtgatgatagcataccaacatacaaaatttgttttacttgcacttaaacaaattggtaaacagtttattcgtaaaaaaaaaaaaaaaaaaccaaaagctgtggcttttgttagaagagaaatgataataaccccccctactattgactaatatttgttg

SEQ ID NO: 256 - DNA, 1038 bp, Glycine max
ataatgaatttacagagttaccctttgcgaactatgaaaggataatgcaaatttgatagagagtttatcgagtggccctgcaggtggaatctcaatggccacgcttagcttcggcatcgccacgacatgtctgagtgctgccgctgattatcgtagaagaagcaactggaaatggagcagacccagaattgtgtgtgttggatgggacccggaaggcgtgcttggtccaccccaaactgggcacctcgccaggttcgagtttaagaggcgcctcgagagagacgcagatgcccgcgaagccttccaacgtcaagtccgtgaagagaaagaacgccgtcaatcccttcgacaatctcgtcctcttcccgatactccgcaagacctcattgaatacttccttgacactgaagctcaggagattgagtttgagattgcaagaatgagaccaagattgaatgaggaattctttgcgcaactcaaattcgagttaggacagcttcgattcgctgttaacaaaacacagctcatggaggacagacagattgagctggaggctctagagaaagccatactagaaggattagaagcctatgataagatgcaaggtgaactcgtaaaagccagggcaagcctaaccaaaatcttgacatcaaaggatgccaaagcaactttgctggagatggttgaaaagaatgaaattaatagatctttattggcacttctagatgaaaacatagcaagtgcacaaaagggcaaccagaaacaggctgcagaatatatggagaagctccgcggggctgttcttcggtacattacagtttagtgcatatagtacgtttcttcccactttactattaagttttgtgaaaattgtgctgttgatcagaaagacaatactaaagaactgggatgttgtggtagcagatttctccactgtaatatcagaagtatcaaattgtacattttgatacgacttgtgcatcttttgttgaaatttttatgaaaattgattttaaaaaaaaaaaaaaaaaacctcgt

SEQ ID NO: 257 - DNA, 2212 bp, Glycine max
  misc_feature (2205)..(2207): n is a, c, g, or t
aatctgctaggagggaattcgagtctccccaaattttctcatctaacgttaaagcgacaacacatgtttctctcattcggtgctcaattctccttcgtcttctgcactgcaatttgcagccactaacagtttaacaatcattctcaaaccccctcacaggtatgccttcattgaatgttttgcttttgggtagttgaaaggtaaccaggtgctgctttattcttgactgctcgagaaggtttctcaggagttcatcttcaatattctccagtttactttaccaaatccagggaatgctgaaagatgtggttgaaagtaaagagttccctctctcaggttaatgaggttgtagctccatctgaggtagccttattaatccttgatgagattggatgtttagatcactgccaacatcaattatatgctcatttgcctgaggtggctggaaatcttagcaattgtttgatttcaaaacgggatgtttgtgaagatggatgagctttgagcatctttggaatagtttactgctttctggtcacataagcacctgtatttagtgtatacttagtatattatcctattggtagtagcattggttgtatgctaaaggagtagttacagtaaatggagcagaagggaagtgtgcttatgcaaagatatgaacttgggagattattaggccaaggaacctttgctaaggtctaccatgctaggaaccttataactggcatgagtgtggccattaaggtagttgataaagaaaagattttgaaggttggaatgattgatcagattaagcgtgaaatttcggtgatgagattaatcagacatccacatgtggttgagctttatgaggtaatggccagtaaaaccaaaatttactttgtcatggaacatgcaaaaggtggtgagctcttcaacaaggtagtcaaaggaaggctcaaggtggatgttgctcggaaatattttcagcaactgattagtgcagttgactactgccatagcaggggtgtgtgtcatcgagatttaaaacccgaaaatctactattggatgaaaatgagaatttgaaggtttctgactttgggttgagtgcacttgctgaatctaagtgccaagatggattgctccatactacatgtggtacccctgcctatgttgctccggaagtgataaacagaaagggctatgatgggattaaagctgatatatggtcatgtggggtaatcttgtatgttctattggctggtcatcttccattccaggatacaaatctgatggagatgtacaggaagattggtagaggggaattcaaatttcctaaatggtttgcaccggatgttcgccggtttttgtccagaatattggatccaaacccaaaggccaggatatcaatggccaagattatggaaagttcttggtttaaaaaggggttggagaagcctgctattactgtgaccgaaaacgaagagctagctccccttgatgctgatggaatatttgaagcatgcgaaaatgatggtcctattgccgagcctaagcaagaacaggccaagccttgtaacttaaatgcttttgatattatctccttctcaactggttttgatttatctggtttgttcgaggacacttttctcaagaaagagacacggtttatgtcaaaaaagcctgcctcaatcatagtcttgaagttggaagaaatttgtaagcggctttgcttgaaagtaaagaagaaagatggaggcttgctcaaattggaaggttccaaggaaggcaggaaaggaactttgggtgttgatgctgagatttttgagattaccccacacttccatatggtggaacttagaaagtccaatggtgacaccatggagtaccagaagctttttaaacaggatataagaccagcgcttaaggacattgtttggacctggcaaggagaaaaaccacagcaagagcaagagcaacatgaagtagtccaggaagagcaccaaccttctcatactgcttagtttcatgatcaatatttcaccccttggtttttgtatgcactgtgcttcttttgtcattatcttagtcaagtgcttaattttaataggactcatagaataatgtggctggttcagcctcctcttgtctgatggatacttgaacaattgtgtacctaaattgcaaatttcaccaatttgggtgttttattccatccttcnnngtctt

SEQ ID NO: 258 - DNA, 2424 bp, Glycine max
  misc_feature (2402)..(2403): n is a, c, g, or t
  misc_feature (2417)..(2423): n is a, c, g, or t
ccacgcgtccgggaaggtgttagaatattctcttatgctcttatttgttaaacttgacagcaacttctctgtcttttcttcctccttcttagttataacgcctctaccctcaccattcctctcattgcaccataaaacaaaaaagaacacaggaaaaacagagagagagaaatcttctcaaaccatcttgcaggtgtgtctttcattgtatgttctactgctgggtaattggaaggctaaccaggagctgcttcattcctcaattattcttcaaactttctaagaagttcatattcttcagtgttctctagtgtcatcaccaaaatcagggaatgctgaaagatgtgcttgatagttaagaattccttcactgaggctaatgagtccgtgcctccatctgagctagccttgttcaaccttgatgacattggatgtttagtccactgcccatatctattttgtgctcgagcgactgaggtgcccagaaatctcagccattgtacaatttccaaacatgatgtttgtgaagacggttgagctttgaatttcttgagtggcagtttcctgcttctggtcgcgtgattgcctgtactgcattggttttcacaaaaacgtgtttctagaaatggagcaaaaaggaggtgtgcttatgcaacgatatgaactggggagattattaggccaaggaacctttgcgaaggtttaccatgctagaaacatcataactggcatgagtgtggccattaagattattgataaggagaagattctgaaagttgggatgattgatcagattaagcgtgaaatttcagtgatgaggctaatcaggcatccacatgtggttgagctttatgaggtaatggccagcaaaaccaaaatttactttgtcatggagtatgtaaaaggcggtgagctcttccacaaggtgtccaaaggaaagctcaagcaggatgatgctaggagatattttccgcgtctgctccgtgcgcttgcccccccccatagcagaggcgtgtgccatcgcgatctgaaaccagaaaatcttctactggatgaaaacgggaatttgaaggtcacagatttcgggttaagtgcccttgctgaaactaagcaccaagatggattactccatactacatgtggtacccctgcctatggtgctccagaagtgataaacagaaggggttatgatggagccaaagctgatatatgggcatgtggggtgcccccccatgttctattggctggttttcttccatttagagactctaatctgatggagatgtacaggaagattggcaggggagaattcaaatttcctaactggtttgcaccggatgtacgcagattgctgtcgaaaatcttggatccaaacccaaagacaaggatatcaatggccaaaattatggaaagttcttggttcaaaaaggggttagagaagcctaccattactcagaatgaagatgaagaactggctcctctcgatgctgatggagtatttggagcttgtgagaatggagatcctattgaaccggcaaaaaactcaaagccttgtaataatttaaatgcttttgacatcatctcctattcctcgggttttgacttgtctggtttgttcgaggagaccgatcgaaagaaagaagagcggtttacatccgacaagccagcctcaatcatcatctccaagttggaagaaatttgcaggcgtcttcggctgaaagtgaaaaagaaagatgggggtttgttcaagttggaaggttccaaggaaggaagaaaagggccattgggtatcgatgcagagatttttgagatcaccccagtcttccatctggttgagttaaaaaaatctagtggagatacattggagtaccaaaagcttttgaaacaggaagttaggcctgcacttaaggacattgtttggaactggcaaggagaacaaccacaaccattgcaacatggagtggtgcagaaagaggaacaaccttcttatcctggcatatcagaggttgtgccacaatcaactgcgtaatgaatcttgtccctagattgggttttgtattgtagtatatgctttatgttcttggtcaagtgcacactgtcatgttgatcgttgtcgcggaataaggtgggtggttaagcatgtatggatttacttgctcagcttgtttagttagtttcttatttgaccatttgggtcttctgttgttatctctgtattgagtctatcgactatgttagaaatggcattagcatttttaaaatggcatcagaatctgcttgagcatgtcttggatacaatgcttcaggatcccttatttataatgccagtgaaaaacacggtcaattttaatttataaaattcttttaaaattattaatttcaaggatcttgtaatgtttttnnccttcaaaaattgnnnnnnng

SEQ ID NO: 259 - DNA, 1028 bp, Glycine max
cgggggagacccaggcttgcgccacgcgtccggtcccccgccgttcaacccacccttaacgctttttcacggaggccaccgtcgtctctgaaagtaagcccttccctttcatcgttcacagcggcgcctctagttttctcactccgcaaccaaacgacacccatcttcgtgttgtctcccaaaaacgacaccgccgaagcagaaccctaatactttgcttcaacgatgcagcacgacgaggtcatatggcaagttatcaggcacaaccattgcagttacatggccaaaattgcgacggggaatttttgtagaaacccttacaacgtgactggggtttgtaaccgaagctcgtgccctttggctaatagtcgctatgccaccattcgcgacgacaatggagtgttttacctttacatgaaaactattgaaagagctcatatgccgaaagatttgtgggaaagagtaaagcttcctaggaattacgagaaggcacttgaaatcatagataaacatctgatgtattggcccaaacttcttatacacaagataaagcaacgtttgaccaaaatgacacagatgcggatacgtatgaggaaacttgctttgaagacaagggagaaaataatgacaactccaaggaaagagaaaaagagagaggctcgaagagaagagaaggccgaaaaagcagctttgttagaaaagtctattgaaaaagagctattagaacgccttcaaaaaggagtttatcaacaaagtgatatatacaattatcctcttgaagagtacaataaagttcttgatatggagaaacttcaaattgctgatgaagaagaggatgaagaggaaccagaggtagaatatgtagaaggttatgatgaacttgaagaggaagaagacatggaggattttggtggttttgcaactctcaagtctcagggtgattttgacgatgatgaaaatgctgacagctcggatgatgaagaggaagaagcaattgatcagagtagagcaaaaaggaaaatggcatt

SEQ ID NO: 260 - DNA, 1742 bp, Glycine max
cccccccctcagctacgtaggcccccccccccactgaaagagaaaaataatgggtattgttgttggctgttcttgttctgctcctcctcatcctagtcatcatcttctccttcttggtttcttcttgacccttcttctacaaacgtttgaggttgaacccagcaccttcaattacacaaggtataggaaagtcagcagcttgagactccaaaggattcagagacacttggacaacattaacaagcctccggtcctcaccatagagagtccagatggtgatctcatagattgtgtccataaaagaaaacaaccagctttagatcacccccttttaaagaatcacaagattcagaaagcaccaacgaagatgccaaggggtatgaagagagtagaagagaaagagatagaaattaggagtgcatggcaaatgtggcataaaaatggaacgcgctgtccaaagggaacggttccgatacggcggagcacggtgcatgacgtgttgagagcaaagtctttgtttgactttggaaagaagcaacgacggtttcgtcttactgggcgcagtgacgcccccgatgtagtcagcggcaatggccatgagcatgcgatcgcatacactggatcatcacaggaggtttacggtgcaaaggcaacaataaatgtgtgggaaccttcgatccaagtagtcaacgagttcagtctctctcaaatttggattctttctggctcctttgatggcacagatctcaacagcattgaagctggatggcagtcaggtcagtccggagctttatggtgacagcaggcccagattattcacttactggacgagtgactcatatcaagcaaccggatgctacaaccttctttgtgcgggttttgtgcaaacaaatggcaggatagccattggagctgccatttcccccatctcatcttatgaatccaaccaatatgacatcaccatcctaatttggaaggacccgaaagtagggaattggtggatgagttttggtgatggcacattggtagggtactggccagaagggttattcacacacttggccacacacgctaccatggtggagtggggtggcgaagtggttaacacacgtgccaatggccaacacacctcaacccaaatgggctcgggccactttgctaatgatggttttggaaaatcaagctattttcgtaatcttgagattgtagacaccgacaatagtcttagctcggtgcacaatatcttaacacttgctgagaacaccaattgttatgacatcaagagctcctatagtaatgaatggggcacatacttctattatggtgggccaggcaacaatcctctgtgcccataacgcatgatatcatatcatatttaatattcttcttcatcatgacgtacctagctttaatttggttctagcactattgtttttgagttagttcacgtccaagtaataccttcgtgttgtcgttgcattctttgcttgtacgtaaatatagaattattgttgtagagccatttccgttcttgtttctgccttcacttttttgttttgtttcctttggatggaagggatcgaaggaaaatgtatgtggttgacgttgtagacttgtagtcaataagcaattaaggaatatcaggacacatgtattgtatatggatgcataaacacgattggaaaatggctagatattattgaatggctttcatctaaaaaaagaaaaaaaaaaaaaaaaaa

SEQ ID NO: 261 - DNA, 816 bp, Glycine max
ggctcgagcacaactcattctcaaatattcattttgtcaccaatcacatctcatttttctaaattcttgtttacacactctcattaatttattacattccatattgtaattaattcttcgtacgtatccatgaagagacagagagatttcaaggggtttgagagcatagatttggcaaattgtctaatgatgctctctcatccccaacaaaatgagaaactacttcaaaaaaaaattgaggctgtggaatttgagtgcaagacatgcaaccgcaaattctcttcctttcaagcattgggtggccatagggctagccacaaaaggtcgaaacttgagggagatcatgaactcaaagcacatgctatatctctaagtttggcaaacaaacccaaaatgcacgagtgttccatttgtggacaagaattctcattgggacaagcacttgggggtcacatgagaaggcacagaacaaccatccacgaagatttttcttcaataaaacaggttattacacaaatgcctgttttgaaaagatcgaatagcacgagggtggttacgtgcttggacttgaacctaacaccgcttgagaacgacttgaagttgttgtttggaaagatggcaccgaatgctggtgcctttgcctgattctttattgttatcagttttgtgatcaacgctgatttgtatttagttttttttttttctttttcggggtgagaatttgtatttagttagtagtcctgtttttgaagtcttgtagtgtattctttaattttttttaacgtgagaattggtttttattttcttcacaatcaa

SEQ ID NO: 262 - DNA, 2020 bp, Glycine max
cttttgcgtgagactctcttatactctctctgttgtgtttctctctccaccactccttcttatcactctcttcctcataatattgagatctctctcagttagttccctttgtgaaagcacatacatataaagtcttctcctttgtttggccgacaaatctatccaaagggagagataccccattacccaccctattctctcaagataagagctttttccccccctttctgtctctattttccatgtattatgaggcggcataaagggtcgtttatcgtgactgtgaagatcactttttgagcgtgttgctgtggattcgggttttcctatcccccgccgccgcccacgcggccggaacaaacatgactggaagtaatgaagtcaacctcagggaatctaagagtgttgttccactcaacacttgggtgcttatctccaatttcaagctggcttacaatctactaaggcgtgccgacggaacgttcaatcgagagttggcggaattcctggaccgcaaggtccctgctaatgcaattcctgttgatggtgtattttcttttgatcatgttgaacgaagcaccgggctcttcaatcgggtgtatcaactagctcctgaaaacatggggcggtttatagagctggagaagcccttgagcaccacagagatagttcctgttataattttcttccatggtggaagcttctctcattcatctgctaacagtgctatctatgacaccttctgccgccgccttgtgaacaattgcaaggctgtggtggtttctgtgaattacaggcgatcaccggaatatcggtatccttgtgcctatgatgatggctggtctgcacttaactgggttaaatcaaggacatggcttcagagtggaaaggattccaaggttcatgtgtacttggctggtgatagttcaggtggtaacattgctcatcacgtggctgtgagggctgctgaggaagatattgaggtgctaggtaatattcttcttcacccactgtttggtggggagaagcgaaccgaatcggagacgaaactggatgggaagtactttgtgaggctgcaggaccgtgactggtattggagagcttttctccctgaagggaccgatcgagaccatccggcttgtaacccatttggccccaagggtaaaaatcttgaagggctcaagtttcccaaaagtcttgtttgtgtggctggtttggatcttctccaagattggcaactggaatatgtggaaggtctcaagaattgtggccaagatgtcaaacttctatacctaaaggaggcaactattggtttctacttcttgcctaataatgatcatttctataccctcatggaggagataaagaacttcgtcaaccctaactgttaatatactatttaaccttacttaaaggatcccatacataactaaaagcctgacatttcacctgggtaatgtttcttttttttatttttgtatctttttttcttttcttttcccaactttataggggtggtgtgtagttatataaatgtgtagtgctacttactgtgataacatctatggtggtaaatctggagctttctgtgatcggtgtggtctactgcttcctgtgctgtgttcatatctttttgaagggtagcaccagtttcagcagtttgaagtgccagagttcagttctttagtggggtttggctgaagcaacgtaaatgaagcttgccctatttaactttttcaacctcaatagtaggaggaggggagatacaagatatggcttggcttatcgctttggttcagtgaatgcatttatgttgtataacatatattattgactgggaactggagcaaatgccatcctgttatgaacttttatgtctatatataaatgtcttgtttgtttacttttcagttagaattttcatcaggaagaagctaaggttgtaatatatttcatcctgttaaattaaattaagcagtttcatcttctaaaaaaaaaaaaaaaaagcccgccgccgact

SEQ ID NO: 263 - DNA, 1766 bp, Glycine max
catgcacccgtgggaatcagctacgcccaaacattctcaaaccaaagccatgaccaatatggaatccaccacacctatactcactcctctagtgctcctcctcctcttctctctagccaaagggcttcacaaccccaaatgtgatgctgcctatcaacatgaccatgatggctcaaccctccaagtgttccatgtgttcagcccttgttccccattcaggccctcaaaaccaatgtcatgggaagagagtgtcctacagctacaagccaaggaccaagccaggatgcagtacctttctaacttggtggctagaagatccattgtcccaattgcctcagggagacaaatcacacagagccctacatacatagtgagggccaagtttggtaccccagcacagaccctcctcttggccatggacactagcaatgatgctgcctgggtcccttgcactgcctgtgttggttgctcaacaaccacaccctttgctcctcccaagtccaccactttcaagaaagttggatgtggtgcttctcagtgcaaacaggtacggaaccccacttgcgacggaagcgcgtgtgcattcaacttcacctatggcacttcctctgtggcagctagccttgtccaagacacagtgaccctagccactgacccagtcccagcctacacctttgggtgcattcaaaaggccacagggagctcactgccaccacaagggctattgggcctgggccgaggcccattatcactcttggcccaaacccaaaaactctaccaatctaccttctcttattgcttgcccagctttaaaacactcaactttagtgggtcactgagacttgggcccgtggcccagcccaagaggatcaagtttacccctcttctcaaaaatcctagaagatcttcactttactatgtgaatttggtggctattagagttggccggagaattgtggatattccaccggaggctctagcattcaaccctaacaccggcgcaggcaccgtttttgattcgggtacggtattcacccggctggttgaaccggcttacaccgccgtccggaacgagttccggcgacgagtttctgttcacaagaaactcaccgtgacaagtctaggagggtttgacacatgctacacagtcccaatagttgcaccaacaataacattcatgttttccggcatgaacgtgacactcccaccggacaacatcctcatacatagcaccgccggcagcgtcacgtgcttggccatggcaccggcaccggacaatgtgaactcggtgctgaacgtgatcgccaacatgcaacagcaaaaccaccgtgtgctcttcgacgtgcccaactcaaggcttggtgttgctcgtgagctttgcacctaatacataataataagtggttcttaggttaagaattttcatgacttgtgggtacaataataaaaatcgtgtcgaattggcattgcaaagttactcctatttgggaattggtatttgatatgggttgggttttggcattgctaagagtttattgctaactatttagtagaagatagtgagctaaatgtttaaggcattgcatgtaagtctccaagtttcaagttatatatgtagtagtatgaaaagaagttatatttgtagctttgtaatggtatgtgtcacgggttcatatatatgtagcaatcccttgtgttgtttattgaagttgattgaattgataatgacttcacattgtggtacaagttcccgggctatatagcat

SEQ ID NO: 264 - DNA, 1439 bp, Glycine max
tcgagtcagctacgttggccccccccccagattgtcatgaaatgttcatatgattcctttcctctaggttgttttgtattttgggagatttacctttcctttctaccttcaaaacatggagtggtatcctgaataattgtctccttttctgtcccaaattttaagaggaaacataattatatgagaatcatgttccaataaatgatgataagatggtcaattttaagacaaaattggagtcaaaatgctacagaactaatggaccatgcatgtatggtcactttcattttgctcgacatgtctttttgaatagcattccctgttttcgagatttaaataaaatataattattgtcacactgcacctcttttctaaaaaaatgaataaaggaaaatagtgatgtcaaaaattcaagaaggtagcgaataacaccactagtactagttaaagagataattctagatttctaattagaataatcttacaacattttctatacactttttttttatcatatctctaaattagaaattattgttaaactttgttatataaaaagtgttactattaaaattatatcacacaacaattaacaatttcactaatgccttttcattttcattttgattttcttgacaaatattattaggtacggtattcacccgactggttgaaccggcctacaacgccgtccgaaatgagttccggcgacgaattgccgttcacaagaaactcactgtgacaagcctaggagggtttgacacatgctacacagccccaatagttgcaccaacaataacattcatgttctccggcatgaatgtgacactcccaccggacaacatcctcatacacagcacggctggcagcgtcacgtgcttggccatggcaccggcgccagacaacgtgaactcggtgttgaacgtgatcgccaacatgcaacaacaaaaccaccgtgtgctcttcgacgtgcccaactcaaggcttggtgttgctcgtgagctttgcacttaatacataataatatgtgattcttaggtcaagaattttcatgatttgtgggtacaataataatcgtgtcgaattggcattgcaagttactcctatttgggaattcgtatttgatctacatatcatatgggttggggttttggcattgctaagagtttatttgctgactatatagtagaagatagagctacatgtctaaggcattgcatgtaagtttccaagtttgaagttatatttgtagtagtatgaaaaagaagaagttatatttgtagctttgtaatgtatgtgtcacgggttcatatatcttagcaatcccttgtgtcgtttattgaagttgattgaattgataatgacttcacaccatggtacaagttcacgggctatatagcataatagcattgccattttagaaaaaaaaaaaaaaaaaa

SEQ ID NO: 265 - DNA, 1751 bp, Glycine max
tcgccgggcttcccggcgcccccccccgcggcaccgaccacacaatctcaaccaaagccttgaccatgaaagcaacccctttagtgctcttcctcctcttcaccatagccaaagggcttcacaaccccaaatgtgatgctacccatcaacatgaccatgatggctcaaccctccaagtgttccatgtgttcagcccatgttccccatttaggccctcaaagccaatgtcatgggaagagagtgtcctaaagctacaagccaaggaccaagccaggatgcagtacctttctagcttggtggctaggaggtccattgtcccaattgcctcagggaggcaaatcacacaaagccctacttacatagtgaaggccaagattggtaccccagctcagaccctcctcttggccatggacactagcaatgatgcttcctgggtcccttgcactgcttgtgttggctgctcaacaaccactccctttgctccagctaagtccaccactttcaagaaagttggatgtggtgcttctcagtgcaaacaggtacggaaccccacttgcgacggaagcgcgtgtgcattcaacttcacttatggcacttcctcagtggcagctagcctggtccaagacacagtgaccctagccactgatcctgtcccagcctacgcctttgggtgcattcaaaaggtcacagggagctcagtgccaccacaagggctattgggcctgggccgaggcccattatcactcttggcccaaacccaaaagctctaccaatctacattttcttattgcttacccagcttcaaaacacttaacttcagtggctcactgagacttgggcctgtggcccagcccaagaggatcaagtttacccctcttctaaaaaatcctagaagatcatcactgtattatgtgaacttggtggctattagagttggccggagaattgtggatatcccaccggaggctctagcgttcaatgctaacaccggcgccggcaccgtttttgattcgggtacggtattcacccgactggttgaaccggcctacaacgccgtccgaaatgagttccggcgacgaattgccgttcacaagaaactcactgtgacaagcctaggagggtttgacacatgctacacagccccaatagttgcaccaacaataacattcatgttctccggcatgaatgtgacactcccaccggacaacatcctcatacacagcacggctggcagcgtcacgtgcttggccatggcaccggcgccagacaacgtgaactcggtgttgaacgtgatcgccaacatgcaacaacaaaaccaccgtgtgctcttcgacgtgcccaactcaaggcttggtgttgctcgtgagctttgcacttaatacataataatatgtgattcttaggtcaagaattttcatgatttgtgggtacaataataatcgtgtcgaattggcattgcaagttactcctatttgggaattcgtatttgatctacatatcatatgggttggggttttggcattgctaagagtttatttgctgactatatagtagaagatagagctacatgtctaaggcattgcatggtaagtttccaagtttgaagttatatttgtagtagtatgaaaaagaagaatttatatttgtagcttgtgtatggatgtggcacggggtcatatatcttagcaaatccctttgtcgttttatgaagttgattgaattgataagactttcacacaattgtcaaagtc

SEQ ID NO: 266 - DNA, 1526 bp, Glycine max
cactcttccatctttctcgctctcaccttactcctctctctgtttcccctcttcatttcgattcttctgcatctggcaagcagtttgtgatgaagattgagtaagaaattcattttttctatgaggtcaatcaaatcatggaggtggcccacgagaaaaaggagtttcttgcctaatgggaaaatcaagtttgaagatgacacaactgccttttatggcggttgtttgtatagtaatgttgtttgttgtgtataggactctaaagtatcaaagttaccaagaacagatagacaaacagtggaatttcagggaagaggaaaaggcatataccgaaacttctggaaacctgaagggcttaccacggggtataatacaagctacttcagattttgagttaaggcctttatggtcgccaagtagtttgaggtcaaaggttagtgtttactccaatcgcaacttgctggcagttccagttggtattaaacaccggcataatgcttcgatgccatggtgcagaagtttcttccagacaatttcacaattattttattccattatgatgccaatatggatggatggtgggatcttaattggactagcaaggccatacacataactgctcaaaaccaaacaaagtggtggtttgcaaaaagatttctacatccagatatagtttctatttatgattatatctttctctgggatgaggatttaggggtggaacatttttctccatcaagatacattgaaattgtgaaggaagaacgattggaaatatcacagccagcccttgacccaaattcaacagagatacatcatagaattacagttagagctaggactaaaaaagttcatagaagagtctatgaactcagaggcagtactaggtgttcagaggcaagtaaagggcccccatgcactgggtttgtggaaggtatggctcctgttttctctcgatctgcctggtattgtacttggcatcttatacagaatgaccttgtccatggatggggagtggatatcaaaataggatattgtgcacagggagatcgcactcaaaatgtgggagttgttgatagtgaatttgttgttcacaaggcaatacaaactctgggtggtagcgtcgatccaactaaagtttcaagtcagaaaaggaaaactgcgagacacggagcagcggcctttgatcaacgagtagagatacgaagacaatcaacatgggaacttgaagtcttcaatgagcggaggaatagagctattgctgaggacaaaaactgggttaattcattcaagagtgataaaaaacgcattagacaaaggcagaaaaccaaccggttctcttaaccacttattcttgactaacctgggttcatatgttagcccttcttcattcatagggcatcaggtttttcgattatattttttttgatatataagcttaatttaagttttgaagatgaaggaattctcaattgattcaattttgggacctcaacatattggtatatatgatttttgcaccttgg

SEQ ID NO: 267 - DNA, 812 bp, Glycine max
atatgttgaaattataaagagagaaggttttgccctcgcgctcccagctcttgacccaaattcaacggagatacatcataaaattacaattagagctagaaccaagaaatttcatagaagagtctatgaacgcagaggcagtacaaggtgttcagatttaagtgagggaccaccatgcactgggtttgtggaaggtatggctccggttttctctcgatctgcctggtactgtacttggcatcttatacagaatgaccttgtccatggatggggagtggatatgaagctaggatattgtgcacagggagatcgaactaaaaaggtgggagttgttgacagcgaatatgtttttcaccagggaatacaaactctgggggggagtggtcacagaatgacaaaggtttcgaaactacaaaggacaactatgaaacaaggtggagtaggaattgatgtgcgaactgagataagaaggcaatcgacatgggaatttgaaatcttcaaagagcgttggaataaagccattggtgcagacaaaaactgggttgatccatttaagagtgaccaaagacgcataagaaaatggcgtgacacgcaacgccttgctaagaacaatatttaactctgttgcatatcttacagtttcattcacagggcattaccttttatttataggcataatttagtttgtgtagatgagtaaaaattcattcaattttgaaaaggaaaaaaatagagagtttttcttctttgtattttcttcctatccctcgcactttcttgataataaaaaaaaaaaaaaaaaaaaaacgaca

SEQ ID NO: 268 - DNA, 1808 bp, Glycine max
gatcttctccagagaattcccgtgctgattttatggtcagatcaatattttgtcccttctctttttatgattccatcatttagacaagatctaagtaaaatgttccctgagaaagacactgtttttcaccatctgggacgttaccttcttcacccatcaaatgaggcatgggaaataattagaaaattctatgaggcacacctagctaaggcaaatgagaggattggcctgcaggttagagtatttaatactcatcgagcaccacatcaaaccattatcaatgaaattatagcctgcacccttcagcataaattgctgcctgatttcgacatgcaaaagtcagcaacttctcctttgaagaagccctcaaaagctgttctagtagcatctttattctcagaatatggtcagaagctgaggactatgtatcaggcaaatacaactgtgaccagggaagtaataagagtttatcagccaagtcatgaagagcgtcaaaagtcaaataatgacatgcacaacattaaggcatggacagaaatatatttgctgagtttgtgtgatgcattggttacaagcccgaagtctacttttgggtatgttgctcatagtcttggaggtttgaagccatggattttgcagagggcgtatggggaaaccatcccagatccaccttgtcgtcgagctaagtccatggagccttgtttccattatcctcccaagtatgactgtagggccaatagcacagttgattttacttccatttttcatcatatgaagcattgtgaagatgtatctagtggtttgaggctggttaatgttaagcactagcgtttgatattgtctagactagagagacagagcatttggttttgcgatttccttgtcacttttcactatttccagtcactcagcacagggatcctcctatttctaaatctctgggttagaggctaaagattttattattggcaagagatacattgtaggccttagacgaatttccagttataccaaatggagtgcaactgcttaggatattgttctcccccattaagtcttgtactatgtaatggttgtttgcgatttaaacctgttttaccacattgaaggtggtttgtgttcatgtggactacacacaaatgcttgtaagctttaagaatgaatggcatttgaggtgaaatcctaaatatatcatcaatgacaacatcgaggctattttttatggatgtattttttacagcagggacctatgatggtgttggttctccattctgagaaaggtcgtagatataattcaacttgagaaggatggtctgtccacagaaacctgcacaagatatatgcattattattcaatatcgttatggcaaacttctttagttggttccaggaattctgaaggtctctgccaattttgctgctgaactacctcaaaggcatgtaatgattagtttagctaaaatgtttctagccaaacaactccttttcccccttgttttaactgttatttattcattatcttacattatttaattgtgaattagaacttttgtagtatttaaacaagcaattgaagttgttataagcataaataatttatgcccacattgacaagtaccattaaaaaaaaaaaaaaaaaatttgttatgattcagcattacaagatatttgcctcggaacttagagtatcatcacttgcggatgcaataacttgtcgaatagctgctcgcgatgccttgtgagaagatgtcatgaaattttaaaagaaatctttaagctctcattatatatactttagctttcatgtg

SEQ ID NO: 269 - DNA, 1245 bp, Glycine max
tcagctacgtaggcccccccccccatttctcaatttaacaacatttgcaaactccacccaaccaaccaccttcttaattaataaccgtcgtcgtttcaatctcgttacacacctcaaaacgcagcggcacactcactagaatgcaagccgtttcgctctcacctttgtcgtttagggattcttccgacgagttcgctggaaagttcgaacacgatttcatggccaagctcaaaatcaacgaagagaaagtcgaaaacgaaaacgaagagaagcataacgaagatgagatagaagaagaagaagaagaagaagaagaagaagaagaggaagagtttagcttcgttctcacgaattccgatggatcgccgatctccgccgacgacgcgttcgacaacggccagattcgtccgatttttccgattttcaaccaggatcttctgttctccgacgattacgacggcggagaaggtctccggcagccgataaaggtcttcgtcgaacataaggatgaatttctgtcggaggcggcgccggcggaaggagcgtactgcgagtggaatccgaaagcggcggtgaagagcaactcgacgggattctcgaagctgtggaggttccgcgacgtgaagctgcggagcaacagcgacggaaaagacgcgttcgtgttcttgaaccacgcggcgccggcgaagccggcggagaaggcgagaagtgtcgtcgtgaagaaggggaaaacaacgacgacgacggcggcggcgtctgcgcacgagaagcattacattatgagcagagcgaggaaagagagcgataaacggaagtcgtatttgccgtataagcaaaatatgttagggttcttcgccaacgccaacggattgagcagaaatgttcatccttattgataatctgttaatttgattcataaattttatttatttgtatgtaagttaatgttttgaaattcatcaacaactaaggattagggaactatctcttcctaatttgttactattatgtaattagattcgatggtgatgttctagagttgaaatatttggatgtatatattttgtagatggagatatgtagagaaattcaattaagtagcaatttcaataacgattagttattaattgcaattaacataattaattgtttacgcacaaacatttatttgagaatttttgttgtctgatttacttgaataagatacagaatctattctaataatagaaaaaaaaaaaaaaaaaa

SEQ ID NO: 270 - DNA, 1062 bp, Glycine max
ataaaaaaaaaccgaaccatttatcattttcctcttctcaattcaacatctgcaaactccaaccaaccaacttcttaattaataactgtcgtcgtttcaatctcgttacacatctcaaaacgcagcagcagcacactcgacttaaaatgcaagccgtttcactctcacctttgtcgtctagggattcttccgacgagttcgctggaaagttcgaacacgatttcgtggctaagctcaaaatcaacgaaaacgaaaacgaagagaagcataacgaagatgaggtagaagaagaggaagagtttagcttcgttctcacgaattccgatggatcgccgatctccgccgaagacgcgttcgacaacggccatattcgtccgatttttccgattttcaaccaggatcttctgttctccgacgattacaacggcggcgacggtctccggctgccgataaaggtcttcgtcgaacacgcggatgtttctccgtcgccgtcggaggcgacgacgccggcggaaggaacatactgcgagtggaatccgaaagcggcggtgaagagcaactcgacgggattctcgaagctgtggaggttccgagacgtgaagctgcggagcaacagcgacggaaaagacgcgttcgtgttcttgaaccacgcgccggcggcgaagccggcggagaaggcgagcagcgtcgtcgtgaagaaggttgaggtgaagaaggggaaaacgacgacggcggcggcgtctgcgcacgagaagcattacgttatgagcagagcgaggaaagagagcgataaacgcaagtcgtatttgccgtataagcaagatctgttcgggttcttcgccaacgccagtggattgagcagaaatgttcatccttattgagaatccgttaatttgattcagaaatttcatttatttgtatgtaaattaatgtttgaaattcatcaacctaactagggaattacctcttcctaatttgctatcatgtaattagattcgaggatgatgtcctagagttgaaatatttggatatatatttttttgtagatgaagatatccagac

SEQ ID NO: 271 - DNA, 2368 bp, Glycine max
  misc_feature (1)..(1): n is a, c, g, or t
ngaataatcactcaatacaatacaaaaccccaaattcagaatttacgattattttcacttcatttgattccttttctttatcttaggtctcacacactagatccatttttgaaggaacttccactttttctcaggtgatgtaataattataataataataagccttgcaggaactgtaatggctcacagcagctctgatgaggatactgatattagtgaatctgaaattagtgagtatgaagataaatcctatgaagaactgaaaagtggaagccaggatgtgaaaacatcggatgagactttcacttgtccctactgccctaaaaagagaaaacgggattatttatacaaggagctccttcaacatgcttctggggtgggtcagagtagttcccaaaagagaaaagcaagagacaaggctaatcatttggctttactgaaatatttggaaaaggatctcatgaatgtagatgttccatcaaatgattcaaaacctgaagatgaaagtgatccttctgttaattctaatgatcagtttgtgtggccttggattggagttgtagttaatattccaactagacggacagaagatggacgctgtgttggtgagagcggttccaggctgagggatgagtacagaagcaggggtttcaatccatttcgagtcaatcctttgtggaatttccgtggccactctggaactgctcttgtggaattcaataaaaactggccaggcttacataatgcattggcatttgaaagagcatatgaattagatcatcatggaaaaaaggattggtttactaattctgggctgaagtctggcctttatgcatgggttgcccgggcagatgactacaagatcaatagtatctatggagaacatctgcgaaggatgggcgatgtcaaaaccatatctgagcttatggaagaagaagctcgaaggcaagataagcttgtctcgaatttaactaacattattcaggtaaaaaataagcacttaaaagagatagaagtgagatgccacgagactacagacaaaatgaaccttgttatgaaggataaagatcaactcattcaagcttataatgaagagatacagaaaatacagttaagtgccagggatcacttccaaaggatttttactgaccatgaaaagctcaaattgcaactggaatctcacaaaaatgagcttgagttgcggaaagttgaattggaaaaacgcgaagcacataacgaaagtgaaaggaaaaagttggcagaggaaattgaggagaatgcatcgaaaaatagctctcttcagatggctgctttagagcaaatgaaagctgatgaaaatgttatgaaactggctgaagatcaaaagaggcaaaaagaacaactccatgctaaaatcattcagcttcaaaaacaacttgatgtgaaacaagagctggagttggagattcagcaattaaaaggttcattaagtgtgttgaagcacatggaagatgacgaagatgctgaaattctgaacaaggtagatacactacaaaaggatttaagagacaaggagcagtcacttcaagacttagatgcattgaaccaaacactaatcattaaagagcgcgagagtaatgatgagctgcaggaagctcgacaggcattggttgatgccattaaagagttacaatctcatggaaatattcgtttgaagagaatgggggaacttgatactagaccattccttgaagcaatgaagcaaagatataatgaggaggatgctgaagagagagcttcagagctgtgttcattgtgggaagaatatctaaaggacccagattggcatccattcaaagttatcatggttgaaggaaaagaaaaggaaattattagagatgacgatgaaaagctgaatgggttgaaaaatgacttgggtgaaggggcatataaagcagtggtggaagctttgttggaaataaatgaacataatcctagtgggcgatacttaacctcggtgttatggaactataaacaaggaagaagagcaactctgaaagaaggagtacaatttatatcgaatcaatggaaagtccttaaacgcaagaagggaatgacatgaaggttgatgttggttttggcgagagaattatgcattgcagcctggtagcatgcatccgtattgggagagcagcaaacctagcggttgtgttttaggttaagtgatttatgataatgtcaagctatttaatttcacttggcactttgtaatcttgtgtggccgaagacattgaagttaaacttgtatatgactatatcatttggcttttaattttaacatgcttctttgagcaaaaaaaaaaaaaaaaaaaacttcgggagtcttctt

SEQ ID NO: 272 - DNA, 782 bp, Glycine max
tccggaattcccggctcgacccacgcgtccgcccacgcgtccgcccccgcctccgggaaatattcgtttgaagagaatgggggaacttgatactagaccattccttgaagcaatgaagcaaagatataatgaggaggatgctgaagagagagcttcagaactgtgttcattgtgggaagaatatctaaaggacccagattggcatccattcaaagttatcatggttgaaggaaaagaaaaggaaattattagagatgacgatgaaaagctgaatgggttgaaaaatgacttgggtgaaggggcatataaagcagtggtggaagctttgttggaaataaatgaacataatcctagtggacgatacttaacctcagtattatggaactataaacaaggaaggagagcaactctgaaagaaggagtacaatttctgtcaaatcaatggaaagttcttaaacgcaagaggggaatggcgtgaaggttgatgttggtttcggggagagaattatgcatggcagcctggtgcatgcgtccatattgggagagcagcaaacctagcggttttgtttaggttaagttatttttcgataatgtcaagctatttcattacttggcacttagctcctgtgggcatgtgcccagaagcaaactgcattcataatgacaagcctttgtaatcttgtgtggcagaagacattgaagttaaacttgtatgactatatcatttggcttttaattttaacatgtttctttgagtaattgtcaaaaaaaaaaaaaaaaaa

SEQ ID NO: 273 - DNA, 1439 bp, Glycine max
  misc_feature (3)..(3): n is a, c, g, or t
  misc_feature (35)..(35): n is a, c, g, or t
  misc_feature (41)..(41): n is a, c, g, or t
gantactgtatactgtatccgacacgacaccaacnccctanaattcaagtaacacaaattcctcaaaccaacaacaacaggcaacagctgtgaatgaatcactcatcactctgtctcactcttattatgtgtcactctctcccacacttttccatttcactctcacctttcccatgatctcaagtctccaccaccccaacactgaattctgcaatttccctcaaccatttccaattccctcttctgggcaccgttaaatttcccatcttgccaccgatatctcatctgggtcattccatggcgcacgcgaagaccgattccgacgtcacgagcatggacacgtcatcgtcgccaaaacgcgccgtttactacgtgcagagcccctcgcgcgactctcacgacggcgacaagtcgtcgacggcgacgcacgcgacgccggcgtgcaacagccccgtggattcgccctcgcaccattcctacgggcaccactctagggcttcttcttcgagcagggtctccggcgggtcctacaacatcgcctcttggggaaggaaagtgacccgcaaaaacaaattagggtggcctcatgagtgcaaggtcattgaggaagaagaggaagggtattatggggaaagacaaggcttttctaggaagactcagatcttcgttggggtccttggctttgccttcattttcaccctcctttgtttcatcattgctgcggctgccaggccttataatgttcggatcagtgttaagagtttcacagtacacaacttcttattcggagaagggtcggatatgacaggagttccaaccaagatgctgacggtaaattgttcggcgagaatgacagtgcataaccctgcaaccttcttcggaattcatgtcagctctaaagcagtgaatcttatgtattctgagatgacagttgcaactggtgagctgaagaagcattatctatcgagaaagagtacccgtacagtgtctgtgaacctgcaaggaagcaaggtttctctatatggtgctgatgcaagcttaactggcttggtggacaatggaaaaataccaatgactcttgtctttgaagttggatcgctagggaatattgttgggaggttggtgaggtccaaacatcgaaggcgtgtctcttgctcagtggctattgattcccacaacatcgaacccatcaaacttaaagagaatgcatgcacatacaattgagaggttttggtcttagcagtaaccagtttcttgtgtgccttttcaattcattctgctggcttttagatttcccgtgatacaggtaaaatggtgaaagaaatactattatagagttaatattgtagaggttttacaagtataatttttggagacatgagaaatgaaaattagttataatgtaatggtataattctatttccccttcttcctaaaaa

SEQ ID NO: 274 - DNA, 1280 bp, Glycine max
  misc_feature (1253)..(1255): n is a, c, g, or t
  misc_feature (1278)..(1278): n is a, c, g, or t
ggctcgaggttttctattataagacagggtgttaacggctagaagccaaggaatcagtaacataaaatggaggttcaatttgccctcccatttcactaacacacacatcacatcatatcagagactccatctccctctcgcacgcgacgagggagtcccgcttcggaatctcaccccctctttctgcgaattcgcaagatggttgctcagaaattcgttgtcgacttgaacaagccccttgtattccaggttgggcatcttggggaagcctacgatgattgggttcacgatcctatcgtaagcaaagaaggtcctcggtttttccaaagcggtttcctcgagttgttcacacgcactgcatggtgggtgattccaaccgtttgggtgccggttgcgagttggttcatttccaactctgtcaaatcaggcctcccttctcttgatgtagctctgctcgtctttctcggcatctttgtttggactttggctgaatacaccttgcaccgtttcctcttccatgttaaaaccaagagctactggggaaataccttgcattatcttctccatggctgccaccacaagcaccccatggatagctatagacttgttttcccccctgtagcagcagctatattagccctcccgatctggaacttggtgaagctgatatgcaccccttcagttgctcctgcggtgtttggaggtattttgttgggctatgtgatgtatgattgcacccattactacttacaccatggtcaaccaaagtctgatgtgcccaaaagtctcaagaaatatcacttgaatcatcattatcggctccagaactatggctttgggatcacatcaccactgtgggataaagtttttggaacggttcctcctcctcaatcaaagggggatgccaaacgtagataagttactgtcaaggttgcatttgttcattggttaagcatagttcattcaggagcttcaaacgagatatgttgataattcattattcatgtcttgattgtctaattattttgctccccaattgatgtttctgagggttaacgtgccaccatcttgtgtcaaacatcctgtaaaatttcatacatttatcaaatttatagtataaaacttgcctccctgtgcacagttcttttaaaaaaaaaaaaaaaaggctttccgcaggaatccttgtagcatcggatgccttcgtgtaggttaacttctatcttcaaagaaatcaagatattcaattacctttnnnaaaaaaaaaaaaaaaaaaaaaanaa

SEQ ID NO: 275 - DNA, 1150 bp, Glycine max
ggaactcggcccgagccacagaagagggagagagagaaaaaaaaaaaaaagtctctgtttcttcacttgctcacaagccgcaactgctactgtgtacccaatctgagcccaacgagatgggggggcagaatctttccccaaaggaaaggagtagagattggattggagttcttatgaacagcagctttggttattgtacttatcaccatgatcttcgatctaatgagatgaatgtgttctgcgtggactgtgcacttaggatgtgtaggcactgtaaggaagctcattccctacatagaaggtttcagatttacaaatattcctaccaggatgtcttccgccatgccgagctgcagaagtattttgattgctccaaaattcagacttacatatccaataatgaaaggattgtgcatctcaaacctcggccttcaatcaccaaatctaagtctgctgatctaagtcccgactctaaatacaaagagaccggcatagcaacaagaccaaagtcagggggcacgtgtgaagaatgtggaaaacacttacaagatgagcgtaatcgcttctgctccattacatgcaagatctcagtgcatccagtggagacccaataccaaggtcaaaatcaatgttcaccaaaccaccaaagtgctagaggcatcatcaatccaaaacctgaaggcattgactttacaatgaatgataaccataattcagaaccggagtcatctatctctgaagctgagccatatgggtgggttgaagttgtgaatttcagaaagcgtccaaggaaaagtatccctcagaggcctgtctttgttttcacgtcttagaataagatacactactctaatggttttcttcattttttttttttgactttacatttcttgaacatttgagggaagctcaaccccgttatgccccatattgggatttaggtatatataacttgggagtttgagattcagttgctattagcaaagtaactagccgagcttgtatagcacaaggacaaaggtaatgctactaacacacttccgacactactactacttaatatctgtatagttttcagcatcttactgtactcccttcgccccacatctaatatctattaatgtttgaggttaaaaaaaaaaaaaaaaaa

SEQ ID NO: 276 - DNA, 1500 bp, Glycine max
agacgacagggaaaaattcctatctcaagtctcacttttttcagcttctctaaattctctgtctacttcaccaagcacttttggttgcagctttggttaatttccaatatggtgtttcctctcctatctatctttgctttactcaatcttgcagtggtggcaacccatgcagaaaccttgccccctgaagtttactggaagtcgaagcttcccaccactccaatgccgaaagccattacagatatccttcacccagatttggcagaagacaaaagcacctctgtggccgtaggaaaggggggcgtaaacgttaacgcagggaaaacaaagccaggaggcacatcagtgaacgtaggaaaaggaggagtgaacgtgaacacagggaaaggaaagcccaacaaaggcacatcagtgaacgtaggcaaaggtggagtgaacgtaaacacaggaccaaagaagggtaagccagtgcacgttggagtgggcccacattctccatttgattacaattacgcagccagcgaaacccagtggcacgatgaccccaacgtggcactcttcttcttggaaaaggacttgcactacggaacaaagttgaaccttcacttcactcgctacttcacctcaagtgttgatgcctcgttcttgcctcgatcagttgctgattccatacccttttcatcaaacaaggtgaatgaagtgttaaacaagttctccatcaaggaagggtcagatgaggctcaaactgtgaagaacaccatcagtgagtgtgaagtgcctggcattaagggagaggaaaagcgttgcgtgacttcacttgagtccatggttgatttcgccactaccaagctcgggagcaacgatgttgatgctgtttccacagaagtgacaaaaaaagataatgagttacaacagtatacaatggcaccaggggttaagaggttgggtgaggacaaggctagtgttgtgtgtcacaaggagaattacccttatgcagtgttttattgccacaaatcagaaaccacaaaagcctattctgtcccattggagggtgctgatggaagcagggtcaaagcagttgcagtgtgccatactgacacatcaaagtggaatcccaagcatttggcgtttcaagtgcttaaggttcatccaggaactgttcctatctgccacttcctgcctcaggatcatgttgtctttgttcccaagtagaaatgtttgttccgtcccaaaataattattatagctcatgcttcataccttgattttataataacacttcatatatgtcaacatagttggatctagcaacaatattgtatgtttttaacatggtcaatttaagttgcatgtgcccatgatgcattagcaccatgcatgtatgtttaatttaaacataataatatatgctatattgaggctttctctcaaaaaaaaaaaaaaaaaaaaaaggaaaaagaaaaaaaaaaaaacaaaaaacaaaaaaaaaaaaaaaatttt

SEQ ID NO: 277 - DNA, 1376 bp, Glycine max
tcgagtcagctacgtaggccccccccccccccaacctcacttgatcaattctccaaatacctaatatggagtttcacattcttcccatcattacttttctcatgcttgttgtggcaactaatgctgatgctgcattacctcctgcattttactggaagtccaagcttcctaccacaccaatgccgaaagccatcactgatttgctacaacctgattggaaggaagagaaagacacctctgtggatgtagggaaaggtggagtaaatgttggtgtagaaaagggaaaccaaggaccaggagatggcactgatgttaatgttggtggtggagacggtggagtgaatgtgcacacaggaccaaagggtaagccagttcacgttggagtgggcccacattctccatttgattacaactatgcagccagcgagacccaattacatgatgaccccaatgtggcactcttcttcttggaaaaggacttgcaccacggaacaaaattgaaccttcacttcactatctactacacctcaaatgttgatgccacgttcttgcctcgatcagtttctgattccatacccttttcgtcaaacaaggtgaatgatgtattaaacaagttttcaatcaaggacgggtcagatgaggctaaaactgtgaagaacactattaatgagtgtgaaggacctagcattaagggagaggaaaagcgttgcgtgacttcacttgagtccatggttgatttcgccactaccaagctcgggagcaacaatgttgatgctgtttccacagaagtgacaaaaaaagataatgagttacaacagtatacaatggcaccaggggttaagaggttgggtgaggacaaggctagtgttgtgtgtcacaaggagaattacccttatgcagtgttttattgccacaaatcagaaaccacaaaagcctattctgtcccattggagggtgctgatggaagcagggtcaaagcagttgcagtgtgccatactgacacatcaaagtggaatcccaagcatttggcgtttcaagtgcttaaggttcagccaggaactgttcctgtctgccacttcctgcctcaggatcatgttgtctttgttcccaagtagaaacacacacgagtcccatttctgatgttggtgaataatttggcagttttaatagcatgaaatgagcttttaaaactgaatgcgtagtatttgcattatgttatcctacgttgtcagcatgtttgcttttacaggtttactgttatctcaatatatgtatatgtactagtgatgtattaaatgtgctaatatgtgatatatatatatatatagctttttcattcacaaaaaaaaaaaaaaaaaaaaaaaaaaaaaaaaaaa

SEQ ID NO: 278 - DNA, 1647 bp, Glycine max
cctgtgagtctgagattgaataagttggatacgcaaaaaatagtaaataaaaagtggcggcctcacctaacttgggcagcccagggtagggtcaaagcgtcaagggaggtgtcggtgacctttagtgttcgatcctatccattaagacatctttgatcatacttaattagttactgcttcaagtctcaaaaagcatgagtcacaccctctaccccccaccaaatattaccttctcatattatcaattaaatacgacaaatttattattttgccattatagcttttgacagctttcttcttaccgtaatccaactatccacagctaccaagggagggaccttcccacccttttcctccccaacttgcttcaaatcacacactcgctcccactatatatatcttccatcatggcatcacactacaaccaataccatcaacacttcatttcttactctcactgaaaaaaaatagcttgttcacaccatcctattttttcaactcatatatacaaatatatataacatggcttctaccttctctcgaagcctagcacttgtaagcttttacattgtcgtttgtgctgccggtaacttgaaccaagactttcagcttacgtggggagatggtcgtgctaaaatactcaacaacgaaaatcttctcactctctcccttgacaaggcctctggctctggcttccaatccaaaaacgaatacttatatggcaagattgacatgcagctcaagctcgttcctggaaactctgctggcactgtcaccgcctattatctgtcttcaaaaggatcaacatgggatgagattgacttcgagttcttggggaatctgagtggcgatccatacattctacacaccaatgtgttcagccaaggcaagggcaacagagagcaacaattctatctctggtttgacccaactgcagatttccacacttattcaattctttggaatccccaacgcattgttttttctgtggatggcacccccatcagggaattcaagaatttggaatcaataggagttccttttccaaagagccaaccgatgaggatatactcaagcctatggaacgctgatgattgggccacaaggggtggactcatcaagactgactggtccaaagctcctttcactgcatcctacagaaacttcaacgccaatgcttgtgtttggaactctggaaaatcctcatgcaaatcaaattcttcaccttcctctgcatctcccactaatgcatggttatcacaagagcttgattccactgctcagcagaggttgcgttgggtgcagaagaactacttgatttacaattactgcaccgacaacaagagatttcctcaaggccttccactcgaatgcaaacactcctagagcctataggactcacatctcgcactacccataacaagtgttgcaatataatcttatgaaccattcttttaatttttgtattcctttttttttttttgttcgatgcttgagtgctatagtgctgttattatacaaatatacaatgtaaaaatatcccatgtaaaataatgcttctgtttttttttttaaaaaaaaaataatgcttctcttgtttgtatgactgaattttgtgtaataaaaaaaaaaaaaaaaaaaaaaaaa

SEQ ID NO: 279 - DNA, 1716 bp, Glycine max
tcagctacgtaggcccccccccccattccctcatctctaatccgttatgagaagctgaaccttcctctgcacaatctccttcaaaaagcttctcatccatggcgaaaacgctcatttcgtctccatcgttcatcggcacgccgctcccctcgctccctcgccaccacctcccccaccgcaccaggtttgtcactaccaaagtccacgtcagcctccatgaaattccccctattcaatccttaagccactccattgacttcgccggaatcgttaccagagccgaaggccttctctacacgctcgccgatgccgcagttgcggcggaccctgcggttgcagcggacactgcggcttccaccaccgatgctgccgtacagaagagcggaggttggttcggcttcatctccgaagctatggagttcgttctcaaggtgttgaaggatggtctttctgccgtgcatgtcccttatgcatatggatttgctatcatattgctcactgttatagttaaggcagcgacgcttcccctgacaaagcaacaggttgaatctacattggctatgcaaaatcttcaaccaaaaattaaggccattcaagatagatatgctggcaatcaagaaagaatacaacttgagacgtcaaggctatatcggcaggctggggttaacccactggcaggttgtttaccaactttggctacaattccagtctggattggtctctaccaagctttatcaaatgtggcaaatgagggactgctaaccgaaggttttctttggatcccctctttgggtggtcctactaccattgctgctagacaaagtggagctggaatctcttggctttttccatttgtggacggacatccacctttgggttggcaagatactgcagcatatcttgttttacctattcttcttgtcgtttctcaatacgtttcaatggaaatcatgaaaccacctcagacagatccttctcaaaagaatcaacttcttattttaaagtttcttccactcatgattggctacttctcattatctgtcccatctggactaacaatttactggtttataaacaatgtcctgagcacagctcaacaagtatggttgcgaaaattgggaggtgcaaagcctgttgtgaatgaaaatgctggtgggattattactgcaggacgtgctaaaagatcagattcgcagctagcaaggaatggtgaaaggtttaagcagttaaaggaagaggaaaagaagaaaaaggtaagcaaggcactgccagtggaagaagttcagtcactggcttctgtttctgcttctgatgatggctcagatacagaaagtgacaataagggacaggaagatgcagaagaagcatacgcttctaaagttggcgaagaggttcaaaattattctagggaaagaagaagcaagcgttcgaagcggaagcgtgctgtataaaggaccgcatacgattagtttatagtgagttttgtatatctcagattatagcatttttgggttggctattaattaaatatatgtatctatactcggcaaaatatctttgttaagttccacatgttagctaaagcaatttgtcttgtgacgtttaatttcattaagatgtatccccccttaaaactaggagtataaaaacttctattccctcctttccaaaataataattagttttagctttaaaaaaaaaaaaaaaaaaaaaaaa

SEQ ID NO: 280 - DNA, 1817 bp, Glycine max
  misc_feature (1799)..(1802): n is a, c, g, or t
tgggtaccgggccccccctcgagtcagctacgtaggcccccccccggtggaaaatattcaggatttgaggtgctggagagaagggataaaagtgtatggtatgggggcgtggtgaccgagggctcgaaaggaggaaacttttggctacagaaagtagtttctttagtcgggtttctttcaaaaaatggtgcagagtctctgtttgatggcttctcatggttaccctcctggccttgtcttgcatccacaagtactgggcttgccctgcagtaccatgaagggctaccaaacattctttccttctccagtagcaaaagcagacctgatcagatatcagtctccttgtcttgatccaagtccatgtgaggagtcaacgaaatctcaaaatgaatggtttgattataagaagtttgtcaatgttgacttctcagttgaaaggcccatgcttattaatgaccaagctaactgctcaaatgcagttctttttggctttggcattgttgaacaatgctctaagcatgatgaaattttaaaggtgctaatgtctgagactgctgaagcagggatagatggagggaatttatccttgttatcagacttgatgaaattgcagttgtcaggcattgatgaaacccagcaaccatcatcatctcttatctacccaactggaaaattcaacatcccaaagcattttctgtattttgttcaagattcggccctttcttcaaagatcacggttcatccagatggtcaaatgacatttatgggtaccgcaattgagttgaaagatcttctctctgtagttgctgagtcatgcttatcaaaatggtcacgaagggatgaaaagcaatctatgcttgttccacacttcagttgggtgaatatcaatgaattagagagaagtcattcctccacattgaagaatcaatccaccttaactgctcctttaaagagtcctgagaaagtcaaactgaagccatcaccaaaaaagaccaagaaagtaggcagggagagggatctctacaagaactcttcacatgcatgtgagacccttctgtccctgatggttgacaagaagcgatgtcggaaaacggcaattctctcgctgaagaaatccagtcctgagcttcctgagctcctgacacaattttctgccggcattgctggtactggccttgcagtcctgctatccgtgatgtgtaacctagcttgtggaagggctaccttttgtacttctagcttgttcaacaccgggtttggacttgggttggtttggctttctggggtagtaaataagctaagggccacaattgtcaacatcagcaagaatgcaggaaagttgggtttgaaagaagaggaaatgatgcaaaagctggataagagcataagagatatttactatactgctgcagcattgctagcagtggtagtgctaaggcttgcttgagtaacatctccaaagatgtagttatttctggctggttggatgctacagtgatggcttttggtgaaagaaagcaaatggcaaagcaaatagtaagaatcaaggttcaaagtagttccacggtgagatctttaaggcaccaagttgatcagctattgggtgttgtagttaatttggtattttcagttaacccaggaagcattgtttggttttgtagttagcttgtaatatagtagaattttgcaatggaatcaataaactgactttctttattaaaaaaaaaaaaaaattaataggcttttgaggtaagcacttagggtaaaaataaaatgcaggaaagtccattttttatgtnnnntgagatcatgaaaaa

SEQ ID NO: 281 - DNA, 781 bp, Glycine max
acagtaattattaattagagatagtaaaatcccacaaacgaaggggtgaaaaaaagagaactggaaatacgaaaccctaaacccatcgtcggtttctcttcttacgttttcttcaccatcttgattaagctttctgggttcattacacgaaaatgttgaagttcttgtcgagagtgaaaatcgagttcaacgcgttggacccgcgaacggcatcgtgtatagagtttctggcgcaatgcaattcacggagggcgaaggagtcgaacccgacgtgcgaagtggacgtgaagcgcgtgagggaagagcgcgcgccgcagataacggtgacattcgttaacggcgtcgaggaagtgttcgacgcgacggcgacgccggctcagagcataagaaacttgattctggaaaagggtcagcacctcgagacggagcagatgtttcgcgaagcaggggaaccctggccggttatcatccccgacgaggagctctcccaaatcgcactccctaccaaaccaaggaaagcggaagacaagaagcaatagctaaaaattcttgagcttattaacagctttggattgttctgggttttgtcaccctttctcttgtttctttttggtgggagatatggcatctgatcgctgctgcgttagtgctgcatgccttgctgtatttcagcatttaattattgaatgcttaactatatatgatttgcataataatgtatgcccctgaattgctgaatttttaaaccgtaatcttgtcatgctcaaaaaaaaaaaaaaaa

SEQ ID NO: 282 - DNA, 1101 bp, Glycine max
  misc_feature (902)..(908): n is a, c, g, or t
  misc_feature (911)..(912): n is a, c, g, or t
  misc_feature (918)..(919): n is a, c, g, or t
  misc_feature (935)..(935): n is a, c, g, or t
  misc_feature (943)..(943): n is a, c, g, or t
  misc_feature (945)..(945): n is a, c, g, or t
  misc_feature (951)..(952): n is a, c, g, or t
  misc_feature (958)..(958): n is a, c, g, or t
  misc_feature (960)..(960): n is a, c, g, or t
  misc_feature (962)..(964): n is a, c, g, or t
  misc_feature (968)..(970): n is a, c, g, or t
  misc_feature (974)..(974): n is a, c, g, or t
  misc_feature (976)..(977): n is a, c, g, or t
  misc_feature (982)..(987): n is a, c, g, or t
  misc_feature (990)..(990): n is a, c, g, or t
  misc_feature (992)..(992): n is a, c, g, or t
  misc_feature (994)..(996): n is a, c, g, or t
  misc_feature (998)..(999): n is a, c, g, or t
  misc_feature (1002)..(1004): n is a, c, g, or t
  misc_feature (1006)..(1006): n is a, c, g, or t
  misc_feature (1009)..(1009): n is a, c, g, or t
  misc_feature (1011)..(1012): n is a, c, g, or t
  misc_feature (1014)..(1017): n is a, c, g, or t
  misc_feature (1019)..(1019): n is a, c, g, or t
  misc_feature (1021)..(1024): n is a, c, g, or t
  misc_feature (1028)..(1028): n is a, c, g, or t
  misc_feature (1030)..(1030): n is a, c, g, or t
  misc_feature (1032)..(1039): n is a, c, g, or t
  misc_feature (1041)..(1046): n is a, c, g, or t
  misc_feature (1050)..(1054): n is a, c, g, or t
  misc_feature (1056)..(1057): n is a, c, g, or t
  misc_feature (1061)..(1061): n is a, c, g, or t
  misc_feature (1064)..(1066): n is a, c, g, or t
  misc_feature (1068)..(1069): n is a, c, g, or t
  misc_feature (1073)..(1073): n is a, c, g, or t
  misc_feature (1076)..(1077): n is a, c, g, or t
  misc_feature (1079)..(1079): n is a, c, g, or t
  misc_feature (1081)..(1083): n is a, c, g, or t
  misc_feature (1085)..(1087): n is a, c, g, or t
  misc_feature (1089)..(1092): n is a, c, g, or t
  misc_feature (1096)..(1099): n is a, c, g, or t
  misc_feature (1101)..(1101): n is a, c, g, or t
aacggccgaaaaaacagaacatagtgacagagtgttccagagagtttgttaaagaactgtgaagaagagggtaactgcaaacaaagcaagcaaaacaaaagacgcagtgatggagaggatgaagagggtgcttctgctgcttctggccttcactgttcttctcatgttgccagaagcttctgctacaaagtttactgttggaaacaaccagttttggaaccccaatattaactacactgagtgggctaaaggcaaacatttctaccttggtgactggctctattttgtgtacgataggaaccaagcgagcgtgttggaagtgaacaagacagattatgaaacatgtaactctgatcatccactcacaaattggactaggggagctggaagagacgtggttccattgaatgtaacaaaaacttactacattatcagtggccgagggttctgcttcagcggcatgaagatagcagttcatgttgaaaagctgccacctccaccaaaagctgcccctgtaaagtccgcggcaccgacccttttttcacaagaccgcattcttctcatgcctgttgtttttgccattggagcagcatgggatgcattcattcatttctggtagtgatattattttacacaccaccattgcacaacaccaatggatagtgttcatgttgtgttactctttttcttttttctcaaaggcaattgttgcttgcatggtgatattagtagttgacctcaaatgggtcaaaggatgatgtttcaagttaggtagtgtttgtgtttgattttcaaaatgtgttgtatttctgtatgttaatgatcagaaatatgtcaaactggtttaaattaatttaatttgttggagaattcaaaaaaaaaaaaaaaaaaaaaaaaaaatnnnnnnnttnntattcnnttaccgggggatcccntattttananagggcnnccccgngngnnnctcnnntttntnnccctnnnnnnggntngnnnanntgnnnanttngnnannnntntnnnngaantntnnnnnnnntnnnnnnattnnnnngnntttngtnnntnntagntgnntntnnntnnnannnntatnnnncn

SEQ ID NO: 283 - DNA, 1046 bp, Glycine max
cggacgcgtgggggtttctctccttgtttcatttttctcttgtttccaccatttttctaaggtgaccttggaactggtttaattcaaagacacttattccatttgacattagaggccgtgttcgaatacttcatcctccagttatgacttgtttcccattctcatttggtaagaaagtgcgctttgtggcaacacatgatccagatattgatgaagtactctcaggcattcaaaatgtaaggatatatacctacaaagaactaaaagttgcctctgacaatttcagtccagccaataaaattggggagggtggatttggttcagtttataagggattgctaaaagacgggaaagtagctgccataaaagtactttcagcagaatcaagtcaaggggtaaaggaatttgtgacagagattaatatgatctcagaaatagagcatgaaaatttggttcagctatatggttgttgtgtggaagggaatcaacggatcttggtctacaattatgttgagaacaatagccttgcacaaacccttctaggttcaggtcacagtaatatcgtttttgattggaaaacacgatctaggatttgcattgggattgcacgtgggcttgcttatcttcatgaagaagtaagaccacatattgttcacagagatataaaagcaagcaatattctccttgaccaaaaccttacacccaagatttctgattttggtcttgcaaagcttattccatcatacatgactcatgtcagcacacgtgtggcaggaacaataggttatttggctccagagtatgcaatatggggcccgccgccccggaaagcatatatttacagctttggtgtccttctcgtggagatagttagtggaagatgccacacagatttacgattaccaataggagagcattatctcttggagatgacatgggaactttatcataaaagagatttgggaaggctggtagacatatcactagatggacctctcgatgtcgaggacgcatgtatagttctggaaattggacttcgttgcact

SEQ ID NO: 284 - DNA, 637 bp, Glycine max
tgataaattgataattaaggatagcccctcctcagccaccctttagataaaccatgattccatttagctccaaaccacacttgattttcttgtaggatggtgttgcatttggtggctctggcgaatctccacgggctaaggcccgcggtggtcgggctggcgtgcccgcttgtcctcaagttcttgatgggcttcaggatcttccgagacgacgcccttcaccactcaagactcttccttttccaattgggtcacatagccttcagcacccaagcccatatctcccgcctgcccagaatggaacgtgctcttaggttaatttggacaacactcactccttctccttctccttcttcaaccgccgataactcccaattcacacaacagagcttctacgacctttccatgctttccctttaatcaccaccactcactcactattagagaaaggggtaattctatttatactgatataagtaaagagaataattgtaatttactcggtttttcctctatctctttcttactcatcttctccacttttcttagtaagtttgtacgtgtgattcaagtttctattgtttgatttgtgctaggttaatgttctagatccaacactcactctactttacttccc

SEQ ID NO: 285 - DNA, 1171 bp, Glycine max
aattcggctcgagctcgagcccactcggcaccattcattcccacattcccatttttcacaccaccaacacaagatgtttctccacattgtgttcctccttttccttctctcatccacttcccatgccactgtccaagacttctgtgtggcagacctcaaaggtgcagacacccctgcaggctacccctgcaagccacctgctaatgtcacttcagatgactttgtgtacactggcttagctgaagctgcaaatgtcacaaacataatcaatgctgctgtgaccccagcttttgttgctcaattcccaggtctcaatggccttgaactatctgcagcaaggttggaccttggtcctagtggtgttatcccactccacactcatccaggtgccaatgaactactcattgtgcttcaaggtcacatccttgctggattcatatcttcaggtaacatagtttatcagaaggtgctgaaaaagggagagctcatggttttcccacaagggctgttgcacttccaaattgctgttggtaagagaaaggcccttgcttttcctgttttcagcagtgcaaaccctggcctccaaatccttgactttgcactgtttgccagcaacttctccactcctttggtgacacagaccactttccttgatcctgacctagtgaagaagcttaagggtgttcttgggggtagtggctaggctagccttatggttaattaataattgcttattattttgctcaattcattacttttgtgctttcaattcgctaaacttgtccagctcaattgactgagctacgtgagtgactagttttaaatcctttaatatttatgtttgattcttacgtataaaaaaataaattcattagacttgtccaggtctcatggtcattgaattgctcgtgttaatgtgaagtaatttaataaactctcgtgcttgatttttgttttccatttctctgttccaaaactaaaaatgtgttgagatttgagtattgctatcttaagaagggttgtttgccaatgttgcctgagagtcttatccacattttccctggttgatacatgtcgggctaaggatgctatttgtcctttactatcacgcatgttttaattatttccgttgtccacacgtctcgaaatatgttgttttattttgtttgcc

SEQ ID NO: 286 - DNA, 525 bp, Glycine max
tcgggatatgacatatgtgctcagtgcctccgccaaatcaaataaaatggatactgaaatggttgagagcattgatgtcacagatgatgcaaggagttttagctgggcagtggacagcgccataaggagtgagactgggtccatttttggagaatctcgtgtccgtagctttgcttcgttagtggacagtgccataaggagtagtagtgctactgaagcagatttggaatcatcccctgtccaggcagaagacagggcgatgaggagtagtagtagtggaactgatttgggaacatccccttttcatgtttttgctacggcagcgggtatgaggactgttgctgccacccacagttaccgagaattattatttatcctgtttaagcttatactgttaatatttgtatgtattaatgagtttgttcaactagctttttgattgtgattattgtgcttattataagatcaaaaagtatttcaaaacttgaaataaacgaagtaaatatctctagcccgcaaaaaaaa

SEQ ID NO: 287 - DNA, 1001 bp, Glycine max
gaataattgatatataagagtgcgataaagagtgggaagggaaggaggagagggagagggagagagaaagaaaggtgaattggattgcatctctctctgtgtgttggaagaggggaatcgtagatctgatttctttctttctttttaataattttgtgatcagaattattgagctgaacaaaagacaatgggattgtgggaagcttttctcaattggcttcgcagcctttttttcaagcaggaaatggagttatctctaataggacttcagaatgctgggaagacttcccttgtaaatgtagttgctaccggtggatatagtgaggacatgattccaactgtgggattcaatatgaggaaagtgacaaaagggaatgttacaataaagttatgggatcttggagggcaacctaggttccgcagcatgtgggaacgttactgtcgtgccgtttctgctattgtttatgttgttgatgctgccgatccagataaccttagcatatcaagaagtgagcttcatgatttgctgagcaaaccatcattgggtggcatccctctgttggtattggggaacaagattgacaaagcgggggctctgtctaaacaagcattgactgaccaaatggatttgaagtcaattactgacagggaagtttgctgcttcatgatctcgtgcaaaaactcgaccaacatcgactctgttattgactggcttgtaaagcattccaaatcaaagagctgagagcctactttctgttttgaactctagtgtaatttatgggtgacacattttctggatttactagaggcatttgcatgtctaactcggttgctgattgatttgtttttcccttttgtcagatgctttgtaatataatatcacatcattcttgtccaatagggagttaaacgggatgacatacatgtgaagggttactttatgaaatcatatcgtgacattttttagataaaaatttattgaactgcatttttcgggagga

SEQ ID NO: 288 - DNA, 1103 bp, Glycine max
tcagctacgtaggccccccccccaaaaaaaaaaaaaaaccattctatctttttcatgacacgaatgcgataaacagtgttgaaggatctgtgcgtgagttcttggtgaaacaaaggaatcgtagatccgtttgtttgtgtagttttttttttttgtcagagaagagaagcgatggggttgtgggaatcttttctcaattggcttcgcagcctctttttcaagcaggaaatggaattatctctgattggacttcagaatgctgggaagacttcacttgtaaatgttattgctactggcgggtatagcgaggacatgattcctacagtgggattcaatatgaggaaggtaacaaaaggaaatgttacaataaagttatgggatcttggagggcaacctagattccgcagcatgtgggaacgttattgtcgtgcagtttctgctattgtttatgttgttgatgctgcagatccagataaccttagcatatcaaagagtgaactacatgatttgttgagtaagccatcattgagtggtattccattgctggtattggggaacaagattgacaaacctggggttctgtctaaagaagctttgaccgaccaaatggatctgaagtcaattactgacagagaagtttgctgcttcatgatctcgtgcaaaaactcgactaacattgactctgttatcgattggcttgtaaagcactccaaatcaaagagctaagaggctcccttatgttttgtactctaatgtaatttcagtgacatatatctggaagttgctggaggcatctgcatggctaacttggttgcagattactttattcctgcccttttctcatttgcttcttaatgtaatatcatgtccaatgacgtgtatcaaacaagatgaaattcatgtcaagggttgttttgtgcgtgaatcatattgtcattgtcagtttagttgcatttttagaatacttgcagaactgcagttgtgagaggaactgattccctgtctctgtaaattagatttttttcaatgatcagcagtgtgtgatattgttatttcccggagtctgtcaaatacaaataaatttagttggattctttatcaaa

SEQ ID NO: 289 - DNA, 1194 bp, Glycine max
cggctcgagcaaagtcctagctagcattaacactataaatagacctccgttttgctctcaatccccaaaccaccttgtctatcaaacattataatttctattacatacattttgtagctaggatgagcaagttactactcattcgtgttgctgggttcgtggcaacctttgtcaccatggtgatgatgatggtgcccaaaaacgtgagtgcccaaaacataggtgatgacatcgtcacacaagacttcttcaacagcataatcagtcaggctgatgatggttgtgcagggaagaacttctactcacgagatgctttccttaatgctcacaattcctacaatgagtttggtaggcttggtaatcaggatgactccaagcgtgaggttgcagctgctttcgcccatttcacccatgaaacaggacatttttgctacatagaagagattaacggtgcatcaggggactactgtgacgagagcaacaccgagtacccatgtgcccctaacaaagcgtactatgggcgtggaccaatccaactatcatggaacttcaactacggaccagcagggcagagcatcggatttgatggattgaacgctccagagacggtggccaatgaccctgttgtgtccttcaagacagccttgtggtactggatggaacatgtgcgtcctgtcatcaaccagggttttggtgcaaccattagagctatcaatggccgacttgaatgtgatggtgcaaaccctagtactgttcaggctcgtgttaattactacacccagtattgttcacaacttggtgtttcccctggtgacaatcttacttgctaatttatcagtatagatggttccatatgatgacatcatacattcatacggtatatcttaacatatatcagaaaataaaccattcaaggcttacagccttattttgattattaatgtaattactacttttgggaatattgtatctgattaccatcgatattgtgcatccaatattgaataaaaatacgttatttctgtgataattagtttgtagcagccagtttaattgccaagatataaataggactgaaatttgaatgacaggttttggcctataatcaataatcttattaacaaaatagttcacatatagattttgttgatgttgaaccctaataaataataacgtttggtctcaaaaacctgc

SEQ ID NO: 290 - DNA, 1380 bp, Glycine max
  misc_feature (27)..(27): n is a, c, g, or t
gtaccgggccccccctcgagtcagctnacgtaggccccccccccccctatttggctgggacgattcagatcttagggtttcttcttcttttctttctgtggagccccattgaccatagccgccagccagagagagaagagaagccttcgatcgtaggttttcttaccctcctttctcccaaatcgggcctttccgcttctcgattcgcttccgcagctgagcgatctggaaaacccagaaaagaaccaaccgaacgttttatatttttcggataatcaatcaattgaagatgtctcgttgcttccctttcccccctcctgggtatagggcacgtggcgaggccttgatcaaatcgattaaggtttgttgagccgtttcgattttgcgtttgtgctcaactctctctgcatgttgtttctctgcataaaactgccaccccccctttttgcgcttgggttgtatattagtgccaaacgctgccgttttaaatgtgttttgatcgaaccctagaacccagatttggccatgttgtgagcaaagatctgttgccccgcggtcattctctaaaacttttataatattatttagggttttcttttgggtaattagtaaaccgaaattgttttgtgagacctagaaaaagggtttcggtttttataaggattttataatgcatgcagttcttccaaatcactaacaattgtttttaataattggtgggtgtttttcacctatgttgcctaaaaaacctgaaatgtttttttttaaaccaataatctctgttacgtaaatggtgaattcaaatattggatcggttttttgtagttaggatcacgttaggttatataatctgaggtataaagatgcgaaatcatatgaaactcgttcattttgattagtgggtgattgggtaatcttcgattttctcactcattggtagaaatgactcaggttattttactattttgtggcatgtgattgctactctcttgtatatatgaaataaaatgtaaatagttattgttcttgcaattgttgaaacgattgttcttgactaccaaaagatttgtaaattgtaaagagatatgaaatagctctagttcttgaattgcatggtgaagcaaagattgaaatgcttgcatagcatgtttgtttctttggacttcttccctatcatctatttgaaaatgttattctggtgctttaaagctccgagaggagatggagaaagcagagaaggaccggagggagaagaaggagaagaaaagggaaaagaaagagaggaaaagagagaagaaggagaagaaagagagaagaaaaaaaaaaaaaaaaaagaaacttaaagaaggagcaagtgccttccctggcactgatgatggc

SEQ ID NO: 291 - DNA, 1443 bp, Glycine max
  misc_feature (6)..(6): n is a, c, g, or t
cccggngtcgacccacgcgtccgcagtaagagaaaaaggagctccccagaatcaactcatgatcatggatctgctattaaaattcgacttccgttgaggaagcatagagaacctgaagaattgaaatccaaatcaaaatttcaagcggggtgttcttctggaagtgtgggggcatctgctacgtccgccccccaaactacacttggaagtgatcgtcagtcacaatgtctcaggattacagagctgaatcgggtacttggaaactctgattcaagacatggcaaagcaatgcagaattcagttcatggagatgttgtggtcactaagaataccattggaagtaatcgtcagtcacaatgtcacaggactacagagcccaaacatgttattggaaactccggcaaagtgatgcagaattcagttcatggagatgctgcggtcattaagaataccattggaagtgatcgtcagtcacaatgtctcaggaccacagagcccaaacgggttcttggaaactctggcaaagtgatgcagaattcagttcatggagatgctgcggtcattaagaattccattggaagtgattgtcagtcacaatgtctcgggaccacagtgcccaaacgggttcttgggaactctgtcaaagcgatgcaggcagttcatggagatgctgtggtcactaaaaagaaccttggaagtgatcaatacctcagggttacagaaccgaaacgggttcttggaaattctgattctagaaatggcaaagcaaagcagaatccagttcatggagatgccgttgtcactaaaaatacctttggaagtgatcatcagttgaaaagtctcgagattacagagcccaaacggattcttggaaactctgattctaaacattgcaaagcgttgcagaatttggttcctggaagtcaaaaagttgaatctttgtacgaatctttgttacagattccaccactaacgtatgatggattggactcggtatatgatgattggttatttagttctgaaccgaaagagtcaaggcccgtctcgaagaaacagaagtgtgattctgatgtctttcagctttcaaattctatgtggcctcgtgcacaatacttgcctgaggtcgaagtatatgcgttgccatacgcagttccgttttgattcttttggattattttttgacaataggtggtagtttgatgaaagtagggagctgttctgtgttctaattgagaaccggtggatgattgtttttttgaaagagaaaaacaattacatggcatatgggcaaagattgcgttaatatgttcaaacatgatcgatgtaattttgtcatccatacttggcggtagtagtatttgtagaatgcacagacataaatattatagtagtaaaacagttttttagcaacccaccccgcgcagacccgccgcgcccgggccg

SEQ ID NO: 292 - DNA, 1163 bp, Glycine max
  misc_feature (1131)..(1131): n is a, c, g, or t
attttttggctgagacgattcagatcttagggtttcttcttcttttctttctgtggagccccattgaccatagccgccagccagagagagaagagaagccttcgatcgtaggttttcttaccctcctttctcccaaatcgggcctttccgcttctcgattcgcttccgcagctgagcgatctggaaaacccagaaaagaaccaaccgaacgttttatatttttcggataatcaatcaattgaagatgtctcgttgcttccctttcccccctcctgggtatagggcacgtggcgaggccttgatcaaatcgattaagctccgagaggagatggagaaagcagagaaggaccggagggagaagaaggagaagaaaagggaaaagaaagagaggaaaagagagaagaaggagaagaaagagagaaggaaagcggagaaagaaaggaaacttaaagacggagcaagtgcctcccctggcactgatgatggcaaaaagtttaagctcatcaacgaactaaaggaaaccaaagcagatggaaaattgcaaaagggtgaagacagtgagaatgaacaacatgagaggagtggaattacagaggaacttgacctacctgtcacttctgtggagccttgctgcctttctgactgtactcaaagcagtaagagaaaaaggagctccccagaatcaactcatgatcatggatctgctattaaaattcgacttccgttgaggaagcatagagaacctgaagaattgaaatccaaatcaaaatttcaagcggggtgttcttctggaagtgtgggggcaactgcaaattccttcactaaaactacacttggaagtgatcgtcagtcacaatgtctcaggattacagagctgaatcgggtacttggaaactctgattcaagacatggcaaagcaatgcagaattcagttcatggagatgttgtggtcactaagaataccattggaagtaatcgtcagtcacaatgtcacaggactacagaacccaaacatgttattggaaactccggcaaagtgatgcagaattcagttcatggagatgctgcggtcattaagaataccattggaagtgatcgtcagtcacaatgtctcaggaccacagagcccanacgggttcttggaaactcttgccaagtgatgc

SEQ ID NO: 293 - DNA, 1193 bp, Glycine max
cactaggactgtgcaaaggttaaaaattcttctcttggtaaaaggctacttttaagccggaatctaatataattccgctgcgggaagacgacagaaggggatgtctcataaggaaagccaagggtaagtgtgggactcaaaacggtgatgatggttgaagttaagaggaaggagccggacaccgaaaccagtcccggagatgacacaacaaggcatactaagaagacaaaggtccaaccaggtgaaacctttttcgcagttaaggtcacagacaacatcaacacatcatctccgtcgtttattcagccaatgcttgacagcgagaaaacgccatcctcggactccaagggttcagcgggaaacgctgcaccgtctaattattcatcaatcgttgacccacattctccccaaggaaatggcagtccacaatctcaaccctccgtctcgaccaatcgtagcatatcagacgttgattcagcggtacaaatgttagaggcaggctcaggggtcactgtacatgtggaccttgatgagcgcgtcggagaatatgttgtgaagatcaagaggagcattaattcaactgcagaaaatgaacataaattggaagagacaaagcaattggctgaaagtgctggaatgttgttagttcaagctgaggtccttcgtcacatgggagagcaactacttgttaagtacagagaatcggttcaacgtgtaatccgaaagcctgcgctcagaattgatttctcaccatgagtaactttcctacgttcattctgccattctgggataaaacttaggttgactaagtcaggtgatttttgagttattttttaatgaatattaaaattttatctcgccaatttatatgataatagacgttgtattgatgtaaattattgagataaaattgtaattgttattaaagaatatcattaaaaacactgagttatgtcttattttttattatgttctttctgttaagaagtatcttgcctctgatccgattgcattgaattactaggatattaagatgtttctcccctagctgggtggagatcgtagatctaggtcgttgttgtaaaataacatggtgatgtccctaagaagtaacatgggtatggttctgatcttttacttttgaattcgatttaataaaagtgttgttttgttcaaaaaaaaaaaataataat

SEQ ID NO: 294 - DNA, 1676 bp, Glycine max
  misc_feature (1170)..(1170): n is a, c, g, or t
tcagctacgtaggcccccccccttatgatttgggataccctcgtgagttactaaattggtcttttaactggaagtacatggtcaggggcttggttcttgacaaaaaaagaggcaacatattgaagatggatcgccacaagtatgtgaaagtagcctatcatggattcagagagttatcaaaagaagataaagttgggacctatggaaatactttagtacgcgattcttttgatgaaccagactatgctctaattgatacactcttttcacttgcggaagcctacttgtttgctcaactggttgattataaggattacaatcctggcaagattcaagagggtgttgattatgcttgcatgtacaaagatgttcgagctgcagttgacttgtgccaccgtgacggaacattgaagcaaatggttgctatagaaccaaagcggtatattaatgaagactcctcaatagtgcccatgcttgaaatgctcagagactctggacaagcaacgtttttagtgacaaatagtttatgggactatacaaacattgtcatgaatttcctctgtggatccagtatggcagatgtcagtaacaatttcggctggcttcaatactttgatgttgttatcactggcagtgcaaagccaggattttttcatgaggaaaatcgtgccaccctatttgaggttgtgcctgagactggaatgctactcaatacagataatggctctcctataccccaggtgggtaatacctcagcaaggctattcacagaagcaaagaatcatgcttgtccagttttccagggaggcaatgtttctcatctgcataaactgctttccattgaatcaagttcacaggttctctatgttggggatcacatttatggagatatactacgcagcaaaaaggttcttggatggagaacaatgcttgtaatcccagagctggagaaggaggttaaactactctgggaatctagggatacccgcaaggaacttcaattcttgaggagtgagcgggactgcattgaggatgaaatacatcatttgaaatggtctctcaaattcaagaatccagatgctgattccaagcagaagttatcttctgaacttgataaattaaagcttgaaagagagagagtgcgattaagtcatcaagaagctcagaaanaattacatcaaagggtagaaagttcacctgtagattatctccagtttcctttcttcctattagcacgtttcacgagccatggggacagcttatgaaaactggttatcagaattctcgctttgctcatcaggttgagagatttgcttgcctttatactagtcaagtatctaacctgggcttatactctccagacaagtattacagacctagtgaagatttcatgcaacatgaatttggcattatggcttgtgagacgccagacatttaagttgaggaatttggggtagtttggatttggaaaccgaattgccgaattctgctctgcccagtgttcagtgttcctggttctcatctcccttctctgttttgttggctttggacagagctccgtttagtaattgatctctccccctcccccccaaagaaaagaaaaagaaaaaattgctatatagtattatttttaacgtttgctacagtgggtaaaaaatactagattttagcgttgt

SEQ ID NO: 295 - DNA, 860 bp, Glycine max
gaactagtctcgagttttttttcggtccctttgcttcgtaggccacaggtttcgcgattccattttcactcggtcctgttgtgtgtgcgcagaataaaatttctcatcgacgatggcgaataccttacaacgcgcccttcgcgccaccatggcccggccgttctccaccggcgcattggccgaaattaagcgaggcgagatcggaatggtttctggaattcctgaagaacaccttcgtaggagggttctaatttactctcctgctagaactgcatctcaacaaggatctggaaaggttggaagatggaagatcaacttcttatcaacccaaaagtgggaaaatccactgatgggctggacatccactggggacccctactctcatgttggtgattctgccttgacttttgatagcgaacaagcagcaaaagcatttgcagagaaacatggttgggagtattcggtcaagaagccccacacaccattgctgaaggttaaatcatacgcggacaattttaaatggaagggaccacccaaatctggtgaagagtgatttgttggtttgtattcatgttaatgcattccgtcttctggagtttaacgtgcagcagttttctctgcatcttttcttggaaaaaagaaagttttaatgtgaattactgattggaaataaaagggactgatctgccatttatttagttttcttctatgatgtagatactgcatctgtttataatcgatttggcctaccatcttaactgaacgctgtaatgaacaattggttgcaggacaaactgatccaataatagctgctgactctgggcaacagtttttatatacttaagagtaataattatcgt

SEQ ID NO: 296 - DNA, 884 bp, Glycine max
ttattattttaaaaagtaaagggcaagctgataattttttaagtttttacagtaaacgaaagaagagaggtttcgcgattccattttcactaggtcccgttgtgtgtgcacggaatcaaatttctcatcgacgatggcgaataccctacaacgcgccctacgcgccaccatggcccggcggttctccaccgacgcattggccgaaattaaacgaggcgagatcggaatggtttctggaattcctcaagagcaccttcgtaggagggttctaatttactctcctgctagaactgcatctcaacaaggatctggaaaggttggaagatggaagatcaacttcttatcaacccaaaagtgggaaaatccactgatgggctggacatccactggggacccctactctcatgttggtgattctgccttgacttttgatagcgaacaagcagcaaaagcatttgcagagaaacatggttgggagtattcggtcaagaagccccacacaccattgctgaaggttaaatcatacgcggacaattttaaatggaagggcccccccaaatctggtgaagagtgatttgttggtttgtattcatgttaatgtattccgtcttccggagtttcaacgtgcagcagtttttctctgcatattttcttggaaaaagaaagtttaatgtgaattactgattgaaaataaaagggactgatctgccattggtttagttttcttctatgatgtagatagatactgcatctgtttaagattgattcggcctaccgtctttaactgaacgctgaatgaacaattgagcaacagtttttataaactcgagtactaatccacaagtgccctgaactttattataaaaaaaaaaaaaaaaaaaaaa

SEQ ID NO: 297 - DNA, 1907 bp, Glycine max
gatcccacgcgtccgtacggcggcaagcacaatgcatcatctcaaagaaattaagagagttttttttgttcctcactgaccaagccatggcgatgagaaccaaactttctttagctatctttttcttttttcttttagccttattttcaaacctagcctttggcaaatgtaaagaaaccgaggtagaagaagaagaccctgagctcgtaacatgcaaacaccaatgccaacagccacagcaatacactgagggtgacaagcgggtatgcttgcaaagatgtgacaggtatcatcgtatgaagcaagagcgagagaaacaaatccaagaggaaactcgtgagaagaaagaggaggaaagccgtgaaagggaagaagaacaacaagagcagcatgaggaacaagatgaaaatccctacatttttgaggaagataaggattttgagaccagagtcgaaactgaaggtggcagaattcgggttctcaagaagttcactgaaaaatccaagcttcttcagggcattgagaacttccgtttggccattttggaagctagagcacacacgttcgtgtctcctcgccactttgattccgaggttgtttttttcaacatcaaggggcgagccgtacttgggttggtgagtgaaagtgaaacagaaaaaatcacccttgaacctggggacatgatacacataccagctggcaccccactgtacatcgttaacagagatgagaatgataagctcttccttgccatgctccatatacctgtctctgtctctactcctggaaaatttgaggaatttttcgggcctggaggacgagacccagaatcggtcctctcagcattcagctggaatgtgctgcaagctgcgctccaaaccccaaaaggaaagttagaaaagctttttgatcaacagaacgagggaagtattttcgcaataagcagagaacaggtgcgtgcgttggcccctaccaagaaaagctcttggtggccattcggtggcgaatccaagcctcaattcaatattttcagcaagcgtcccactatctccaacggatatggtcgtttaactgaagttggtcctgacgatgatgaaaagagttggcttcaaagactcaatctcatgcttacctttaccaacatcacccagagatctatgagtactattcactacaactcacatgcaacgaagatagcactggtgatcgatggcagagggcatcttcaaatatcatgtccacacatgtcatcaaggtcgtcacactcgaagcatgataagagtagcccttcataccatagaatcagttccgatttgaagcctggaatggtgtttgttgtccctcccggtcatcccttcgtcaccatagcttccaataaagagaatctcctcatgatttgcttcgaggttaacgctcgagacaacaagaagtttacatttgcagggaaggacaacattgtgagttctctggacaacgttgctaaggagcttgcctttaactatccttctgagatggtgaacggagtattcgacgattcctcgaacggaaattgataggaagactctaccacttgcctcataaggaccgaaaggagagtttctttttcccttttgagttgccgagagaggagcgtggtcgtcgcgctgatgcgtgagaggtttagaacaatcaagaaaaggtgtgcatgtggctgaagatcacggggaatgtattaagcttcagagactctttaaattaaattttctgtattttgtgttatatgttactagttctttaaattagccagatggagtttatgtgtatctaaatgcagggatgctaatggaataaaatggccacttgtattgttagctatctcttatggtagcaaaaaaaaaaaaaaaaaaaaaaaaaaaaaaaaaaaaaaa

SEQ ID NO: 298 - DNA, 1743 bp, Glycine max
tctcgagccgattcggctgtgagtttgttgttcctcactgacctcaccatggcgaccagagccaagctttctttagctatcttccttttctttcttttagccttgatttcaaacctagccttgggcaaacttaaagaaaccgaggtcgaagaagatcccgagctcgtaacatgcaaacaccagtgccaacagcaacggcaatacactgagagtgacaagcgaacatgcttgcaacaatgtgacagtatgaagcaagagcgagagaaacaagtcgaagaggaaactcgcgagaaggaagaagaacatcaagagcagcatgaggaggaggaagaccaaaatccctacgtttttgaagaagataaggatttttcgaccagagtcgaaacagaaggtggcagcattcgggttctcaagaagttcactgagaaatccaagcttcttcaaggcattgagaatttccgtttggccatcttagaagctagagcacacacgttcgtgtccccacgccactttgattccgaggttgtcttgttcaacattaaggggagagccgtacttgggttggtgagggaaagtgaaacagaaaaaatcaccctagaacctggagacatgatacacataccagcaggcacaccactgtacatcgttaacagagatgagaatgagaagctcctccttgccatgctccatatacctgtctctactcctggaaaatttgaggaatttttcgggcctggaggacgagacccagaatcggtcctctcagcattcagctggaatgtgctgcaagctgcgctccaaaccccaaaaggaaagttagaaaggctttttaatcaacagaacgagggaagtattttcaaaataagcagagaacgggtgcgtgcgttggcccccaccaagaaaagctcttggtggccattcggcggcgaatccaaggctcaattcaatattttcagcaagcgtcccactttctccaacggatatggccgtttaactgaagttggtcctgatgatgaaaagagttggcttcaaagactcaacctcatgcttacctttaccaacatcacccagagatctatgagtactattcactacaactcacatgcaacgaagatagcactggtgatggatggtagagggcatcttcaaatatcatgtccacacatgtcatcaaggtcagactcaaagcatgataagagtagcccctcataccatagaatcagtgcggacttgaagcctggaatggtgtttgttgtccctcctggtcatcccttcgtcactatagcttccaataaagagaatctcctcataatttgcttcgaggttaacgttcgagacaacaagaagtttacgtttgcagggaaggacaacattgtgagctctctggacaacgtagctaaggagctggcctttaactatccttctgagatggtgaacggagtcttcgaaagaaaggagagtctctttttccccttcgagttgccgagcgaggagcgtggtcgtcgcgctgttgcgtgagaagcagtgtggaggtggctgataacggggaatgtatttagctttgagagtctttaaattttctgtatttgttgtaatgttagtagttccttaaattggccagatggagtttatgtgtttgtaaatgcagggatgctaacggaataaaatggccacttgtattgctaaacaaaaaaaaaaaacaatagaaagggttgaatcgagctaatccgagtttcattcagt

SEQ ID NO: 299 - DNA, 2512 bp, Glycine max
ctttaactcaacctcaacatcagctacgtaggccccccccccaacttgttgcaccgtaactgaaaattgaaaccctctttcgcaaaatttcccaatttcgcgaaaccctaactagccctatggaactctctcgtctcttcgtttccgacacgtgcttcttctcccctccgattcgctgctccccttcgccggcgctgtccacgtttttcgccgtcaagaaccgccggagcaggaggaggagcagcttctgttccgcctccaatcccgacaccttggtcgccggcggtgccgccgtcgtcgctggggccggcgagaagcacgaggaggacttgaagtcttggatgcacaaacacggcctccctccctgcaaggttgtgctgaaggataaaccttgccccaatgattctcataaacctatacattacgtcgcagcaagtcaagatcttcaggttggcgatgttgcattctccgttcctaattccttggtggttacgctggagagggtgctgggaaacgagactgttgctgagctattgactacaaataaattgtccgaattggcgtgcttggcattgtatctgatgtatgagaaaaagcaggggaagaaatctttctggtatccgtacatcagggagcttgatcgccaacgaggtaggggccaactgtctgtggaatcacctcttctatggttaaaatctgagctggattacctgtcaggaagtccaattaaggatgaagttattcaaagggaagaagcaataagaaaagagtataatgaacttgacacagtctggtttatggcaggttctctatttcagcaatatccatatgacattcctactgaggccttttcatttgagattttcaaacaagcctttgctgctattcagtcttgtgtggtgcatttacagaaagttagtttagctcggagatttgctttagttcccctgggacctcctttactgtcctaccaaagcaactgcaaggcaatgctaactgctgttgatggcgctgttgagcttgcagttgatcgcccgtataaagccggggacccaattgttgtgtggtgtggccctcaacctaactcaaagttgcttataaactatggttttgttgatgaaaataattccaatgatcgtcttatagttgaggcagctttaaatactgaagatccacaatatcaagataaaagaatggtggctcaaagaaatggaaagttatcagttcaagtttttcatgtatatgctgggaaggaaagggaagctgtcttagatatgcttcgttatatgcgtttgggctatgtttcagatccttctgagatggaatctgtcatctcctctcaaggtccagtttgtcctgtaagcccttgtatggaacgggctgcgttggatcagttggctgattatttcaaggcacggctggctggctaccctacaacattggctgaagatgaatctatgctgacagatgataatctgaatccaaagaagcgagttgctacccaatatgttaggctggaaaagaaaatgctccatgcctgtttgcaggcaaccaccgacttcattaaccagcttccagaccacactatatctccatgccccgctccctatgcacctttattgaaatgaaaggaactggaaatgtatgtagtctgaactgtacaaatatggatttgatgaaccaggtcagtcaaattatatattcttgatatgcatccaattagaaatcccctgaattaaggtaatttgtggtttatcctcttcagctttggtttatatgtgaatgtaggactttaggattggataaagatactcaattctttaaacttctcactgtgtgaaaaacaccctttgttagcaaaccattaaatgtcagctgagttgtaagacaataatttctttgaaataaaaaaaataaagttaggaaagagataatcttgcattatccattttttaaaataaaataaaatgcttgtgctgtgttgattggtagttagtgtttcatgattgttcttttctcacatttctaactgctttagtagatgcttatgcattataataggagagtgacaattccctgtatctgaaagaaagaacagtgcatgaagtttgattttgaaaaaccatgatgcatagaataaagtaatttctgaatactatgacggatttcgtaggtcaattacaaatgcatatagttgaatcacggctcattgaacaatgatgcaagagttccggatttaaaaggttatgggtctgcctttccccctgaagataaaatctcaatccgagtgttttctgcatgcccccttcaggtaggcgtgtcgcttcattccctaggtaggacttaggaggaaaggaaccatcatttgagcaaatttttgtgtcttactgtaattgtaccgacgattcgaaatttgagtgttggaatgatactcaactttgtaaatggaaacctgaatcccaaatcctaattcaattgtgcatatatagttccatgaaaaaaaaaaaaaaaa

SEQ ID NO: 300 - DNA, 666 bp, Glycine max
  misc_feature (620)..(620): n is a, c, g, or t
gttcagttctttggtttgacatctttctcaaagaatctcttatcttctttctttcccattttttcattccactttatctcaacctcgatttttccattttccgattaactcactcttttcacgatcttatctacatataatttcaaaatttttaatttctcaattgattgtttgtgacggtgatcgatcggtcggcgcgatcgtacctgcatctcttctcttccagtgtataggtttggagaatgagttctgtgcaaggaccagttgtgtgcccttctgtccgtgccaaacaagtagggttctgcagcattcctatgattggggcagtgaaaatgaacgttagacgcattagaagtgaattttggggtctcaatggcgccaaggctaaacccggttttctttcttgccgtataaacacacgaaagtacaagactgtgcattgtacttttaactcaccctccaatgacagtggaagtactgctgacaatttcaatgaaaaagatgaagattatgttaattctagcgtcattgaagctgttgaggtgaagagtggagcagatggtttcataatcaaaatgagggatggaagacacttaagatgcgtccataacaatcctcanggaggacatcttccagattatgcaccacatcctgctattgtattga

SEQ ID NO: 301 - DNA, 862 bp, Glycine max
  misc_feature (826)..(831): n is a, c, g, or t
tcgaccttcagatgctatcaacattgcagtaagatgcaaggttcctatacaagtcaacaagtacttggcatacagtgatggtatgagagtaattgagtcaggcaaattgtcaacacagttccctggtatggatggccgactatttactgaaatggaccggccaagtggtcaaccttgttccgagaccacggagtttaatcttttgcacaacatgttgaaagctgttgttgaagagcgctataaagatgctgctttgttcagggaccaacttaatcaacttagggcagggaaaaatatgaaaaacagattctgaatgctttaattgtaaaaatacaatcttacattagaatgtcaaagggggttcggtacagctgagctgattgcagtcatgtctcttccttcctcggtctatatatgcttacattgtctgtgaatatttgtatatatttataaacattaatgctaatgcaatcatgtggaacttttcactgcttttctgagacttgtttcaatcttaaaaagctgttaatatgtaatgtgtttttctatccatgggatgcagtatgcgactgatggatgtgtttcgctgtattattcaaaatatttgggatgattagataaaatgctgtaaatatattacttggttctcagttatttgtgcatttgtttttttttaggtagactagctaataggagaacttttatatgtatttgtactcaaataaccattcagtgcttattcaattcgattcttccactgaattacgctgaacaatcactctgcattgtcaatccctaattttagtttgtagatacctcccaaagnnnnnncctatcatgttgccaggaagccagagtagac

SEQ ID NO: 302 - DNA, 1681 bp, Glycine max
gaataatgattcaatctcaggccgtccgctcgtctctctctctctctctctctctccgtatttatatgttcagctctttgctttgacatctttctcaaagaatctcttatcttcttctatttccctttgtctcaacctcgatttcccccctattttctgattaactctttacacgatcttatctacgaataataaaaaattaattcctcaattgattctttgtggcggtgttcgatcggtacctgcatctcttcttttccaggtttggagaatgagttctgtgcaaggaccagttgtgtgcccttctgtccgtgccaaacaagtagggttctgcagcattccaatgattggggcagtgaaaatgaacgttagacgcatccgaagtgaattttggggtctcaatggcgccaaggctaaacccggttttctttcttgccatataaacacgcgaaagtgcaagactgtgcattgtacttttaactcaccctccaatgacagtggaagtaccgctgacaatttcaatgaaaaagatgaagattatgttatttctagtgtaattgaagctgttgaggtgaagagtggagcagatggtttcataatcaaaatgagggacggaagacacttaagatgcgtccataacaatccccagggaggacatcttccagattatgcaccacatcctgctattgtattgaagatggaagatggcactggtctacttctccctataattgttttggagatgccaagtgttttgctaatggcagcaatacgcaatgttcccatagctagacctactttgtatcaagtagtgaaggagatgattgacaagatgggttacgaagtcaaatttgtcagagtaaccaggagagttcatgaggcatactttgctcagttatatcttaccaaggttggaaatgacgcagaatatgtgagctttgatcttcgaccttcagatgctatcaatattgcagtaagatgcaaggttcctatacaagtcaacaagtacttggcatacagtgatggtatgagagtaattgaatcaggcaaattgtcaacacagttccctggtatggatggccgactattcactgaaatggaccggccaagtggtcaaccttgtgccgagaccacggagtttaatcttttacacaatatgttgaaagctgttgttgaagaacgctataaagatgctggtttggtattttttacccttgttagttggagtagtatcagcatgctaattgtccttttggttaaggatcctctcatgttagtattcttaaaacacgactttttcagctttgttcagggaccaacttaatcaacttagggcgggaaaaaacatgaaaaacagattctgaatgctttaattgtaaatacaatcttatattagaatatcgatggggttcggtacagctgagctgattgcagtcatgtctctcccttcctcggtctatgtatgcttacattgtctgtgtagcaattgtaaatacaatcttatattagaatatcgatggggttcggtacagctgagctgattgcagtcatgtctctcccttcctcggtctatgtatgcttacattgtctgtgtatatttgtatattgtatatatttataaacattaatgctaatgcagtcatgtgaaacttttcactgcttcaaaaaaaaaaaaaaaaaa

SEQ ID NO: 303 - DNA, 1095 bp, Glycine max
tgtggatggaatcaaccacgttatcctctcaatattttctctctttcctctctaaccaaaaacaaaaagaaaaggaagctaactaaacaaaattctgatcggctcgagctcgagccgtcgcagtaaagtatcaaccaaaccaacaatccaacaccatgaaactctctgttttccaccatcagcaccatcctatgattctcaattgcccccttaccttgacaagaacacacaaaagacttaacaacaaaggttcatataggtggttaccatgccactgctcacattcttccacaaataaaattgctgctgaaccagttacggtgtctttaagtattgaaggaaggagagcattactcagttgtctcctcacaactgttgttggagtctatgcatgtgatgtggctggagctgttagcacaagtagaagagctctaaggggagccaaaattcctgaaagtgattatacaaccttgcccaatggtttgaagtactatgatttgaaggttgggaatggagctgaggctaaaaagggatcccgtgttgcaattcactatgttgccaaatggaagagtatcacctttatgactagtagacaaggaatgggcgttggaggaggaacgccctatggatttgatgtaggccaatctgagaggggaacagtccttaaagggttggatttaggagtacaaggcatgcgggtaggaggccagcgactgttaattgttcctcctgaacttgcctatggaagcaaaggagtccaagaaatccctcccaattcaacaatagagttggacattgaattgctttctatcaaacaaagtccattcgggactccagtaaagatagttgaaggttaatgcaatgatttaatattgataataaatactttaaaactttaaaatgttaatttatctacgattaagaatgtgataataaattgatttatctctctctccacttgcaacccgaataagatatataggattcagaactgtatcacatgtattaggttctttaaccattttataatggagtacaccttcccaagcttgcccaaatggcaattggaaaaattgacaaaaaaaaaaaaaaaaa

SEQ ID NO: 304 - DNA, 1519 bp, Glycine max
ccggaatacccgtcgacccagcgtccggtttaataagtctcagaaacactcactcactcggttcttctcaaaccgtcaccgtcgaggctatgcccaccaacgaagacttccagagtgtttcaaattgctatgtgttcaagagccgattgcaggagtatgcacagaaggcggggctgcccacgcctgtctatgaaactattaaggaagggccttcccatgaaccttctttcaggtcaacagtgatagtgaacgacgttcggtatgattctttgcctggatttttcaaccgcaaggcagcagagcagtcggccgccgaagttgctttggtggagttgatcaaatctttttttgtttgccgcccctgccctcgtccggtttgttttttccagcatgaaacaggattatgcaagaatttacttcaggaatatgctcagaaaatgaactatgcaatgccaatgtatcagtgcaagaaggatgaaacaccaggtcgagcatcagtattttcatgtacggttgacattggggggattctatatattgggggagcagcaaaaacaaagaaggaagcagagataaaagctgctagaactgctttattagctatccagtcaagtgcatctcatgcttccgaaaaccaggttggccatccacagttgaccgtccttccatgcagaaaaagggcaacaagttctgttgccatagctgatgagaattcaaatcccccaaagcctaagaaagcgcggtttaaaaggaagtcttccaagaggaaaccctctagagataagatgggccaaattcatactgaaaacttgggcattggagaaattatcaatcatgaggtagaaacacatgcaagtgttaatggtgaatctggcctccttgaaaagaaaaccgaaacattcacttcagaagccgccaacaattttgagaatggagtatcagttaattatcaagagaaagaaacattggctggggagagttctcttgctgtcaatagccaggaaggaatttttgagaatgggaagtcaacagaattatattccaaggagaacaatcttgtgactgttgttacagaactatcttctgtgtcaaatggaggcataccggaaacaggtgtggaggtgaacaaacagcaatacaatggagaaatggtttctgaccattgtgttgtggggggttgaggcttattgaattatttaaattggaaggtaagattcaagcaatggcagtcatttattagtgttaggaaccttgaggcttccaactgtttttctttgttgggtgtcactcaattaggaaagtaaaatacaggatgtgatgattctcatagcatgttgataatttttatcgtttaactgatgagggtgttttaacaccatttatttatgttgtattagtatatttgagttatctgctccatttgtccgcgacatgggacatggatttggacgggtttgagtttatattaaaaacgctgtttcctttcagagtttaaaaaaaaaaaaaaaaaaaaaaaaaa

SEQ ID NO: 305 - DNA, 2286 bp, Glycine max
attaaatttgtccattccccgctaccgtcgccccccccccgtgcaacgcagaactttgctggcgtactcatcgtgacgaaattaacccaacagcacacagcactttccccaaatcaaatcatcgaaaccctaactcgcgattcccgatcgaaaccctaactcgcgatggcgatcttgctgggcgaaattcttcaatcgctggagctgtggctgaagctgatcaagaacccgcagcctcagccctacgtgaaccctaatctggaccccgttttgctggtgcccggtgtcggaggctccatgctgcacgccgttgacgaatccgaaggaagccgagaacgcgtctgggttcgcttcctcaacgccgagtacacgctcaagaccaagctttggtcgcgttacgatccttccaccggaaaaaccgagtccatggatccaaattcaagaattatggttcctgaagataggcatggactccatgcaattgatattttggaccctgacttgatgttgggaagtgattctgtgtattatttccatgacatgatcgttgaaatgcgtaagtgggggtttgaagagggaaagacgctttttggttttggatatgattttcgccaaagcaacaggttgcaggaaacaatggatcggttggctgcaaagttagaatcaatttataatgctgcaggagggaagaaaataaacattataactcattctatgggcggtcttttggtgaaatgtttcatgtgcctgcaaagcgatatttttgagaaatatgttaagaattgggttgcaatttgtgcgccattccagggtgcaccaggaaccatcaattctacctttttaaatggaatgtcatttgtggaaggatgggaacaaaacttttatatttccaaatggagcatgcaccagttgctgattgaatgcccatcaatatatgaacttatgggttgtcctaattctcattggaaacatattcctgctctggaattgtggcgtgagagacatgattctgatgggaaatcacatattgttctggagtcatatccaccatgtgatagcatcaaggttttggagcaagctcttgtaaataacatagttaattataatggcgaggatttgcccctgcctttcaactttgagatcctgaaatgggcaaacaaaacatgggagattctgtcttctgccaaacttccctcgcaagttaaattttacaacatttatgggaccagtcttgagacacctcatagtgtttgctttggaagtggggacaagcctgtcacagatctgcaacagttacgttatttccaggccaaatacgtatgtgttgatggagatggaacagttcctatagaatcagcgaaggctgatggtctcaatgcggaggcaagggttggcgtgcccggtgaacatcagcgtattcttcgcgagcctcacgtatttcggcttctcaagcactggctgaaggctggagaacccgatcccttttacaacccggtcaatgattatgtgattctacctactgcttttgaaatggagaggcataaagagaagggtgtagaagtagcatcccttaaagaggaatgggaaattatttccaaagtccaagatgaccaaagcagcacagcagataaagtgtgttccatatcagtttcacaagaaggagccaatcaatcttattctgaggctcatgctactgtcattgttcacccagacagcgagggtaaacaacacgttcaactgaatgctttggctgtttcagttgatgcctcatgaataacattctgttgaagcctttctgcgtgtttggaaaaatgttgggttcgacgtaacccaccttttttttccaatccagctgtatataactgttccgtttgctgctatggaacacgtgaacggagtttggagctgtgcaaacggcaaaccaaacactcacatgtattgttgattatggatgacatctcttgtatataatgatattcgtttgatgttgctgtgccatatccctcccgatttatgtatgatatgtgaagcgtatgtatcagttatgaaaatgaataccatcgttctgaaattcttgtatataatgatattcgtttgatgttgttgtggcctattcctccgtgttctatgtttgatagtacatgtgaagcgtatgtatcagttatgcaaatgaaataccaacaaataaaaaaagaatgaacaagacaaagaagaaaacagcaagctattgtattttatttgagtaatgatatgagaacactttaaaaatgcatatcgattttctcc

SEQ ID NO: 306 - DNA, 1209 bp, Glycine max
accaggtcatttgtggaaggatgggaacaaaacttttatatttccaaatggagcatgcaccagttgctgattgaatgtccatcaatatacgaacttatgggttgtcctaattctcattggcaacatattcctgttctggaattgtggcgtgagagacgtgattctgatgggaaatcacatattgttctggagtcatatccaccatgtgatagcatcgaggttttgaagcaagctcttttaaataacacagttaattataatggtgtggatttgcccctgcccttcaacttggagatcttgaaatgggcaaacaaaacatgggagattctgtcttctgccaaacttccctcacaagttaaattttacaacatttatgggaccagtcttgacacacctcatagtgtttgctttggaagtggggacaagcctgtcacagatctgcaacagctatgttatttccaggccaaatacgtatgtgttgatggagatggaacagttcctatagaatcggcaaaggctgatggtctcaatgcggaggcaagggttggtgtgcctggtgaacatcagcgtatccttcgtgagcctcacgtattccggcttctcaagcactggctgaaggctggagaacctgatcccttttacaaccctgtcaatgattatgtgattctacctactgcttttgaaatggagaggcataaagagaagggtgtagaagtagcatcccttaaagaggaatgggaaattatttctaaagtccaagatgaccaaagctgcacagcagataaagtgtgctccatatcagtttcacaagaaggagccaatcaatcttattccgaggcgcatgctactgtcattgttcacccagacaatgagggtaaacaacacgttcaactgaatgctttggctgtttcagttgacgcctcatgaatcacattctgttgaagtattcgtaacgtggagggaatactttctgtctttggaaaaagctagggttcatggtaacccaccttttttccaatccagctgtatagttactttaacgtttgccaatttggaacacgtgaatggatgtctggagccgtaaagggcaaaccaaacactcactatattgttgattatggttgacatctcttgtatataatgatattcgtttgatgttgcggtgccaaaaaaaaaaaaaaaaaagtatgatatgcgaagcgtatgtat

SEQ ID NO: 307 - DNA, 917 bp, Glycine max
tcagctacgtaggcccccccccttaatttgcatcaccctttattcctgagtgctgggaaaatgcgttatcggctcccagaatatttggaatgttacaaactgatctgtgaaagaaaggtcaaacccttgtatttggttgcccttttgaaatccctaggagaagaaaaatgcatagtttttacaagatctgtggaatcaacacatcatctctgcaaattgctaaattgttttggtgatctgaaaattggtatcaaggagttttctggtctaaaacatcaacgggtaagaagcaagacagtgggtgaatttcggagaggggagtttcaagtgcttgtatcttctgatgcaatgactcgtggaatggatgttgaaggggtaagaaatgtcattaattatgacatgcccaaatacacaaagacgtatgttcatcgagctggtagaactgcaagagctggccagactgggcgttgcttcacattgatgtcaaaagatgaggttggaggatttaagaagttgatgaaaaaggctgaggctagtgattgtcttgagtatactgttccatccagtttgattgaagcgcttcatagtacctaccaatcagcactgacaaaattgaaggagaaaattctggagtcccggagaaaaccaaggataagtcttgtcaatcgatcaaagtgagaacaaatattcacgagaatagttttgcctatgaacggatatacaagagattcttttactgtacattttatgatttaattagaatgataatattatgtttttttgggttacatattatttattttcaccactattttttgtttaatataaaaagaaattaatattatgctactcgtatatttgtttactttacaaaggagaatgtcttcattttattgttgaaaaaaaaaaaaaaaaaa

SEQ ID NO: 308 - DNA, 1510 bp, Glycine max
  misc_feature (1502)..(1502): n is a, c, g, or t
cggtctcgtgggcttttggtaagcatataagggtggttcttgatgttggctgtggtgttgctagttttggtgcgtacttactgtcacggaatgtcgtcaccatgtctgttgctcccaaggatgttcatgaaaatcagattcagtttgctcttgagcgtggtgtaccagcaatggctgcagcatttgcgactagacgctccccccatccaagtcaagcttttgacttggtacattgttcacgatgtagaattaattgggactagagatgatgggatactgcttcttgaagttaataggatgctaagagcaggagggtactttgtctgggctgcccagccagtttataagcatgaagaagttttagaagaacaatgggacagagatgcttaatcttaccactcgtctctgctggaattttttgaaaaaagatgggtacattgcagtatggcagaaaccttctgacaatagttgctatcgagaccgcgaggcaggaactaaacctccaatgtgtgacccaagtgatgacccagacaatgtttggtatgttgatctaaaagcatgcatctctgaattgcctaagaacggatatggagcaaatgttactgaatggcctgcacgtttgcaaaccccccctgataggcttcaaagcataaagcttgatgctttcacatccagatcagagctttttagggcagaatcaaaatactggaatgaaataatagcaagctatgttcgtgttttacactggaaagaaatcagattaagaaatgttatggacatgcgagcaggttttggaggatttgcagcagcattgattaatcagaatcttgacagctgggttatgaatgtggttcctgttagtggcccaaacaccttgcctgttatatatgaccgtggattgattggagttatgcatgactggtgtgaggcatttgacacctacccaagaacctatgatttactgcatgctgcaaacctactttctgttgagaagaaaagatgcaatgtctcatccattatgcttgagatggatcggatactacgacccggtggacgtgtatacatccgcgattctcttgatatcatggatgaacttcaagagattgcaaaagcaataggctggtacgtgatgttgcgagacacggaggaggggcctcatgcaagttatagggtattggtttgtgataagcacttgctacgctcttaaagctaaatggggtatattgcatgatattttctatgaccttgcatgtcattttagaagtgtaggaagatgcaagtgcaagtactactaggcatttgagaagtgcacttccttacaaacgtgaggaggtgctcagcatttattcatcgataccactatccctagagccggatgcatcatctagcctatttgtaaaattcaatttatttgtatattccaaagcgctacgtgccttaaatatattgtttccatgaatataagcaccttcagtgttgatctttataatttttttgggtcnaaaaaaaa

SEQ ID NO: 309 - DNA, 993 bp, Glycine max
atcaccctcgagccgcaattgtgtaccttcccttgctccttctcacttcacaacactcaccccatttttctactcctttccttcttccctccttttatttcatttttctaacaaaatggaggaaagggtggtaccaaagaggccaagagaagaagagaccctagagcacaaagatgcatcattagatagttatgaattactagagtcctcatcaaagaggcacatgccatacaaccacatactatccctccttgaatcagaggaagaagactccacacaagacctctctcctctcatcactgccctccaacaagaaatcaccaattgtgccaatgattcggatacccttttgagccaacacaacctcaccaacaccacaacaacaactaataataatttagagtcttgttcatcctcaacaactcaatattctagtaacatggtggaggaacatgatgacaaagaaggggtcatgagacaccttcttgaagcttctgatgatgaacttgggattccaaataaagaggatgaatcactcgatcatggtgaagatgggttcaatttcaacggtggggacatgttttcttccttttgtgatggtttgttgtgggaccttgaagatgaagctgccaactactatgatctcttgcagtctcaactctttctttagttttttttttttttttggtgggggtagaaagtgaaaaaccaaagtttttcatgcgttcaagatgaaatccaaggagaaacaaaggaaaaatttacactcttttttttttcagttttttgtcccctctttttgtaaattaagatcatgggaggcttacgtggttggttattacttggcaatatgtcgatctgtagaaaaagcaacttggcttatactcacattacattacacaaagtaataattagctagtaatgatcttcttaactctttcatatgtttattttattgacttttgagggtaaatgaaaaatgacttctcttta

SEQ ID NO: 310 - DNA, 882 bp, Glycine max
ttttttttttttccctttcaacttttggtcagggttcatataaaatcacagaatagtaaggctatgtaaattaaaaaataaaaataaagatacaaacactatttgactttgagggaatttggatttttcttactacgtgtagaattgtattaagattctaaaccaagtgatgttgacatgaaggtcttggtcctaatcagttctcgtctaaatctactggaaaaaaatatggcagattggatacaatgataatgcatgattcatgaatgtgctacaataagacaacacctgtcaacacttgcaaaaggtacaaggaagtgggaaagtgcaaatccatttccttcggcatatcactttcaaccaattgacaataatagagcaaacatcacaagaaaatggcaagtttcactagtttttattatgagacatatttgaaatgatcatggaaggaagggatggagattcagatgggtgttctttgtcatcaggttcttggatctaaaagagtggcttagtccatctttgactttcaaaataagagaaacctctgatagttgccaagccacattgaggacaatcatcaccgaaagaagacaatgagtcacaaagttctgcctcttcaccttcttcagctctttgattatctcatcattcttacttcccttaccttcccctccattctccttttcactttctgtttcctgagttaaagaagccacaggctcagaagaactagaagcctcgaattgctcaagtatctcttctcctttcaacattttcaactgagagacagagaaaaggtgggaaagagcattttggtattgagcatcattgttatggagggaaccttggacctgaattgcgtggtcgccgggcgcaagc

SEQ ID NO: 311 - DNA, 1019 bp, Glycine max
gtctccgccgcgtgggcccccccccccccacccttgttccttctcacttcacaacacctcacccattttccactctttcccttctaccttgttccacctcttaatttttctaacaaaatggaggaaagtgtgctaacaaagaggccaagagaagaagaacccctagagaacaaagatagtacttatgaattactagagtccttatcaaagaggcacaggtcatacaaccacatactctccctccttgaatcagaggaagatgactccacacaagacctatcttctctcatcacttccctccaacaagaaatcaccaattgtgcctctgattcggacacccttttgaaccaacacagcctcaccaacaccaccaccaccaccacaacaaatagtaatttagaggattgttcatcctcaacaactaaatattctagtgacatgatggaggaacatgatgacaaagaaggggtcatgagacaccttcttgaagcttctgatgatgaacttgggattccaaataaagaggatgaatcactcgatcttggtgaagatgggttcaagttcaacggtggagacatgttttcttcaatttgtgatgggttgttgtgggagcttgaagatgaagctgctaactactatgatcttttgcagtctcaactctttctctagttttttttttttggtgggggatagaaagtgaaaaaccatagttttcatgcgttcaagatgaaatccaaggaggaaaaaaatgaaaaatttactagtttttattttttcatttttttgtcccctctttttgtaaattaaaatcatgggacgtttatgtgtggttggttactacttggcaatatgtcgatctgtagaaaaagcagctaggcttatatattcacattacacaaagtaattaattagctagtaatgatcttctaaactatttcatatgttaattttattgacttttaagggtaaatgaaaattacttctttttattttttatgattaaaaaaaaaaaaaaaaaa

SEQ ID NO: 312 - DNA, 1685 bp, Glycine max
tcgagtcagctacgtaggcccccccccgaataatatataatatatgctgtagaataagaacaacaacaatactcctactgcaactgcatagtttggtgagttgtgtaattttgtttgttcatcttgtgttgttcactgttctttcccagacccacctcaaagttgaaagcagccatgggttttttcttgaaatgggtcaacttgtttgtcttttttcatttccttgctgcaacacccatcttctcagattcctcctccagctcaaatgcaatcgccaccaccaagttccttgatttagccaaggatcctcgggtttttgattggatggttggtatcaggaggaagattcatgagaatccagaactgggttatgaggaatttgagaccagtaagctgattagagctgaattggataaactgggcatctcatataaacacccagttgcagtcactggtgttgttggcttcatagggactggactccctccttttgttgcattaagagctgacatggatgctcttcctctgcaggaaatggtggagtgggagcacaagagtaaagtacctggaaagatgcatgcatgcggtcatgatgctcatgttgccatgcttcttggtgctgcaaagatcctcaaagagcatgaaaatgagatacgaggaactgttgttcttgtttttcaaccagcagaagaaggaggtggaggggctaagaaaattttagatgctggagtcttggaaaatatctctgccatatttggattgcatattgtacctacctatcctattggtgaagtggcctcaaggtcgggtcccatatttgctggaagcggcttctttgaagcaacaataaatggcaggggaggccatgcagctatccctcagcactctatagatccaatattggctgcttccaatgtgattgttagcttacagcatattgtttctcgtgaggttgatcctctggactcccaggttgtgactgtaggaaagtttcaaggaggtggtgctttcaatgttattccagactctgtcacaattggtggcaccttccgagctttttcaaaagaaagcttcatgcaactgagacagcggattgagcaggttatcactggtcaagccgctgtgcagagatgcaatgcaacggtcaactttcttgatgatgagaaacctttctccccccctacagtaaacaacggggacttgcatgggtactttgaaagtgttgctgggagtttgcttggcgtgaataatgtcaaggagatgcaaccattgatgggatctgaggactttgcattctatcaagaggtttttccgggatacttcttcctccttggaatggataatgcctctaatgaacatcttgaatctccacactctccatatttcaaaatcaatgaagatgcacttccttatggagctgcacttcatgtatcattagcaagtagttatcttctcaaattaaatccggacatatcagtagtgggggggaaacatcacgatgaattataatttataacacaagattgttgaaagcccttgttgggctatttgtaggtgcaatcacggcgtagtgggggcattggttggttacatccttagttgtaaatgtattacattcaaattaaaataaatccatagtgcttccacattaaagaaaaaaaaaaaaaaaaaatagggggcaaaaa

SEQ ID NO: 313 - DNA, 1263 bp, Glycine max
ggctcgagatgaatactagcattgctggtcttgatttagcggatgcgttcctgttggttggcacccacccacggcccggggcggccctcgcgtccgccagaatacgcaagactgtcagagcaaaccaagccaaagttgggtacattgggcctgctactgatttcaactatgaccacaaacatcttggtactggccctcaaacactcctcgaaattgctgagggtcgccacccatttttcaagacactctcgaatgccaaaaaccctgttatcattgttggtgctggggtttttgagaggaaggaccaggatgcaatttttgccgctgttgaaaccattgcgcaaaaagcaaatgttgtcagacctgactggaatggccttaatgttttacttctccatgctgcccaggctgctgcccttgaccttggacttgttccacaatctgagaaaagccttgagtctgcaaaatttgtatatttgatgggtgctgatgatgtaaacttagacaagatcccagatgatgcttttgttgtttatcaaggtcaccatggtgacaagagtgtttatcgagcaaattttattttgccagcagcagcattcagtgagaaggaaggaacctatgaaaataccgacggatgcacgcaacaaacattgcctgcagttccaacagttggtgactccagagatgattggaagataattcgagctctatctgaggtggcaggagtgcctttgccctatgatacaattggggccgttcgtgcccgaatcagtactgtagccccaaaccttgtgaacatggatgagagagaaccggccacattgccatcttcactcagaccaaccttctctgagaaggtggacaccaccccattcgggactgtagttgagaatttctatatgactgatgccattaccagggcatcaaagataatggcacaatgcagtgccatgctgttgaagtgaaacatggattttttattttttggtttcaataatgaagattcacgtttttcctttcctggccatgcaagactttgcttgcccaaaacttattggatgtttgaagtatccaataaattaaaactaggatttatctgtttccatttgtaatatgcggtgtgaaagcaccactttttagaactgttgccatgtaaaatttgagttatccgactgattgtgaaggtttactcgtctcatcaattttccatagccaggaaattgcaaagtcaaaaaaaaaaaaaagaaaaaaaaaaaaaaaaaa

SEQ ID NO: 314 - DNA, 2636 bp, Glycine max
  misc_feature (21)..(21): n is a, c, g, or t
tttcgggccggaattccccgntcgacccacgcgtccgcgctgcatccccaaatccctctctaaacaaagtcaaaatctatcgaaagaaaagagaaagcgaatcggagaagaagaaaaatggggttggctttgttagcttcgaaggccgtgagacccacatcaaggctcctcttcggttcccaaaaccctagcaccttcctcctccgaaccatcgtctccaagccccagcttcggaatcccgaagccaccgccgcgcatccggagcagccgccgcctgccgatctcccgccgcggactccgctcgccggcgcccgcgtccacttcccaaaccccgaggactccatcgaggttttcgtggacggctaccccgtgaaaatccccaagggaatgaccgttcttcaggcctgcgaggtcgccggcgtcgacatcccgaggttctgctatcacagcagactctccatcgccggcaattgccgcatgtgcctcgtcgaggtcgagaaatcgcccaaacccgtcgcctcttgcgccatgcccgctcttcctgggatgaaaattaagactgacacacctgtggcaaagaaggctagagaaggagtgatggagtttttattgatgaatcatccattagattgcccaatttgtgatcagggtggagaatgtgatcttcaggatcagtcaatggcatttggctctgatcgtggacggttcactgaagtgaagagatctgtggttgataaaaatcttggacctctggtgaagactgtgatgactcggtgcattcaatgtacaagatgtgttagatttgcaacagaggttgctggggttcaggatcttggcatgttaggtcgtggaagtggagaggagattggaacatatgttgaaaaacttttgacaagtgagctttctggaaatgtcatagatatctgtcccgtgggagctctcacttcaaaaccttttgcatttaaagcccgaaattgggagttgaagggcacagagacaattgatgttactgatgcggttggatccaatattcgaattgatagcagaggacctgaagtgatgcgcattgttcctcgtttaaatgaggagataaatgaagaatggatttcggataaaacccgcttttgttatgatggtttgaaaaggcaaaggttaaatgatcccatgatacgtggttctgatggacgctttaagcctgttaactggcgtgatgctcttgctgtggtagcagaggttgcccaccaagtcaaaccggaagaaattgttggcatagctggcaaactttctgatgctgagtccatgattgcactaaaagatttcataaataggatggggtcaaatgatgtatggggtgaaggcattggtgtaaatactaatgctgatttcagatcaggatatattatgaatactagcattgctggtcttgaaaaagcggatgcgttcctgttggttggcacccagccacgggtggaagctgccatggttaatgccagaatacgcaaaactgtcagagcaaaccaagccaaagttgggtacattgggcctgccactgatttcaactacgatcacagacatcttggtactggccctcaaacactccttgaaattgctgagggttgccacccatttttcaagacactctcaaatgccaaaaaccctgttatcattgtcggtgctggggtttttgagaggaaggatcaggatgcaatttttgctgctgttgaaaccattgcacaaaaagcaaatgttgtcagacctgactggaatggccttaatgtattgcttctccatgctgcccaggctgctgcgcttgaccttggacttgttccacaatctgagaaaagccttgagtctgcaaaatttgtatatttgatgggtgctgatgatgttaacttagacaagatcccagatgatgcttttgttgtttatcaaggtcaccacggtgacaagagtgtttatcgggcaaatgttgttttgccagcagcagcattcagtgagaaggaagggacctatgaaaataccgatggtttctcacaacaaacattgcctgcagttccaacagttggtgactccagagatgattggaagataattcgagctctatctgaggtggcaggagtgcgtttgccctatgatacaattggggccgttcgtgctcgaatcagtactgtagccccaaaccttgtgaaaatggatgagagagagcctgccacattaccatcttcactcagaccaaccttctctgagaaggtggacaccaccccattcgggactgtagttgagaatttctatatgactgatgccattacaagggcatcaaagataatggcacaatgcagtgccatgctgttgaagaagtgaaacatggattttttattttttggtttcaataaagaagattcacgtttttcccttcctggccatgcaagattgcttgccaaaaacttattggatgttggaagtatccaataaattaaaactaggatttatctgttccatttgtaatatgcggtgtggaagcaccactttttagaactgttgtcatgtacaatttgagttatccaactgattgtgaaggtttactcgtctaatcaattttccgtagtcaggaaagtgcatcgtcaaattcttattac

SEQ ID NO: 315 - DNA, 1383 bp, Glycine max
ggagagagagagagaactagtctcgttttttttttttttttttggcagaagcaactttcaaactttatagtttatgtagttgctgtgattcccgtgagcagcgtttagattactaacttggacacatcggtttttgaagcatcggatagaggtgattaacgctaaaccgtaccagagtaggctgttacctgactcgaactcaggcggacgtcagctgacattcacggaatagttcgatatcataattcctcgtcctttgctgttatagctcccgatgtctaacactacttttagaccttttactggttcctccaggaccgtggtcgagggagaacaagccggcgcccaggatgatatgtcgttgttacagtcacttttttccgacaaatccagggaggagttcgctaaggagtgtaagctgggtatgtataccaacttatcttctaataatcggcttaattatatagatctagtccccaagaacactggtagtagagctctgaacttatttaagtcagagtatgaaaaaggtcatattccctccagcggtgtgcttagtatacctagagtgctggtttttcttgtgaggacgacaacagtgactgaatctgggagtgtcaccattagattggttgacttgataagcgcttcgtcggttgaaattctagaacctgtggatggtacgcaagaggctactattcctatttctagtcttccggctatcgtttgtttttctcctagttatgactgtcccatgcagatgatagggaatcgacacagatgtttcggcttggtaactcagctggatggtgtcatatcctcagggtctaccgtcgttatgagtcatgcgtattggtctgcgaactttcgtagtaaacctaataactacaagcagtacgcacctatgtataagtatgtggagccctttgacaggttgaaacgtttgagccgtaaacaattgaaaaattatgttaggggcataacgaatcaatctgtaaatcatggttatctattgggtaaaccactactgaagactgacgagcaagatccagagatgattgtgttagaggaggaatcactaacccctaccgacagcaacggagtcggcaaggataaaatcgctgtgaccgcgaaatccgttgcggggcttccgacagcctcgatgtctatcaatcgtagatagctagatctattgctaacagacttagtgtcatgggagcaaaactcatatgaggtcattgaaacatgaactgggaagaatcagaacccgccgaaaggacaggctgagggcgtacggttcatgcgtagttgattgggtatgagacacaaaaaaaaaaaaaaaaaaaaaaaaaaaaaaaaaaaaaacctcacaccaaaaaaaaa

SEQ ID NO: 316 - DNA, 1459 bp, Glycine max
  misc_feature (1442)..(1442): n is a, c, g, or t
  misc_feature (1444)..(1445): n is a, c, g, or t
atgcctctacgaatctcaaaccaattcaaatagtaccatataatactaccaatgtcccttgaatctccccacctttcttctttcttcctattaaaattttcaacaaaaacatcatcccagtaaggaacctctcttccctttccaagttatcattttttcaacccatccccatcttcctccccctttttcatttcctccaatcccaaacaaaacccccaaaaaatgcaatcattcccccccatccccactctcgcatgcctttaccttactttctttacgtcactactattcctactacctttttctcgtgccggtttactctccgaaccggtgagcgaccccaaccagcctctcgaaccgggctccaacactgtccccgcctttcctgtccagacccaggccctaacctgccgcctcgacctctccgacgagctcttcggcggcgtcaaggatgcctgcggcaaggacctcgaccggagccgctgctgccccgtcctcgccgcctggctcttcgccgctcacgcccgcaccgctcttgatgtctccgccgcccctcctccgtcctccgccgaccttccgatgatgcccgacgactcccaaaaatgcgtcaactcgctccaggattcgcttctctcccgcaacatccgaatccctcagcccaacgccacgtgcgacgctattctctgcttctgcggcatcagactccaccaaatcacgtcgcttacctgcaacgctgcgtttaacgtctcgctttctcacaggaacgccaccccaaccgctgcggttcgcaacctcgagaataattgccgtaactcctcttacgctggttgcaccaaatgcctcggtgccctacaaaaggtgaaggggtataaaaacgagacgaagggaagtgatagggtgaagaaaatgttcaaccgggactgtcaactgatggggttaacgtggcttctggcgaagaacaaaacggcgtacatacctaccgttttcggcagtgctgcgtgcgatgatgtacagtgcgcaccctcacgagtccaagtgtagtcctgaccaagagaacatgccgctggccgttgattcgcttcagttcgagagcggccacgcgccatctcggccgtccaagttttgcgtgacggttttgcccctcgtggttctcttattattttccgcttttgtgtagaaagggtgggtccacttgctggggtttagtgtctgtcctcttctctttctctctcgctatcacgtgaagctgagctactcgacaaaacatgcaaacaaaacatggtgggttgtttttgtttctgactagagggagggtttttctcgctgtaaattttcagagtccattgacatgtctgtgtgtacatgatgctagtgcggtagtgtcaccaacttacatagaaagaagaggttttttttaaaaaaaaaaaaaaaaaaaaaaaaantnnaaaaaaaaaaaaaa

SEQ ID NO: 317 - DNA, 2139 bp, Glycine max
acgaggattccaccagctgatactcgctacaagacagaggatgtccccgcgtccgaaggaaatgagtttgaggattattttctgaagcgtgagctgctcatgggaatatatgagaagggttttgaaaggccttctcccatccaagaagaaagcattccaattgctcttactggtagtgacattcttgctagggctaaaaatggaactggcaaaacagctgcattttgcattcctgcattggaaaaaattgatcaggacaataatgttattcaagttgttatactggtcccaacccgagaattggcattgcaaacttctcaagtatgcaaagaacttggaaagcacttgaaaattcaagttatggttacaacaggtggtaccagcttgaaagatgatataatgcgcttatatcaaccagttcatttactagttggaacaccaggaagaatattagatcttgccaagaaaggtgtttgtattctgaaagattgcgctatgcttgttatggatgaggccgataagcttctgtccccagagtttcaaccatctatagagcagctgattcattttcttcctacaacccgtcaaatcttgatgttttcagccacatttcctgttactgtaaaggatttcaaagataggtatcttcaaaagccttatgtcatcaatcttatggatgagctaactctgaagggtattacacaattttatgcattcgtggaagagagacagaaagtccactgcctaaatactctattttctaagctgcaaataaaccagtctatcatcttctgcaattcagtgaatcgggttgaactccttgccaagaaaatcacagaacttgggtattcatgtttctacattcatgcaaagatgttgcaagaccatcgtaacagagtgtttcatgatttccgcaatggtgcatgtcgaaatcttgtttgtactgatctttttactagaggaatagacattcaagcagttaacgttgttattaattttgattttcccaagaatgcagagacttatttgcacagggttggtcgttctgggaggtttgggcaccttggtttagcagtgaacttgattacctatgaggatcgctttaatctatataggattgaacaagaacttggaactgaaataaagcagattcccccacaaattgatcaggcaatttattgtcggtgattggctttaaataccagtgttgtgtttacagttgcggctaatagcagtggttagtgtgaccgtggctcaagtaggtgggtgagaggatctgctaagctagtggcaaattgtgtattattggaacctggcatgagaggatgcactgtcaaaaactgggtattattggacccattactgagtgctttcagattaattctggttttgggagccctgaaacattgttgagacctttaaaaagtttaatattggcttttatctgccagatagttattgggttcagtttgggtttctgttttccatttgcagatttattctgtcattacatgttttttgtattgtagttttataattgaatgttttagggatgatataccttggtatggacatgttccttccttatgctattatcctatggcgaatgctcatcggtgtcttcagggcactgactaaggaattcaaaatagtaacttttcattaaagtgtcatgaatatatctctattctgtactgtgatttcgaatgcattttcaatttggattttaataaaaactttatgttttggattccttaatcagtgccctagggttacttattagcaagacccttgtgctatcagtttaccattataggttctcttatagattttagattagttgtaggaatctcaacatttgctgctcatattatgccatatggttcttggtggtgccggtttatccacaattgcttgtcgctaggattttcatggccattgccgttgaagactcgaagtcctaaccaagcttctggagcctttcttttgatagagtcctttgtcttttttcaattgttaatttcatgaaactatgtagatatgggactgaaatggtatttctgctgggtatcttctgattttcatggattttcagcattgggtacaatgcacattttcaagttaaaaaaaaaaaaaaaa

SEQ ID NO: 318 - DNA, 1854 bp, Glycine max
tcgagcagctacggtaggccccccccccccagtttgtaaccatttgactttttagccatccttcatgtgctaatgtttatgtcaggttataactccaaggaaataaaacaaataccaaagaatcttctttgctttctctcctttgcactttcctcctcttccttgtgatttttgtttgcatcacagggagaaactgagacacagaagatgagagagataattagtattcatattggacaagctggaattcaggtggggaattcatgctgggagttgtattgccttgagcatggaattaaccctgatggcaccatgcctagtgatacctcagttggtgtagcacatgatgctttcaacaccttcttcagcgagacgggatccggcaagcatgtgccaagggctttatttgttgatctggaacctagtgttattgatgaagtaagaactggtccttacagacaactctttcaccctgagcaattaatttctggcaaggaagatgctgctaataacttcgcaaggggacactacactgttggaagagaaattgttgaactatgccttgatcgtatcagaaaattagcagacaattgcactggtttgcaaggattcttggttttcaatgctgttggtggtggtactggttctggtttgggatcattactgttggagcggttatctgtcgattatgggaagaagtctaaacttggctttaccatctatccttctccacaggtatctactgcagttgttgaaccttacaacagtgtcctttccactcattctcttcttgagcacactgatgtggttgtgcttttggacaacgaagctatatatgatatctgcagaagatcattagatatagaaaggccaacttacactaacttgaaccgtctgatatctcaaattatctcttccttgaccacttccctgagatttgatggcgcgattaatgtggacattaccgagttccagactaatctcgtgccatatcctcgtattcacttcatgctttcatcttatgcccctgtaatatctgctgcaaaggcctaccatgagcagctatcagttcccgagatcaccagcgctgtttttgagccatcaagtatgatggctaagtgtgatccaagacatggcaagtacatggcatgctgcctgatgtatcgcggagacgttgttcccaaagatgtaaatgcagctgtttcaaatatcaaggcaaagagaacagttcagtttgttgactggtgccctactggtttcaagtgtggtatcaactaccagcctccaacagtggtaccagcaggtgatctggccaaggtgcagcgagcggtttgtatgataagcaacaacacagctgttgctgaggttttctcacgcattgattacaagtttgacctcatgtatgctaagagggcatttgtccactggtatgtgggtgaaggaatggaagaaggtgaattctctgaagcccgggaggatcttgctgcccttgaaaaggactacgaagaggttggagcagaaggcgaagaagaagaagaagaacccgatgattactcaaagtagtcaatcattcatcaccagctaccttacctacatctaccttctttcctctgtctaatgtctatccttgtccattgaattttaagcatctttctgttgtgtgctagctctgttagtgttgggtgagataattgctttcctcatgagaagcagtggtttatttgtcagtttgaatcacttttaagtttcagtgaaagagcaaaataaaggatagcgtaggagtgctgcagtttccattacttaaaagaaaaaagatgtttattttatcttttgcggtggttccttgaaaatata

SEQ ID NO: 319 - DNA, 1974 bp, Glycine max
tctcccccccctcccttccttttttttttttttttttttttttttttttgacaaattccttctaatgaaactttgagctttgattctatagacaaatacaattccaccaccaataccaattctttaaatcaagtaacaatataaaagtacaccaatccaattttgcaggccataccaacttattttcccttgccttattcactagtacggccaaaatatacatttgttgggggcaaataataatttaacatgaatcaatacaagaaaactaatcacaaagtgtaccaacttctaatgcaacaagcaatattcaaagtcctgaggtgaaagggacaccagagctaggtatccaattgctaccagcaatgaagttgccaacagtgaaaggtgaggcctcagaagcactagtgagaacatggtagcccttccaagtaaccctattggcagtgttggaacctggaccagtgtttgcatattcagcatagtacaaagtgtctagggcaaagttaccatcccattccatccaaccagcagggttgatcaagctatcaagataggttttcatgaacactgttcttgagtacttttgccagggtcttcctaggtatgacttaacagaactagggttgaagcctgaggcacctgtgaccttggagttgtggatgatgattcctgtgttttggttagggtcagttctgccttgagctgtgactgtgatggttctctgtggaggggttcttgcatagatgttgcagttttgcaagactgcagcagcattgccaaagatgaaatccactgtgccataaatgtcacattctctgtagaattgcctctctgaatgaacatatagtgtgtcttggaaaccctcaaagctgcatctgtaaaatactgagagatctgagccagaacggaatgccactgcttggtgatttgctgctcctgctgtgttcctgaatgtgatgtcttgagcaatgaatccatcacccacagcagcaacagtggctgaacggaaggttgtggtgcctcctccaacgcttttgctacctgtgattatggtctttccaataccatctccaaccaacattatattatttgctttcacctcaacttgctcattgtacaccccacccttcacatatatcacataccttccactactacttggagcagcatcaacagcagctttcactgttgtgtattttccagaaccatcttttgcaaccactacattagccttagaagcagctgaagaagattgcaacaattttctatcaccaggcttcacccatgttggaaacccttctttgtaacttggtggtttgtattggtaaggacctttgttgagagagagggtgttgcttagtaactttgtgacattattggacatcaagggtaggacatagtcagggacacctagctcatagaatccgtttttgcatgtttcaaggtttgtgagggctgtgctgagccatgtttgtgtgtcggtttgggtgcacttggtgtaaggggcaatggttttgttgagtttttggatggtgtactcatagagttcaaggcaatctgcccatgcagatttttcatgaacattgcggcacttagggccaagggcatgggtgttaaattcactcctttgtgctctctctagggctagctgaagggaaactttgaggaaatcggatttgcttttgatgggttggttgaaggcatggttggtcaagtagtactcacatggttgagggtaaggggtttggctacaccatgattgaatatctttgaatgagtaagaggaagcaatggaggagaatagaaagggagcaagtagaagggttattagcaaacaaaataatggtgccatagtgagggctagcctatggccaaaagtgttttttttttggggggtttagaattatgggagggtggagagaaagtactgtagaggtttatttgaagtttggtttgaggatgggtgtgggt

SEQ ID NO: 320 - DNA, 1424 bp, Glycine max
tacggctgccgggagtccccggaagggacctgaaagaagctaagatctattttccatcaagagtgcgttgaaatttgtttcacagacacaaattgccttgccccggaaggctatttaacatcaactattatgaacttctacattcaatatttgcagcaacaagcattgttgacaaatagatcgttatctgcctaccattttttcaatacatatttctacaagaagcttaaagaagctgtttcctacaagcaaagtgattgagagatctttgcaaagttccgaagatggcggaaaggtgtaaatatttttcagaaggcttatgttttgattccgtttcctacaagcatgcacttcctgcccaaattttgcatttgactggagcgtattgttagatatatatcttacctgcccctctactcagttctgggtttattacgcatgtttcatgtatccagccttcattggagcttgatcattatttgcatcccagacaaagaagatgaatcggggccaatcatacttcatttggattctttgggtcttcactctagtaaatcagtttttgataatattaaaagctatttgattgaagaaaagaactacatggatcgagaagacatggcttcagatgtttcaattgcggatagaatatggaagtgccttcctcgtagaatcgaatctcaaatcattcaggttccccaacagaagaatgactatgactgtggtctttttgtattgtacttcattgaacgtttcatggaggaggcaccggaaagactgaaaatgaaagatttagatatgtttggaaggcgatggttcaaacctcaagaggcgtccaatttgagagtgaaaatccgtaagttgcttgtagaaaaattacagaattcagtcacggataattgtaatttggaatcttctccttcatcatctgctggccctgcaactgattgtgttgagactgccagggattctcttactggccctgcaactgattgtgttgagaccaccgaggattctgtgacttaacatggcagaattgcaattgtcatttccttgaacgaacaatctgttgatattcgtatggttggtgccagttttttttttccttgtacagaagccagctattcagctggtaatttttggatagagttttcctatgacctggtaaatagtccatcagtctttaatccaagcaagggtggctaacagttggctgtgcagaaataacaaacaactctagttcctaacctttccaaatgtatagtgggggaaacagtacaaaactgacgactagaggcaatatagagttcaaatctacccggtatttttggaagttgttttcatcccaactttactttcgtatttatgatatataggaataaaacgattcatagcattcattttacccaaaaaaaaaaaaaaaa

SEQ ID NO: 321 - DNA, 1226 bp, Glycine max
tcagctacgtaggccccccccccagctacgtaggcccccccccccaacctaccctacttgatcattcaccacatttcatttacacaaatcatcaatggcctctcttgtatcctcaagtgttcttttacacctctttctcataatttccgcgctccatttgggcgcagcagcaagaattctgagtgaaaaggaccaacaacaacaattgcagttccaataccacaaaggccctcttctcagtggcaaaatctccgtcaatctcatctggtacggtaacttcaagccttcccagcgagccatcatctccgatttcatcacctccctttcatctcacaaatccacagcccaaccatccgtcgccacgtggtggaaaggtacccaaaaatactaccaactcataaagtcatcaccaaaactcaccctcactctcggtacccaaatcctcgacgagaactactccctaggaaaatcactcaccaacgacaacattgttagtttagcatccaagggtgcctcgaaagacgccatcaacgttgttctcacatcctcggacgtaaccgttgaaggattctgttccagtaggtgcgggacccatggctcctcggtgggtcctcgcaagttcgcttacgtgtgggtggggaactcggagacgcagtgcccgggccaatgcgcgtggcccttccagcagcccatttacggcccacagaacccgcccttggtcgcgcccaacaacgacgtgggcctcgacggaatggtcatcaacgtggctaccctattggctgggaccgttaccaaccctttcgggaatggctacttccaaggacccaaagaggctccgctcgaagccgcttccgcttgcaccggtgtgtacggaaagggcgcttaccctggctacgctggggaactcttggtggaccccactaccggcgctagctacaatgctaacggcgtcagtgaccgcaaatatttgttgccggcactctttgaccctaccacttcagcttgttctactctggcgtaacacaaacgcacggttttagctagcttaatattattgttgttccatgttagggatacactatgacacaagagattcttttatttgtttattgattcattgttatccggatgaataaatatatgaagttcaatgtaccaaagcaaaacatatagtatatgtgaattcaattattggtatttccattctctttttatcaaaactactg

SEQ ID NO: 322 - DNA, 1206 bp, Glycine max
tttccaattcccttccctacctatatatatacacctgttcctactccctccgctacgtaggcccaccccctttcatttacacaaaatcatcaatggcaatggcctctcttgcatcctcaagtgttcttttgaacctcttgttcatcgtttctgcgctccatttgggagcagcagcagcaagaattctgagtgaaaaggaggaccaacaacagttgcagttccaataccacaaaggccctcttctcagcggcaatatctctgtcaatctcatatggtacggtagcttcaagccttcccagcgagccatcatctccgatttcatcacctccctttcctcttctccaaaatccacagcccaaccatccgtcgccacgtggtggaaaggcactgaaaaatactaccaactcatcaagtcggcaccaaaacccagcctcaccctcgctctcggtgcccaaatcctcgacgagaactactcccttggaaaatcactcaccaccgacaacatcgttagtttagcatccaagggtgctcccaatgacgccatcaacgttgttctaacattctcggacgtaaccgttgaggggttctgttccagtaggtgcgggactcacggctcctcggtgggtcatggcaagttggcttacgtgtgggtggggaactcggagacgcagtgcccgggccaatgcgcatggcccttccaccagcccatttacggcccacagagcccaccattggtagcgcccaacaacgacgtgggcctggatggaatggtcatcaacgtggccaccctattggccgggaccgttacaaacccttgggggaatggctacttccaaggacccaaagaggctcctctcgaagccgcttccgcttgcacagggctgtacggcaagggcgcttaccctggctacgctggggaactcttgctggaccccactaccgccgctagctacaatgctaacgccgtcaatcaccgcaaatatttgttgccggcactctttgaccctaccacttcagcttgttctactctgccgtaactctaaaactcgggtgcttagcttctatgttagggctacactatcaccccaagagattcttttatttgttgtttatctggatgaataaatatacaatgttcaatgtacaaagcaaaacatatagtatatatatatgaattgaattattggtatttctaggcttcaaaaa

SEQ ID NO: 323 - DNA, 1067 bp, Glycine max
  misc_feature (73)..(73): n is a, c, g, or t
  misc_feature (80)..(80): n is a, c, g, or t
  misc_feature (101)..(101): n is a, c, g, or t
  misc_feature (126)..(126): n is a, c, g, or t
  misc_feature (145)..(145): n is a, c, g, or t
  misc_feature (160)..(160): n is a, c, g, or t
  misc_feature (201)..(201): n is a, c, g, or t
caaggtaaaaggtccccaagaagaactcataaagaaatccctttgatggccaagtcccaaaagttttttcccnaaaaggnatacctttgaagggaagtagnaaaagttataaatgctggctatggncccggcatttgtgagtacnccaggaacctaaaanttgttcttcctggtgattttcgaggccccctcgtgccggcnaacttatataaaccccagtgtctctggatgtaggttggatgcacttatagaaccacttgatatggaacttagccaactttgtgatattgttgtggagcctctcagggatcgcatagtgacaagtcttcttcaggcatcattggatggcttactccgtgttatcttagatgggggtccatcgagagttttcttcaccggtgatgcaaaattattagaggaagatctggaggtgttaaaggaattctttatatctggaggtgacggcctccctcggggtgtagtcgaaaatcaggttgcacgtgttcggcatgtgatcaagttgcacggctatgagacgcgagagttgattgaagacttgaaatctgctagtggcatggaaatgcaaggtagcaaaagcaaattgggaactgattccaaaactctattaagaatattatgccacaggagtgactcagaagcctctcaatttctgaagaaacaatacaaaatacctagttcttctgcttagaggaatgtgtacaacagaagggaaccagcaaaatttttcattttggtgttagctttctgtgaatatacattgctgccaatgtgtcattttttgtcagaattattaaaattacccattcggtgtataattagcggccataactgatatttttcctttccttttttttcgtttttaatcgaactacactgttgttgatcttcttttgtaaaatttcctccatgtgaatactgtaactgtaagatttcaattaatgaagctgctattctttcttataagggtagttgtttcatattaagaaaacttcaactgaatgtgcaatttattccctaatttcctaataaagcagttttatttctac

SEQ ID NO: 324 - DNA, 1521 bp, Glycine max
ggaattccaggccgacccacgcgtccgtcttgttatagattgagatgaaatctggaacattggtgttgcgttgggtcaattcacagcttggaagaattttaggttgggtagagcgggttattcagcaagagcattgggacccgatatctcctcaacaacgacatgctggttctattgtggaagtttacaggattgttgaggagacggttgatcaattttttggccgctacgttccccccccccccacagaattgaacagcttgtttcgtggcattgacaatgctctccaagtgtatgcaaataatgtagttaatgagttggcaagcaaggaggaactgataccacctgtgcctattcttacacgatacaaaaaggaagctggaataaaggcttttgtaaagaaggaactgtttgatgctcgtgtgcctgaacctgatgaaacaaggcccagccaaattagtgtccttgcaactccaacactttgtgttcaattaaatacattatactatgcaattagtcatctgaataaattggaagacaacatctgggagcgatggacaagtaaaaggtcccaagaaaaactcataaagaaatcctttgatgacaagtccaaaagtttttcccaaaaggatacctttgagggaagtagaaaagttataaatgctgctatggaccgcatttgtgagtacacaggaactaaaattgtcttctgtgatttgagagttccatttatggacaacttatataaacccagtgtctctggatgtaggttggatgcacttatagaaccacttgatatggaacttagccaactttgtgatattgttgtggagcctctcagggatcgcatagtgacaagtcttcttcaggcatcattggatggcttactccgtgttatcttagatgggggtccatcaagagttttctttcccggtgatgtaaaattattagaggaagatctggaggtcttaaaggaattctttatatctggaggtgacggcctccctcggggtgttgtcgaaaatcaggttgcacgtgttcggaatgtgatcaacttgcatggctatgagacccgagagttgattgaagacttgaaatctgctagtggcatggaaatgcaaggtggcaaaagcaaactgggaactgattccaaaactctattaagaatattatgccacaggagcgactcagaagcctctcaatttctgaagaaacaatacaaaatacccagttcttctgcttagaggaatgtttacaataaaagggaaccagcaaaattttcattttggtgttagctttctgtgaatattcattgcttagaggagtttttgcctttcctttgttttggttttaatctaactacaatgttgttgatcttcattgtaaaatttcgtccatgtgaatactgtaattgtaagttcaattaatgaagctgctattcttttttacccgcgtagttgtttcatatttagaaaacttcaactgattgtgcaatttattccctaacttcctaataaagca

SEQ ID NO: 325 - DNA, 2241 bp, Glycine max
attaattctcctacctgtttttttttgttttttacatgttcttccacgttaaagccatattgcaggtacgcaccccccccccgaacaagtttgcgtttaccttaaaaataaacgcacaacaagtaattcattaaaatatcacgttaggaataggaagtgacatttctagagcaacaactgattatggcttccgaccaagcagcaacaacagtccctttggattgttgggaggacaacgagaaaaaacgtgtagtcttggcggaagcaagtggagacttcatagatgttctctttagtttcctcactcttccattgggaactatcgtccggcttgggatcaattttcaactatcagtagagatgggtagcatcaagaaactgtacgagagtgtgcaaaatttgggatctgatgttttctggaacgacatctgcaagcaaatgttgcttaatccccgcaatccgttagaagcctcatgccagagactaaaagtgaaggtggatgatacaaatcccacaaagtatttcatttgtcacagctgttcaacggaaaagaatttgttgctgagtacctttgatgggggaaggtgctactgtgggaaattgatgagaaaaaacatggatctgctggtagaatccaaggaagaaactgctgcagaaaatggtgtttttgttaaaggggatgccaagttcttgatctttgatgacttgacagtgctccgaagcactccaagtaaatccgtccaaaaattcctcgaacatcgacgcaaagacttcgagatccctacaatttctaaagatgttgacatgaaggagatatttagcatactaaagcaagcattaatctccaaatctcctctaagtgaagtattcttcaaaaaagaaggatctaagtcatgctcttgcccatactcttgcccttgctcacgaaataccaacccaattcattggaaagattctataaaaatcaaggtaatggtgaacaaatcaaataataagattgtgttggccgaagcagatggagattttgttgattttcttttcagcttcctcacaacaccccttggatctattctgaaccttactaacggcaaatttcccttgggaagcattggtaacttgtacagaagtgtgaagcgtctcgatccatcatggttcaaagggtcatctaaggaatccttactgaatctgagggtggctcctcattttggttgcaagagcagcccatttcaagaagaccacactcctaattattggtatggcactgtagcagggaaagataataatgaggggcgtacaatgatttcaaagaaaaaggatatgttacaaacagcaaaagaactgaaactttttgacccaagatgttctgatggagcaaaagaacctggtgtgggatttgtgaagaggccgtgtctatttgttgtgaaggatgatctggaagtgatacaaatgacaactacttctagcattgagtatctgagagatgagaaagtcaaggtgggtgatttggaggagcatttggtggaaatcaggtcaaatgaggtaatgaacctgttgagggcttctttgacatccaatgaagctactttgacacggagcctaggctgcctattgatgaagtggaaatgccaaagatgcattccattatggggtagattgcaacggatgaaaaagatacacaggaagaaaaaagaaaacggagagaattcctgcaatatattatgttgttgctctgtgtgtgataagtgaattcgatggtcatgtaatatttcattctcttgtttctcttgattctacaagtgttattagaatattaggtctctagaattgatctattttggtgttatcatgcacatcagtcgtgttagaacaattatataaacttttagtaagtgtaatatgtgtgtatttaatgctattaatttcatattcatatgcatattaaatagtattagttattataataaattaaatataatatttgtgaaacacgatgtaaattattttatgtttgttttatatgttttccccctttcctctaaaaaatttggaagagttgtctccgcttgcctcctcttccgcttctccgtggctttctccaatctgtccaacatctcgttagaaccagcgtggagggcatttgctccggaaagtaccatcttcatattcagaattagtaacttgagctgcttgttcaataaaggtggaaggagttatatcattagccgaatatatatgccactt

SEQ ID NO: 326 - DNA, 1238 bp, Glycine max
cttgtccataagtactccaccccccacgggcttctcactcattcattcccatctctctctctctctgctaaactgaataaagcagagaagaataagaaaatgggtgtgttcagtacagtgctgctgtgccttatgtccctaatgtggatggtggatgctcgaattccaggcgtatactctggcggcgcttggcaaaatgctcacgctacattctacggaggatccgatgcttccggcaccatgggtggagcatgcgggtacgggaacctgtacagccaagggtacggagtgaacactgcagcgttgagcacggcactcttcaacagcgggctgagctgcggagcgtgcttcgagatcaaatgcgcaaacgacaagcagtggtgtcactccggcagcccttccatcttcatcaccgccaccaacttctgtccccctaactacgctcttccaaacgacaatggcggctggtgcaaccctcctcgccctcacttcgacctcgccatgcccatgttccttaaaatcgccgaataccgcgccggcatcgtgcctgtcgccttccgcagggtggcatgtaggaagcatggtgggatcaggttcacaataaacggtttccgttactttaacctggttttgatcagcaacgtagcgggtgcaggggatatcgtgcacgcctacgttaagggatcacgaacggggtggatgccaatgagcagaaactggggacagaactggcagtcaaacgccgttttggtgggtcaggctttgtccttcagagtcaccgccagcgaccgtcgctcttccacctcttggaacattgttccatcaaattggcaatttggtcaaactttcactggaaagaacttccgtgtctgaacaccccctttactttcttaagatatataaaatacaagtttattttctttttgtttgggttcccaccatttatctatttcctgatcttttttactgcagaggaagaaacaaaaaaatagtcagtgacaagtttttttacttttgcttctcattggtgggtttcatttttttaattaatgtataattgatgattcccgggtgaagttttgcgttccgattagtgtaggaaatgctgaagcggctaagcaaagagggtagcccgcggctaaattttacagaatgatgctattgtattaactaatatatattgttccgtcatggatctaggaagcgtgctttactttacgcaaaagctcagatgggaa

SEQ ID NO: 327 - DNA, 1270 bp, Glycine max
cattcattcccatctctctctctctctgctaaactgagtaaagcagagaagaataagaaaatgggtgtgttcagtacagtgctgctgtgccttatgtccctaatgtggatggtggatgctcgaattccaggcgtatactctggcggcgcttggcaaaatgctcacgctacattctacggaggatccgatgcttccggcaccatgggtggagcatgcgggtacgggaacctgtacagccaagggtacggagtgaacactgcagcgttgagcacggcactcttcaacagcgggctgagctgcggagcgtgcttcgagatcaaatgcgcaaacgacaagcagtggtgtcactccggcagcccttccatcttcatcaccgccaccaacttctgtccccctaactacgctcttccaaacgacaatggcggctggtgcaaccctcctcgccctcacttcgacctcgccatgcccatgttccttaaaatcgccgaatatcgcgccggaatcgtccctgtcgcctatcgccgggtgccatgcagaaagcacggagggataaggttcacggtaaacggattccgttacttcaacctggtgctggttagcaatgtggcgggtgcgggtgatatcgtgcgcacgtacgtgaagggcacccgaaccgggtggatgccaatgagccgaaactggggtcagaactggcagtcaaacgcggttttggtgggccaggccctgtccttccgcgtcaccggcagcgaccgccgcacctcaacctcgtggaacatcgctccacccaattggcaattcggtcaaactttcaccggaaagaatttccgggtctgaaaaaaaccctaatcataatcatcacccatgtcatcaacatcaatgacatacttatatatattttttatcatgatcctttttgttttggttcccgccatttatttacttattactagacatggtcgtttgactggatagtgagtgacaactttttaattgtgacttagatgttgttgggttttactttttctgattgggtgggtttgataattatacttggggtgcgtgaagttgtagtattttgaatttctagggaacgctgaagtggcttaagtaaaatggtagcccgcagctaatttgtactttttattgtagaatcatcatggtgttatatatatatatatatatatattaatatttcaatttgctccatgaaaataactccatttaactacattattgttctctttaaaaaaaaaaaaaaaaaaaaaaaaaa

SEQ ID NO: 328 - DNA, 1329 bp, Glycine max
cggctgcgagaagacgacagaaggggatcacctctaatccccgaatctcccagagaaacaaagaaaagaagaaaatggctgtggccaacaatgtgctttgcattttcttcattatctccttaacatgtatggttcaagctcgaatcccaggggtttactctgctggtgcatggcaaagtgcccacgccaccttctacggaggctccgatgcttccggcaccatggggggagcgtgtgggtatggaaacctgtacagccagggttatggtgtgaacacggcggcattgagcacggcgctcttcaacagcgggcttagctgcggtgcgtgttttgagataaagtgcgcaaacgacaggcagtggtgccactccggcagtccttccatcttcatcaccgccaccaacttttgccctcccaacttcgctcttcctaacgacaatggcggctggtgcaaccctcctcgccctcacttcgacctcgccatgcccatgttccttaaaatcgccgaataccgcgccggaatcgtccccgtcgcctatcgccgggtgccatgcagaaagcacggagggataaggttcacgataaacggattccgttacttcaacctggtgctgattagcaacgtagcgggtgcgggtgatatcgtgcgcacgtacgtgaagggcacccgaaccgggtggatgccaatgagccgtaactggggtcagaactggcagtcaaacgcggttttggtgggccaggccctgtcctttcgtgtcaccggcagcgaccgccgcacctcaacctcgtggaacatcgctccacccaattggcaattcggtcaaactttcaccggaaagaatttccgtgtctgaaaaaaccctaatcataatcaccacccatgtcatcaacatcaatgacatgcttatgtatatttttttattgtaatcctttttttttcaaggttcccgccttttaattacttattcctagatggtcgtttgactggatagtgagtgacaacttcttaattgtgactttagatgttgttgggttttagtgttttttttttcttttctgattgggtgggttttataattatagttggggtgcgtgaagttgtattttaatttgtaccgtagaccaaaggggcgtaataggaatggaaaaggcgaaagggagagcgaaaggatgagagaaagtgttgtaggtaacgctgaagtggcttaagcaaaatggtagcccgcagctaatttgcgctttttattatagaatcatggtgttatatatattattaatggtataaatttgttctatgaatttaactgaaaaaaaaaaaaaaaaaaaaaa

SEQ ID NO: 329 - DNA, 1821 bp, Glycine max
tcgagtcagctacgtaggccccccccccacacccaaatccttcttcaccttcacaattagaaaaaaaaaaaaacaaaaaatgggcgtttctcgttctcaaaagcctcatgttgtttgtgtgccattcccagcacaaggccacgtgaacccttttatgcaactaagcaaactccttctttgcaccggtttccacataacctttgtgaacaccgagttcaaccacaagcgtttggtgaagtctcttggacaagaatttgtcaagggacaacctcattttcgatttgagaccataccagatgggttgcctccatctgacaaagatgcaacacaaagcattgcagcattgtgtgatgcaactagaaaacattgttatgagccactcaaagagcttgtgaagaagctcaatgcttcacatgaagtgcctttggttacctctatcatctatgatgggctaatgggctttgcagggaaagtggcaagggatttggacatttctgaacaacaattttggacagcctcagcttgtggtttaatgggatacttgcaatttgatgagcttgtcgaaagaggcattattcccttccaagatgaaagtttcactactgatgggtcattggatacaaatctagactggatatctggaatgaaaaatatgcgaatcagagattgtccaagtttcgtgagaactaccactctagatgaaaccagttttatttgctttggtatagaagcaaaaacctgcatgaaatcatcttcaatcataattaacaccatccaagaattggaaagtgaagttctcaatgcccttatggctcagaacccaaatatatataacattggtccacttcaattgttaggaaggcattttcctgataaagacaagggcttcaaggtgagtgggtcaaatctttggaaaaatgactcaaaatgtatccaatggctagaccaatgggaaccttcctcagtcatatatgtgaattatggaagtattactgtgatgtccgaggatcatttgaaagaatttgcttggggactagcaaatagcaatttaccatttttgtggataaaaaggccagatttggtaatgggtgagtccacacaattgccacaagacttcttagatgaggttaaagatagaggatacataacaagttggtgcccccaagagcaagtgctgtctcatccatcagttggggttttcctaactcattgtggctggaattctacactagaaggtataagtgggggtgtccctatgataggttggcctttctttgctgaacaacaaacaaattgcaggtacatatgcacaacttgggggataggaatggatattaaagatgatgtaaaaagggaggaggtgacaacacttgtgaaagaaatgataaccggagaaagggggaaggaaatgagacaaaagtgtctggagtggaaaaagaaagcaatagaagccactgatatgggaggatcatcatataatgatttccatcgattagtgaaggaggttcttcacaatgatgttgtttgagtctttcaatatattgggggtccgaaggtagggtattaggtgtttcaatattggagatcctagtgttgggctgggctatcaaacaaaatattatgaagaaactagcatgacttgatggctgaaaatcaagtctattaaataaagatttgtgtggatgtaattcatcatatattgtattgatttgaagtgtatgtcggtttacaatatacatgtaaactttcaattcgatgtaattgaggttaaattataattttgatcctctaatttaaaaaattcatgaacatcattcctct

SEQ ID NO: 330 - DNA, 944 bp, Glycine max
gataaacataaagatgatgggcaattaagtccctatccaccatatgcaatgatagcagtcccgtatttatgaaaggcccatcaactattgcacatttgtactctgatggcaaggcaagcgcttctcctctttgtgttctggctatgcttcttggcaagagttagatcggacgaggattgcgtgtacacggtgtacgttcggacgggttcgatcatcaagggaggcaccgattcagtaattggtctgaagctatacgacaagtccggctacggcatatacatcaccaacctcgaggcatggggcgggttaatggatccgggtcacaactactacgagcggggcaacctcgacatattcagtggtagaggcccttgcttggaagcacccgtttgcgaggccaacctaacttctgacgggtcggggccccatcacggctggtacgttaattacgtcgaggtcaccaccactggggtccacgcgccttgttctcagcagcagttcacctttgagcagtggctcgccaccgatacgtcgccgtatcagctctgggctgtcaggaacaactgtccaaacaacttgggcccggcccagctcaccgatgttgccatccctcgggctgggcctgctttctctattctggaatccaccgtccgcgtctaggttatgttggttgctctacttgagtgtcggtagtgttgttgggaaacatatgttttttgggacataatacttttggtgaggtttgtacttgcgtcctccttaagcttgttctgtctcgctagaacagaattgtttactgggctcatgagtctagactctagaagttccaatttatatatttatcctttattattgaataaaggaggatgcggtttggacttttttgtaaaaaaaaaaaaagttatgtttaagtaaatgataggtgcataatgtgttgtgtgccc

SEQ ID NO: 331 - DNA, 2023 bp, Glycine max
cgattcgggtggtggcaataatggtaggacaataaaaccccttggggttgacatatcaaagaggcagcataaaggtggacttagcaagggcataattgctattattgctctttcagtttttctagtagttgttttatgctttgttgctgctttggcattgttcaagtacagagatcatgtgagtcaaccaccatcaaccccacgggttttacctcctcttaccaaagcaccaggtgctgctggccccgcggccggcggtgggcttgcttcagcttcgacatcatttcgatctagcattgctgcttacacaggatctgctaagactttcagcatgaatgacattgagaaagccacagataatttccatgcttccagagtacttggagaaggtggttttgggcttgtttatagtggtacacttgaagatgggacaaaagtcgcagtcaaggttctaaaaagagaggatcatcatggcgaccgtgaattcctatctgaagttgagatgcttagccgccttcaccatagaaacttggttaagttgattggtatatgcgcagaggtcagcttccgctgtctagtttatgaactcattccaaatggcagtgtggaatcccatttacatggagttgacaaggaaaacagcccacttgattggagtgctcggttaaagatagctctcggttctgctcgtggactggcttatctacatgaagattcaagtccccatgtcatacatagggacttcaagtcgagcaatatcttgctggaaaatgattttacaccaaaagtatcggattttggattggcccgaacagcagctgatgaggggaacagacacatatcaacacgagtgatgggaactttcggttatgtggccccagagtatgcaatgactggacatcttcttgtgaagagcgatgtttacagttatggtgttgtcctccttgagctttcgactggaagaaaaccggtggacatgtcacaacctcctggtcaagaaaatctcgttgcatgggctcgtccactactctcaagcgaagaaggattggaagcaatgatagatccatctcttggacctgatgtgccttctgatagtgtggctaaagttgcagccattgcttcaatgtgtgtacaaccagaggtgtcggaccgtcctttcatgggggaggttgttcaggctctaaaacttgtgtgcaatgaatgtgatgaggcaagagaaacaggttcaagctctagctctgttgatttgagtcattctagacaactatcagataatttacaaggccaattctcagccactaactatgattctggagttgatattgaaaatgggttgttagcatcagagttattcagctcatcagcgagatatggaaggcgagtgtccggatcatttagaaggcattcttattcaggtcctctaaatactggaagaagcaagcggttgtggcagataattagaaagctttctgggggtagtgtcagtgaacatggaactatgtttaagttatgagtcttatgaccaggttccattgaaccaaattgcaatttttgaactttcttctgtgcatattgctctccctcactttgttaatgtgcagttcacaactctgctagaggcattgcacctctctgcctgagccatttgaagtttgacaagagaatacaagcaagttgtaaataggttttgacatgcttttttctgctaacctgcaagatcatgtgtatgtaactggtactaacactttgaagaggggaagcaatgcaaatctagcttgaaaatagaagatgactgaagatgacctttagtaagacctccaattgcaaatacaaacatacaagatatagtctatgcagttgcagcatcaataatgtaatgttcaaattgtcaaagtctcatgcatttagaggaggaggggatggaatggaatctggttaattagttgtatagaacaagatatattacgaatacaaatctgaatttacgcaggccactcatttttgaaaatatctttatgatgat

SEQ ID NO: 332 - DNA, 975 bp, Glycine max
attccccgctaacaatttgccaactaagaaaccccaaaagttgttccaaatctggatttcaaaacaaaatatagattcgccgcaacccatttgaatctctgagagaaggggcatatcaaaatcaatttttttttttctttcttcttttccctgaagagcaaatgggggcgtatagagctgatgaggattacgattatttgttcaaggtggtactgattggggactctggtgtgggaaaatcgaaccttttgtcgaggttcaccaagaacgaattcagccttgaatcaaagtccaccattggggttgagtttgccaccagaagcattagggttgatgataaagttctcaaggctcagatttgggacactgctggccaagaaaggtatcgagcaatcactagtgcatattatcgcggagctgttggtgctttattagtctatgatgttacccgccatgttacatttgaaaatgtggagagatggttgaaggagctcagagatcacacagatgccaacattgtggttatgcttgttgggaacaaagcagacttgcgtcatctgcgagcagtttccaccgaagaaactacaaattttgcggaacgggagaaaacgtttttcatggaaacatccgctctcgagtccctgaacgttgaaagtgccttcacagaagtgctgacacagatctatcatgttgtaagcaagaaggcccttgaaattggtgatgatccagcagcattaccaaaaggacagacgataaatgttgggtctcgtgatgatgcatcggctgtgaagaaagatggatgttgttctgcttgatcatgcagtaatgtatatgttctgtttatatccatgtagagtttcacccttaaagcatgaaaatgattgtctagacctttacaatctcaactttctgctttggtatgcagagaaatctgttcaatttaagtcaaatttttaggtaaaaaaaaaaaaaaaa

SEQ ID NO: 333 - DNA, 1578 bp, Glycine max
accattcttctaattctaaatctggggttttctttaaatttcaaatcccccacaaagcatgcttcttttcttcttcttcttcaattgacgccaccccatttgattttttctctctcctttttctcttccctctcctaaacaaacacaacaacaacaacataaaatgggggcgtacaaagccgacgatgattacgattacttgttcaaggtggttctgatcggcgactccggcgtcggaaaatctaaccttctttctcggttcacgcgaaacgagttcagcctcgaatcgaagtccaccattggcgttgagttcgccaccagaagcattcgcgtcgatgataaggtcgtcaaggctcagatttgggacactgctggtcaagaacggtaccgagctattacaagtgcatattatcgaggagctgttggtgctttactagtctatgatgttacacgtcatgttacttttgaaaatgtggagagatggctaaaagagctgagagatcacacagatgccaacattgtggtgatgcttgtagggaacaaagcagacctgcgtcatctgcgtgcagtttccactgaagatgctacaactttcgctgagcgagagaacacatttttcatggaaacatctgccctcgagtccttgaacgttgaaaatgccttcacagaagtgctgacccagatctatcatgttgtaagcaagaaggcccttgaggttggagatgatccagcagctttaccaaaaggacagacaattaatattgggtcccgtgatgatgtatcggctgtgaagaaatctggatgttgttctgcttgagtgtgtagaagacagtctctgtatttttataaattatatgccttgtttataccatgtagagattggcctcacagcatgaagatgattatttagcgagcatcaaattttaaagtttctgcttagaattatgttcaaaattagccaaatgtttagaaaacaagcacattcattttgcattgtgcctatttttgtgccatttaaagatatttatttatcaaatttccaatttattagtttgattcttttctaatcttcatcatgcttctatttgttctcatctatgccgcatttgaaaagcagatattcaatctggttctttccttgcttagtttttctcttcctttctttccttgcttagcttttctcttcctttcataatgaagagtattgaaaacttgaatatattgtttctttctatttggagcattgtaggtatttggcaacattataaattataatacttgctaacagactccaatgcttgaaggctcctcactgtgcgagaaggtatgggggaaggtcatcaaggtattgctaataaattaggaaaaggttggattttttcttataaagttggttccaagaagcaacacatgtccaattcctttttatagaaacagccagcaaatagtctctgtttgacagaacacaagggctttttcaccaaaccactagaaaactatattccaaacaagtgtaaaacaataacgaattacctgcaggccggctctagaggatccccgggtaacgagctcgaattc

SEQ ID NO: 334 - DNA, 846 bp, Glycine max
cggctgcgagaagccgccgcgaggatatggcggttgactaaagtaagcagcgttgcaacgctgtttcctttctgtttcttttcttcttccttccgacgagatctacaacgttgttgttgtttagatcttgaatagtgttttggtgttcggtgagatggaagaaaggaagcaatcacgttatgtgaagttgactaaagatcagacacctctcgaagacattacccctggcgaactcaaccagccaattcaggttcctcagttggacgttcgcaagtgccctgaatgtagacagccgctacctgaaagctatgctcctcctgcagatgaaccttggatgactgggatctttggatgtgctgaagacagagaaagctgcttgaccggactgttttgtccttgtgtattatttgggcgcaatgtagaaagattgaaggaagacactccttggactgggccatgcatttgtcatgccatttgtattgaaggtggcatttctctggcaatagcaactgctgctgcaacttccatctttcctgctattgagccagggactgtatgtctcattattgagggtttattgtttacatggtggatgtgtggcattcacactggtcaagtgcgccaatctttacagaagaaatatcacttgaagaattcaccgtgtaatgcatgttgtgtgcactgctgctttcactggtgcgccctgtgtctagatcacagggaggtgaatggacggctctcggacacattttttcagaatgacccgtgtaaccctcctcccgttcagagatgaatctacgatgacagggaaactctaaacgtcttcacctacacatcgagcatact

SEQ ID NO: 335 - DNA, 994 bp, Glycine max
acgttatgtgacgttgactaaagatcagacacctctcgaagacattacccctggcgatctcaaccacccaattcaggttcctcacatggacgttcgcaagagccctgcatgtacacagccgctaccagaaagctatgctccttctgcggatgaaccttggatgactgggatcttcgcatgagctgaacacagacaaagctgcttgaccggactgttttgtccttgtgtattattcgggcgcaatgtagaaagattgaaggaagacactccttggactgggccatgcatttgtcatgccatttgtattgaaggtggcatttctctggcaatagcaactgcagctgcaacttccatctttcctgctattaacctggggactgtatgtctcattgttgagggtttattgtttacatggtggatgtgtggcattcacactggtcaagtgcgccaatccttacagaagaaatatcacttgaagaattcaccgtgtaatgcatgttgtgtgcactgctgctttcactggtgcgccctgtgtcaagaacacagggagatgaatggtcgactatcagataacattttttcagaaatgaccgttgtaaaccctcctccggttcaagagatgaaaaccactgatgacaaggaaactcctgaaacgtcttcacctaacaacggtgagcatactgatttggagatacaggctgtataaggaaggcgggatactattgttaatattctggggtggggagggggtaatactatgcttttttaatagagaatttttttctttttatctttgactagagttctttctccctgtttcattggacgtgttatatgtaggagtgtctcataactttccttggctatagagagcctaacaaattgtaccgaatccttaattttttaatgttttccggcttcaaccattaaaaaagaaaaataaaaaaaaaaaaaaaaaaaaaaaaaaaaaaaaaaaaaaaaaaaaaaaaaaaaa

SEQ ID NO: 336 - DNA, 1156 bp, Glycine max
ggtcatggattccgggtcgatcagtacggctgcgagaagacgacagaagggggataaaagaaaggcatagcatagggcggttgactcaagtaaacagcgttccaacgctgtttcctttctgtttcttttttcttcttccttcttccttccttcgttgttgttgttgctgcgattctctagatcttgaacagtgttttcgtgttcggtgagatggaagaaaggaagcaatcgcgttatgtgaagttgactaaagatcagacacctctcgaagatattacccctggcgaactcaatcagccaattcaggttcctcagttggatgttcgtaagtgccctgaatgtagacagccgctacctgaaagctatgctcctcctgctgatgaaccttggatgactgggatctttggatgtgctgaagacagagaaagctgcttgaccggactgttttgtccttgtgtattatttgggcgcaatgtagaaagattgaaggaagacactccttggactgggccatgcatttgtcatgccatttgtattgaaggtggcatttctctggcaatagcaactgctgctgcaacttccatctttcctgctattgagccagggactgtatgtctcattattgagggtttattgtttacatggtggatgtgtggcattcacactggtcaagtgcgccaatctttacagaagaaatatcacttgaagaattcaccgtgtaatgcatgttgtgtgcactgctgctttcactggtgcgccctgtgtcaagaacacagggagatgaatggacggctctcggacaacattttttcagaaatgaccgttgtaaaccctcctcccgttcaagagatgaaatctaccgatgacaaggaaactcctgaaacgtcttcacctaacaacatcgagcatactgagttggagatagaggctgtataaggaaggaaggaatactatgcttttttaatagagaattttttcttttgacctttgactggagttctttcttcctgtttcattgggcgtgtcatatgtaggagtaccacatattactttcctcggctatagagagccaaattataccgtatccttaattttgaatgttttccggcttcaaccattaatcctctctgcaagagtctatcttttcattttggtg

SEQ ID NO: 337 - DNA, 3176 bp, Glycine max
  misc_feature (3151)..(3156): n is a, c, g, or t
gctagatcgtcatctgtccaagtagtgtcgcaacctgaaagtccttctccccttcaatcaccatcaaatgcaagttcagtcccagttgaaattcccgtaattttaaggacttctgacatgatgacagatctccctgaaacacagaaggaagaggcaaagttgtcacagcctagacctggtcaagcagtcaatgagaatgctggggaatcatcatcctctggaactcagggttatgctgaacaggaactgcaaatgaatacagaaccaaactcaaaactagaaaaacagcatcctgcatcttgtagtcagctgacgctaggccccccccctgatttttacctcgaaggacaacacctggatcataaattgactctatatcaggcaattcttcaccatataataaaaaaaaatgcagattctttttctagtgcaaaactgtggagtcaagtgcacataataacctatagaagggatgtagaatctgaggatgtaatacctccagaatgtcattcttcaccccagcatttctctgatgaaaaagttgtccctcgcgtccggcatactccttttttctcagacatgttctcttgtgaactagtttctgatttggagatgtccagtccaatttatgatattttgtttcttcttaaaagcttggaaagcatgaacagaattatatttcaccttatgtcgcgtgaaagaatttgtgcttttgcccaagggaaagttgataacctggatagtctaaaaataacagttccttctgtcccacagattgagtttgtaagcagtaagttgacagagaagctagagcaacagatgagggactctttggctgtctccatttgtggtatgccattgtggtgtaatcaattaatggcttcatgtcctttcttatttagttttgaggcaagatgcaaatacttcagattggcagcatttggtcagcctacggctgcgagaagacgacagaagggaggaacagtaagtgacaggcgactgagccctggtggattgcctcgaaagaaatttttagttcatcgcgaccggattttggaatctgctgcacaaatgatggacctgcatgccagtaataaagtggttcttgaggtggaatatgatgaagaagtgggcactggtcttggaccaactttggaattttataccttggtgtgccaggagttccagaaatctggcttggccatgtggagagaagatgattcttcctttaccctcaagacaaacttgcaggctgaggaaataggagttcattccttttatggactctttcctcgtccatggtcatcaatgcaagatacatctggtggcatacagttctctgaagtaacaaagaattttttccttctaggccaagttgttgctaaagcacttcaagatggaaggatcttagatcttcacttctcaaaagctttctataaacttattcttggaaaggaactttctctctacgacatacaatcctttgatcctgggcttggtaaggtgctacaagagtttcaagcattagttatgaggaagaaatttatggaatctgtcagtggagggaattccgagttgcagtatggactaagctttcgagatatgagcattgaagatctttgtcttgattttactcttcctgggtttcctgatattgttcttgcttcagggaccgatcataccatggtaaatatgagaaacttggaggattatgtttctcttattgtcgatgcaactgtgaggtctggagtttcaagacaagtggaagcttttaaatctggctttaaccaggttttctccattgatcatcttcggattttcaatgaagaagaacttgagcgaatgctttgtggagagtatgactcttgggctgtcaacgagtttggagatcacattaagtttgatcatgggtatactgctagcagtcctcccattgttaatttgttggagattgtccgagagtttgataatggacagcgacgagcatttctgcagtttgtgacgggcgcacctcgccttcctccgggaggattggcatctctcaatccgaagttaactattgtccgaaagcattgtagcaaccgggcagacacagacctacctagcgtgatgacttgtgcaaattatctcaagctgcctccgtactcatcaaaagaaaggatgaaagagaagctcttgtatgccataacagagggtcaaggatctttccacctttcataattgcactctcttaactggtccataattgaagaattatgaagatgtaattattagggtaattgatagttatgtagataagggtgctagtggcttgctggcagtggtctaaatgagtttattgcagtggtggtcacacgagtcactcggctatgaagcttctatcttcactgactacaaaaaattgttgggggtgtgtacatagcacgctgatagtttagttgattgacttgtatcagctgtacagacacggagggcactttttaagggtcacgcttgatatttgatgtacagtatttgtacaggaaccttaatcattaaaattttagtcgtttacttgcataatgatagtggtttcttatcttttgcttaacttgcgcaatgtaagaaaacttgcatgaagaaactccttggactggaccatgcatttgtcatgccatttttgtagagggtggcattgctctggcaactgcaactgcaatctttaatggtttcattgtcccagggacatcatttctcatttttgagggcttattttttacttggtggatgtgtggaatttatactggtcaggttcgacaaaacttacagaagaagtatcacttggagaactcaccatgtgatccatgttgtgtgcactgctgcatgcactggtgtgccttgtgtcaagagcacagggagatgaaaggaaggctttctgacagctttttccctgagacaaccattgtaaatgctcctcccattcaagagatgaagtctactgatgacaaggaacactctgaaacctcttcttctgctaatagcaaggagcatactggtttggagttacaggttgtatagggcattacctttgtcaatattgaaaagaattgcatatatttccgaattttgcttgatagagaataactttcttcgacctgagttccctgtgttnnnnnnttggacatgtagatcaaaca

SEQ ID NO: 338 - DNA, 1231 bp, Glycine max
tcgagtcagctacgtagtgcccccccccgatcatatcatcacatcttctgctctctcacgagaagaatactactaactgtgttgtaatacctcagtggagaacaagatgaatccatggaacatgagaacttccaagttactctctcaacaacttgcttatcctccttatcgcttggtagaagagattccaaacatgggaaattccagttgtgtgagcaaggagccaagaggttcacagatgacaatcttttatggtggccaagttcttgtcttggatgatattcaagctgacaaagccaaggacatcatgtcttttgccggcaaaggaatgtctcaaaaccagaacgactgtgcttacactttccctgctacaacttctgctactcccagtagaccattcccttttcttatgaatatcattccaaccactgccaacaattcggttcaagaccaccctcaaacaccatccaaacctgttatttgtgatctaccattggctaggaaagcttcacttcatcggttcttggagaaaagaaaggatagaattgctgccagagcaccatatcaaacaagcaatcacatggcagcccttaataagctagctgaatccaagccatggctcaccttggcacctaaatcaccacaacaagacgaatctgattctgatagcagctccagctttgtgttattttaactacttttgttggacaaggtgaagaagattgtagtgtcaacattttgataaacggagtcaacattttatgggcttctctatagctccgtgctgaatttttgggagggctatgatcaatgctgttgctcatggctttactattattatatttaagagtgtaatttagggcaaaaaagtaatgtaaatgtagtttggttagcatagttttagtaaaatattgaaatcagttcttctcaattctcattatcacgtgtattatatgtaaaacttacggttaggattatctttctatatgctagcctgtttgttatggttcaattggtttcctactagtatgtgagacacatttagtcaaattccatctttccagcgaattcagtttttcctctcaaattatcctagttcatgccatgcagcagaaaatgaggtagattgagcagcaataagaataacaaattgaactaattgaaagatataatgtgcatgcaattattatgtagcattgttataaaaatgtcctcagatattgttgaatcc

SEQ ID NO: 339 - DNA, 1135 bp, Glycine max
cacacacgctcaccctcaatatccgccattgaattcttcttccatttctcttttttctgcatacccatttcgtttttcttcccaaatggccctttcttgctccaaagttttaagcttttatctctcgcccgttgtgggtggtggtgatgttccgaaaaagctcactttttcttcttttttgggtctttctaagggtgttggtggaagcaggagctcgagggtgtgtgctgcttcaaatgcacccgcaccactcgctggggtcatatttgaaccatttcaagagctcaagaaggattatcttgctgttccgattgcacacaatgtttccttggctcgtcagaactatgcagatgactctgaatctgcaatcaacgagcagatcaatgtggaatacaacgtttcctatgtgtaccacgccttgtttgcgtacttcgacagagacaacatagctctcaaaggacttgcaaagttcttcaaggaatcaagtgaagaagaaagagagcatgccgagcagcttataaagtatcagaacattcgtggtggacgagtggtgctgcacccaatcacaagtcctccctcggaatttgagcattcggaaaaaggggatgccttgtatgccatggaactagctttgtctttggagaagttgacgaatgagaaacttctgcacgttcacagtgtggcagaacgtaacaatgatcctcaattggcagacttcattgagagcgagttcttgtatgagcaggttaaatcgattaaaaagattgcagagtatgtggctcaactgagattagttggaaagggtcatggtgtgtggcactttgatcaaaagcttcttcacgatgaagatcatgtataatctttgaacggcctctgctttctaaatatggtcctatgtgaagttatgtgttgttctgcttgtaggaatagtgaataagtgtttctctcctaggtgataaaaatgtaggaactttgtgttgtattatagttattgtcggtagaatggtagtagtagtagtattattatgtgcaatctcgtatgtttgtagcatgcaattattttgttagaagtaaaaaatgacgtcggctacttgggttcaagtccaaaaaaaaaaaaaaaaaaaaaaaaaaaaaa

SEQ ID NO: 340 - DNA, 1806 bp, Glycine max
ccacgcgtccgatccacccttatatcagctacgtaggcccccggttcccccccacaacctgctccagttcattaaactcgttttttgctagaagcaggaagagaagagaaacaaacaaaccacaaaataatcaattgagctacttactataagatttagatctcccaacagagagtttcacaaaattgccaagtacccttttcaggatcaaggaagagaatcaagaaccaacaaaaggtgttgttcattgttgtagttgtttgtaactgtagcaacaggaagatggttggaaagttggttgtggtgaggcttgtgttggccatatctgtgttgagctctctccttctgacaacctcggcacagacagcatgcaagggccaggccttcaccgaaaacaaggttttcaccacatgccgtgatcttcctcacctatcctcgtacctccactggacctttgaccaggccacagggaagttggacatagccttcagacacacaggaatctctggaacagacaagtgggttgcatgggctatcaatcccagcaacaacctcaattcagctatgacgggagcacaagctctggtggctatcataccatctagcggtgccccaaatgcatatacttcttccattgcaaatcccggaaccacactggcagagggagccatctcttataatcactcaggattgacggctacccatcagagcactgaggtcaccatctatgctaccctcactcttcccagtggtaccaccactttggtccacctttggaacgatggtcctgtgtcttctggtacccctgcaatgcattctatgacttcttccaacacccaatccaaggaaagcttggatcttctttctggctccagtcaagcaggaagtgggaattcacttaggagaagaagaaatgtccatggagtcctgaatgcactgagctgggggattttgatgcccgttggtgccataatagcaaggtatttgaaggtgttcaaatctgcagaccctgcttggttttaccttcatgttacatgccaaacctctgcctacatagttggtgttgctgggtggggaactggtctcaaactcggaagtgactcggttggtattaagtataacacccatagagcactcgggatcaccctcttctgccttggaacccttcaggtttttgctctgcttttgaggcccaacaaagaccacaaaatcagaatctactggaacatttaccactacgccgttggatactccaccataatcatcagcatcatcaacgtctttaaagggtttgatgcattggagacttctgtaggggatcgctacaatgactggaagcatgcttacattggcatcattgcagctttgggtggcattgctgtgcttttggaggcctacacatggatcgttgtgttgaagaggaggaactcagagaacaagacagcacatggtgtcaatggaacaaatgggtatggttctagaggacagcaggtgtaagggaaagtggcctcatagatactggatttttggcttctgaattctacttatatgagtttggttgttaaaacttataacactttctgtttgtatatttgttcacttatatggagtgtatttaggacactcccggtagcttagagtctggttttgatataaaattctttcataggatagacagtgagttcctggggcatggtttccggaggataccttgtattgattttcttcatatttgtatttattgtttacgtttatcttactctttctccataccttccagtttcaaaaaaaaaaaaaaaaaatgtt

SEQ ID NO: 341 - DNA, 2231 bp, Glycine max
atgattgtttgtccactagtaaccagagtttaaagaaccagataatttttcagtgaagaagaaaaatcccaatgattgtgactcgttctgctttgatgctccatctccaaaacccaccaattcgctaccacttcttctcccacttcagctatgctcccaccttccctactctattcaaacctcgccctttctctccaaccactccacgccaagcacaaaccagaacctttgtaagcgctgttgcatcatcatcatcagcagcacatggttccaatggcagagacactttctttgcagaagaaaacgtttcgtggagttcactcggtctctctgataccatttctcgagcgctctctaacattggcctcaataggccctctctcgttcaggcttcttctgtaccgtctgtgctgttagggaaggatgttattattgctgcggagactgggagtggtaaaacatacagttacctagttcctctaattgataagcttagagacgcccaggaacattctctacatgctgtgttggatcaaaaagtgacctcaccacagaacgttctgctggtgctttgtccaaatgtgcaactttgtgagcaggtagtgaggatggctaacagtctctgtagagatgatggcgagacaatagttagtgtggcagccatttgtggcaaacagggatggccaattcgggaacctgatgtcattgtgacgacacctgcggctcttctgaattatgttgaccttgacagaacccgacgcatggaatttatgcgtggtgttaaatatgtggtgtttgatgaagctgatttacttctctgtgggagcttccagaataaagtaatccgcctgataaacttgctccgctttgatgaaaaactattgtctcgatcaaaaaaatcagtagcggagtttccgatgaaacaggaattttccttgtcatcagaagatgcttttgaaggtgaagaggaacttcaaactgaagccatctcagaagacgatgacaatgataaagaggatattgttgatattaataatgaagccggaaatgttaaactaagagactggaggagagtgaggaaaaattatgagcgtagtaagcagtatgtttttgttgctgctacacttccagtgaatggaaagaagacagctggaggggtattgaaatatatgtttcctgatgctgagtgggtttgtggaaactatcttcattgtcacaatccgagattggagcaaaaatggatagaagttatggttgatactcaagtggatgaactcataaaggctgtgaatcacagattcagatctgaagatttggttaatgctggtggcattcacagaacaatggtgtttgccaacactgttgaggctgttgaagctgtggcaaagatattactccgatctgggattgaatgttctcgttatcataagaattgcacattggaagagcgagcacaaaccttagttgattttcaagataaaggtggtgttcttgtatgtaccgatgctgctgctcgtggtgttgatattccaaatgttttacatgttattcaggcggattttgctacttctgctgtagactttttgcatagggttggtcgtaccgctagagctggtcaaattggacttgttactagcatgtgcactgaatccaacagggagcttgttaatgctgttcgtcgggcaggggaacttgatcaacctgtggaaactgcatttagcaggaaaagaagcttccgcaacaagctcaagaaaaggggtactaacaaagtcagagattcagcaacaattaaagagagcgttctaggatgagaatactaggtgacactcagtatctaaagcagcatgcgccaatgacaatgtgaaacaacattatggccactgcttcaaagtgtattatctgttacacctagatgcttacgagtaaatgacacatgtaacggatcttgccatttcttgaggattatgcaattaccgtgaaggaatcctccatatctgagttaattaatgcagataactgttattgatatcccttttgctggtttcatgagtagagtgtcttgtattgtccaatcttagtttctggaatcacatttttccatcatcaaaaaaaaaaaaaaagtggcagttggttaacttggttcccatcaatttatttttcatgtaattacgagattgtattgcaagagaataaacgtgataagttatttgatgaaaaagaatatcgaatga

SEQ ID NO: 342 - DNA, 1261 bp, Glycine max
tccatttagggtgggcaaatttttggaagggggaatggtgggggcctttttgttttttacccaacttgggaaaaggggatgtttttcaagggggattaatttgggaaaccccgggtttttcccatcccgggggtgtaaaaaggcggcccgggaggggggggaattcggctccctattgggggaattggggtccggggccccccccggggtttttttttttttttttccttttttttttttttttttttttttttttttttttttttttttttttttttttttaattaatatcttcaattctttattcatcataatcaaagacaactttatattataacttaaataagttaaagaagatattacaagtagtagcatcaagcaccatcagaaaggtccaaatacaattggagtggtcttaattattccaagaagaaaacaaaacaacaaagcacacataattttattactgttttattgatagatatttgataggaagaagcaagtgcagaggaaattaataggtgtaggtgggtttattatagatttagaccccctttgctgtccactgaaatttgtggggtttgtgattcatgttcatgccatagggattggcatagcgagtatccccaccaccccagttatgacgctcatatctcatttcatccaccttagccgtgactccaccaacatgctcctctgcataagactcctcgtactcctcggattcctccgaaaaatactcatggtgcccaccatggtttggaaaatgatgttgagaggcgttattattaccatgatgatgaccaccaaaagggaactttctgccaccatggtggtcactgtgcatgccttcttgaaacatgcctcctaacttgccaccatgcctgttcatgttcatgtgcatggctcctacgccgttgccatgcccatgatgatgtttttgcattgagaagtcagagtccacagcagcaaaagcaccaagccttttgttgttgttgttgttgttcatgttcatgtgcatgcctgggaattgcttgtggttgtggccatagttgttatcagggctccaagactcttcttggaaggcatagctctgttgctgaccctgactctccatccacatgctcccatcagcacagtgttgctgctgaaaatggttccttcccatcttgtttctggcaaacttcacctttagtttgctgttattagtgttaattagagatatgtctccccttctgtcgtcttctcgcagccgtatcga

SEQ ID NO: 343 - DNA, 2295 bp, Glycine max
cggccgcgcccggcggcgggcccgtttttccactctctcacctcccaactcgccctcgactcacatccttgtccgattccgcgaacgagtcgagtgaatcgggttggtaagatctattctgtttcttcgtcatggcaaccggacaactattctcgcgtactacacaggctttgttttacaactacaagcaacttcccatccagcggatgcttgattttgacttcctttgcggcagggaaacaccatcagttgctggaataattaaccctggttctgagggatttcaaaaacttttttttggtcaggaggaaattgccatcccagtgcatgctaccgttgaagcagcttgtgctgcacatcctactgccgatgtcttcatcaactttgcttcatttagaagtgctgcagcatcatccatggctgctttaaaacagccaacaattagagttgttgctattattgctgaaggagtacccgagtcagacactaagcaattgattgcatatgcccgatcaaacaataaggttgttattggcccagccacagttggaggcattcaagcaggtgcttttaaaattggtgacacagctggaacaattgacaatataattcagtgcaagctctacaggcctggatctgttggatttgtttctaaatctggtgggatgtccaatgaactatacaacactattgcccgcgtaactgatgggatttatgaaggcattgctattggaggagatgttttccctggttccacactttctgaccatgttttacggtttaacaacatgccacaggttaaaatgatggtagtacttggggaacttggtgggcgtgatgagtattccttagtggaggccttaaaacaaggaaaagtatccaaaccggttgttgcctgggtcagtgggacatgtgcacgactattcaaatctgaagtacaatttggtcatgcaggagccaaaagtggtggtgagttggagtctgctcaagcaaagaatcaggcactaagggatgctggagctgttgttcccacatcatatgaagcttttgaagtttcaattaaggaaacatttgataaattggttgaagatgggaagatcacaccaatcaaggaaatcacacctccaccaatccctgaggaccttagtactgcaattaagagtggaaaagtccgtgctccaactcatattatttccaccatttctgatgacagaggagaggagccatgctatgctggtgtacccatgtcttccattattgaaaaaggttatggtgttggtgatgttatctctcttttgtggtttaaacgaagccttccccgttactgtactcaatttattgagatatgcatcatgctatgtgccgaccatggtccttgtgtctctggtgctcacaatactattgtgacagcaagggctgggaaggacctagtttctagtcttgtatcaggtttgcttacaattggtcctcgatttgggggtgccattgatgatgctgctcgctacttcaaggatgctcatgacagggcgcttagtccttatgagtttgttgaaagtatgaagaagaagggaattcgtgtgccaggaatagggcacaggatcaagaatagggacaacaaagataagagagttgagctgctacagaagtttgcacgcacacattttccttctgtgaaatacatggaatatgctgttcaagttgagacctacacgctcacaaaggcaaataatttagttcttaacgtagatggtgcaattggatctcttttcttggatcttcttgctggtagtggaatgttcaccaaacaagagattgatgaaattgtggagattggctatctgaatggcctctttgtgctggcacgctccattggtctgattgggcacacctttgaccaaaagcgattgaagcaaccactttaccgtcacccatgggaggatgttctctacacaaagtgagaaagttttgtgcgactgtaagaactttggcatgcttcaaattagcaatcttttgggaaatcatgcacatctgaaatatgctggagtggttttgtagctgttagactagtgttgtacgatctattggtgaaaagtcatcttccatttgtaacttgtattaaatttcataaagagagaacttggtcatttttaaaattatatttctcttgatgaatattttggcgcatttattctgcagtatgatatatgttcatggaaacgacaattttattgccctcagcgtatgaaatgttttgctatggccgctaaaaaaaaaaaaaaaaaaaaaaactgagac

SEQ ID NO: 344 - DNA, 1389 bp, Glycine max
aacgaaacgtttagattggaagaaggcatcgtcttcatcttcttcccttaggttaggttttgcagagctcccttcaacgcatttcttcgacccatattcactctttcaagcacaacgacactatctcattgagtggtatcctatctcacgataatttggtttctttattttctgtctttgaactcccattgatcggcgacaattgagagatgggaaaagcaagggacagaaccgaagatttcaaagacgccgtgcgccacaccgctcgctctttgggctacgatgaggctaaattggcgtccgtaatggcatctttcattattcataaaccgccgcaaaggtccccgttttccaaagccgcattgaagacgttggagagtattggagagctggatcagtgtttgttgaagcatagaaaggactacacggatctgcatcgcacgactgaaaaagagagagatagcattgagcatgaagttagtacttttattaaaacttgccaggaacaaattgatattcttaagaatagtataaatcaagaggaggaaacttcgaaacattggcttggcattgcaaccacaaaatctaatgccgacaccattgcccacaaacatggggtggttctaattttaagtgagagactccattcagttacggcacagtttgatcagctcagagctgtacgcttccaggacgctattaacaaagcaataccacgaagaaaacttaaccgtgtagccaggaaagattctgcagaaacctctaagtcaggtgacatggagctcagagaacctgaggagttacgctctgagcctctaagagtccaacagcaactcttggacgatgaaacacgtgcccttcaggtggaattgactagtcttctcgatacagttcaagaaaccgaaactaagatggtggagatgtctgcactaaatcacctcatgtctacacatgttttgcatcaagctcagcaaattgagcatctgtatgatcaggctgttgaagctactaagaatgttgagcttggtaacaaagaactctcacaagccattcagaggaatagcagcagcaggacatttcttttactatttctatttgtgcttactttttcaatcctctttcttgattggtatagttaaatgcttttggttttctgctatcacagtgtatcttatagacactctctgccccttttctcttttttccctattgctgtcaatatttgtttttactttttaccactaggaaggcatctttttctagattcgatgtttattggagacagaattttagtaatcaatttatgaagggaatgacaaaagagacctgcctactgtttggtaggaggggagggaaaaaaaaaaaaaaaaaacaaaaaaaaaaaaaaaa

SEQ ID NO: 345 - DNA, 1764 bp, Glycine max
attttagaggggaaggccgggctatgggaatgggatgaggaaagacgagatcgtatggggaccatgagtgaatcggtggggagaggggaagagaagagggttgtgagtgtgactccgctgagggatatgacgccagagagggttttcgggaagatgggacatttgcagaagttgttggatcggtttttggcttgtaggcctactgggttggctaagaatagcaggatggttttgattgcgctgtatcctgtggttaaggagagttttcagttgtatgctgatatgtgtgaggttttggctgtgttgcttgataagttctttgatatggactatgctgattgtgtgaaggcttttgatgcttattctagcgcggctaaacaaattgatgagttggttgcattttacaattggtgtaaggataccggtgtggcgaggtcctcggagtaccctgaggttcagaggattaccaataagttgcttgagacattggaggagtttgtgagggatagggccaagaggccaaagagtccggagaggaaagaggaggttccgccggtggagaaggtagaggaggagccggccccggatatgaatgaaatcaaggcactgccaccaccagagaattatatcccacctcctccgcctgagccagagcctaagccgcagccacaggttacggaggatttggtgaatctgagagacgatgcagttactgcagatgatcagggaaataaattggctttggcactctttgctggtgcacctgctaataatgcaaatggatcatgggaagccttcccgtcaaatggacagccagaagtgacttcagcctggcaaaccccagctgcagagcccgggaaagctgattgggaattggcattggtagagactgctagcaatttgtcaaagcagaaggcaactttaggtggtgggtttgatcctctattgttgactggcatgtatgatcaaggaatggtgaggcagcatgtcagcactacccaactgagtggagggagtgcaagcagtgtggcattgccaggacctgggaagactacaacccctgtgttggctctccccgccccggatggatccgtgcagccagttaatcaggatccatttgccgcatcgctgagtgttccaccaccgtcctatgtccaaatggctgatatggagaagaagcagcacttgcttgtgcaggagcagcaggtgtggcatcagtatgctagggatgggatgcaaggtcaatctagcttggccaaactgaatggcgctggatactatgccggaggtcctatgcccatgatgccttatggaatgcccccagtcaatggaatggggcctccaaccgggtattatcacactccttactgatacccctttcaccttttttttcttttctgtgtcacatctataggttgtttcgtttattttttactacgacatagtgtttggcttggtttcaaatgatgtcatcttattcttgagatctgcacattagtacaacggggttgctaaggagactgggttgaagagacaaattcttgttgggttttgatgctgggagatgtgtaactcatttgtgatatctctctgtattttgtaatattagcattttcttcccgattttgtacttccaagtgattcttgcaccttaaaaacaaacgattaactactgtaaattttattaaatgctggtactgatgaacactattggttataccaaatgatatttccatcttgtgggagcagccttgactgcctatt

SEQ ID NO: 346 - DNA, 641 bp, Glycine max
tcagctacgtaggcccccccccccatgtgcacacgtatttttatatttgcatgcgtataaattgacagtaacatattttgcacttttgcagttttacatgaatttttgtgccaaactaggaaacattatttggagaccggcagggactatgccaaattctaatctgctcaagcaaatgactttataatccacttcatgcgggtgtgattaattagaagagcactaactggtccccgagtatgctaaaaattagcatcctttctagctatcataatgcaacatacactgtatgaatagtattgcaaacgggaatcactgtcaacttacaacatggcttaaagtataatggtttacaaaaacaatcttgggagaaggaaaggaaaaaaaccctattgcaatcatcttgtagttgtagcaaatctatcccacaatggtttacaaaaccaatatattgtttggttcgggcagaaatgtataaagcataatgctttccgtcaccaattctgtcagcgtgtttgggagagctattcaaattctcaaacacgtttgtttgagacatgctgttttgtataaaaaagcgtctttggtcgcaataaattaaaagttaagtctgttaattgacattaaaaaagaacaacaac

SEQ ID NO: 347 - DNA, 1719 bp, Glycine max
cacgcgtctcagctacgtaggcccccccccccccggtgcgtttaaacttttaaagtgtgaacagtgaccgacattgcttcttccctgcgtcgtcgtttttttcttctctcctctttgttagggtttgctcggttccatttttcccaaaccattcggcacaacatcgaaatttccccattgtccgcttccgcaacgaaataactctaccgtgccctacgataaggggtttctcagagcaggagcaatgtcttccccttatctacctgccacaactgactcacttgctctcgcaactgaggccaaagacccatctgaggccatctccattctttatcgggtgcttgatgatccttcttcttcaccagatgctctgcgtatgaaagagcaagcaatcacaaacctcactaagcttctcactgatgagaataggggagaggatctgcgcagccttcttactcagttgaggccattcttctccttgatacctaaggcaaaaactgcaaagattgttaggggaataattgactcggttgctaaaattccagggacatctgatctacaaattgcactctgcaaagaaatggtgctgtggactcgtgctgaaaagcgtacctttctgagacagcgagttgaggcaaggcttgcagcacttctgatggaaagtaaggagtattcagaagctttgactcttctctctggcttggtcaaagaagttaggagattagatgacaagcttcttcttgttgacatagatttgctggaaagcaagctgcacttctcattaagaaaccttccaaaggcaaaagctgcactcacggctgcaagaaccgctgcaaatgctatatatgtgcccccagctcaacaaggtgccatagatctgcagagtggaatacttcatgctgaagagaaggattataaaactgcttatagttatttctttgaagcttttgaatcattcaatgctcttgatgaccccaaggctgtttttagcctgaagtatatgttgctgtgtaagatcatggtgaatcaagctgatgacgtaggaggaattatttcttctaaagcaggcctgcaatatcttggccctgacttggatgctatgaaagctgttgctgatgcacattctaagcggtcccttaagttgtttgaaattgctttgagggactacaaggcacagttggaggaagacccaattgtacacaggcacctttcatccttgtacgatacccttatggagcagaatctctgcaggttgatcgagcctttctcaagggttgagattgcacatattgctgaacttattgaacttcccacggatcatgtggagcggaagttgtctcagatgattttggacaagaagtttgctggaacattggatcaaggtgctggatgccttgtcatatttgacgatcctaagactgatgctatatatcctgctactctagagaccatttccaatgttgggaaagtcgtggacagtctttacgttaggtctgccaagataatggcatgagctctctggttattttactccgatgtcacattccttgttgctgttttcttcttaatggtgactagcatgtcatttgttttttctatttttatttttgttgaacttaattgtggtaaacctcttccggtggcttttgaacatttaaatgtttttgtggttttactgccacttgtctaaccatggtaacataaaaaaacatgtgtgct

SEQ ID NO: 348 - DNA, 1626 bp, Glycine max
  misc_feature (1519)..(1519): n is a, c, g, or t
  misc_feature (1567)..(1567): n is a, c, g, or t
  misc_feature (1573)..(1573): n is a, c, g, or t
  misc_feature (1588)..(1588): n is a, c, g, or t
  misc_feature (1592)..(1592): n is a, c, g, or t
tacggctgcgagaagacgacagaaggggaccacaaaccaccacccaccacccaccgccgccacattcacaccacgcgccgccgcttccaatttccccggagacccaccctttgcatggcagtgagctttctggcgcgcgatgtatcggacctctgccttgggaagccgccgctgaggtcgctctccgccgccgccaccgtcgccgacgccttggccgcgctcaagagctccgaccacgagacccacgtcagcttgtggagcttctgcgagaacaagaacgaggttcgttgcgttgggaaactgtgcatggtcgatgttatttgctacctttgcagagaggacaatctcttgtctccttctaaagctctcaaagaaccactttcttcaattctccctaaggatcaatctctcgttgtgcatcttcaaccttcttctagcttgtttgaagctattgatcttatcctccaaggtgcacagaatcttgtggtgccaatattgccaacaaagaggagtggagtttcaagaaggaaacagcagcagcatcagaaggcatcatcaacaatcaacagccatagtagttgtgaattctgttggttgactcaagaggatgtgattaggttccttcttggttccattggggtcttcactccactccctgctttgtctattgactctcttggcatcgttagctctgatgtgcttgccattgactactactcccctgcatcttctacagttggagccatctcaaagtcccttgcccagcaaacttctgttgccattgtggacagtgatggcactttcattggagagatatcacccttcactctcgcttgttgcgacgagacggtcgcggccgccatggccaccttgtctgcgggggacctaatggcctacattgattgtggaggccctcctgaggatcttgtgagagtggtcaaggcaaggttgaaggagaagaatttggagaagatgttgcaggagttcacaattttgtcatcttgcgagagttcacaattggcatcctcctcgtcttcctccgatgaggagtcaacaacaaggacaccagctaggtctggaaggttggcaaggtcatctagctactcggctaggatggtgaggaaggccgaggctatagtgtgtcatccaaagagctcccttgttgctgtgatgatccaggccattgcacatagagtgaactacttgtgggttattgaggatgattgtagcttagttggcattgtcactttttctaatatgttgaaggtgttcagagaacatttagaaactatgtagattattaggtgatgaggttttggctttggatgcttctggtgagaagcatgaacaccaaggtgtatgagcatggtccttcttttgtaagtattgcaatgtggcccgggaggttttggtttttgttgtgctttatttctgtgtgcttcccttctaataaaaaaactcccttcaacgcaattttttgtaaaggaccaattttttcctgcctcagtttgtttgaaanaacttaaaatgttcccatgtccaatgagactatttttactgcaacganatttgngcaaccatttttggnttcnaaaaaaaaaaaaaaaaagaaaaaaaaaaaaaaaa

SEQ ID NO: 349 - DNA, 1250 bp, Glycine max
tcagctacgtaggccccccccccgatgttaatgagaatgaaatgattctcctgacaaaaactgttaaacttagtgagtactgagtagggagttgccagccatgtccgttgaactcaagctctctcgttccaatcgtatctatcgcccttcggaagctctggaaggcaaaatcattgtcaaaactcagtcttcaatttcccactatggaattcgccttactgtcaaaggatccgttaacttgcaggttcgtggaggatcagctggggttgttgagtcattctatggtgttattaagcccatcccaattgtgaataggaccattgaggttaaatcttctggaaagattggttcgggtacatcggagataccattctcagtgaatcttagacagcgggatgaaaatttagaaagattttatgagactttccatggtgcaaatattagtatccagtatttggcaactgtagatatatctcgtggatacttgcataaatcattatcagcaacaatggagttcattgttgaaagtgataaagaaaattcagctgatcttcaacaacaaccactttctccagagatggcaatcttttacattacccaagacactcaaaggcatcctctacttcctgaattaaaatctggtggatttcgggtgacaggaaaaatctctactcaatgttctttgtctggtcctattagtggtgagttaactgtagaaacatctgcagttccaattcattctattgacattcagttgtttcgagttgagtccgttcttcttggggagaaaattgtgaccgaaacctctctggtccaaacaacacagatagcagatggagatgtgtgccgtaatttgacgctgcctatttatgtaatactaccacgccttttgacctgtccaacaaccttagctggtcccttctcagttgagttcaaagttgccatcgttataagctttcagtcagagctaagtaaactgcacaaaaaatctgacgccaaaactccgagactatggctggcaatggaaacattactgcttgagttggttcggacaaagtaagatgatttaattgtgtggtttatcaaaatatgaatatgtggataaatatggaacatggctttactcatgcaacattttagataggtttgagtaaattgggtatttgacttctcaagtttcatgtaatgtagctcaatcttttactgcagcattgcattgagaaacatttcttaaaaaaaaaaaaaaaaaa

SEQ ID NO: 350 - DNA, 1956 bp, Glycine max
gtctcgtgttggctcttttggtgtttggttgccctttttaaattaataatgtgcaaaacattacaaaagagtttgtttcaaactcattaaagaacaataaaacaagatatgcaacttaaaacaaaactcgattgaacttatttccaacccaatcccatatgataagcagattgattatcatactttatgcaagcatgtatattctttagattgagccacaggattattactatatgacaagcagaacttcgcttattttattaacacgattgagcttttgctgattcgaagattcactatgtcaatctgaaattcaactcgagattcctcatctagtccagctttatcagtcgtccaatggctaatgtccaccactttatatgaaatcaccagcttaaactcttcccaatatcttcaaagcataaaattagaaaatgccaagttgccaacgaacaataaccaagctattctcgcgaactaaattagactaccatttcaactttcagtttgacagttatctgagcagagactctctgaatgcattgccataactctgttttctgatagaaacatgtactgttgaatctttctctatatctggtgccatcatatatgaaaattctatgcactagagaatttggtatacagcttctgaaggcaatctttactagccagagcataatattccagaagcaaattaatttcagggcacatatttacaacttagacacaaactcttcatatttcataacatcaatgtggattaaacaaagaattaccatgtcaacatttagtcaaaatttcggctccagtcttagttatcaaaatggtatgctcaaactgtgcagccggactaccatcagctgttattgttgtccagttgtcaggccatgtaatggaatcaatgcttcccatcgaaagaatcggctcaattgtaaatgtttgaccttcaaccatgcggcctgccttctcattgcgattgtgcataataattggttcagaatggaacactgttcccacaccatgcccaacaaaacgctccactacaccatagccatacttttcagcatgctcactgattctctttccaattttcctaaagagagcaccgtccttgcacgcagctattcccttctccaggcattcttcagttaccttaacaagatttttcagttcatcactgacttccccacaaaaaaatgtctttgacgtgtctccgtgatatccatccaggtagactgtcacatcaatgttaataatatcaccattctgtaactgccgagaatcaggtattccatggcacatgcactcattaactgatgtgcacacgcttttcggaaatccaccatagccaaggggtgagggataagcaccagcatcaattatcatctggtgcactgctttatcaatctcattagttgttatggaaggcctaaccatagttcctgcaaagtttaagacacgcgctgcaagctcacctgcagccctcattttagctataccttcagaatcatgaatttgatgctcacttgcaatttctggaagtatatctgaacctacataaggaggccttggtatgtggtcaggaacagggagatgtggtgatactctcccacgccttaatggaggccttttcttaaactttggcacaactcgaacttcacgttctcttctgatattcatggcctcctccaaccccgaaatcttcctcgcgaaaaccacgaattgctttctcgaaagcaattggttcccttgaagagtagaagagcgcgagagtgtgagccgagaaccgatgaaggatgacgaagacagtgagcattcgccatgatggagtgttgggattttcagaaatgcgttgttagcgagcgaagcagtgagcgccattggaagaagaagaagagtatgtgtttgtgagtgagtgaggataatggggggggggcctacgtagctgatcga

SEQ ID NO: 351 - DNA, 956 bp, Glycine max
cttcttgttgccgtgttgataacttggtatatggttcctcgtctacttcgagtccatatatataacttgccaatattcttagactgtccgaaacatatatacttggtgttttttgttctaggaaagcctcgtataatattattgtgtcacaataataatgtctcactccattaattcagagttcaagtttgatcccaaggaaccctccatgcccatatcgtatccaataaagaccctcaaggagttggagtcacgctcctactttgagtcctttcattatccttttaacaaagcttcagttccaattgaaagtgggtattctgaacctttgccaaattgtagaagaatactagtgtgccatgatatggctggagggtacttagatgataaatgggtccagggagggactaatgctgaagcctatgccatatggcactggcatttgatagatgtgtttgtctacttctctcataatctcgtcactctccctcctccttcttggactaatacagctcatcgtcatggtgttaaggtgctggggacttttatcactgaaggggatgagggaacgactgtctgtaatgaactgctttcaacaaaggagtctgcccaaatgtatgcaaaacacttggcagagcttgctgttaatttaggctttgacgggtggctgttgaatatggaggtatcattgaagccggaacagatttctaacttaaaagagtttgtcaatcatctatcattaacaactcattcttcagtgcccggatcactggtgatatggtatgacagtgtcactattaacggtgatctatggtggcaaaatgaactaaatgagcataataagcctttctttgatatatgtgatgggatatttacaaattattcatggcaggaagactatccaaggcggtctgctgctgttgctggtgatcgaaagtttgatgtgtacatggggg

SEQ ID NO: 352 - DNA, 1209 bp, Glycine max
caccaaaatacttctcttggcattttgtgtcccttctctctttctcttgctggatattttccaaccaaacgtaggcaccacttctaggaatggcaagtaagatatttcttgcccttctgatcacaacctttgtggttgaagcctctgctggtaacttcaaccaagactttgagataacatggggtgctggacgtgccaaaatcctcaaaagtggggaacttctcagctggccttgtccctagacaaaacctctggctctggatttcgttctaggaatgaatacttgtttggaaaatttgacatgcaaataaagcttgtgcctggtaactctgcaggcacagtcacggcttattatcagctatcttctcttggggatactcatgatgaaattgattttgaatttctgggtaacttgagtggtgatccttatattcttcattcaaacgtattcacacaagggaaaggtaacagggaacagcagttctatctgtggttcgaccccacccaggacttccacacatattccattctttggaatcctcagagcatcatattctctgtggatgggacacccataagggagttcaagaatcttgaatcaaaaggggtttcttttcccaaaaaccaacccatgaggatatattcaagcctttggaacgctgatgattgggccacaaggggaggcctagtgaagactgattggagccaagccccattcacagcctcttacagaaagttcaatgcccaagcatgtgtttggacttcttcttcaggctcatcttgctcctccaacaatccatcatcaaaccaagcatggttgaaacaatcactggattcaacagggcaagctaggattcagtgggtccaaaagaactacatgatttacaactactgcactgacactaagcgtttcccacagggccttcctcctgagtgcacaatcgcatgaaaacaaaactatttcatattataaacctctcatacctcatgaattcattttttttttcttgtcttgtgtaaattaataaaaacactatagggctcctcggtttatactttatatgcatctattgtctgtgaaatagtgtgcaaatgagattcgttgtaattttggtttttaataaatttgttggagagttataaattaaaaaataaaaagaattgtgcgcttaaaaaaaaaaaaaaaaaaaaaaaccccaaaaaaaaaaa

SEQ ID NO: 353 - DNA, 1005 bp, Glycine max
  misc_feature (998)..(998): n is a, c, g, or t
gtacgcctcgcggcctacggctgcgagaagacgacagaaggggactccaagccctcaccaaatacttctcttggcattttgtgtcccttctctctttctcttgctcgatattttccaaccaaaataattattaaaaccaaacgtagctaggcaccactgctaggaatggcaagtgagatatttcttgcccttctgatcacaacctttgtggttgcagcctctgctggtaacttcaaccaagactttgagataacatggggtgatggtcgtgccaaaatcctcaatagtggggaacttctcaccttgtccctagacaagacctctggctctggatttcgttctaggaatgagtacttgtttggaaaaattgacatgcaactaaaactcgtgcctggtaactctgcaggcacagtcacagcttattatctatcttctcttggggatactcatgatgaaattgattttgaatttctgggtaacttgagtggtgatccttatattcttcatacaaacgtattcacacaagggaaaggtaacagggaacagcagttctatctgtggttcgaccccacccaggacttccacacatattccattctttggaatcctcagagcatcatattctctgtggatgggacacccataagggagttcaagaatcttgaatcaaaaggggtttcttttcccaaaaaccaacccatgaggatatattcaagcctttggaacgctgatgattgggccacaaggggaggcctagtgaagactgattggagccaagccccattcacagcctcttacagaaagttcaatgccccaagcatgtgtttggacttcttcttcaggctcatcttgctcctccaacaatccatcatcaaaccaagcatggttgaaacaatcactggattcaacagggcaagctaggattcagtggggccaaaagaactccttgatttacacttctggctggccctaacgtttcccaagggcttcttctgagngccaatc

SEQ ID NO: 354 - DNA, 2281 bp, Glycine max
cggaattcccgggtcgacccacgcgtccgagtcaaaagcgttcggctcgtgcggctgcgagaagacgacagaaggggacactaacacatacacactcggatgatgtttgtgttgggtgtttcttcctccgccgcagccgctcctgctgctgccacctcctccactcaccaccttctcagtggaacccttcactctccttcttccctctcaacttcccatctatttcccacaacttcggtgcgttcatcttcactgcacttcaggtgcgttccaatcaaagccatggctgaagttgatactatagcagtgtcaaaaactgcttcttcttctgctccgggcagcaagcaagccttgatatcattgtcagacaagaaggatcttgcatttgttgggaatgggctccaggaattaggatatactattgtttcaactggaggaacagcttctgcattggagagtgctggagtagctgttactaaagttgaaaagctcactaagttccctgaaatgcttgatggtcgtgtcaaaactttgcaccctaacatacatgggggtatccttgcccgaagggaccaaaaacatcacattgacgccctcagtgctcatgggattggtacttttgatgttgtggtagtgaacctgtacccattttacgataaagtcacatcagctggaggcgttgaatttgaggatggaattgaaaatattgacatcggtggtcccgccatgattagagctgctgcaaagaaccacaaggatgttttggtagtggttgatacagaagactaccctgcccttctggaatttcttaaaagaaaccaggatgatcaaaagttcaggctaaagctcgcatggaaagcttttcaacatgttgcttcctatgattctgcagtatctgagtggttgtggaagcagagtgtgggagataaattcccacctagcttgacagtgcctctttcactcaaaagttctctccgttatggtgaaaatcctcatcaaaaagctgcattctatattgacaaaagcatttctgaggttaatgctggtggaattgctacagccatccaacaccatggaaaggagatgtcatataataactacttggatgctgatgctgcttggaactgtgtatgcgagtttaggaaccccacgtgtgtagtggtgaagcatactaatccatgtggggtagcatcgcgtgatgatattcttgaagcctacagactagctgttaaagctgatcccgtgagtgcatttggtggaattgtagctttcaatgtggaaattgacgaggcacttgctaaagaaattcgagaatttagaagccccacagatggggagacaaggatgttttatgaaatagtggttgcgcccagctatacagagaagggacttgagattctctgtggaaagtctaagactctaaggattcttgaagcgaaaaagaatgaagctggaaagctttcactcagacaagttggtggaggatggttagctcaggattcagatgacttaaccccacatgacatcaagttcaacgtagtctctgagaaggctccacaggatgatgagcttcgtgatgcagagtttgcatggttgtgtgtgaagcatgtcaaaagcaatgctattgtgatagctaagaacaattgcatgttaggtatgggaagtgggcaaccaaaccgtgtcgagagtttgagaatagcaatgaggaaagctggagatgatgttaaaggagcagccttggtcagtgatgccttcttcccatttgcttggaaagatgctgtggaagaagcatgtgaaagcggaattggtgttattgcagaaccaggtgggagtatcagagaccaggatgccatagactgttgtaacaagtatggtgtttcactgctctttaccaatgtcaggcactttaggcactgacttaatttttgctttggaataacttcctgcctccattatccaagcggtgttgctggaacttgtgcttccaataggtagcactgaaacctgtttttgaagtcaagtgactgtatgagtaaggattgttctatccaatttatatagaaaaataaattgatgttctcctactttctaatgtcttatgtacattagaataatgtgatggaatcatcttttgcaatgaacagaatcaaattagacattcttgctgcaactattcaattatgttcagttgaaaggaaaaaacatgtaggattttgaatgtgagaaagtctacggttgtttatggaagaacttatccaaatagggccttaatggcgaaggt

SEQ ID NO: 355 - DNA, 1353 bp, Glycine max
ccacgcgtcctcacggctgcgggaagacgacagcagcctgagagtcagattcgctcgcattgcttcgcctcacaacagcagctgcagcagcaatggctcccaaacgaggtggaaaggctccggctcttgccgctaagaagaagcctgagaaggtcacgaatccgttgttcgagaagcgtccgaagcagttcggaatcggaggggcgttgcctccgaagagagacttgactaggttcgtgaagtggccaaagaatgttcaaattcagaggaagaagaggattctgaagcagaggttgaaggttcccccagctttgaaccagtttaccaaaactcttgacaaaaacctagcaacaagtctgttcaagttgcttctgaagtacaggcccgaggacaaagctgaaaagaaggagaggctcttgaaaagggctcaggcagaggctgaaggcaaaactgttgaagctaagaagcctattgttgtgaagtatggtctcaaccatgttacctacctcatcgagcagaacaaagcacagctcgttgtgattgctcacgatgtggacccaattgaattggttgtctggcttcctgctttgtgcaggaagatggaaattccgtactgtattgtgaagggaaaggcccgcttgggaacggttgtccacaagaaaactgcatccgttttgtgtttgaccactgttaagaatgaagataaattggagttcagcagagttttggaggctatcaaggctaacttcaacgacaaatatgacgagtacagaaagaagtggggtggtgggatcatgggatccaaatcccaagcgaaaaccagagcaaaggagaagcttcttgccaaggaagctgctcagaggatgacttaggaggagtttcttatattttgttgttttgcgaatgctatttagtctgtgttttttaatgttactctcttttaattattgtctttataaaaacatttgttattcacatgagctagagtatttcgttaaaatctcatgccgtctgtcccaattcctgaaccctaagatttatttctttttggttgcagacttttttcggatactttatgaaggaactgcatgcggatgcagttgcatccaatttttgatatttgatatttttgtatttgattctctatgattatagtataaaatagtttgtgatcctctctaaacaaaataactgcaaaggatcattctgctgcaggtgatcattttagctagtcaaattgaagtgttcaagtgaaccgagaattgtatattttcgtgctaaacttgtcgattatactcacaagtctctgtttgtctgcataatatattgaagcgtaataaattgattaatctt

SEQ ID NO: 356 - DNA, 1833 bp, Glycine max
tacctgcgagaagacgacagaagggggaggtcaaacaacttaatgaattgatgggctcgtgtgggcaaggcttccaagtgtacattattggccatttccaacaattccaattgatctcaattctcgcagtcaccagtgttagaactataagagtacctaatcaaatagtgttttgaccaaagaggtcgatttagtttagtagcagttatgaacacgaacatgaatgttattttgtgtctccagttcctatgtttctttcttttgagtactttgttcattaaagcatctgcaataaatgtggaaacatatgaatctgatagaataattgatcttcctggccaaccttcaagcccctcagtctcacacttttcaggttacatcactgtcaatgaaaaccatgggaggacccttttctactggttctttgaagctcaatctgaaccctccaagaagcctctccttctctggctcaatggaggacctggatgctcctctgttgggtatggcgcagttgttgagattggacctcttatagtcaacaaaaatggggaaggactacatttcaacacatactcctggaatcaagaagcaaatttgttatttgtggagtcccctgttggagttgggttttcttatactaacacatcttctgatctcaccatattagaggataattttgtggctgaggatgcctacattttcttggtgaattggctacaaagattcccacagttcaaatcccgggacttttttatatcaggagaaagctattgggggtcactatatccctcagcttgcagagttaatcctcgagccgattcggctcgagagcaaatacccctttattaatcttaaaggttttattgtagggaacccagaaactgatgattactatgactataaaggccttcttgaatatgcatggagccatgcggttatatcagaccagcaatacgacaaagcaaaacaagtatgtgattttaaacaatttgaatggtctaatgaatgcaacaaggccatgaatgaagtgttccaagattacttagaaattgacatatacaacatttatgccccggcatgtcttctaaacagcacatcctcaatagctgatgatggcgacagtaacggccctgaatcattaactaaggagagaaatgattatagactaaagaggatgagaatttttgggggctatgacccttgttattccaattatgtagaagaatacttcaatagaaaagatgttcagtcatcttttcatgcagatactaaaagagacactaacgtagcatggaaggtgtgcaataattccatattgcggacttacaacttctctgttttctcggtcctacctgtctacactaaactcatcaaaggtggccttaagatttggatttacagtggagacgcagatggaagagtgccggtgataggaacacgatattgcgttgaggctctgggattacctttaaagtctaggtggcgaacttggtaccatgataatcaggttggaggaaggatagttgaatatgaagggttgacatatgtgacagtgagaggagcaggtcacttggtgccactgaacaagcctagtgaagctctctctctaattcattctttcttaactgggcaacatcttcctactactcatggataatcatcgtaatatatgtacaattgtgccagtattttgggttggcaatttttctctcaagaatgaaaacccgtgtatgatcaatataaataaatgaataacaatgacatgtagacatcccttaactacaaacattcatttgactcttctcactaaattatatcatttattatacctgc

SEQ ID NO: 357 - DNA, 1605 bp, Glycine max
gggaagaaccactaccaaacttcaactcactttctctctctcattctccctctctctcaccccctccgatctataaatcattctctctctctctctctctctcttacttacaaagtaaagagtagagtttgttctgtgaagaactgagggaggttcaggtccatgatattttgaaatctctctgtagtaggaagaccatgggacgagcttcatcattacttataatttttttggttcttggttcttcctttgccacctataatgtggtaacgatgataaggcactacggatcttcagaaggtgtggctgttaatgatggtgcattgttttttgaccctattactgagatgcctgatcatgtaaagaatcggaagacatctaaagtgccctttcatgtcgcgttaacggcgacggatgctccatataacaaatggcagtgccgcgtcatgtattactggtataaacaacaaaagaagttacctgggtctgagatgggaggattcacgaggattctacattctggaaatcctgacaacttgatggatgaaattcctactgttgtggttgatccccttccagcaggtttggaccggggatacattgttttgaataggccatgggcctttgttcagtggctggaaaagactaaaatagaggaagaatatgtgttaatggcagagcctgatcacatatttttacgtcctctgcccaatctggcctttggaggacatccggctgcttttccatttttttacattagacctgatcagaacgaaaagaccataaggaagttttatcctgaggagctggggccagttacaaatgttgatccaattggaaattctcctgtaattataagaaaggatttgatcgcaaagattgcccccacatggatgaatatttctttgaagatgaaagaggacccagagactgataaagcttttggatgggtgctagaaatgtatgcttatgctgttgcatctgctgtgcatggtgtgaggcacattctgcggaaagacttcatgttacagcccccatgggatcttgaaactaacaagaagtacattctccattacacttatggatgtgactacaatatgaagggtgaattgacttatggcaaaattggtgagtggagatttgataaaaggtcacatctacgaggacctccaccaaaaaacttgcccttgcccccaccaggggttcctgaaagtgtggtaacccttgtaaagatggtgaacgaggctagtgctaacattccaaattgggactcatcttccacctcatcatgatgatatcccaagtgcacatttcgaaaaggaaaaaaaaatagacatttgagtctttttttttgtcacgagtttagtcttagaatcatagatgaatgtagtaaactataccattttatatggcaatttaaacgcaggataaatattttatatatatttttttcttgttggtgatcttcttgaatggtatttgggctcgtaccacaatgccagatactttattcaataagtattggcttcgatattgcatatgcatatgttgacaattcttgtaaaaaaaaaaaaaaaaaaaaaaaaaaaaaaaaaaaaaaaaaaa

SEQ ID NO: 358 - DNA, 1442 bp, Glycine max
ggcccgcccgggtttcacccttatcttccgggtcgattttgtggggaatttggacggaatccaattcccccaggaaacagttttggccctgggttccccaactcggaattaaccccccctaaagggaacaaagctggaggctccaccccggtgcgggccctctagaactagggatcccccgggttgcagggaatcttttttttttttttttttattttttttttttttttgcctattaacgattttattattggattatgatcggggggagttgtacaagatacaagtgatgcagaatttagacggctaacttctgtcctaacagtaattttctaagattctgtgtaccaataaaaaaaaatctgagaaaagttgttaggcgcctgttagattcagctatgttgccatggaagttcaactctggcagagaaaatactttctcagctatgttgcacattggcccttgtctgtattgcgatcatcgaattcccaagctcctccttgctgtcaacacagtaccagcttcactgtcgcaaccttccctcccactgtgaatttgccttcccccaaatacgaaaggcgtttcctatacacttcacatccagatgaaaagaacttcttatattttcttttgaatcctctctgaacactctggaatgccgaagcagtttcaactgagatccattatttgactggacttcggatgttagggacatcttgctaaagagttcgattggtgggttatgctgaaccctcttttccgtatggaaattaaattccattggcactgtggtttcctgctttctgttccggaaaacaccaatatctcctttacttgaaagaatcttcttattaagaggacgagctttaaaactatgtgcaaaatccaatccatcatgctttggagcacccatggcagatggccttctcaaatccctgattctattttcttgagcagaaacagctctatgtttgtccaaatccttatcagaatcattgcaatgaagtgaagacgtagaagtcgcagatgtatgctgcatggccctctcttgtgtcttgagatgaaattcttgaaattctggcaatcgtggagtgctcctcttgggaagtggcaacgaaggagcatttagaatttttctgtttaacgggcgtgctctgaatatgggggcagccactgtcacaacttctgcctctgcagcaattttaggtctaatcctttgtgctctgtgagccgtttctaggtcaggctctctagggatagtaatcttcagcttggaatgtccagaattttgatcaacagttgcaaccttcttaggtgccttgtggacaaaattaacttgctgcttcacatcaccaaccttgtgcaagctaccgccttctaatttctgccgtttggcagcttgacactctatcccggaagaggtagatgaattcattttttt

SEQ ID NO: 359 - DNA, 1034 bp, Glycine max
  misc_feature (1003)..(1004): n is a, c, g, or t
  misc_feature (1009)..(1009): n is a, c, g, or t
cccacgcgcccgtacgaccaactaggacaaaacactatttgacgacttaaccccaaacgaagaaaaaagactgagagcaattgcatcaacaacaaattgaaaggatgtcgatcttcgagtacaacggaagcgccgtggtggctatggtcggcaagaactgcttcgccattgccagcgaccgaaggctcggcgttcagctccaaaccatagccacggatttccaacgcatttccaagattcacgacaagctcttcatcgctctctctggcctcgccaccgatgctcaaacattgtatcagcgtcttgttttccggcacaaactgtatcagcttcgtgaagagagggatatgaaaccagagacctttgccagcttagtctctgctctgctttatgagaaaaggtttggtccatacttttgtcagcctgtaattgctggattaggggatgaagacaaaccattcatctgcacaatggattgtcttggggcaaaggagcttgcaaaagattttgttgtttctgggactgcatctgagtctctgtatggtgcttgtgaggcgatgtttaagcctgacatggaaccagaggaattgtttgagaccatctcccaagcactgctatcatctgtagatcgtgattgtttgagtggctggggaggacatgtctatgttgtcacgccaaccgaagtgaaggaaaggattttgaagggaaggatggattaacttgtaagccacctgagttttctgtttagtttggagttgaatggcatgacatttacaatcctttgttaaagggtacctttgttattgtggctctttagataaatgtatcctgaaaattatttatagacggttcacttgttctatattttagattatcagtgaaaggaggagattcttgagttgggcatgttgtgagtgatctattggaatgtttttcagtgcagactggcatgcaaagcacgataatgatactagaattgcctcaaaccaaaaaaaaaatatannaaaanaaaaaaaaaaaaaaaaaaaaaaaaa

SEQ ID NO: 360 - DNA, 1020 bp, Glycine max
aaaagaaaactagggtgctcttcttgaaatactaactaagacgacaaggacaacattatttgacgacttaaccccaaacaaaggctctgcaattgcaaattcagaggatgtcgatcttcgagtacaacggaagcgccgtggtggctatggtcggcaagaactgcttcgccattgccagcgaccgaaggctcggcgttcagctccaaactatagccacggattttcaacgcatttccaagattcacgacaagctcttcatcgctctctctggcctcgccaccgatgctcaaacattgtatcagcgtcttgttttccggcacaaactgtaccagctgcgtgaagagagggatatgaaaccagagacctttgccagtttagtctctgctctgctctatgagaaaaggtttggtccatatttttgccagcctgtaattgctggattaggggatgaagacaaaccattcatttgcacaatggattgtattggcgcaaaggagcttgcaaaagattttgttgtttctggcactgcatctgagtctctgtatggtgcttgtgaggcaatgtttaagcctgacatggaaccagaggaattgtttgagaccatctcccaagcactgctatcatctgtagatcgtgattgtttgagtggctggggaggacatgtctatgttgtcacgccaaatgaagtgaaggaaaggattttgaagggaaggatggattgaattataagccacctgggatttctgtttagcttggagctgaatgtcatgacatttaccctcctttgttttaaagggtaccttgttattgtggctctttagataaaatgtaccctgaaatttatatattgacggtttcacttgttctatatttagattatcagtgaaaaggagatacttgagttgggcatgttgtgaatttgagtggcctattggaatgtttttcagtgcagactggcatgcaaagcacgagaatgatacaagaattgcctcaaatctatttctcccgtttttttcttcc

SEQ ID NO: 361 - DNA, 2012 bp, Glycine max
tgactgtgtgctttgcttagaacaacactaccatcccaaaaaaaaatccctcttgtgtcactcaatggccatgccatgacttggcagcaactctcaaaaaatggaaacagatagagagagaccccatcgcagcacaagcgagttgtttgtttgcttcacttcccgtttgtcctcttcatccatgaagctctcatccaagtccattctcagcccaagccgcagcagagaccctcctcagatttccctctcttcctccctcagcaggaggctcaagagcaatggcagcatcaagggtggtggaggtggtcaagcctctccaatgttcccaaccggtggtggtggcaagagaagaggctgtggctttgagaatcctgaaccttcttctcccaaagtcacttgcagtggccccgcgtcggccccgcccccggagcaagggaagaagcatgaggagttggttggagaggaggaagagcaggctagagttagcatatgtattcctcccaagaatgctcttttgttgatgaggtgcagatctgatccggtcaaaatggctgctttggctaaccggttttgggaatctcctgttcacaaagacaaatgtcaagaagaacaacaagatgatgaagaagaaagtggagatgaggaggaagagcaagaggatgacaaagagcaacaccacaaaatgaaagatgaacaacaagaagaagcactagagcaagttgaaagagaagccatagaagatagcatttgtgagagagaaacagaaactgctgttgtagccactgaaaatgatgaagaagaacaagatgggaaagaaagctatgaaattgtaagcagagaaaatctagaaagccaagtatttactgaagtagtaaaagaggaagaaaaggttgatgaagaagaagcagcaaatggaggaaatgccattgaagaaggtgaaactttaactcacccagaagcttattcagatctagagaaccttaaaaccgaagaaaaagaggctaatctcgaagagggtaaagaagagagagaaaacaacgatagctcggaactttcttccaccccagaaaccttcgcagcttcagaaaaagaaaacgacggagcagaggcagaaacagaaccagtaacggtggaaacttcagaagggtcaacggaggaggaagaagagaaagtgatcgaaccgaaggaacaacctcagcaaccaggcccgacccgagaaccaaactcggatccggagtcaatggagcgagaaaacgggtcaaagcgcgaagagagagacagagaagcgttgccggagtgtttgttgctgatgatgtgcgagccgaagctgtcgatggaggtgtctaaggaaacgtgggtgtgcagcaccgacttcatacggtggctgccggagagaaccgccgcaggcggcggcaacagggtcgccgcagaaacgcttgcaaagtccaagccaaaaccgaagccgatgatgcagccaccgcggtcgtcgtgctcgttcccggcggcgagaggcggcgccggggtgtcgatggcggcgatgattgagcagaagctgatggggtccaaatcgggtaacgggtacgagccgtttgtgctcacgcgctgcaagtcggagccgatgcggtcctcggctaagctcgcgccggaggcttgtttctggaacaacaggaagctcgagccgcacccacccgcggcacagcttggagtcggcgcgccggctggtattgggttctgattttgattttttttctttccttttctcgaaatctcaaattttccttattttctttaattaattgacagaataatcaattgttgttatgtattatgtgtagattattatcgctaaactttgggcagctttggtaagttaggattattgagtatactattttgctgtttttagaatgtaatcctttgtataaatagttttagtgatgctatttgttttgggctccattattactcgttagtgaatttataataagagtttaatttctgcattattagct

SEQ ID NO: 362 - DNA, 1614 bp, Glycine max
agatgatcaaaatggtgtcggcgaacatttttcggtgcctcccgccggcgtcgcacgagaacaccggccaggaagccacggatccggaggaggaggagccgtgcctcgaaccggcgtggccgcacttgcaactcgtctacgagcttctcctcagatacgtggtttcctccgacactgacacaaaggttgcaaaacggtatatcgatcattcttttgttctcaaactccttgatttgtttgactctgaggaccctcgtgagcgtgagtatttgaaaaccatattgcatcgtgtgtacgggaaattcatggtgcatcgtcccttcattaggaaggccattaacaacatattttttcggtttatatatgagactgagcggcatagtggtattggggagcttctcgagattctggggagtattattaatgggtttgctttgcccatgaaggaggagcataagttgtttcttgctagggcgcttctgcctctgcataagcccaagccggttggggtgtaccaccagcagttgtcgtattgcattgcgcagtttgtggagaaggattacaaactcgcggacacggttattaggggtttgttgaagtattggccagtcactaattgccagaaggaggtgctcttccttggggaactagaggaggtgctggaggccacgcagaccgcggagttccaacgctgcatggtccctctttttagacaggttgcccgctgcctcaatagttctcactttcaggttgcagaacgagctctctttttgtggaataatgagcatattgtcagcttaattgcccaaaacaggactgtagtattacccataatatttgaagcattggagaaaaatatcaagagtcattggaaccaggctgttcacggcctgactgtgaacgttcggaaaatgttcatagaaatggatgccgaattgtttgaagagtgtcagaggcagtatgaagagagggaggctaaagcaaaagaattagaagagcagcgggaattgaattggaaaagactggcagatgcagctgcacagaatggggtggatatggtcacagcttagtgaaattactttactgccgtaaccggcagtgtgaattggataggtgaaggattacatgtgctcctcgccattttggtgccattatttattggtttctttctttcccacttaatttcttttccccctctattttctcagttggataatcagcaagttgaagaagcagtgattaatgtaacttaaaagtgcagttgggataatcaatcggacgctgttagcaatgtctgcagattaagaatgtttaatgaaatactttcttgtatttttttttcttacagagagaaatacggatcttttttttccttctgaaaacaaattgtagtgccctttgtgtttatggtacaagaagtagggcctgttattttgtgcttgattggcacttgattggctaaaggcaggtttggttttggcactaagtttcgtaaggagctagtgttgtgtcgtctctctgataagaggtgttattgattacacttgttttgcttgttttctagatagttatgtaaagggctggtgatttacttatacaaaaaaaaaaaaaaaa

SEQ ID NO: 363 - DNA, 1315 bp, Glycine max
taaccatacaatattaaaaaaatctcccccaaaacaaattaaaaagataaatataaaggaagtgtggttgcaacccatagtgcatccctctcccatcaactttgtgtttctctcttcaccttcgtctttctttcatttcaattctttgtggttcagaaactctgtacagttaatcaagcccaacctcacctcacctcacctcacaggttttagttgttaattaaatatatagatagaaatccaaggaagaagatgaagcagtttgccgtccaaaacgtcgtcgctccatcccacgatgagattagcgtggtttgccccaagccccgccgcctcggcctcttcaacttccccgtgaacgatccccctgttagacccttctactggcatctcagttgccaggctgagccatgtgattcaaactcgtctggttcaaatcctttggacaacttacttaccaaggatggtgattttgatgtagagcaatcatggccagtggtaacctcgtcgcccccatttttctgcgggtcgccgccgagtagagcagctaaccctttgattcaggatgctcgatttggggatgagaatttttccccgctctccccaccgtcgtgggtggtggttccggctgctgcgtcgggtctgccaccgtctccctcttcctctgcaaggaagggagggtgtgtccgagccaattttggtaacaatcctgctgtgagaattgaggggttcgattgccttgacagggacaggcgaaattgcagcatcccggctctggcttagaacaccctcctcacacgccacacgtctctttgatattaggattcagttcaacatataaacataaccacagaagatgagccttcatacaatataataccctacggagaagagtaattttggatgcttgagagttgaatctagaggaagagataaaattttatcttgtgtctgtttgtaaatatgttcagttaatcggccagtgcatgtaaatgtcaatagtgtgtcttgtgtagagaaatattgtctagcctccaaataatgatagagggttgatttgggtgttaattagatttcgcccgtgccctatgttagtagtgtctaaggaaaaataccattctcttttttgtaagtagaagtcttttgaggatggagaatatttcattttgattttcttttatgatgggtctctctccttgaattgtaattagtagcggcttaagaagcaaaatctgtacaaaggaatggtttgttttgagaaaaaaaaaaaaaaggggccggccgaaatgtgaaaagcatgagcaaagttttactgcgt

SEQ ID NO: 364 - DNA, 1047 bp, Glycine max
  misc_feature (14)..(14): n is a, c, g, or t
cggccgctcgagcncggcgggccggcaatttacccttaaagttgtagcaagaagttaattaataatgagtgcgaatgcagggttggtgttgagcggtgagacgatgggggagaacgagaaaggagagcgatggagcggagcgatgacaaatctgacggagatggcctccaatctcgactctctccagaagcttctcctcaccaaagccgtcttcgtcgacgacgacaccttctccaaagcctccctcgccgccgaccaggcccgcaccatcaagctcctccagcaacgagtccagaccttggagagagaggtcgacgccgccatcaccaccgccgcccgcgctcgctccgagaagcgccaggccgaggctgctcagaaatccgccgaatcgcgcgctcatcagctcaccgccgaactcgaaaacaccacaaaggtgtttgagctgcacatggaagagctgcgagcgaaacaagaagagatcgagaagcgcgacgaggacatcaaacttctggaagctataattcgaacgcttggaggaaaggaatcactctcttcgtctcagtagaagaaatctttgtttaaagtgtggttaatactcaaaaccctaaccattgccctcttttgttactttgtaaattgaattatacactagtgcgtgaaagattcatatcttaagactgtagtaaatgctgttgtttttctatatgaatattaattggagtaattctttttacatgattaatttctctggtggttcactggcgccaaatcaaagatattgtgggaagtgcgaggtagattgcaattttgcgggtgttgaattgtttgttatgacatgaaacgcatttcctttgacgaatacaaccattacgttatgatcgatcataatgcttcaaatttcagaacatcaagatgtatagtttcctcccaattggagtttgtgtttgagtaaataatttaagttcttgtggaattagtgtatcgggaaaagaattatggcatataagttgtttatgtaatcaaagaagaaatctaccgtttagattt

SEQ ID NO: 365 - DNA, 858 bp, Glycine max
agaggcagagacacctttctttgcaacgcaaacgcaactagcaacgctttgatttcagcctcatccacagcgagtaagaaaggaagaaagtaggtagtggatattgagagaaacaaatgagatctgaagccttccaaacagctaacatttatcgccttcttctcaaggcggtcaagaaacatattgggaaggaagagaacaagaaacattttatagaatttgtaacctcagagttccgtaacaaccgaaatttgtctgacaatgtggctatccaacagaaaataaagcttgctcgtgattatacttttcttcttaacagtgtacaccatcacaaggatttacttttttcgtacaatattgctgtggataggtcagatgaagtaaaaaggactcttggaaaatctgcttctagtgttggtcttcagcttcctgaggtttatcagccataatgattgttagtgttaatttttgcatgcacggaacatgcctttgtactacactgtagattttggtggggtgactgtttcttctgaatgaaaaaaaaaatggtttcatagctttttatccagaacaaaaaatcttaacgaagaaaaagaggaatgggattcagtgctgatgaataaattatatcaaattatatcattcactcattagttcttttctttctaataacaaaatctattatacgagtgtaatagatatatttccttcaaattaagtgcatgtctttcaaggtttcaaattttgagttgcttctacggatgtttgcaattcaagttcaggtgttggcttagcttgttgccttttggaattttatggaaagcttggcgaactccatctaataaatgtctattgata

SEQ ID NO: 366 - DNA, 1519 bp, Glycine max
ctctacggtcagctacgtaggcccccccccggcgtgaggagtgaggtgctccgggtgagtttatcatatgccgttgataagaggagagagagagattgaccgtttgttaatcttatcttttcttatcccaaacaaactgaaactcaactcctgaaaggcaagagtgagagagaaatggagaatgcggaggagatgatgcagcaaaacgacgaggttttgtcggttgaacttccagctccttccggttggaataaactgtttttccctaagaaactgggaacaccaagaaaaagtgagattgtattcattgctccaactggagaggagatcagtaccaaaaaacaattggagcagtacctaaaggcacatcctggcaatcctgtcatttcagagtttgactggggaactggtgagacccctaggcgatcagcaaggatcagtgagaaggtcaagtcaactccaccagcagatagtgatactccaaagaaacgagctcggaaatcatcaggatcaaagaaggataacaaagaaactgaatctgcatcagaggaaggcaaggcaaagtctgatactgaagatcccaaggctgcagaggaggagaaaaatgaaggaaatgataactctaattctggaggaaagcaacttgagaatggagataaaactgaacaaattgatgaacaggccaagaagccagatgtagatatggaagaaaatgatctgaatgatacaaacaataaattagaaaatgattcagatgaaattaagaacagtcatgtgaacggcgaaaatgtgattgctgaaaggcctgaaggtgaagaagctcaaaagcaagaagttgaaccagcagagaaagttgccgaagaagctgctaatactgcggagactgaaaaatccctactgactgaattagaaaaagaaaagaatgaggagaaaacagatactgcgactctagaggctaatgggggaggcgagaaagagaatcctaatgctgcacaaatgtaatatggttatttggagctgtgcacagtgaaacacttcaacatttgtcataccgttgtgtaagctgcataaatgtaacaccattgccctagtgccccatgacttttgcgatgctattttagttattttgtggccttatggatgactgtagtctcgtatttcatctaaagatttggttgtactttctacctaggattaggaaattaaatgagtcttccttttagtttagattaggacatctgattttacttagtgcagctacgtagattgtagactttctgtgacacatttgtgtttctagtcatttaaatttcacattccccatctaagaatgctctttttatgttaccgaaagtgagtggtaaatgcaggattgaagcagcaatttatcacttcctttcctagttatggcataagcttcatatctaaaggttgtgtttcattagatttcatgtaattcatcagtattcagtcaaaaaaaaaaaaaaaaaaaaaaaaaaaaaaaaaaaaaaaaaaaaaa

SEQ ID NO: 367 - DNA, 1509 bp, Glycine max
ctgcgagaagacgacagaaggccgggagagggaaaagagttgaagacttgaagtgaagaaagaaagaattgagaaaggatagggtttagggttggcaaaggaaggaagggatggaagcagctgtggtggacgtcggctctaagcttctcaaagcggactttgcaattcctgaccagactcccgccatgataattcccactcagatgaagcaattgctcgatgatggatcagtcactgatagttcactggctgacaatgtcaccgttgatcccgtcgtgcgaggatttattagagattgggatgccattgaagatttgttgcaccatgttttgtatactggcctcggatgggaaattggcaatgaaggacaaatactatttactgatccactttgtacccctaaggcgaacaaagaacagttggtgcaactaatgtttgaaacattcaacatctcagggttttatgcctcagaacaagcagtgttatcactctatgctgtgggacgtatctcaggctgcactgttgatattggacatggaaaaatagatattgcaccggtaattgagggtgctgttcaccacattgcctcaagaagatttgagtttggaggtactgacctaactaatttcctggctctagaacttggcaagtccaatccacaagtaaatatcagcatgtctgatgtggagaaaataaaagagctgtactcatgctgtgctgaagatgaattagcttatcagaagaccggatattcttgtcctgtggagaagcacacccttcctgatggacaggtaataacaattgggagagaaagatatactgttggggaagctttattccagccatgtctactgggtttagaggctcatggcattgttgatcagcttgtccgtgctatttcaactgtgtcatctgataatcaacggcagctgctggaaaatactgtggtttgtggtggcacttcttctatggcaggttttgaagagagatttcagaaggaatctagcttaagttcatctgctgttcaacctacactcgttaagcctccagaatatatgccagaaaatttaaccatgtattctgcatgggtgggaggtgccatacttgccaaagtggttttccctcaaaatcagcatataactaaggcagactatgatgaaactggaccttccattgttcaccggaaatgcttctaacagtatctatccacatggtttcaacaactatttattcctctgcatctactggtagcagtggaagatttccgtaaatacctgttccttaaacatgcatatgttggagctctaggagcttgcatatctttgtaatgtggatatctcctgtaaaatattcattttggccatttgtaaccttgtagcctgtagctactagctacacctcttctagcacacccctttgttccttttatatgatagtttggaatttatgttttaatttatgaattaataatatatcttgtattaatgttttaaaaaaaaaaaaaaaaaa

SEQ ID NO: 368 - DNA, 1890 bp, Glycine max
  misc_feature (19)..(19): n is a, c, g, or t
tcgagtcagctacgtaagngcccccccccccactaggtcacctttagttctcttctctcgcgcaatttccatctggttcacgacacctaaacatgcatcagccttcaatctttctcgtgattccatctccattcctttgatttgaccatcttctcttcggatcatcatccattgaagatacaaactgattttcgtccctctctaccgtataaggtgttatttgtcttgacttgaagtatattttcatgtctgagaaatgctgaaatactgggagttttaatttcagcatttaaaattttgggaattggcagttactagtcgactttcagctacgtaggcccccccccccccccacttgagtttagtttgacaaccttttctgtatggtctattgatttgttgatctaagccgataaataaaaatgtaatggaaattgatttctatgctctttttatgttgccaatattagaagtcttgtttatttgcttaaatgtgtctttttgaatggattcaataaaaaaaaaaaagttgttccaaacaggctgtctcaggtttgttaacttttcttccaccatggctaacaaatctcaagaagagcccaagactgctcctgagcctgatcggtggtacaatctcacccttggaccttccttcaaagatgaatcctctaacaaatactgcactctacgatatgaatttaagccagcttcagttgataagactaagccagggttgctacgcaagaccaaagagaacagggtttctgtggaatttcagaacaaccaaataggaaagcccaaggtgacatttgaggggaatagtgaggaatataaggaaaatgatgctgtattgttctttgatggtgagacacttcgattggagcggcttcatagggcagtaaagcaactgcggcatctacgaatgccaggtgaatctgcaggtgctgcatctacagttgtggctgctccatctggacctgctttagatcctcgatcatcccctgttgggaagtctgtaaaacctgcacctcttggcaggagctcatttctggctgtgccagttgaagtggaacgcattgatattggtgaacccgagaatactggaatcaaatctggttctaagatgtcatttgatcatctaaatgaactgcccattaatacctcaccagatgctaaaaatgaagtcgaggaacatcaagatatagatattcatgacctttttggcagcgaaacacctgaggatgaccataatgttgaagaaaaagataatgttggatttgacatgaatgttccacacactgatgatgagattgctgatgtggatgatagtggtgatgaggtggacaaaggacccaatgctgcagaagctctcggagaccaggtgaatgcagaggggagggatgagcagacatctacatctagcagtagtagtggtagtagcagtagtgaaagtggaagtggaagtggtagtgggagtagcagcaacagtgatagtgaaggcagtgatgaagactcggttcactcaatctgaagttatacaactgtggtttctttcttttccttttctcattggtcaagcctggcttagaagaaatttataagccatcctcagtgtgctgagggttataaataatgtgctatattttatgtgtatattaatcggctttaaatagttttgcgttttcattaaagcatgtgaagcaatttttaactagcctaacttggcaactttccatgggtgaaaaacttgctagctggaggttcatctttaggagacgaaatggatttgaattctttaatattgttattgttaagtggacaaaatttagatgtcctacaaaattaaaattgtcttaataatttatccaataaagtgtcgcattagaggtt

SEQ ID NO: 369 - DNA, 1711 bp, Glycine max
cgtaaaacagaagtttgtgaacatcccattgggcttaacatttatcagtggcaggttccgcatcatcatgcattggatgagaatccttctatccttgtagttggaagatgtggaccaagtttggctgcaccatctgttctttcttttattgatgcatacacagggaaggaactcaattctttgagtcttgctcatactgttgctcaagttattccactgccttatactgattcaactgaacagcgtctgcatctaattatagacacaaaccaacacgcatacctatacccaagaactcctgaagctattggcattctgcaacgtgaattttcaaatgtgtactggtactcagttgatgctgataatggtgttatcagaggtcatgccttgaagagcaattgcattcacaaagtagtggatgaatactgctttgacttcagggatttatggtctattgtattcccatctgaatcagaaaagattattgcaacagtaacaagaaaatcaaatgaggtagttcatactcaagcaaaagttatgactgatcacgatgtcatgtataagtatgtatcgaagaatgtactttttgtcgcaaatgcagcaccaaaagccagaggggaaattggaacagccaccccagaggaggcattgttggtcatctatatcattgatactgtgactggtcgcgtattgcatcgcatggcacatcatggttgccagggtcctgttcatgctgtatttagtgaaaactgggttgtctaccactattttaatctcagagcacacagatatgagatgtcagttgttgaggtctatgatcagtctcgagcggataacaaagatgtctggaagtttgttcttgggaagcataatcttacatcacccatctcttcttattatcgagcagaagttgttacaaaatcacagtcatacttttttacccattctgtgaaagcaatagaggtgacttcgacggccaagggtataacctctaagcagcttcttattggaacaattggtgatcaggttttggcacttgataagcgctttttggatccccggcgcacacttaatccctcacaagctgagaaagaagaaggaattattcctcttacggattcattgcccattatttctcagtcctacattacgcattcccttaaagtggaaggtcttcgaggcattgtaactgtgcctgccaagctggagtctacatctctcgtctttgcctatggagttgatctattttttactcagattgctccttctaggacttacgattcactaactgaagatttcagctatgctttgcttcttctaacaattgttgcacttgtagctgcaatatttgtcacttgggtattatcccagaggaaagatctacaagagaaatggagatgatctgtcctccatttttgccttataatttctaattttgaagttttaagtagttttatctctgttttctttgttagttattagttcggattttgaaatcttttgtagcttgaattgcaaaagtaatgcagaattccattaggttgaatggaggatgttttcattttaatgatgtaaattgaggagtacgaaagataatcatgaaattccgatgtttgacatgaatgttttatcattgttgtcaaggttaaatattcagatgtttcttttcatgccggagccagtaactttgatacattgaaactgcaggtcg

SEQ ID NO: 370 - DNA, 950 bp, Glycine max
actcacgccgcacccctcgccggcgggaagacgacagaaggggcccagtttcccgcacacacttcttgtctcttctctctctctctatattttgggtttcattgttgggtgctgaagcaaatttgcggtgtagcagaggcaatggaggttcaaagtctcagctttgagaataacattttgtgggttggctcttttgtggaggctttggtgcttgacactttccttgccactgccaaatctcttgcttgctttgtcatcttgactggatctctccttacggatgtcaataatttagtgtcaccgatggtggatggaaggtttcctttagaccaactgtgcaagggaaaacatacttttgaagaaaacaaggatgctagtgatacagaggatgatgatgatgacgacaatgtgaatgatggagaggacgacaatgatgacgaagaagacgaggatttctctggtgatgatggcggggaagaagctgattctgatgatgatcctgaggccaacggtggaggtgggagtgatgatgacgatggggatgatgacgaggacgatgataatgatgaagatgatggagatgaagatgatgaagatgaaggggatgatgatgaagatgaggagtctccacaaccaccttctaagaagaggaaatgagaattatactagtatgaaaaaattgtcatcttcctgccttttgtaatgctttctagtttttagtcaaatttagttcttaggacaaggatttaccagcttggacctgtcaccccatgcttttattgtctaatatcataacttataaacattagtatattctcaggttgcgatgttgtttgctttggagggcattgtagtctgtggcaaaaatggttcaggtcatggtactcatttcctttttcgttgggcttgtaagtctgccatttctagaattacaccgacctccctcagtt

SEQ ID NO: 371 - DNA, 2100 bp, Glycine max
  misc_feature (21)..(21): n is a, c, g, or t
ccctatagggggaattgggtnccgggccccccctcgagtcagccgcgggccccccccccccccattcagcttgacaagctcaaaatctttgctggtggatctgatcttgtcgacatattattacaatcaaattttactggtgtgagtggccaacttcattttaattctgacagaagtattgtaagtggtggttatgatattataaatgtcaatcagatgggaattaaaggtgttggtttttggtctaataattcaggattttcagttgtaccccatacagctcttaaaaaacggaaatataacaggttttcccaagatcagaagcttggaaatattacttggcccggtggaattaccgatcgacctcgtggctgggtgattgctgataataccaagccactgagaattggagtgccaaaaagagcaagttttgttgaattcgtaactgaactgccagatagtcatcaaattcaggggtactgcatcgatgtcttcaagaaagccctagaatttatcccatatgaagttccttttgtattcaagccttttgggaacggtaaagcaaatcccaattatgatgcacttgtgaaaatggttgatgaaaatgtatatgatgcagttgttggagacattgcaattgtgacaaatcgtacaatgattgtggatttttctcagccttttgcatcctctagccttgtcatagtggctcctatcaacaaagcaagatcaaatgcttgggtgttcctccaaccatttacggcagatatgtggtgtgccactgctgcatcatttttggtggttggagttgttatatggattcttgagcaccgagtcaataatgacttccgtggtcctcctaagaagcaaattgtgacaatgttaatgttcagcctctcaacattgtttaagaaaaatcaggaagacaccgtaagctcactttctaaaatggtgatgatagtctggctttttctattgatggtgatcacggctagctatacagcgagcttgacttcaattcttacagtggagcagctttcatcgcccatcactggaattgatagcttgattgcaagtaactggcctatcggataccaagtaggatcatttgcttacaactatctgacagataatctttatgtatcaaaatcaagacttattcccctaggctcccccgaggaatatgctacagcacttcagaaggggccatctggtggaggggtggcagctatcattgatgagcttccatatgttgagttatttctgtcaaatgaaactgattttggtattattggacagccattcgccagaagcagttggggatttgcttttcagagagagtctcctcttgcctatgacatgtctacagcaattttgaaactctctgagaatggagatctccgtaagatacatgagaagtggttctgtaaaatgggttgtgctgaagataggacaagcaactccaagcctgaccagcttcacttgattagcttttggggtctgtatctctcatgcggtattgtcttgcttgttgcacttgcactgtttctgctgcgaatgattcaccaatacgcccgcttcaaacaaagacaaaaagatgttgcttcttcatccacagaaccatcgggcattcattgttcccaggttgttgttaacttctttaacttcattgatgagaaggaagaggccatcaagaaaatgttcactcaatgtgacaatcatcacaaccccaactgagataattattatggttgtgttgcaagagggctcaaagtggtagatttcagtaaactgctgtcatttgggcagtttgcttaagatgtttatatgatacctgatagcaatatatctttgtagagtgacaataatgatagtcttgtacattatttgtagtactagtttttttcttctatcataagtctttattttatagtcaaatggacatcatgatgcttaagatggtttactcatatcaattgtaatgtgttgtgaaatttgagtgctaatgatctgtacacctgacatgactaaaagttttggcagctgttatcccatttctggttattaattcgattaatcaaatattaatgatttgatccttct

SEQ ID NO: 372 - DNA, 3125 bp, Glycine max
ccacgcgtccgaagctctgcacccaaccttcttaacttgaactcgaagtatgcggtttgtgtgggatccaaaagtttatgttcctttattcactctcaattttccatcataatctgcttcttcaattccccaatttcaagattcttattctgctttgaaatcctaagctccaccctttgttcggtgtctctatttattcgtcttctttggcagagttagtgattatcgccgcagcaaattctccaaggttatttttttccgctgattctaagctcaacgccttgtaccaattcacaccccaacttgatctgtgactttggccttttcagctacatttcaagagcttcttcatttcctttttgttttttgggggttttttgttccctatttttttattctaatacagtgatatcctagtacgtgtttttgtttttgttttaattgcagttgttgtattcgctgctaaactattctgggtctgtttttttttttttttttttgttgagcttcgttcaagtttgaattgaaagttttctcctttacttgttcattttgatttggtttttcttgctttgcattttgagcaccccttttgatctggggcgttctggtgtttgtgtggttctctgttttagtgttttctttttggggatttcggagtggaagtgggagtttgggtgatctgggttttgagttgaggtaaggggtttgttggatgcacctcttggctttaaatcactttgaagggtttttacgcttagttgcaaagatgcttcctgatcagagaaaaaagtcatctgtagaggtggacttctttactgaatacggggaagggagcagataccgaatagaggaagtaattggttaaggaaagctatggtgttgtctgctctgcatatgatacacacactggagaaaaggttgcaataaagaaaattaatgacatatttgaacatgtttctgatgccactcgcattcttcgcgagattaagcttcttagacttttacgccatccagatattgtggagatcaaacatattctgttgcctccttctagaagggaattcaaagatatatatgttgtcttcgaactcatggaatctgatttacatcaggtcatcaaagctaatgatgatctgacaccagaacattaccagtttttcttgtatcagcttctacgaggcttgaagtatatacacacagcaaatgtttttcaccgtgatctaaagccaaaaaacattttagcaaatgctgactgcaaactgaagatttgtgactttggtcttgccagagtggctttcaatgatactcccactgctattttctggacagattatgttgcaaccaggtggtatagggctcctgagttgtgtggatcctttttttccaagtatacaccagctatagacatatggagcattggctgcatttttgcagaacttttgacgggaaaacctcttttccctgggaagaatgttgtccatcaactagaccttatgactgatcttcttggaactccatctcttgaagccattgctagggtacgaaatgagaaagctcggagatatttgagcagcatgcgaaagaagaagcctgttcctctctcgcagaagtttcctaatgcagacccccttgctcttcgtttgttagaaaaaatgttggcatttgagcctaaggatcggcctactgctgaagaggctctagcggatccatattttaaaggcctggccaaggttgagagagaaccatctccgctgcctggtgccccccccccgtttgaatttgagagacgccggataacaaaggaagatgtacgagagcttatataccgagagactttggagtaccatccgaagatgttgaaggaatttctagaaggagcagagccaacaggtttcatgtatccaagtgctgtggatcacttcaagaaacaatttgcatatcttgaggagcattacggcaaagggggaactgttgctccgcctgagaggcaacatgcatcattaccgagaccttgtgtgttgtattcagaccactcaatgcagaacacatctgaggttgcagatgatctatccaaatgttgcatcaaagaagttgagaaacaacccatagaaaggagtagtgctatccctatgtctaggcttcctttacaagcaccgcaaaatattcaaggtgttgctgcaaggccccgaaaggttgttggttcagtaatgcgttacaacaactgtggggtagcagtgacggccgaggctgaacagcggagggtggtcaggaatccatctgtttcagctcagtatgcagcatcgagctgttcatatcctaggagaaacccaggctataaaaatgagaggggggcagaggatgatgggattgaaggttcaaatggactgcagccaaagtacatggcaagaaaagtggctgctgctcaagctggacctggtggtcagtggtattgataatgaattacattgaatctatgtggccaacaagagccttgtgttgtgccatgaaactctgataatacccgagtttcatgtgctacacctaatcttgatcatctgaactgaaatttcacattcgaagtaacaaagggaagagctcaagggactcaagtcctaatgttgaagtatctagaggatgatttctaattcacgctatttgcatggtcaaatttaaagggttctcgtggtctaattgatgattttcttgcactctaatttattaataacagagtacatgaaagatctgaaaagccatgaacttgaaggcagaccaccagttgcttcattgcagaatgggaagttgttacttttaccctatagtattacttgagtaccaataccaagataatgtattttttttttaaaagaacttatagccaaactgccaaagtcatattctcttgtccctttctccatggggtatctttggggttagtaacttaatttggtgtaacaaaagaaatgaagtgttggttcccaatgaatggtaactccttgtttccacatgtttgcttactgaattccccgcgcgcccgctgatattttcctccaagtattttcctcagcctatgaatcataagtgcttggtcgtatcttattatgggggaacgtgggtgcacactt

SEQ ID NO: 373 - DNA, 1494 bp, Glycine max
ccacgcgtccgaaaaagctctttcccatgattggttatcctttgaagagacactcttagaacatcttacaccaccatgaagtcttgctagacataatcccaagtcctttgaaatgattcgtaaagagaaagagatgaaaacttgcatcttttgtgctaccaatcaatccattcctgaccaaaaaattgagtttcaagtgtcactattaaacccattgatcactaaaatatccagttgtgtgcaagattttttttcttcttattttacatcaatgctgcattcggtattgggtctcaaaccctattatcaggaaaatttgagctgcagatttacatttatctttacattatctattgggagcttgacaatatattcctatgcacatatcttaatgtattatctatccgtttactccatctggctagttttttttactttcctggtttttattatcatgtatgtaacagtatagtagatcattctagaatgatacactactaacaagtcactgcccgtttatccccttgtttgttttacctcgttttttgtattcgtttttctcgtttgtagttcagtgttaatttgactttgtagtttggcatgttgaaacaattaatgaagtatctgattcaaaagttgtgtttgggtttttgttttctcccactctaactcaattgcagggattgcaacctctaaaaccttatgaacaatctgacggtctggttgtgaggaatatattaacaatgcctgcccctaagaagttggtcccgccatcatccaatggaatgccacctcctctactgagaaccatgcccccaccacctccgcctaaattttctgatccatttgaagttaaagtacacaacaagaacaagactttgcttaagacaaaatctgatgcagttcctgatacattggtcaacctaatggaatatggagaggaggatgatgatgatatagacgattctagtgaggaatcacttcctcatgacacccgagcaactggggttcaaaagcctttctgggctttatgagctacaaagtgcatattggacgtagatatgtaaatatttattttttgggttggaactagttcttgctggttacatactcttcttccccggggtggaatgggaagcccttagcatgatttttggagtgaaatagttggtttagtagcattttaaaggttgtaattgctcattctcatatgcttcgcgagagtagatttgtatgttgtaattttttgtccctatttgagtatgcatgtacactggtagtctcttttcagtggtttagtaggccgctaaagtaacgatgctgtgataaggaactgttttttccttcttccccccatttttatagtcagaaccctgttaattgttcatcctgggcccctggctgagtgaaactaagcttccatgttagattgaacaagcaattgcaaagcttgtattattattattattattattattttttttttcgtgggtt

SEQ ID NO: 374 - DNA, 853 bp, Glycine max
agaactgaaggcgcacgtccctcgagtaccaatccaacaccgagtgcgaactcgaacgatgatgccaagtgtagaaggctcggcctgcaagtcgtgtctagtctgagttccgacctagcaaatgtgaagaaggctgccgcgatggactctgaagtcctcagcagtgaggtctccaagctctcgaaagggattgcacacattgcagaggttgtgcagctggatgaagcaggagggtccgatgaaagcagccagaagttcagagagtcaatgaacaagttcatgagaatggccgaggaggagattctaaaagtccaagcacaagaaagtgttgcactatcccttgtgaaggagatcacagagtatttccatggaaacttgtcaaaggaagaagctcatccatttagaatcttcatggtagtaagagacttcttaacagttcttgatagggtgtgcaaagaagttggaatgataaatgagagaaccatggttagttcagcacatagattccctgtcccagtgaaccctatgcttccacaaccccttccaggacttgttggaaagagacaatacaattcctcagatgatgatgatcatagtccatctccttagctgtgtatcactcatgtcagtgtgacatcttttggctgcatcttctgttaggaaaaacctggaaccaggcgattctgacgggtctgggggtgcatgtatggtctggcccattttttttttctcttgtcaaattgtaaaaatccttgtaaaagatttgagttataaatatattatagattatatatagagtagaagattttctttgggggaataagcttcgccttatatgaattggagatgatgt

SEQ ID NO: 375 - DNA, 1314 bp, Glycine max
attcggcccgagctggaggctgctgtcccttttcctttatccacttttttttttccattgcgttatttatttgcccgtgtctctcactcagtcactcactcattctctctgcaaattctaatcttcgcaaatcaacaacgtctctctctgttactctgaaaactgacttcaagttagtgtaactagctgccaagttgtgatggcattggtctctggaagaagttctgctctgaacccaaatgcacctatgttcatacctgctgcacttcgtcaggtggaggatttttcacctcaatggtgggatcttgtgaaatcttcaacatggtttcgtgattattggttgagccaacataaggaggaagaatttgaagaagttgccaatgactctactaatgatgatatggagaatatgctctcggaaacttttgatctaggcatggaagaagacttcaatgttctagaaaacgagtttgagcagttggtgatgttctctgaagctctagatcattctgttcaggatgatcctaatactggaaaagggtctcctcagagtcttaacaaggatgttaaagcttttcttattaacttgacaccaaaatcaccgagggaaaggggtcccaagtctccttcagggcttgcaaagcaccttgagaagccagcacagcacgtgaatgtgaagtgtgcctctctccgaattcaccaacctcgttgaggaaaacgtttgaaagctcatagtgatatcttgctagagctgcaagttgctgactagagcttgagatctctgttgtaataatttttgtatatagagggtgcagtagtgtgtttgtatttttcttgtttctggtcttgtatatttgatggagccctcggaactgtaggtaggtgagactttaattctgaccagccaaatccgggaatgtctatggttgatgaacttaaatctcaatttcaaataaattgttacatggcttggaagtgtgtagatgtaagttttaggtgtctttagttcaatgtggcaatgggagtgtacttttcaagccttatgatttgcgtttagagtgataatgatatactagctgctttctgcttgtacaaacacctatccattgtgtggccaagccaaattcagtaacaatttccctacttttaaaaatggaacaatgatattgtaacacatttgtgcgcctcatgccatgccatgccaatttgtgttagatatgtggtttggatgtgcttcatgtaatgaaaagagtatgctgcaacttgttatgtgaaaatgtgatataataaaaagtaagtggatagttgagaacc

SEQ ID NO: 376 - DNA, 2386 bp, Glycine max
cggaattcccgggtcgacccgcttttcagaatttttaattttctcgggaaaaatgtggttccacctaagaaaacgacactagcattgcatagcaatagttgatttttctccagaaaattaagaagctcaacttagtagtggtaagaagtaataacgcgcgcacacacacatacacaaagacagtgacagtggtgttgaattttcctcaaagaggatgtggaaactcgtgcgatatgccgccgcctccaacctcgcccgatcgcggcggttctccgccgcgattcctggtccgtgcattgttcacaagcgcggtgccgacatactccatgacccctggttcaacaaggatacagggtttcctttgactgaaagggataggttggggcttcggggcctcttacctcctcgtgttatatcctttgagcagcaatatgatcgctttatgaattcattccgatctttggagaataatactcaggggcaaccagataaagttgtttccttggcaaaatggaggatcttaaatagactgcatgataggaatgagactttgtactacagagttcttattgataatattaaagagtttgctccaataatatatactcctacagttggattagtgtgtcaaaattattcagggttatttaggcgtccacgtggaatgtattttagtgccaaagataaaggagagatgatgtcaatgatctataactggccagctcacgaggtagacatgattgtcttaacagatggaagtcgaattcttggcttaggtgaccttggagttcagggaattggaatccccataggaaaacttgatgtgtatgttgctgccgctggtatcaacccacaaagaatacttccagttatgctggatgttggcaccaacaatcaaaagttacttgaagatcgtctttatttaggacttcgacaaccaaggctggaaggtgaagagtatctatcaattgtagatgaatttatggaagctgttcatgctcgatggcccaaggctattgtgcagtttgaggattttcaaatgaagtgggcttttgaaaccctgaaaagatatcagaaaaggttttgcatgtttaatgatgatatacagggcactgctggtgttgcacttgctggaatattgggaactgtaagagcccaaggccgaccattgactgattttgtgaaccaaaagatagttgtggttggagctgggagtgcaggacttggggttctaaaaatggccatccaaacagttgcaaagatatctgggtgcagtgaattagctgccaaaagccaattctatttgattgataaagatggtctagtcacaactgagaggaacagtctagacccagctgcagctccgtttgctaaaaatccaagagacatagaagggcttactgagggtgctagtataattgaagtggttaagaagattaggccacatgtgctccttggtttgtctggcgttggtggtattttcaatgaggaggtgcttaaggcaatgagagaatctgtttcaacaaaacctgctatctttgccatgtctaaccccaccatgaatgctgagtgcacttctattgatgcatttaagcatgctggggaaaatatagtgtttgcaagcggaagccctttcgaaaacgtagatcttggtaatggaattgtgggtcatgtaaatcaagcaaacaacatgtacctcttcccaggaattggtttgggaacccttctgtcaggtgctcaccttataacagatggaatgttgcaggcagctgctgaatgccttgcttcatacatggccgaggaagatatcttaaaaggaattttatatccatccgttgatagcatacgagatgttacggcagaggttggggctgctgtgcttcgagcagcagttgaagaagaactggcagaaggaaatggtgatgtggggcccaaagaactttcccatatgtcgaaagatgagactgtggagtatgtgcgaagcaatatgtggtatcctgtgtattctcctctcgttcatgaaaaatgatattctgactatatgttcaattttttgggggacctgtgaaattcacatctcaaattgctgcagccaagccttttatttttatttttatctatggtgtctaatccaatgttcttaattcatgcttattactagcaacgctgagtatcggatggcaaacaaaaaaaagggaaatatatgtctcctttcattttggccgggaattattgtattagttttgaatctattaaggtcagtctagtgttgacgagtttaagtaatttatatgggatcttaagtttgttgttgtacactaaaaaatagtattgaaatttgactttttaaagttcggcatatattatactggagacatttgataat

SEQ ID NO: 377 - DNA, 2286 bp, Glycine max
  misc_feature (2276)..(2276): n is a, c, g, or t
gcgcttcgcgcagctgcagagcgcacaagacaaaaccgcatttgtttgcatttgttttaattttcttcgcttaagcgctgtagtaggtggtgttggttgtttggtgcatttgattttgatttggaattggaagaatgtggaaggttgtgcgattcgcggcggccagatcgcggcggttctcgacggcgattcccggtccatgcaaggttcacaagcgtggcactgatatcctccacgacccttggttcaacaaggatactgggtttcctttaactgaaagggatcgattggggcttcggggcctgcttcctcctcgtgtcatttcgtttgagcatcaatatgatcggtttatgaattcatatagatctttggagaagaatacacagggccaatcagatagatttgtttctttatccaaatggaggatcttaaatagattgcatgacaggaatgagactctatattacagagttcttattgataacatcaaagagtttgctccaataatctatactcctacagttgggttagtgtgtgaaaattattccgggttatttagacgcccgcgtggaatgtattttagtgcgaaagataaaggagagatgatgtcaatgatctataactggccatctgatcaggtagacatgattgtcttgacagatggtagtcgtattcttggcttgggtgaccttggagttcagggcattggaatacctataggaaaacttgacatgtatgttgctgctgctggtatcaaccctcaaaaaatacttccagttatgttagatgttggcacaaacaatcaaaagctacttgaggatcccctttatttaggagttcggcaacctaggttggaaggtgaagagtatctattgattgtggatgaattcatggaagctgtacacgctcgatggccaaaggctattgtgcagtttgaggatttccaaatgaagtgggcttttgaaaccctgaaacgatatcgagaaaggttttgcatgtttaatgatgatatacagggcacggctggtgttgcacttgctggactattgggaactgttagatctcaaggtcaaccattgtctgattttttgaaacaaaagatagtcgtggttggagctgggagtgcagggcttggtgttctcagcatggctgtccaggctgtttcaaggatgtcagggggcagtggaacagatgccaacagtcaattttttttaattgataaagatggacttgtcacgacagaaaggagcaatctagatccagctgcagttccatttgccaaaaatccaagagatcttgaagggctttcagagggtgctagtataattgaagtggttaagaaggttaagccacatgtgctccttggattgtctggagttggtggtgttttcaatgcactgaggtgcttaaggcaatgagagaatctgtttcaacaaaacctgctatctttgcaatgtctaatcccaccatgaatgctgagtgcactgctattgaagctttcagtcatgcaggagaaaatatagtgtttgcaagtggaagcccttttgaaaatgtagatcttggaaatggagaagttggccatgtaaatcaagccaacaacatgtacctgtttccagggattggtttggggacacttttatcaggtgctcgtcatataacagatggaatgttgcgagcagcagccgaatgccttgcttcatacatgacagaagatgatgtccggaaaggaatcttgtatccatccattgactgtatacgagatgttacagcagaggttggggctgctgttgtatgtgcagcagttgcagaaaagcaggctgaaggacatggtgatgtagggttcaaagagctagagaacatgtcaaaagaagaaactgtggagtatgtcagaggcaatatgtggtaccctgagtattgccctcttgttcatgaaaaatgaacttttatgaaggctttttgctattgatatctcagttccgcgcaaccaagccctttaatattttgatttctaatcttagcaatttatgactagcaaggttttgatagttgaaggtcaattggtgagaaggggagagagagatatcctcatttgttgcagccgtgaattgtatgtgtaatgccgccctccctttcttttagtgtgtgtttggattagcgtttgtagaattaattcgagatcaacatggttttaagtaaatgtgattttagaataacgtgattcgagaagcttcataagcattatagacagttgttaagttctgtttctctcctttagntaaaaataaa

SEQ ID NO: 378 - DNA, 1557 bp, Glycine max
tcgagtcagctacgtaggccccccccccaaggtgtatttcattctctcttttacaccacttcaacttctagtgaaatatctgatcaattaatggctcagtatttctttttgtttgttttggtgtttgccagccaactgatggctggattcaatgcaccgctaccgctaccatctccgtcatatggaaatcatacaaccattctcagcatagacggtggtggtatcaggggcattattcctgcgactgttcttgaatacttagacaaggctcttaaggctaaggatccaacaacatctttagcccattattttgatgtgatatcaggaactagtactggtggcctcatgactgctatgttagcagccccaaactcatctaatgccaatagtcctctctttactccctcggaagtcgtgcaattctacaagaactatggccctaaaatatttgaacctagagcttggtatgatcttgacaaatgtcccaaattcaatggagagttcttacatgatataactcgtaagatattgaaagaaacacgactgaataaaacattgacgaacgtggtaataccaactttcgacgagaggaaaaccaagccagttatattctcaaactataagctcaagacggaaacttacttaaatgccaaactctcagatatatgcatcgggacttcggctgcaccgacttatctaccgccgcaccaatttcagaatgacggtgttcaatttgatttggttgatggtgctatgtctgctaataatccagcgttggttgctgtgagcgaagtgatacaacacaatgagcataaagaaatcctgttgctgtcattaggaacaggaacaataaaagctgaggagaagttatctggcatctttgatggcttgtgtcaacttgagtggctagttagcagcactaacgtttttagtgaggctctatatagtacaaacatgatccactactatcttgccacagtgtttccaggtgttttgcctgcggataactatcttcgaattgaggagtataacctggatccatccatggaagaaatggataatgctgacaagaaaaacatggataatcttgtaaaggtaggaaaaaacctcttgctccaaaaagctttgaggatgaatgtgaatacttttgtcccagttgaactagaccaaacaaatgctgaagctcttgacaggttgtctgagaaattatatgcagagaggcagttgcgtctgaaaaggaaatctatggaaaaaggaggaagccgaattattgaatctgtcaaagtcccttctggccgaatgcatgcaacttaagcaatattgttattagacgtatttgaataaatgtcatgtatatgaccttatattatcctgtgtgttttatccatgtctgttgtaataaggttcattgcttttcgggttctatgtaactcctaattgggtggaccatatatggatcatgttacaagtttcaatgcttttgagttctatgtaactcctaattccaagctctattggaattaaatatcaatgtatccttgtttgttgcttttccat

SEQ ID NO: 379 - DNA, 1158 bp, Glycine max
aagattaaacacttgagagattcatattcctggtcttactatgaactatgatgtgatgttcagataaaaggtttaggtagtagccaaccttaacaaatgaaaagaagttagcaattgataaaactcacaggtgcatcaacttgctctacctacccaccttattttcggccttgtcaggaacaaagggtctaaataaatagccttacataacgactctaattaactcaccctttttgtaaaaacctctctcagagtttgctcacccctactcttcttccagtctctatctcaatctccatcaaatttaactatggctactgaagaggttttggttgatgaaatcacttaccctaccaagatcactactaccaagcccctatctttgcttggccatggaatcaccgacatggagattcacttcatccatgtgaaattctattcaatcggggtttatttggagccagaagtagtaggccacttggaccagttcaaaggaaaatctgcaaaggagctggaagataatgaagagttcttcaatgctctcatttctgccccggtggagaagtttattagacttgtggtgatcaaagagatcaagggtgcacagtatggggttcagattgagactgcggtgagggataggttggcagctgaggacaaatatgaggaggaagaagaagaagctttggaaaaagttattgaatttttccagtccaagtacttcaagaaactttcagtgatcacataccatttcccagcaaattctgccactgctgagattgtggtatctttggaggggaaagaagactccaagtatgtgatagagaatgccaatgtggtagaggccatcaagaaatggtaccttggtggctcaagtgcggtttcttcctcaaccattcaatctctggctagcactttctcgcaggagttgtccaagtgaacataactttgtatggtgtaataatcttggggtctgtgttttgtgttgctaagttgcagtaattggaatttttctccacacaatgttttgcggatttctgcttttgaacttttcggaataatgttaatcttgtgacttgccaaaaaaaaaaaaaaaatttgtatggttattcttcatgctgttggaacacatacataataaatcgacgccctcactac

SEQ ID NO: 380 - DNA, 1273 bp, Glycine max
tcgagtcagctacgtaggcccccccgctcgatcagttctgccacccaaacccagaaagaatagaaccacctccagagaaaaatattcaaagatgtccagcgttaaggagttagttgaatctaagtgtctgagttctgttccctccaactacatttgccttgaaaatcccgaagattctatattgaattatgaaacagataatattccaaccattgatttttcccaactcacctcttctaatcccagtgtacgctccaaggcaatcaaacaactaggagatgcttgccgcgattggggtttctttatgctaatcaatcacggtgtgtcggagatactaagggatgaggtgattaggacaagccagggcttttttgatctgactgagaaagaaaaaatggagcacgcaggaaggaacctatttgatccaataagatatgggacaagcttcaatgtcacggtggacaagacccttttctggagagattatctcaaatgtcatgttcaccctcactttaatgctccttccaagcctcctggttttagccaaactttggaggaatacattaccaagggcagggaactggttgaagagttgctagaaggaatatctctaagcttagggcttgaagaaaacttcatacataaaaggatgaatctagacttgggatcccagttgctggttatcaactgttacccaccatgtcctaaccctgagcttgttatgggccttcctgcacacacagaccatgggcttctgaccctcctaatgcaaaacgagcttggagggcttcaaattcaacacaatggcaagtggattcctgtccaccccttacccaactcctttctcatcaacactggggatcacatggagatactgaccaatgggaaatacaagagtgttgttcatcgagctgtagcgaacacgaaagccactaggatttccgttggtacagcacacggacccaagcttgacaccattgtggggcccgcaccagagcttgttggcgatgataatactgcttcataccgtgccatcaaatacagtgattacatcgagcttcagcaaaaccatgaactcgacggaaagtcgtgcttggatcgtattcgcatttgaatcaaattaattaagctccatgcatttcttgtatctgaattctgaaccatgcttgtgtttcatatgtaatttaatttcagcttgaatattgatgtacttggaacgtaatttccgcatgtgtaattgaaaatttttaaatgcatgcacaaaaaaaaaaaa

SEQ ID NO: 381 - DNA, 2063 bp, Glycine max
ccgccttcctcacaatacccttcatttacacattatcatcaccaaaaataaataaaaaaaaacctctcatttcagagagagagagagagacttcacagaccaaagtgcagagaacaacaaagttcacaactttaaggaaaattgaaatggcccaagtgagcagagtgcacaatcttgctcaaagcactcaaatttttggccattcttccaactccaacaaactcaaatcggtgaattcggtttcattgaggccacgcctttggggggcctcaaaatctcgcatcccgatgcataaaaatggaagctttatgggaaattttaatgtggggaagggaaattccggcgtgtttaaggtttctgcatcggtcgccgccgcagagaagccgtcaacgtcgccggagatcgtgttggaacccatcaaagacttctcgggtaccatcacattgccagggtccaagtctctgtccaatcgaattttgcttcttgctgctctctctgagggaacaactgttgtagacaacttgttgtatagtgaggatattcattacatgcttggtgcattaaggacccttggactgcgtgtggaagatgacaaaacaaccaaacaagcaattgttgaaggctgtgggggattgtttcccactagtaaggaatctaaagatgaaatcaatttattccttggaaatgctggtactgcgatgcgtcctttgacagcagctgtggttgctgcaggtggaaatgcaagctacgtacttgatggggtgccccgaatgagagagaggccaattggggatttggttgctggtcttaagcagctcggtgcagatgttgattgctttcttggcacaaactgtccacctgttcgtgtaaatgggaagggaggacttcctggcggaaaggtgaaactgtctggatcagttagcagtcaatacttgactgctttgcttatggcagctcctttagctcttggtgatgtggaaattgagattgttgataaactgatttctgttccatatgttgaaatgactctgaagttgatggagcgttttggagtttctgtggaacacagtggtaattgggataggttcttggtccatggaggtcaaaagtacaagtctcctggcaatgcttttgttgaaggtgatgcttcaagtgccagttatttactagctggtgcagcaattactggtgggactatcactgttaatggctgtggcacaagcagtttacagggagatgtaaaatttgctgaagttcttgaaaagatgggagctaaggttacatggtcagagaacagtgtcactgtttctggaccaccacgagatttttctggtcgaaaagtcttgcgaggcattgatgtcaatatgaacaagatgccagatgttgccatgacacttgctgttgttgcactatttgctaatggtcccactgctataagagatgtggcaagttggagagttaaagagactgagaggatgatagcaatctgcacagaactcagaaagctaggagcaacagttgaagaaggtcctgattactgtgtgattactccacctgagaaattgaatgtcacagctatagacacatatgatgaccacagaatggccatggcattctctcttgctgcttgtggggatgttccagtaaccatcaaggatcctggttgcaccaggaagacatttcctgactactttgaagtccttgagaggttaacaaagcactaagcattttgtacattgagtagggaagagagagagatatatataaatactcacaaagcagtgagtatatggcttgcttttgtttctaaacattcctttataaggacttgagataatttgtattgtttaaaagagccattggttctgttgtatcaaagtaatttaattttcagtaccgacttggctctactcatatgtggtggtgtacattgcatctttgcatttgattccatatctattgggatgggaccatacattttttgtttattatttaagtcaaacatatcagataatatgtggtgaccagaaaagtgtctagcaatcaaatgggtctgtgattgc

SEQ ID NO: 382 - DNA, 929 bp, Glycine max
gttcatccaaaaacccctttatgtgactcactcgagccaacaacctctcacacgcgaccaacccccccataactcataaggtcaaaaccatttctcacaaaacccttcattacacacattattatcattatcacacacacaaaaaaaacctctcatttcaaagagagagagagagatttcacagaccaaattgcagaggacgacaaagttcacaacttcaaggaaaatcgaaatggcccaagtgagcagagtgcacaatcttgctcaaagcactcaaattttcggtcattcttccaatcccaacaaacccaaatcggcgaattcggtttcattgaggccacgcctttggggtccctcaaaatctcgcatcttggtgaacaaaactggaagccttatgggaaattttaatgcggggaagggaaattccggcatgtttaaggtttctgcctccgtcgccgccgccgcagagaagccttcgacggcgccggagatcgtgttggaacctatcaaagacatctcgggtaccatcacattgccagggtctaagtctctgtccaatcgaattttgcttcttgctgctctctctgagggaacaactgttatagacaacttgctgtacagcgaggatattcattacatgcttggtgcattaaggacccttggactgcgtgtggaagacgaccaaacaaccaaacaagcaattgtggaaggctgtgggggattgtttcccactattaaagaatctaaagatgaaatcaatttattccttggaaatgctggtactgcgatgcgtcctttgacagcagctgtagttgctgcaggtggaaatgcaggctacgtactggatggagtgccccgaatgagagagaggccaattggggattttggttgctgggtcttaagcagctcggtgcagatgttgattgctt

SEQ ID NO: 383 - DNA, 803 bp, Glycine max
actttgtccttcttttaaagggagatgtaaaatttgctgaagttcttgaaaagatgggagctaaggttacatggtcagagaacagtgtcaccgttactggaccgccacaagattcttctggtcaaaaagtcttgcaaggcattgatgtcaatatgaacaagatgccagatgttgccatgactcttgccgttgtcgcactatttgctaatggtcaaactaccatcagagatgtggcaagttggagagttaaagagactgagaggatgatagcaatctgcacagaactcagaaagctaggagcaacagttgaagaaggtcctgattactgtgtgattactccacctgagaaattgaatgtcacagctatagacacatatgatgaccacagaatggccatggcattctctcttgctgcttgtggggatgttccagtaaccatcaaggatcctggttgcaccaggaagacatttcccgactactttgaagtccttgagaggttcacaaagcactaagcattttgtacattgagtaggaagagagagagagataaatactcacaaaacagtgagtatatgcatgacttgcttttgtttcttaacattcccttgtaagaacttgagataatttgtattgttggaaagagctattgattctgttgtatcaaagtaatttaatttccagtacagacttggctctattcctcatatgtggtggtgtacattgcatctttgcatttgatcccatttctattgggataggaccatacctttttgtgtttattattcaagtcaaacttagcagat

SEQ ID NO: 384 - DNA, 2588 bp, Glycine max
tcacagttcacattcacatgttgttgaatctcaagataagtgtcccttcgtacatgtggcatctgtgtgttcccacaactgctcctattacaaacacaattaagagagactcataactcattgatataaatcatcacacacacagcatcagtgtattacggctgccacacggcgtcagttggggacaaagagtgatagatagaatacagcatttcatttctcatcatcaatggctttctcttgtaaacttgacagcttcattctctctgcctataaaccccaaaactccattctcccactttcaatccaaccttcctccttccttccatctccttcttctttgaagcctcagaagcttcccttcagaattcgctatggttctaccatcagagccacgtcatcatcctcaaccccttccgcaaccattgccgaacctgaaggcattaagattaaatcgattccaaccaagcccattgatggacaaaagactggaaccagtgggcttcgaaagaaggtgaaagtgtttatgcaagacaattaccttgcaaattggatccaggctctgtttaattcattgccaccggaggactacaagaatggtttgttggtgttgggaggtgatggtcgatactttaatcaggaagctgcacagataataatcaaaattgctgctggaaatggtgttggaaaaattctggttggacaggaaggtattttgtcaacaccagccgtttctgctgtaataagaaagagaaaggcaaatggtggatttattatgagtgcaagccataatcctggcggacctgaatatgattggggtattaagtttaattacagcagcggacaacctgcaccagaatccatcactgacaagatttatggaaataccctgtcgatctctgtgataaagatagctgacattcttgatgttgacatatcaaaagttggggttacaaagtttggaagcttcagtgtggaagtaatagacccagtctctgactatctggagctattggagacagtattcgattttcagctaatcaaaggtcttctttcacgtccagattttaggtttatatttgatgccatgcatgcagttactggtgcttatgctaaacccatcttggttgataaactcggtgctagtctggattcaatttcaaatggaatccctttggaagattttggacatggccatcctgatcctaatctaacatacgcaaaggatcttgtcaacattctgtatgctgaaaatggacctgattttggagctgccagtgatggggatggtgatagaaatatgattttaggaagaagtttctttgtaactccttcagactctgtagcagttattgcagccaatgcaagagaagcgattccatacttcaagaacggtgttaagggtcttgctcgatcaatgccaacaagcggtgctctggaccgtgttgctaaaaaattgaacctccctttctttgaggtccccactggttggaaattttttgggaatcttatggatgctgggaatttgtccgtttgcggggaagagagttttggaacaggttctgatcacattcgtgagaaagatggcatctgggctgtcttagcttggctttctattattgcacatcgcaacaaagacaagaatcccggggagaaattgatctccgtatctgacgttgtgatggagcactgggcaacttatggaaggaatttcttctctagatatgactacgaggaatgtgaatctgaaggtgccaataagatgatagaatacctacgagatattttgtctaagagcaagcctggtgatcagtatggaagttatgttctccagtttgcagatgattttacatacaccgatcctgtagatggaagtgtggtatcaaaacaaggtgttcggtttgtttttacagacggttcaaggattatatatcgtttatcaggaactggttctgcaggggctacggttagagtgtacattgaacagtttgaaccagatgtctctaaacatgatgttgatgctcaaattgccttaaaaccattaatagatttggcaatatccgtgtcaaagctcaaagacttcacagggagggagaagcctacagtcatcacataatggacaattccacaaccacttgatcaagttgttatatgttccaaggtgtgctctaagttgagtgcatacgcaggttgtttattgcatgcctatccatatctgagctcgctcgagttcggtcacttttggttgttcaagaattttggagcgataggtcccctgtaaaatatgctacttatatatttatgtgcaaagtatgaagcaccgacgtgcaacaaaataataataaaaaagaatagtttgctgctctaaggagctaggcctttcaaagttttgtccaattttttctaagtttagaaactggagttacttctcatcaagcagaataccaatttcacgtatgttccaaaacttctttctctgttatgattagtagtcctctttgattcctgatgtctctaggatgccaaaagtatgaatgttattgtcaagaatctattttttagcacttgagatgaaagcagagacaagg

SEQ ID NO: 385 - DNA, 852 bp, Glycine max
taccgcgccgcgaagacgacaggcggggacgaagggggggccttcactctgaaccaaataccatagtcttctctttgtccgtgacaaaacagttcccacaaaaaaaagaaaaaagaaaaaagaaaagcactaaaaaaaaatgaagaagggtttctcccttgtgctgctgattcttctgatccagtacaacaacgttgtcaacgcctacaacaacaaaaactgtgtcacagaggattgcctcatcggcaacaaggatttggaatcagagttctactttggatcccatgtggccagaatgctctacgatgtgagccaatctgtgagtggcaaaacaggcaataaaaataacaaagctgttaattgtccaaataagcaaggctaccgaagctgcttgccttccaaaaacggtggtggccctaagcaaagttgtggcgattacaccagggtttgctaagaactcgttccaacccttgtgatttcatttctgatttttaagattgtgatatgatggaatcttatttatgtcaatttgtttagtttaatttccatatgttattgttttttttaatattaagtcaggtaccagaaaatttgcatcaattcacactcatgagtcacctgaacaagagctagacccggttttattgtttgtatcactgtatgtaatatttaatgttttcggttcatacttttgttgcggttgtattgttgttgtgtatcatctgtgccattagtttatttgatgttgataagaataattccatgtgagatgggaaataataatatattattgcctgcagagatttctgcaaaaaaaaaaaaaaaaaaaaaaaaaaaaaaaaaaaaaaaaaa

SEQ ID NO: 386 - DNA, 880 bp, Glycine max
tcgagtagctacgtaggcccccccccaaaaaatttttctcgcagacactcttattcgagctccaattaaaaacccttgacactgttgcgtttggctaaaatgccggatgttcagacccttgttaacgattttctgaatcagcttaagaaacgtaaaattgaaggttctcaggccacagcgaagctcacagcagagttgctccggtctgtgatttcacagcagcgagtgccacacacaaaccaagccacagctctgattaatgcagtgagggctgtgggggagcagcttattgctgctaatcctgttgagctagctgtcggaaatatcgtgaggcgtgttttgcacattataagggaagaggatctttcccttgcaacagctgctatggatggtttgggggtatcagctgcaagtgatgatgaagatgatgcagagcgagatgaaaatcctgttttatctgctgctgctgttgcagctgctgctagaagcacattgcgtccaccgtcattgcaaactcttctagaggatacatctgattcagctgccgctccccccacatcttcctcagggggtgaatctgacgggagaagtagatctgtggaaaaaggttcaagagggaggaaattgaagcatgatgtcatcgaagcagtcaatgaacttattcaagacatatctacttgctatgaacaaatagccgagcaggcagtggagcacattcatcacaacgaggtaatattaacgttaggcagctcaaaaacagtgttggaatttctttatgctgctaaggaaaaacagagatcatttaaggtctttgttgctgaaggtgcccctaggttggttgtagtggctatgtaacatttgcatttatttgcaatgaact

SEQ ID NO: 387 - DNA, 1258 bp, Glycine max
  misc_feature (1256)..(1258): n is a, c, g, or t
ggaaactctcatagaatgaatataggtcttaatggtcacagcaatttactcggagtgcacaccatatagctcaagggaggatcttgtttcaagatttccgctcgtccgcgcgtccgggccatctgcttatgatcaatcaagtgctccacagcgtaatgtaaaccatgataacagagactggaggagtgcagatcggaatcttgaacctcctgctcatttgcaagggtcaatggtctctcagaatgcttcttcagagaagatttggccagaagaacgactgagggacatgtccttgtccgcactatgagaatactacaggcctagagatgagaacgaacctgctttttgtgtcaaagatttgaactctccgagcttccctccggccgcgggttctcgccgggtcgcggattcatttgagagaaaggatgcggaaagagatcttttggccaaactacttgtcaaccttgtgaaatctcagcatggaaccttgaatcaagttcagctcattaaagggtttgaatctgctctcagtacattggaggatgctgttaatgatgctcccagagcagcagagtttcttggccgaatttttgcaaaagccataacagagaatgtagtttctttgaaggagattgggcagttaatacatgatggtggagaggagccaggtagtctcttagaagttggacttgcagctgatgttcttggaagcactttggaggtaattcaaagcgagaagggggacgcggttctaaacgagatgcgttcagactctaacttgaggttggaaactttccggcaacctaatgctaaaacatcaaggaagttggaaaaatttatttagatgccagtgatggttattgtattttttttttttttttttttgtgtaaaggggaaaagttatttggctagtgcttttttggggtactcaattttgcagagaatggttttctccgtgagatgggtggatagggttttatatctgggattttctgtctttatattatttttccgacatcttcactgcaattgtaaaaaggttcaattgagcatcagaaattttaggcgtagctgctatgcctgcttgatgacctttacatatttctttgtagatataaaaggttcaatgagcatcaagaattttattttcgtatcgtttttggttgtatttcattaatgcttgtaaaatgaaatgcaatagagaaaataagagaagtagttttatgccgaaaaaaaaaaaatattaaaagaacgnnn

SEQ ID NO: 388 - DNA, 2579 bp, Glycine max
aattcggctcgagctcgagccgctcgagccgattcggctcgagatcatggtggaagaaataaccctgatggggagaggtggcagcgttctgctagcttccagcagaggggtttaattccttctcctacccaaactcctttacagatgatgcacaaagctgagaataagtatgaagtgggtaaagcatcagatgtggaagaggtaaagcagaggcagttgaaggctatcttgaacaaactaactccgcagaattttgatagactttttgaacaggtgaaagcagttaatattgacaatgcagtcaccctcactggtgtcatctcacaaatctttgagaaggctctgatggaacctaccttttgtgaaatgtatgccaacttctgtttgcatctggcttctgagttgcctgattttagtgaggacaatgaaaagataacttttaaaaggttattattaaacaagtgccaggaggaatttgagaggggtgaaagagaagaagaagcagcaaataaggctgacgagggtgaggttaagcagtctgctgaggaaagagaagaaagaagagttaaggctagaagacgcatgttgggaaacatcagattgattggagaactatacaagaagaaaatgttgacagagagaataatgcatgagtgtatcaagaagttactgggtcagtatcaggatccatatgaagaagacattgaagctttgtgcaagctaatgagtactattggggagatgattgatcatccaaaagccaaggaacatatggatgcatattttgaaaggatgaaattattatcaaacaacatgaatttatcttctagggtgaggttcatgttgaaagattccattgatttgagaaagaataaatggcaacaaaggaggaaagtagaaggtccaaagaagattgaggaggtacacagggatgccgctcaggagaggcaggcccaagctggtaggtcaggtcgtggtcttggcaacaatcaatcagctagacggaatcccatggattttggtccacgaggatcttctatgctgtcttctcccaattctcaaatgggtggactgcgtggtcttcctactcaagttcgtgggtatggtgcttttcaggatgctcgatttgaggaacgacaatcttatgaggctaggaccttggcagttccattgcctcaaagaccctcaggagatgattctataaacttggggccccaaggtggtcttgctaggggaatgtctacgagaggatcaacagcaatttccaatttaccaatatctgatgtgcttcctgtccatggagactctcatagaatgaatacaggtcttaatggtcacagcaatttatcagagcgcacaccatatagctcaagggaggatcatgtttcaagatatggtactgataggtcttcagggccatctgcttatgatcaatcaagtgctccagagcataatgtaaaccatggcaacagaggcttgaggagtgaagatcggaatcttgaacctcttgctcatttgcaagggtcaatagtctctcagaatgcttcttcagagaagatttggccagaagaacgactgagggacatgtccttgtcagcaataagggaatactacagtgctagagatgagaacgaacttgctttatgtgtcaaagatttgaactctccgagcttccatccttccatggtttctctatgggtcacggattcatttgagagaaaggacgcagaaagagatcttttggccaaactacttgtcaaccttgtgaaatctcagcatggcactttgaatcaagaccagctcatcaaagggtttgaatctgttctcagtacattggaggatgctgttaatgatgcccccagagcagcagagtttcttggccgaatttttgcgatagccataacagagagtgtagttactttgaaggacattgggcagttaatacatgatggtggagaggagccaggtagtctcttagaagttggacttgcagctgatgttctgggaagcacgttggaggtaattcaaagcgagaagggggatgcggttctaaacaagatctgttcaggctctaacttgaggttggaaactttccggccacctaatgctaaaacatcaaggaagttggaaaaatttatttagatggtagtgacgctcattgtattttttatttttttttgtagagggtaaaaattagttggctcgtgcttttttgggggtagtactcaattttgcagagaatggttttctctgtgagatgggtcggtagagttttatctatgggattttctttgttttaaattatttttcggacatcagaaattttaggcgtttttgctatgcctgcttgatgacctttacatatttctttgtagatataaaaggttcaatgagcgtcaagaatattattttcatatcgcctttgggtgtttttcattaatgttcaaaaaatgaaaagcaatagagaaaataagagaaagtagttttatgttaatataaaatattttggaccgcgataattaaaactcgggataatttttacttgggaataaggttttgtggggcgaaaaaaaaccaaa

SEQ ID NO: 389 - DNA, 2030 bp, Glycine max
gttaaacaagtgccaggaagaatttgagaggggtgaaagagagcaagaagaagctaataaggctgatgagggtgaggtcaagctgtctaatggggaaagagaagagaaacgtaccaaggcaagaagacgtatgttggggaatatcagattgattggagaactatataagacgaaaatgttgacagaaaggataatgcatgaatgcatcaagaagttattgggtcagtatcaggatccggatgaagaagatattgaagctttgtgcaagctgatgagtactattggggagatgattgaccatcccaaagccaaggaacatatggatgcatattttgaaatgatgagatcattatcaaacaacatgaatttatcttctaggttgaggttcatgttgaaggatgtcattgatttgagaaagaataaatggcaacaaagaagaaaggttgaaggtccgaagaagattgaggaggtgcacagagatgcttctcaagagaggctggcccaagctagtaggctgggtcgtggtccaggcaacaatccacctcgaagaatccctatggattttggtccaagagggtcatctatgttatctcccaatgctcagatgggtggactgcgtggattgcctactcaagttcgcgggtatggttctcaggatgctcgcatggaagacaggcaaacttatgaggctaggacattgtcagttcccttgcctcagagacctttgggtgatgaatccataaccttgggaccacagggtggccttgccagaggaatgtccattagaggtccacctgcagtttcaagttcaactggtcttaataatggttataataatttgtcagagcgcacttcatacagctctagggaggaccctgcatcaagatatactccagatagatttgctggttcgactgcttacgatcaatctattgttcaagatcgtaatatgaattatggtaacagggacttgagaaatgcaaataggattcttgataaacctgttgtaacttcacctcctgcccgagcacaagggacagcagcctcccagagtatttctccagagcgactgcaggacatgtccatggcagcaatcagagaatactatagtgctagagatgtgaatgaagttgttctatgcatcaaagatctgaactccccaggctttcatccttccatggtttctctctgggtcacagactcatttgagagaaaggacaacgagagagatcttttggcccagctgcttgtcaaggttgtgaaatctcaggatggacccttgggtcaagcccagctcatcaaagggtttgaatctgttctcagtactttggaagatgcggttaacgatgcccccaaagcaccagagtttcttggccgtgtttttgccaaagctataacagagcatgtagtctctttgaaagagattgggcggttaatacatgagggtggagaggaaccggggagcctcttagaagctggacttgcagctgatgttcttggaagcacattggaggtaataaaaatggaaaagggtgatgctgttttgagtgagatctgcacgagctccaacttgcggttggagaccttccggccacccgaacctcttaaatcaaggaagttagagaaatttatttaggggtagagatgctcatagaggaatatatttattcatgtctagtgctactaataggggatactcaaatttgcagaaatggttttctccatgggggagtgggtgggggagatttttatgttcggatttctgtctaaaagattatttctgccatatcttcactgcaattataaaaggttcagttaagcgtctgaaaattttaggctgagttatatatcatgtctgtcatgagggtttactttttcagcagtcttgtatcattcaaagttcaaactgtccatgaaaatatactggcatattgatctgcatcatgtcaatgtgtatagggacatgcaatcaagcataacgccacatactaaattgttttaaaatatactagctgacgatggttttttct

SEQ ID NO: 390 - DNA, 851 bp, Glycine max
acggctgcgagaagacgacagaaggggagcatcgagtatcctcttccttctccttcttccgcatcaactcgtcttattagagtttttactaatcaattatggcttacgagataaccgagataaagaagattggtataggcctaattggtttcggcttatttttcacatttcttggcataattcttttctttgaccgtggtttgcttgctctgggaaatattttttccttggcaggggttggcattttgcttggttggcgttccacgtgggcacttttcactaatagagccaactttaagggttctgcatcatttcttctaggtctctttttcatctttgtgaggtggccaattgttggtataatacttgaaatatacggttgtgtttttctcttcagtggattttggtcatctatcaaagtgttcctctaccatatccctgttgttggatggattatacagtttatctctcctccttgattgtcacagaagggatttaacggatagcctcttagtatatggctaatcatgggtttcgattgtcttggtaatttttccaatgacttgtgtatgaatgcaatgtcttggctagtttttccaagagtttgcatcaggcaaattagcttcctttagtgagaagtatcgcagcatgcaatttatgtaaaagagttggtacttggtaggctaattttgttgtttcaaggctcatatatacaagctggttatgctgttcaggctcgctactgatgtcagactgaacatatgtttacttttggctttatgcgccttgtcattgtcaagacctcgccaaaggatgttgaaattctttttgtaagaaaaaaaaaaaaaaaa

SEQ ID NO: 391 - DNA, 964 bp, Glycine max
tacggctgcgagaagacgacagaagggggacactgaggtttggatctttgcctgtttgggtttgtggactgccaaataagcgtttgtatatattattctcacggagtttgtgtgtgaggcagcagcacacggcacacacaaagaacaaaagacaaagacagagagaaacaatgtcttccccaagcaaacgccgagacatggacttgatgaagctgatgatgagtgattacaaggtggagacggtcaacgatggcatgcaagagttctttgtggaattccacggacccaaagacagtccttatcaaggtggtgtgtggaaagtaagggtggatctacctgatgcctatccttataagtctccatctattggctttgtcaacaaaattttccatcctaatgtggatgagatgtctggttctgtttgcttagatgttattagccagacttggagtccaatgtttgaccttgttaatgtgtttgaggtgtttcttcctcaacttcttctgtaccccaatgcatcagatccattaaatggtgatgctgctgccttgatgattcgagatcatgctacatatgaacaaagagtcaaagaatattgtgaaaaatatgccaagcctgaagatgttggagctgtacaggaggaaagttccagtgatgatgagccgagtgaagatgattatgcctctagtgatgatgccattgttggccaacctgatccttagatttttacatacaatgcctgccttatttgcagtcttgcttgtacatgatatcatttaatttgatattgagtccaggaatttgaagtgagacaagttcttaaggttgaaggaaaaattcacacctttctatctattacatggtggttgtgtaaataggtttatgatttaaatgcttctgtgactagaccattcaatttcagaaggttccgaaaaaaaaaagaaaaaaaaaataagaaaagcga

SEQ ID NO: 392 - DNA, 1813 bp, Glycine max
cggtttcgggccggaattcccgggtcgacccacgcgtccggccgacccctgcttcggcaccgtccgtccggactccgggtcgacccacgcgtccgcgcaaacatgtccaccgcaacaactcacgtgctcgcttatcccttccctacctccggtcacgtgatccctctcttagacttcaccaaaaccctagtctctcgcggcgtccatgtcaccgttctggtcacaccctacaacgaagccttacttccaaaaaactattcccctcttctccaaacgcttctcctccccgaacctcagttcccgaacccgaagcaaaacaggctcgtatccatggtaaccttcatgcggcaccaccactacccgatcattatggactgggcccaggcccagcccattcctcctgcggctattatatcagatttcttcctcggttggacccacctcctcgcacgtgacctccacgtgccgcgcgtagtcttctccccctccggcgccttcgcgctctccgtctcctactccctctggcgcgacgccccccaaaacgacaacccggaagacccaaacggcgttgtttcgttcccaaatctcccaaattccccattctacccctggtggcagatcacgcacttattccatgacaccgagagaggaggtcccgaatggaagtttcacagagagaacatgcttctcaacattgattcctggggcgtcgttatcaacacattcaccgagttagaacaagtttacttaaaccacttgaagaaagaattgggacacgaaagagtctttgcggtgggcccggttctgccgattcaaaccggttcgatttcaacaaaaccggaagaacgaggcgggaacagcaccgtttcgcgacatgacatcatggaatggctcgacgcacgtgacaaaggttccgttgtttacgtgtgtttcgggagccgtacgtttctaacgagttcacaaatggaggtgttgacacgtgcgttggaaataagtggggtgaactttgttttgtccgttagggttcctgaaaaaggacacgtggcgaaggagcacggtacggtgccgcgtgggttttcagatagggtgaaaggaaggggatttgtgatagagggatgggccccacagttggttatactgagtcaccgcgcggtgggggctttcgtgagtcactgcgggtggaactcggtggtggaagggttgatttcgggggtggcgatgctgacgtggccgatgggtgcggatcagtatacgaacgcgaagcttctggtggatgagttgggcgtggcggttcgcgccgcggagggtgagaaggtaattccagaagctagcgagttggggaagagaattgaagaagctttggggagaacgaaggagagggtaaaagcggaaatgttgagggatgatgcgttgcttgcgattgggaatggtggcagctcgcagagggaattggatgcgctcgtgaagcttctaagtgaagttcagcgtgtggaaagcacttcttgaaaacgtgtttcttttttgttggggttagggtaatttgggaaccattgggatttttagtgtgattggttttgagcggcgtgtttggatgcatgctgcactaactgagctcactcacgtttggtaactagtaggttctttcagtgagaggtaaaagtattattgcttccgttctgattgtactactactaaatactaatttatcgttctggtcttgaccgacgaaaatgcgggttgttgacttgtttaaacggtttgacacttttggaagaagttcaacgtgaaaactactaataagtaattatgattt

SEQ ID NO: 393 - DNA, 1710 bp, Glycine max
  misc_feature (19)..(19): n is a, c, g, or t
ttttttttttttttttttntttttttactctggattttttttttttttttgctgatatgaatgaagtgatacattttttaaatcaagaatttgtaacaaatacatgagaaattagaagagaaaggtataattggttggcaagaatgaaactgaaaaaggatgtcatacattcacataaattttcatgttgaaaaaatgaacacaaatgcacccagaatacatgcttccactaacaaataacaacttatgatgagcataggcactcagtatacattcaaacttccatttttatctgcattcatcaaatgatccacaaattgattaatgtgcttatcagagctgcctccttcaccaactgcttccctagccaacttcttccatttattggcattccttctaatctcttggcttctttgaccctccatcacatccttcaaactctggacaaattcttgcttcctcacaattcctttctcatcctccttaggccacacaccaacctcccagatttcatccaaaaatttagcatcaggcaactggtcagcccactgtggcaaacacaccaccggaacgccgaggctaagactttcgagggtggaattccagccacaatgagtcacaaagcagccagtggcttggtgagccagcaattcaagttggttacaccatgtcacaattagacccttatcttttaccgactctctgtacccacagggcaattttccatgctcagattctcttaaaacccacaagaaactcaccccactttctttcaatccccaagccacctcttccatctgttcttctgtcaatgacaccatgcttccaaaggagatgtacactacagactgaggaggctttgattccaaccaattgctgcactcttcagttagcggcttccatagacttgctccataccctttgtcccctttaatcctcccatccaagtaaccagaagggaccattggtcctatcatctttgccggaaagagctccgttaagcctttcaacacctcgctttccaatgcttcaaaggtgttgacgaacatccaatccgcattgttcaagttggagaattggctcaatttcatggccatgtaagcagggtagctttcggggaacctgacgaaactggggagagcgcgggaatccaagggaggaagccccggaacacgaaggggaaggtgttccatcttaacagggagctgaatgaaaccatggtgtaggcgacagaatatgttgcagaccgcagcagagttggtgaaaaaggcggctccgtaaatgccatgctgcttcgccacgtcgagaacccaggggaaaaatgagtcatagacaatgcaggtgacgggggagggagtttgttggtgttttctgatgagctcagacaaggtcctggagccgtttgttctgaaggaggcaaggaagagttgcacgttgttgttggtctgggcgaagccggcttggtcgaaaccatcggagatggcttcgaccgtgatgttgggtgcattgatggagttggcagtgtagtgggtggtggcaactgtggctttgacaccctttgaagctaatctttttgcgaattggacaagggggttgatgtggccttgggcagggtatggaagaacaagaacatggatgttgttttgcctctgatgaaccatcttttgtttctgtttttgttttttttgagtgatatcaaatgttttggtt

SEQ ID NO: 394 - DNA, 1813 bp, Glycine max
acggtgcgagatgacgacagatggggaggcgagaaaaggcttttgagttatgatgatgaaagaaatcatgattatttatctgaaactaagggggttgagtgtgaggcaagttgtgcttttacgagatttagtctaggagaataagaaacccggattgttcacgtgccaaccaagaatctcgaagctcccaaaatccaacagctaaaaaattcacagctgtgtcatccatgaccatgattcaatcccatccaaatccctctctataatgccttcatcaagatccagtagtaggaacgaaacaacgattgagtaatcctcacttgatgatactactagtcctgagatgataacatcaaacttcgcaataacaacgaaacttccttataatttatctttctctctttctttctttcttccttccctctcttctattctcttcttgtctttacatcacaccctctttccccctttgccaaagctctgatcttttccctctccaatccccgtttctccacttttcttgatcagggtgcctcgttttctcagtttctgaatcattttttgttctgggcctctctccacttcggaaaaagatctgatttttcgcccccttttttttgtttcgaatccctcgtgaaccctcttttctcgatctggggtgtgaaggaaaccgctttttatcgtttcaattatgaggaaaagggagagggagaatccttgtggcgtgtgtggccactatcacaaatacgaagaaggggaagtgtgttcaatttgcggtcaccggattccggttggatcggagaaaacttcgatacaagtcagtgcttttccttccgttgtcctgccggaatttctttacctaggaagctacgacaatgcgtcccgctccgagcttctcaagactcaggggatttctcgtatcctcaatactgttccttcttgtcaaaatctctacaagaactcgtttacctatcactgccttccagatgacaaaactttgccatttgatgaagcaattcagtttctagagcaatgtgagaaggacaaggagcgtgttctggttcattgcatgtcaggaaagagtaggtctccagctattgtgattgcatacttgatgaagttcaaagggtggagacttgcacagagttatcagtgggtaaaagaacggagaccttctgttgaattaactcaaggtgtgtaccagcaactgcaggagtttgagcaaaagatctatggaccgattgatagtggcagctctgtgccgcctggtttcttgcctacagcaccttcaattagctttggtttcccaaagatcaatgatccagctcagcttccttccttcagcactgctggaactccttcaatctttgcgcgagcacccctagatattgctccaaccgagtttacattcggtgccggtcagactcagaagaatgtggctggaaacccctataatgcaaatccagcaaatccaaatggcactgatatccaaatggatggttcttgatccttcaccagccacatgtgtgattaagctgcttgacaatttggcttgtggtgaagcttgcaaggtaccaggctgccatatttcaagtcaagtttgcaataatcataagtgacttgtctattctacaccaacttcttttttcccttgtatttctcaaatcttttcatagttatctctggttgtagtattgagttacagcataatattcttactggcctcagtagatctgcgcgacaatatccagtttttaatattacaagcaaaatcttgtctataaaaaaaaaaaaaggaaaaaaaaaaaaaaaa

SEQ ID NO: 395 - DNA, 663 bp, Glycine max
caaggtgtacccgcacacccaatacgcattgttccagttgcagaattggctcaatttcatgcccatgtaagcgggatagctctccggaaacttctacgcaaactcggcagggagcgactatccaagggagctagtccaggaagacgcaggggcaggtcttccgtcttaacagggagctgaaggaaaccatgatgaatgcgacagaatatgttgcagacggcggctgagtttgtgaaaaaggcggctccgtaaaggccatgctgcttggccacgtcgagagcccacgggaaaaaggagtcgtagacaatgcaggtgacgggagagggagtttgttggtgttttttgatgagcagagacaaggtcctggaaccgtttgttctgaaggaggccaggaagagctgcatgttgttgtttgtttgggcgaagcccgcttggtcgaagccatcggagatggcttcgatcgtgatgttgggtgcattgatggagttggcagtgtagtgagtggtggcaactgtggctttaacgccctttgaagctaatctttttgcgaattggaggagggggttgatgtggccttgggcagggtatggcagaacaagaacgtggacgttgttttgcctctgctcagccattttgtgtttctgtttttgaggagtgatgatt

SEQ ID NO: 396 - DNA, 1679 bp, Glycine max
  misc_feature (1662)..(1678): n is a, c, g, or t
attcatcacccatgaccatgatccaatccatccaaatccctctctataatgccttcatcaaaatccagtagtagaaacgaaacgattgagtaatcctaacttgatgatactagtccttagttgataacattgttatcacatcaaacttgcaataacataaaaacttccttacagttcctctttctctcttgtctctctttcttccacccttccctctcttctcgtctttacatcacaccctcttttcccccctttgccaaagctctgatcttgtccccctccaatccccgctactctgcttttcttgatctgggtgtctcgttctcagttttgaatcgtttttctgttctgggtctttctcctcttcgaaaaagatctgatttttctccctgttttgattcgaatccctcgtgaaccctctttcttgatctgggtgtgtgggaaaccgtttttatccttcaattatgaggaaaagggagagggagaatccttgtggcgtgtgtggccactatcacaaatatgaagaaggggaagtgtgttcgatttgcggtcaccggattccggttggatcggagaaaacttcgatacaagttagtgcttttccttccgttgttctgccggaatttctttacctaggaagctacgacaacgcatcacgctcggagcttctgaagactcaggggatttctcgtatcctcaataccgtcccttcttgtcaaaatctctacaagaactcgtttacctatcactgcctcccagatgacaaaactttgccatttgatgaagcaattcagtttcttgagcaatgtgagaaggataaggagcgtgttctggttcattgcatgtcaggaaagagtaggtctccagctattgtgattgcatacttgatgaagtccaaaggatggagacttgtacacagttatcagtgggtaaaggaacggagaccttctgttgaattaactcaaggtgtgtaccagcagctgcaggagtttgaggaaaagatctatggacggatcgatagtggaagctctctggtgcctggtttcttgcctgcagcacctccttcaattagctttggttttccaaagatcaatgatccagctcaacttccctcattcagcgctggaactccttcaatcttcgcgcgagcacctctagacattgctcctaccgagtttacatttggtgcaggtcagactcagaagaatgtggctggaaatccctttaatgcaaatccagcaaatccaaatggcactgatatccaaatggatggttcttgatccttcaccggccacttgtgtgattaagctgcttgacaatttgtcttgtggtaaagtttgcaaggtaccaccaccaggctgccatatttcaagtcaaggtgcaataatcacaagtgacttgtcaattctacaccaacttctttttttcccatgtttttctcaaatcttttcatagttatctctggttgtagtattgagatacagcatatttttactggcctcagttgttctgcgcgacaatatccagttttcaatattagaagcaaaatcttatctacaaggtatacaaatagtaaacaatccagcttgtggaaccgctgttttaaaatatagaaaaattcatggcccagtttttgaaattcatcatcaaaaaaaaaaaaannnnnnnnnnnnnnnnna

SEQ ID NO: 397 - DNA, 2728 bp, Glycine max
ccacgcgtccgatttttacttcaatttacctcgcagtgtttcgcacgctctctgtttcctcgataagcatgattttttcaaggattgcacgctccgtttcgcggtcgtctcgcgctagaaatttattacacggtgatgggagattgggaacccatgtcggattgccacggacgaatgcgtgttctgaaggagccgaaggggtattagggtttgttaggggctacgtatcttctgccagagctcgcagtaatggcctcgtttccaatttgcctgattttaaatctgttgcagcaaaccctaggattcgccgattgttttgcagcaaagctccaaagaagaagaattatgagaacttctatcccaaggaaaagaaggaagttccgaaaggaaacgacaaaaaatacgagtccaaagataactcgaacgcaaacacagaggatagtggaaattttcaggaagctttcatgaagcaagttcaaaatctagtcaccccattattgttgatggggctatttcttacatccttttcgtttggtcctcgtgaacagaagcagattagctttcaggagtttaaaaacaagcttttggaaccaggattagtagaccatattgttgtctcaaataaatcagttgccaaagtatatgtaaggaacactcccctcaaccaaacagataatgaagtagcccaagggacccaacctgcaattggatctggaggccagtataaatattatttcaatattggaagtgttgagtcttttgaggagaagctagaggaagcgcaagaagctctgggcatttactctcatgattttgtgcctgtcacatattcttctgaagtggtttggtaccaggaattgatgaggtttgctccaacactgttgcttttgggatctctcttgtatatgggaaggagaatgcaaggtggaattggtgttggtggcagtggtggcggcaagggtgcccgtggaatattcaacataggaaaagcaccagttactaaagtagacaaaaatgccaaaaacaagatctattttaaagatgttgctggctgtgatgaggcaaagcaagaaattatggagtttgtccacttcctcaagaacccaaagaaatatgaagaacttggtgcaaaaattccaaaaggtgctctcttggttggtcctccaggcacaggaaaaacccttttagcaaaagctacagcaggggagtctggtgtgccatttctttctatatctggttctgatttcatggaaatgtttgttggtgttggaccatctagggtgagaaacttgtttcaggaagcaaggcagtgttcacctagtatagtatttattgatgagattgatgcaattggtcgagcaaggcggggtagtttttctggtgcaaatgatgaacgtgaaagtactttaaatcaattgttggtcgagatggatggttttggaaccacttctggagttgttgtgttggcaggaacaaataggcctgaaatcttagacaaagctcttcttaggcctgggcgatttgaccgccagataacaattgacaaacctgatattaaaggtcgtgaccagatatttcagatctacttgaagaaaatcaaacttgatcatgagccttcatattattctccaaggcttgcagcccttacacctggatttgctggagcagacattgctaatgtctgcaatgaagctgctctgattgctgcaagaggtgaaggaacacaagtcacaatggaacattttgaggcagccattgataggatcattggtggtttggaaaagaggaacaaggtaataagcaagctggaaaggcggactgttgcctaccatgaagcaggccatgctgtttcaggttggttcttggagcatgttgagcccttgttgaaagtaactattgttccacgtggcactgctgctcttgggtttgcccaatatgttcccaatgagaaccttctcatgacaaaggagcagctttttgatatgacttgtatgacacttggcggtcgggctgctgagcaggttcttatagggagaatctcaacaggagcacaaaatgacttggaaaaagtgaccaagctgacgtatgcccaagtagcagtttatggttttagcgacaaagtaggcctcctctccttccctccaactgagggctcatatgagttttccaaaccatacagcagcaaaactgctgcaatcattgatagcgaagtgcgtgattgggtggacaaagcatacaaacatacgattcagcttatcgaggaacacaaggagcaagttactcaaattgcagagttgctgcttgaaaaagaagtacttcaccaggacgacttgcttcgagttttgggcgagcggccgttcaaggctactgaactcaccaattatgatagatttaagcagggttttatagaggaagaggaaaaggtcgtggaaagcaccgtagatacgcctgaggaaggtggtgggtcttcacctctagaaccccaggttgttcccacatagacagttatttaatttgtgtttgttattgtacatggctttcttgttttttcaatttgctgacagaggaacgaacaaaacgcttatggtaactgctgaataaaaattattcgtttctgatttttcttatatggatatgccatagaccggccaatccaaatactattttcagttgttcgagcctagttactgttacattgatttttaagattgtaagtgtgtattatttt

SEQ ID NO: 398 - DNA, 1333 bp, Glycine max
tcagctacgtaggcccccccccagaatcgaactactttcacttcttcaaaatggctcactcgttgataagaaaatgcataaaacctgcaaccctcaacttcctgacaccactcgcagtccctgagattcggcggcggctagcgtcggtggcggcagcggcggacgaggaccctccgcaatcgccgtcgtcgttcactttctcgtcggagggggagaaggtgtacgtgaagccgccggcggggaagtggaagccgtcgccgtcgtcgacggtgacgatgccgatgtcgttcatgacggggtccatcgtggggaagcgcttctacaaggaggtgaagactcgcgaagccgatgacgggaacggctggacggttatgctcgattaccgaaccctaaagactccttccaagagacccctcaagcttccctctcttcctcttgctaaagccattgctgctgaatgggaataccagcaaacggatggcataaggcccttcacaatgcctcttatgagacttgcttgcactgccttggaaagagttccactcacaaggagcaaagttattgagaatttgatgaagaaatttaatcaagatttagtattttgccgtgcacctgatgacgatgagctgacaagctatgtacatgctcgtcaggtggagaaaattgatccattgcttcgttgggtggagtcagaatttggctttaagccagttctttacaccagcttttttggtggaaagcaggaagatggtcttgtaatggctattgagaaccttctaaagaaaacagatgattgcgaattggcagcaattgatgctattgcagcatcagcacattcgttaattatagctattggaatggttcaggggaaattgcaaattgaggaagcaattgaacttattagacttgaagaagattctcaggtggacaggtggggcctcgtagaaggtggccatgatgtggatattgctgatctaagggtgcaggtttcgtcagcaattgtatttcttggtttatcaagatgcatataggcttttaacatcctttcatattttacgttaccatcctaggaactagctatcaggctagactagaataggaaaccaggggttgttgtcatatccagatctttccagagacaataaatattcttgggtacgcataatttgctttgtagagttttatttatggttacagttttgtcatgggttgaaacattataaacatggctttaaaagggcctgatttgtactggaataacaggtaaaattctttgttcaagtgttttctttcagcttcattattcataggaaacaaaaatgtgggttgtgtg

SEQ ID NO: 399 - DNA, 1057 bp, Glycine max
ctttccttcccgcccacgcgtccgcccacgcgtccgtacggctgttagaagacgacagaagggggatcacacgcacccggcaagaggttttgagggtgaaaccactcttaatttgaagccatggtctcgtttcacaaggcgctggccgagagtactccaaagccagaaattcatgcagaattcgaagcatcatcaaagaaaagaaagtgggaagagccattaaccgaaggtttcttcaaggatcaaatagagaaaaggaaatccgtctttgatatagagcttcaccctgagacccctttttcttcagataaatggcgtcaatacctcactattcagtcagggcagatacagttgtgtaacacaagaacaacaacagagaaccccaaaaaaagctccgaagaaccaccttcttctcatcacatgagtttaaaccttgagctaaatttgacgtgtgaatcaccgaggaaaaaagaagaaggttatggttatgaaatgaatgagaaaaagagttctggttcttcccctgggggtttgagtgaacgtgaggatctgtgtaaaaaagattcagatggtaaaattctttctccctcgtggttgtcatcatctgaagatgattacaaagagatggttgcaacagtttgcatgcgctgccacatgttggtcatgctatgcaagtcatctccttcatgtcctaactgcaaattcatgcacccaccagatcagaacccttcaaaattcttaaagagaagatgcagtctcttctgctagtttaatttaattattgggaacgtcgatcaaatactacataagttttcacctttcaccatctttctacttttccctctgaatagcctaagttcttcaaatatagctcaagtgtatgttcaaaacggtggggtgatgattaatcttgctctaagtaatatggtacttaatttcattgttagaacaaatgcgaataagtgagtaccgtagaagctaacctggaatatatcatcatcatatatttatgtgtatatagtattctcgagcatccaaaaaaaaaaaaaataaaaaa

SEQ ID NO: 400 - DNA, 1095 bp, Glycine max
  misc_feature (1087)..(1087): n is a, c, g, or t
tcagctacgtaggcccccccccccatgaggcatataacttctttgttttattatgatgattaatattgtaagcaccagtagaaaggttgcaggatgtgtctcttgtgcaaggaaattgaacttaccatacacaacaccactcgtattttgaactgatgcgtagcatgtaaatgactaggaccaaacacctttaattttgcaggtctcttttagtgatgagaggaaacagtgctgacatggcaaggcacgtaatgtgtccatcccctaacagaagggtcagcatcaccttcttcagagtgaggccagactccaaccaatgccaaacaccaactcccactaccatgacaagtgcaatgactatgtggcaaccgggcattgctgctagtccatatgctttgccaaatagtgctctaactagctatgagggtatggacatgaacatgatgcccaaatggggaatgcttcacgctccaatggtgatgcttactcctatgcgtcctgtggcgctgaaccctcgcaaacttgctggtggtgggactggggtgtttttgccctggaatgtgccatctagaaaacctgccaagcatcttcccccacgtgcacaaaaaggaaggcttctcacattaccttcctccgttgaaccacaaatgggagagtccacttctgaaccaagcatttgtgttgaaggataaggacaagtttagttctgaaagcagccttgggtttgaagaaatctgaatcaagaaaggtgacttccacgactcagctatttgctctacactgttgaaattttgttgtacaaacacaaacgcccccccccccccaagtgctgcaatgaaagagcagtttggttcttcttcatcttttttccctttggatagagtagagtctagtggtgttcaaaacggtttcccatgtttgccaatcaccgcaagagcttagtagagtagtcaagctttcaaatttaaagtgtgaattatatctgatggtagctttttgtaagaatgatattttaagttaaaaagacaaatcaattcgtcaccaaaatgcttacttaaagcttatcgataccgtcggaaaaaaaaanaaaaaaaa

SEQ ID NO: 401 - DNA, 1860 bp, Glycine max
  misc_feature (1833)..(1833): n is a, c, g, or t
tcagctacgtaggccccccccccgtgtccgctgctgcaaagtgcaaaacctgagagagaaaatggagaagatgaaaatagaagaggttcaatcaaccacgaagaaacagcgtgttgctacacacactcacattaaaggcctaggtctcgaggcgagtggaaaagcattgagttttgctgctgggttcgttggacaagttgaggcaagagaagcatcaggtcttgtggtggacatgatacggcagaagaagatggccggccgggcacttcttctcgccggaccgcccgggaccggcaagacggcattggcacttggaataagccaggagcttggcaccaaggtaccgttctgccctatggttggctccgaagtttactcctcggaagtaaagaagactgaggttctcatggaaaattttcgacgggccattggtctgcgtatcaaggaaaacaaggaagtatacgaaggggaggtcaccgagctctctccagaagaaactgagagcgtaacaggtggttatggtaaaagtattagccatgtcatcattggattgaagacagtgaaaggaacaaagcaactcaagttggatcctaccatatatgatgccttgattaaggaaaagatagctgttggcgatgttatatacattgaggcaaatagcggggctgtaaaaagggtgggtcgaagtgatgctttcgctacagagtttgaccttgaagctgaagagtatgttccactgcctaagggagaggttcacaaaaaaaaggagattgttcaggatgttaccctacatgatctggatgctgccaatgcacgacctcaagggggacaagatattctgtctctgatgggtcagatgatgaagcccaggaaaacagaaatcactgacaagttgaggcaagagattaacaaggttgttaaccgatatattgatgaaggtgtagcagagcttgttcctggagttctattcattgatgaggttcatatgctagatatggagtgtttttcgtatttgaatcgtgctttagagagctccctatctccaatagtaatctttgctactaatagaggaatatgcaatgtaagaggaactgatatgacaagtcctcatggcatacctgttgacctgttggatcggttggtgatcattcgaacgcaaacatatggtcctgctgaaatgatacagattctagctatccgtgctcaagtagaggaactggttgtggatgaagaaagtttagctttccttggggagattggacaacaaacatctttaaggcatgcagttcaactgttatcacctgccagcattgttgcaaaaatgaatggccgagacaacatctgcaaggcggatcttgaggaagtttgtacgctatatttggatgccaaatcatcggccaggttacttcaagagcagcaggagaaatacatttcataatattgttttccaactgttgcgatgactgttggttgggtttgaattacaaccagtttttgctttcgcttctatactgtctcttgcatgattgagataatcggttcaagggctgtaattttgttactgaattcattttaggattatttttcatgatgcttttgatgactgaaaatgaaaaacagcgtggaaatgtaatgaggcagttagtttcccatatttttcgtttctctgtattatcttttgcttttctaaatttagttctgttgataatggactttaatgtctttggtttatcccttgtacaactttctaatggcatttggaatattttacgatgtgcttaacatgtatgaaaatcctcgacttcccatttttttataaaaaaaaaaaaaggnaaaaaatataaaaaaatacaaaataaa

SEQ ID NO: 402 - DNA, 2397 bp, Glycine max
tcagctacgtaggcccccccccccaaacaaaattgctagaaacagagaaagcaagttagatcaaagatctgaatcgagatcggagaagaggaagaagaagaagaagagtatgggaacgacggtggcgggtctagcgccgggtctgtcacggaagctgaagaaggttctagaatctcggatcgatacgccagacctcttgtcttcgctcaacacgctctcttccttctacgatgacaacactcctcaggcgcgtcgcaacctccgatccaccatcgagaagcgcgccctctccatcaaccgcgaattcctcgacgcttcccacgccgcgcagctggccttggatagcgtggagaacgaggtcgatgcgctcgctgagtgctgtgacaggatagcaaaggctttgaatagttgtagtgctagcaccgctgacattatcggcaccacagagaggctcaaacaagagcttgaaactactacacaaagacaagagattgtagcatgtttcttacgtgattatcagctctcccctgaagagataaatgcacttagagaagaagagctgaatgaaaactttttcaaggcattatctcatgtccaagagatttatgccaattgcaaagtgttgcttaggacacatcatcagcgtgctggtttagagctgatggatatgatggctgtgtatcaagaaggagcttatgagcgcctatgcaggtgggttcaggctgaatgtcgaaaattgggtgacactgacaatcctgaagttagtgagcttctgaaaactgcagtgcgctacctaagggaaagatctgtccttttcaaatattgtgctgaagaggtagccaatatgagacacaatgcactatttagaagatttataagtgctcttacacgtggaggacctggtggattgcctcgaccaattgaagtgcatgctcatgacccactacgatatgttggtgatatgctaggctggttgcatcaggccttggcatctgaacgtgaacttgtagctgtattacttgatccagatacaattaccgattctggtccgaagcaattctccaataactctgagaatggctctgggaagacagaatctgacttgatgtttgttcttgatagaatttttgaaggagtatgtcgaccgtttaaattgagagttgaacaagttttacagtctcaaccaagtcttatagtatcctacaaactcagtagtacacttgaattttactgctacactatctcagatttacttgggcgagaaactgcactttgtaatacactatgggcactgaaagatgctgctcagaaaacattttttgatattttaaaaggtcgaggggaaaagcttttgcggtatcccccacttgttgctgttgatctttccccgccaccagcagtgagggaaggggtatctgtacttcttgaagttatcgacaactacaacagcatgatggttcctgcttctggccaaaaacctgcttttggtccagttatatctgctatactggatccaatagttcagatgtgtgaacaagcagcggaggcacacaagtcaaagggagccggccattcatcaagaagaagtaggatgagttccgactctggtcaacttactaaatcatcagttgatgcaattttgtcaaatagtagctctgcatcttcttcactgactagtgaaaccccttcaaagatttttctcattaactgcttgtgtgccattcaacaacctctatctggatacgaggctgttgctgattacgtgaaaagacttggagcaatgatagataatcatttgtgtgttctcgtggaaaaagaagctgatgcaatcttaagaagatgtaatttgtcagagaagatgccgcacttccagaattcaatccacaaggaaggggacaatgaagtgggtaccccattggctgagatggaggacactagtccagctgttctttcggagtgtttgaaagctctgtttggccttatcttgggaagtgaaagttccctgccggaatttgagcagatgcaggttccaaggttgcgttctgaagctactattggcgtggccaggtcactggccgaagcttatgaccttatttataaggctattatggatcccaagaatggttatccggaccccaggtcgttggcaaggcatccacctaatcagataagaactatattaggaatttaagttttgtcgatttgtttagctccgagtccgacctcttgctcattatgttcattatgtttgttaattacgtatataacctctctctttctcatttgagattgtattgatatacttacaataaataattctgttatctattaacttttgagatgctatatcggaattctattattgttgttgttaaaaaaaaaaaaaaaaaaaaaaaa

SEQ ID NO: 403 - DNA, 945 bp, Glycine max
ggaaattttatttttattgctctattaattgcatcatctatattgcattatatagcatcgtgtttcagtgatcattaaacaagtcttgtggggttcctcattttgcaagctttctttggtttcacaccatttttctattgacttcatcacaatataaaagatcattagtgtcggtattatcaccaccatattcttttggacttcctctgctacttctaggtttcgttttatttggctttgattttcttctgcaaccttatctcctgcaaagctttgattactgagtctaacttaccctgccacagtttgccttgtttacctgagctctgtttttaactggtctttgatcaaggatggccataaaggcaattgagttgttgaaaggaagcggaaaccatgaagagatatttgaagttcttgcagcagtggctgcatctttgggggatgtaatagatgatgtgaacactttgcaggtaacacctttaaagggggcaatgaccaatgaggtttttgaggtaaattggccaaccaaaagtgatggtcatcaaagaagggttcttgttcgattatatggtgaaggtgttgaggttttcttcaacagggtggatgaaatccaaacctttgagtgcatgtcaaagcatggacagggtccacgccttcttgggaggttcaccactggcagagttgaggagttcattcatgccaaaacactctcagctgcggacctccgtgaccctgaaatatctgctttgatagcatctaagatgagggagtttcacaatcttcatatgcctggtgcaaagaaggctcagctttggcagagaatgaggaagtggcttagtcatgccaaaagtttgtgctcccctaaagaaaccaaagattttggcctggacaatctagatgcttgaataaatatgcttgtggaagttgtatctcagggaaatc

SEQ ID NO: 404 - DNA, 1710 bp, Glycine max
ccacgcgtccgaattcgagcggccgctttttttggtttttttgttttttttttcttgtaaaaacaagactacctatattagaatataattctcacaagacgagtaaaaaatcataaattaaaagatatgttcaaagcattatcaatctacagaaacccacccccttaacaataatcctaagttgagaaaagaaaagtcaagagagttgcaaataaatagaaaaggaaaaaaaaggggaaaaaacattaaaactgatacattgcaagctggaatgatacacatgcccacaatagcatcgcctgctgctcagcttccacttggaaagattcagttataattcaagtaaacaacacatccaccgaagcctaacttcgaaaatataagtatcaatatgattcatggctctgatttggacaaggagatgagcttgcacattactgcagggcattagttgctgtgctggtaacagcaactcaaccaaaatagtatcataggaagtaatcaggtgttctcctggttacatctggctctcccctccttggagctggctcaaactgaatgaatgtgtgtcctttgcagtcatcaacctcaagaattgatgccatattcccacaacgataacaatagttaggtgcactaaatatagtaaccaccttttgatcatgtccccagttatatccttccataaccagctggtgagctctagcaatcagcttcaagttattggtatggttaaattgctcagatatgtcctggccaaaggtatatccagcacctctaggagagatgccccaaccacaacgatcatctggatcagaccatagaagatcacacatgggtccctcatgaggaacttcttgtacgcgatcaaaattacgtatgttatccagggtttcaatagatggcgacaacccaccatgaagacaaaatatttcagattcaaccaatgctgtcaacggaaagtagtcaaacaaatcagtaaagatcttccaaacattagcactaccatacttccgcaggcactcatcataaaacccataaacttgagtaatctggcgactttcatgatttcccctcagaatagtgatacgctgacgataacgcactttaagggcaaccaaaagcgtaacagtttcaacagaataatagccacgatcaacataatctcccataaacaagtaatttgtatctggacacttccctccaatgcgaaaaagctctgcaagatcatggaattgcccatgaatatcaccacaaattgtaacaggacttttcacaggctggacattgctctcttccatcaaaatttcttttgccttatcacacaagacccttacctcttgctcggacaagggtttgcactgcatgagctgagaaatctgctcatcgaggtttccatgcgaattcgaaggcaccgaatccatgttctagtactccacctcctgaccttgctcgttgaggtcgttctatcaatatcctctctccgaatcgatggaaaccctagatctcactcggaaaacccctttcgccttttcggtttgtgtttgttgtttctggtttttagaaagagagagaaagaggagaggggtggtggtggggaagaaaccaaagcgttttggaggcttcgttttgttcgataaccactcctttttcgggggcaaaattgaaattaccaataattgaaacgctcatgctcaacaacaatattgg

SEQ ID NO: 405 - DNA, 1501 bp, Glycine max
cttgcatctgacttcaatttccatcttcaacttcaacacttaaactccttttagtttcaataatccacaccccaaaccccaaatctttccctatttattttcatcttagttttccctaggaccatatattataccatatttatatatcttcacatacttaataatatataataatgggtgttgtacggacgtgggagagcaggagggcggagctggaggcctttcgccggagcctggtggcagccgccggcatccagcggcggaaagacgatgagggggggagaaccgacaagtttgtttcctcctatgaacatgatgatggaaagggtaccttaatctgtgtcacttgtggagtttcctactttggtcttgccttggtcaaccatctcttgctcttaggttactctcttcgagtcaccgttgacaacccagaggacatagagaagctgagggaaatggagaggcgtggtgaagtgagggctacagaaggaaatttggaagtaataatggcaaagctaactgatgttgatgggttggagaaagcatttcagggctgtcgtggcgtctttcacacttctgcatttacagaccccgctggtttatctggctacacaaaatccatggccgagattgaagtaagggctgctgagaatgtgatggaagcatgtgcaagaacaccttccataacaagatgtgtgttcacatcatcactatcggcttgtgtgtggcaagacaattcacaatcagattttaccccagttattaatcatgcctcttggagcaccgaatcattctgcatagaaaagaagctttggtatgctttaggaaagatgagagcagagaaggctgcttggagaatatctaatgaaaggggtttgaagctcacaactatttgtccagctctaattacaggtcctgaattttgtcataggaatccaacagcaacgattgcttatctcaaaggtgcacaagaaatgtactctcaaggttttctagcatcagtggatgtgaccaaattggctgaagctcatgcaagtgtattcaaggcaatgaacaacaatgcttctggtagatacatttgctttgaccatgtaattgatacacatagtgaggcagagaagctggcaaaggatatagggatgcctaaggaaaagatatgtggagatgcatcaaacaattcttctatacatagatttgaattgtccaatgagaagttatgcagaatcatgtcaaggccactcaggtgttacagtgaatattagtagatgaaatcatgttatgcttggcttaaagatttgtttatttaaaggtgtgactttggcttaggagactagaagagaaaatagatgaggcatgcttaatagtttgtttagtaatttgtaatgcctgtattcatttatggtttaattatagtatataattctattcaattttggtaccaaaaaaaaaaaaaaaaaaaaaaaaaaaaaaaaaaaaaaaaagcttatcgataccgtcgacc

SEQ ID NO: 406 - DNA, 1643 bp, Glycine max
gggccggaattcccgcgtcgacccccggactcggcgctctcagggcagtgtgtggattgaggtgtcgcacggtgggtgtagcagtagattccgcctccaagaaaagaaagagcaatgcaagctgcatcttcaggcatcggatacggtctaaaatatcaggctagatgcatatccgatgtgaaggcagacacagatcacactagcttcctcgctggcactctcagcctcaaagaagaaaatgaggtacatctgattcggctttcgtcgagtggaaccgaactcttctgcgagggattgttctctcatcccaacgagatctgggaccttgtttcttgcccctttgatcaacggatcttttcaaccgtctactctaacggtgaaacgtatggggcagcaatatggcagatccccgagctatatggcgagttaaattcacctcagctagagagaattacctccctcgacactgattctggcaagattaaatgtattctatggtggccatctggaaggcatgataaattgatcagcatcaatgaggaaaacctgtacttgtggaatttagatgtttcaaagaaaactgctcaggtacaatcacaagattcagctggtatgctgcacaagttatctggaggggcatgggatccacatgatgtgagttctgttgctgcaacttgtgaatcgtatctccaattttgggatgtcagaacaatgaagaagactatgtcaatcgagtgttcccatgtatgcagtgttgattaccatccccaaaagcagcacatacttgttactgcagaacatgagtctgggatacacatttgggatctaagaaaacctaaagttcccatccaagagcttccaggacatactcattggacttggactgtcaagtgtaacccagagtatgatggaatgatcttgagtgctggtacggattcaactgtcaacttgtggcttgcctcaacaaatcatgatgagttaacaactgaaagacaagtcgattcatctgcccgatgggttgatccattgcttaatacgtacagtgattatgaagacagcatttatgggctcacatggagttctcgtgaaccatggatctttgcatcattatcctatgatggcagggttgttgtagaatcagttaagcctttcatctccaaaaaataaagttcagcaccaattgccatgttgccatcatttgtcatgtcatcttcttgtgtatgtcagtaatttcctgcctctcgggtcttgagataaatagatctgaaagaccctaatatttattccatcatgtcaccgttgctgggtttgacgaggctgaacaggtttaatgttacatgtgcattacatctttgacgagaaagcattgatagctcagaaatcaacatttttggttttatcttttttatctttcaacgttgaatggttttaggctggattatgtgcaagtttattctttgattagacatccatgctatgtaattcgtggagtcgttgtatatctatggaactacaagttcatacaagttctttctttgtatctcgagtttgtcctctaatatgtcttcgtggaaaggtaataaatctactgtaattgggaaacagaaagttgctatatgaaattggctgagtgtcgttatagc

SEQ ID NO: 407 - DNA, 974 bp, Glycine max
tcgagtcactacggacaaatggataccctgttactgttagatgtcacagggaagaaagagcgtcgagaaggttcagttcagatcctccgtctccaccatggcaactcccaaggcatcgtcgaaatggaccgagaacatttcctcaatagcagctcgcatcttcttccttctcatcatctttcagatccctcttttcagggtgacttgcagatctggcatgtgtacaacccctttgcatgtcacgtcgtcacaattaattgcaagtgagatctttcctgttgttgttgtgaagggccttctgtacccaggggctgcagtgaacggcctcatccacaacatgactgttccaagttgggataatttgttggacttgtataacttgaccagtgtgaaggaagcttctgcggtaactgatcttcagcgcttggaggttcttgcagggagctacttcaccgtggccggagcacttgtgggtattctaaaacccgggagaatgagcatgtttgggtccctacttataatttgggggctggtcaaagaagggattttaggaaagccagtaaatactgatcctgcaaaagctgtgtacgtttacccaacaatggtgatcgccatgatatgtgctttctcatctgttaagtatgatgtgaagaaggtggtcaggtcagcccctatcaggtcatctgcaagaccactaaagaactcatccaagtctaagctgaaataagtgatactcatgttgacaagttaaaattgtatgccttcctcccaaattcattttggaacatatagttcagtttttccagaattattaccatctcattttactatgttccttttaattgattgagagcttgttgatttgtagatgggaaagaggcttaccaaattatttattagatatcaatcaattcatcaaaaaaaaaaaaaaaatagaatactaacttaaaagttggcatccttcaaaaaaaaaa

SEQ ID NO: 408 - DNA, 866 bp, Glycine max
atcgtcgagtcagctacgtaggccccccccccattcctctgcattcattcagcgttcatctcaatctagatttgtgtgcggtgcgtctccggtgaagagaagaagatggcgaccgtaccaggacagctcatatgggaggtcgtaaagaagaacaactctttcttggtgaaagagttcggaaggggcactcagagcgtgcagttcagcagagagcccaacaatctctacaacctcaacactttcaagtactccggtttggcgaacaagaaaactgtcactgttcaacctgcgggtaaagaccagtctgtgttgctggcaacaaccaagacaaagaagcaaaacaagcctgctgctttgcttcacaaatctgtcatgaaaaaggagttccggaggatggcaaaggcagtgcaaaatcaggtagcagataactactacaggcctgatctcaaaaaggcagctctggcaaggttgagcgctgtcaataggagcctcagagttgctaagtctggtgtgaagaagaggaacagacaggctgtgaaggtccctagcaggaagtgaaattagaagagttaaattgcattctacattactaccatccttttcccccttttgtagtttgtgttccagaaccaaaatttagattttcgagttttgtttggagaggcaattattgtgagttttcaatatacaacaactggaactatgttatagctttcaactgggttggtattttttttttcaatagatgatttaagtaagaaggatggatgttcatattaaaaaaaaaaaaaaaaaaaaaaactcgctcgaaaaaaaaaaaaaaaaaaaaaaaaaaaaaaaaaaaaaaaaaaaaaaaaaaaaaaaaa

SEQ ID NO: 409 - DNA, 1003 bp, Glycine max
gttggtacgtattatatataatcctccttgcattgcattttatagtcattggctcagggtctcttccattcacaaccttaaacctttctttcttgtaaactttattgattgattctgagaatagaactaagagggtatagacatggctagcgcaattgcagcttcttttttggttctgcttctggctttccccactgtatttggagctgaccatgaagttggtgacactagtggatgggccctcggagttaattacaacacctgggcctctgggaaaactttcacagttggtgacactttggtgttcaagtatgactccactcatcaagttgatgaggttgatgagagtggatacaacagctgcagctcaagcaacagcatcaagaactaccaagatggaaactccaagattgaattgacttcaccaggcaaaaggtacttcttgtgccccatttcaggccactgtgctggaggcatgaagctgcaaattaatgtggctgctgctagtgggacccccccaacaaccccaagtggcaccccaccaaccaccccatcaaacccttctccttctcctccctctgagtcaggatccaccaacaccacttcaccaccaaagcctagtggagctgtaactgtttccagtggcattggccttttggtggggtctttctttgtgtcagcaattatgtttggtttcatgggctagggaagaggcagtgctgttttttttttattctcctttttattaatatgttattgttttgctgagagtttgtgtgaatttcatcatttaatccagatgtatatctaatcttgatatgtatctccttttaatatttaaaaatgacacatttctttagctgcaaccccccctattcttttgatagctgggatgatggtgacattatatatatctaatatcccttgctttattttgttaaaaaataaaaaaaaataattgtacctgaaacaattgtagtccacttaaatagtggtctttttg

SEQ ID NO: 410 - DNA, 1305 bp, Glycine max
aaaaaacagtgagacaccaccatcacttcagtggagtagtcgagagagtgaggtgaatactgaatagtagtagatgcaactaagaaaatggggagcataaccacaagcaccatcggagctcccccaacccgaagaacaacactcacccctttctcttcgcttctccccaaacccaaaccccattctctcgccctatccacttccaatccccacccattccatctctccaaacccctaaccatttcccctaatccaaacccccccattcccaaatccaccccctcctcctcctccgccgctacctctccatcctcccccctaaacctcaagtcccgcctccgcaacggcgagaccctctatggtctcttcctcctctccttctcccccaccctcgccgagatcgcgggccacgccggctatgacttcgtcgtcgtcgacatggagcacggccccggtggcatccgcgacgcccttccctgccttcacgccctcgccgccgcgaacaccgccgccatcctccgcgtccctgaatccaccgccgcctgggccaagaaagccctcgacctcggcccgcagggcctcatgttccccatgatcgaatccccattatccgcccaggacgcagtctcctactgccgctttccccccaccgggctccgcggcgcggcccatcccatcgtccgggcctccaagtacggcctggacgacgagtatctcggtaattacctcgacgagcttcttatcatgtgccaggtggagtccgaggagggagtggcgaacactggcgcgatcgccgccgttgatggcgtagactgcgtgcagatgggccgttggatctgagcgcgagtttagggtacttgtgggacccagggaacaagaaagtgagggaggttttgaaggatgctgagaacaaggtgttggagagccgaaacgacgacgttgagattggggcttatctcgcaggtttcgccacggtgtatgatggggcgagggatttgaggtcgcgtgggtatcacatggtgagtggcgccgtagacgtggggctgttccggagcgcagcggtggaggatgtgacgcggttcaagatgggcggggaggggtcggagagtgatgagggggaggagaaagagggtgatgagaagtactggagtgagtgaatgaatgagaggtgtttttttaaaaaaataattagattttttgtaaattaggtgatgtggttgttggtttatgtgcttttgatattttaaatgaaaatgaatctttgattccataaaaaaaaaaaaaaagcttatcgataccgtcgac

SEQ ID NO: 411 - DNA, 1348 bp, Glycine max
ccaatttttaaggctatttttgatattcgtgcttgggacatgagaacaatggaatctctctgccgagcatgtaaatatgcggcggcgacttctcgacggttcggggggctcacaattggtgccatgctggaagagattcagagtctttataggcagcaccaccaaccatgctttctttatctctccagtgaagttataaagatatttggttctgatccatcttgtgctgactacctgaaaaatttgattgaggcgctcttccagcacacaacacgccttctcacaaatattcaggaattcacagcccggcctgatatagcagatgattgttttttgttggcctcaaggtgtattcgctactgtcctcaactgtttattccctcgtctgtttttccttcattagtggattgctctatgattgggatcacagtacagcatagggaggcttcgaattccatattgcatttcttggctgacatttttgatcttgcgaattcctctgtgggggagcaatttataccaataagagatagtgtaataattcctcgaggtgccagcatcaccagaattttggttgcttcattaacgggagcacttcctaaatctcgagtggatgtggtatcttatacactcctggcattaactcgatcatatgggatgcaagcgctggaatgggcaaaaaagagtgttttgttaattccatcaacagctgttacagatgtagagcgatcaagattcttaaaagcactttctgatgcagcatccggaggggatactaatggacttactgttcctgttgaagagctgtcagatgtttgccgacgtaacagggccgttcaggaaatagttcaggaagctttgagaccgcttgagttgaatatggtgaatgtatcatagaggattggtaaatgccattgatagagagggccattttgtttagggtcctgtctgttagttaggctagttggttgtgtattatctatctgttatattcatttttttttatccattatcattctccaattttttagaagaatttgcccctgcatgctctgatgtgttggccggaagaaattcgatgggggtattgtatctttttattcttgagatgtgggattggtgagtgatgtttgtcccggttgtcatttttggggggcggaggttacatggtatacagttgtaatttaatggaaacagaaaaggtgggggaaaatagagtacattgataagttgctgcaaattttcaagttgggaatgaatatcgattttggaatctgtgactgaattgtgttcagttcgccggaccaatctgttaaaatgaatgaaggcggatgttgagatgtaaaaa

SEQ ID NO: 412 - DNA, 1789 bp, Glycine max
gatagacgtgaaagggataaagaagttgaaaaggatagacgagaaagggagaaagaagttgaaaaggatagacgagaaagggagaaagaagttgaaaaggatagacgtgaaaaggagaaagaagttgaaaaggaaagacgtgaaagacagaaagaagttgtgaaggatagggagaaggtagaaaatgataaagaacgagaacaacatcccggaggcccccccccccgagaaatgttcgtggatcatgaagatagggttcctgtaaagcttgaagagaatggagcagttggagggccagaaccaatggacatctctacaacatcaacatctcagctatgtggaattcctagttcagatgtgacaattttggaaggtcatacttcagaggtgtgtgcttgtgcatggagccctacaggatctcttcttgcatccggatctggagattcgacagctcgtatctggacaatagcagaagggagatgtaagcctggttcagagaatggccctttgaatgtgttggtgttgaagcatgttaggggtaaaacaaatgaaaagagtaaagatgttactacacttgactggaatggggaagggacacttctcgcaactggttcatatgatgggcaagcaagaatttggaccaccaatggtgaactgaagagtacattaagcaaacacaagggaccaatattctctctgaagtggaataagaaaggagattatcttctgactggaagttgtgatcaaactgcaattgtgtgggatgtgaaggcagaagaatggaaacaacaatttgaatttcattcaggtccaacacttgatgttgattggcgcaacaatgtgtcttttgccacaagttccacagacaatatgatacatgtttgcaaaattggagaaacccaccctataaaaacttttgctgggcaccagggtgaggttaattgtgtcaaatgggatcccacaggttcattgctggcctcctgttctgatgatatcacagcaaagatatggagtatgaagcaggatacttatcttcatgacttaagggagcattccaaggagatatataccatcagatggagccccactggtcctggtacaaataaccctaatcataaactggtgttggctagtgcttcatttgactcaactgtaaagctatgggatgtggaacttgggaaactcatctacagcttggatggacacaggcatcctgtatattctgttgctttcagtcccaatggcgattatctagttagtgggtctcttgacagatccatgcacatatggtcattgagggacggcaagattgtcaaaacatacacaggcaatgggggcatttttgaggtctgctggaataaggagggtgacaagattgctgcatgttttgctaataatacagtttgcgttttggattttagaatgtaatatctgtgaagcgccaatttctcctcaccagtacattaaattctttctttcccccccttgagatgagatcggtggaaatgtattttgggtgggtggataggttacccattttaaccatagttgtagtggaccctgttgtaatttgctagaacattattaaaaagtagtttgtaggagtgcattcttaataagcaaaagtgtatagatttagttggacaaaatcctgtacaaggatcgctagactttttgtatctacttgcctttctcttgcacgatggctgcaaatggcatgcattttcggtccctttgatccattaaggcttgttaatcaaaggcaaaggggggcggggggttgattccc

SEQ ID NO: 413 - DNA, 707 bp, Glycine max
  misc_feature (661)..(661): n is a, c, g, or t
  misc_feature (680)..(681): n is a, c, g, or t
gggcctctccaactccgatttcgtttctcctccgaaaaaccctaatttccccttcgctcttccccatgaccacggcgtagctcatttcccccactccgaaaatgtcgctccagggcagcgccagcggaaacggcaccgtggcggcggcgtcgacggcgagcctgaggctgcggctgaaccctaacaaggagcacaagcccgatggctacgaggacatgcaattggatttcagccctaacattttcagctcgctggagaggtacctccctccgagcatgctcaacgtgacgcgtgacgagaaggccaagttcatgcgcgagattctcctcaagtatctgcccctcggggaacgcaacagagcacaaaagcatagagaatatagagagaggataatagcaaattatcagcctctacatctggagttgtactctgtggatcctgctgcattctttgtccccacatttctgagagcaattaatgataatacagaacaaagctatagaagtatagtatctgaaccctttccaggcatttttatatttgacatatttcagacccacttttgtgagtgtattgctgtctgagattgaaaattttgagaaagtgggtgactgaaactaaatttcggatcatgcatcccaatacaatgaataaaattggntgctgtactttgatgactnntggacttgaaacaatgcttgacagct

SEQ ID NO: 414 - DNA, 2081 bp, Glycine max
ctggaacactccaacttaaccggttctctggattccaagatcttgaaccgtttggaccagctccgagtcctcagtttcaaaggaaactcgctctccgggcaaatacccaacatctccgccttggtcaacctcaaatcgattttcctcaacgaaaacaacttctccggcgattttcccgcctccgtcgccctcctccaccgcgtgaaagtcattgtactgtcgcaaaaccatatctccggcgaaattccggcgtcgctgctgaatctccggcgactgtacgttctctacttgcaagacaacgcgttgactggacgcattcccggtttcaaccagagcagcctcaggtatttaaacgtttcgaaaaaccgtctatccggcgagattccggtgacgtcggcattgatccggttcaatgagtcgtcgttttgggggaacccggggctctgcggggaacagatcgaagaagcatgcaaaaacggaagcggttcattgccgccatcgataagccctagctatccgttgaaaccgggaggaacaacgtcaacgacgatggggaaatcgaagcgcacgaaattgataaagataattggagggagcgttgggggagttgtttttgcattaggatgcgtggttttggtgtgggtgatttgcaggaagtggaaaagaaggaggaggaggaggaggaggaggaagggtggtgctgaagtggcagaaggggaagtgggtgcggcgggaagtgggggaggaggtgataatagtaaagaagaagaaggtggggggtttgcgtgggaaagtgagggtgtagggaagctggtgttctgcggaggaggggatggggacatgagttatagtttggaggatttgctcaaggcttcggcggagacactggggaggggtataatgggaagtacgtataaggcagtgatggaatcggggttcatagttactgtgaagaggttgaaagatgcaaggtaccctggcttggaagagttcagtgctcacattcaagtccttgggaggctcacccaccctaacctcgtccctctcagggcttatttccaggctaaggaggaacgcctcctcgtttatgattactttcctaatggcagcctcttctcccttattcacggatcgaaaacatctggtgggggaaagcctcttcactggacatcctgccttaaaattgctgaggatctagcaacaggcatgctctatatccaccagaaccctggcttgacacatggaaacctgaaatcttctaatgtattgttgggttctgactttgagtcatgtcttactgattatggtctcactgtgttccttaatcctgacacaatggatgagcctagtgcaacttctttgttctatagagcacctgaatgccgcaactttcaaaggtcacaaactcaaccagcagatgtatacagtttcggggtccttcttcttgagcttttaaccggcaaaacacccttccaagaccttgttcagacatatggttcagacatacctaggtgggttcggtcagtgcgcgaagaggagacggagtctggggatgatcctgcttcaggcaatgaagcatctgaagagaagcttcaggctcttttgaacattgcaatggcatgtgtttcactagtgccggagaacaggcctacaatgagagaagttttaaagatgataagagatgcaagaggggaggctcatgtctcatctaacagtagtgatcactcccctggtagatggtcagatactgttcaaagctttccaagggaagaacaccagagcatatgattggtaactttttgacagcttattagttgaaactatgcattctgatttttcctgaattggttattgatacgattcatgcataaactaggtgatacgtgaggacctacatttttaatctctagctgtgtgagtaaatgcattttaaagggtaattaaggattcttttatagagtcatcacaggttgcaaagagtgggagatcatcagttcctgctttgtcttgtattttctttttaaaataaaacacacattccaaataaaaacatggggttcagattaaaaaaaaaaaaaaaa

SEQ ID NO: 415 - DNA, 1078 bp, Glycine max
  misc_feature (1)..(3): n is a, c, g, or t
nnnacggctgcgagaagacgacagaagggggctcccagcagctaaggaatcaaatcggaaattcagactctcactcttcccttctcccctctccttagcttccactcattgtacacaaaattctgcagagacagagagaaaagtgttgaacatggcaggaagagaagttcgtgaatacaccaacctcagcgaccccaaagataagaaatggtgcaaggggaaagataagattgacgatgaagacattactttccaacgcatggttgcaaagatgcgagaggttgctggggagcgcggaggttaccttcatggacgaggcgccttggacagtgatgatctactttatctcaaagagcaaatggaagccgaggaggatgcagaacgcctcctgcgtcgcactgaaaaacgggcatttgctgcatttaagagagctgcaagtttagcagattcttcacctgcatcagtaccactggcatttcgggttgagccaaagcccaaaagtgggatcaggcagcaagacttgctgaagaaagttgttgagattaaacctaagcggccaagatttgatgcaaatcgtaagcctgatcacgatccttcgaaagagaaagagcagtctttgccaagaacaaagaaagtggaggagcaacctttgtctggatcaaagaaagcagaggaacatgctccattggggtcacaagaagccgaagctaagcctaaggttgaaagctccagtgggggattactgggcctggcatatgatagttctgatgatgatgaatgatttggtaattgtagtttgatggtagatctcttctttccatcattgtctttgtaggttgtagtttttagtacagaatgcttgatttatttagagaaagtattaaattgtagtgttcaaggtataaaaagttccttgtatgaagattagtcttgaagggtgggaaaagaaaatgaagtattagtccattactctacaaccagatccaagatacaacagctttatatgtgctatcatctaatttttttgtgcctgttttgtttattcttgaaatatgatgtgggtcctggaggaattgct

SEQ ID NO: 416 - DNA, 907 bp, Glycine max
gttggcatggttactcaattgcctgaccaggaccagaccagcgtttcccgtaaacagatgcttgctcggcttgatgtttgcatgggaggtcgtgtcgctgaagagctaattacgagagagaacgaagtcacttctggtgcatcctcagatctcaggcaagcaaccagtctggcaagggaaatggttaccaaatatggcatgggcaatgaagttggactagtcactcacgattacaaagatgatggtaggagcatgagctcagagactaggcttcttattgagaaagaggtgaagcaattcctggagagggcctacaacaatgcaaaaactattctgaccactcacaacaaggagcttcatgcacttgcaaatgcccttctggagcacgagacactttcaggaactcagataaagacattgcttgcccaagttagatctcagatgctgcagcagcagcagcagcagccaccccaaacaattgaagctcagagcagtttacaatccaacacggtgcctccatcatccagcaacccggcatctgctgctgccgctgctgctgccgccacagctgcagcaacagctactgctgccgccgccaaggctaacagtgctccagtgggatcttagcaggacaagatgccggagatgggtagcaaacataactttgtacggccagattgaaatgtgcttatagtatttttttttttttcaggtttttttcacttggaggaactcaactcatgcaccttggagtctagttgacataaaagtatatacattttcgtttctcattgtttgtagggtacaatgataaattaaagagattatcagttgcctccaactcaatctggtactctcactcgatctttttcagacaataaattataacaaattaccttgttccatt

SEQ ID NO: 417 - DNA, 1675 bp, Glycine max
  misc_feature (1591)..(1591): n is a, c, g, or t
  misc_feature (1640)..(1641): n is a, c, g, or t
ggctcgaggcgctttactcgtcttggtggtaagcttccgaaaggagttttactcctcgcgccccctggcactgggaaaacaatgttagctagagctattgctggagaggctggggttccattcttctcctgcagtggaagtgaatttgaagagatgtatgttggtgttggtgcacgaagggtgagggatcttttttctgctgcaaggaagcgagcacctgctataatattcattgatgagatagatgctattggaggaaaacgaaatgcaaaggaccaaatgtacatgaagatgacattaaatcagttactggttgagctagatggattcaagcaaaatgagggcataattgtgattggcgctactaattttccacaatcattggataacgcattggtgagacctgggcggtttgatcgccatgttgttgttcccaatcctgatgtaaaaggaagacagcagattttggaatcacacatgtcaaaggttctgaaggctgatgatgttgatctaatgatcattgcccgaggaacacctgggttctctggtgctgaccttgcaaacttgattaacattgctgctatcaaggcggcaatggatggtgctaaagctgtgagcatggctgatttagagcatgcaaaagacaagatccggatgggaagtgaacgcaagtcagctgtcatatctgaggagtcacggaagttgactgctttccacgagggtggccatgcccttgtggccatacatactgatggggccctccctgttcacaaggcaactatagttccccgtggaatggctcttggcatggttactcaattgcctgacaaggacgagaccagcatttcccgtaaacagatgcttgctaggcttgatgtttgcatgggaggtcgtgtcgctgaagagctaattttcggagagaacgaagtcacttctggtgcatcctcagatctcaggaaagcaactagtctggcaagggagatggttaccgaatatggcatgggcaatgaagttggactagtcactcacgattacgaagatgatggtaggagcatgagctcagagactaggcttcttattgagaaagaggtgaagcaattcctggagagggcctacaacaatgcaaaaactattctgaccactcacaacaaggagcttcatgcacttgcgaatgcccttctggagcatgaaaccctttcaggaactcagataaaggcattgcttgcccaagttagatctcagatgcagcagcagcagccccaaacacttgaagctcagaacagttcacaatccaacacagtgcctccatcatctagcaacccggcatctgctgctgctgctgctgcagctgccgccgccaccacagccgcagctacagctactgctgctgccgccaaggctaaaagtgctccagtgggatcttagcaggacaagatatgctggagacgtgtagcaaacataactttgtactgccagattgagatgtgcttaggtatttttttttcaggttttctcagttggaggaactcaactcatgcacctcggagactagttgacattaaagtatatacattttcttttctcattgttntgtccccaactcaatctggggtactctcactcgatttctttttctgacnntataaattaataacaaattacccttgttcaattc

SEQ ID NO: 418 - DNA, 890 bp, Glycine max
  misc_feature (877)..(877): n is a, c, g, or t
  misc_feature (880)..(880): n is a, c, g, or t
gttgtactcttatccattctatcccatatatgtaaggacctgcgtagcaaccgcgcgccgcactttccagcaatattgcacctttttgcccatagccatggctgaatcaattttaggtttcacccttttcaaatcacacactcttagttcatgtctacaaacaaaaaagtttcaagtgaaccattcttcaagattgccaaagcagcattcaaagtctacccttttcaacagaccgtggcaggtcttagagggcaagagcgaaaaaagaggatctttgtgcaaagtgaatggcttgccagattggccactgatggcaattatagtagagcaaatggaagggcagagagatttgatcactgagaaaacagtttcccatcttagtgatcaggcaataaaaaatgtttactcttggtacataatgttcaccgtttgggggtgcttattctttggtgccatgaaggatccatattacgactcagaaacatataggggagatggaggagatggaactggcaactggatttatgaaaagcaagatgctatggaagcagaagccagagaagctctgtggcgggaggagttgattgaggagatagaacaaaaggttgaagggttgagagaacttgaagaggctggcaagaagaactagtcaactgattcatacctttgcttccacccattaaccaagcgattctctgttattgtatataaaaagagtaatttcttatgcttcaaaatgcaatgctgaaccacagatagtactttgaactaatatatatggggtcgcaatataagtcaatgggtggattttaatcctattgttatttaaaaaaaaaaaaaaaaaaaaaaaaaaaaaaaaaaaaaaaaaaaaaaaaanaanaaaaaaaaaa

SEQ ID NO: 419 - DNA, 1073 bp, Glycine max
tcagctacgtaggccccccccactctcctctcagttctcacgcagagtactgcactgaacgaaccgtaggtaggttctgttctgacgtttaactcacttcttcttcttcttcttttgatctcttcgttcgcatcttgcggataaaagcagcgctgtaattttcgtttctctgctttgtgcttttttcatacgttgcgtttgggtgttaagttgttccgtttcagccatggtggagaacaatctcttcgaggatatatttagggtcgaaaaattaaaccccgatgacaaaaaattattcgataaagtcactcgcattgaagcaagaagtgaaaagtttgacatgtttatgcacctggacattaattccgagatatatccgttaaaggttggtcagaagtttgctcttgtgcttgtttcaacacttaatcctgatggaactccagacactggatattatacccagatcagtcgacaatcactggccaacaattttgaatatgtcatgtatgggaagctctacaggataacagagggttcagggcgtgaaaaagcggagatgaatatttcatttggtgggcttctgatgatgctgaagggagatacctctcattgcaacaagtttgagctggatcagaggttgtatcttctgataaggaaagtctgaaaattgtatgtaaaaaataaatatgaagatgtgaagccttgttgcagcaaaaagacagcagctatttctatcttcatgtttgagtacttaagctgtcgattttcttactaatgcgggtcttcagtaggacctgaagtttcaaaaccaaatatttggtgatttgatcaaagactctggttttctcacatctttttctttaccctcccttatatttattttccactccctctctatttactcatctctctctctctctcctacacctatttcgcatccctccatggggtgtgaaattattattgcttgattatactcattcccctggtgtgtatctttactattgtttggataatgtattctttacattacttataagaaaagctcatatatcaaaaaaaaaaaaaaaaaa

SEQ ID NO: 420 - DNA, 830 bp, Glycine max
cggctcgagtactccgccacgtaggccccccccccccaacgcatcagaaaaagaaaagccttcaatcatatagcattctaagaaatgaagagccctaccattttcattctctttctactttctgccttctacacctcactcctaccttcagccaccgctcaagtcgtggttgacatggaaggtaatgatcttcaaaatggtgggaaatattatgtgttgccagtaatagagtcatcatatggtggaataagagtagccgcaactggaaaagaaagatgccctctcactgttgtacaatctgccgatccgtatgataaggggattgcaacaattatttcaaccccatatcgagttcctgttatccgcgaaggctttcctttgaacattacgttcggtaattttgcagttatactgccttgtgtcccccttcgttctgagtggaccgtcgttaatggccaaccagaaggacccgcagttaaaattggttcgcccccaaatgcagaaaatggttggtttgaaattgagaaattgttaacttcgggctataagcttgtgttctgtacgcggcctgagcgtagctattgtcaggatattgggattcatgtcgatgatgaaaatcacgcgcgtttggtgttgacaaatgatgatccactagtggttgagtttctgaaatatgatcccttctggccccagaataatctagtgcttcctacaagtcaatgagagactatataaatgctttggttgtaataaattattgtcagactaaataaaataatcaaagcttatcccttcaaaaaaaaaaaaaaaaaaaaaaaaaaaaaaaaaaa

SEQ ID NO: 421 - DNA, 1385 bp, Glycine max
cggctcgaggacagtcacgcgtagcaacagaacaagagtggaagtattcttcactaaaaaaaaaaagagtcgaaaatgtcagacggaacattgcaggtactggacggaacgcacctgagaggcgtcgatctgtccttaggcgacgacggtccattcaccggagctaaaatactcgacattgcccattcccgcgcctcttcttccctcttcggtctctcattacccgattccctcaaagtctctgctctcacgcgcctccgcacacccgacaccgatgctttccgctccgcctattactccgccgacaaggcctccgagattcttcgagactacatctccgccatcgccgatgaactcaaagataatcctcttgttgtatcaatcttggatggaagtactctccggttgttatcagaggatgaggatgacttcgccatgttagcagaaaatctattcactgacttagatgccgaagacaaggggaaaatcagcaagagtgaaattcggaatgctcttgtccagatgggagttgagatgggcgttcctcctttctcagaatttcctcagctaaatgacttgttgaaaaaacatggggtggatggagaagaaaagttgggccaggcacagtttgcacagcttctgcagtctgtactgcaagatctagaagaggaactttctaaaaagaatgttgtttccatccagaatattcgaatcattaatggctctaagctaagacggctattggccaatgaacaggaattaaacaccgttgtgaagaaggcattgcaggaaaaacgggaagcaaaggatggactagggagcacagaaataataaggagcttccttgagagaaacgcaaaggaattgggtttaccgctagctcaagctgatgaagcagttgttcttctttataacgctgtttttgctgaaataacacaagaaaaagatggtcccgaattagataaagaagagctggcaaaacttgtgaagaatatcctcgagaaattcgcagatcagcttgaggttagtcctgtgtatcaggacttagcttgaggacgatgagtaaatcggacacatttcatgttatgtttgaaactttgcatcattacagagtatttggaattcgcaccccctctcacccaaacatcaacaatatgtatactgtataatgaattttacttatgtggattgtggaggtgccttaaatagcatgggacttgggtaattttgttttaaaattatgagatttttttttttttgccggggttagagttagaaatcatgtgtatttttcaactcacttgtcagatattaactctgcttatcttgtgtgattgttgttgactgaaaaaaaaaaaaaaaaaaaaaaaaaaaaattttggaaa

SEQ ID NO: 422 - DNA, 1348 bp, Glycine max
gggccccaagcacgagtggtggatccgtttaccgcagcaaacactcttctgagttctgagctagcgaggttgcaatggcgattatctccgatttcaacgaagaggagcagaaacccactcactcttcaccaccgcaaccccaatcctcttcctcttcctcttcctcttcgttcagtgctgcttttgaccggtcaaaccctatcgcttttctggagagagtcttccagttcgtctccgaacacagcgactttctggcgacggagagcgccgagaaggagatagcgttgctggtgcgcgccgccgggaagaagaagagggagtttctcaagtcggagagagaaaaggccgagaagaagaagagagaggacctcaaggcctcggaggagagggaaaaatccgacaagaggttgaaggaagagaaggaacccaaagccgaagacaccagcaaagacgaaagcacctccaaagttccaaacaaaggtaatggcttagatttagagaaatactcttggactcaatcacttcaagaggttaatgttaatgttccggtgccaaatggaaccaaatcaagatttgttactgttgagataaagaagaaccatctaaaagttggactcaaaggccagcctccaattattgagggggagttttataagtctgtcaagcctgatgattgctattggagtatagaggatcagaatgcaatttctattcttttgaccaagcatgatcaaatggaatggtggaaatgtctagtgaaaggtgatcctgagattgatacccaaaaggttgaacctgaaaacagcaaacttggtgacctggatcctgagactcgacagactgttgaaaaaatgatgtttgaccagaggcagaagtctatgggcctccctaccagtgaagagctccagaagcaggaaatgttgaagaaatttatgtctgagcatccggagatggacttttctagggctaaaatatcataaatgggtgcattactcttggcaaacttttttgggtctgatcttattgcatgcaggcaggtccagctattatactaatactggtgctacctttaatcgcagtttattatcgtgttatttctttttgggttttgaacacaatgaactttgttcatagtagtttttttattttgatatagtcagatctattttggaaatgatctttattgcatacaggctactggtggtacctttggttgctgtttatcttgttatctctttttggttgtgaatgcagtgaaactttgttcataatagcttatattttgaatggagaatttacggctagatttattttcaacgactagaattggttttgaaccatttgatat

SEQ ID NO: 423 - DNA, 1382 bp, Glycine max
tcagctacgtaggccccccccccagactttagtgtaaatattgtttcaagaaaaagaataagagtgaagagtcgatccagttatcacttaccacagcaaacactctagagttctaagcaatggcgattatctccgatttcaacgaagaggagccgaaacccgctcactcttcaccaccgcaaccccaatcctcttcttcttcgtcttcgttcagtgctacttttgaccggtcaaatcccatcgctttcctggagagagtcttcgaattcgtctccgaacagagcgactttctggcgacgcagagcgccgagaaggagatagtgtcgctggtgcacgccgccgggaagaagaagagagagcttctcaaggcggagagagaaaatgccgataagaagaagagagaggacctcaaggtcacggaggagagacaaaaggtggagaagagattgaatgaagagaaggaactcaaagccgaagacaccaacaaaaacgaaagcgcctccagagttccaaacaaaggtaatggcttggatctggagaaatactcttggactcagtcgcttcaagaggttaatgtgaatgttccggtgccaaatggaaccaaatcgagatttgttaccgttgagataaagaagaaccatctaaaagttggactcaaaggccagcctccaattattgagggggagtttcataagtctgtcaagcctgatgattgctattggagtatagaggatcagaattcaatttctattcttttgaccaagcatgatcaaatggaatggtggaaatgtctagtgaaaggtgatcctgaaattgatacccaaaaggttgaacctgaaaacagcaaacttggtgacctggatcctgagactcgacagactgttgaaaaaatgatgtttgaccagaggcagaagtctatgggcctccctaccagtgaagagctccagaagcaggaaatgttgaagaaatttatgtctgagcatccggagatggacttttcaagggctaaaatatcataaatggtgcattactattgacatccttttttgggtctgaccttattgcttgcaggctggtccagctattattatactatagtgtttacctttggtctcagtttagtatggtgttatctctttttgggttgtgaaacgcaatgaactttgttcatagtagtttcttttttggatagagaatttgcagtcagatatatattggaaacgacctttattgcatacaggttggtccagctcttcttatacttactggtgttacctttgatcgcggtttatcttgttaacactttgattgtgaacacggtgaaactgtgttcataatagtttatattttggattgggaatttgcggccaaaaaaaaaaaaa

SEQ ID NO: 424 - DNA, 1162 bp, Glycine max
tcgagtcagcgcggaggcccccccataaaaagcataagaatctgcaacaaatagtcatggctgcgcttggggaacaatcagaagaacaagccatggctgcccaacctaaacctcagaaccgacgacccatttctaacatcgtcatcgtcgttgctatgcagacggaggcacttcccattgtcaacagatttcagctcaccgaggaccctcactctccgtttccgcgaggggttccttgggttcgttatcaggggacatacaaagatcttaatataagcttgatttggcctggaaaagatccaactttgggggttgatagtgtaggcacgatatcatctgctcttgtaacgtatgctgctattcaagcattacaaccagacttgatcatcaatgcaggcactgctggtggcttcaaggccaaaggagctagtattggtgatgttttcattgtatcagattgtgcttttcatgacagaagaatacccatacctgtttttgatttgtatggagttggtgtacgtaaaacctttgaagcacccaaccttgtaaaggagcttaatctaaaggtgggtaaattgtctactggtgactctttagatatgacacagcaggatgaatcgtcaatcattgcaaacgatgccacagttaaagatatggagggagcagctattgcttatgtttctgaccttttgaaagttcctgcaatgtttgtaaaagctgttactgatatcattgatggtgacaaaccaactgcagaagaattcctgcaaaatctggcagctgtaactgctgcacttgatctggcagttgaacaagttattaattttattaatggaaagtgtgtatctgaactttgacaactcaatttcaccttacgagttttttctgtatgcaatgttacacgatggggttccattgtacactactaccattattggttgggaatttgtgagatttaagcaaaaatacaaacttataaactgaagatattgcagccccatctcccatctcccttttgtactgttctggccttgcaggctgtataagttatctgacagattgtgcaatcattgtaaacatgtatgctgacatactttagtgaatcacataaagcaatatggttttgattgtttgtctctgaaaaaaaaaaaaaaaaaaaaaa

SEQ ID NO: 425 - DNA, 994 bp, Glycine max
gcccccccccaagtgctgtaacagcacagagagagagagagagagataatagtagaaggtcggggatagtaaagagagaaatccgaatagaaaaagaagctagctagggtttcggcgcgaagaagaatggggaagaagaaggtggagataaagcgaatcgagaacaaaagcactcggcagataacattctccaagaggcgcaatggattgatgaagaaagctcgcgagctatccattctctgcgatgcgaaggtggcgctgctcatcttctccagcaccggaaagctctacgagctctgcaacggtgacagtttggccgaggtcgtgcagcaatattgggatcatttaggagcgagcggtactgacacaaagtcgcaggaactatgctttgaaattgcagatatctggtctggttcagcgttttctcaaatgatcaaaaggcacttcggtgtttctgaacttgagcatctgagtgtgtctgaccttatggaactagagaaactgactcatgctgctctttcgcgaatcagatcagcaaagatgcgattgatgatggaatctgtagtgaatcttaagaaaaagattgaggcactagaaaaaactaatgacgtcaataacgtggtgacacggtctattgactgtgatcaaacagatggggtgacgcataatctgttcccaggtctctaatggagctgaaagccactactctgggtctaacttgcacactcaacccttgaatttccaagtgtgtgtttaatacatgcatagggaaccatgccatggtctagctacttgccttttattatttctattttggttgaaacatggagcatcttgaagataatgtagcctggggaactttgcttcagctactactttgtgcctaattaatttataataagtgacattagatgccaaaaaaaaaaaaaaaactcataatgctaaaatttgggaacggttcacggtgaaagtaatggaaacaatcatgtggagg

SEQ ID NO: 426 - DNA, 898 bp, Glycine max
atcaccaaatcaacaacacaccggacaattttccaaactacacatactattaattatttccaattccactattattcccctaatcacaaaatatgccatccatatctttggtcaattcctcaccaatattattccatccattttcaccctccaagccatgttctaaaggcaagaaaacgaattcgtttgctccaattaagggttccatgagaggatcagcggatcagaacttcagtggaaggttggtggatgagggcatgatcatactgaggaagaggatccatgagatgaacatgatagagaggaactatgagccaccatcggattggatggattgggagaagcggtattataccaagtatgactccatcatatgtgaagcagtgggagttttgcagacccagttgatgaatactaggccaagtttggcccttggagccatggctttggttgcaatcagtgttccaacttcttctgctgtgcttttctttcatttgtttgagttggccaaggctgttttggctgcggctcatcttggctagctagattacaatattaattgttcattaaatgctttgaattggtggtttggtattttgaaaaaccattcaattcatttaaattatactcctacatatatagagcttcatgtttagaattttactccatctgatctgctgttaggtttgaggatgggtatagataagtttatccaatagtaatgcagttgtttcgtcatttgtgacctatacaactcgtgtaattaaatgctatgatttgaccctctttacattgagttgcttttacttgaagaataatgttgtcatcggattcccaaataatgcagttagaaattaaaaattcttgaaaaaggatatgatgaaaaaaaaaaaaaaaa

SEQ ID NO: 427 - DNA, 1961 bp, Glycine max
tcgagtcagctacgtcgcccccctcagctacgtaggccgaaaaaacctgaagtatactactagggaagcatcagattttcatgctcctcctttcattaaattaaagaacagtttctaggtatggaaactctttcatatgggtcagcaccatgctgccaagttgtgaactcaaagtggaaattagttgaaaagagtttgagttcacgtcaatcaagagtttcctctataggaaaacttggagtttattacacaggtactatttctgcatgtgcgcctgtgagattttatgagatgggtactagggtgcagctaagaagctcaaaaagattcaatttcaaggtttgtagtggaagttatgatgatggttatgtgattggtgaagaggaagcaagggatatttcagggttagaggagcctgtaacaaccaaggttctgattccaggtctgcctgatgattcaaaaggtgaatctggtgctccaataagtagttgtttttggggatggaaacctaaactcaatgtgcactatgagaaggccgggtgcgaaaacgtcaatgatttgcctcgtgttctctttttaccaggttttggtgttggctctttccattatgagaagcaacttaaggatttggggcgtgactacagagtgtgggctctggattttctaggccaagggatgtctttgccttttgaagatcctgcccctttgtctaatgaagaggctgcatcaaatggaagtgtttcttcatggggttttggagatgaaactaaaccgtgggcgactaagcttgtttactcggttgatttatggcaagatcaagttcgttgcttcatagaagaggtcattggtgaaccagtctatcttgtgggcaactcactaggaggattggttgcattgtattttgcggcaaacaaccctcatttagtgaaaggtgtcgcattgcttaatgcaacacctttttgggggtttctgccaaatcccataaaaagtccaagactagcgaaaatatttccatgggccggaacattccccctaccttcaagtataaagagacttacagagttattgtgggagaaaattagtgatcctaaaagtattgctgaggtacttagtcaggtttatgcagatcattcaacaaacgtagataacgttttttcacgcatagttgaaaccacaaggcatccagctgctgcagcgtcatttgcttcaatcatgtttgctcctcaaggagaactatcctttaatgaaacattatccagatgtcgagcaaacaatgtgccaatctgcctcatgtatggaaaagaagatccctgggtggggccaatttggggtctccaggttaaaaggcaggtgcctgaagctccatattatcaaatcagccctgctggtcactgccctcatgatgaagttcctgagatcataaatttcttacttcgcgggtggatcagaaacctagagtctcagggttctgtgtcattaccattgcttgaagatctagacagtatgaagcactctattattgacagggaattagaatttcccagagaaggttcaaaaaagtcagtgatggtcagatatttcgcttccaatttctcactttgggacaggataagatctttcatcagatctcaatccaagttcagtaatattctggcagccaaacctcaatgacagggtgaatcatatggcatcttcaaatataaatcaactttgtatactgtcttctctttcatagtttgtataaagagaaaacaaacacaaatgctttagaatcataggtaaaatcttgtatatataatatacctataattactcaccaagaaagcatgctagtgaacaactattactcaggagatgttttatgttatacatacgagcattttttttaaaaaaaaaaaaaaaaaaaaaaaaaaaaaaaaaaaaaaaaaaaaaaaaaaaaaaaaaaaaaaaaaaaaaaaaaa

SEQ ID NO: 428 - DNA, 1951 bp, Glycine max
tcagctacgtaggccccccccccatctgtgtctttgtctttgtctctctctctctgtgtgggaagaacgaagaagaagaagcatcacagaaccgaacccattcagaagcaaatccgaaaacccctcacttaatattactggtattcagctgttcatgacaaaagcctgaaccaatcatgtcagaaggtgcagaaattgatgagcgtgtggaccttgatgaggaaaattatatggaagagatggatgatgatgttgaagaacaaatagacgatgatggagtggatggagttgaagaagaaaatgctgaaggtagttttgaagaagatgaatatgaggactcagctgctgaggctggtgggaaagaccagttgcctgaagcagaaaaaagtgacattgctactgaatttggggatgatgagcaaaaattgtctttcattgatgaagatgagaaagagaagcatgatgaacttcttgcccttccacctcatggttctgaagtctttattggtggacttcctcgggatgtatgtgaagatgatttaagggaattgtgcgagcccatgggtgatattcttgaggtgcgattaatgaaagacagggacactggagaaaacaagggttatgcctttgtggcttttaaaacaaaagaggtagcgcaaaaggctattgaggagatacacagcaaggaatttaaggggaaaactttgaggtgttcactttctgaaaccaaacacagattattcattggtaatgttccaaaaacttggactgaagatgattttaggaaagttgttgaaggtgttggtcctggggttgaaaccattgagctcataaaggaccctcaaaatcctagtaggaaccgtgggtttgcgtttgttttgtattacaataatgcatgtgctgattattcgcggcaaaagatggcaagttctagctttaagctggatggcaacaccccgactgtcacatgggcagatccaaagaactcacctgaccattctgcttcttcacaggttaaagctctatacgtcaaaaacattcccgagaatgttaccactgaacaattgaaggaactattccgccgtcatggagaagtaacaaaagtggtcatgccacctggcaaagctggagggaaacgtgattttggtttcattcattatgcagagaggtcaagtgcattgaaagctgtaaaagatacagagaaatatgaaattgatggccaaatgcttgaagttgttcttgctaagcctcaagctgataaaaaacctgatggaggttatgcctacaatcctggacttcatccaaaccatattccacatcctgcatatggtaacttttctggaaatccttatggctctttaggggctggatatggtgttgctgctggttatcaacagccaatgatatatggtaggggtccaatgccagcaggaatgcaaatggttccaatggtgttaccagacggtcgaattggctatgttcttcaacaacctggtgtacaagtgccagcaacccgaccccgcagaattgatcggagcaatggtccaagtgggcagccagggcgaggaggaggaggaggtagtggcaatgatgaaggcaatcgtagtagaaggtatcgaccctattagggatagaagactgataaatgcgatgtggcttatgccccccaactgtcttttggtggtgagggggctttgggaacaagggacgtgtaattcgtttgctatatatcgacagaaaatccctcttcacaatccctatcccataaaagggggaaaaaaaaaaaaaaaaagagaaagttaggtttaggaccagtgatattctgcttaatgttggtgtctactgctgttagatgagtcacagcagagtaattgccatattttctgcttgtaatgcttcttggatttttttattgacaaccagtagaaaaatgtgttaatttgggttcagc

SEQ ID NO: 429 - DNA, 1064 bp, Glycine max
attcggctcgagctcaccttcaccttcaactgccaactgcaaatatctatcttctttcgggttcacttgaccgagagtaagagactaatccctcgagatactgatactgaaacctatcgttcttcacatcataaccatgcgttccagcaacggtgcatcaagcagcagagcctccaatgctaacactgggcgccaccctgtgtaccgtggagtgaggcgtaggagtagtggcaaatgggtttctgaaatccgtgaacccaaaaaacctaacaggatttggttagggacatttgccacccctgaaatggctgctattgcctatgacgtggcagcgcttgctcttaagggtaaggatgctgaactcaacttccctaactcggcttcctccctccccgtccccacatcatctgctgctcgcgacattcagatggctgcggctagcgccgcagccgctgtcggagctgcgaatgatgcacttgaaggaagccgaggagggaatgcttcggtttcattgacggaagagttttcagggggaaatttgaaccactttgtggatgaggacttgatctttgacatgccgaatattctggtcaatatggctgaaggaatgctactgagtcctcctcgttttgataattttgctgctaccgactatgaatacatggatgaagatcctaacctctgggggttccctaattactagttactacccatgggatgataaaaaaaaactttttatattactaatgcaaaaatcttaataaggaaaggtaagtaagttgtagtaataaattatgggagaactcttacatccagactttgcttagacaccaggaaaggtatagtgtgtgtgtggaaagtgcatctttcttttcatttggttttttttcaccttgtgtacagtactaccttctagctatagtgaggtttgctgctgtatgttgcacctcaaatatgtatgtaatgtctatataagttgttaattttaaataatctttttttggttgtttaaaaaaaaaaaaaaaaaaaaaaaaaaaaaaaaaacaaaaaaaaaaaaaaaaggg

SEQ ID NO: 430 - DNA, 1332 bp, Glycine max
tgcggctgcgagaagacgacagaagggggtcagctacgtaggatgccattgtactattgtagtgttccagagtgatgatggaagtgatgatctgtgagaatttccggtattcaccactctccatcttatcttcttctccttcacctcgttgccatctctctgttccatcttcttctttgaggattaaaccttcttcttcatcttcatcatcatcatctgtgtcttgttctctcatggagaatcaggagacccaacgcagcaaattcatggactttccgttcgtttcatctgcccagaagaacctcatggttgatctcgtttcaacacttgagaatcgctttcactctcagcttcttccttgcacactcccctctgatgttcagtattaccaaagccaaactgccactgcccaagcttcccttcatattagaccagctcataatgactcccagatagattttgtgttgggaagctgggtgcattcagagctaccaacaggagggtccttagatataacaagtctttcagcctatctcaacagctcaactgatgcgccaaattttgtgtttgaaatgatccgcagtagtccaacaatgctagttctcattcttgatttgcctcccaggaaagaccttgtgctttggcctgatgacctcaaaactttctatgaggacactcaactagacaaacatcggcaagctctggacagagttccagaggttcaaccatacttctcttcttccctttacatccgcactgtttcctctcctacagccataatggttcgcattctgacggaaaatggcggagtggaacgcatggaggagatcatcagggaccatttggaccccatttcaaagcaagtgttggggatctggttggatcattgtgcttgtgccaagcgacaagttggagaggcagaaagagcttatcttaagaaaagggatggtctcattagaaacaagaccattgagattgatcttggttcaagctttcccagattgtttggtccagaagtagcaaaccgggtactggatgctatcaaggagtattttacagtctgagatgcaaatttatttggaattgttggatattctatgtattacatacacgtacctaatttgctgtgcaatctaatgaggcctcagtatttgctgaatctctctagtcaagtatcaaatctgtaaatgattatgatcgtttctacttccccccccgttcttgtctgtgcatcaataatcagttctctgcttgtattatatatatagctactagggatgattcatatgacaatagcacttatctaattgcatctggttcagtttcaagctc

SEQ ID NO: 431 - DNA, 1236 bp, Glycine max
  misc_feature (777)..(777): n is a, c, g, or t
ccaccctccaccgctgcgagaagacgacagaaggggggggagaaggacttgacattgttgtagtgatgatctgtgaacatttccggtattcaccactctccttcttatctttttcttctcctccttcaactcgttaccatctctatataccttcttcttcttcttcttccttttctgtgtcttgctctctcatggagaatcaggagacccacaacaaccaaggccgcagcaaattcatggactttccgttcgtttcatctgcccagaagaatcttatggttgatctcgtctcaacgcttgagaatcgctttcacactcagcttcttccttgcacactcccctctgatgttcagtattatcaaagccaaactgccactgcccaagcttctcttcatattagagcagctcataatgactccccgatagattttgtgttgggaagctgggtgcattcagagctaccaacaggagggtccttagatataacaagtctttcagcctatcttaacagctcaactgatgcgccaaattttgtgtttgaaatgatccgcagtagtccaacaatgctacttctcattcttgatttgcctccccggaaagaccttgtgctttggccagatgacctcaaaactttctatgaggacactcaactagacaaacataggcagactctggagagagttccagaggttcaaccatacttttcttcttccctttacatccgcactgtttcctctcctacagccataatggtttcgcgttctgacggaaaatggncggagtggaacgcatggagggagatcatcagggaccatttggaccccatttccaagcaagtgttggggatctggttggatcattgtgcttgtgccaagcgagaagtgggagaggcagaaagagcttatctgaaaaaaagggatggtctcattagaaacaagaccattgagattgatcttggttcaagctttcccagattgtttggtccagaagtagcaaaccgggtactggaagctatcaaggagtactttactgtctgaaatgcaaatttatttggaattgttggatattctatgtattacatacatgtacctaatttgctgtgtaatctaatgaggcctcagtattttctgaatctctctagtcaagtatcaaatctgtaaatgattatgatcgtttctacttccaaaaaaaaaaaaaaaaaaaaaaaaaaaaaaagcggccgctctagaggatcca

SEQ ID NO: 432 - DNA, 1131 bp, Glycine max
tcactacctcggcccccttagcatcttctttcaactgctgactaacgttcattccgctcttcgctttctttcacatccaatcaacgaaaaatgctggctgttttcgacaaatcggtggcaaagagcccagagggtcttcagagccctcactcaaattccgtctcagccctaaaagacggttttctcgcagagcacttctcttccgttcaccctggttccgtcaccgttaaccttggctcttccggtctcttggcctattctcttcacaaacagaaccccctcctcccaaggctgtttgcagtcgtggatgacattttctgtttgtttcaaggtcatcttgagaatgttgctaaccttaagcaacaatatggattgaacaaaacagcaactgaggtgatcattatcattgaagcatacaggactctaagagatcgtggtccctatcctgctgctcaggttgtgagagacttccaaggcaaatttgcatttattctgtatgacagtggttctaagactgcatttgttgctgcggatgctgatgggagtgttccctttgtctggggaactgatgctgatggaaatctcgttttctcagatgagacagagatcgtaactaagagctgtgggaaatcttacgcaccattccccaaaggatttttcttttcaacatccggaggtttgagcagttttgagcatccactgaatgaggtgaagcctgtaccaagggttgacagttccggacaggtgtgtggtgcaactttcaaggtggatgctgaggctaagaaggaagcaactggcatgccaagggttgggagtgctgctaactggtcaaataatatctgattgcgactctattctgtttgaattatgggcttttattttatcatagctgcactcggctgcaagttctggacctgttcctatattatgataactttgaggctttgcttatcatattaatttatttactgaatctgacatgatttcatgaagttatacaaagttgctttgaagcaaatggttaagctcatactctcttcgcacttatcttgtaataatataaacttgcggacaggttcatccaaatgattatttaccgcctttgttttatcgcgttttaaaaaaaaaaaa

SEQ ID NO: 433 - DNA, 1039 bp, Glycine max
tcccacgcgtccgtacggctgcgagaagacgacagaagggggagaaatgaaagtgaagagaggaagcagagtgtgtgactgttccccaatttcctgtgcttagagtgaagaagcatttagaaaaagcaagacacgatgccttcggctcaagatccattctacgttgtcaagcaagaaattcaagaatctattgataagctaaaatccacttttcaccaatgggaaaacactgctgatgttggcgagcgatccagtctatcaaaggaagttcttgctagttgtgaaagcattgcatggcaggtggatgaattggacaaagcaatttctgtggctgctagagatccttcttggtatggcattgatgaagtggaggttgaaaaccggaggaagtggaccagtgatgctcgcacccaggtgagcacagcaaagagaagcagtgcaagctggaaagggcttaaacaatgctagtctaaatgggatgcacaaggaattaatgaggcttcctagttctcatcaaactacatctaaccaatatgctgcccaggataatgatgatttcatagagtcagaatcggacaggcagatgcttcttattaagagacaagatgaggagttggatgagcttagtttaagtgtacaaagaattggaggtgttggacttactatacatgaagagctccttgccgcaaggaaaagattattgatgaacttggcaatggagatgggacgggtacatctaatcgccttacattttggccagaaaaaagtggcaatggtcatgaagaaggctagcgcaaagggccagatcatgatgatactgggtttgttggcgatgtttattttcctcttcatcttggtattcttcacctagtcagtgagaccgatgaaccctggcaatgctttgtttgtacatgaaaaaagatttaaagcttctgtgaagatacaagattaatgagacattaaatatgcctaaaactcaaatatggaagcgtctttgatttgtggatggaaaaaaaaaaagacggccgaaagggcggcc

SEQ ID NO: 434 - DNA, 1730 bp, Glycine max
tcagctacgtaggcccccccccccccgatttttggtttctctccagatcttggactttacagatcatgtttggacagagtgcttctctcaatacttgggaagatggatgcatcttgacccatgtgaaggaatctatgacaagccattattatatgaaaaagggtgggggaaaaaactaaattatgtaatagccatagcaaaagatggagtttatgatgtcaccaaacgatacacaaggaagtggcatgaggtcctatctcgacgtactatccttacagagccttctttgtcaactttactctctaatataacaaaagaaagtcgaagaggctttgcatctcaactactttcaattattgaatcccatgatatggaggaaaacaaagaacttgagaggagtttacatgctgaagatgacaagtcactctcattacctggaagaagaagtgggaatgaggaatggcgcaaatccagattagaaatgggttctgataagctaagttcttctgcttgcccagttcgcttgtgtgtagatgagcatgtgacaaggatttataatgcattccaacctatcctttatcaatttgttggggaagaattaacaaagtcagaagctgttgaagtactcaggactactaaaggaattcttttggatcttagcaagtccccctataaaacaagaaggacctccattgattcagttctagagaacccaaaatttcagaaactatttccatcttttgatgacttactttgtgctctttttctggggaaaaagttgaatacagatgggagagttgaaatttgtttggttggtgaccctgtagtaacttctttagcattgcctgttgcgttagatgctctggatgacatgatttacaatcttaacaagtgtgaaaactatgggaaagatatgtttctgttgccacttttaaagttaaatagaatacattctggttcagcaattgcaagttcagaggagttgccttttgggattataacatcagcatttgatggcactcgaatgtctaaatgggaagaaccaaatggaggaagaggttgttgggtcgtgtatagaacatttgataacaagatgtttgagcttgcagcatatgagttgatgtcagccaatgatgcaccagaaagggatccaatggactggattcttgaagggagtagtgatgatgggatcagttggcaggttttggacaagcaaacctctcagttctttgaagaccgtttccagcgcagaacatacacaatcagttctgcaagttttccatgtaatgttttcaggtttaggtttctggcagtcagagatattcagtctaattcccggctgcaaatcggtagcattgacctctatgcaaaatctatatgaaatccggagactttaattacctcccgactaaattacgaaatagttaaggtctccttcttccgatgatccgaaaaattaagataaaagaaaaaaaaatctatatgaaatataggtaaattgtgagcatagttgagcaaattcttttgtctatgtcttattttataagaaaaagaaaattaagattaaatttgtctatgccttaaaaggaagcccatcaccgtggatgaaatgaggaggcaaaactaaaacttcctggcttgagattactgcccatacataacagtaatattatttatactggtcaatgttttattaaaaaagctatatatatgtgaccgcattgattttt

SEQ ID NO: 435 - DNA, 1645 bp, Glycine max
tccggcagctacgtaggccccccccccccctgacgaatttttgtatctttttcaaaattgaggtcctatctcgacgtactatcattacagagccttctttgtcatctttactctctaatataacaaaagaaagtcgaagaggttttgcatctcaactactttcaattattgaagtccgtgatatggaggaaaacaaagaacttgagaggagtttacatgctgaagatgacgagtcactctcattacctggaagaagaagtgggaatgaggaatggcgcaaatctagattagaaatgggttctgataagctaagttcctctgcttgcccagttcgtttgtgcgtagatgagcacgtgacaaggatttataatgcattccgtcctatcctttatcaatttgttggggaagaattaacaaagtcggaagctgttgaagtactcaggattactaaaggaattcttttggatcttagcaagtccccctataaaacaagaaggacctccattgactcagttctagataacccaaaatttcagaaactattgccatcttttgatgacttacttggtgctctttcactggagaaaaaggtgaatacagatgggagagttgaattttgtttggttggtgaccctgtagtaacttctttagcattgcctgttgcgttagatgctctggatgacatgatttacattcttaacaagtgtgaaaactatgggaaagatatgtttctgttgccatttttaaaattaaatagaatacattctggttcagccattgcaagttcagaggagttgccttttgggattataacatcagcatttgatggcacccgaatttctaaatgggaagaaccaaacggagcaagaggttgttgggtcgtgtatagaacatttggtaacgagatgtttgagcttgtagcatatgagttgatgtcagccaatgatgcaccagaaagggatccaatggactggattcttgaagggagcagtgatgacgggatcagctggcaagttttggacaagcaaacctctcagttctttgaagaccgtttccagcgtagaacatacacaatcagttctgcaaattttccatgtaatgttttcagatttaggtttctggcagtcagagatattcagtctaattcccggctgcaaattggtagcattgacctctatgcgaaatctataggtaaattgcgagcataattgagcaaattcctgtctatatgtcttattaatataagaataagaaaaggaagattaaatttgtctataccgtaaaaggaagcctatcacggtggatgaaatgaggaggcaaaccaaaacttccttggcttgggtgtatagttaaacgccatacataacagtaatattatttataccggtcaatgttttattaaaaaaaaagctgtgaccgctttgattttttaaattattttattggcatgccttataaggctagaggttttacttagttttttggcagtctatggaaacttgtgggaatgattaagttcaattggtctgaaatgtcgtttttaagcagttggattttgcggggtgggtagtgtgttctatggatttatttttcctgcacgtttaaacgtttatattagaacgaatttgattgatttttgttgatt

SEQ ID NO: 436 - DNA, 1879 bp, Glycine max
cggtccggaaattcccgggttcgcacccacgcccgtccgtacggctgctgaaaaaacgacagaaggggggtgtaaagtatcttccatttgaaaacagcattgtgttgttacctacccccattcattcactcaccaacaccaaacaaacaagtccctgctggtggcggacactccgagggcctctcccctcttcctctccacagtataaaacccaaaactcacacaacccgacccatcacgcaagacaaaagcgcgctcttgtgttccgtttccgtttgtttctgttttctttctctttcagatctcgaaaaatgcagagcgcggctttcactttctctccctctctccctctccgcaacccttcccctaactattggaggagaccttctctctccctccgtctctcggccaaacacggcaacagcaacagcgatgacgtgaactccaatggcgtttcttcaactttcttcactcgccgatcttggactcttcctccttcctcttccttcaagttcaggcctctccctccccgcgccgccgaaagcgccgttcccgaaagtgcgcccgtcgaaaacccgctcttcaaaactctcgaactcggcgccttgtttggcctctggtacctcttcaacatctacttcaacatctacaacaaacaggtgttgaaggcgtttcattacccggtaactgtgactgttgttcagtttgctgttgggactgtgctcgtggcatttatgtggggtttgaatctctataagaggcctaaactcagtggtgctatgcttggagcgattttgccgctggctgcagtgcatactttggggaaccttttcactaatatgagtcttggaaaggtcgcgcggccgctctcccccactatcaaagccatggagcctttcttttcagtggtcctttctgccatgttccttggagagtttcctacaccgtgggtggttggttctcttgtgcctattgttggtggagttgcactggcatctgttacagaggcctctttcaattgggctggattttggagtgcaatggcatccaatgtgacaaatcaatctcgtaatgttcttagcaaaaaggccatggttaataaagaggattctatggacaacattactctcttctctatcataacagtaatgtccttcttcttgttagcacctgtggctatcttcatggagggtgtcaaatttactcctgcttacttgcaatctgctggggtgaatgttagacaactttacatcagatctcttcttgctgcactctgtttccatgcgtatcaacaagtttcttatatgatattgcaaagggtatcacctgttacccactccgtgggcaactgtgtgaagcgggttgtggtcattgtgagctctgtcatcttcttccaaacacctgtctcacctgtgaatgcttttggaactgctatagctcttgctggcgttttcctctattcaagggtgaagcgtattaaggcaaagccaaaaacagcttaattttcaattgtaaaattttgttagttgcatcacggaagccaaatagttgcaatctgcaattctgaatttctttgtaggcgagatagggaatttgaagattatctttattgatccttacattttcctttttttttttcttctttttaagtttccttgtggatttcattatttatttctgagttctaaaacttttaaagagtttcctagattatcaattatagaaaaccaataggatcttgaaatctatgattttcacaaataataaataaataatgtgtatctttctccacatggaagcttctctccgatttattttgattttcttgaagaggagaaactacgattcacattttttattattctttctacttttctat

SEQ ID NO: 437 - DNA, 2171 bp, Glycine max
ccacgcgtccgattagatctcaaattattatttctactgaaaactacagccatcgatcgaatttgctgcaattaacataatagcagaatcccttttccaacctttcttctcttcagatcggatcagatcagaatcccaccgccatggatttcatgaaggtcttcgatcaaaccgttcgagaaataaagagagaggtgaatctgaaggtgctcaaggttccggaaatcgaacagaaggtgctggatgcaactgataatgaaccttggggtcctcatggtactgtgctggcagagatttcacaggctaccaaaaaatttactgaatgccaaatgatcatgaatgtcctttggacaagactgggtgaaactggaaaagattggcgttatgtatacaaggcattagctgttatagaatatttggtagcacatggatctgaacgtgcggttgatgacattatagaacatacttttcagatatctgcactttctagttttgaatatgtcgaacctagtggtaaggatgtgggactcaatgtaaggaagaaggctgaaaacattgtgtcgcttttgaatgataaagataagatacatgaagtcagaaataaagctgctgcaaaccgtgacaagtccattggagtttgctccggggggcccccccccaagtctgggtcagcctcctcttatggtagtggcagcagctttcaaagcagtggtaaatatggaggctttggatctagagatggtgacaggtttaatgatagctatagagacaaaggatcctatgaagaagaaaaagattaccaaggaaaatcacaccatgccaccgctagtgacaatcaagagaactccttcaagaagggttctgctcgctctgccagtaaaagtcaggagaacaagtcatctggattatcaaagtcatcgactaatgcaaataattatggttcagtttcttctcaaagttcaagtgtacctgcaaacagtactgaggatgacatggatgattttgatccaagaggaacttctaccaaaacttcagctggaaactctaaccaggttgatctctttggacaagatttaatcggtgacctcatggatgctccaacatctgttcctgtagaaaagccagcaactagtaatgtaccagaggttgatctttttgcagatgcagcatttgtatcagcagaacctcatgtggacaaaggagccatttctcaaccacaggctgaggtggatctattttcttcacaaccagccattcctacagttacaccaacagttgatttgttttccattcctgaaccggcagtgcagccagacaccaagtcagagaagtctgttcctatgaataacagcactattgatccctttgctgctgttcctcttaataattttgatggatctgatatttttggtgactttacttctcaatctgattctgtgtcttcccagccctccaataatgttgtcagtgatggcaagcatgataatgtgactggtaaatctttagcagactctaaagtttcccctaaaaaggatgcttttcaggtgaagtctggcgtctgggctgattcactaagccgtggactgattgatctcaatataactgctcctaaaaaagtatcccttgcggacgttggaattgtgggtggattgagtgatggatccgatgaaagggagaaaggccctccaccttcattttacatggggagagctatgggttcaggatctggtcttggaatgggtaggtctggattcactccttcacagccagcagctggagacgactttttctcaagccttagcaaccaacaatatcaatttggtgggttccaaaagtaaaattctcagattttatactcttcccatcacattttcactcattctttatgtcggcattaccaagcttgtgaagctttttggcatggctttttgttcatatatatttctcccaatattgtgattatattattttaaattttaagctactatcgattgcaacatcctgcggactaaagtgccaaaatgtatggtggcactactttgagttgtaaaatatacgtgtcaacaattaaggttgctgttgacatgtttgtcgtcattagagatcaacctgtcaaacctggcttttatttgccttgtttgttcccaaaaaaaaaactctcttgctttctc

SEQ ID NO: 438 - DNA, 1004 bp, Glycine max
ctcgagccgaatcggctcgagcggctcgagcggctcgagaactacagccatcgaattccctgcccctcgcgtccgagcagaaccccttttccaacctttctcctcttcagatcggatcagatcagattcccaccgccatggatttcatgaaggtcttcgatcaaaccgttcgagaaataaagagagaggtgaatctgaaggtgctcaagattccggaaatcgaacagaaggtgctggatgctactgataatgaaccttggggtcctcatggtactgtgctggcagagatttcacaggctaccaaaaaatttactgaatgtcaaatagtcatgaatgtcctttggacaagactgggtgaaactggaaaagattggcgctatgtatacaaggcattagctgtcatagaatatttggtagcacatggatctgaacgtgcagttgatgacattatagaacatacttttcagatctctgcactttctagttttgaatatgttgaacctagtgggaaggatgtgggactcaatgtaaggaagaaggctgaaaacattgtgtcacttttgaatgataaagataagatacatgaagtcagaaataaagctgctgcaaaccgtgacaagtacattggagtttcttctagtggaatcacatacaagtctgggtcagcctcctcttatggtagtggcagcagctttcaaagcagtggtaaatatggaggctttggatctagagatggtgacaggtttaatgatagctatagagacaaaggatcctatgaagaagaaaaagattaccaaggaaaatcacaccatgccaccgctagtgacaatcaagagaactccttcaagaagggttctgctcgctctgccagtaaaagtcaggagaacaagtcatctggattatcacagtcatcgactaatgcaaataattatggttcagtttcttctcaaagttcaagtgtacctgcaaacagtactgatgatgacatggatgattttgatccc

SEQ ID NO: 439 - DNA, 1805 bp, Glycine max
  misc_feature (1639)..(1639): n is a, c, g, or t
  misc_feature (1648)..(1648): n is a, c, g, or t
  misc_feature (1736)..(1736): n is a, c, g, or t
cggacgcgtgggcggacgcgtgggcggacgcgtgggtgcacgactgcggagtgctgttaatgtgctgactgaggcgaagaagagctctaagtgtgctgcagcgcaaattctagatgcaattggaaagttagaggccaatattaaccggaaccttgaaagggcagtcaaggagaatgatagggtttacctcatgagagttccttcaccaagttcattaccgcctcttccggcattttctatggttaagtccatggtgatgaatgagatgctagatgcaagcaaggagaatatgtttgctagtcttgttccagacaacagtgcaaaagccctctcccggtatactgaaatggtagatgacgttataagaacacaagctgaaaagttgcagcaagctagtgagttaacccgagttaggcttaaggaaatggagctgcccgaatccattcttgctttggaaggatctgctacgctgcccccccccctcaaagaagatgtggaggctgtgcagatcagtgggggccctgctggtttggaagcagagttgcagcaacttaaggacctaaggagggtgaatcaagagttgctggtccagactgaggaattgttgcagaaggaagcaagggaagattctcaatttagaagccaatttggcactaaatggaccaggcctcaatcaagcaccttgaccaagaacttgcaggataggctaaacaggtttgcaggtaacttgaagcaagctgctgagagtgatggtaggattgagcgttctgttagagaacattcagctctcatgtcgatccttgatgcccgtccgattgaatctgcacttccaagcttggcaaggccgattatgtcttttgatcaaaatgaagatgctattgtggggtctctcaagcaaagcttgaggcaactagaaactctaggagctcaaagggctggtcttgaagatatgcttaaagagatgaaaagaaaggatgatatattacccaagttgatgacatccaccggttcttatgatgatctcttcaagaaggagatagcaaaatatgaccatatttgtgaagaaatagctcaaaatatcgaggcacaagagcaattgttgctgcagatccaggctcaaaatgatgagttttctgttatctttaatctcgaagattacaaagcttcacgtgaaaaagcctacaaacagattgaagctgccatagcaaaatttagagaaataaaggacaacatcaatgaagggttaaaattctatgttacgctgcaggatgcaatcacaaatgtaaagcagcagagcaacgactttgtaatgacgcggaacatccagtgcagggaaatgattgaagatgttcaaagacaagtggctggtctgagtttccaggataacaaaaacacaggtggttttaacagcaactacccttcagtgggaagccaaaatcaaagatcccctacacaaacagatccggctcgtccccaagcaccttactatcagcagccagttgagcagccaccagttccctccctatggccatcatccccctcccccatatggtggtcctgcacaacatcatcagcctccaccttccatacacattcaccatcatcaactgcaccatacccaccccctcaggttcatcancagccaccnagcaacccatgagtatggccaaccagcatatccccggatgggcgtgttccgtactacaatgcacaagcccagcaccttggttcctgtnctccggcctccttaaaccttcccaattccaatacctcccgcctccccaaaggggctaactataaccaga

SEQ ID NO: 440 - DNA, 1270 bp, Glycine max
  misc_feature (985)..(986): n is a, c, g, or t
  misc_feature (990)..(991): n is a, c, g, or t
  misc_feature (997)..(997): n is a, c, g, or t
  misc_feature (1018)..(1018): n is a, c, g, or t
  misc_feature (1020)..(1020): n is a, c, g, or t
  misc_feature (1028)..(1028): n is a, c, g, or t
  misc_feature (1033)..(1033): n is a, c, g, or t
  misc_feature (1043)..(1043): n is a, c, g, or t
  misc_feature (1046)..(1047): n is a, c, g, or t
  misc_feature (1049)..(1049): n is a, c, g, or t
  misc_feature (1051)..(1051): n is a, c, g, or t
  misc_feature (1054)..(1054): n is a, c, g, or t
  misc_feature (1056)..(1056): n is a, c, g, or t
  misc_feature (1060)..(1062): n is a, c, g, or t
  misc_feature (1068)..(1068): n is a, c, g, or t
  misc_feature (1071)..(1071): n is a, c, g, or t
  misc_feature (1075)..(1076): n is a, c, g, or t
  misc_feature (1084)..(1084): n is a, c, g, or t
  misc_feature (1089)..(1089): n is a, c, g, or t
  misc_feature (1098)..(1099): n is a, c, g, or t
  misc_feature (1101)..(1103): n is a, c, g, or t
  misc_feature (1106)..(1108): n is a, c, g, or t
  misc_feature (1111)..(1111): n is a, c, g, or t
  misc_feature (1114)..(1114): n is a, c, g, or t
  misc_feature (1116)..(1116): n is a, c, g, or t
  misc_feature (1118)..(1118): n is a, c, g, or t
  misc_feature (1123)..(1123): n is a, c, g, or t
  misc_feature (1126)..(1126): n is a, c, g, or t
  misc_feature (1133)..(1133): n is a, c, g, or t
  misc_feature (1135)..(1137): n is a, c, g, or t
  misc_feature (1143)..(1144): n is a, c, g, or t
  misc_feature (1151)..(1152): n is a, c, g, or t
  misc_feature (1160)..(1161): n is a, c, g, or t
  misc_feature (1163)..(1163): n is a, c, g, or t
  misc_feature (1169)..(1169): n is a, c, g, or t
  misc_feature (1182)..(1182): n is a, c, g, or t
  misc_feature (1188)..(1192): n is a, c, g, or t
  misc_feature (1194)..(1194): n is a, c, g, or t
  misc_feature (1199)..(1199): n is a, c, g, or t
  misc_feature (1203)..(1203): n is a, c, g, or t
  misc_feature (1208)..(1210): n is a, c, g, or t
  misc_feature (1212)..(1213): n is a, c, g, or t
  misc_feature (1215)..(1217): n is a, c, g, or t
  misc_feature (1221)..(1221): n is a, c, g, or t
  misc_feature (1223)..(1223): n is a, c, g, or t
  misc_feature (1225)..(1226): n is a, c, g, or t
  misc_feature (1237)..(1237): n is a, c, g, or t
  misc_feature (1249)..(1249): n is a, c, g, or t
  misc_feature (1258)..(1258): n is a, c, g, or t
cggacgcatggtaagtgacacaagatcttcagacatttggagggcttatgagagcaacacgttatcaatggaattcaggattaactaggagaagctcatctaggaatggtggtggcaggattggaacgggaacatcagcatcgacagtctttaacaaatggacatgctagtgagggaatggatcccgaattatcaagtcatatgtcagccgaagctagtatcaagtccacactgcagttatttgtgaaactctctgcagatatcatactggattcttggagcgaaacacacagatctcatctcgtagcacaacttatcttcttagaccaactttgtgagatttcaccgtaccttccaagaagctcgctggaaacccacgttccgtatgccattctccgttcagtatacagccaatactatgcagatactcagtccactccattggcaatactgaacgcatcaccccgtcattcacctgccgtgttactcgcacacgcttctcctgtcttaaggcatcatcgtggtggagactcaccacagtattatgggcacgaatcaggatacttcaaaggatcgtcatcacataaccaggagcacctctatgatgatattggcagcttaaggagcatggacaacaagcaaagaaatgttcgtcgttccgggcctttggattacagtgccagccgtagtagggtaaagtctgttgaaggctcaacttctggaagcactggccccagtccacttcctaggtttgcagtgtctagatctggtccattagcgtacaagtagttgtttgatataatacccaacagaagctggtaagttattcaccttctgctagtgatcagttctctataatgggtaaatcatccaaggtttgcacaaattttagcaaatgtatatcgcactaagcgtccttttgtaatcgcctgaatagtttaaatcaatgccatattaagttcctactgttttagcgagaaaaatnnttannttttantattttcagtttttaaatatntntagaattngattnaatatgtatnttnnantnatntnatannntttttnatngatnngttttttntgtanaatgttctnntnnnctnnntgnatngntnttatnggnctatggnannntttatnnttttatnntattactnntntgtttntctttttttattntttatnnnnngntgatntgtnttttnnntnntnnnaatntntnntttatatattntttttttgatantatttcttnctttgtcttgag

SEQ ID NO: 441 - DNA, 649 bp, Glycine max
cttccaagggggacgtctttcccaggccttgcatcattttggaggcatgaagtggcagaagatctttcagggcatttggagggcttatgagagctacaggttatcaatggaattcagggttaactaggagaagctcatctaggaatggtggtggcagggggaggcgacgggtgcaagttgccccgtctcccctgacactggtggcaaccaatgaaactagcacccccctgatccagcagcttaacaatattgaagttggattggaggatagaagcctaacaggttggggcaagacaaccagaaggccccgccgacagaggtgcccggccggtaaccctccgttgatccagttaacctaatcaccataagaggcttaaaatttttagatgtgaatttatagaggtaagcagggcaggctttcgaattaatggaacgcatgatgttctcaggcatggggatttctcttgtaaatttcttcaacccgtatttgggtatatgcttgattgtcagtctttggggtggtggtaccagcttgtattattcttaaataatgttgcatgatttcttctcattatctctttatagaactgttgagacgcggggcggggcacgctgtggttcgcggccgcgttggccgcgccccgaccgt

SEQ ID NO: 442 - DNA, 1754 bp, Glycine max
  misc_feature (1645)..(1645): n is a, c, g, or t
  misc_feature (1649)..(1649): n is a, c, g, or t
  misc_feature (1652)..(1652): n is a, c, g, or t
  misc_feature (1657)..(1657): n is a, c, g, or t
  misc_feature (1663)..(1663): n is a, c, g, or t
  misc_feature (1665)..(1665): n is a, c, g, or t
  misc_feature (1674)..(1674): n is a, c, g, or t
  misc_feature (1694)..(1694): n is a, c, g, or t
  misc_feature (1710)..(1710): n is a, c, g, or t
  misc_feature (1718)..(1718): n is a, c, g, or t
  misc_feature (1720)..(1720): n is a, c, g, or t
  misc_feature (1729)..(1729): n is a, c, g, or t
  misc_feature (1735)..(1735): n is a, c, g, or t
  misc_feature (1738)..(1738): n is a, c, g, or t
  misc_feature (1745)..(1745): n is a, c, g, or t
ccaaaacaacaaccccctccccaattcccccccaatctaccacaccgctagggttttcacaagccccgccagatacaccttccccgtctccgacaaaggcacccacatcgtgcgcctccacttccaccccttcaccaccccaaatctcgatctgggtctcgcccaatttcacgtcttgctcaacgcccacgtcgctctcagcaacttcactcgcttgctaagcgacgccacaaaccctagcatcgtcgagtatctcatctgggtcgacgcggagaagctcgaaatcgtgtttgttccgaacaaagactccagattggcgttcgtcaacgccattgaggtgatttccgcgcccaaagaccttgtccccgacaccgcacagtatttgagttcatcgaaattagagaaatttgagggtttgaacaaacaggctcttgaagttgtttacagggtcactgttgggggtgttaaagttaccccttttaatgattccttgtggagaacttgggttcctgatgatgggtttttcagaccaagtgttgggtcggaaaagctttactttggtgggagaatcaattaccatgttggaggggctagtcgtgaggttgggcctgataatgtgtataatagtgctaggttgattaggagtaagaatgattctgttcctaacgttaatatgacttgggtgtttccggttgttggagggtataagtacttggttcggttgcatttctgtgatattgctagcatttcggttggtttgctttacttcaatgtttatgtcaatggaaatttggcttatgaagatttggatctctcatacgttacgaattcgctggcttcgccgttctatgcggactttgtggttgatggaggagatggggccttgagtgttggtgtaggtccttcgaagagcagcatgccgcatgtcatcgatgggatattgaatgcggttgaggttatgaagttgaacaattctcgcagtagtcttgatggagaggtttgtgctgatttagttatgaagagctggtcgacgaggaataatacaggtatgctgtttactttggtggctgctgtttgcattgtgttgagcttgtccatagtgattcgtaggaggttgattgggtcgagggaatctgtgtcttggtcaaggttgcctgtgaatttgtcggatgatagtgttaagaattaagattggtgatatatagttatatcaaaatataagaaaaaaagattggcaatgtttagtcagcaagtgaataagttgtgtgtaaaaatatcagcaaatctagccatctaatgttgtggccctcatgagaaaagagaagcatgaaggaacatgctgcagatcaagctagaaaaggaagacattctggaagcccgactaataccaatgctttagggattgttgtattatatctaagtttccttacttgtttatatcataatattaattaaggcattccttttgcctccagactttgttttcttatcattgttaattttgctctgcttttgtaatgctgtagctttcatcattgttattgctcgaacttttggaaatacgcatgtaacttctatattgagtggttatatgaaaatatactgatgccccaaaaaaaaaaaaaaaatttaaaaaaaaaaaaanattnctnagccnggggancntaattttanagcggcgcccccggggactncactttggtccttaangggtaatncncttggaacntgcaanctnttctggnaattgttcg

SEQ ID NO: 443 - DNA, 1342 bp, Glycine max
tgattgctagggctgcatgttctggagatgttgtggcacattctattgttaaggaaccgtataatgtgggcacaaggaaatgggagccgaaaaatatcacctgtgccatgggtcctgtgctcaaacaaggcaacaagaacgaagatatgaatatgttcttgttgaatcaaaagaggggtgaaaaacgcctacctcccaaggttgctggacagtctcagtttgttgcttctaatgctggtgcagaatctatatatagggctgtccctggtgaaaccgtatctccatcaaatgtgcaacttccaatggttgctccagataatgcatctactctggcttctcttcgcatgcttcgtgtatatttgagaacatatgcacttgagcaaatggtgcaagctgggaatgcatcagctggacttcggactatcaaacgggttgagcaaactttgcaagatcttggggtcaatttgaaaccaagggttccaacgaaagctgtttgtgcagagcatcttgaattaagaaaagaaatactaacatggcttaatctccagaaacaggtgcaatataaagaggctgaaggttcctcctttcgtgatgggtcatatggtgaaacacctggcacaccaaagcatttacatcgtggtggggatcaggatcgaacatttattccagattcaatgaatttcggagtggaaagggtaggcaaaaaggaccaaaagcgcaaggcacctggagctccatcagctcataaaagacctagaaaactaaaggcctcagatctttagtttctcaggtggcaaccgggaaaggtgtttcaattcacagaattctttcaatcaaaattatgaatgttgtggaaggtgtggctgtgaactcaacacctgaaaattcggattgtggtatatctagtccaactgaaattcggttcacttcggtctaaaattttaaactaatgccactcttggtattcgatgtaaaaagaaaagtgggatccctgagatgagtgagatctcccatcttaaccatgtcctgagaagctggactttatttcttgtgctgctaaggatttgtagaattgtagggattccaggtacaaaagaggcatcttattggaatatgcatgtatataagtttgacatgggaatttcggatgactttgatagcttatgaagataattttattgtcattgtaagaaaatcgtggaatagcacaggagcataaggaagaagccaggagtaactgattgaacttatcaccttcccatatctataactattaataatgggaattatccaatttggtgtacatatttcattggataattttatcattaaaccacttctt

SEQ ID NO: 444 - DNA, 1888 bp, Glycine max
tcagctacgtaggcccccccccccgagggaaaactggaacaggaagaacgaacctgtttaattcccccaaatccgaagttgatcctgaaaccctaaatagcccttaacgttgtgtctatgtttgtgaattatggacgcgaaggatatcctgggattgcccaaaaactcgttcccatctctcgagaagaaatctcgtcctcccaaagagtctcaaagaaaaccagatggcatttcgcgcgaggtgtatgcgcttacgggcggattggcctctctcatgcctgcaattgaagcctctcagttgaagaaaaagcctcttcctctcgaaaaaatcacttggcagtggcttcctttcaccagttctgctcgtaaagataatcttcatctttaccattgggtacgagtcatcaatggtgttcctcctacgggggactattcttttgccaagtataataagtccgttgatgttatcaaatacacagatgaggagtatgacaagtatttgtcagatcctacgtggaccaaagaggagacggatcaactatttgacttatgtgagagatttgatctccgatttattgtaatagctgataggtttccatcctctcggactgtagaggaattaaaggatagatattatagtgtttcccgggctatattgattgctagggctccatcttctggggatgtcgcagcacatcctattgttaaggaaacatataattttgcacaagaaatggaacgaaaacgagcactgtccatggtcctctctcaaacaaggcaacaagaacgaagagatgaagaggttcttgttgaagcaaaaaaaatagcggaaaaacgcctacctcccaaggttgctgaacagtctcagttggttgcttctaatgctggtgcagaagctacagagagggctgtccctggtgaaaccatatctccatcaaatgtgcaaattccaatggctgttccagataatgcatctactctagcttctcttcgtatgcttcgtgtatatttgagaacatatgcacttgagcaaatggtgcaagctgcgaacgcatctgctggacttcggactatcaaacgggttgaacaaactttgcaagatcttggggtcaatttgaagccaagggttccaacgaaagctgtttgtgcagagcatcttgaattaagaaaagaaatactaacttggcttaatctccagaagcaggtgcaatataaagaggctgaaggttcctcttttcgtgatgggtcatatggtgaaacacctggaacaccaaagcatttacatcgtgttggggatcaggaccgaacatttgttccagattcaacgaatttcggagtggaaagggttggcaaaaaggaccaaaagcgcaaggcacctggagctccatcagctcataaaagacctagaaaactaaaggcctcagatctttagtttctcaggtggcaaccgggaaaggtgtttcaattcacagaattctttcaatcaaactgaaatttggtttacttcggtctgcaattttagattaatgccactcttgttattcgatgtaaaaagaaaagtgagatccctgagatgagtgagatctgccatcttaaccatgccctgagaagctggactttatttcttgtgctgttaatgctttgtagaattgtagggagaccaggtacaaaaaaggcatcttatttgaatatgcatgtatataagtttggacatgggaattccagatgcctttgacagcttatgtcgggatgtagaaattgggtgcggatggaacaagtgtcctgcttcataaatgtttctaatcgttcacacacccaatgaaaaaaaaaatgtttttattcaaaaaaaaaaaaaaaaaataccattattcacctttgtcattgtagt

SEQ ID NO: 445 - DNA, 1643 bp, Glycine max
ggctcgaggttctcaacatcagctagctagccactcactcacaataaataaaataaaaagggttttacaaaacatacgcatatatctagggtttctctttctcttttgcattctctctgaattcgtatgccatggagtcacccggtaacgagcatgtggtgggtggcgcagaacccaacgacgtcgttacgcccttttcccacagagaagaacctcacaattcccaacccctcaccggcgacggtgccagtcccggaaagatatttataggtggtttagcgagagaaacgaccattgcccaatttatcaagcactttggtaagtatggtgagatcacggattcagttatcatgaaggacaggaaaactgggcagcctcgtggattcgggtttataacatatgcggatccctctgtggtcgataaagtcattgaggaacctcatgtcatcaatggcaaacaagttgagattaagcggacgataccgaggggagctgttggctctaaggattttaggacaaagaaaatttttgtaggtggaattccttcaaatgtgactgaagatgaatttagagacttctttacacgctacggcgaagttaaagatcaccaaataatgcgggaccactccaccaaccgatctcgtggctttgggtttatcacatttgaatctgaagaagcagttgatgatcttctgtccatggggaacaaaattgactttgctggagctcaggtggaaatcaagaaggctgaaccaaagaagccaaactcagcacctccatcatccaagcgctataacgactctaggtcttcatacagcagtggtggatatggagatgcttatgatggatttggtggcagctttggaatggggggtgggtataggtcaggtggtgcttatggtggtggtaggggtagtggtgcttatggtggctatgcaagtgaatttggtgggtatggaggatatgctggtgcgatggggccgtatagaggagatccctcccttgggtatgctggtcgttatggaggaagctttagcagagggtatgatcttggtgggtatggcggacctagtgagaattatggagcatatggggcaggtgggggttcttcgggtggtgctggtgctggtgccggtgccggtgcctaccaaagtggctatgatggaaacctgggagggggatatggaggggctagtggaggccccttctatgggagcactagaggaggatacagcgctggtcgatatcatccttatggaagataagattggaaaccaagcatttatagtctaggactaatatgtctagcatcaaagcaggtttgtagtttgtgttttgttcatcagatagattatatactctttcaaaaaaaaaaaattgtcaacgttactttcatttatgagcatacccatttcttgaaagtccaaacaaattttctatttggctccccctttgagtctggtttatgtatgtaagagctgcaaattgtgtagacgggtgtattctcaatcttgttcattgttgcttgtaatgcttctaattaccatcttttgttttttatttgatttaattactccatgctggtttgttattctatacatgagataaactttctaacacttttattggttgaatatttttgg

SEQ ID NO: 446 - DNA, 1653 bp, Glycine max
tttttttttttttttgtaacagaaagacttaaaattgagatgttaaattaaatcatataaacatgcttagtgcacaagtctatacattttcctttcaatacaataggacactcgtaataaaataaacttcagctcactgctcacaatggagagtttgatggagatccgaaagtggaatgatttccattatctgaattaggaatttttgctccccttaatcaagaacaaatgtggaaggggttcgcctactcctgatgacatttgtgttgattaaacctaattttcaaatttttcatcctatatttcactaatctatctaaaacataaattacagataaatccagcaaatcaggtaactagtttgtccgctattccagaagggaatggggaaaactatcaaaggggtcgtgaagacattaacccttgagaataaccattagcaaaattttgtttcttcttgaaatttgtaacactacaatgaggacatatatattctagcccatctgtttttgcataatccttaaatgcaccaagaccctgccttctgtcacagccaaagtgggcccactcaccacatatgccacaattcacccaatcaccagctgcactactgtgacacaacaagcaacattctccatccacatcatcatgtgctaattcatattctaaaaggtaggtctcataatgtcgtttgagagtattcccaacaccagtcattctattggttgtggtgtaattgcgcatctttgaaaagatttgtcccttccagttgatgccattgccaacatgaaatcctcccctggtaaccacctctttatacaagttgtagagatcaagacgttttccattgagtatggcatcagggaactcggtaagccctccttgaggaatcagtctattatgtccccggagaatcagaaactccatgacatctttaagaaattcctcctcagagcatgtctgtacggggcctctaccgcaaccatgtttcttaagaggcaatgggttcaatgaaataacctgcttagactgagctgcgcttgaaaatgattttctgtgtgttccagatgttgatccaatactactacgcttcgtaggggcaacaagtggcaaaatagcctccacctgagtgccatcaaaaccatctgtctcagaaggtccacaaaaaggtgtcattctatggcgatgaatgtgaggaattggcctcattgcagatactttcaatctctgcctagcaggagttaatggcgtgctaatcccattgaccatttttctatccttttcctcttcatttaatttatgaaactaccctgccctgcaaagacaccttcatgaagaccagggctatccccttggcttggttcacaccttttcttagtaggagggggtggtttcaaccaaccagggggactgctaaaaattatattatttttgattgtacagctatctttctcacagtttttatagaagaaaagtaagcgttcagcatcatctttctcaaaagaagctattggcaatccctgaatactagcaatgccaagtgcaactaaacttcgataagaaacttcaggtgctagctgtctcaaaatctgcaaagcccattgaggaagcttcatgcaaatttcaaataggggggggggcctacgtagctga

SEQ ID NO: 447 - DNA, 1762 bp, Glycine max
tccaaatccaatttcaatatgatacggattcccacttgttgccgcaaacacacaacatatttccttcttctttctcttcagctacgtaggccccccccccatactctctctccactgggtaaacatgcttaattctgaaggagatttaaaaataagttttggctataaatgcaatagcgatagaggtattccttgtgaagttgccagtggctgcaaaatccttcctggagtacgtagaacaagcagtttctcctgcttttcaggtgcagccttaagtgcaaatgctacattagcaaacacaaacatctgcaatggtaagataggagaagaaatccttcccaagttgggattctcctaattcatttcgaaaagtaacctcttcaccaagtctttcaaagttggacatactatcatcctccctcccaaatagtctgtcttactgatgaggacatgagggttcatatcacttaccttagctgcagtccttctactacaagtgatatccttgaatatgactcttgcacattaaaatccatgagtgatccttccagaagtgaaggttttcttaatgctaaggaagtccaagtagcaggaggagctgctggtgaagatagagttcaagcagtttgttctgaagaaaatgggtggctcttctgtgcaatatatgacggctttaatggaagagatgcagctgactttctggctggtaccctgtatgacaccatcatatcttactttaacaagttaatttgggaattggagccgggttccgtcaaagcttacgatgatggatgcttgggtggatccctgcaatataagttggatgatagtcttatttatcacgaggatcaatctctgtcaagatttaagggaataaacgattctaatcatggttgttttgcaaagtgtagtccttctactaagtcagaagtatcatgtgattcattttcacatggggtacttgatatccttcaacgtgccattagtcaggctgagaatgacttcttgtacatggttgagcaggaaatggaggaacgtcctgatttagtttctattggatcttgtgttttacttgtgcttcttcacggcaatgatttgtatacacttaatctaggtgacagcagagcagtattggcaacatgcactacagttgatcgaatggataagagagagagactcgaggctatacagcttacagataatcatactgttgataatgaagttgaaagagctagacttctggctgatcatcctgatgatcccaagatcgttataggaggaaaagtgaaaggtaaattgaaggttactcgagcttttggagttggctacttgaaaaagaaaaatctgaatgatgctttgatgggaatccttcgagttcgggatcttaaaagcccaccatacatatccacgcaaccatcattgaatgtccatagaatttcaaattccgatcaatttgttatagtagggagtgatggtttatttgacttcttcagcaatgatgaggcagtaaagcttgtggagtcttatatcttgagcaatccttttggtgatccagcaaagtttctcatagagcagcttgtagctagagcagctgattctgccggtcttagcatggaagagttgatgaatattccagctgggaggagaaggaagtaccatgacgacgtgaccgtaattgtaatcatgcttgggatgaatcagcgtacttcaaaggcatcaacttgcatttaagacttgccacttcaaaaaaaaaaaaaaaaaa

SEQ ID NO: 448 - DNA, 1237 bp, Glycine max
gttccttgaagttagtttgctttcaattttatatgaataataacataacataagaatagtttatatgaacacgcaaggtaagttaaggagaccaaaggaagaagaagaagtagtggagtgatcctggttgggtgtgaaaaatgtcgcacagcgataccataccccttcacccatcttcccaatccgacattgacgagatcgagaacctcatcaatgccagcgttcaccaatcagtcccttcggcgagacctcccagtcccccacgcgcctccatccccgtctccgtctccgccgccccttcccccttcatctcctccaacctccctccaccgccacccctccctaaatcctccgtctccgccgtccctccgccccctcccccgccgcgcgccgacatctcctcctccgggttcggctccgcccccaacacgctcactgagcccgtctgggacaccgtgaagcgcgatctctcgagaatcgtgagcaatctgaagctcgttgtgttccccaaccctttccgcgaggaccccggtaaggccctcagggattgggatctgtggggccctttcttcttcattgtcttcctcggcctcaccctctcttggtctgcctctgtcaaaaagtctgaggtttttgctgttgcatttgctttacttgctgctggcgctgtaattttgacattgaacgtacttcttctgggtggacacattattttctttcagagtctgagtctgttgggttattgcttgttccctctggacgtcggtgcattaatttgtatgttgaaggacaatgtcatagtgaaagtggttgttgtgtgtgtgacattggcttggagctcttgggctgcatatcctttcatgagttctgcagtcaaccccaggagaaaagctcttgcactctacccagtttttctcatgtatgtatctgttggttttctcatcattgccattgactaaatgcatcaatgcttctgatttctttattacgataaccacctggaatctgcttctaaataggaatttttgtttgatgatcaaccatttttttttaattcttttctgcccctccttttttctgtttaaaatttggttagatatatttgaagacaaacagttgtataatattacgtggaaagtatatggtgggatcaaacttgctacataagtattgtttctctttctattatgtattatttaatgtgtgaatgggaatactgataggattgaaggccccc

SEQ ID NO: 449 - DNA, 1112 bp, Glycine max
gaagaagtgaagtgcagtgatcattttgttgttgggtgtgagtcttgggtgtgaaaatgtcgcacagcgataccataccccttcacccatcttcccaatccgacatcgacgagatcgagaacctcatcaatgccagcgttcaccaatcagtcccttcggcgagaccccccagtcccccacgcgcctccatccccgtctccgtctccgtctccactgccccttcccccttcatctcttccaacctccctccgccccctcccctccccaaatcctccgtctccgccgtcactccgtccccacctccgcctcgccccggcatcgccacctccgggttcggtcccgcccccaacacgctcaccgagcccgtctgggacaccgtgaagcgcgatctctcgagaatcgtgagcaatctgaagctcgttgtgttccccaacccttaccgtgaggaccccggtaaggccctccgggattgggatctgtggggcccattcttcttcattgtcttcctcggcctcaccctctcttgctctctgactgtgtctcagtctgaggtttttgctgttgcatttgctttacttgctgctggcgctgtaattttgacattgaatgtacttcttctgggtggacacattattttctttcagagtctgagtctgttgggttattgcttgttccctctggacgttggtgcattaatttgtatgttgaaggacaatgtcattgtgaaagtggttgtggtgtgtgtgacattggcttggagctcttgggctgcatatcctttcatgagttctgcagtcagccccaggagaaaagctcttgcactatacccagtttttctcatgtatgtatctgttggttttctcatcattgccattgactaaatgcatcaatgcttctgatttctttatttcgataaccacttggaatcttcatctaaataggaatttttgtttaatgatcaaccttttctttttaattcatttctacccctcctttttttctgtttaaaatttggttagatatatttgaagacagacagttgtataatattacgtggaaagtatacggtgggatcaaacttgctacataagtattgtttttctctttctatt

SEQ ID NO: 450 - DNA, 801 bp, Glycine max
atttttgaaacggcatcgttttagcgaagggagtgaagtgatagaggaaactgtagaagcgcacagagagagctaagtggaggaagaaaatgaaggcattgggatggtggctgatagcggtaggcacgcttcgattagcttccgtgtggttcggtttcttcgacatttgggctcttcgtctcgccgtcttctccaacactacaatgactgaagttcatgggcgcacatttggaacttggacactgttgacctgcaccctttgttatatctgcgcattcaaccttgaaaataagcctctctacctggctacttttttgtcattcatctatgcattcggtcatttcttgaccgaatatctaatttatcatacaatggagattaagaatctgactactgttggcatatttgcaggaacatcgatagtatggatgctattgcaatggaatgcacactcgaaagtccacttgaagcactcttagccagcaaaaatagatggggcaaaagtgcagtactatgatgggtgatattggactgttttagatacaagagtcgcagctctagatatctcatccttttatttgattttattagaagacatttcatgttgataccaatatatacggctacccattgcagtttacaaaattatggatcgatgcagtgcttcaccatgttagcctcgttttgaaaatgcaaatcattattggctttgctccgttttgcactaactgattttgaagagatgagatccctggtgtttagaattttgtagtccaaaggggggggggggggggggggggg

SEQ ID NO: 451 - DNA, 1255 bp, Glycine max
aataaccccttaatttctctctcacacacactttcccacatctctcatacacttcctgcttctctctctctctctcgtcctttttcctcattctcttcttcacaaaacatcactcttttttcatttcaccgacaacacaacaacgtgagttaaacaaaaaacagtaactccacgcagccatgacagacagggtgtacccatccgccaagcccgccgtggttaacggcggcgccgccaacccatctttcccggcgacgaaggctcaactttacggcgccacccgccccacctaccgccctcaaccccaccaccggcgccggagccggcgacggtgctgctgcaccttcttcttctggctgatcctcaccgtgctgatcctcctcctcctgatcggcgtcgccggcacggtgttctacctcctctaccgcccgcaccaccccaccttcaccgtcacgtcgctgaaactctcctacctgaacctcacctcctcctccaacaccctgaactcccgctttgacatcaccgtctccgccacgaaccccaacaagaagatcctcttcgcctacgaccccacctccatcaccatcctctccgccgacatcgacctcggcgacggcaccgtccccggcttccagcacccgaagaagaacaccacgctgatcaaaggctccatcctcagctccggccaggcgctccaaagcgacgaagcctcacgcttgaagtccagcatgaagagcaagaacgggttgccactcaaagtgaatttggaaaccaaagtgaaggccaagatgggaaatttgaaaaccccaaaagtcggaatcagagtctcctgcgacggaatcagagtcagtcttccctccggtaagaaaccggcgacggcgtccacttctaacgccaaatgtgacgtcgatgttcggttcaagatctggaagtggaccgtttgatccatgtaataatgtacaccaccatacaacaacagcacagaggtgtgtactgtgttaatggtcttattaatttgttttcttcttcttgcctttggtttttgtttttactttttccttttagcttctttttattttggtatttgtccatattcataattaattacttgaattgaatgcgtgtaaatggcaacgagggttgccgggggattcagtcggtgacagttgttagcattttcaatgtatactagtctatttttttctacatagttttgtatttttctattaaaaaaaaaacaaaaaaaaaaaataaa

SEQ ID NO: 452 - DNA, 1429 bp, Glycine max
gaaaggagtgggtttcattaggtgaaagacaaacaagttgaccttaaagttaaagtcttaaagtatgataaacgagatatagaaattaaaaagcgtgaggaggattttgctggttttatacgcgccgaatgtgtgagagagaagggagagctggatacagctaaatggctatggttagaaagttgccatctttccccttcctaccccaccttctccaaatgtttaaaccctagttatcccaaaacaacctcctaataacccattaaaccccccctctcatacactctctaatccaaagagaacaccaccctttttcctcattctcttcctcactaaaacatcacactttttttcatttcaccaaacaaaacagtaacaccacacagccatgacagacagggtgtacccatcggccaagcccgccgcggttaacggcgccgccgccaacccatctttcccggcgactaaggctcaactttacggcgccacacgccccacctaccgccctcagccccaccaccggcgccggagcaagcgccggtgctgctgcaccttcttcttctggctgatcctcaccgttctgatcctcctcctcctgatcggcgtcggcggcacggtgttctacctcctctaccgcccccaccaccccaccttcaccgtgacgtcgctgaaactctcttacctgaacctcacctcctcctccaacacccttaactcccgcttcgacatcaccgtctccgccacgaaccccaacaagaagatcctcttcgcctacgaccccacctccatcaccatcctctccggcgacatcgacgtcggcgacggaaccgtccccggcttccagcacccgaagaagaacaccacgctcatcaaagcctccatcctcagctccggccacgcgctccaaagcgacgaagcttcacgtttgaagtccagcatgaagagcaagaacgggttgccactcaaagtgaatttggaaaccaaagtgaaggccaagatgggaaatttgaaaaccccaaaagtgggaatcagagtctcctgcgacggaatcagagtcactcttccctccggcaagaaaccggcaacggcgtccacttccaacgctaagtgcgacgtcgatgttcggttcaagatctggaagtggaccatttgatccacgtaataatgtacaccatacaacacagaggtgtgtaatgtgttaattgcttgtttgttttctttttcttgcctttcctttcagcttcttttattttggtatagttttcgagaatttgtccatattcataattaattaccttaactgaatgcgtctaaatgccaaccagggctgccggggcttcagtcggtgacagttgttagcatgttgaatgcatactagtctatttttttgctagatatatttgtatttttctattaaaaaaaaaaaaaa

SEQ ID NO: 453 - DNA, 1940 bp, Glycine max
tcggcgacggccgccctccccccttctctgatacccgggctgagtggctcattgcccttcagggctgcttcaggcagaatgtaacagtcgttactatttatgcttctctaggtgaggatgccctgatccactcactaaatgagactgaagtatctactctgatctgtgactccaagcagttgaagaagttggatgcaataagatcaagactaacatctttacaaaatgttatttactttgaagatgataacgaagaagatgctttctctggaagttcaagcggctggacaattgcatcttttagtgaagttgagaaacttgggaaagaaagtcctgttgagccaagcctgccttccaagaatgctattgcagttatcatgtacacaagtggcagtacaggtctgccaaagggtgtcatgattactcacgggaacattgtagccactacagcagctgttatgacagtgattccaaatctaggtagcaaggatgtgtacctggcatacttgccccttgctcatgtttttgaaatggcagcagagtctgttatgctggctgcaggttgtgcaattggttacggctctcctctgactttaactgacacctctaatggagcccggaatgcggcccggggagatgctactgtgttaaagcccactcttttgacagcagtaccagctattcttgatcggattcgagatggagttgtaaaaaaggttgagcaaaaagggggccttgtgaagaatcttttccattttgcatacaagcgccgactggctgctgtaaaaggaagctggctaggagcttggggattggaaaagttgatgtgggataccattgtctttaaacaaattcgtagtgcacttggaggccagctccggtttatgctttgtgggggagctcctttatctggagattcgcaacacttcatcaatatctgcatgggggctcctattgggcaaggatatggcttgactgaaacatttgctggggctgccttctcggagtgggatgactacagtgtgggacgtgttggtccacctcttccttgttgccacattaagcttgtttcttgggaagaaggagggtatctgacatcagataaaccaatgccaaggggagagattgtagttggaggatttagtgtgacagctggttactttaagaatcaagaaaaaactaacgaagtgttcaaggttgatgagaaaggtatgcgctggttttatactggtgatattgggcaattccaccctgatggatgtcttgaaatcatagataggaagaaagatattgtcaaacttcaacatggagaatatatctctctcggaaaggttgaggcagcactatcatcatgtgattatgtggacaatataatggtttatgcagacccctttcacaattactgtgtggctctagttgttgcttcacaacagtccctggagaagtgggcccaacaagctggtatagattaccaagattttcctgatctgtgtaacaaacctgaaactgtcactgaggttctgcagtctatttccaaggttgcaaaatctgcaaagctggagaaaactgaaattcctgcaaagattaagttgctgccggatccatggactcctgaatctggattggtcactgcagctctcaagataaagagagagcagctgaaagccaaattcaaagacgatcttcagaagttgtatgcatgaaatgtagtatctaacctcttcaatttctggttggtgtatgctcaatgtatgtaatgtgtcacaggtatcttttttattcgataatactattgaacatgtaactaatttgacataataaaatcatactccaaataatacatcaagtgggtctagttcagttggttctgtcaacatgaaattcttgccagtgaagccaaccaagcggctagcaatagatatagttgatttatgagcagt

SEQ ID NO: 454 - DNA, 1476 bp, Glycine max
attcgcgcgcgagggtttgaagttttggcgctgaaagaaaaatggcggaagagtacgaggaaggtggtgaggttgaagaagagttctccgtttggaagaagaacactcctctattgtacgatttcttcatttctcaccctcttcaatggccttctctcaccgttcactggcttccctcctctccccaacctcactcccatccttccttcaatctccacaaacttcttctcgccactcacacttccgaaggcgaatcaaacttcctcatgctcgctgacgcatccctccccgtagacacctcacaacacatcgtcgccaccgatccgaacaaccccgttcttcccaaggtggagatttctcaaaggatttctgttgatggggaggtgaatcgagcgcggtgcatgccgcagaaccctagtattgttggtgccaagacttgtaattccgaggtttatgtgtttgatttcaccaaggaacgtgggagtgcgtgtgaccctgatttgaggttaaggggtcatgataaagagggttatggtttgtcttggagcccttttaagaacgggtatcttttgagtggttcgcatgaccataaggtttgcttgtgggatgtgcctggtgcctctcaagagaaggtgcttgatgcacttcatatttatgagggtcatgagaatgtggttgaagatgtgtcatggaatttgaaggatgagaatatgtttgggtccagtggagatgactgcaaattgatcatttgggacttgcggacaaacaaagcccaacaatcagtcaaaccacatgaaaaggaggtgaactttctttctttcaatccatataatgaatggattttggctacagcatcttcagatacagatgttggcctctttgatacacggaagctggcagtgccgctacatattttaagtagccacacagatgaagttttccaggtagagtgggatcctaatcatgagactgtgttggcatcttctggtgctgacagacggctgatggtttgggaccttaacagagttggtggtgagcagatagagggagatggtgaaggtggccctcctgaactactattctctcacgggggtcacaaagggaaaatatcagatttttcatggaacagaaatcagccatgggttatctcaagtgtagctgaggacaattctttccatgtctggcaaatggctgagagcatttacaatgacggagatgatgacaacatgtggacggccgatgattaattaaccagacacatgatcaaaggcgatgatgctcttattaccattgctttattgttttaatggaatctttgaccatttggtgtcatgtgaatgtcttgtgatcattaacaactggaacagtgatggcaacatagtatctttgtcaaacatgaactcttttttatatgcagaattgatttctgaagcacgtttaaaaaaaaaaaaaaaaaagcttatcgataccgtcgac

SEQ ID NO: 455 - DNA, 1389 bp, Glycine max
aacaaacacaacaccttcgcttcaagtctcccaaaacacacataactaggaacccgctccttccttaacctctgcaactttctccaattcaaaagaacaaaaacaacaaaagcacccccatcattgagaatcgtctcaagcttcgttttttacgtgctggggttgcttagatttcaattgggtatagagaatgttcaacggtatgatggatcccgatttgatgagaatcgctcaggagcagatgagtcgcatgtcacccgctgagttggctcggatccaacaacagatgatgtctaatccagagctgatgaggatggcctccgagagcatgaagaacatgagttctgaagactttaaacttgctgctgagcagttaaagcatactcgtccggaagaaatggctgagattggtgagaagatggctaatgcgagtcctgaggaagtggcagcgatgcgatcccgggttgatgcccagatcaaatatcagttgagtgcggctgagatgttgaagaagcagggaaatgatcttcataatcaaggaaggtacaatgatgctttgaagaagtatatgcttgctaaggaaaacattaaagaggtaccatctttccagagtagaaagcttcttttggcatgctctctgaacttgatgtcctgttacttgaagacaagccagtataatgaatgcataaaagaaggttctgaggttttggcatatgatgcgaagaaccttaaggctctttatcgaagaggtcaagcttataaggaactgggtctactaaaagatgctgtttctgatctgagcatggcacttgaagtgtcccctgatgatgatacaattacagagcttttacgggataccaaggaaaaattggcaatggaaggtggtgagcatgcgcctcgaggaatagtaactgaagaaataactgaagttgaggatgttccttctggaagctctttgaaacaatcggtggttcaactaaaaaaatctggtgactcctctaagagttacagtacagccaacaatggaattccaaaaacaaagacagacagtttagatgcattgaaaaaagatcctgaagctgtcagatcattccaaaactttatttcaaataccgatcctgccacactggcttctttgaatgctggacaattcaaagatgtgtctccagatatgattaaaactacctctgatatggttagtaaaatgtcacctgaggaacttcaaagaatgcttgacatggcttcttcatttcaaggggataatccaatttttagaggaggttcccctgattcttctttcaaccctggatcaatgcctccaaatgtgacacctgatatgtttaaagcagcaagtgatatgattagtaaaatgccagcagatgaccttaa

SEQ ID NO: 456 - DNA, 1326 bp, Glycine max
gtttagatgcattgaaaaaagatcctgaagctgtcagatcattccaaaactttacgtaggccccccccccaaataccgatcctgccacactggcttctttgaatgctggacaattcaaagatgtgtctccagatatgattaaaactacctctgatatggttagtaaaatgtcacctgaggaacttcaaagaatgcttgacatggcttcttcatttcaaggggataatccaatttttagaggaggttcccctgattcttctttcaaccctggatcaatgcctccaaatgtgacacctgatatgtttaaagcagcaagtgatatgattagtaaaatgccagcagatgaccttaagaggatgtttgaaatggcatcctcactgaaagggaaagaatctactccattagcagcagcagtagatgagaatgaaagaaatgtttcccggtcaaacttaccatcatcaagtactaatggaactactgcttttggagaatcaagttctcataatgtgttttcaaatatgagaaatgcttctcagtcaaacttcccttcctcaagtgccaatctccaagaacagatgagaaaccagatgaaagatccagctatgcggaagatgttcacatccatggttaaaaatatgagcccggaaatgatggctaacatgggtgaacaatttggtgttaagctttcaccaggagaagctgcaaaagctcatcaagccatgtcatccttatcaccggagagcttggataaaatgatgctttgggcggacaggattcaaagaggagttgaatccgcgagaaagacgaagaactggctgctagggaaacctggcatgatctttgcaatattcatgctcattttggctgtcattcttcaccggttaggcttcattggtggctagagtaagaggcaaacattgtattatgagattccttaggcattcaaactcaggcataaccttcttgtgtgatgagaatatgagaaaatgattgattgtattctcagcctagagacaatggagagaggaggaaggggacatattggttatctggaaagcaatgccaaaatggcatctcatcagatatgtccaaattgtggatgtgattggcacttattttttttgtaatatattagcttttgagttgtttgccatttagcacttgtagggaccctaccattcaataaatttgtaacttattttgtcattcttatacccctagtcccaatgtagcattggtatggtgcgttattatttataaaatttacatgattcccttttaaaaaaaaaaaaagaggactccgggccgcgaagctggtgccgaatt

SEQ ID NO: 457 - DNA, 3096 bp, Glycine max
  misc_feature (735)..(735): n is a, c, g, or t
ttttagttttctcatttctggcaccagcaacaagagtctctacttgtgagattttcttttcattttccgtcgtagttcaatcccctttcgttcctcacttttagggtttccaatttctccgatggcgcccgatcctaatcgcgccggcactagcgccagcgccaacgccgccaaagacgacgccgtcgccaaaaagaaggtcgaaaacgaagatctgtccgatgaggatttggcgctgaagcagcaattggagttgtacgtggaaagggttcaggatcctgaccagggattgcagaaggttgcactcgagagcatgaggcaagaaattcgaacttccacgagctctatgacttcggttcctaagccgttgaagttccttcgccctcattatggcactcttaaaacgtattatgaaactatggcggagtctgatttgaagaagtacctggcggatatattgtcggttttggcactcacaatgtctgccgaaggcgaacgagaaagcctcaagtatagactattgggttctgagggtgacattggttcctggggccacgagtatgttaggaatctggctggagaaattgctcaagaatatgcaaaacgacagagtgaagaggctcccatagatgatctcatggaacttgtgcaacaaattgttgcttttcacatgaagcataatgcagaacctgaagctgttgatcttttgatgggggttgaagatctggatatgtntgagtggacatgttgacaaaacaaattttaaaaggacttgcctatatctcaccagttcagctagatacctcccgggaccagatgatatgctagctgcgggcagtccacagtcgggctataaacaatttgaagaatatccaaatgcactccaaattgcattgttcatggataacatgcagcacgtgaggggaggtgttcacctcttgtaatgatgtgctgcggaagaagcaattctgttacatgcttgcacgtcatggaattacttttgagcttgatgagaagatggtttcagacgatgaggacagagaattgttgcaggaaatcataaacaattctaagttaagtgaaggatatctcacccttgctcgtgatattgaagtcatggagcccaagtcccctgaggatatatacaaggcacatttgcttgatggccgggctagtgctggtgcaagtgttgattcagctagacagaaccttgctgcaacttttgttaatgcatttgtaaatgctggctttggtcaggataaattaatgactgttccatcagattcttcaagcagtgcttcttctggaaattggcttttcaaaaataaggaacatgggaagactagtgctgcagctagtctgggtatgattttactctgggatgttgactcgggacttgctcaaattgacaagtacttccatagtaatgataatcatgtcattgctggtgcattactgggagttggaattgtgaattgtagtatcaagaatgactgtgatcctgcaatggcacttctaggtgactatatagataaagaaccccccgcccgcaggattggtgcaattacgggtttgggaattgcatatgctggttcccagaatgaccagcgtccggagaaattgacaggtgtactgaacgattctaaagcttcacttgaggtgcttgcatttgctgctatttctttgggcttgatctatgtgggttcttgcaatgaagaaattgctcaagcaattatatatacactaatggaccggagcgagtcagagttgggagagccccttacacgacttttacctctcggtctgggtcttctatatcttggaaagcaggacagtgttgaggcaactgccgaagtttcaaagactttcaatgaaaaaattagaaagtactgtgacatgacactcttatcatgtgcctatgctggaactggaaatgttctcaaggttcaaaatctgttgggtcattgttcacaacatcttgataaaggtgaaactcaccaaggtcctgctgtgcttggaattgctatggtagctatggctgaagaattgggacttgagatggcaattcgatcattagaacatcttctacaatatggagagcagaatattcgccgagcagttcctttggcccttggtctactctgtatatcaaatccaaaggtcaatgttatggatacgttaagcagacttagccatgatactgattcggaagtagctatggcggcagttatatccttgggtctaataggtgctggaacgaacaatgctcgaattgctggcatgcttcgcaatctttcaagttattactacaaggataccagccttctattctgcgtgcggattgcccaaggtcttgtacatttgggaaagggcttattaacccttaatccatatcattccgatcgcttcctactatcaccgacagcacttgctggattaattaccatgttgcatgcttgcctagacatgaaagctattgtgctgggaaaatatcactatgttctctacttcctcgttttggcaatgcagccaaggatgttgttgactgtggatgagaacttgaagcctctgtcagtgcctgttcgtgttggacaagccgtagatgttgttggacaagcaggtcgtccgaaaacaatcactggctttcagacccactccacccctgttctcctggctgctggggacagggctgagctggcaacggaaaaatacattcccctatcaccaattcttgaaggtttcgtaattttgaaggagaatccagattacagggaagagtgagaaccacggtagtgatgcttttttcttttgttccaagtgtctgaacagtagttagttaaaatgtatttgaaattgtgtcaaaatgtagaagaaattatttttaaaatcatttcttcgtttggatagaaagatgatcagagaatcctttagctcgacagtttttaatttctattgattgtgagcatattcttgcacgagaactctggtcatgtataaccatgatataccgattgattcgaaagataaaagtctttacggtgttgaaacaaaaaaaacttttaatcttaatattattaataaaaaaaaaaaaaaaaa

SEQ ID NO: 458 - DNA, 2395 bp, Glycine max
  misc_feature (174)..(186): n is a, c, g, or t
  misc_feature (277)..(299): n is a, c, g, or t
  misc_feature (309)..(313): n is a, c, g, or t
  misc_feature (512)..(543): n is a, c, g, or t
acgtgggagattttgttgctaatttataaatggaacaattggttctgatctgctggtttctgtcaaatttggagcctcactatataagagcctaggttagtaactgaaataatttatatgttgttcctcaacgatgagacatgaaatgctgtttgaggtgccttccttgctaannnnnnnnnnnnntgttctgatagatgcttgtactgaattgctttattttgacagcaattgtattatcaatgagacagctctgtgattgtgcttgtattccatnnnnnnnnnnnnnnnnnnnnnnnatgtgctacnnnnngtctcaagtgtgccactttgttgatcagctgtgaaccttatgtttcactctgcttgtttctcctaggcacacttgcttgatggccgggctagtgctggtgcaagtgttgactcagctagacagaaccttgctgcaacttttgttaatgcatttgtaaatgctggctttggtcaggtacaatgttatttctagattctgnnnnnnnnnnnnnnnnnnnnnnnnnnnnnnnnatctattcttcaattcctcaatcttctacttctcacttcccattatcattgtgcaggataaattaatgactgttccaacagattcttcaatgcagtgcttcttctggaaatcggcttttcaaaaataaggaacatgggaagactagtgctgcagctagtctgggtatgattttactctgggatgttgactcgggacttgctcaaattgacaagtacttccatagtaatgataatcatgtcattgctggtgcattactgggtgttggaattgtgaattgtagtatcaagaatgactgtgatcctgcaatggcacttctaggtgactatatagataaagaagacacttcaacaaggattggtgcaattatgggtttgggaattgcatatgctggttcccagaatgagcagttacgtgagaaattgacaggtgtactgaatgattctaaagcttcacttgaggtgcttgcttttgctgctatttctttgggcttgatctatgtgggttcttgcaatgaagaaattgctcaagcaattatatatacactaatggaccggagtgagtcagagttgggagagccccttacacgacttttacctctcggtcttggtcttctatatcttggaaagcaggacagtgttgaggcaactgccgaagtttcaaagactttcaatgaaaaaattagaaagtattgtgacatgacactactatcatgtgcctatgctggaactggaaatgtcctcaaggttcaaaatctgttgggtcattgttcacaacatcttgataaaggtgaaactcaccagggtcctgctgtgcttggaattgctatggtagctatggctgaagaattaggacttgagatggcgattcgatcattagaacatcttctacaatatggagagcagaatattcgccgagcagttcctttggcacttggtctactctgtatatcaaatccaaaggtcaatgttatggataccttaagcagacttagccatgatactgattcagaagtagctatggcagctgttatctccttgggtctgataggtgctggaacgaacaatgctcgaattgctggcatgcttcgcaatctttctagttattactacaaggataccagccttctattctgtgtgcggattgcccaaggtcttgtacatttgggaaagggcttattaacacttaatccatatcattctgatcgcttcttactgtcaccgacagcacttgctggattaattaccatgttgcacgcatgcctagacatgaaagctattgtgttgggaaaatatcactatgttctctacttcctcgttttggcaatgcagccaaggatgttgttgactgtggatgagaacttgaagcctctatcagtgcctgttcgtgttggacaagccgtagatgttgttggacaagcaggtcgtccgaaaacaatcactggctttcagacccactccacccctgttctcctggctgctggggacagggcggagctcgcaacggaaaaatacattcccctatcaccaattcttgaaggttttgtaatattgaaggagaatccagattacagggaagagtgagaggaaccacagtggtgatgcttttttcttttgttccaagtgtctgaacagtagttagttaaaatgtatttgaaattgtgccaaaatgtagaagaaattattttaaatcatttcttcgtttggatagaaagattataagtgaatcttctagctctcgacagtttttaatttctattgatccgggagcataatcttgcacgagtactcaaccatgaaatatcgattgattcgaaagataaagtcttgcggtgtcgaaaaaaaaaaaaaaaaa

SEQ ID NO: 459 - DNA, 897 bp, Glycine max
ggatccggtcgcggtgacgaggtgcgggtgagaaaatctctctacaccgtaatcgctatttggcatcgctgcaacaatctgcgatactctttcctctctccgcttcgaatttcttctcacactctctgcttcgccgcaaacagtgactcactgaacaactttccgaagcattgagtagtagtgattgggtggtaacaaagagagagagagagagaaaaggatgaaccagaacccgcaatcgagtgaaggaaggaacgatgacgattctgccctttctgatttcctcgcttccttaatggattatactcccactatacctgatgaattggtggagcattacttggccaagagcggtttccaatgtcccgatgttcgattgactagattggtagctgttgccactcagaagtttgttgctgaagttgcaggagatgcacttcagcactgcaaagcaagacaagcaacaattccaaaagacaaaagggacaagcagcagaaggataagcgcctagttttgacaatggaagacctttcaaaggcattgcgtgagtatggcgtgaatttaaagcatcaagaatattttgctgatagcccttctaccggaatggatcctgctacccgagaagaatgaatttttcttgttttttttttgtgttctggcttctaaagtctcgtgtttagtaagtatccttatgtacaaatgctgaattgaatatattctattgatatgttggttctccagtgttatgcactgtatcagaaggcatagcgcagtatgcccattttctgtagttgaatacacgtcattttactggcttaaaaaaaaaaatgagaacatggttttactgattgccaatatgttttgtaggagtgaatagttaatggaacaatttcatc

SEQ ID NO: 460 - DNA, 1266 bp, Glycine max
cccacgcgtccgctccgcgcgaagattatttggacatcagtataggaacatggcttcttccaacaaaatgaagaccatcaagtcaacgttcctcgttttgtgcctcttagcctcgttcctctgtccaatcaaggctcacggaggaagttctcatgatggtgtatctgaaagcgaagatttgcattctcggggtctgatcgtggtgaaaatatggtgtttgatcatcttccttgtgagcactttcgctggcggggtttctccttacttctaccgttggaacgagacttttcttcttttggggacacagttcgctggtggggttttcttaggaacctctctgatgcatttcttgagtgattctgctgagaccttcggagaccttacttcaaaatcttacccttttgcttatatgctggcttcatctggataccttctcaccatgcttggtgactgtgttatcactattgttaccaggaatagcaacagggaagccaaagtggtggaactggaaggagggacaacgccccaagagcatgacctagccagagatcattgcgcagtggcggagacaacaaaccctgtattattgaagacttcttctttgggagacaccattctactcatccttgcactgtgtttccattcagtttttgagggcattgcagttggagttgcaggtactaaggcggacgcatggaggaacttgtggacaatatccttgcacaagatatttgctgctattgcaatgggaatagctttgctaaggatgttacctaagagaccctttgtaacaacagcagcatattctttggcctttgctgtctcaagccccattggtgtggggattggcattgccatagatgccacaacacaaggaagcaccgcagattggatgtttgctataacaatgggtattgcttgtggggtcttcatctatgttgccatcaatcatttaatttccaaaggcttcaaaccacagaggacaatgcgttacgacactcccttgtttaggtttgtcgccgtgctttctggtgttgctgttatagctgtagtcatgatctgggactgatcatcatgtttcaattcctgtttttctttgttcattaataattgttctacgaaattgtgcgtgtgtgataattatgatgaatgtaccattatattctcgctacaatattaaacgtttgtttactattttgaatgaaaatttatagtctttgttccttctatcaggtgaaactaattgttcaggttccttcttcaatt

SEQ ID NO: 461 - DNA, 1204 bp, Glycine max
ctcttttttctctatctccgttttctctttctccttcttgttcttcttcttcaaatccctagcccccttttgttgtataaatactcagccaggtccgctctcccgggcgaaccccccgcccagagaaagtggagcgagaaaaatactgaaaccctccctcgccattcttgttctgctccgtccctctcgatctgcgtcagggattctctggcaggtattgttgatctgttcggttctagatcttttcgtgcggcttttgttgacggcaccgtcatgtcttccctcagcagagagcttgtttttctcatacttcagtttctcgatgaagagaaatttaaggagactgttcacaagttggagcaagaatcgggatttttctttaacatgaggtattttgaggatatggtgacgaatggggagtgggatgaggtggagaagtacttgtctggttttacgaaggtggatgacaatagatactccatgaagatcttctttgagatacggaagcagaaatacttagaagcattggacaagcaagatcgagctaaagcggtggatattttagtgaaggatttgaaagtatttgctgcatttaatgaagaactttttaaggaaatcacacagttgttgactttggacaactttagacacaatgaacagctatccaagtatggagatacaaaatctgcacgaggcataatgctggctgaactgaagaattgatagaagctaaccctctgtttcgcgacaagcttcaatttcctactttaaagaactccagattgcggactctaattaatcagagtttaaattggcaacatcaactttgtaagaacccaaggcccaaccctgacataaagaccctttttgtggaccatagttgtgggcaagtgcacccaaatggtgcacgagccccttctcccgttaccaatcccttaatgggtgctgcccaaaggctggaggtttcccaccacttggtgctcatggtccatttcagcccacaccagctgctcttccgacatcccttgctggatggatggctaacccatctcctgttccacacccttcggcttctggccggacccataggtttggcaagcaagctaataatgcaagctatttttaaagcgccccaaaaaccccttcctttccaataaaccccagcttatggactaatcaaactgggtggattcaagaacatgta

SEQ ID NO: 462 - DNA, 2093 bp, Glycine max
agacctcgtagggggggttgggctcgaggaagaataaaaattagggcgaagcgggtcataggtgtgaagtgaaagagagattctgcgtgcaggaagagcgaagcgagtgagtgtggcaatggcggaggagcaaggtgaattcaggatttacaattccatgactcagcagaaagagatcttcaaaaccaaagtccccggcaaggtttccatgtacgtttgcggagtcactgcctacgacttcagccatctcggtcacgctcgcgctgcggtttctttcgatatcctcttcaggtaccttaagcacttgggctatgagattacatatgtgcggaatttcactgatgttgatgacaagataattaagcgagcaaatgagaccggggaggatccattgatgttgagcaaccgtttttgtgatgaatataatgctgatatggctgatctccagtgcgagacaccatctagggaacctcgtgtttctgaacaccttaacgagataaaggacatgataacccagattatcaacaatggctatgcatacgaagttgatggtgatgttttttatgctgttgataaatgcccaaattatggcatgctatctggacaaagactagaacataatagagctggagaacgagtagctgtggactcaagaaagcgtcacccagctgattttgcattgtggaaggctgctaaaccaggtgagcctagctgggacagcccttggggtcctggaagacctgggtggcacattgagtgcagtgcaatgagtgcttgttatttaactcataaatttgatatccatggtggtggaattgatttaatctttcctcatcatgaaaatgagattgcacagagctgggctgcagaccatgatagccatgtcagttattggatgcataatgggcatgtcactaataacaatgaaaagatgtcaaaatccttaggcaactttttcactattcgccagatcactgagcgttaccattcacttgctttgaggcactttttgatcagtgcccattacagatctccactaaattactcaatttcacagctggagaactcatcagatgctatttactatatatttcagactcttcaagattgtaaagatgctgtatcaccattacttcaaggggaaactgagaagaatgaaaaggtacctcaaattaatgaggctgccaaggaatgcattaagaagttgaatgttgagtttcaaacaaaaatgtcagatgacttgcagacaccagtgatactaactggtgctctccaagaggccttgaaatttgtgaacacttctttgaagatgttgaagaagaaaatgcagaaaagagcacagttgcaattgattcaatccttattggaggttgagaaagtagttggaaaagttttggacgtactaggattgttgtcttctaaatcctatgctgaggttctgcagcagttgaaagataaggcattgaagagagcaggtctgacagaagatgaagtgctacatcttatagatgaacgaactcaagctaggattaataaggatttcgccaaaagtgataagatgagggctgatttggctacaaagggcattgcacttatggatgtgggcaacgaaataacatggagaccatgcatcccgagtgagccacttgttgcagaagttgttcagagacctatagttgaggaaaagcagtctactccagtgaatcaaaaagtggaagaaatacctggggatcgagaagggaatggcccacatacaacaacatgaaggtggagtcaatgtgtccctccttagctatgattaatacggaaaatgttataatttatcaatactacacaacgcttgaagattgtataccagttgaaagatatgtatgaccatacctaggtgtctaggacgcgaatcatttttacacatttctcatgttgggtcttctatggtcctgtctctggattagtttaactgatttgacaattgcatgaacgtgcccctaacggagattttgtttttttgatactcagattgggtatttagctctttgtattacagaaagccggaatattttttcaagaatctagagtctgattatctcctg

SEQ ID NO: 463 - DNA, 1362 bp, Glycine max
attcgcgggatatagcgtgaatttacaaaagtagccaacaacggtgcctgtccttccgatatccattcataattctccggaacaacacacttgtgtttcctttccattttacggaaaaaagagaaagataagcgaaacaaacaatctctgaatcgatgggctaaaagggaataaaaaagaaagagcttcaaatctggcaaatctcgtgggattgagggctcggtctgcgtcgaagcaagcttctccccatttgcacgacgacgaggaggagtgtaggccttggcgtcgaaggttaaccatgtctttgtcttgggcctccgccctcaggatcaccattctccttctcctcctcgccgcggtcatcgtcgcatgcttcactctcccaatcgaaaagatgatgaaggacttcttattatgggtcgatcacgatcttggtccctggggcccacttgttctggctgttgcttacattcctttgactgtcttggctgttccagcttcagtgcttactcttggtggaggttatctttttgggcttccagtgggatttgttgctgactctattggtgcaactgttggtgccggagctgcatttcttcttggtagaacaattgggagatcatttgttgtttctaggttgaaggattatccacaattcagatcagtggcaattgcaattcgaagatctggctttaagattgtattactgcttcggcttgttccactactaccatttaacatgttaaattatctcttgtcggtgactcctgtttcaataggggaatacatgctggcttcctggttaggaatgatgccaataacactggcacttgtttatgttggaacaactcttaaagatctttctgatgtgacacatggttggggcgagttctcaaagactcgttgggcgtttatcattcttggtcttgtgatatctgttgttctgatgatatgtgttaccaaagttgccaaggctgctttagataaagccttggccgaaaatgaagacattgatgggattacttcctcgccagatttacctattgttgctgaaccatcagcagatcttaaccaacctctcataattaagatagattcttctgaagacagtcatgaaaagtaaattcctttttgtgtaaattcttttttcactctaccttctataaaggctatgcttttaattttaatcttaggggtagctgcctatttatttgccacttgtacagtttcaacattagaaatatagtttgtgacaggagtgtctaatcctacaaccaagatgacattattgactctatctttcatttttaacaacagaaaagttcatgttatgaaccattcttgattaaaaaaaaaaaaaaa

SEQ ID NO: 464 - DNA, 1464 bp, Glycine max
agctccggaggccccccccccaccaaacgcatagcgcgaatttacaaaactagccaggaacaggccctgtctttccgatattcaccatctctttctctctaatccaaaaaaaaatctgttgtgaacaaacacacattattgtttgttttcatcccacggaaaaatcgatcaggcaaaacaaacaaaggtgaaactgaataggtgcgtgtttgtgttgatgggctaagaggacagagaaaaagaaagaaagagtataaaatcaaatctggcaaatctcgtggggttgagggctcggtcttcgtcgaagcaagcttcccctgatttgcaggacgacgaggaggagtgcaggccttggcgtcgaaggttaataatgtctttctcctggtcctccacccttaggatcaccatcctcctcctcctcctcgccgcggtcatcgtcgcgtgcttcactctccccatcgaaaagatgatgaaggacttcttattatgggtcgatcacgatcttggcccctggggcccacttgttctggctgttgcttacattcctttgactgtcttggctgttccagcttcagtgcttactcttggtggaggttatctttttgggcttccggtgggatttgttgctgactctataggtgcaactgttggtgccggagctgcatttcttcttggtagaacaattgggagatcatttgtcgtttctaggttgaaggattatccacaattcagatcagtggcaattgcaattcgaagatctggttttaagattgtattactgcttcggcttgttccactcctaccgtttaacatgctaaattatctcttgtcggtgactcctgtttcaataggggaatacatgctggcttcctggttaggaatgatgccaataacactggcacttgtatatgttggaacaactcttaaagatctttctgatgttacacatggttggggcgagttctcaaagactcgttgggcgtttatcattcttggtcttgtgatatcggttgttctgatgatatgtgttactagagttgccaaggctgctttagataaagccttggccgaaaatgaagatattgatgggattacttcctcgccagatttacctattgttgctgaaccatcagcagatcttaaccaacctctcataattaagatagattcttctgaagacagtcatgaaaagtgaattctattttgtgtaaattctttcttcactctaccttttataaaggctatggttttaattttaagctttagcggtagctggttgcttctatttattcgcgatttgtacagtttcaacattagaaatatagtttgtgacaggagtgtttaatcctaattcctacaaccaacatgacattatggactttgtgttttatttcttttgacagcagaaaagttcatgctatgaactaaaaaaaaaaaaaaaaaataattcggccgcgtcgcgct

SEQ ID NO: 465 - DNA, 2010 bp, Glycine max
tcctcttctccttctccttcttggatttcaattcatttctgttgatggttcagctgatgaagaattctcggaagcccgaaacgtcttcgtgcggcggccccggctcgtgccggatcggcgcgggcccactggaagaagagcatgggcctcacaacaagcgctgcaaaccctctccctctccctcgcctcagcctcagcaatggagtgcttccgatgatggttctgtcagttctccatcccatctgaacatacttgacgagccgagcccgttgggtttgcgcctcaggaagagcccttcactgttggatttgattcagatgaagctttctcaaggaagtgcgcagccgagcgaagatttaagctctggagccaaaagggagagcagggctgctgctgtgtccggtgccggtggtgctgacaagctcaaagcttctaacttcccagcttcgctgctgaggattggttcgtgggagtataaatcaagatatgagggtgacttggtggcaaagtgttactttgctaaacataagcttgtttgggaagttctcgaaggtggtctaaagagtaaaatagaaattcagtggtcagatatcatggcacttaaggcacattgtcctgataatgggcctagcacattgactgttgtgcttgctaggcagcctctttacttcagggagactaatcctcagcctagaaagcatacactatggcaggcaacagcagattttaccgatggacagtctagtaaacataggctgcattttttgcaatgccctcaagggctgttggcgaaacattttgaaaagcttatccagtgtgacatgcgtcttaatttcttaagccaacagccggagataattttggattcaccacattttgacacacaaccttctgcttttgaggacccagacaatccaaaagatcatgatctgcttcaagtcagtggtaaaggatcctccacgtcttgttatcaagacagtggatcacctcaggcatccctgtcatcatcatttaagactgaacacaatgatcctcctggaatgatgttggatagtctcccccgagatgcaccttcacccagttcagttatggagtgtacttcaattgaagggagtacaagctctgaaactgattccaagggcccaagaaatggggatcagataaaacttcctggacttcgaccttctatgtcagtgagtgattttattggccaaattgaactctgcctgacagagcaaataacctccgggaatccaccattttctgatggaggatcggagtacaaggagatcctggaagacattgctcaacatcttctcaatgacaatcaggttgcagcaacttctgatgaaaaatcactcatgtcaagggtcaattctctctgctgtcttctgcagaaggaccccgttacagtgcagaattctcattttaccgaagatagtagtactgttgaaggacctcatgatggaaaagatgtcaagcctggtgcggaggaaccaaaggacacttctggtggcaagcaagcactaggcatgtctaggaaagactcgtttagtgatttgcttctccatcttcctagaatcacatctcttccaaagtttttgtttaacatatcagaagaggatgatgacagtcatgccaaatagttattctcatatttggaatttcaaattgggcaagtatagagttacctagcagtgtctagctgcgtagggaatattttatgtctttgtagacatgtgcaagtttaatttctaccctgggaactactgggatttggaaaagttgttttaatgaagaatcctgatagagcccatgtataaattgtcaagtagatgttttagatctgtatttgttttatttttgtttgatttctgtgttatgcacagatgatgtctacttgtaagtaaatcctgtgttgcctgatcagttatggatggtatccatgacccttggaatagataagatcgtaaagctgtagctgatactatccctggcaagctcagtttg

SEQ ID NO: 466 - DNA, 1391 bp, Glycine max
tcgagtcagctacgtaggccccccccccaaattcttaagcgttcacacaagcttttcacatggaaatcggctcccccgcattccttaccctcgaagactattcttccttcttcttccctgacatggatcccattcccaattccaatgtcaacaagcgtcgtgcaaacaacgaccagttcgacttaaatgactccgcattcagccacctcctcaattccatcatggatcctaaccatttccaacaccaatccaaaccaatccaattcgactcctccccgaccaagagagctcgccgtgacctcctcgttctcgaagacagccacctcaaccccgcctcggccccgcaacagcagcgccgtctctgggtcaaggaccgctccaaggactggtggcagcggtgcaacagcccggacttccccgaagaggaattccggcgccacttccgcatgagcaaggccaccttcgacatgatctgccagcacctggactccgccgtcaccaagaagaacaccatgctccgagaagccatcccggtccggcagcgcgtggcggtgtgcatttggcgcctcgccaccggcgaccccctccgcgaagtttcgaagcgcttcggcttgggaatctccacgtgtcacaagctggttctggaggtctgctccgccatcaaaagcgttctgatgcccaagttcctccactggccaaacgaagccgaaatgaaacccatcaccgaaaaattcgagtctctctccggaatccccaacgtgggaggctcaatgtacaccactcacattcccatcattgcaccaaaatccaacgtcaacgcttacttcaacaagcgccacacagaaagaaaccagaagacatgttactctataaccgtccagggcgtggttgatcccaaaggtatttttagcgatgtttgtataggttggcctgggtctctctcagacgatcaagtgttggagaaaagcgcgttgtatcagagagccactatgggaaatttgaaggacgtgtgggtggtgggaaactcgggacaccctctgatggagggtgttttggttccttacactcatcagaatcttacttggacgcagcacgcgtttaatcagaaggttggggagattcagagcattgctaaggacgctttcgccaggctcaaagggaggtggtcttgcttgcagaagaggactgaagtcaagcttgaggacttgcccgtgcttcttggggcctgctgtgttttgcataatatttgtgagatgagggatgaggaaatgatccctcagtgtaactctgtcatctttgatgatcagatgctgccctataataataacgtttgctttaatgctttcgatcaagccttacatcagatagcgcactatttgctggtccatgga

SEQ ID NO: 467 - DNA, 674 bp, Glycine max
cccagatgatgctagacaagttgcagactacatttgggccaacttcttgggagggaaatcaaactctaggccttttgggaatgccatattggatggagtggattttaacattgaaagtggtgaactacactatgcagcacttgcttataggttgcatgaccattatgctggttctaaaaaaaaattctacttaactgcttcaccacaatgttcattccaaaacaacttacttcatggagcactcaccacaggcctttttgaccatgtttggattcaattctacaacaatcctcaatgtgaatttacctctaaggaccccactgggtttaagagtgcatggaatcagtggaccacatcaattaatgctggcaagttctttgttggacttccttcctcacatgcagcagctagaacaggttttgtgtcatcacatgctctcataaataatttgctgcctatagttaggtcacctaaatatggtggtgttatgctttgggataggtatcacgatttgcaatctcgatatagtggtaaaattagtggaagcgtttaagtgctccacttattaaatagaagttttaaggattctaggaattatttcaaataactgttgtagaatatcttcaatttaaatataagtaatttattttcaaaaaaaaaaaaaaaaaaaaaaa

SEQ ID NO: 468 - DNA, 1438 bp, Glycine max
ctaacccgcccgcggatcccgtcacaagttctttcactggaaggagaacaagaagaaaaaaccgacacaaagatctagtcctagctagaatcaaacaggggcgatctcaccttcaagaacacatcgccatggcaaggaacttgcttcttgtgctttttgcagtagccaccctcctccatggctcagcagcccaaaccagacacatggtcggtgatgccacgggctggatcatccctgctggcggcgctgccacctacaccgcctgggcttccaacaaaaccttcaccgtaaacgacactctcgtgttcaacttcgccaccggccaacacaacgtggccaaggtaacgaaatcggctttcgacgcgtgcaacggcgggagcgccgttttcaccctgacctccggtccagcgaccgtgaccctgaacgaaacaggggagcaatactacatttgctccgttggatcacactgttccgctggccagaaactggcaattaacgttaacagagcttcttctaccggtccttcccctgcacctcaacccagaggaagtggttctccaccaagggctagccctgtccccacacaagcaccacaagccagtagccccactcctccaccaaggtctgcaccagcacctgcttttggtccatcctctgaaccagctactttcattgttggagaaaccgctggctggattgttcctggcaacgcttccttttacacagcttgggcctctggcaaaaacttcagggttggagacgtccttgtgttcaactacgcatcaaatacacacaacgtagaggaggttacaaaggccaacttcgatgcttgcagctcagcctctcctattgccactttcaccactccacctgcgagagtgaccctcaacaaatctggtcaacatttcttcatctgtggaattccagggcactgtttgggaggtcaaaagcttgccatcaacgtcaccggcagcagcaccgccaccccaccttccgccgcggccccccccaccactccttctagcccttctccagccggtgctgtcactcctcccccacagaactctggtgctgcatctcttggagttgttggagtatttgccaccctgctttcagttgccgccacttttttctattagatactccacgagattattctagtcaggagcttgcgagtcatcatcatcgctctttgattgtgtttcatgaattcagtttttttcttatttttttgaggatgacaataaagttagctttaatttaatttctcttcatcggctacagttttggttttttgttatgtttttgagtaaaaataaattggtacggtgtgaatatgttaacaagtgtatttctttgatagttaacatcgttgtattacagtgcatatatttggaattggagataaaaaatatttgtgacacctttcgcaatcaaa

SEQ ID NO: 469 - DNA, 1229 bp, Glycine max
  misc_feature (1225)..(1225): n is a, c, g, or t
gctgaagatgctggaacaaagcttgaggcagcaaagagcgtttcatcaaatggggatgatggaacaggaggcttggaggccccagagagggttgccagaacgatctgtcaacattttgagagcctggcttttcgagcatttccttcatccgtacccaagcgatgcagataagcatctgttggcacgacagactgggctatcgagaaatcaggtatcaaactggttcattaatgcgagggttcgcttgtggaaacccatggtggaagacatgtaccaacaagaactcaaagaggccgaaggggcagaagaagagagggaggggaaccaaagcagtagcaacaacagtggccaccaattggcacaaactccaacaccctcaaccacagcatcgacggcaacagcgccaccaccaccaacaacgacaccaccaaccggaaaaagatccgattctgaaagcgacccttcacttgcaccaataaataacaccaccagcactgccgccatgaccgtcaccgcctctgaggtgacgcaactgtcggagctgccccgaacaatggtggccgatgaatcttgtaggcatggtagccttgttgcaacggagtttgggaccgcttctgctgcttctgaaattggttccactctgatcaggtttgggaccaccgccggtgacgtgtcactcacgctagggcttcgccacgccgggaacatgccggagaaaactccgttctccgttagggactttggaggcatttaaaacttaatcaattccccctatattacttcacatgatcataaaagataagaatgatacgtataggaggttgctttattattactattattataattataataatatgattattatgatatgatatatcaaaagaaaccatttttccacccttgtaacttctctttgatgttagttcctcctctcagattaagttgcattttatggaaggaaaggaagaagggaatacgaaatgagaaaggtaggcttatatgtgattatcagctggcgataggtaggctctgtggtgatctgtgcaactgtatagtaggttgttttctacgtttttttatttatttatcacgtgtatgtacttaaggtttcatatcttaatttgataggactttatctaattaatagaataacatgtgctccctctcatcccgtatatgcacttgatgttttgtaacttataatttgacaagacttgttccntttt

SEQ ID NO: 470 - DNA, 1024 bp, Glycine max
ccacgcgtccgctctttttaattttggctcatcatcacccttcgccttttcgccgctgttgcagactctgctcaaaacacacaaacacagcaacagccaccacactttcactcacccacttacaatatctccattttgccccttctttccccttcagcataaaaccatctctataaatattcattcattaaacatagcagacaatagcagcacacacacttatcttcttcttcctctgattccattcatcattcattactctgatccgacggctgcgatcttctcgtttctccaatcgtacggccaggggtcctttgtctgcctcactcaccttcccaactttctctctctacttagagagtagcttctctggaacaccgagtatggagtccaacggtcatgttagagtaaagagaaatgatattattaaagaaaatggtcattcccatttgtcaaataatgatgatgaacatgatccatggactgcatgggcatacaagcctcgcaccatcacattgttacttattggcgcttgctttcttatttgggcaagtggagcacttgatccagaaagagatgcatctggggatctagttacttctgttaaaaggggtgtatgggcaatgattgctgtttttcttgcttattgcctgctgcaagctccttctacggttcttattaggccacatcctgcaatttggcgcttggttcatggcatggctgttgtatacctagttgccctcacatttttgctttttcagaagcgtgatgacgctcgacagtttatgaagtttcttcatcctgatcttggtgttgaacttccagagagatcttatggcgctgactgtcgtatatatctgcctgaaaaccctgcaagcaggtttaagaatgtttatgagacactttttgatgaatttgttctagctcatgttattggatggtgggggaaggcaatattgattcgtatcaaccccttctttgggtgttatccattgtttttgagttgggggagtacactttttcg

SEQ ID NO: 471 - DNA, 1934 bp, Glycine max
ggctcgaggacaatagcagcacacacacttatcttcttcttcctctgattccattcatcattcattactctgatccgacggctgcgatcttctcgtttctccaatcgtacggccaggggtcctttgtctgcctcactcaccttcccaactttctctctctacttagagagtagcttctctggaacaccgagtatggagtccaacggtcatgttagagtaaagagaaatgatattattaaagaaaatggtcattcccatttgtcaaataatgatgatgaacatgatccatggactgcatgggcatacaagcctcgcaccatcacattgttcggacgcgtgggcgcttgctttcttatatgggcaagtggagcacttgatccagaaagagatgcatctggggatcttgttacttctgttaaaaggggtgtatgggcaatgattgctgtttttcttgcttattgcctactgcaagctccttctacggttcttattaggccacatcctgcaatttggcgcttggttcatggaatggctgttgtttaccttgttgccctcacatttttgctttttcagaagcgtgatgatgctcgacagtttatgaagtttcttcatcctgatcttggcgttgaacttccagaaagatcttatggcgctgactgtcgtatatatctgcctgaaaaccctgcaagcaggtttaagaatgtttatgagacactttttgatgaatttgttctagctcatgttattggatggtgggggaaggcaatattgattcgtaatcaaccccttctttgggtgttatccattggttttgagttggtggagtacacttttcgtcacatgttgccaaatttcaacgagtgctggtgggacagtattattcttgacatcttgatctgcaattggtttggaatatgggcaggaatgcatactgttagatattttgacgggaaaacatacaaatgggttggtctaagccagcagcctaacataataggaaaagtgaaacgaacattaggccaattcacaccagctcagtgggacaaagacgagtggcatccactgcttggtccttggcgtttcattcaagttcttagtctttgcattgtatttttgacagtagagctcaacacattctttttgaagttttgtctctggatacctcctcgaaattcggttgttatatataggttgattttgtggtggctacttgcgattccaacaattcgtgagtacaactcataccttcaagacagaaagccagtgaaaaaggtcggagcatattgttggctctctcttgccatttgcattgtggaacttctgatttgcattaagtttggacacggcttgtatccaaaatcaatgcctatatggctggtaatattctggtcaggtgttggagtgaccatttttacatttttgcttttgtggtcttggcaactccatcgcactttagggaacaaaaagagacgataatttcacaattgcagcagttgcaatgctgcattattctttgattgattccttcctcatttttatgggtaccaatccatagccatacacatggtgtaaatacatcaacctcataattaattgtaaatgaatattaatttctcctagcttagtatagtggaacagatcacagtttctttgggcggcaaatttatagttccagctggtagagaggtgtacttattattattatttatgaggcctgcttctgttctgaataggttttcaccattggtaaattgcccaatttcttcgcctccatcggaatgaatcattttgaaacgtgtatccagccatttcaaggaaattttgagtgaagaatgcttttgcttcattaaaaaaaaaaaaaaaaaaaaaaaaaaaaaaaaaaaaaaaaaaaaaaaaaaaaaaaaaaaaaaaaaaaaaaaaaaaaaaaaaaaaaa

SEQ ID NO: 472 - DNA, 1232 bp, Glycine max
  misc_feature (27)..(27): n is a, c, g, or t
tcgagtcagcacgtaggcccccccccngtgcatgggatcatgatggtaaatgcatgctggtggtataggagatggttcaattcagattggaatattaagcctggatgggggagtaggccagatgtacatattgagaaaagtcatgaggatgatattagtggtctgaaattttcaagtgatgggagaatcttattgtcaaggagttttgatggttcattgaaggtttgggatctgcgcaaaacaaaagaaccattaaaagtatttgaggatctgccaaatcactatgcacaaacaaatattgccttcagtcctgatgagcgactctttttgactggaacatctgtggaaagggagagcatgacaggaggtttattgtgcttctttgatagagtaaatcttgagcttgtttcaaaagttggcatatcacccacttgtagtgttgttcagtgttcttggcatcccaaactgaatcagatctttgcaactactggtgataaaagccaaggtgggactcacatactatatgatccaaccgtaagtgaaagaggagctcttgtatgtgttgcacgtgcaccaaggaaaaaatcaattgatgactttgaggcaaaacctgtcattcacaatcctcatgctttaccactatttagagatcagcctagccgtaagcgtcagcgagagaaagtactaaaggatccattgaagtcccataagcctgaactacctatgacaggtcctggctttggtggacgagttggtactagtcaaggaagcttactgacccagtatcttctaaagaaaggtggtatgatcaaggagacatggatggaggaagatccaagggaagctatcctgaaatatgctgatgctgcagcaaaggatccaaagttcattgctccagcatatgcagaaacccaacctgagccagtttttgcaaagtcagattctgaggatgaggagaaatgatcgggttaccaagttattgtatcacaaagatggctaacaaggggacggtaggcaagagtgtactgtactttatttcgagaggctgggagaagtttcgctaatgcaatgatgctgttgaaattgtaacacctctaatgttttagtacctcatgtctgtaaattagtcatgtaaaattgaattttgcaaactataaaatgatacatttacgaattttaaaaaatttgtaataatcctatgcaatgatttggcatggcgtgatagtgccatc

SEQ ID NO: 473 - DNA, 1066 bp, Glycine max
tcgagtcagctacctaggccccccccccccatctggactcatcggcgttgctgtgctcccaatcctatttacacagagagagccactgaaacaaaacaacgatctaattcaagtttaaattttcagttctgttctgcttctaatggcgagtttcagaaacgctgcgatcaacgtcttcagagcgatcaatactaacaaagccaccatcgctgcttccacaaactctcttcacactctcaggccccttttttgttattctaggtctacccctttctcttcccacactgaagctgaatccctgcaaatcgatttatctaacgaagaaagcaaaagatgcttgtttaaccggctattgtatagaagcaaacaacgagggttcctggaactcgatttggtcctcgggaaatgggttgaggaaaacattcactccttggatgaaaatcggattaaggctctcattcatgttctcgatctggagaatccagacttatggaagtggatatcaggacaggagcaacccccagaatcagtcagcgcaaacctggtctttgctgcagtgcgggaaagagttaagaaaaaccttgatatccattctgctcctgaagtaagagcaacgcctggccaaccatgggtaagaggctgggatgatatcaagaaaggacaagatggtcctgtttctggaaatcagtagcttgacattcaatgatcataccatctattacaatgaatgaaatccggtccaccattttttactttgtaactataaataactaaataagggctgggtaactgcaacttaaaaggtttgtattagctgctagaaatcagtaaaggggtttaaactggatgattgtgactttcttgaaatctttactcttcatctgtttcatatccagtaagtttattgtttagtgatgtcattaatgtggtttaagtttggttagaaataatttcaaaggaattgatgagtaaaaaatagacatgtgtttcgaaatgatattctaaaaataaatttagaagaattttgtttatatggtaaagtagaattaatttaggtgtaaataga

SEQ ID NO: 474 - DNA, 1823 bp, Glycine max
ggctcgagatctggtccaaaagcaacccaacatcgtcagagttcacgccctcagtctcagagagtgacaaatcagaaggttttggagattaaggatcaaattattagagccagagcatacttggggtttgctcctccaggcagcaactcacacttgatgaaggagttgaagctgagaattaaagagatggaacgtgctgttggagaagctactaaggattcagatctgtcaaggagtgctttgcagaaaatgagacacatggaggcttcactgtctaaagccaaccgtgctttcccagactgcactgctatggcagctaagctccgtgcaatgaatcataatgctgaagagcaagttcgttctcatcaacacgaagcaacatatcttattcatcttgctgcaaggaccaccccaaaaggtcttcactgtctttctatgcagctaactgctgattactttgccctgaaacccgaggaccggaagcttccaaatgaaaacaagattcatgatccaaaactttatcattatgctgtcttctctgacaatcttctggcatgtgctgtggttgttaactccactgtctctaatgccaagaaaaaggagaaacttgttttccatgtagtgaccaattcactcaactttcctgcaatctggatgtggttcttattaaaccctcctggcaaagccacagtccacatacaaagcattgagaactttgaatggttgcccatgtacaatacattcaacaaacataattctagtgatccaagatatacttctgagttgaactacctgcgtttctacctgccagatatcttccctactctaaataagattctgctctttgatcacgatgtggtggtgcaacaagatctcagtggactatggaatgccaatttgaaaggaaaagtaattgcagcagtgggcacctgtcaggaaggtggaacctcatttcataggatggatatgctcataaacttctcagatccattcattgcagagaggtttgatgccaatgcttgcacatgggcatttgggatgaacttgtttgatttacaacagtggaggagacataatttaaccgctctctatcacagatatttgcaaatgggttccaagaggccgttgtggaacattggaagtctgcctttaggctggctcactttctataacaagactaaggttttggacagacggtggcacattcttggccttggttatgactcaggtgtcgataaaaacgagattgaaggggctgccgttatacactacgatggaattaggaaaccatggttggacattgcaatgggaagatacagaagttattggaccaaatatatgaactttgacctccctattttgcaacgttgcaatctccaggcgtagcccaaaattcaaatattattactctacctggctggttttatttgattaatttgttggcacattaattgcctgcttcagtcgattctttattgttctttggcgattcttcttgtaaagcccttcatagatgcatagaatttcctacatatatctttttagaagcttagctaatttgtagtgacattcagatgaaataagactcgcataggtattttagctgcttggagaaaccattatttgttgtgtacataattcattcccgtgctctcttaggtcgtgctgcctctgattactatcaatttacaccaattgctagcggactggaaattaaagttaaattttattttgaggaactaatttatacaaaattgtggaaatgacggttgcgatttgaattgtaagttgtaacgttaattatgccgtgtgatcatttttct

SEQ ID NO: 475 - DNA, 1634 bp, Glycine max
aaaaaagcgaatcatttatgcagttagttagctttaatttattttacatgcttcactagctggtcataacaaactgggcaacgttttgaatgtttaaactgttaattattgataattgataattttacaatggactaacgagatactttccaacagactgcaagcctataaacaagaatcagaattctggcaatctacatacacaagtggtgaactgatttgacatccaagaagcagagcatttgaaacccttaggcaatccaaaaacaaattgatgctatacaaaaaatctatttcaaccaatcagcagctgcccttccagcaaaacaactaagaatttcaccaaaaagaaaacagagagcttaatggcaaactagtttaatcctacaaagtccaactggaagctggaatcccttgtttctggaaccaatcaggcatgtggaacttttcatagaggaaaggtcttacatcattctgctcagaaagttgcttgagaagtggaagaatgacatctagaagctgggtgtcatgtggttgcccagcagaaaatggaatgcacggaattccattcaccggttgcaatacaaagctgaaaggattattgtctacaataacaatgcgacaaagatcctttgagatgcaggtaagatccttgacatgctcccgatattccgtgctaattgttgagggccgataaagtcgtagactgaatcgattttccacatctattctgtcaacaaggggtctagcatagccttcaagaccagctgtaaacagcaccatgtcagcaaattcactgagttgctttaaaaattccttcaacccagggcgttcaaatactgtaacataattgatttttggtttgccttctccttccttgtctatcgatacacattccagctcaaaccaattcaaaccaccttcgattgcttgagtccgtagagcagctggcaaacttgatgtctcatatgcacataccagtgtttcatctaagtccagcacaaccgtgagttttgggacgggatgatcggcgggggaataatcaagtggtgagatttcgagggcggagggaggaggcgaatcgtgttcagcaatctcaacggagggaagaggtttgaaggaagaggaagaggaagaagcgtttgaagaagaagaagaattagaagagaaagagagtagagggtagtgacctaaggctcttataatctggaagaagatctgaaagaagaaggccaaccaactcaacagtgccctccacacttgctgagtccgaggcgagtacacctccgcctgagtcaactcgcccatattcccccaaaacaaaaacctaaccaacgatcgatcgatcgatgcaaattgattattaatctcttgcgttgcgattgtgccgtgctgcttacggggtgtttcgattctctctctcttttgcgtgtgagtgattttcagagagatgttgtggtcatggtggtgcttcgacgaggtctagagagagagagagggaaaggaaaagggctacggagattgacgcacgcgctgcggttgcgcgtgaggtctttggtggcgcgttagtcagagatggccttctagctttttctgtattttggatgtttttgctttttctgcggtcatgggag

SEQ ID NO: 476 - DNA, 641 bp, Glycine max
acaccaaactgaaaaaaagtaaaaaaatctctcaacaccttgagaaattttatctgttagtaatttgctactactattttacattctctttctctctacgttttattatagtcatggcatctcaagcagtttccttcaagtccttcgccgttgctcttcttgtggcgcttttcttcgccgccgccgcctccgctcaggacttgcctccggcggcggcgccgggacccgatgccggggccgccggagccgtttcgagctcggtcgccatgattggagcttccgtactgttgtcaatgctcgccatcttcaagcactgagtataatctgatggatccatcttgtgtgaagattattgattcgttctgcacactcagatctattgttgctgcttttataatacgttacgagtgatgattattaatttattattattatgattattatgagtttatctatgtataatagagagagagagagagagatcttacagcatttatataatgaaccatttattgtaggtgttagtgagaaataagaggaattttgatatcctcttttattatattgttatgatttcagtgtgtaatatacatattcattcaatgaatttatttaaaaaacaaagaaaaaaaaaaaaaaaa

SEQ ID NO: 477 - DNA, 776 bp, Glycine max
ccgggctgcccacgcgccctaccgccgacgtaggccccccccccccgacaccaaaacgaaacaaagaagaaaaaaaaaactcaaacaccttcaagaacttgtatctttctttgttagtatttgttactacaattttacattcttttcatctctacatatttcattagtcatggcacctcaagcagtttccttcaagtccttcgccgttgctcttattgtggcgcttttcttctccgcctccgctctggacttagtttcggggcagtcgccggtgccggcgccggcgccggcaccagatgccggagcagctggatccgtgtcgagctcggtcgccatgattggagcttccgttgtgatttcattgctcgccatcttcaagcactgaagaataatctgatgatggatcgattttgtgtgaagattattgattcgttctgcacactcagatttattgttgctgctttataatacgttacgagtgatgattattatgtacgtataaaagagagagagagagggattttacaccattcttatattgaaccatttattgtaggtgttagtgagaaataagagggattttgaaatcctctgttatcatcgtaacatcgttatttcagtgtgtaataatagtaaatagtaatatacatattccccaatcttatgattggttagttcttaaaaaaaaaaaaaaaaaaaattttaactgttttttttttttctttcttttggatattgttaaatgttaaccggtgtcttatcattaaaaaaaaaaa

SEQ ID NO: 478 - DNA, 1609 bp, Glycine max
ttaagtatggatctggctcctctaaagtgaactcactttagagagtgaagtaacaaattcgtggatgagaaaatcaatgattaatattatgtgcacatgcattataaatcatgcatgtgttagaatatcaacagttgatttgtatgtcaacaacttagatttgttactttactgactaaagtgaataactcattttggaggagccaaatccattaagtataattttctttgcatcctgaagcatggacaaaacacttataccagaatgtctgtggactgatgtagttaaccagtctcctccaatggaagcttaaattatatttcataagaacacaatgcctggttttgggaccaaggaattaaatcattctctcaaatcaatatttcaagtggaaaattggtagtgtattttcttcattgtttctttgtcagttggttggacctgatatctgtaagacgtgcaacatttgtctaaacatttgttgttaataaaacttttgatagctatggaatgacagggtttcccagattgactcgttgagcgcttactggtcaggttctaatgacatttctgacttagagacagagaggagagaaagaaaggggtggaaggtgacgatacatgacctctctggctcggctgtagctgcagccttcataacaactccctttgttccatcttcaggttgtgattgggttgccagatccaacccaggatcttggttgattgttcgtccagacataggtcgatctgagagctggcagccatggggaaaacttgaagcatggcgcgagcgtggcattagagacactgtttgctgcagattccatcttctgtctgaagctcaagaaggaggtgaatttcttatgtctgaaatacacataagtgctgaaaagggtggagagtttttcatagacactgagaaacatatgcgaactgtagctactgcagcaagtccaatacctagtccacaaagtagtggagactttggtgcgctgagtccattggttggaggtttcgtcatgagttgtagagttcaaggtgaagggaagcgaagtaaaccatcagtacaactggcaatgcgacacgtgacatgcgtggaggatgctgccatcttcatggcacttgcagcagctgttgacctcagtatcgtggcatgtaaacctttccggaggaaggtcaggagaggtttttggcattcgatgtgatcaacaaggcaaatgtatttataagcactgtcggaactgtcaatgctctgcctttgcttttcattgctgcaatgcttaaaaaaatgtacagcttaagttagtgtcatacattgccctcttgtgaattcttctacatattatgatttctaaggctacatgacaatgtggcctttgtacaattaaggtgcacaaaacaatctcaagttaatgaacttttctagaattaaccttattctgaaaagctcctatgtttgatagatgttattgtcaaatatcatatatctttcttcccttcaatattgtgagttgggttcaaggtagaccttgtacattgtattatccatttactgaattttacaatatgtgcagattcataattgtgaatatctaaggtaaataa

SEQ ID NO: 479 - DNA, 761 bp, Glycine max
  misc_feature (744)..(744): n is a, c, g, or t
aaagaaagagagattgcgcaaacatttttcaataaattttgggacatgagttttgtgaaaaatagtgctttaaaagcaatggtgggacaattgtgacaaatatggatcctcaggcctttattaggttgtcaataggttctctggggttgcgatgcactggaattgaactgagcactacaaaatctggaattcaaacactctctttaccttgtgtttgtgagatacggcttcgaggttttcctgttcaaacatcatcagtccccgtgatatcctccacagaagttatacctgatactcagaacgttgcttttagcttttaccttgaggaatctgatttaaaagcgttgttagctcccggttgcttctacaacactcatgcttgtttggagattgcggtgttttcagggaggaagggatcccattgtggagttggcaacaaaaggcagcaaattgggatttttagaatgcaggttggccccgagtggggtgaaggaaagccagtgattctttttaatgggtggataggtattggcaagaacaaacaggataatggaaagccgggtgcggagttacatttaaaagtgaaactagatcctgaccctagatatgtgttccagtttgaagatataacaacattgagtcctcagatagttcaactgcaaggatccatcaagcagccaatcttcagttgcaagtttagtaaggacagggttttccagattgactcgttgagcgcttactggntcaggtccaatgacatt

SEQ ID NO: 480 - DNA, 3187 bp, Glycine max
  misc_feature (3168)..(3168): n is a, c, g, or t
ccctcgcgtccgaaaaccattcaatgcatcagctggcatttcccttccaaaacgttaaggtgcccccacaaacacaactaccacctttgctaataaaaaatatctccttttttccattttcattttgaatttcctttcatcttctatatgttattgccattgctacacaaacaatacaaaacaccaccctttaaccgtttgcaacggttgctttgaacgaagggagcagtaacggctatgttataatttctgagtttgtgttgtagagagaagttacgttctgagaggccaagatggattttacttcgttcttgacgtccctggggacttcctttgtgatatttctggttttgatgattgtgtttgcgtttctgtcaagtaggccagggaacaatgtggtgtactaccccaacaggatcttgaaggggttggatccgttggaaggagggtacaagagccgcaaccctttctcttggatcaaggaggctttgacttcttcagaacgtgatgttattgccatgtctggggtcgacactgccgtctactttgtctttctcaccactgtgttgagtatcctagttttatctggagttattctgctaccagttcttctgcctctttctgttactgaccatggtatgaagacacaaacaactagcaacggaactttcagtgaacttgacaaattatcaatggctaacatcacggcaaagagttcaaggttgtggggattttttattgcctgttattgggtttcaattgttacgtttgctctcctatggagggcttacaaacatgtgtcatggctgcgagctgaagctcttaagtctcctgatgtgaagcctgaacagtttgctatagttgtgagagacatacctcatgttcctcaaggtcagactaggaaggaacaggttgactcttactttagagacatctatcctgagacattttacagatctatgattgtaacagacaacaaagtggtgaacaagatttgggagtcattagaaaagtatacaaagaagcttgcccgtgctgaagcagtatatgcagggtcgaaaacaactgccaaaccagaaggaacaagacctacaaacaagactggcttccttggacttgttggtaaaaaggtggataccatagaatattgcaacgagaagattaatgaacttgaggccagattggaatctgagcaaaaggtcactctcagagagaagcagcaagatgctgctgtagtatttttctcaagtagggtggttgcagcatctgcatctcagagtttgcatgctcaaatggttgacacttggtcagtctttgatgctccggaacccaatcaactaatatggcctaatttgaaaatcaagtactttcagagagagctgaggcaatacttggtgtatttcattgtggcactgactatattcttctacatgattccaattacatttatatctgcattaactactttggataatttggtgaaatatctcccattcataaagccaattgttaatataaaggcattgaaaacagtgttggaagcttacctccctcaactcgcactgattattttcttggctttgttgcccaagttgcttctgtttttgtctaaatttgaaggcattccaactgaaagtcatgcagttagggctgcatctggaaaatatttttattttaccgtgctgaatgttttcattggagttactattggtggaaccttgttcaaagcattcaagagaattagggagcacccgacgttggatgaaatttcatccttgctagctgaaagcctcccaggcaatgctacttttttcttgacctatgtggcccttaagtaagataacttcttaactttattctgtttagtttatttatctgtggtgatacttcatttttttcatttataagttaaggtgcataactactttatggtgatggtagaaggaaatgtagaggccatgcttcatctacaaatggtgtttcacattatatcttgttattatcttttcctagattcttttgaagcaggagttaccatgtattccaaaagcacatctgtaacaaatattttctcacatgatattgtgtgtaaactgtaaaatttataatttggactattcctaccagacatatagataggaaaagacttcaccttttctttatttttaattacttggcatgacacaaattaattgttttttctttgtcttagatttttcattggctatggccttgaactgtcccgaatagttccccttattatataccatttgaagagaaaatatctttgcaagactgaggctgagttgaaagaagcttggcgtcctggagatcttggttacggaactagagttcctggtgacatgctgattgtcacaattgtcttctgttactctgttattgctcctgtgataatcccatttggtgctctatattttggcctaggatggcttgttttgcgaaatcaggcactcaaagtctatgtaccaacatttgaaagttatggaagaatgtggccacacatacacaaccgtattctagcatctttgatattataccaaattacaatgtttgggtactttgggacgcagaaattctactatacaccacttgtgcttcctcttcccatattgtcattggtctttggttttgtctgtgcaaagaaattttaccccgcctttcaacatccagcacttgaggttgcagctaatacgcttaaggaagttcccaatatggaattgatttttggagcttacattccaccaagcttgaggtctgagaagatagatggtgaccgggttgaagatgcattgtctcaagcttcaagaacaacacctgtttgatgtaattatctgaatttcaactttttttttacgtgttagatgtagtcttgtagagatacttttagacattttattaattgttcataatacgtcttaggaactagaggtgttgagtgttgactgtcgtgaatgtgattgtgtaatgttgggtggtcttgtaatattttcatgtaatgtgatgtttgttcgacttgtgatagtcgcggatcagtgttctcgtgttctctatgcaattcaagattttctttatttgtactaaaaaaaaaaaaaaaaaaaaaaaaaaaaaaaaaaaaaaaaaaaaaaaaaaaaaaaaaaaaaaaaaaantaaaaaaaaaaaaaaaaaa

SEQ ID NO: 481 - DNA, 2089 bp, Glycine max
aattcggctcgagcggctcgagcaaagactgaccaagtgtcaaccaggctcgggctccggaacccaatcaactaatatggcctaatttgaaaatcaagtactttcagagagagctgaggcaatacttggtgtatttcattgtggcactgactatattcttctacatgattccaattacatttatatctgcatttactactttggataatttggtgaaatatctcccattcataaagccaattgttaatataaaggcattgaaaacagtgttggaagcttacctccctcaactcgcactgattattttcttggctttgttgcccaagttgcttctgtttttgtctaaatttgaaggcattccaactgaaagtcatgcagttagggctgcatctggaaaatatttttattttaccgtgctgaatgttttcattggagttactattggtggaaccttgttcaaagcattcaagagaattagggagcacccgacgttggatgaaatttcatccttgctagctgaaagcctcccaggcaatgctacttttttcttgacctatgtggcccttaaatttttcattggctatggccttgaactgtcccgaatagttccccttattatataccatttgaagagaaaatatctttgcaagactgaggctgagttgaaagaagcttggcgtcctggagatcttggttacggaactagagttcctggtgacatgctgattgtcacaattgtcttctgttactctgttattgctcctgtgataatcccatttggtgctctatattttggtctaggatggcttgttctgcgaaatcaggtgaagttcttggaattttgtttaatgaacccagttttatgttttatgtggtaattttatatggctaaattttagttttcattccttatgtttatgaagtttaatgatcacacactaataatgtaatttcactctgtcaactaataaaaaatcactgttgatatgacttttaatgtatttattgtaaaagtcaataaacttaccatgaagatttgtaattaaatgactctgttaaactttttcacagggcatgacctattttctctatgcttattttaagtctcaatttagtccttttaaaaagttattttgaaatcaagtctgttagtaaatatattattttaagagtttgtgtatacttgtattaatcaacaggcactcaaagtctatgtcccaacttttgaaagttatggaagaatgtggccacacatacacaaccgtatactagcatctttgatattataccaaattacaatgtttgggtactttgggacgcagaaattctactatacaccacttgtgcttcctcttcccatattgtcattgatctttggttttgtctgtgcaaagaaattttaccccgcctttcaacatccagcacttgaggttgcagctaatacacttaaggaagttcccaatatggaattgattttcagagcttacattccaccaagcttgaggtctgagaagatagatgatgatcgggttgaagatgcattgtctcaatgttcgagaacagcacctgtttgatgtaattatctgaatttcaacttgtttttacgtgttagatgtagtcttgtagagatacttttagatattttattaattgttcagaatacgtcataggaaccagaggtgttgagtgttgatgttgtgaatgtgattgtgtaagaaaatgttgggtggtctcgtaatattttcttttagtgtgatgtttgttcgacttgtgatagttgcggatcagtgttctctatgtattcaacattttctttatttgttctgaatgagaattcatgacttttcattgtgtaaaattaacaatgttgattgatatgttctaaaaggagtttgtgggaggccttaccgcgttctgccatgtgctctgccagcagcctgttcccaaatgataagggaaattgtaaggaataaaagtgggaaagtagaatgtgactagaaatctagaatgaatgaaaaaagtttttttttttttttgtacaacatatatcaaattgaaagaaagcttgtaccacaatacgtacacaacc

SEQ ID NO: 482 - DNA, 1248 bp, Glycine max
  misc_feature (1208)..(1208): n is a, c, g, or t
  misc_feature (1240)..(1240): n is a, c, g, or t
agcttacctccctcaacttgcgctgattattttcttggctttgttgcccaagttgcttctgttcttgtctaaatttgaaggcattccaactgaaagtcatgcagttagggctgcatcaggaaaatatttttattttaccgtactgaatgttttcattggagttactattggtggaaccttgttcaaagcattcaagagaattcgggagcacccgacgttggatgaaatttcgtccttgctagctgaaagcctcccaggcaatgctacttttttcttgacctacgtggcccttaaatttttcattggctatggtcttgaactgtcccgaatagttccccttattatctaccatttgaagagaaaatatctttgcaagactgaagctgagttgaaagaagcttggcgtccaggagatcttggttatggaactagagttcctggtgacatgctgattgtcacaattgtcttctgttactctgttattgctcctgtgataatcccatttggtgctctatattttggtctaggatggcttgttctgcgaaatcaggcactcaaagtctatgtaccaacatttgaaagttatggaagaatgtggccacacatacacaaccgtatactagcatctttgatattataccaaattacaatgtttgggtactttgggacgcagaaattctactatacaccacttgtgcttcctcttcccatattgtcattgatctttggttttgtctgtgcaaagaaattttaccccgcctttcaacatccagcacttgaggttgcagctaatacacttaaggaagttcccaatatggaattgattttcagagcttacattccaccaagcttgaggtctgagaagatagatgatgatcgggttgaagatgcattgtctcaatgttcgagaacagcacctgtttgatgtaattatctgaatttcaacttgtttttacgtgttagatgtagtcttgtagagacacttttagatattttattaattgttcagaatacgtcataggaaccagaggtgttgagtgttgatgttgtgaatgtgattgtgtaagaaaatgttgggtggtctcgtaatattttcttttagtgtgatgtttgttcgacttgtgatagttgcggatcagtgttctctatgtatttcttcattttctttatttgttctgaatgagaattcatgacttttcattgtgtanaaccccccgaaaaaaaaaaaaaaaaaaaaaanagaacaag

SEQ ID NO: 483 - DNA, 860 bp, Glycine max
ataaccaccaacctctccctttcccccttttcatttcttcctcgattttccatttccataaccttagtcatcctcttctttcatctttctccctaacggtatcgagggaaaaatatggaggtcagagaaaaggttcagcttcagttaggtcgagtcgaagaagaaactaagcgtcttgcaaccattcgtgaggagcttgaagccctggcagatccaatgaggaaagaagttgcacttgttcgaaaaagaattgattccgtaaacaaagaattaaagccactgggtcatacctgccagaagaaggagaaagaatacaaagacgcccttgaagctttcaatgaaaagaacagggaaaaagtacagctaatcaccaagttaatggagttggtgggtgaaagtgaaagattgaggatgaagaagctggaggagctgagtaagaacatagattcgatgcaatgatttagccaaactgctaatgactcctgattagccttgtgtggtatattaaagatgatgacatagtatatttttatatgtatgggtgttttgttttgtgcttgtgtaattttgtggtgttgatgtttgtttaactagcatttgatgggacaatcagctaatttaggagggctatataccctacaaacagccaggcttgtaactaaatacttgcattttgttgtcattttttctccccttcaattcacttttctttggctttgttcaccttaatttaatttattgatgtaatttgaattttgttgccacgaaggatggttccaacaaagtcctggtgtgttttgcttttaaaaaaaaaaaaaaaaattataattgaatataaaattatattataaacttcaccc

SEQ ID NO: 484 - DNA, 982 bp, Glycine max
  misc_feature (901)..(908): n is a, c, g, or t
  misc_feature (967)..(967): n is a, c, g, or t
  misc_feature (977)..(979): n is a, c, g, or t
gcggggaagaagcgcactcgcaacaggggaaggaagcagagcactgcagcctcatcatttcaaggccaacacaaagcagagaaagcaaaaaaaaaaaagagagggttagagagataataaagtgaaggaagaagaaagggtttgtttgtgtgaaagaaaggatgcagagtgagaaccagaacaaccagctggtagtgcagaattcggggagcctgagcttcagcagccatttgtcgaaggaagatgaagagatttcacggtctgctctctccaccttcagggcaaaggaggaagagattgaaaggaagaagatggaggtcagagaaaaggttcagcttcagcttggtcgtgtcgaagaagaaactaagcgtcttgcaaccattcgtgaggagcttgaagccctggcagatccaatgaggaaagaagttgcgcttgttcgaaaaagaattgattccgtaaacaaagaattaaagccactgggtcatacttgccagaagaaggagaaagaatacaaagacgcccttgaagcttttaatgaaaagaacagggaaaaagtacagctaatcaccaagttaatggagttggtgagtgaaagtgaaagattgaggatgaagaagctggaggagctgagtaagaacatagattcgatacaatgatttagccaaactgctaatgactcctgattagccttgtgtggtatattaaagatgatgacatagtatattttatatgtatgggtgttttgttttgtgcttgtgtaattttgtggtgttgatgtttgtttaactagcttttgtcgggacaatcagctaatttaggagggctatttaccctacaaacaggcaggcttgtaactaaacacttgcgttttgttgtcattttttctcccttcaattcactnnnnnnnngctttgttctcttataatttaatttattgatgtaatttgaattttgttgccacgaaggntggttccaannnagt

SEQ ID NO: 485 - DNA, 2072 bp, Glycine max
tacggctgcgagaagacgacagaaggggagagtcaatgtctttaaattttcttctgtattaagctgaccaaagacaaatcctttttgtatctgtagctggaattttcttccttcttactttaccttcgattgtcaccttctaattctgcaacaagttccaaaccttcaaatctcactgccccaaaaatcctttcttttttaaatagccatttgacttcagcctctacagcagagtcccagatctctgcattccaattcccatggctggtcgctatgacagtaaccccttcgatgaggaagaagttaaccccttctataatcctggaagtgttcccgctgccactaattcaaggctttcacctctgaagccagaacctgttgattataattatggctttggtgcgacagttgatatacctcttgattcatcaacggatttgaaaaagaaggagaaggaacttcaagccaaggaaactgaattgagaaaaagggaacaggaagtgagacggagagaagaagctgcttcacgagctggaattgttcttgaggagaagaattggccgccttttttcccaataatccatcacgacattgctaatgaaattccaattcatcttcaaaaattgcaatatgttgcatttactacactgttaggattagtgttgtgccttttttggaatgttatagctgttactgcagcttggattaagggtgaaggtgtaaaaatatggtttcttgccattatctacttcatagcaggggtccctggagcatatgttctgtggtatcgcccattatatcgtgcttttaggaatgaaagtgctttgaaatttggatggtttttcatgttttatctgcttcacataggattctgcatcttagctgcagttgctcctcctatagttttcaaaggcaaatccctgacgggcattctggctgccatagatgtgctgggcgaccatgctttgattgggatcttctacttcattggatttggattgttctgcgttgaaactttgatcagcatttgggttattcagcaagtatacatgtacttccgcggcagtgggaaggccgctgagatgaaacgggaggccgcaaggggagcactgagggctgcaatatgattcatcagtcttgtggagaaggaagtgtggataacttgtgtatggatcaatgttgtatattagaagccacacacagaaattgtgaacaaaaatatttcactgagcatgatttttgtttacagctgttatttgtttatttatttttctgtttagcatgctacctattaatgtggtttgttagtgtatatcgaaagctgagagcttggacatactagtggctggtagaaacatgctataatttatggaaattaatcctctatatagtttagaatctaaaaaaaaaaaaaaacaagaactggttcgggcaatctatcttgaatgaccaatatcagacttcaatgcccatcttactttggggataagaaattggcttaattgcatttttttttaccattggctctttaatttttagcaaattttaccccaataaatcaagattgagttaaggttatttagtgaaacttgcatgaaattcaacaacaataaaataaggagtgctaacaacatactctttccaacacactttcttttattaattaaattttatttaaaaaaatacaaaattatgactgaggtttatcaaatgagtgaaatttacacaattttgtgaattttatcaagatgatgaatcttgatttaacaaagtgaagttgtgactgatgattgattgattatgggttcaaatttggaaacagtctctttataaatgtaagagtaaggttgcgtatactaatccttttcataccttcacatagtgaggaacgttctaatattgggatacattagtttttctgtaaatttaccaaattttagtaaattctagcctaataaaaaatgtgttgagttttttaaattctagcctaataaaaaatgtgttaaagagtatattgttaacattttttataagattatgttttgaagaggtttttgaaagaatgtgttgct

SEQ ID NO: 486 - DNA, 1579 bp, Glycine max
acattgttctgcgcccattggtcaatatatgcttatatatgttagttgaattttatcactggattaataattagctcatagtttttttggaagagttgtgaaaatgggacttgtggagctttttggggtggcatctatgcccgtgatcaaagtactactaatcactgctgttggcttgcttcttgcactggacaacgtaaatttgttgggaaaagatgcaaggatacaagtgaatcatcttgtgcattatgtgttcaatcctgcactggtgggtggcaatttggccgacacgattacttttgagaatgttgttttattgtggttcatgccggtcaatatcctcttgacgtttataataggctctgccttaggatggatccttatcaaattaacaagggctcccaaacacttggaagggctaataatgggtgtctgttctgcaggaaatttaggaaacttgcctataatcattatcccggctatatgtaaagacaaaggtagtccttttggagactccaatgtctgctatcaatatggaatggcttatgcttcactttctatggcggttggagctgtttatatatggacttatgtctataacataatgagagtttccgcaagtgtagtaccaaaagatgcttatagaactagctccttcagactggaggcttcaggagagttcctagaattcttaccagaggaagaatcctcagaacctgaaaatccatcaaaggacaacatggatgattacacacttctgctttcttcaattgaatctgaggagaatgtgaagttaccagtctcagctaaaatcaaacaccaaattggaaagcttttagtcaactccaatttcagagccatattttcaccagcaactcttggagcgattgttggctttattgttggagtagttccccagatacgtaaattgatgattggcggcgatgcttcacttcatgtgattcaggactcagttaccatggttggtgaagcagccgtcccagttataacccttataatgggagcaaacctccttaaaggtttgaagggagcaaatacttcgttttggacaattcttggaattatagtagttcgatatattttcctgccaattttgggtattctagttattaaaggagcaacacagttgggtttggtgcaaccagatcccttatatcagtttgtgcttctccttcaatatgcacttccaccagcaatggctataggcacaatcgcgcaattgtttggagctggtgaaggtgaatgttctgttatcatgctatggacatatgctttggcctcagttgcagtcactttttggacaacttacttcatgtggcttgtggcttaattttgtattcattgctatctatggttattatttatttatttttaaattttgccttataagtatctcttttcagccaggggtaggaactgcctacactatctgtagttttatacaaacttcctcaaatggatgaaatagaatatatgtggttactcaaacattaattactttttcaataaatgatataaatggtttactatgtgtatgaatagaaaaaaaaaaaaaaaa

SEQ ID NO: 487 - DNA, 2012 bp, Glycine max
ccacgcgtccggcagctgcagacaaacaaggtgagttctctctcacatatccatctttgttgcttttgactgtcttttcttctccgaaatattcatgcatggctactaccgctcactgggcaaacatggtgttcgatttttttctcttgtcttttctttgatgcacaaattccgagctgttcattctgaggtttggtttggtttgtttaaaagctgacacaaatatgaagttccactagatttaagatttgtttgtatctttgttttaattttctagctatatcaaggatatatatgatattcgtggcaaatatagtagaaaactcgatccaccgtatattggtctcctatcttctccttttgtaccaaaaaaatttatgatcatgatcctaaacacaaaaagcactgccacagctttaacttttactctttaattaccttcttgctcgtgtgatgattattatcaaatatataacaggaaaaagaaaaggattaattattgatttgttattattgttgattcttaaagtttactcattcctcttgttttgactgtcttgtaaattacctccttaatctgttcgcgtaatgaagttaattattaccaagtcatatgcatggtcttgaaattttaatttttatctgtgtggattcttatcacgctaaagagcagctgccgacaaccaagcctcttttggggtcggattagctggtgagatccatggaagatataggtccgaattcatgcacaaggccagtgacagagaagaaagcaagaccccaagaacaattgaattgtccaaggtgcagttcaaccaacacaaagttctgttattacaacaactacagcctcacacagccaagatacttctgcaagacttgtagaaggtattggacagaaggagggtctctgagaaacgttcccgttggaggtggctctaggaaaaacaagagggtcacctcatcaaaggttcctgacttgaatccaccaattagcctctcatcagtctcagccatttcttcccaaaaccctaaaatgcaaggagtccatgaccttaatctggcttttcctgcagctatggacaagtatcatcatggcacgtctccgtatgttgagatgccaaaacttgaaattggtggtgatcacagtactagtcatcatagtcaccaccatagccatagcccttcttctgcagttgagctactacggtctggcatggattctaggggtttgaatccttatgctcctaattccttgatgtcaggctcagatcattccctttatacacctggctatcccatgcaggaaattaaaccaaaccttagcttttcagttgatgatggatttggaaatagatcatatggggttcaagagaatggtggagggaggcttttgttcccttttggagacatcaagcacctttctgcaggtcttgaagtggaacacaataaagaacaaggaaataattcaactggatattggactggttggtgaagggtcttcatggtaaggaaagaaaagaaatattgggagaacataaatatcaacctgcattgttttctttctcttcactgtttctatctatccgcttgaagttgttcagatcactaacaataggatacacatggttactctattttgtatacattattattattattacatttctattcgagcaatgtgaggattttacagctcatcttggttatttttaatatgtttagagagagagagatagaagaagaggtgaatatagggtctgcttttgtccaagtcatgcaatgcaatgacctgtattcatgaattcttctgtcaaggagtagatacatatctatcgatcacctttattgatgtatgcatgctttcaaagatttggtacaaaatgacttttgatgattaaggaaagagtcagatattcaagtttgtaaccataattatacatgtattggattggtttgtgtgttctttcctattacaaaaatttctatctatgtcgatctatgcaaaaccc

SEQ ID NO: 488 - DNA, 1523 bp, Glycine max
tcagctacgtaggccccccccccgaatttgaccagatttggtaggaagaaagaacaaaaagcacattacatgagttgacattttttccatgtacccatcttaggtatatgcaattctgcatgcacctgaattcaagtttcaatctttaacctatccatggcttcctcactctttctttgcagtaactacgtctcccccacctcccaaaaccccttcagaagcatccatttagctcaattcagaccaaatgggacatccaattttcactcaaagcttcggtttcagagaccccacttggttagagccatggtttctgattccaacacttccaggagacaaatagagattgtgtatgaccctgaaggaaggataaacaagttggctgatgaagtagacagggaagcttctctttcaaggcttactttgttctctccttgcaagataaatgtttttttgagaataaccaacaagagggaagatgggtatcatgatttggcatccctttttcatgtgataagtctaggtgacataattaagttctctttgtcaccttcaaaaaccaaggatagcctgtcaaccaatgtgtctggcgtgccccttgatgatagaaatttgattattaaggcgcttaatctttacaggaagaagactggcagtgacaagtacttttggattcatcttgataaacgggtgcctactggggcagggcttggcggtggaagtagcaacgctgcaactgcactatgggcagccaatcaatttagtggctgtcctgcctctgagaaagaactccaagaatggtcaagtgagattggatcagacattcccttctttttctctcagggagcagcctattgcactggtcgaggagaggttgttcagaatattcctccaccagtatctctggatgttccaatggttctcataaagcccccagaagcatgttcaactgctgaagtctacaagcgtctacgtttggatcagactagtaatgtcgatcctttaacattgctggagaagatctcaaagattggtatctcacaagatgtttgtattaatgatttagaacctccagcatttgaagttctcccttctctcaaaagactgaagcagcgaattagtgcagctggtcgtggagaatatgatgctgtttttatgtcaggaagtggaagcaccattgttggaattggttctcctgatcccccacaatttgtttatgatgatgatgaatacaaagatgtcttcttgtcagatgcctattttctcactcgagaggcaaatcagtggtaccaagaacctgcttcaagtccttctgcctctcctgttgtttcggagtctgtttaacctacggtcttataagataagaagatagtaatgtaaaattgcattatctagtcttttttcctgcatcatttaatgatgtaaaaaaaaataagttttgctgctttaactgctgggaatcaataaaaaaaaaaaaaaaaaaatgaatgaataaatattaggccctgcctctgagttgtacc

SEQ ID NO: 489 - DNA, 1899 bp, Glycine max
aattaaaggacatattaaaaaaattattttcgtggcccgtgcctcgcggaaggagcttgagagaggagaaaaaggaaaaagagaaagagttttgcagagttgaatcgtgaaagaggaatggcgaagcacgaggagcttccgatcccgatttacaacaacctagaacctgtctatggcggaagttccgcactcgaagaagctcagcttcgtttcgacattttgaagtccaaattcatcgatatcttcggccatcatcctcaaatctttgctcgctcacccgggagagtgaacttgattggggagcatattgattatgaaggttattcggtgctgcctatggcaattcggcaagatacgatcgtggcgattcggaaaaatgatgccgaaaaggttctcaagatcgctaacgtgaatggtgaaaaatattcactttgtacttatcctgccgatcctctccaggaaatcgacttgaagaaccacaaatggggacattattttatttgtgggtacaaaggtttccatgactatgcaaaattgaaaggagtggatgttggcaaacctgttggacttgaagttcttgttgatggaacagtgccgacaggttctggactatcaagctctgcagcgtttgtctgctcatccacaattgctattatggctgcttttgatgtgaacttcccaaagaaagaacttgcacaagttacatgtgattgtgaacgacatattgggactcaatctggtgggatggatcaggcaatctctgtcatggccaagactgggtttgcagaactgattgatttcaacccaattcgtgcaacagatgtgcaacttcctgctggtgggacttttgtgatagctcattctttggcagagtctcaaaaggctgttactgctgccacaaattataataatagggttgtcgaatgccgtttggcttctattgtgctcgctataaagctagggatggatccaaaagaggcaatttcaaaagtgagcacactgtctgatgttgaagggttatgcgtatcatttgctggtatttataactcatctgatcctgtacttgctgtaaaggaatatttgaaggaagaaccatatacagctgaagaaattgaagcagttacaggggaaaagctgacttcatttttgaacaataatgcagcttatttagaagtgttaaaagttgcaaagcaatataaattacatcagagagctgctcatgtgtattcagaagccaagagggtacatgctttcaaggatgttgtatcctcaactctaagcgacgaggacatgctaaagaagcttggcgaccttatgaacgaaagtcatcatagctgcagcgttttatatgaatgcagctgtccggagttggaagaacttgtaaatatttgtcgtaacaatggtgctcttggggcaaggcttactggagctggatggggtggttgtgctgttgctttggtgaaagagagcatagttccacaatttatccttaatttgaaggaatgtttctaccagtctagaatagacaagggcgttattaagaagaacgatcttggcctttatgtatttgcttccaagccatcaagtggtgcggctatcttcaagttttagtgttctttaacccgcttcccttcttatggctgcaactttcttcccgagatctaaacacaaattagatgcaatttctgatggagtaagattaaatggtaccctcatcgttaagttattttagttgatacaatgaaaacaaataatgttattgccgaatggctaagtcatcttctgtaatggaaaaataaacgtgttatcacgaaaacagcgtttaaactcttacgtagttgctatgattagataattgtaaaaatccttaatgttttaatatatattgattttggaccc

SEQ ID NO: 490 - DNA, 1237 bp, Glycine max
  misc_feature (793)..(793): n is a, c, g, or t
ccacgcgtccgtattattattgcggctcgtcaataattacagaattaaatggcatattattaaaaactgttttcgttacgcttcagaaatacaacgagctgatagaggagacaagaaaagaaagagaaagagtttgcagagttgaattccgaaagaggaatggcgaagcacgaggagcttcctatcccgattaacaataacctagaacccgtctatggcggaggttccgcactcgaagaagctcagcttcgtttcgataatttgaagtccaaattcgtcgaaatcttcggtcatcatcctcaaatcttcgctcgctcacctggaagagtgaacttgattggggagcacattgattatgaaggttattcggtgctgcctatggcaattcggcaagacacgatcgtggcgattcggaaaaatgaggcggaaaaggttctcaagatagctaacgtgaatggtgaaaaatattcactttgtacttatcccgccgatcctctccaggaaatcgacttgaagaaccacaaatggggacattattttatatgtgggtacaaaggtttccatgactatgcaaagttgaaaggagtgaatgttggtgaacctgttggacttgaagttcttgttgatggaacagtgccgacaggttctggactatcaagctctgcagcgtttgtctgctcatccacaattgctattatggctgcttttgatgtgaacttcccgaagaaagaacttgcacaagttacatgtgattgtgaacgacatattgggactcaatctggtgggatggatncaggcaatctctgtcatggccaagactgggtttgcagaactgattgatttcaacccaattcgtgcaacagatgtgcaacttcctgctggtggggacttttgtgatagctcattctttggcagagtctcaaaaggctgttactgctgccacaaattataataatagggttgtcgaatgccgtttggcttctattgtgctcgctataaagctagggatggatccaaaagaggcaatttcaaaagtgagcacactgtctgatgttgaagggttatgcgtatcatttgctggtattcataactcatctgatcctgtacttgctgtaaaggtaattgtacctcgtatgatgtcatccttagaattagccttgtgtgacactatctttctatttgcattgagaacatttcatttcaattgatatggatttctttgaactttaatattctc

SEQ ID NO: 491 - DNA, 1794 bp, Glycine max
ccacgcgtccggtcattatgcaggggaggtcacttatgatacatctggattcctggaaaagacagggaccttttgcacttggattccatccaacttctatcctcaagcatatgtcatcttcccacgcgtccggcatcccatatgcttactcaatctgagaagcctgtggtaggtcccttacacaagtcaggtggggcagattcccaaaagctaagcgttgccacaaaattcaagggacaattgttccaattgatgcaacgtttagagagtactacaccacattttatccgctgcatcaagcccaataacctccaatcacctggatcatatgagcaaagccttgtactgcagcagttgagatgttgtggggtcctggaagtggttcggatatcaagatcgggctttcctactagagtgtctcaccaaaagtttgccagaagatatggttttcttctccttgaaaatgttgcctctcaggatccacttagtgtttcagttgctattcttcatcagttcaacattttgcctgagatgtatcaagttggctacacaaaactattcttccgaacagggcagattggagtgcttgaagataccagaaatcgtaccctgcatggagttttgcgtgtgcaaagttgcttcaggggttaccgagctcgttgttatcgcaaggagctttggagaggaatcactactctccaatcatttattagaggagagaaaagcagaaaggaatatgcagcttcgcttcagagacatagggctgctgttattatacaaaagcggatgaaaacagtacttgcaaggaacagaatgaaaagtattaatggtgctgcagttgtcatacaatcatttattcgtggttggttagtcagaagatgctcaggagatataggactatcaaaacctcggggcattaagactaatgagtcagatgaggttctggtgaagtcatctttcctggctgaattacagcgccgggtacttaaggcagaagcttccctgagagagaaagaagaggaaaatgacattcttcaccaacgccttcaacagtatgagaacagatggtctgaatatgaattaaagatgaaatccatggaagaagtatggcagaaacaaatgaggtccctacagtctagcctctctattgcaaagaagagccttgctatggatgattctgaaagaaattcagatgcttctgttaatgcaagtgatgacagggatttcagctgggatgtaggaaccaatcaccggcgccaagaaagcaatggggcaagatcaatgagtgctggtttgagtgttataagtcggttggctgaagaatttgagcagaggagtcaagtgtttggtgatgatgctaagttcttggtagaggtaaaatctggtcaagttgaagcaagtttgaacccagacagagagcttagaaggttaaaacaaatgtttgaggcttggaaaaaggattatggtgcaagactacgtgaaacaaaggtcattttgcataaacttgggagtgaagatggatcgattgagaaagtgaagaaaagttggtggggaagaaggaatagtacaagaataagttgatttatttatttatttattcttatttggggtttggctttggtctatgcactgttttaagggcattgcctactatatatccgaaaatgaagaaaatataataggaaagataagataggagtaggacgaatgaattactggttactgtaattaggttagctgttgctagccactcttattttatgagaaatttctgcacgagttgtggagttagat

SEQ ID NO: 492 - DNA, 1237 bp, Glycine max
ccattctccgtttctcagtcttcctttcctctctctcttgtttgcattcatgtgagggtgattttgcagagagttaacagcacaaaccactcactctcttaacttgagattattttttttctttccccaaacccaaagaggcatgagttgcaacgggtgccgcgtccttcgaaagggttgcagcgagtcttgtatcctgcggccgtgtctacagtggatcgatacgcccgaagcacaaggccatgccactgtcttcgttgccaaattctttggccgtgccgacctcatgtccttcatttccaacgtccctgaaccccaaaggcccgctctgtttcaatctctgttgttcgaagcgtgtggaagaacggtgaaccctgtcaacggtgctgttgggcttttatggaccggaaactggcacgtgtgccaggcggcggttgagacggtgctccgcggcggcaccgtcaggcccatgccggagcttctcggcctagacgctcccactcccactgccgatgacgcttccgaaggggaagttacctgtaccgacaagtggagagtccgagatccgaacccgaatttcccgggaacccggttcccgggtttgaggtccgataaggccggttctggtggcaaacgcaagcgatttgaagagctcgccaagcttcagacggcgacgacggatctcaatctccggctgacgccgagttttctgcagaacgcggctagctacggctgccggcaggaaattcgctggccagggtcgccgtcaatgaattccgaggagtccgggacgacgacggcgtgcttggagagcgggatcggagatcactacgctcacgacggagaccggaaagtgctgaaccttttcatttgagagttctctttcgctctccgagattcgtgtttgagggttctcgctgacgcgtctttttgccttttttttttataacgctttattttgagaaagaggttttcccggaattgaatccggtgagattttgtaagaataccggcacaggatttttctctctgttgttcttgctagacagggagagaaagatgagggttagtcggtgatgatttttccttttttcttttcttttttttcccctttgagctatcaaacatgttatgatggtgtgacatgaatgatgaaatattaaataacttaatacatagttcttttatattcatcgatacttttaacagagtaaaaaaaaaaaaaaaaaaacaagaa

SEQ ID NO: 493 - DNA, 1159 bp, Glycine max
ctctcgagccgattattctcagtttctccgtcttcctttccccgtttttcttctctctctcaatctctttcatgtgagggtagaaccacaacaaaacacaaaccacacactctcctaactcgaggttatttttttctttccccaaagaggcatgagttgcaacgggtgccgcgtccttcgaaagggttgcagcgagtcttgtattctgcggccgtgtctacagtggatcgatacgcccgaagcacaaggccatgccactgtcttcgttgccaaattcttcggtcgtgccgacctcatgtccttcatttctaacgtccccgaaccccaaaggcccgctctgtttcaatctctgttgttcgaagcgtgtggaagaacagtgaaccctgtcaacggtgctgtgggacttttgtggaccggaaactggcacgtgtgccaggcggcggttgagacggtgctccgtggcggcaccgtcaggcccatgccggagcttttcggcctagacgctcccactcccaccaccgatgatgcctccgaaggagaagttacctgtaccgacaagtggagagtccgagatccgaacccgaatttccggttcccgggttcgaggtccgataagggtagttccggcggtaaacgcaagcgatttgaagagctcgccaagcttcagacggcgacgacggatctcaatctccggctgacgccgagttttctgcagaacgcggcgaacttcggctgccggcaggaaattcgctggccgggatctccgtcgatgaactccgaggagtccgggacgacgacagcgtgtttggagagcgggatcggagatcactacgctcccgacggagaccggaaagtgctgaaccttttcatttgagagttctctttctctaagtttcgtgtttgagggttctcgctgacgcgtctttttgccttttttttttttaaacgctttattttgagaaagaggttttcccggaattgaatccggtgagattttgttagaatagcggcacaggatttttctctctgttgttctttctagacagggagagaaagatgagggttagtcggtgataattttttttttccttttgatctatcaaacatgttaagatggtgggactggacatgaatgatgaatattaaataacttactaaa

SEQ ID NO: 494 - DNA, 2182 bp, Glycine max
accgatcgacacgtttggatgagcgaggctggtgtgtggacgcttctttttcatcggtccgaaccctaaggatgtgctgagacagtacacggcggtgacgggaactccggcgatgccgcagctgttttcgattgcgtaccaccagtgccggtggaattatcgcgatgaggaggatgttgagcatgtggattccaagtttgatgagttggatattccttatgatgtgttgtggcttgacattgagcacactgatgggaagaggtattttacttgggatagggctcttttcccccaccctgaggagatgcagaggaagttggcttctaaagggaggcacatggtgaccattgtggacccgcccgtccagccggccgagaattttcatttgcacaaggaggcctctcagaaggggtattatgttaaggatgccagtgggaatgactttgatggctggtgctggccgggttcgtcatcatatccggatactttgaacccggaaattaggtcctggtgggctgataagttctcttaccagagttatgagggttccacgccttctctttacatatggaatgacatgaatgaaccttctgtcttcaatgggcctgaggtgacaatgcctagagatgttacacactatggaggtgtggaacatcgggagttgcacaatgcctatggatattacttccacatggcgaccgctaatgggctactgaagcgtggtgaggggaatgacaggccatttgttttatcaagagcattatttgctggaagtcaaaggtatggagcagtttggactggggataacactgctgattgggatcacctaagagtttctatcccaatggttttgacccttggtcttactgggatgtcattctctggtgctgatattggtggattttttgggaatcctgaacctgagttattggttcggtggtatcagctaggagcttactatcctttctttagggcccacgcccatcacgacacaaaaagacgagaaccatggttgtttggagaacgaaatacagaattgattaaggatgcaatacatgttcgttatgcacttctcccgtatttctacacattattcagggaggctaacactactggtgttccctgtgtgtcctgtccattgtggatggaattcccatctgatgaagctacttttagcaatgatgaagctttcatggttgggagcagtcttttagtgcaagggatctatactgagcgagctaagcatgcatcggtccatttgcctggaaaagaatcctggtatgacctaagaactggaactgtgtacaaaggaggggtgacacataagttggaggttacagaggagagcattcctgctttccagagagctggaaccattattgcaaggaaagaccggtttcggcgaagttccactcagatggcaaatgatccctacactctggttgtagctctgaatagttcccaagcagctgagggtgaactctacatagatgatggcagcagctttaattttctgcaagggggctatatccatagacgatttattttctcgaatgggaaacttacttctatagacctggcacctgcttccagtagcaaggggcgttatccatcagatgctttcattgagaggattatcctgctgggacatgctcctagctcaaaaaatgcactcattgagccatcaaatcaaaaggttgatattgaacttggccccctttgggttctaagggctcgtgcaccagctgttacaaccatacgtagacctaatgttcgtgttgcagaagattggactataacagttatataacatttccggttcgagggaggagtttaatgttcaaagttactgctagtgcacaacgagattttgtttctgtagttgagttgatatgaagttcagctgcaacgttggggtaagaagaaagaaaatcattaattttgaagaatgcatttgcaccaactcagtttgagcggcttatttaatgtaggactcgttgactggaaagatttaacatttggaagttgtgattccattgttgtctactattttgataaggataaatttgtatcgtctggaatggtctgtcttgggaaaagcttgtgatgaatgcaataacttagtcgttagtttatataggctgcaaaatcaaattaataatttatgattttttttaatatc

SEQ ID NO: 495 - DNA, 1033 bp, Glycine max
gagagagagagagagagagagagagactcacagagagtctgagagtgcgtggggggggcagagagagagagagagagagcaagacacccctccctctaagaaatgcggtcaattcctctgggaacctcagtatctccaactcctataaacacctcaaagttatcacctttcagtgttaattttaagaaaccaaccactttcccatcttggggttcaactcctcctcatgaattctctctctcccaatcaggattatgtagagcaagtcaagttgttgatttgttcccgactgtgtctcctgaaattattgttcgggaggccaggctagaggactgttgggaagtggcagagactcactgcagctccttcttccctgaatattccttcccattagattttgtgctgagaatggacagattggtggccatgatggcaggattcactctaccaaacggttgcaagagaatctgtttggttgccgttactggcaactcatttggtgaaactgtattatttggaagtgaagatttcaaggttggtggttttgatgggaaaatcagcctcaacaagggatatgtggctggtatattaacagtggatactgttgcagactctttgcctaggaagggaccattgcgacagagaaggactggaattgcatacatatcaaatgtggcagtccgagaaaaatttaggcggaagggaatagctaaacacttggttgcaaaggcagaatcacaagccagaagttgggggtgtcgtgctattgcattgcactgtgatttgaaaaaccctgcagccacaaagttataccaaggccaaggtttcaggtgtatcaaggttccagagggagctaactggccacaaccaaggacctcaccggatatgaagtttaacttcatgatgaaacttctcaacagctcaactgtttctaaatgaacttcagagtagggaataattatgttctaaaacataatgtattttaagaaagaaaaaaaaatgtacaaaaggacagtctgttattgaattgtgt

SEQ ID NO: 496 - DNA, 661 bp, Glycine max
  misc_feature (616)..(616): n is a, c, g, or t
tacggctgcgagaagacgacagaagggggaggaggaaacacacaaaccttcttccaagtgttcttcccattattctacattgtcctctctttggttctctattatttattaattgtgcactccttttggttctctaatatttatttccaccgttttcttaaaacaaaagcctcttcaaattctccaacaactaataaccaaaatggccactgaaaagcttagaagttgtgcaaacttccttgagaactctaaaccctactttgccatgattgctatacaatttggctatgcaggcatgaacattatcactaagatttccctcaaccgtggcatgagccactatgtcctcgttgtttatcgtcatgcctttgccactgctgttgtcgctccatttgccttcatctttgaaaggaaagctcaaccaaggataacattcccaattttcatgcaaattttcatcctagctctacttgggccagtgattgatcaaaacttctactatgctgggttgaaattaacctccccaactttctcatgtgcaatgagcaacgtgcttcctgccatgacttttgttatggcagttttatgccggatggagaagatcaacatgaagaangtgagatgccaagccaaggtggtgggaacattggtgacggtggct

SEQ ID NO: 497 - DNA, 1850 bp, Glycine max
tacgtcagctacgtaggccccccccccggcaacccaaagtttgagaattgaattcgttcagatttgaaaatgtgggttaaggttgttcttcttctccttgcagcactttctctttttcacttagccgcagcttctcttaatcgtagcagtttttcagcagatttcttctttggaacagcttcttcagcttaccagtatgaaggtgcagcacgtgaaggtggcaagggacctagtatatgggacaccttcactcatagccacccagatagaatagcagaccacagtaatggggatgttgccattgattcataccaccgctacaaggaagatgtggccatgatgaaggatattggattcaatgcctacaggttctccatctcttggccaaggatactacctcgtggaaacctgcagggaggagttaaccaagaaggcatcacatattacaacaatctcataaatgaactgatagcaaatggacagcagccctttataactctatttcactctgatttccctcaagctcttgaagacgaatatggtggttttcttagtcccaaaattgagcaagattttgcaaattatgcagaagtatgcttcagggaatttggtgacagggttaagcactggattacattaaacgagccagtgctatatagcaatggaggttatggaagtggtggatccttacccaatagatgctccaagtggtttgctaactgcactgctggtgattctactaccgagccctatttagttacacaccacctcattcttgctcatgctgcagcagtaaaggtctacagggagaagttccaggcttctcagaagggtcaaattggggtaacactgaattctgcttgggttgtgccactttctcaatcaaaagaggacagagaagctgcatatcgaggtcttgcctttatgtatgactggttcatggaaccactttactctggaacatatcctgctgtaatggttaacagagttggaggtcgtttgccaaagtttaccaaaagggaatacttgatggttaaagggtcctatgatttcatagggttaaactattacacttcaacttatgcaactagttctccttgcccacgtgaaaggccaactgcctttacagacgcctgcgttagatttactactgtaagaaatgggcttctcattggtccaaaggcagcctcagactggctctacgtctatccaccaggaattcaaggtctactagaatacactaaggagaaatttaacaacccaattatctacataacagaaaatggaattgatgaggttaatgatgggaaaatgttacttaatgacagaacgaggattgattatatcagtcaccatcttttgtatcttcaaagggccataaggaatggagtgagggtgaaaggatactttgcatggtcattgttggacaattttgaatggaatgcagggtacagtcttcggtttgggctcgtgtatgtggattacaagaatggactgaaaagataccgcaaaagatcagctttgtggttcaaaatatttcttcaccaatgaaatgatccttggtagtgaaagacagaattgatgggggaagaaataagaatatgttgtttctttcttaatcctagtcattttcttttggccattgtaagatctaagcagagctactttgatgatttctgacagcctgccaatagtgaggcttcatggttatctgtataacttacttccattaataagtttctgtatttggttttcctgtccctaaaaaaaaactcatataaggacaaccaagagctctctagggcctccgacatgttttaattaggtttaaatatatttttagtctctaa

SEQ ID NO: 498 - DNA, 1745 bp, Glycine max
tcagctacgtaggcccccccccccccctgactgtaaaagcaccataatacaagaacccaagccaagcgattcactaatcattattaacacacacaacacgcacattcgtcccaaaccctaatccccaattttgattccaattccgacgagatcccagggagcatagcagagccctcaaatctaaattccgttcggagagatcctagtctcttcttcatggcgcatcgaggagccacgctgttcttccttctattcgctatctgctattctctcatcgccattgctggaaagagctattacgatatacttcaactgtcgaagggtgcatcggacgagcagataaagagggcgtataggaagctagcattgaagtaccatcctgataagaaccccggcaatgaagaagctaataagaaatttgctgagattagcaatgcgtatgaagtgttgtcggatagcgagaagaggaatatttacgataggtatggtgaggaaggtttgaagcagcatgctgctagtggaggcagaggtggtggaatgaacttccaagatatttttggctctttctttggtgggggacaaatggaagaagaagagaaaattgtaaaaggagatgacgtggttgttgatttggatgcaacacttgaagatttgtacatgggaggtaccttgaaggtttggagggaaaagaatgtactaaagccagcatctgggaaaagacgctgtaactgtagaaatgaggtttatcacaagcaaattgggcctgggatgtttcaacagatgacagagcaggtctgtgagcaatgtcccaacgtcaaatatgtaagggaggggtatttcatcactgttgatattgagaaaggcatgcaagatgggcaggaggtgctattttatgaggacggtgaacccataattgatggagaatctggagatttaaggtttcgtatccgtactgcacctcatgacgtcttcagaagagaaggcaatgacttgcacactactgtcactataactctggttcaagcccttgttggttttgagaagaccattaaacacctagatgagcatctggtggacataagcacaaaggaaatcacaaagccaaagcaggtgaggaagttcaaaggggagggtatgccattgcatatgagcaacaaaaaaggagatctttacgtcacttttgaggttctattccccacgtcactaacggaggagcagaaaacaaagataaaagcaattcttggttagaatacgcgaacaagataggcgttatttcgctcattatgtccttaatgtaacatggttaggtggttatagtaaacgcatactagggcttcccatccatgcccttttttttgttagttgacaaatagataccttttgcccccgttagtattgatgcgcatcctgtaactcttgccatcccgtgaattcaattgccttcttggcggtgctattttgatacaaggaaaacaacactagccgaaaaaaaaaaaaaaaaagaaaatgcttccattgttttgtaccgtgtctgaaatcgttcatcttgtgaactagattagattgctgtaaaactgaatggcgtcttaccgaagttgatacattacatctgtagttgtaactgcggactagattagaatgcagatggaccataaccattgagcatacgtatgtacctgcacccgacggccattaaactttgattccaatattcaaagggtgataagctcatgcggatttgttaa

SEQ ID NO: 499 - DNA, 1472 bp, Glycine max
  misc_feature (162)..(162): n is a, c, g, or t
  misc_feature (177)..(177): n is a, c, g, or t
aaaatcggtccggaaagatcctaaccccttcttaaggggccatcaaggagcaacgcggtccttccttcaattcgcaatctgcaattctcccatcgcaattgctggaaagagctattacgaatatatttcaacggtcaaagggtgcatcggacaagcagatanagagggcgtataagnagctagcattgaagtacatcctgataagaacccggcaatgaagaagctaataagaaatttgctgagattagcaatgcgtatgaagtgttgtcggatagcgagaagaggaatatttacgataggtatggtgaggagggtttgaagcagcatgctgctagtggaggcagaggtggtggaatgaacttccaagatatttttagcacgtttggagggaaaagaatgtactaaagcctgctcctgggaaaagacgctgtaactgtagaaatgaggtttatcacaagcaaattgggcctgggatgttttcaacagatgacagagcaggtctgtgagcaatgtcctaacgtcaaatacgtaagggaggggtatttcatcactgttgatattgagaaaggcatgcaagatgggcaggaggtgctattctatgaggatggagagcccataattgatggggaatctggagatttaaggtttcgtatccgaactgcacctcatgacgtcttcagaagagaaggcaatgacttgcactctactgtcactataactcttgttcaagcccttgttggttttgagaagaccattaaacacctagatgagcatctggtggacataagcacaaaggaaatcacaaagccaaagcaggtgaggaagttcaaaggggagggtatgccattgcatatgagcaacaaaaaaggagatctttacgtcacttttgaggttctatttcccacgtctctaagggaggagcagaaaacaaagataaaagcaattcttggttagaatacgaacaagataggtgttatttcgcttattatgtcctcaatgtaacatggttaggtggttatagtaaacgcataccttgggcttctcgtccattccccttttttttgttagttgacaaatagatacctttttcccccgttcgtaatgatgcgcatcctgtaactcttgccgtccattgaattcaattgccttcttggcggtgctattttgatacaaggaaaataacactcgctgaaaagaaaaagaaaatgcttccattgttttgtaccgtgcctgaaatcgttcatcttgtgaactaagattagattgctgtaaaacttaatgaagttgatgcatttgtagctgcggaactagattagaatgcatatggaccgtaaccattgagcatacgtttgtacctgcactcgacggctattaaactttcatttcaatatttaaaggttgacaagctcaagaaaaaaaaaagttaaaaaaaaaaaaaaaaaaaaaaaaaaaaaaaaaaaaaaaaaaaaaaa

SEQ ID NO: 500 - DNA, 2180 bp, Glycine max
  misc_feature (8)..(8): n is a, c, g, or t
  misc_feature (18)..(18): n is a, c, g, or t
  misc_feature (23)..(24): n is a, c, g, or t
  misc_feature (34)..(34): n is a, c, g, or t
ctgcaggntaccccggtnccggnnaattcccggngtccgccccgcgcgtccgccaatctgcagggtcttgcacgcaaacgacacgtacaaacctcgggggaactctgtattgataacacgccattgaagctctaattcgaattccatcacagacccttttcgtttgtcctctcacagttttgttcttttggcctcgaattgatattcagcgcaaaattttctttttggctgataatatatgtaaacagtatatgcacatacatgccctattttggtctttgttttaggtgttccaatggagggcaaaatcttggattctcagaatcaggttaaatttgtggaaaatttatctgcaagggtttctagttgctcccttggcgacaagatatcctattccgattctcctctggatgatgaggtggatggtcggaggagcaattgtgttactaaagagtattgtgattcgtttttcaatgatagcactgaagggcattgtataaattcttctagattatatcttgaatcacccgaaaaacaaatggaaaagaataacgaggacatggagtcttcagctaatcttcagaagcggggaaagtacttctattatgatactccactgcaagaagatactggagtttggataccagtttctgttccaccaatgttggaagatgatcacaaagagtggaccaaaggttttcactcaaatggtggctattttcctgatgatgatatgggatggaatcaatacgttggagatgaaagggaattgactatgtgggatgtgctagcagaaatgttacttgtagctcgaggaaaagtgacttctttggcatcgggagatattcatacatgtaatttttcatggatatccagccatgtgcttgaacaagcttggagagaaatggcacaaactctcacagaggccaactttggtaatgtaaaggaactactggaagcagagcctccaaaatggttagcagatagtgctgcttcttcttgtatgctttgtggtgtgagatttcatcccatcatgtgctcccgtcatcactgccggttttgtggaggaatattttgtggtgagtgttccaaggggcggagtttgttgccttcaaaattccgagtttctgacccccaaagagtatgtgatgtatgctgtgtccgacttgactctgtgcagccttatttgatgaatcatgtaagtaatgctgctcagttgccaacccatgacctgacagatctgagcactttgagatcgtggattaattttccttgggggcagtctatggaatatgaaatttacaaggcaactaacactatcaaggcttataatcagataggttttctaaagctcgagaagtcaattccagatgccattctaagacaagcaaaaggccttgcaattatcactgtggtcaaagtaggagtgggggttacttacaatattggaacaggacttgtggttgcccgtagggaagacggttcatggtctcctccatctgctgtttccacctttggtgtagggtggggggctcaggctggaggcgagttgacagacttcatcattgttttgagaacaaatgatgctgtcaagacatttggtggcaatatgcatctttcacttggagcaggtttgagtgctgcagtaggctttgttggtaggtcagttaaagctgatgttcgagctggtgatggtggctatgctgcttgttatacctacaactgcagtaaaggtgcatttgttggatgttcacttgaaggaagtatggtgactactcgcacgcaagaaaattcccgtttctatggcagccagtctataactgcaacagatatactttttggctcgttgcctaggccacctgccgctgccattctctatcgtgcacttgctgatttgtattcgaagtttgatgattaattgaatggttcaacgtcgcctttcattcctttctccttttggacattggcattgaagacatagtttgtacagctgctaagtcacactcattgtaaatgttcatcgcgtcattatttgtcttgtaaatatgtaaatgttgatattgtacactccacgttgaccaagatggagggattggtgacctgctttaaggttaattttatttggctagaactgcctttgatgatttttgaagttcctcaactctaaaaaaaattttgaa

SEQ ID NO: 501 - DNA, 786 bp, Glycine max
aaaaggccttgcaattatcaccgtggtcaaagtaggagtggtggttacttataatattggaacaggacttgtggttgcacgtagggaagatggttcatggtctcctccatctgctgtttccacctttggtgtagggtggggggctcaggctggaggtgagttgacagacttcattattgttttgagaacaaatgatgctgtcaagacatttagtggcaatatgcatctttcacttggagctggtttgagtgctgcagtaggcattgttggtaggtcagttgaagctgatgttcgagctggtgatggtggctatgctgcttgttatacctacagctgcagtaaaggtgcatttgttggatgttcacttgaaggaagtatggtgactactcgcacacaagaaaattcccttttctatggcagccaatctattactgcaacagatatacttcttggctcgttgcctaggccacctgctgctgccattctctaccgtacacttgttgatttgtattcgaagtttgatgattaattgaatgactcaacatctcctttctccctttggacattggcgttaaggacataatttgtacagctgctaagtcacactcattgtaaatgttcattgtatcattatttgtcttgtaaatatgtacactccacgttgaccaagatggagggattggtgacctgctttaaggtgaattttatttggctagaactgcctttgatgatcaaaaaaaaaaaaaaaaaacctctactatattaaatgcaataaatttttttatc

SEQ ID NO: 502 - DNA, 1013 bp, Glycine max
gtagcaggtcttgtgagatgaaattgaaaggaagacaaaacacaagacagagtcattcagcaaggcttgaaacgagaagcgaggatgcccatcagatgtattctgcattggcaaccgaaccaaggaagcgttgtgaacagccaagtcctgaatgagatctcgcagtgcgtcgaaagccttaacggcgtcaaagaaggaagatgcaaagcctccctcactttctacagacccaatttacgagaccaatcggtgaccatcgattttcctcgcgattttctggggatatcgatgctggagcagccgaacaaatactacttaatcattcgcggccagaagattgttctcgaggccgattcttctatcttgcttatcatggagaaactccagtcctacaagtccaaagtcgcccttcatttcgagggagtgctgtataagttgggtgactttcagatcagggtgattaaagttgttcccagtcaagcggagagtctcagaggaattatgattgagattgagtatctccctatctcgtcagttgaaaaatccaagcaaattttggaagagttcattgatatatggaaagaagtcgtgtctaaaaaatcattagccggtcagttcatgcatacagaaccaaattatgcagaatatgggctttctgacaattatacctctcagcatacagctgttcagtatgctgctgcattggcccaactgattcaatctgcacagttacggaactaggaactaggacctttgaagggtatgtaagggatatttattttatgaaatcttattggattcttgtgagtgtggagatggtaatatatatttcaataatgtttgttagaaagtaataaaaaaatatttcctgagatggtcataaaatcatatttattgtgtaaaatttttattataccttcactatcaatacccactatgtcactctgtgtctacttatctctgattttatttctgctattgtaacatttatagttaaatcatatttctatttt

SEQ ID NO: 503 - DNA, 747 bp, Glycine max
ccagatgtcaggcttcaagagagagaacatgtttttgaccagcaaactgtgttacgacaacttgagtcaatattgtcgattcacaaattagcaaggcttggacattatcttgatgcattaagggaggttgctaaacttccattccttcctttagacccccgaggccctgatattgctgttgatgtgcttgaaaatttatctcctcatgtccaagcttgtattccagatcttttgaagactgctctcacttgtctggataatgtgacagactctgatggatctcttcgtgccttgagggctaagattgcaagtttcattgcaaacaatttaaggaggaattggcctcgtgatttgtatgaaagagttgcgcagaggctgtgaaagtaaatcatgtgattgcaatggtagttacgtttgaaaggcaacagaatatgtttggctaaaggttttcagtagtagcatatgtaaagtagtcttaatgacgtgcctgctgcaccacctatgcccggagatatactgagaggaaataatagaaaaaggaaatacactggttctaaatattctctccacttttccactttttgttctagccattggtaatatactgctcactttgtattaataagaacattactttaagttttaaccgctccgcatatggtataacaaatcagcaaacagcatgttctttttcatctttaaaaaaaaagggggggggaggggggggggggggggggggggggaggg

SEQ ID NO: 504 - DNA, 2962 bp, Glycine max
gttctgcggaaccgaaccttacttttaaaattttagggcttagggccggttccccccgggccgccttccccgtccgcggagcttcttcattcagctcgagagagagccatggcgaacgaagagttgggtagttggactgatctgctacattcttccaccaagcttctcgaacaagctgctccttctgctcagttccctccacttcagaggaacttagatcaactggaagcattatccaagaagcttaaatccaagacagtaaggactgaagcaccttctcaatctattgctgcaacaaggctccttgctcgtgaggggataaatgcagagcagcttgcaagggatctgaagtcatttgaactgaagacaacttttgaggatgtttttcctgttgaggcaacaagcgttgaagagtatctgcagcaggttcatgaaatggcaatggtctctgctgtccaggaagctcagaaggataatctcaggagtttcaatgattatatgatgaaagtattagaggaggattggcaaaaagaaaaacgtgatttccttcagagtttaagtcgaatttcaacattacctaggacaaacattgctgctaacagcaacgtgggtaccctcccgggtcagcttgcatttgtgtcttctacttcacaagtctcttctggtatgcctagcatggagattgttcctctgactggcagacctattgtggagaaaaaggcatctgtctatgctgaggtagtgaaaaaactgaataaagcaagggagtctgggtcaccatttaaacctgctgcagctttcaaaggtgcatatgaaaatttgggcattgatgctagtggtggaaagtcagtaacgatgcgaaagatatggcaccttgttcagatgctgatgggtgaggaatcagccgtgcaacgtgtttcaaaaaggatgtcattgattattggtgcaagacgccaccttgaatggggacatgagaaatacatcatggataccatacaaagtcatcctgcacaagctgctcttggtggtggtgttgggaatttgcaaagaatccgtgccttccttcggattcggctgagggattatggcgtactggattttgatgctggcgatgctcggcggcagcctcctgttgataccacatggcagcagatatatttttgcctgaggtctggttattaccatgaagcgcgaaatgttgcccaatcttcacgtgcttcacatcaatttgctcctttgctgacagagtggattaataaaggagggatggtaccagaagagattgcagctgctgcatcggaggaatgtgaaagaatgttgagaactggtgaccgggtaggtcgtactgcatatgacaagaaaaagttacttctgtatgccatcatatcagggtctcgaaggcatatcgatcgcctgcttagagatcagccaagtctctttagtacaatagaggatttcttgtggttcaaattgtcagctgtgcgggattgccctagtggaccttcatccattgttctaagtgatggtctgattccatacagtttggatgatttgcaaagttacctgaataaatttgagccctcatactatacaaaaaatggaaaagatcctttggtatatccctatatcttgctgttaagcattcaattgcttccagctgtattatacttgtctaaggaagcaggagatgaaggatataacattgatgctgcccacctttcaattgtgctagctgatcatggggtcctttctgaaggtgctggttctgggcaaaagttgggagtgatggatgcttatgcggaagtgtccaccattatcaggcagtatggatctatgtatttgcgtcttggtgatctccaaatggccctagaatactacgcacaagctgctgctgcagtgggtggggggcaattgtcgtggactggtagaggtaacgttgatcaacaaaggcagagaaatttgatgctgaagcagcttctaactgaactattgttaagggatggaggcatatatcttctacttggtgcaagaggtgcgggtgaagaaggtgaattgggacgttttgtgactgatccgaaagcaaggcaactatttttaattgaagctgcatgccactgtcaggaggctggaatgtatgacaagtctatagaaattcagaagagagtgggttccttctcaacggcactggataccatcaataagtgcctgtctgaagctatttgtgcccttttccgtggaagattagatggcgagagccggactgctggcctcatccattctggcaatgagattttggagacatacacttattacccagatgccagtcttcaagagagagaacatgttttggaacagcaaactgtgttacgacaacttgagtcaatattgtctattcacaaattagtaaggcttggacattatgttgatgcattaagggaggttgctaaacttccatttattcctttagacccccgaggccctgacattgctgttgatgtgcttgaaaatttatctcctcatgtccaagcttgtattccagatcttttgaaggctgctctcacttgtctggacaatgtgacagactctgacggatctcttcgtgccttgagggctaagattgcgagtttcattgcaaataatttaaagaggaattggcctcgtgatttatatgagagcgttgcgcagaggctgtgaaattaaatcatgtgatgttattgtaattacctttgaattacaacagaatgtttggttaaatgttttcagtagtagcgtaacacatgtaaagtagtctcaatgatatgtctgctgcacctatgcattggaaatatattagaggaactagaaaaaggaaatacgctgcttctgaatattctcttcaccttttctctttttgttttagctattggtaatggtaatgtactgttcattttgtatcaataagaacattactttcaagttttaa

SEQ ID NO: 505 - DNA, 1034 bp, Glycine max
ttccagttaagcatataaatccaagtttgaatacctaacataacaatatataaggccgccaccaaataccaaatagatcccattggagagtaggaggagttgttcacccacatcaccttaccattgtcattttcttccccccttcccctatacggctgcgagaagacgacagaaggggatcctcatccaaattatcccatcatacctttactttaccccacccaaagcgaaaaaaaaaaggattcaaacatatttgccttatacaattcaaatggcacacacaaaagtggatatgggtttggttttggtggtaatggccatgctatgcgcaggagctgcagctcaatctcaatcgagttgcacaaatgtgttagtgagcctgtcaccgtgccttaactatatcacagggaattcttcaaccccatcttcaggatgctgctcacagcttgccagtgtggtgcgctcacaaccacaatgcctatgtcaggttcttagcggcggtggatcatcactggggatcaacattaaccaaactcaggctctggctttgcctgttgcttgcaaggtgcagaccccacccaccagtcaatgtaacaatgctgctgcttcaccaccaacaggaacagttgcggaatctccaaattcagctccatcaggaaccggaggatccaaaaacctacccacaactgataatggctcatccagcgggaattccatcaagttatcgattcctctgatacttattttggcagcaacatacgtgtcaactttcacaacatactgattctatattcggtcgattttccatttgctattttttgcttgtttgccaattgtccttgtttaatcatttgctattattgagcttccttagtctgaagggttcaatctattcattcgtgacccctactgggatacattgttttgtataatctgagacatgtgttctctcatttatcaataaaatgggttgtaacttggtttgctaaaaaaaaaaaaaaaacgcccctcgcgtcagtgtattctaacctcat

SEQ ID NO: 506 - DNA, 1393 bp, Glycine max
aaggcccccactacccccctaacgcattgggttcggaggtgttgagtggaagtggaaggtgaagaagaagaatatggaggatttcaagaagagaaagctggagctggacgaagcaggtggcgacggtgatttttcttccaaggaagagcttcgcttcctcatcgaacctctcgctaaaccccagctcgtcgatcttcttgccaaactagggtcccaatatccttcaattgcagaagaaataaaaagtattgcaagtgcagatcctgcccatcgaaagctttttgtccgtggcttggcctggaataccacttcagaaactttgcgtgctgcatttcaagagcatggagaaattgaggaaggagctgtgatctatgataaagtgacaggaaaatcccgtggctatggatttataactttcaaaaatatggaatcaactcagcaagcattgagagcccctagcaagttaatcgatgggagattggctgtctgtaatctagcttgtgagagtctaagtggaacaagtagtgctcctgatctttccctgaggaagctttacattggaagcttatcaccagaagtcacaagtgaaattctccttaactattttgcaaggcatggtgaaatagaggaaggttcagttgcatatgacagggatacaaatgaatcacgtggttttggctttgtcacatacaagacagcggaggctgcgaagaaggccatagatgacctagaaaagatgctcgggggaaggaatatagttgtaaaatatgctgattcccacaaaggtaaaactggccagccgccatttccttctggagtggttccaatggcacccttacctatgaacccaggatacatgcaacctggaaaaggtcatgttggttcagggcccccaatcaattacagttacccccaaacagtagcaccatattctgcatctccttatccaaaccctcctcccactgcaccctcactttatccaatacaatggcagattccttatcctcaagtttctgcaaagaaagaccaacatggggatccgcctgctgctgtaggaatgaacccttattactatcccaagcaatgaatgtatttaaaactaaagatgatgattttggtactcgtttcttttctttgccttccttttcaaatcgttttagaccctagttacctctcctatccccatcacttattaatgcagttctgcgacctttctttgcagctattgatctcttgtagagttttgacattcttttttattacttgtaatattgactataattttttttattagatttttttcataatattttaaaaaaaaataacatttcttttctgcatttaagctctaagactttgaagtttcaaatcatttgcaactgtttgagtggtt

SEQ ID NO: 507 - DNA, 2226 bp, Glycine max
tcgagtcagctacgttgccccccccccccaccatctaactaccctccttcaaaactcatctcgaaaccctaagcactcgctcgggttcgtgtagtgccaaaccctagggctcattttccagatctattcagtttttctctcctctcttttccgatccaccgttggagatcgaagatggtgtccgacgccagcaagaagaaggccgcacagaagaaggccgccgccgccgccaagagaggtggcaaagctgccgccgctgccgttatggccgccacctcttccaaagccgccgacaaggtcgccaacggaatcgccgatattcagatttcggatcggacctgcaccggcgtcctctgttcgcatcctctctccagagatattcgaatagagtctctatccgtcacattccatggacatgatctcattgttgattctgaattggagctgaattatggaaggcgttatggcttactcggattaaatggttgtggaaaatctacactgcttacagccatcggttgtcgggaacttccaattcccgaccacatggacatatatcatctaaccagggagattgatgcctctgatatgtctgcattggaagctgtcataagctgtgacgaagaaagattgaaattggagaaagaagcagaagctttagctgcacaggatgatggaggtggtgaatcccttgaacgcatttatgaacgattggatgccctagatgcagccactgcagaaaagcgtgctgctgaaatcttacatggtcttggctttgacaagcaaatgcaggcaaagaagacacgtgatttttccggtggctggagaatgaggattgcattagcgcgagctctatttatgaacccaaccattcttctacttgatgaaccaaccaatcaccttgatttggaagcttgtgtgtggctggaggagagtttgaagaagtttgaacgtattctggttgtgatttcacactctcaggactttcttaatggtgtctgcacaaatattatccacatgcaaagcaaaaaactgaagctctacactggtaattatgatcaatatgttcagacacgttctgagctagaagagaaccagatgaaacagtacaagtgggagcaggagcagattgcctcaatgaaggaatacattgcccgatttggccatggttcggctaaactagctcgccaggcacagagtaaggagaaaacactggcaaaaatggaacgtggtggacttgcagagaaggtggtcagagacaaagttttggtatttcgttttactgatgttgggaaacttccccctccagttctccagtttgttgaggtgtcatttggttatactcctgataatctcatctacaagaacattgactttggggttgatttagattctcgggttgcgctggttgggcccaatggtgctgggaagagtacactactgaagctaatgacaggtgacttgatgcctagtgatggcatggtccgacgtcataatcatcttcgaattgcacaatatcaccagcatttggccgaaaagctagacatggaaatgtctgctctccagtttatgattaaagaataccctggaaacgaggaagagaagatgagggcggcgattgggaagtttgggctgtcaggtaaagcgcaggtgatgccaatgaagaacttgtcagatggacagaggagccgagtgatatttgcttggttagcttggagacagcctcagatgcttcttttggatgagccaactaatcatttggatattgagacaattgactcgttggccgaggcattgaatgaatgggacggtggcttggtgcttgtcagccatgattttaggctcataaatcaggtggcgcatgagatatgggtatgtgctaatcaatctgtgaccagatgggagggtgacattatggaattcaaggcgcatctaaagtcgaaggcgggtttatctgactgaaacaatacgagtgtggatgctgccggtgtgtagtagtattacattaaaaggttatgatttttgttcgagcagagatccgtaataattttttttagttactatttcttgtgcttatcatttatttgcctggttgttaacaagcgtggatgaatgggatttcaccttgaggaaacgaagcttattctacaaatgaactatttcaaccgagaatattattatttgtggtattataattacgttaattcctctcaaaaaaaaaaaaaa

SEQ ID NO: 508 - DNA, 1537 bp, Glycine max
gccattgatgcatcaactgcagaaaagcgtgctgctgaaattttatttggtcttggtttcaacaagcagatgcaagcaaagaagacacgcgatttctctggtggttggagaatgaggattgctttagcacgtgctctatttatgaaccctaccatccttttacttgatgaaccaaccaatcaccttgatttggaagcttgtgtgtggctcgatccgcttcgggggaagttggaccgtattctggttgtggtttcacactcacaggatttccttaatggtgtctgcacaaatatcatccacatgcaaaacaagaagctgaaactcttcactggtaattatgatcaatatgttcagacacgtgctgaactggaagagaaccagatgaagcagtacaaatgggagcaggagcaaattgcctcgatgaaggaatacattgcccgatttggtcatggatcagcaaaactagcccgccaagctcagagtaaagagaaaactcttgcaaaaatggagcggggtggacttgcagagaaggtggtaagagacaaagttttggtattccgctttgttgatgtgggaaaacttcccccgcctgtcctccagtttgttgaggtgacatttgggtacactcctgataatctgatctacaagaaccttgactttggggttgatttagactctaggattgctctggttggacccaatggagctgggaagagtacgttactgaagctaatgactggtgatttggaacctctagatggcatggttcgacgccacaatcaccttcggattgcacaatatcaccagcacttggctgagaagctagacttggaaatgtctgccctccagtatatgataaaagaataccctggaaacgaggaggagaggatgagagcagccattgggaaatttggactgtctggcaaagcgcaggtcatgcctatgaagaatttatccgatgggcagaggagccgtgtgatattcgcatggttagcttatagacagcctcacctgctacttttggatgagccaacgaaccatttggatatagaaacaattgactcattggctgaggcattgaatgaatgggatggtggcatggtgcttgttagccatgattttaggctcataaatcaggttgcccatgagatatgggtgtgtgctgatcaagctgtgaccagatgggaaggtgacattatggatttcaaggagcacctaaggtcaaaggcgggtttatctgactgaagaagatagtgggactgggacactccagcatatcaccatctaaggactacgttacgtactgctgcttgagttggatttctccatggtgattttttttatttaaatggctctgcagagtaatcgctttggaaatcatgtcctcccccgttagattgcagtaatttgtatttttatcctttagttgccgatcagcatgataaataacaggggaccttagatgtaatacctatctgtatgtgaatgatatgttgtacctagagtattatatttactgcactagtttcctctgccc

SEQ ID NO: 509 - DNA, 2018 bp, Glycine max
ccacgcgtccgcatgacatttgatatgactgacattttgttttgttgtcatgaatttctttcttgtctgtctcaccataattacacccaacaagcattgcttaaataatggtttttacattttcagattgttgataaactccattggtatgttcagaatggtgatacaattgtggacttctgttgtggtgctaatgactttagcattcttatgaagaaaaagcttgaagagactgggagatgttcatacaaaaacttcgatttacttccaacaaagaatgattttaattttgagatgagagattggatgactgtccaaacaaaggagttgcctgcagggtcacagttgatcatgggcctcaaacccccccctttggacttaaggcagctttggctaacaagtttatagataaacctctcacgtttagactgaagctcctgattctcacagtaccaccagaaacggagaggctagatgaaaaacggtcgccttatgatcttgtctgggacgataagaagtttctattgggcaagtcattttatctaccgggatcagttgatgcaaacgacaggcagatagagcagtggaatgtaaagccacccccgctctacctttggagtcgtcctgattggactgataagcataaggccatagctcggaagcatggtcactttatcagccagcgggggctgttaagaattgaaagctttgataaagaaaaatcaccggccagtcatactttggatgatagttctggtttcgatagcatgccaggtcatgatatcttgaatttgactgatgcacctatcaatgagggccagacgggatgctcaccacatggaaatgttgatcgagagagtcaagagagacagaaatatatggtgagaaaggctgataagacctcatggaagaggaaacgaagtgaggaaaacgatggaagaagactaggtgtgacctcaccacccaatccaattgatgggagatcctcagttgaaagttttcagctcagacctgacatgccacctcctgattatgagcttggtgataaaagttataggcatttggagcccacctcttcctcacgaatgcggcaccagggggattagagcagcctatagcgggacccaaaattggccaagtgttgccaatcccctttatgattctgggattacagatgtaggtgaacaccatagcagccttccaagagacatcgccaatagcatcggatatagaccctatgtcagggaggatgagaactaccttagggaattagagacaaggcaacagactcgccattatggtattcagaatcctaattctgtgatgagtaattatctatctgtgcatgatcctgctaatagccaccacatggggccaagttatccagcccttgctttagcatctgagccttatgtgatgaatacaccagccatgcagcgatatgcacctcgcctagacgaattaaaccatgcaaggatggatcctttggggtctcgcctagacgaattaaaccatgcaaggatggatcctttggggtctcgcctagacgaacctgctatagttggtagaaacggtgcttttgaacgtagtgccctcccacctggatatgggagtaggatgccaggttttgcagctggttctcaccatatgtattcacgccagaattcagcagaccgattcaatgggtagtttgaatgtccatttttttgttctcctcttctacttttgcataaaaatgctgtatgccttaatctgcagaaatcatagggtttttttttttaggtgtatgctgtatgctaaatcttcggtctctatttccttcctaaagaacatttaggttttttcattttttggtgatctgtatatgcaagaccttggagtgggtagatacgttgtaccacctacaagtatatgataaatcagagttcactatttgaagaatgaggctttcactcctcattattcaattagacaccttaacattccctttaaatgtagactaagacattcattctaac

SEQ ID NO: 510 - DNA, 2179 bp, Glycine max
gcaaattctggtgcccgtttaggtgtagctgaagaagtcaaatcctgtttcagagttggttggtctgaggaatctaatcctgagaatggctttcagtatgtatatttaacacctgaggataatgctcggattggatcatcggtgatagcacatgagttaaagcttgagagtggagtcgcctcaggggcgatagataccattgttggcaaggaggatggccttggggttgaaaacttgagtggaagtggggctattgctggtgcttattcaagggcatacaaggaaacctttacactgacatatgtaactggcagaactgttggaattggtgcttatcttgctaggcttgggatgagatgcatacaaaggcttgatcagcccataattcttactggtttttcagcattaaacaaacttcttggtcgggaggtatacagctctcacatgcaacttggtggacctaaaatcatggcaactaacggagtcgttcatcttacagtttccgatgatcttgaaggtatttcttctattttgaagtggcttagctacattccttctcatgtaggtggtgcacttcccattgtaaagccgcttgatcctccagaaagaccagtggagtatttcccagaaaactcgtgtgatcctcgtgctgccatttctggaaccttggatggtaatggaagatggctgggaggaatttttgacaaagacagctttgtggagacactagagggatgggcaagaacagttgttacaggaagggcaaagcttggaggaatccctgtgggagtagttgctgtagaaacacagacggtaatgcaaataatacctgctgatcctggccagcttgattctcacgagagggttgttcctcaagccgggcaagtgtggttccctgattccgcaaccaagacagcccaagcaatattggatttcaacagagaagagctcccgcttttcattcttgcaaactggagaggcttttcaggagggcaaagggaccttttcgaaggaattcttcaggctggttccactattgtggagaaccttagaacatacaagcagcccatatttgtatatatcccaatgatgggcgaactccgtggtggggcatgggtggttgttgacagtagaatcaattcagaccacatcgaaatgtatgccgatcgaacagccaaaggtaatgtcctagagccagaaggaatgatcgagatcaaatttagaacaagagaattgttggagtctatgggtagacttgatcagcaattgataactttgaaggtaaaacttcaggaagccaagagtaacagggacatcgcggcctttgaatccctacagcagcagattaaatcacgcgagagacagcttttgcctgtgtatacccagatagctaccaagtttgctgaactgcacgatacttccttaagaatggctgccaagggtgtcgttagagaagttctggactggtgtaactcccgtgctgtcttctatcagagactgcacaggagaattggtgagcagtcactgatcaacagtgtgagagatgctgctggtgaccaattgtcacatgcatctgcactgaacttgctcaaagaatggtatttaaattctgatattgccaaaggtagagcagatgcttggttggatgacaaagccttcttcagatggaaggataatcctgcaaattacgagaataaactaaaggaattgcgtgcgcagaaagtgttgcttcaattgacaaatattggtgactcagctctagatttgcaagctctacctcaaggtcttgctgcccttttaagcaagttggagccatcgggtcgcgtgaagttgaccgatgaacttcgcaaggtacttggttagaggacctttttcgtgtcttattattgtaccacatttatttgtgttgattcccttggttaagttgttatacccaagtgaaaggaggctgtagcatccctcattgccgaagggatccgttgcttcaaagtgtaaatgacatgagtttggatggtaattaatttatgcagttagaggatcacaaccggcatcaccatgttccatctatttatttgctggttgattgattcttttggtatatttgaataaaattgtaataatgtgtaacattgtttttaatgcataacaattttgggtggtcgatgtaaaaaaaaaaaaa

SEQ ID NO: 511 - DNA, 1776 bp, Glycine max
ctcgggcccatcagcttcgtaggcccccccccccccacttctctcgaagaacagaacagacgaaaaggccctaaaaccctaatctcccaaaaccctacgcatggcgtcgtcgttaattcacctccgccgcaccgtcagagcactctccggcgtcgcccagtctttctctgtgcatgcggcatcgtattccgtccccattcggtgcggtgtttcatggagtttgcagtcaccgaagggtgtggttcagccccgttcattcaggtcaagctcaatttcacttctctcttttcgatcctcgcagcggcagagcaacatccccgatgagattggtcccgataccattctcttcgagggctgcgactacaaccactggctcatcgtcatggaattcaaagacaaggacaacaaaccctctcccgaagacatggttcgcgtttacgaagagacttgtgccaagggtctcaacatcagtttggaagaggccaagaagaaaatatatgcgtgcagcacaacaacttacataggctttcaggcggtcatgactgaagaagagtccaaaaaatttgaaggtcttcccggagtcatcttcgtgctaccagattcctatattgatcccgtgaacaaacagtatggaggagatcagtacattaatggaacaattatccctcgacctccaccagtacagtttgggaggaatcagggaagacgagactggaataggagtcctggtcaatacaaccggcaagagaatccagtgccaagcccccaagggaatccctcttacaatagtcagggacccatgccaaggggtggaaggaactatgggccttcgcaaaattatccaccccaacagaactctggtcaagcatcacagaattatccaccccaacagaactatggtccagcatcacagaattatccgccccaacagaactttgttcgagcatcacagaattatccaccccaacagaattatggccaggcatcacagaattatccaccccaacagaactatggccaggcatcacaaaattatccaccccaacagaactttggccaagcatcacaaaattatccaccccaacagaactatggtcaggcaccgcaaaattatcctccccaacagaactttgatcaagcatcacagaattatccccaacagcaaagatatgggccatcttcaccacaatatgcacaacagcagagctttggaccaccaggacaaggagaaagaagaaattatatgccacagcagaacattggacgaccgggacaaggagaaagaagagatcctgtgcctaggcatggtgcttcagaggcgaggggtgatacttttaccccatcatatgtgcaggatttcaaatcagcatacaaggaggaatttgaacaggctgagctggggaaccatcctgccaaagaacagacaggatcgcaacaaagatatccaccttctggcccaggcacttttactggagagggaagatactgatagtaatctgggacatgtgggcggcttgtattaaagtactaatcacattctaagctgattccatgtccttgccgtttggtggaatattgatatattgagctttcgttgtgtatccatcaattttagctgcactgttctgtgacaaagttggatctggtatgtaaagttagtactggctgcagtcttgttttttgaacatggttgaactaagaatttcacgtggattcttgtgctagtgactgagaatcgttggcaataaaacacgttcaaagaaaggtcttactggg

SEQ ID NO: 512 - DNA, 817 bp, Glycine max
cccaacagaactatggccaagcatcgccaaattatccaccccaacagaagtatggtcaggcaccacaaaattatccaccccaacagaactttgatcaagcaccacagaattatccacaacagcaaaggtatgggccatcttcaccacaatatgcacagcagcagagctttggaccacctggtcaaggagaaagaagaaattatatgccacaacagaactttggacggccgggacaaggggaaagaagagatcctgtgcctaggcatggtgcttcagaggtgaggggtgatacttttaccccatcatatgcgcaggatttcaaaccagcatacatggagggatttgaacaggctaagctggggaaccatcctgccaaagaacaggcagggtcacaacaaaggtatccaccttctggcccaggctttactggagagggaagatagtgatagtaattgagttagtgggcggcttgtattaaagtactaatcacattctaagatgattgtttgcccttgccatttggtggaacattgatttattgagctgtcgttgtgtatccatcaatttttagttgcactattctgtgacaaagttggatgtggtatgtaaagttagtactggctgcaggcttgttgtttgaacatgcttgaactatgaatttcacgtggctctttcctgtcttactccgctcccattctccttctcattgtaacggatagaacaatgaataatgtggatttgcgttctctaaaaaaaaaaaaaaaaaaatcagttcccgtaagggccattaatgctacagcccacaatcatgtctttc

SEQ ID NO: 513 - DNA, 1733 bp, Glycine max
ggctcgagttctctcttcacctacactttcctctttcaattcaattcaattcttctttttggttcagaaactctgtacagttaatcaaaccctacctcacctcaccggttttaacaatcactctataaggcagatagaaaaccctaaaccccttccatttcccttccactcactcttctaacatggcgactcagatcctctctcgcatcttccccaaaaccctagcccccttcctctcccgttctctctccaccgccccctctcctccctccctctccgcgctctccttcctccgccgcatctccgttgccgccaacccctccctccaccgcgccctcctccccaactctccctccctccgcgccctctccacacgcgccactacctcctccctcaacgaccccaaccctaactggtccaaccgtcccccgaaagaaaccatcttgctcgacggctgcgatttcgaacactggctcgtcgtcatggagaagcccgagggagaccccacacgcgatgacatcatcgatagctacatcaaaacattggccaaggtcatcggaagtgaagaggaggcgagaatgaagatatattcggtctcgactaggcactactttgcgtttggggctcttgtgtctgaagagctttcttacaagattaaagaattgcctggagttcggtgggtgcttcctgattcttacttgaatgttaaggaaaaggattatggaggtgagccctttattaacgggcaagctgctccctatgatcccaagtatcacgaagagtgggttagaaacaatgctcgtgccaatgagagaaacaggcgcaatgacaggcctcgtaatgctgacaggtcaagaaactttgagaggaggagggaaaatgtggtaaacagagacatgcagggcaggcctccttcgccaaatcctggccctaatgtgggcggtcctcctccaagcaatgcagctgggtaccctccaagcaatgcagctgggtaccctcctagcaatgcaggatatgcccctccaagcaatacaggcgggtaccctcctagcaatgcaggatatgcccctccaagcaatgcaggcgggtaccctccgagcaatgcaggctatgcccctccgagcaatgcaggctatgcccctccaaatacagctggatattcttctccgaacgccgcaggaggttaccctcctaatgcaggtggtggctatggtcctggtggtggtgtgcctcagaataactacgcagggaacatgggagggccaccatcaaaccagaacatgggagggtttcaacaaaattcaggatggtcgaacaatgctcccagtagagatgtgccaagcagggatatgggaggaccacctggtgggaacccatattctgggtgagatcactgcagatttttctagccaatgtagataacgaagaattgtgcccaagaaagcagagtttatgctatgtttctcaaggaattagaatttattagtcttacgtgttactcctattttctaatgaacctgcatgttgtgcatccgaagttcaatttttttaatgctagatacgatcattttgtttctattgtttgtgaggttgacggtctaatttgttatctgattgaggttgcctttcagacttattattatataaagtaactgttagtaataatacctgtttagggttctagtatattaaaaagaagtttgtctcttattcttgaacccgtcattcaaaaa

SEQ ID NO: 514 - DNA, 1649 bp, Glycine max
tgtcactgcagacatggcggttcatatctttggagaggatctgatttgtacaaggtcttgcaagtattgacggagtccataaaagagcgccgtggttgaatcctcttattgaaatggcattcattaagtcattcattcaaggatttctaccgggtattgcattgaagctttttctcatctttttgccaacaatattgatgatcatgtcaaaatttcgaggccgccgacctaggccccccccccagagaagagcagcatctagatactatcttttcaattttgtgaatatatttcttgggaacatacttaccgggacagcatttgaacagctggactctttcattcaccaagcagccaatgaatatcctattacaattggcactgcaattcctttgaaagcaagtttcttcatcacttatataatggttgatggatgggctggtatagctgcagaggttttgatgttgaaacccctaatcatatatcacttgaagaattttttcttggtgaagactgaaaaggatagggaagaggctatggatcctgggagtattggcttcaacactggagaacctcgaatacagttgtactttttgctgggtctagtctatgcttcagttacacctactgttcttcctttcataatagttttctttgggctcgcctatgttgtgttccgtcatcagattatcaatgtttataatcaagagtacgagagtggtgcagcattctggcctgatgtccattttcgtgtcattattgcactgatagtgtcacagatagttctgatgggactccttaccactaaagaggctgcttcatcaactccatttctaattgtactcccagtactgacgatatggttccatatatactgcaaaggccgtttcgaacctgcatttgttagatatcccttacaggaagcgatgatgaaagacacattggaacgagctacagatcccaactttaacttgaaagcttaccttcagaatgcatatgttcatccagttttcaaagctagcctttttgatgaggacgaagaggacgaagaggtaatgagtctaaagttggaaactgagagtgtaactgtgcccacaaaacggcaatcaagaaggaacacaccattggctagcagaattagtggtgcatcatctccttctctgcctgatcatggcatccgaaatcataatccagagccataaatcatggaccaaggattcatatcattgttattggaccgaccacatatgtaacatacaatgggctacacatgcttccagcataaactgagagaagcaagctagtgtgatcggcacaaactgtaaggtagagattctttgatatattattatttccgattttgttaatagtgaatttgttcccttacaccacggaatgctgtaaattatcccagaacttgtcatggtttagatcgtgtgtatatttttttcttcttttttttaccttatgcttttccttcggattcagctcagtttatatgaggaaaaaaagtgtgtttgcacttgtgcacgtttttaagttttaacacaatcaatgaacgactttcctttacgtttaaaaaaaaaaaaaaaaaaaaaaaaaaaaaaaaaaaaaaaaacaaaaaaaaaaaaaaagaggggggccccccc

SEQ ID NO: 515 - DNA, 781 bp, Glycine max
ggcttgtatattatcaaaacaaagttgaaagaacttcatacggctgcgagaagacgacagaagggcttggtctttgcggaaacaaagtagatgctatcgatcatcacaacactgaaattgacaaactgtcaaaggaaatagcgttagagagggataatgtcagcaatgatcccaagtccatcatgcctgcggcatttgtttcgtttaaaacacgatggggtgctgcagtttgtgcacaaacccaacaaaccagaaacccaacaatgtggttgacagagtgggcgccagagccacgtgacatctattggtcgaatttggcaattccatatgtttccctcaccgtgagaaggttgatcatggctgttgcattcttttttctcaccttcttttttatgatcccaattgcaattgtacaaggtcttgcaagtattgagggaatccgcaaaagagcaccatggttaaatcctcttattgatattcctttcattaagtcgttcattcaaggttttctacccggtattgcattgaagctttttctcatctttttgccaacaatattgatgatcatgtcaaaatttgaaggcttcggatctatttcatctctggagagaagagcagcttctagatactatcttttcaattttgtgaatatatttcttgggaacatacttaccgggacagcatttgaacagctggactctttcattcaccaaccagccaatgagtaagtcattcacaacaatggcactgcaattcctttgaaagcagtttcttcctcact

SEQ ID NO: 516 - DNA, 1130 bp, Glycine max
gctgcagaggttttgatgttgaaaccgctaattgtttatcacttgaagaatttcttcttggtgaaaactgaaaaggacagggaagaggccatggatcctgggagtattggtttcaacactggagaacctcgtatacaattgtactttttgttgggtctagtatatgctgcagtgacacctgctgttcttcctttcataacagttttctttggcctggcctatcttgtgttccgtcatcagatcattaacgtttataatcaggagtatgagagtggtgcagcattctggcctgatgtccatttccgtatcgtgatggcactgcttgtctcacagatagttctgatgggactcctcaccaccaagaaagctgcttcgtcaactccttttctcgttgtgctcccaatactaaccatatggttccataggtactgcaaaggccgttttgaatctgcatttgttaaatttcccttacaggaagcaatgatgaaagatacattagaacgggcaacagaacctaacctgaacttgaaaggttatcttcagaatgcctatgttcacccagtttttaaggacagcatggatgacgatgatgacgaggaagatagactcagtatagacttggaaactgaaagtgtgactgtgcgcacaaaacgccaatcacgaaggaatacaccattgccaagcaaaaataatgatgcatcatctccttctctgtctgatggtattggaaatcatccagagccttaaggcaaaatgagataactgtacattcgaatttaggtcagtattttctcaacagactaggatgatgtgcaagtgcaaatatagtaagttgcatcacttgacaaagttgaggaagatgggctatctcttgtagtgacttctgctgaagcaattgttttgaagttttttccaggccgatgtaatcgctacatgtagactatctggaagatatttttgtaatgcttaggattttgttgaatactagtgaatttgcttccttattagatgaacagaagaggttgtcttttaagacctgtacattatattgcaagttacatagattatatacatatacattatattacacttgggaatattgaaagttacctaaaaaaaaaaaaaaaaaa

SEQ ID NO: 517 - DNA, 2022 bp, Glycine max
cacgcgtccgcacaatgttctggaaaattgggatattaattctgttgatccatgtagctggaggatgattacttgttcccctgatggttctgtttcagtattgggattgcctagtcagaacttgtctggacactatctctcagctacgtaggccccccccccccacaatctgtgttgcttcagaataatgctatttctggtaggattcctgctgcaataggaagcttggaaaagcttcagacacttgatctttccaataatacatttagtggtgagatacccagttctttgggaggcctcaagaacctgaattatttgaggttaaataataacagccttacaggatcctgccctcagtctcttagcaacattgaaggtctaacccttgtggacctctcctacaacaatctgagtggttccctgccaagaatatcagcaagaactttaaagattgtgggtaactctttaatttgtggcccaaaagcaaacaactgttctactattttaccagagccactttccttccctccagatgcactgagaggccaatcagactctggtaaaaaaagccatcatgtggcacttgcttttggtgcaagttttggtgctgcttttgtccttgtgattatagttgggtttcttgtttggtggcgatatagacgcaaccagcagatattctttgatgtcaatgaacattatgatccagaggtgcgtcttggtcatttaaaaaggttttcattcaaagagcttcgagctgcaactgaccatttcaactcaaagaacattctaggaagaggtggctttggaatagttttcaaggcatgcttgaatgatgggtctgttgtggctgtcaaaaggttaaaggactataatgcagccggtggtgagatccaatttcagacagaagttgagaccataagtttggctgtccaccggaatcttctgcggctttcggggttttgcagtactcagcatgaaaggctccttgtttatccctacatgtctaatggcagtgtagcctctagattaaaagatcacattcacggtcggccagctttagattggacgaggcgaaagagaatagctttaggtacagcaagagggttggtttacttgcatgagcaatgtgaccctaaaattattcaccgcgatgtcaaagcagcaaacattttgctagatgaagactttgaagctgttgttggtgattttggtttagctaagcttctggatcatagagattcgcatgtgaccactgctgtgcgtggcactgtcggtcacattgctccagagtatctatccactggccaatcatcagaaaaaactgatgtgtttgggtttggaatcttgctgcttgaactgatcacaggtcataaggctctagattttgggcgagcggcaaaccagaaaggtgtaatgcttgattgggttaagaagctccaccaggatggaagattgagtcaaatggtagacaaagatctaaagggcaacttcgatctgattgaactagaagaaatggttcaggttgcactcttgtgtacacaattcaatccttcgcaccgccccaagatgtcagaagtattgaagatgttagaaggggatggcttagctgagagatgggaggcctcacagaggattgaaacaccaaggtttcggtcttgtgagcctcaaagatattcagatttaatagaggaatcttcactcgtagttgaagccatggagctttctggtcctaggtgacaaacaagtatcttggttttccactatagctccttgtttaaaaggtgtagtttaaatgttaaatatgacattgtcattcgtgtcaatagctatgtaatgctcgtattcatctgtaaaaagaaaaaaaaaaaagaggaaagtcatgtataagtatcttctttgttggaatgttgatttagttgcttcagaaaaattttgaatcaatgttagaaaattgtatgtagttgcacgatcttggtggctaagcaatctcatggagccagttgagtaaaaaaaaaaaaaaaa

SEQ ID NO: 518 - DNA, 1360 bp, Glycine max
tgggtaccgggccccccctcgagtcagcttcctaggcccccccccccaaaaaggttttcattcaaagagcttcgagctgcaactgaccatttcaactcaaagaacattctaggaagaggtggctttggaatagttttcaaggcatgcttgaatgatgggtctgttgtggctgtcaaaaggttaaaggactataatgcagccggtggtgagatccaatttcagacagaagttgagaccataagtttggctgtccaccggaatcttctgcggctttcggggttttgcagtactcagcatgaaaggctccttgtttatccctacatgtctaatggcagtgtagcctctagattaaaagatcacattcacggtcggccagctttagattggacgaggcgaaagagaatagctttaggtactgcaagagggttggtttacttgcatgagcaatgtgaccctaaaattattcaccgtgatgtcaaagcagccaacatattgctagatgaagactttgaagctgttgttggtgattttggtttagctaagcttttggatcatagagattcacatgtgaccactgctgtgcgtggcacggttggccacattgctccagagtacctatccacaggccaatcatcagaaaaaactgatgtgtttgggttcggaatcttgctgcttgaactgatcacaggccataaggctctagattttgggcgagcagcaaaccagaaaggtgtaatgcttgattgggttaagaagctccaccaggatggaagattgagtcaaatggtagacaaagatctaaagggcaactttgatctgattgaattagaagaaatggttcaggttgcactcttgtgtacacaattcaatccttcacaccgccccaagatgtcagaagtattaaagatgttggaaggggacggcttagctgagagatgggaggcctcacagaggattgaaacaccaaggtttcggtcttgtgagcctcaaagatattcagatttaatagaggaatcttcactcatagttgaagccatggagctttctggccctaggtgacaagcatcttggttttccactatagctccttgtttaaaaggtgtagtttacatgttaaaaatgacagtgtcattagtgtcaatagctatgtaatgctcgtattcatctgtaaaaagaaaaaaaaggaaagtcatgtataagtatcttctttgttggaatgttgatttagttgcttcagaaattttttgaatcaatgttagaaaattgtatgtagttgcacttaacatgttcttgctgttggttttggtggctaagcaatgtcatagagccagttgagtaaaattttctttagatcaaaaaa

SEQ ID NO: 519 - DNA, 1156 bp, Glycine max
  misc_feature (886)..(887): n is a, c, g, or t
  misc_feature (890)..(890): n is a, c, g, or t
  misc_feature (904)..(904): n is a, c, g, or t
  misc_feature (912)..(912): n is a, c, g, or t
  misc_feature (917)..(917): n is a, c, g, or t
  misc_feature (919)..(919): n is a, c, g, or t
  misc_feature (928)..(928): n is a, c, g, or t
  misc_feature (934)..(935): n is a, c, g, or t
  misc_feature (937)..(938): n is a, c, g, or t
  misc_feature (941)..(941): n is a, c, g, or t
  misc_feature (949)..(949): n is a, c, g, or t
  misc_feature (953)..(953): n is a, c, g, or t
  misc_feature (956)..(956): n is a, c, g, or t
  misc_feature (958)..(961): n is a, c, g, or t
  misc_feature (966)..(966): n is a, c, g, or t
  misc_feature (968)..(968): n is a, c, g, or t
  misc_feature (971)..(975): n is a, c, g, or t
  misc_feature (978)..(978): n is a, c, g, or t
  misc_feature (981)..(987): n is a, c, g, or t
  misc_feature (990)..(1001): n is a, c, g, or t
  misc_feature (1007)..(1008): n is a, c, g, or t
  misc_feature (1012)..(1029): n is a, c, g, or t
  misc_feature (1031)..(1043): n is a, c, g, or t
  misc_feature (1045)..(1048): n is a, c, g, or t
  misc_feature (1050)..(1059): n is a, c, g, or t
  misc_feature (1061)..(1062): n is a, c, g, or t
  misc_feature (1066)..(1086): n is a, c, g, or t
  misc_feature (1088)..(1104): n is a, c, g, or t
  misc_feature (1106)..(1109): n is a, c, g, or t
  misc_feature (1111)..(1118): n is a, c, g, or t
  misc_feature (1121)..(1135): n is a, c, g, or t
  misc_feature (1137)..(1153): n is a, c, g, or t
  misc_feature (1155)..(1156): n is a, c, g, or t
agaagaggaagcaaggcagtgaatgatacggctgtgagatgacgacaggcggaggagaggaatcagaatcgcgtttgggagaagaagagcaaaatcgctgtgaaaatgagcggaacggtgaagaaagttagcgatgtagcattcaaggtgggaaggaacatcgattgggatggaatggcgaagcttctggtctccgatgaggctcgcagggagttctccaatctccgtcgcgctttcgacgaggttaactcccaactccaaaccaagtttagccaggaacctgagcccattgattgggattactatagaaagggaattggcactcgtttggtggatatgtacaaggagcattatgagagcattgagatccccaagtttgttgatacagtaactcctcaatataagcctaaatttgatgcccttttgattgagcttaaagaagcagaggagaaatctctgaaggagtctgagcgcttggaaaaggaaattgctgaagtacaagagttgaagaaaaagcttagtaccatgacggcagatgagtactttgaaaagcatcctgagctgaggaagaagtttgatgatgagatcaggaatgataactggggttattgatttttcaattagcaaaatgtcaggttgatgttgttctggctggtttaataataactacattgatttctttgtaactcggttctctttttcagttcaaaggatcttatatattacagtgtcgaaattttttgtggtactgtagttaatcacttaagacttaaccacaaaagtgcggttgtggtcgactgatcgtcagagaaactgctgttttgcgtttgtcttaataaattatatgtctgccccgtaatgaaaaaaaaaaatttctgtttgttcnnccnccccggggatcccntttttttnaaacngnccccccccngggggnncnnccnccttttgntccnttntnnnngggtnanttnnnnnctnggnnnnnnnggnnnnnnnnnnnncctggnnaaannnnnnnnnnnnnnnnnncnnnnnnnnnnnnncnnnntnnnnnnnnnncnngggnnnnnnnnnnnnnnnnnnnnntnnnnnnnnnnnnnnnnncnnnntnnnnnnnnaannnnnnnnnnnnnnntnnnnnnnnnnnnnnnnngnn

SEQ ID NO: 520 - DNA, 1358 bp, Glycine max
  misc_feature (1)..(22): n is a, c, g, or t
  misc_feature (24)..(25): n is a, c, g, or t
  misc_feature (27)..(27): n is a, c, g, or t
nnnnnnnnnnnnnnnnnnnnnnannanatttatttttttttttttttgtttcaacagaaggggaaggaaatcagttttgattgccacaaacaatttgatttaacagaaggagaatgaacatggctcctaaacaattcttttataccccaagcatttgaacacaacatccattcctaaataacctctaactacaaaccctactatacatcccaaatgtaaaagagctactatcatgtttggatggcacataagaatcaattctaccccataaaatcaggtgataccataaaaaagtagaaacaactatttgttgtttttaccttcaccatgaaaaattaattgattatgttttaccataaagctacatcactactcaagagacctctttatagtgattcgaggaaaccagtttttgagagtacagcattcctcactttgctaagatccctacctttgagggttctcccagcaccttctaaaacagaaaatgaggatatctgactcctttcaagccttcgggcaataaactcatgtggaggaagcttggaatcactctcatcattttcctctccatcctcatcactacccccaccatagttagcaacaccatcaccatcaaaccttgaattagcactgttcttggggagtttagtcctataaatctttgaccagtcaggaatgttgacaggtgctgattgctgaagaaccgtatcttcattggaggaactagcactgctgctattgctagatcttgggatcattctggctgaactaggcctagcaggaacaggaacagaagaggattgatctttgtctttgaacttgctaaccccagaagtaccataatcactacttctgttcttgaaaacgtcccaaacttcttcttcatcaaagtctccatctctcaaggacttccatatcccactatgctgcctgcctagactatatttatcttccatcacaaatcaatcacttcctgcatagtcacataacacaaatgtgaagaaaattatctcaaattattgaactagaattttcactggtttaagcataagacaaaaaagagaatttggaaattaaggggagaaattaagaaccaaaagtataaatcacaggaggtgattatatttgatacagtaagatatttggtattttattgaggaaaaataaaaggaaccactttttgttgttgttgttgttgttgtcgtcctggaatcagaagcttgaaataacccaactttatgctgattctaaagtggtttcttgctgaacaagtttgcagagagattatagggagaagcagcaaagcaaagagagagcagagcaagttctttctttctgaaggctcgagccgaatt

SEQ ID NO: 521 - DNA, 3741 bp, Glycine max
agaggaagaaaaaagaacaacatccaagaaaaccagcagagcacctcccaagatccgatcagatccattcaaccctctctcttcactttctctctctaccttcaatatcccattttttctcacttcccccaaacccatttccgctctcgccggttagggtttcttcaattccttctccaaatgcgctagatcgacacccagaagttcaagtgcatgaagctttggtgctttccatggctatgcttcactgaagaagaagaagaagagcgcaacgttccaaaacctatgaaggaagacgacattttcggaaacgacgtcgtttccgacgacgacgacgacggaaacaatacccgcggcggcgacgacgagcaattcgcgacggcgcgcaccgatgcattgggctcgtggcccggcgagagcagctccaccgccgccgccgcatgttcggaaacccccgcccccggcggcgagagccgcgattcgagccgcaggcgcgccaagttctacgcggatttcgaggagcgtaacttttcaacgcatgccggaaagtgcggtgcatctaatgaatacggtgattatgaccatattaaaggtactcttcgacccaacggtgagacttgttatgatgcatttgcattgatgggtgctgttgaggagagtagtagtggctttgattccagcattgtgaaagagggtgagggtcggctcggggatatctcgaaagttgaagatgtagaggtcagaatggatctcaccgatgacctgttgcatatggttttttcgtttttggatcatcccaatctctgcaaagctgccaggatttgtaagcagtggcgaggtgccagtgctcatgaagatttctggaaaagtttgaattttgaagatcggaacatatctgtcgaacaatttgaggacatgtgtaggcgttatcctaatgccacagcagtgagcatatctggttctgctatttacttgcttgtcatgaaggccatctgttcattaaggaatctagaggttctaacattaggaagaggacagatagctgatacttttttccatgctttagctgattgttctatgttgagaagattgaatatcaatgattctacactaggcaatggcattcaggagataactattaatcatgacagattgtgtcatcttcaattgacaaaatgccgtgtgatgcgaatagcagtcaggtgcccacaacttgaaactatgtcgttgaagcgcagtaacatggcacaggttgtgcttaattgtccacttttgcatgagcttgatattggctcttgccacaaacttcctgatgccgcgatacgagctgctgcaacttcatgccctcaactggtctcactggacatgtcaaattgttcatgtgtcagtgatgaaactctgcgtgaaatagcattgagttgtgctaaccttagttttcttgatgcatcatactgctcaaacatatctttggagtctgttagactgccaatgttaacagttttaaagctccatagctgcgaaggcattacttctgcctcaatggctgcaatagctcatagttatatgttggaggttttggagcttgacaattgcagcctgttgacttcagtgtctttggatcttcctcgtttgcagactattagattggtacactgtcgcaaatttgctgatttgaacttgaggactatgatgctttcttctatactggtatcaaactgccctgcactccatcgtatcaacatcacttcaaattcacttcaaaaattagccttgcaaaagcaagatagtttaaccatgctagctctgcaatgccaatctttacaagaagtggacctctcagagtgtgaatctttgacaaactctatatgtgatgtttttagtgatggtggaggatgccctatgctgaaatcactagttcttgataattgtgagagcttggaatcagttcggttcatcagcaccactttagtcagtctttcccttggtggttgtcgggcgatcactgctcttgagctcacatgccctaaccttgagaaagtcattttggatggttgtgatcatttggaaaaagcctccttttgtcctgttggccttcggtctctcaatttaggaatatgtcctaaattgaatatactcagcatagaagccatgtttatggtctcacttgagttgaaaggatgtggtgttctgtccgaggcatcacttaattgtcctctcttgacatctttggatgcttccttttgcagccaactcactgatgaatgcttgtctgcaacaacggcctcctgcccattgattgagtcattaatattgatgtcatgcccatcgattggtttagatggactttgttctttgcgttggctccctaatttaaccctgctggatttatcgtacacttttttggtcaatttgcagcctatttttgagtcttgttcacagctaaaggtattaaagttacaggcatgcaaatatctcactgactcatcacttgagcctctttacaaaggtgctttaccagtacttcaggagttggacttgtcttatggaacactgtgtcagtcggccatagaggagcttctttcttgctgcacacaccttacacgtgtgagcttgaatggctgtgccaatatgcatgatttaaactggggatgcagtcgtgcgcatactgctgaattgcctggtgtaaatgtcctacccattgcaagttcccctgaaaatgtcctcgagttaagtgagcaacccatccggttactgcagaacctaaactgtgtgggatgtccgaacattcggaaggttttcattccatcaacggcacattgttcccgtttgttatttttaaacctttctctatcagctaatttgaaggaagttgatgtagcttgtctcaacctaagctggcttaatctaagcaattgttcctctttggaagttttgaagctagagtgtccgagattgaccagtctattccttcagtcttgcaacattaatgaggaagctgttgaggctgctatatcaaaatgcactatgctggagactcttgatgttcgcttctgtccaaagataagctcaatgagcatgggaagattgcgtgcagcatgttctagtttgaagcgtatattcagcagcttgtcagcttcataaacatgaccaaggatctgtgaaattttccagtggttttcacttggattgaaggcaaacttggtaataaatctggttatatccttatgtattgtaaatgtgtaacttgttattgtttgtttgtatggcatatatagaaattaggtttatcttctatggattgttataataaattgtcgttgttatacttgttactattgtaaattttacatttcaattttgttgatacatattttattctaaaacagtccaacttttttttttttttgtaaataggggatctgatccattttttgccctagccaaaaaaaaaaaaaaaaagcaaacccaacaaacaaaaacaaacaagggcggcccttttataggaatcccatctactttcgcttgcctgcgacgccataacttttctttggggtgcccaaaatctaattgactggccggtgtttacaatgccgaaactgggaaacccttgaggtgacccaccttattggactgtgcgaacataccccttttcccagttggtgttaaatctgaaaggcccgggccactcgccctgtcaaacagtttgacacccttaatggggaatggaaccgcccctgttgg

SEQ ID NO: 522 - DNA, 2068 bp, Glycine max
  misc_feature (542)..(542): n is a, c, g, or t
tccggtcagccacctagggcccccccccactgccccaacctattcttggagactgttagactgccaatgttaacagttctgaagcttcacagttgtgatggcatcactgcagcctcaatggctgcaatatctcacagttatatgttggaggttttggagcttgataattgtagcctattgacatcagtgtctttagaccttccccgcttgcagaatattagattggtacactgtcgcaaatttgctgatttgaacttgatgaccctaacgttgtcgtctatcttggtgtccaattgccctgtgctccatcgtatcaacatcacttcaaattcacttcaaaaattaacaataccaaagcaggacagtttaaccacattagctctgcaatgccaatctttacaagaagtggatctctctgagtgtgaatctttgaataactctgtatgcaatgtttttaatgatggtggaggttgcccaatgttgaaatcgttagttcttggtaattgtgagagtttgacatcagttcagttcatcagtacctnttcagccacccaggccccccccccttgccgtgcaataactaatcttgaactcacatgccctaatctagagaaagttattttggatggctgtgatcatttggaaagagcatcattttgtccagttggtcttttatctctcaatttaggaatatgtccaaaattgaacacactcagcattgaagcaccgtttatggtttcacttgagttgaaaggatgtggtgtactatctgaagcattcattaattgtccactcttagcatctctcgatgcttccttttgcagccaactaacggatggctgcttgtctgcaacaactgtctcatgcccactgattgaatcattgatattaatgtcatgctcatcaattggttcagagggtcttcgatctctgtattgtcttccaaatttgactgttcttgacttatcatacactttcttggtgaacatgcagcctgtctttgattcttgtttgcaactaaaggttttaaagctgcaagcatgcaaatatctcactgacacatcacttgaacctctttacaaaggaggtgctttagccagcacttcaggagttggacttatcttatggaactctttgtcaatcagccatagatgagcttcttgcttactgcacaaacctcactcatgtgagcttgactggctgtgtgaatatgcatgatttgaattggggaagtagttgtgggcaaagtgacaatttccctgctgtaaacaccccatctagggcaagttctaatgagaatatccctgaatcaagtgagcaatccactcgcttactgcaaaacctcaactgtgttggatgtccaaatattaggaaggttgtcattccattgagggcaaattgttttcatttgttatttttaaacctttcactctcggcaaatttgaaagaggttgatgttacttgtctcaacctatgctttcttaatttaagcaattgttcctctttggaaattttgaagctagagtgtccaaaattgaccagtctgttccttcagtcttgcaatattgacgaggaagctgttgaagctgccatatcaaaatgctctatactggagacccttgacgttcgcttttgtccaaagataagctcaatgagcatgggaagattacgcccaatttgttcaagtttgaagcgaatattcagcagttagtcaactcttgttaccatgatcaaggatataaaaaaaaaaatccctagtgcttcacttggattgaaagcgcgcttggtaataaatttgattatttcttcgtggtgttgtaaatggctaaattttaaatgtttgtttggcatatggaaatccgttctgtatttgcaataatttatctttgttgtacccgtattcttgtaaaatcaacatttcaaatttaagctctctttattttgaagcagtttaatggatccctgttggagaataaaggtagctttgattcttgtcttattttttttcagttttttgtttaaaaattgttccctaaaataattttacacaataatcaatttctcctcc

SEQ ID NO: 523 - DNA, 2329 bp, Glycine max
ggaaaagtataaattctcgtaacgtagggtcaggtggtatgttccggaagattagattagatatacggctgcgagaagacgacagaaggggaccgtagcagatctcattcattcttttcttttctttccattcaatcacgccctctcttcccttcccttggcgcaatgaattccaacttcaatttcgatttcgatctcggcatcggatccaaccgtcccaaatcccttaacgaccagaaaaaccccaaaccaactccctattcttcctattccaccaccaccaccgcttcctattcctcctcccaacccaataaacaacctgcatggacccaccaaccctcccccactcagaccaccgccttgcccggtggccccccctccatggtcggagacatcttcggcaagagctggggaacccctcaaccttcttctgcttccaaaaacatcgggatcgtcaataagaaccctaaccttttcggagatttggtaagttctgctttgggccagggttccaagaccaacgttcctcttaaaaatgctcccactcccgcgcccaataaatccaccttttcaatgggaaatatggctgattctttgcccaaaactggttccacgccgcagagcagttctacttgggcatcgtcctctgggggttttaatgtgagtgccaataaaaccactctcaatcttgggggtccttcattgcgaaacatgggtactggaattggaaccaattctaataacaaggatccctttagttctttgtctggtattggatccaagcaatctgctactcttaattcagctcccaaaggaccaaaggttgatttgggggacgatggttttggtgattttcaaaatgcttccaaacccagctccactgcgtttccattcactgcttctcctggaattgatatcaattttactggatcaggtgatagtggtgatccaatggacatgtttttcacggcaacttcctcctcggcctctggtggaggtgctgctgcggcctctgatggatttggaacacaggatgattggggtttggattcggagtttggtgggggaggccatgatgtaggtggcaccactactgagcttgaggggctgcctcctcctccttccggggtgtcaggttccactgccaaaggcaaagggatggacaattacaagcaggggcagtttgccgatgctattaagtggctttcgtgggccgtcatccttctacagaaagctggggatagtgcggccactgtcgaggttttgtcgtgcagggcttcgtgttacaaagaagttggggagtataaaaaggcagttgcagattgtacaaaggttcttgaaaatgatgaaaccaatgtatctgtcctggtacagcgtgctctgttatatgagagtatggaaaagtacagacttggtgctgaagaccttaggactgtgctgaagattgatcccggtaatagaattgctagaagcactgttcaccggttggctaagatggctgattaggaattcttttgtcattttctttttcctttaacatgccatataggtttttacatcaccaacaacccccatttcctttggcctttatagttagggggtgatacataaggactgcttttgaatgttgtcacccttcatatgatattgtgatgtatggtttatttcattttggctatgtcttgaaattaaaattctcgttgccttctcccagatttgcacttaataggattgccatattctttttctacttgttatcttgtgtttggattgtttgcatattaagaaagacatttgttatttcttaaaattgtgaagagagaatgccttcccgttactctatggaaagaaatttgatttacagacatatttgttccctcgttcgctggacgattttgttttgcttgtgaatttatgtataggctcgggaaatttttgggcctaatttcgcgagccttaagaaatttctgtggaatatgaattaagtttatatattgttgcatgctttgtataaactaggcttgattgtatttttgttcccacatttcataatgtaaattgggagactttgaccagaaggtgcagttttttttttgatttcttttatttagagtcgattttagattattcctcaaaatgggataagtcttaataaatgttatggattttgaattagaagtcatatcaatgatttatggcttcaaagtggtataattttttttaatgttacgtttaaggttatcagttttttaattttttgccctttaaagataaaaaaaagcacttgccacttcaaaggtataagactaaaaaaaaaatacgcgtcgtt

SEQ ID NO: 524 - DNA, 765 bp, Glycine max
aaaaagaggagattttaagggtttccatataagaaaattgataagaggtgagagatactttttgacaatggttacaagcaagcgaaactaaaacgacgcgaaggagaaaaagggagatcggagagacagagagatcagtagtatcagagatggggagagggcaagttctgagcgcgtaccgcgcgcttctgaaagcgacacggaaaacattttccggcgacaccatgatgctgaaggaatctgcggtggaagtaaggaagaagttcgaggaaaacaagaacgtgagctccgaggcggagatccagaagcttctcctagaggctgaagaggcctcccatttcatcaccaacatgctcgtccaggcacagctcaatcccgattctggcacttacgcggtgaagccgtgtaaggagcatgctggagcaacgcttgaacttccctccgaagaaattattcggaagtcagcatagggacaagaggcaagcggttagaacaaagtctagatttttatttttgcttaggatcaataagcagtattgcctctgattttatgggggtgtttgattattatttttttgctcccaatcctttgtttcctttcaaatctatttagcggagtagacaggatataaatctgactggcaaaagtttatgatgccctttttttgttgtatgatcacataatgtatcccaagtttttttgtttaatttgccttcagcagaatttcaaattggtttggatgattcctgcgaagtatgacaagc

SEQ ID NO: 525 - DNA, 1368 bp, Glycine max
  misc_feature (12)..(13): n is a, c, g, or t
tcagctacgtannccccccccccgcgtttccgaagatggttcaacaccaatggaatcatggagtattggttggagagtgctgactcgggcagcgcccgccgccccccccccctgcaggacctttcccggataccgccatctacatatagggaagctggtgccccctcccagaatattgattcttctggtgaattgaaacagcttaaaatagaattgatgcaaatgaagaaagatatgcatgagctcattgccaagaaggaagagaaaagtgatattaacatggtggaggagacacacaaggaatctgtaaagtggaaatttatgactgaccatcgccttactgaaatcatgacttctttgaaggatattcaggggaagtatggtgaattgatgatttggaaaactacagttgagcaacaacttatggaaataactgataaattgaatgatcttcaagcatctagggagtgcaccactaatagtcctccttcagaaaggtggcaagattggatagaaagtaccaacctagacaatattcaggaagatgcatttgcaacttggattgggaatccggagctacttaatgttccacaagaggttatacttgaagatcccaacacaaccataccaacacagccacccagtgaagaactgactaacaagaggagcgatgtgctggagttagtacctggtaaactagaagatcaacctaatgtaacccctgattcttctacaactgttaattcgaagtcagaccatgacaacaactcattgatcatgtttcaggagatgtttatggatttatacaaatggaaagagaaaatggaacagcagctgatggaggtatcgaatactgtatatggtatgcttgcaatgaagtagacatcactccgaagtatcgaggctaagataggatataaccaccgtttcgttctcaagttttctttgttactcttaaaactggtaaagtttagatattgtacagcattaacaatctgatcctgaaaatctatgccaaccactaagttcacagaagaggttgagtctcaccctgctggctgagctgcaaattgtcgatatgtctgactggccttttacagtatacttggccttttaaattgaatgacttaaggtaggtcttcagtggtaatgaaattggttgttttctcaacttattgggtaagattatgagttcctttagtataggtctttaggtaggctacccgtatttaacgtattagctgaaactatcttgttagagcttgtacttaacctatttggtaacaagttgccatatatatatatagaatttctacaatatcgttcagcaaaaaaaaaaaaaaaaaaagggctggcctacctaaagac

SEQ ID NO: 526 - DNA, 738 bp, Glycine max
gtttcagtattttcaagttgagaaaagaaaggtatgtggccatatgttagtaattcgttggaagtaacgctagcttcagaagtcgatggtttgctttcttcgcaccgtgtccgcccgcctcttctcctcctcggtttgccactgaatgcagctgatatagtttacagaagttgtgaaggaccaacagagcacttaagagagtttaactgagagctgcagggatggctcatttggatgtttgtcatcaagtcaggttcattggtcagcttgaggaatatggaagtagactttcttccagtattcctacggtagaaggatcaaaagataaagaagaaatcgttgaagttaaacctatcttcatgccaaattttaagaaaagaaaacgccttagccttaatcgtcttagagagatcaaagcagatatgtgtgcaaggcaaagtagtggcacacctaaaacaaagtgtgaaagcatagacagatggtcagctaagaggtatgagttggctcagcaaagcatgtgggaggtcttaaagggcgaaggtgcaacttttgaaaatccaattacccgacctgcactaagaatggctgcccgtaaacacattggtgatactggactgttagaccacttactgaagcacattgatggtaaagtggcacctggaggaactgagcggttccgtcgatgtttcaacaccaatggaatcatggagtattggttggagagtgctaatttggatg

SEQ ID NO: 527 - DNA, 1271 bp, Glycine max
ttttttttttttttttttttttttttttttttttttttttttttttttgcttttttttttttttttttttttttttttttttaggtaaaagtaaaacaaacgttatctaataaaaattatgccacatctcaaaagttgtatccttcctaactgaaatccttgttagtttagaaaaagctcaacttcattcaaatgtagaaaagtaaaaattcttaagctacaacagaaagctggatctttcagccaaaatttcacaactacttcctcgtgttctctcatactcaaccctagtcagttacaggattctgtattccatatccatggtagagtctagtgagtggctgaacgtgagaaattgtttatctacttcttcttctttgacttgcttgacagagactgagtataagcagttccctgtagccattcatctgttgaagcatcagtagtcttagtcccaacttcaacttttggagccctctttgttttcttagataggtactgtatttggccatgaatccatagccccaggaggacaaggagtgcaaccccaagagtaacaagaaaaacggattccatgctaagaaaagcaccagattcaacaacctcaacagtgccattaaaaaaggtgctttgatatggatgttcatctatctcgtatataatagtgcccacaaggtcaaaagttcctgcctgcaagaacttactgactgcaaataaatatgggaaagtagcttgtgctgaggctggtacagaaccattgttaaaaccctgtgcagtaagattttgaaccagcatacggtgatcaaaaggaaggtgaacactagccttgatcgcaataacattcaagcttgaatccccatcatttttaacaccaacaagcagctctgtctcttctccagctgttatcaatctcgcactattttttggaaaaacacttattgtttcaattcctggagcagaagggaaggtcccatcaccaaagtcttggacatcatcaccaacaatgccgatatcacttgattcttcagcagcctccactacatcttcggagtctgactgacacctagcaacttggaggagaggggaggcaaggaggagaagagcgagggcaaaagcccaaaatttgtctacggaggccatggtggtgtagggttggtgtcacgatttccaaatttcaattcaacgtgtgaattttcaaccctgaaatacagagaattgtaatggggtgtgttttaggggaaggagttcctacgtagctgctcgcagccgta

SEQ ID NO: 528 - DNA, 1316 bp, Glycine max
ccattaatgagctccgtcattataaatatatagaacgagattttggcttggtcttccgccttttttttttttttcgccctcaaacacagaataaacgttatctagtaaaaattatgccacatctcaaaagttgtatccttcctaactcaaatccctgttagttttgaaaaagttcaactacattcgaatggagaaaagcaaaaattcttaagctacaacaaaaagctagatccttcagccaaaatttcacaactacttcctcgtgctctctcaaactcaaacctagtctgttacaggattctgtattccatatccatgatagagtcttgtgtgtggctgaacgtgagaaattgcttatctacttcttcttctttgacttgcttgacatagactgagtatatgcagttccctgcagccattcatctgttgaagcatcagtagtcctagtcccaacttcaacttttggcgccctctttgttttcttagataggtgttgtatttgaccatgaatccatagccccaggaggacaaggagtgcaaccccaagagtaacaagaaaaacagattccatgcttagaaaagcaccagattcaacaacttcaacagtgccattaaaaaaggtgctttggaatggatgttcatctatctcgtatatgatagtgcccacaaggtcaaaagttccagactgcaagaacttactgactgcaaataaataagggaaagtagcttgtgctgaggctggtacagaaccattgttaaaaccctgtgcagtaagattttgaaccagcatacggtgatcaaaaggaaggtgaacactagccttgatcgcaataacattcaagcttgaatccccatcatttttaacaccaacaagcagctctgactcttctccagctgttatcaatcttgcactatttttcggaaatacacttattgtttcaattcctggagcagaagggaaagtcccatcaccaaagtcttggacatcatcaccaacaatgccaatatcacctgattcttcagcagcctccactacatcatcagagtctgactggcacctagcaacttggaggagaggggaagcgaggaggagaagagcgagggcgaaaacccaaaatttgtcgatgcaggccatgatggtgtggggtaggtgtcaaatttccaaacttcaattcaatgtgtgaatcttcaaccctgaaatacagagatttgtaatgggggtgttagggaaggtgcgcattccacgaacgacttcccagcatgaggtcctttacatataggccgtactctctttgcttagatgtcgggattatcgc

SEQ ID NO: 529 - DNA, 1451 bp, Glycine max
ggctcgaggaaacatcatttgtgagagctcatgcttctttttggacaagatattcaatcttcttctatataggatgcttctttagacaattttataggtctgtgggcaaggctgactacttggctttgcgcaatggatttatcacggtccacctggctcctggaagtaaatttaacttccaaaagtatatcaaaagatccttggaggatgacttcaaggtagttgttggagtcagtcctgtcctctgggcatcatttgttgtttttctgctactaaatgttaatggatggcatgctatgttttgggcatccttaattcctgttgtgataattttggctgttggaacaaaacttcaagccacactggcaaacatggctattgaaatcacagaacgacacgcagttgtccaagggattcctcttgttcaaggctcagacagatatttttggtttggtcggcctcagttagttcttcaccttatccattttgctttgttccagaatgcgttccaaataacatatttcttggggatatggtattcttttggggctgagaaattgtttccatgctgactacaagcttgcagtagtgaaagtagctttagggcttggggtgctatgtctctgcagctacatcacccttccattatatgctcttgttacttcgagtcagctacgtaggccccccccaatatttgacgaacaaacatcgaaggcgttgaagaaatggcacatggctgtgaaaaagaagcaaggagtgaaacttggaaattccaaggtgcgagccatggatggaagcagcactgattcaacaatacactcttctggccccacactacaccgttacaaaactaccggtcactcaactcacttcgtatcaaactacgatgaccaagatgattaccattctgataccgagttgtcttccatttcaccaacaccaaacttgatagtaagagtggaccatgatgaggaagaagcaaaagaaaatgaacaccacccaacagccaacaatcaagaggcccctttacatttgtcaagcctggaaagaagcatgaaatagcatcagaagttactccattcaaccattctttgttcttttacagctttctagatattgttatacttgatcatgatatagtcagttttgtacattcttgttcttaaaaacacttgccgggcattggaaacttttaagcttgctcaaaatcatgcttatagccttattatattgctttgattcgtgtgcttgagcaaaaggatcgttaggaacaattagaggacagaattgttaggtatattatgtgttatatgttgaagggtatatgtaaatcccaattataatataagctttttggccaagtagagcatatagaagaatatacattcagtcaaaaaaaaaaaaaaaaaactgcaatattcttacattgtatgattcccgggtcttgaatt

SEQ ID NO: 530 - DNA, 1435 bp, Glycine max
tcagctacgggcccccccccccccaatgaataacaagttatggaaagatatctactccatcacctcgaacaggaaaagaggggaaacaagataatggagaggtgacagacaaggatgattatctctatttttgtttcctttattggctggtttgtctgagcttagctttgacccaaggtctgagataaggcaaagcgccttgaaagtcctgtttgaaaccttatgcaaccatggccacctcttttcactacctttatgggaaagagtatttgaatcagtcctatttccaatatttgattatgttcttcatgctattgatccttcagggagtagtacctcagaggtcaatgaagtagagactgatggtcagcttgatcaagatgcatggctttacgagacatgcacattagccctccaattggttgtagatctttttgtcaacttctataacaccatcaatccacttttaagaaaggtgttgatgctcctggtaagctttataaagcgccctcatcaaagcctggctggcattggtattgctgcatttgttcgtttgatgagtaatgctggggagctgttttctgataagaagtggttttgtcactaaaagaagcagcaaatgcaacactacctaacttttcattccttggcagtggaaactttgtgactgtcaatcatgagcatgcttcaatggctgaagatgacagggatcctgctgagtctggctcacatgataatttagaaagcccgaggactcaaaatctttatgcatatttatctgatgcaaagtgccgagcttctgttcagcttttattgatccaggcggtgttggagatctataacatgtaccgatctcgactttcagcaaaaaccatactagtcttgtttgaggctttgcatgatgtggcattacatgctcacaagattaacagcaatattattttacgttcaaagttacaagagtttggctctatgactcaaatgcaagaccctccactgttacgcctggagaatgcatgaatcctaccaactatgcctcacatttttacagaacctcactgtggacagacctcctagttatgaggaggttgaggtcgagacacatctcattcgattttgtatattgaagttgcaggttctggaaaagtatctgaatcttttcatggtagacagctgcattggttctcaccactcttcaagctatttgtaatttgggagatatatcttttgagaagaacctggctcattttttccatgtgattttgtgtttagatataccttccccgttcttctatattttagaagcctagagttaccaatccgaattgatctgtattaccaggaggtttaatgttgtatcttgtatgcttgattattttatcccaatttttttaaaagaattttgagtttttccaccaaaaaaaaaaaaaaaaaa

SEQ ID NO: 531 - DNA, 1367 bp, Glycine max
gtcgtcttgtttcgggccggaattcccggcctcgacccccgcgtccccgtcaatccacttttaagaaaggtgttgatgctcctggtaagctttataaagcgccctcatcaaagcctggctggcattggtattgctgcatttgttcgtttgatgagtaatgctggggagctgttttctgatgagaagccgctagaagtggttttgtcactaaaagaagcagcaaatgcaacactccctaacttttcattccttgacagtggaaactttgtgactgtaaatcatgagtatgcttcaatggctgaagatgacagggatcctgctgagtctggctcacatgataatttagaaagcccgaggactcaaaatctttatgcatatttttctgatgcaaagtgccgagctgctgttcaacttttattgatccaggcggtgttggagatctataacatgtaccgaactcaactttcagcaaaaactatacttgtcttgtttgaggctttgcgtgatgtggcattacatgctcacaagattaacagcaatattattttacgttcaaagttacaagagtttggctctatgactcaaatgcaagaccctccactgttacgcctggagaatgaatcctaccaaatatgtctcacatttttacagaacctcgttgtggacagacctactagttatgaggaggttgaggttgagacacgtctcattagactttgtcaggaggtgttggagttctatattgaagttgcaggttctggaacagtatctgaatcttctcatggtaaacagctgcattggttaattcctcttggctcggggaagcgaagagaattggctgcacgtgcaccgcttgttgtgaccactcttcaagctatttgtaatttgggagagatatctttcgagaagaacctggctcattttttccctctcctctcaagcttgataagttgcgaacatggatcagctgaggttcaggtagctctcagtgatatgcttagtttatcagttggtcctcttttgctacggtcatgctgattgattacgttaagatcgacaatgaattttgagatataggatatttttcctctaaatctcttttgttcatattttcctcctttcctttgcctcgggttacttgcaaaagtatagttcgatagtgtttgaatagttggcagtgattttgtgtttagaataccttcccggtccttctatattttagaagcctaagattaccaatccgaattgatctgtattaccagaaggtttaatgttgtatcttgtatgcttaattattttatcccaattttttaaaagaattttgagtttttcgaccattgataagggcggggggcgggggggggaaa

SEQ ID NO: 532 - DNA, 1328 bp, Glycine max
  misc_feature (1246)..(1248): n is a, c, g, or t
  misc_feature (1292)..(1295): n is a, c, g, or t
  misc_feature (1306)..(1306): n is a, c, g, or t
  misc_feature (1308)..(1309): n is a, c, g, or t
  misc_feature (1318)..(1319): n is a, c, g, or t
cattggctctccaattggttgtagatctttttgttaacttttatgacactgtcaatccacttttaagaaaggtgctgatgctcctggttagctttataaagcgccctcatcaaagccttgctggcattggtattgctgcttttgttcgtttgatgagtaatgctggggggctgttttctgatgaaaagtggttagaagtggttttcctcattaaaagaagcagcaaatgcaacacttcctaactttttgtttgttgaaagtgaggactttactaaaaatcaggaacatgcttcaacagctgaagatgatagagatcgtgccgagtctggctccccagataatttagaaagctttaggattcgtcgtctttatactcatttaactgatgcagtaatagtctataatgtccattttgttttgattcttgcgatgatggagatctataacatgtatcgccctcacctttcagcaaaagccatgctagtcctgtttgatgctctgcacgatgttgcgatacatgcacaccagattaacggcaatactatgttacgttcaaagcttcaagagtttggttctgtgacccaaatgcaagaccctccactgttacgcctcgagaatgaatcgtaccagacctgccttacatttttacaaaaccttgtcattgacaagcctcctagttacaaggtggatgaggttgaatcacatctcatccggctttgtcaggaggttttggagttttatattgaagttgcaggttttgaacaaaaatctgaatcttctcatggtagacagcaacactggttgattcccttaggcactgggaagaggagagaattggctgcacgttcacctctcattgtggctactctgcaggctatttgtagtttgggagatacttcttttgagaagaacttgtctcatttcttccctctcatttctagcttggtacgttgtgaacatgggtcaaaggatgtccaggttgctctcagtgacatgcttagtttatcagttggtcctattttgctacagtcatgtggatgatttgggtaaagattaaccctgcattttgagatgtaggatatttttttgtttaaatctttttgttcataattttctcctctctctcctctgccttgaattacttgtcaataatattctatgacagtgtatgaaaagttgttagtgaatttgtcttagctacaccttcgtaactgctggacgtttagaacgccagcttgtcccggtnnnaagtgatatgtattaccgtaagcgccgaatgttgcactgtcgtnnnntactcatgtcncnntttccaggnngaggtgtgc

SEQ ID NO: 533 - DNA, 994 bp, Glycine max
  misc_feature (72)..(74): n is a, c, g, or t
  misc_feature (76)..(76): n is a, c, g, or t
  misc_feature (79)..(79): n is a, c, g, or t
tcggaattcggctcgagttagctggcagtagtgactatgtatccagagaaggattctggtgttttgtgacannnanacnatttcttatttgatggcagagaaccagacagataggactccccctggaggttcaacctctaatgcttcaaaatctggcaaatctgggtctgtattgaattctagttctgaagacaagctaaatcagacatctgtactagatagtattttgcagggagaattgccctgtgaactggagaaatctaatcctacatacaatatattggcattattgcgggtgcttgagggtttgaaccaacttgcatctcgtttgagggcccaagtggttactgatagctttgctgagggaaaaattttggatttagttgagctaagtgttaccagcggtgctagggttcctacagaggaatttataagcagcaaacttactccaaaattagctaggcaaatacaagatgcccttgccttatgcagtgggagtcttccctcgtggtgttaccagttatctaaagcgtgcccttttttgtttccttttgagacccggcgacagtatttttattcaactgcctttgggttatctcgtgcattgtatcgccttcagcagcagcagggtgctgatggtcatggatcaacaaatgaaagagaggtcagggttgggagattgcagcgtcaaaaggttcgtgtctctcgaaatcgcattttggattctgctgctaaagtgatggagttgtattctagtcaaaaggctgtacttgaagtagaatattttggtgaagttggcaccggtctgggtcccactctggagttctacacacttctcagtcatgacttacaaaaaattatacttgaaatgtggagatcaggttcttcagagaaatatcaaatggaaattgatggagatgaaaagaaaatgaaacgtagtgaaggctcttttgttggagatggagaacttgttcaagctcctcttgggctgttt

SEQ ID NO: 534 - DNA, 1078 bp, Glycine max
ccaccggctcgagctcatcttcttctgaattctattgttgcagggtaacacatggctctgttattcaaggatccgtcgaagatttcggcgtatcgagatagaaggttccccgggacgcaagaggagtttgagcacgcgcttctgacctcaaccaccgtttacgtggggaacatgtcgttttacacgacggaggagcaagtttacgagctcttctcgcgtgctggggaaatcaaaaagatcatcatgggcttggacaagaacacaaaaacgccttgcggcttctgtttcgttttatattattctcgtgaagatactgaggatgtttgcaaatacataagtgggacgatactggatgatcgtcccattcgagttgattttgattggggatttcaggatggtagacaatgggggcgtgggaggagtggtggccaggtccgtgacgaatatcgcactgattatgatcctggtagaggtggctatgggaagctggttcagaaagaattagaagtacaaaggcagcttgtagattatggcactggttctttgggttcttttccaccagttattccaacttcctatggtagacatggtggaggtcatggtcatggtggttcccatcgacatggtagagattactataggaagagacaccgagatgatgaccgccacatacacgagtcctcaaaaagaaattctgatcatgaatctcggaggaacactgaccacgaatccagaccggaaaaaaatccacggtttcgtgagagtggtgattctgatgatgacgaggaagatgatagaaaaagacgggcttaaccagaatttcatgcttgatcaagttgttttaaatttaaacatttctactgacataattaaaggtggatgattgtttgtataatgtatattattgcaaattgcaaagatctcactgttagtttaacctttcttgaaattctaggctggatctgctgcctgcatatatatggcagtgctatttactgttttgtatcaatatttttctcttgtgcttttgtctaccaacatattaataagattttgttaactttgtctattgatagag

SEQ ID NO: 535 - DNA, 644 bp, Glycine max
ccgaccaacctgggcgagaacgacccaaagagaaataaaccacttatatatatatatatataaaaataaaaaaattagcatcatacaccatatctagttaccttcaacataaaatggaagaatccaagggttttgttagtggtgagactcaaaaacctcacccaaaaatgccttctagttccttcccaattcctttgccagggaggaatcgccatggccagcagtgtccatcaagatatgccccacaatggaggcaaagggcaatactagggcacaccgtgggaaaccctagcggggcaagtgagaatacaactttgaaggtgtaagtcactcgaggagtaataatacttagtatgaagatcttaaacgtttgaataaccgttgtcgttgttatgttgtcttttctatatcgtatattaccgagcataggtgtgcatgctttgagaataagagccttgctaggctagaatatgaatatcttcagcaattttattatagatgacttgtgtattgtaagtgttacgactttgtacttttgtgataccacatgtttatgttctccgttcatggatggatcgtatccaaaagatgataagcttttaattaagaatactgatttttagaccaaaaaaagaaaaaaaaaa

SEQ ID NO: 536 - DNA, 990 bp, Glycine max
ccaccggcgcccttcttgatcttgccgccagcgtccagttcggaaccctagaaattagcagtggctgaataaggtgaggagatcggctacgtgggcccccccccccgaattccgcaccagaaaaacaccaaattacatagaatttttaggcgtaaccaaagtacgtaccaaaccatggcattgacaagtcaattgagaaaccttcttgcagctctagaggctgaggaagcagcccaaaaatccaaaggtaaagtgaacacatacaccaaccatggcgatgggtttcagaacatcactggcactaagaccaacagtggtgcatattctggtgatggtaacactcatcacgccaccaacaactacggtggtggtcctgctataaataatagtggcaatttccagggacatggcaatggaggctttattggtggtaatttcgatgcctcaacgaggaactactgattaatttatgtatgatcaacttcatgtattaaatatcgtgttctgcgctacgtatactaattaataataaaattagagctgcatgctgcagctctaacagtgtgtgatatgaataattacttgagaggggggatacgacacaccttcttgagttcataaatttcaattccgatctttttggttgtggtgtattattaataacaatttgttattattaattattaagtgacttctataataacaatttgttaactttgctaaaaaaaaaaaaaaaaaaaaaaaaaaaaaaaatttaaaaaaaaaaaaaaataaacgttacccccattttcccgcttgtggggtttccaccatgtccccctttttcttccattttccacccgttttttcacaccatttttcccccgccttttccccctttttccccctttttcttttcctttttttcctttccccctttttttcctttccgttttttcttcaccttttctttttttccctttttttcctcccctttttcctccccttttt

SEQ ID NO: 537 - DNA, 1145 bp, Glycine max
ttcggctgcgagaagacgacagaaggcggaaccaaacaacaaatattcatggctttctttattctctccttcctcttccttcttcttgtttcatctgccactgcttgtgatcgctgcttgtatcaatccaaggcttcctatttctccaaagcttctgctctttcatctggggcatgtgggtatggctctttggcactagacataagtggtggacaccttgcagctggtgtggattctctcttcaaaaatggagcaggttgtggtgcctgctttcagataagatgcaagaacccaactctatgtagcaaagaaggtaccaaagtggtattgactgatcttaatcacaacaatcaaactgattttgtgctaagcagcagagcctttgcgggcatggctcaaaagggtatgggccaacaaatactgaagcttggcattgctgaaattgaatacaagagagtaccttgtgattacaaaaatcagaatttggccgttcgagttgaagaatcaagcaagaagcctgattacttggcaattaaatttttgtatcaagggggacaaacagagatagtagccgttgatgtggctcaggttgggtcttcaaactggagcttcatgagcagaaaccacggggcagtatgggacacaagcagggtaccccaaggcgcattgcaatttaggttagtggtaacggcagggtatgatggcaagtggatttgggcaaagaaggtcctacctgctgattggaaaaatggacttatatatgattctggccttcagattactgacattgcacaagaggcttgttccccctgcgatgatgggacatgattctttgctgaaaaataactcacatatacgcatagatagtaggcatcaattttattaatactatactataggctcacaatgcaacttataataatactaaggaatcatggactagcttaataaatttgaaaagcattcttatttgtaaaccactctccacttcgttactttatattctttctcattgtaagttgtaaccaaccaaaataatatattcttcctttttggagtaaaaaaaaaaaaaaaaaaaacttggaccagtactctctcaaaaaaaaaaaaaaaaaaaaaaaaaaaaaaaaaaaaaaaaaaaaaaa

SEQ ID NO: 538 - DNA, 1178 bp, Glycine max
  misc_feature (1165)..(1165): n is a, c, g, or t
cacttagatgccaacaacgacagcaagatcttcgccgatgagctcaacagcgcagtccaaacgacgcttggatctgtcgtcttgccggaggagcttcgctgtgtcatggaccacctcgaaatcgaccgcgacggcctcatcaacctcttgccaccgtgagtgtttgtgaagttctagatctcatgggttgcttggcgttgttgtttgggtggaggtgcgcacaacaatgcggtgttctcatccaaggcctttttctgttactggagaagcaacaatgtttgaaagggataacttttaatataccataatgaaataaaattaaaatttaatggccaaaaaatgatattaactaaaagaaagaaagagccataaaatactttgattaaataaaaccgtgaagagctagtattggctcaatatcgtgcagaaccaacatccccaaacaatcgcttattgctaacgcgacctcttcctgttcccgctgcatcagcctcagagcacccgctagggtttcttctgcacacccaaccaaatggcggatcctgagttggaagcaatcagacagagaaggttgcaggagcttatggctagccatggtggcgtgggaaatcaacagaaccctgaacaggagaaagctcaggatgatgcaaagagggaggctgaggaacggagacagatgatgcttagtcagatattgtctgctgaagcgcgagaaaggcttgctcgaattgctttggtgaaacctgagaaagcaaggggcgttgaagattttatattgagagctgctcagatgggtcagataactgaaaaggtttctgaggaaagactcatatcactgttggagcagataaacaaccaaacaacaaggcagacaaaagttacaatacagaggcgtcgaagtgttcttgaggatgatgattaactttcactgtctctttaaacggtgtgccttgagtattgatttcatgctttattatatattttactgtcaaatcaaagtattgcataagtggattgtgaaatatctgtttcagcttgaaattttggctgtcttgccaggcctcctaatgaattaaactacccaatacttggaaagcttattattttgacacattcatttgtaaaacaatttctagcatgtggatggcatttcaagaatgcatgntgtaattttccac

SEQ ID NO: 539 - DNA, 815 bp, Glycine max
ctttattgtcttcacgcgcagctcattcatctttggtgagtggcgacataaataagcatttgcctacgttgttcgtgttggatgcttcccacctctcattgattggattaagcgccaaagtttccgaatttgcataatggtattgctagttgggcttacattgcttttgggtctcttcctcgctgttcttctattcaacccacgacaccgcaaatctgggcataaggcaaaagctcaagccagtttaaacgttgataaggcatcaaaatcctacagtaaaacagaagtttcgttgcataacaagagaacagactgttggataatcatcaagaacaaggtatatgatgttacctcatatgtggaagaacatccaggtggtgattccattcttgtacatgcaggagatgattcaactgaagggttttttggaccacagcatgcaactcgagtctttgacatgattgaagacttctacattggagatttggagcaatagcttagtcagttactccaggaatgtattgttcaagagatgtatgatttgagaatttcaacattctgctgctggttatctccccaattttcacttcttgtgcatggttttgatatatatttgtgcatgaaatcatttgtgctctcttgtggatgtgtgcagaaatagtaaaacaaatgaggttccagtcttcatttcatcttccaaccaccattattatcctagctttttgtctctagcaatccccttttggttgatttgctttatccttaattcattaatataatctgccctaattttaaaaaaaaaaaaaaaaaaaaaa

SEQ ID NO: 540 - DNA, 2086 bp, Glycine max
gtctagaatattcctatctgaaattaaaaaaaaaaaaagaaattgtcttgctcatagggaggacgtctataacctgtcgacattgaaaataacaaataatataaattgatagacgaaaagagtagcgggcagtgacaaagcaaaagcgtggagtgggtcttgcgttgtgttggaatcccaaattcatttctgtttctcattctcaattcttcttctattctcattctgatttgccacacacgcagaaaggttgaaaatagtgggacttgattcactggaggtggagaaagatggctaacaacgcagctgcttgtgctgagagagcaactagtgatatgctcattggtccagactgggcaatcaacatagacttgtgtgatatcattaatatggaccctgggcaagccaaggatgctttgaagatactcaagaagcgtttgggcagtaaaaatccaaaaatacagcttctggctctttttgtactggagacccttagtaaaaattgtggtgaaagtgtatttcagcagatcgttgagcgggatatcttacatgaaatggttaagatagtgaagaagaagccggatttaaatgtgagggaaaagatactgattttaattgatacatggcaagaagcttttggggggccaactggagtttatcctcaatactatgcagcatataatgaattgaagtctgctggagttgaatttccaccacgagatgagaatagtgtaccattcttcactcccgctcaaactcagccaattattcattctgctgcagaatatgatgatgctactattcaggcttctcttcagtcagatgcatctgaccttagtttgctagagattcaaaatgctcaaggactagctgatgtattgatggaaatgcttagcgccttgagtcctaaagaccgtgagggtgtgaaggaggaagtgattgttgatcttgttgaccagtgccgttcataccaaaagcgtgtcatgcttcttgtgaacaatactacggatgagcaacttttaggtcagggattggcactgaatgacagccttcagcgagtactctgtcgacatgatgacattgtgaaaggaactgctgattctggtgccagagaagcagaaacttcagttctaccacttgtaaatgtaaaccacgaagatgatgaatcagaggatgattttgctcaactagcccataggtcatcacgtgatactcaggcacagaatcaaaaaccagcctatgacaaggcagaaccagggaggataaacccactcattccaccaccaccagcatcaaagaagccggtctactctggcaccggcatggttgactatctcagtggtgatacatacaagacagaaggatctcctgaaaactcagaacccacttcatttacagctccccttcattctagccctaatccaacctcgtcaactattccatctctgtcttcatctcatcctcatgctgtgagtactacctcatcaccaatttttagcagcgagcctgtgtatgatgaacaaccatcttctgaggacaaatcttcggagtgtctgcctgcagctccctgggatgctcaatctcctggcatcattccgcccccaccttcaaagtataatcaaagacaacagttttttgagcaacaaggtgtatctcattcaagtagtggatccagttcctcttatgacagcttggtgggacaaactcaaaatctctccctgaattcatccaccccaaccaaacaacagaagccagaagatgcccttttcaaggatcttgttgattttgccaaatccaaaacctcatcatcttccaaacccaataggtcatattgatatgttgtgtttgtttgattgcttatgctggtacagtttataaatgttgtttatcacgttttacttcagaccgctgagacgaccgttttgtggttggttaggacccttcggatatgaactgaccatgcgtgtacttacatatatttcttatattcatgtatattgttcatattgaatttgttgccttatgttttcaataatatcagattctttaaggatcaaaaaaaaaaaaaaaaaaaaaaaaaaaaaaa

SEQ ID NO: 541 - DNA, 544 bp, Glycine max
gcttaccatatattcctctttctctttcactctctcactcaaggttagactcttttgaagaaaaaaatggctctgtgtagaaggccttatgcttactcaaaggtggacaaggaggaccctgaagacataatccatagaagggcacagtttttgatccacaaagtgttggagcaagcagattcacgtagaaagccatcatgccttagaatcagaatctctaagatgaaggtgaagattggaaaaaggttaaggaggctcaggaggagaattatgtccggtgtgtctgctgctagacttggttttcatggacatgttatgagtcaaatcaaaacgtggaagagactctttagccgaggaagacaatctcaaaccctcataacccttcctcctcttatcaaatgatgatgtgtatctatgtgtaaacattttactaggaaactcatgttttatgcaatacaatgtcatgttaatttctgtcctttttcttttgtgtgttttctccccagtttcccttagtccatacaaagagtgaaatcataaaaaa

SEQ ID NO: 542 - DNA, 934 bp, Glycine max
tcgagtcagctacgtaggccccccccccaaaagtaagttattcatccacttagagagacagtgtggttacccatagtctcatatagtgtcatacagcaaaaaatttcagcaacacaaaacaatgggttctcttatggcaggatggtattctacccacatggatcctcaatcagccacacttaaaaggaaccgctcactcactaaggatgaaattgatgcttactggaaatcaaagaagaagatagaggaagaacaccttagagctatttccaatgtgtcagagactattcaggctagtaaaaacacagagcctgaaaagaagttgcagaagtcaatgaccatgccagttacccgtgcacgggactacttaaatatggtggacattgacacaagtttggagcaacttattaagcgaaatggctggtggaccaagagtagctgggcgtttctgaatgagcctccagtgactgaagctgcgtccaataagtatgcatcgcagtttcacgtagcaagcatgggatcatcaaaatttaacccccgagatggaattagtgcttgatacatatgaatctaactaattactatataaaactactcaaccatatatatatatatatatatatatatatatatatatatatatatatatatatatatatatatgttttcactagtactagtgttcgtatctacatgaatactattatataatatgcgaagtgttgaaccaattaatagtgagcttcgttggtctctagtcatgtgaggaatcaattaatgtatgatggatcttggtactagttagttctgttttgctggccggtcctagttctccaacttcactgtgttgtaatgtctggtttgtttgaagagggtaatgatataatccaaagttccaaacagttaatgaatgaatttgatgtgctaattattt

SEQ ID NO: 543 - DNA, 929 bp, Glycine max
  misc_feature (897)..(898): n is a, c, g, or t
cttaatttctgggtttgacccacgcgttcttacgcctgcgagagacgacacgacaaagtagctgagttggttatttatccatttagaaagacattgtggttacccatagtctcatagtgtcatactgcaacacaaaacaatgggttcccttatggcaggatgggactctacccacatagatcctcaatcagccacacttaaaaggaaccgctcactcaccaaggatgaaattgatgcttactggaaatcaaagaagaagatagaggaagaacaccttagagctatttccaacttgtcagagactattcaggctagcaaaagcacagaacctgagaagaagttgcagaagtcaatgaccatgcctgtgacccgtgcacgggactacttaaatatgggcatagacacaagtttggagcatcttattaagaaaaatggctggtggaccaagagtagctgggcatttctgaatgagcctccagtgactgaagctgtgtccaataagtacaaatcgcagtttcacgttacaagcatgggatcatcgatcaaaatttaacccccgagatggaattagtgcttgatatatatatgaatctaactaattactatataaaactactcaaccatatatgtacatatattttttcactagtactagcgttcgtatctacatgaatactataatataatatgcgaagtattgaaccaattaatggtgagcttcgttggtctctcgtccgtgttgtaatgatggatcgggtactagctagttctgcagttccactgtgttgtaatgtctggttttgtttgaagtgcttataagcatgattaatttgctgtgttctgcagtagatgaatgaatctgatgtgcttattaaaaaaaaaaaaaaaaaaaaaaannaaagcggccgctctagaggatcccagcttac

SEQ ID NO: 544 - DNA, 954 bp, Glycine max
  misc_feature (38)..(38): n is a, c, g, or t
attctcatccccactatcaaccactatataaaatatancacatacctttgaagatgacaaagtaggtcaatcctccacttagagagacattgtggttacccatagtctcatatagtgtcatacagcaaaaaaattcagcaacacaaaacaatgggttctcttatggcaggatggtattctacccacatggatcctcaatcagccacacttaaaaggaaccgctcactcactaaggatgaaattgatgcttactggaaatcaaagaagaagatagaggaagaacaccttagagctatttccaatgtgtcagagactattcaggctagcaaaaacacagagcctgaaaagaagttgcagaagtcaatgaccatgccagttacccgtgcacgggactacttaaatatggtggacattgacacaagtttggagcaacttattaagcgaaatggctggtggaccaagagtagctgggcgtttctgaatgagcctccagtgactgaagctgcgtccaataagtatgcatcgcagtttcacgtagcaagcatgagatcatcaaaatttaacccccgagatggaattagtgcttgatacatatgaatctaactaattactatataaaactactcaaccatatatatatatatatatgtgtgtgtgtgtgtgttttcactagtactagtgttcgtatctacacgaatactattatataatatgcgaagtgttgttgaaccaattaatagtgagcttcgttggtctctagtcatgtgaggaatcaattaatgtatgatggatcttggtactagttagttctctttttgctggccggtcctagttctccaacttcactgtgttgtgatgtctggtttgtttgaagagggtaatgtgatataatccaaagttccaaacagttaatgaatgaatttgatgtgctaattattttgcaaaccccccatg

SEQ ID NO: 545 - DNA, 857 bp, Glycine max
  misc_feature (18)..(18): n is a, c, g, or t
tcgagtcagctacgtagnacccccccacaaaaaatcaaaacgaaaaattatttattatgtaaattataagaaaatgtgaaaaaaataataaaaaatgtaattttatgcatttcaataaattatataattgttctcttggtttattaatcaatatgcactcattattacttgtcaacttattataattttgcaattaattcgcttttttccagtaaagttctcttgatcattaaattaatatatatatatatatatattttggatatggttggttgcatgcaggtggaccaagagtagctgggcgtttctgaatgagcctccagtgactgaagctgcgtccaataagtatgcatcgcagtttcacgtagcaagcatgggatcatcaaaatttaacccccgagatggaattagtgcttgatacatatgaatctaactaattactatataaaactactcaaccatatatatatatatatatatatatatatatatatatatatatatatatatatatatgttttcactagtactagtgttcgtatctacatgaatactattatataatatgcgaagtgttgaaccaattaatagtgagcttcgttggtctctagtcatgtgaggaatcaattaatgtatgatggatcttggtactagttagttctgttttgctggccggtcctagttctccaacttcactgtgttgtaatgtctggtttgtttgaagagggtaatgatataatccaaagttccaaacagttaatgaatgaatttgatgtgctaaaaaaaaaaaaaaaaaaaaaaaaaaaaaaaaaaaaaaaaaacttgtaaaaaaaaaaaaccaaaaggaccaccctttt

SEQ ID NO: 546 - DNA, 1269 bp, Glycine max
tttttttttttttttttttatatgaatgaccatgatagtatatatatgaataaaaattacatgtaacttgaattttaagtatctgaatatcactttattttggtcccttcaaatgggtaataacattcctaagagttaagacaataatttgttttaaagctataacaaaagaatgaacaaataaaagaatctctcgtagtgcctaacaactaaacatagatgaaaacattgagtcgtagttttacacgagcgtggaacaagatgaggttttaggatcaacaagagctggcaacagatacttccttccgttgaccccattcgcgttgtaactggcaccggtggtggggtccaccaagagattccctgcatagccaggatacgcgcccttaccataaaccccagtgcaagccgaaccagcttccaaaggagcttctttgggtccttgaaagtagccatttccaaaagggttagtgacagtcccagcaagaagactagccacgttgataaccatgccgtcgagacccacgtcgttgttgggtgcaaccaaaggtgctgggttctggggaccgtaaatgggttggtggaacggccacgcgcattgaccagggcactgtgtctctgagttacccacccacatgtaggcgaacttatacctcttaccgttcacacgcgcccccacggaggacccgtgtgttccgcacctactcgaacagaacccctccactgccacttcagcagaagttagaacgatgttgatggcgtttctctgtggacccttggacgcgagttttaagatttggttggtggtgagtgattttcctagagagtagttttcatcaacgatttgggaccctagggagagtgcaagtttggggaacgagtttttgtagtatttgtcggtggctttccaccacgtggcaacggatggttgggcggtgaggggtttggaagaggagagagaggtgatgaaatcagcaacaatggctttctgagaaggtttgaacttaccgtaccaaattaggtttacggagattttgcctgtgaggagagggcctctgtggtattggaactgcaattgggggtctgactcagacaacttcctggctgaactcaaatgtaaaatcatggaaagagttacaaagagactcaagaagagaactcttggagatgtaggagaggccatcatggaaagagccacaaagaactaagaagtgagatagatgttggaacttgtaaggtggtgatcggggggggggcctacgtagctga

SEQ ID NO: 547 - DNA, 1551 bp, Glycine max
tacgtcagctacgtaggcccccccccccacatttctgtagctctatggccgaaatgatacagtttgtttccttattctaaaccccaaagtagcaatagttagattagagtacatagtttttgtcacacctcacttctctccgatttgcgcttgttcttcttcttggtcaactcgatcgtaagtcgtagaactagaagggtgagggcaatatggaggtaacaaaagggaaggaaactaaaattgttttgacgaaacccttccaattggaagctgaatcagatttagaaccgtcttatagagccccccatctcctacatcgcttgttaagtttactcaagaacgtgcggccaggatcagatctcacaaacttccaactgccgcctgtgtttaatttcccaaaatctcaacttcaatgctatggtgaatcagtgtactgcacatcttccaacttgctaagccaatgcaacagtgggcagagtccactggacaggttcacatcagtagtagcatggagcatatctaccacacgccccacatcttttggtgttgctccttataattccactcttggagagacccaccatgtttccaagggcaatctcaacgtcctagttgagcaggtttcactcaatcctccagtatctgccctccatgcaacagatgagaaggaaaacattgagatgatatggtgccagcagcctgttccaaagtttcggggtacatctattgaagctcaagtgcatggtaaacggctgctgaagctccaaaatcatggagaaacatatgaaatgaattctcctcacctttcaattagaattcttccggttcctgggattgattgggttggcaatgttaatataaggtgcccagagacaggtctggtagctgaaatatcatacagatcaagccattcttttttaggatttgggggaagtcgtaaattgatcaaagggaaaatccttgactcatcattactcaaagttctcttcgaagttgatggtcattgggataagatagttagagtgaaggatacaaatagtggagaagtgagagtgatatatgatgccaaagaagccatttcaggtctcaaaactcctattatcaaggatgtggagagtgtgtggccaaccgaatcagcccttgtttggagtgagttgagccaagccattatgaacaaagattgggaaagagcaagagaagcaaagcaagacgtggaagaaagacagaggaatatgttgagagacagagccatgaaaggagaaacttggtttcctaagaattttagggtgtcttacagtaaagacacatgggaatgggactgttcaccaactcataaatgggtccctgaggcccccatcatagctcaataatttattgttatgtactttgtactgtgatgtctttaaataccagccaaaacacagttataggctgttcaaaaattgaaatgcacttatttctggttggacaccaaaagggttggaagatttattgttgtactcatgaaattcatttaaacctaagttatttagtaaaaaaaaaaaaaaaaaa

SEQ ID NO: 548 - DNA, 1793 bp, Glycine max
  misc_feature (1784)..(1790): n is a, c, g, or t
tcgagtccgctccggagtgccccccccgaatcagaatcacctggcttggcctagcgcttattctctcgcattccgtggagatctagtgcttctgctgcaagacctcgctgaaaattagggtttcgattcggaggtagacgaagatgttcggaagggctccgaagaaaagcgacagcaccaggtactacgaaatcctcggcgtttccaagaacgcttcgccggatgacttaaagaaggcttacaagaaagccgccattaagaaccatcctgacaaaggcggggatcccgagaagtttaaagagcttgctcaagcctatgaggttctgagtgaccctgagaagcgcgagatttatgatacatatggagaagatgctcttaaggaaggaatgggtggtggtggcggtggccatgatccatttgatatcttcagttcattctttggtggaagtccgtttgggtcaggtggtagcagtagaggacggaggcagaggcggggagaagatgtggttcatcccctgaaggtctctctggaggatctttacctcggaacttcaaagaaactctctctttcacgaaacgtgttgtgctcaaaatgcaatgggaagggctcaaagtctggggcttcaatgacctgtgctggttgccagggtactggcatgaaggtgtctattaggcaccttggtccttctatgattcagcaaatgcagcatccttgcaatgagtgtaagggtactggagagacaatcaatgacagagacaggtgccaacagtgcaagggagagaaggttgttcaggagaagaaagtacttgaagttgttgtggagaagggaatgcagaatggacagaagattacattccctggtgaagctgatgaagcgcctgatacagtcacaggggatattgtctttgtcctacaacagaaggaacacccaaagttcaaacgaaaggcagatgacctttttgtagaacacacattgtctcttactgaggctctatgtggcttccagtttgtgctgactcacctggatagcaggcagcttctgatcaaatcaaaccctggggaggttgttaagcctgagtcattcaaggcaataaatgatgagggaatgccaaactaccagaggcacttcctgaagggaaagctttacattcatttctcagtggaatttcctgataccctgagtcttgatcaggtgaaggctttggaggctgttctgccatcaaagccaacatcacagttgtcagacatggagctggatgagtgtgaggagaccacactccatgatgtgaacatggaggaagagacaaggaggaggcaacaagctcagcaggaggcatatgatgaggatgaggatatgcatggtggtgctcagagagtgcagtgcgctcagcagtaatgagccacaggagcgctagagtagacatgtgatgatctcgatcatcttattttttagccgtttgtgcgggtctaaacatatttagtgtttgatatctcagacgattttagcaaccaaacactgtagcattattgtccaagaaattatttcacaagacatcctaatacaattttttttccttctgatggcattggtgtttctttcattttttgttttgcaggaaaaaaataattttatctgtttttaaatatagtttaatatgcggtttacttatcatggaattagatgatgaataatattcttatttatttatactttattaaggaatagggaaaatagtgagtttaatttaaatggatcgattcatatatgagaagtctaattttnnnnnnnaaa

SEQ ID NO: 549 - DNA, 1676 bp, Glycine max
tcgagtcagctacgtaggcccccccccccgaattagtgaattagaatccaccttggcctagccagctagcgcttcttctctcgcattccgtggagatctagtgctgccaaacctcgctgaaaattagggtttcgtttcggaggtagacgaagatgttcggaagggcaccgaagaaaagcgacagcaccaggtactacgaaatcctcggcgtttcgaagaacgcttcgccggatgatttaaagaaggcttacaagaaagccgccattaagaaccaccctgacaaaggcggtgatcctgagaagttcaaagagcttgctcaagcctatgaggttctgagtgaccctgagaagcgtgaaatttatgacacatatggagaagatgctcttaaggaaggaatgggtggtggtggcggtggccatgatccatttgatatcttcagttctttctttggtggaagtccgtttgggtcaggtggtagcagtagaggacggaggcagagacggggagaagatgtggttcatcccctgaaggtctctctggaggatctttacctcggaacatctaagaaactctctctttcacgaaacgtgctgtgttcaaaatgcaatgggaagggctcaaagtctggggcttcaatgacctgtgctggttgccagggtactggcatgaaggtgtctattaggcaccttggtccttctatgattcagcagatgcagcatccttgcaatgagtgtaagggtactggagagacaatcaatgacagagacaggtgccaacagtgcaaaggagagaaagttgttcaggagaagaaagtacttgaagttgttgtggagaagggaatgcagaatggacagaagattacattccctggtgaagctgatgaagcacctgatacagtcactggggatattgtctttgtcctacaacagaaggaacacccaaagttcaaacgaaaggccgatgacctttttgtagaacacacattgtctcttactgaggcactgtgtggcttccagtttgtgctggctcacttggatggccggcagcttcttatcaaatctaaccctggggaggttgttaagcctgattcatacaaggcaataaatgatgagggaatgccaaactaccagaggcacttcctgaagggaaagctttacattcatttctcagtggaatttcctgataccctgagtcttgatcaggtgaaggctttggagactactctgccactaaagcctacatcgcagttgacagacatggagctggatgagtgtgaggagaccacactccatgatgtgaacatggaggaagagataaggaggaggcaacaagctcagcaggaggcatatgaggaggatgaggatatgcatggtggtgctcagagagtgcagtgcgctcagcagtaatcagagcctgtgatgtcatttgatgatctcgattatgctattttttagccgcttgtgcgggactaaacataactagtgtttgatcaaaacgattttgacaagcaaacactgtagaatttattgtccaagaaattatttcgcaaaagacatcttaagtaccattttttttcttcttattaaaaaaaaaaaaaaaaaaaaaaaaaaaaaaaaaaaaaaaaaaaaaaaaaaaaaaaaaaaaaaaaaaaaaaaaaaaaaaaaaaaaaaaaaaaa

SEQ ID NO: 550 - DNA, 2323 bp, Glycine max
ttcccctcccgtcccccgcgtcctcccgcgcggctccccggtatctgccgcagccaacatccaaagtccaacaaacatttggcggagtttacaacaaaactcttcaaaacccacatccaaatcgtcgtaaagttcaaatctttgatacctcatttcgatttagacctatattgttcccagcaacaggcttccattaacttctctctgcggcgatggtcttgaagtcaatggttgcttccgcgagcgatctaagtctcgtgtctgttgcagggaactctccccttgatttcaagaatcgggttttcggtggccgactcattagcctcggatttcgtttcaacaaaggtagtaaatgcaaggggaatgaaaggtttaactttgaggttcgtgcagctgtggaagtgggtgtggagagatcgaagagtaaggctttggagggtggttttgggttggatgtggtttcagaggcagagttaacagtgaagggttttgcggggttgaggaagaccaaactcgtgtgcactgttggtcctgcttgcagctctttggaggatcttgagaacttggctcttggaggcatgagtgttgccaggctcaacatgtgccatgggaccagggagtggcaccgtgatgtgattaggaagatcaagaagttgaatgaggagaaagggttctgtgtttctgtaatgattgacactgagggtagtcagattcatgttgttgatcatggagctccttcctccgttaaagttgaggaaggttcaaattgggtgtttactgctgaacattatgagggttctcgtccattcactgttcaaacgaactatagaggtttttctgaaggtaccgaagtgggtgatgaacttgtaattgatggtggaatggcatgctttgaagtcacagaaaagactggtaatgatttgcattgcaaatgcatagatgctggtcttttcctgcctggagccaaatttagtttttggagagatggaaagcttgtgagggggaataacaagctccccactctatcgacaaaggattgggctgacattgactttggtatagcagagggagttgatttttttgccttatcctttgtcaatcatgctgattctgttaaggatctaaagatgtacctctctacgaagtcaactaaatccattaaagttttggcaaagatagaaagcttagaatcccttcataaactggaggaaatagtgcaagcttctgatgggatcatggtggctcggggtgaccttggtgtcgaaataccacttgaacagattcctacagtccaagaggatataatttacgtatgcagacaattaaacaagccagtgattgtagcttctcagcttcttgagtcaatggtcgagtatccaacgccaacacgtgctgaggtagcagatgtttctgaagcagttcgacagtatgctgatgctttgatgttgtctggagagtcagctattggatcatatggacgaaaagctttggcagtcttggatatggctagcagtagaatggaatcatggagtcgggaggaaaatagacaaagtcttgttagccaccatcaacttggagaatcattgccagaatgcataactgagcaaatatgcaattgtgccgttgaaatggccaacaaccttggtgtggatgccatctttgtgtacacaaagtatggacacatggcatcgcttctatcgcgcaaccgcccgaatcctcccatctttgctttcaccaacgatgacagtacccgcatggctctgactttgcaatggggtgttgtgcccattctggttgatttgtccgatgatgctgaatctaacatctcaaagtctgtgcaacttatgaaatctagagggttgatcagccaaggagatgttgttctagtggtctcagatgttgctccgacacgtgcctctcctatggctttccagtctattcaggtgaagactattatctaaaacacaaggttgcaaaaatattgaagaacacgtgtctgtgtattttctaggcttgggataggatagtattgtattattgtttttttttcttcggtattgtattattggtttcttgtccttttttttatatattggtttcttgtccttattcaaaacaacaaaagtttataaattctaaattgtagaactctagcaagttttggaacctctttcaagagatgcttatgaattacactttgtgaattgcccatcgtaagtcactaatacagttgcactaatatatggcaattatatttgatttatcaactttgattgattgtgatgaaccaccagaatactacaatggcaaagcttttgagctt

SEQ ID NO: 551 - DNA, 1206 bp, Glycine max
tcgagtcagctacgtaggccccccccccccactatttccgtctctcgcttgtgctgccttcgtttgcgtttttatcacagaggaattaacatatatatagcaagcatggcagtcacactctacgaccttagctcttcctctgggttgaagaaacttgatgagtaccttctcccacgcagttacatcaccgggtaccaagctacaaaggatgatcttactgtttatgcagctttgccaactgctccatcagatgaatatggaaatgtttccaggtggtacaagcacattgatgctttgttgagaatctctggtgttactggcgagggatctggtgttattgttgagggatctctagttgcagagcctgttgcaactccccctgctgcagacacaaaggctgctgttgctgaggatgacgatgatgatgatgtggatttgttcggtgaagagacagaagaagagaagaaggcagcagaggaacgggcagctgcagtgaaggcatctacaaaaaaaaaagagtctgggaaatcatctgttctgttggatgtgaaaccatgggacgatgaaactgacatgaagaagctcgaagaagcagtgagatctgttcagatggaagggttgctttggggtgcatccaaacttgtacctgttgggtacggtatcaagaaactgcaaattatgcttactattgtggatgacctagtttctgttgatactcttattgaggaacatctcacagttgagcccatcaatgaatatgtccagagttgtgacattgtggccttcaataaaatataaactacaattgtgggacttggagatcatggcaacgggaggaattgcaagttttaaaaactatgatattgggaaactaccctgaattgagaatttttgtctttagaaacccgcttgttatttgtttttatatatcagtctttgtgatgtcatcggctatttggataataatcatctttcctttgttgtgtcatccgtattatttggatagtaatcattttacctttgatgtgtggcgtgtgttcttccccccggcctttagtcgcagatgttgatttaagaaatcttgagaactcacgttactctagttttaaatgttacttgctgggggcctgtgctttgcacagtgcagtgccggagagagaaaagagagattttaaattggttttaatacaagtatagtaatttcat

SEQ ID NO: 552 - DNA, 701 bp, Glycine max
  misc_feature (1)..(1): n is a, c, g, or t
  misc_feature (6)..(6): n is a, c, g, or t
  misc_feature (8)..(8): n is a, c, g, or t
nccagngnaattcggcctcgccgccgaaaaatagcaaagaaacataacaatttatatatataaatagtgtattttgctttagatattttgagtaacatggcatccctcaaggctgacaaacccgttggcactcaactttttgggcagggtaaaaaggaagctgctcccaaagctagtgatggtgcatcatccaaatccaagggttcagcttccaaatctgctaccaagaaagttccagtacagaagccccaagaatccaagaaaaagggaaaaggaggcaaatcatctacaaagcactagccagaaagccttattaatttactgaaggaaagtgtggtttaattgtaagaataaaaagccacacaaatattggatacaataaaaattgtaccttgttttcctttgcagtcaaggtatcttggcttcctatgtgatcagcttgctctaggcttgatatatataatcaaaataatatttttgcattttaaaaaaaaaaaaaaaaaagatatcggataccggcaacctcgaggggggggcccggaacccaatttcgcccttaaggagagccgaaataaccgggcgtcactgggcccgtgttttaaaaagccgtgaattggaaaaacccggggggtacccaaattaaagcccttgggaaaaatccccctttccccgggtggggaaaaaaaaaaaggccccccccc

SEQ ID NO: 553 - DNA, 1436 bp, Glycine max
  misc_feature (107)..(107): n is a, c, g, or t
gcgagggcctaatgaaaggtgagttgcagaatgccagagaggccattctctggggcactgattatcttctgaaaggcggtgcacatccaaacgggattggtgttcangtgggggatgctaagaaggaccatgcttgttgggagagaccagaggacatggatactccaagaagcgtgtttaaaatagatgcaaacacacctggttcagaagttgccgcagaaactgctgcagctcttgcagctgcttctctggtttttagaagaagtgaccccacatactccaaaattttagtcaggagagccatcagggttttccagtttgctgataagtacaggggatcctacagcaatgccttgaaaccttatgtgtgccccttctactgctcttactctggatatcaggatgagctgttgtggggtgctgcctggctgcacaaggctaccaagaatccaatgtacctaaactacatcaaagttaatggccagatccttggggctgcagagtttgacaacacctttgggtgggataacaagcatgctggagcaagaatacttctttccaaggaattcctggttcaaagggtacaatccctccatgactacaaggggcatgcggacaatttcgtctgttccctaatttctgggacctctttgtcttccacccaatataccccaggtggccttcttttcaagatgagtgatagcaacatgcagtatgtcacatccacctccttcctactgctaacatatgccaaatacttgacccaatcccatatgcttgttaactgtggcggaatcaccgtaaccccaaggagactccggacaatagctaagaaacaggtggattacttgcttggagacaacccattgaagatgtcatacatggtggggtatggtccacggtacccacgaaggatacaccataggggctcatctctaccgtcgattgctgtacacccgggaaagatccagtgttccgcagggttcagtgtgatgaattcgcaatcccccaacccaaacattctcgtgggggccattgttggtggaccagatcggcatgataggttcccagatcaacggtcagattatgagcaatcggagccagctacatacattaactcaccccttgtaggagcactggcctatcttgcacactcatttggtcaactctaggaaccccaattatttcgtgtatcccatgttttatttcactagtctcgctagttacttgtgtctcctagaattattatgcacacactcatttgagaccagtaccacaccactaaaccttataaacttatcacaagctgcttaacttaatactattatgtgtaactcttatgatttcggaaagtggtatatatgtatgtcacgtgatggtgtgtgttcaacttctcaagaaattcaaacaaaattacgaaaaaaaaaaaaaaaaaa

SEQ ID NO: 554 - DNA, 745 bp, Glycine max
tcgagcagctacgtaggcccccccccccagcacagtgtggcagtttggtcgttgagtgagtgagtgtggtttcacattggctgttcaaatcaaaaatgactttctccctttcattcaccactctgctttcccttctctctgtcattctgcttcatgtcaatgccttccccgttcatttcaatcaccccatacaccatcgccaccctcgctttgccgctcataactacagagacgctctcaccaaatccattctcttctttgaaggccagaggtcagggaagctccctcctaaccagagaatgtcttggaggagagactctggcctctctgatggctctgccatgcatgttgatttggttggagggtactatgatgctggggacaatgtgaaatttggttttcccatggcattcaccaccaccatgctttcatggagcgttattgagtttggtggcctaatgaaaggtgagttgcagaatgccagagaggccattcgctggggcactgattatcttctcaaagccactgcacatccaaacaccatttatgttcaggtgggggatgctaagaaggaccatgcttgttgggagagaccagaggacatggatactccaagaagcgtgtttaaaatagatgcaaacacaacctggttcagaagttgccgcagaaaactgctgcagctctttgcaagctgcttctcttggtttttaagaagaagtgacccccacatactccaaaaatttta

SEQ ID NO: 555 - DNA, 1602 bp, Glycine max
acaagggaggcttggagatttctttattcttctggtcttaccaatcaaattgacctttttttgctttgccccggtatgattccttgtgatcaacgtcacttgttaatggtgcatgcaatatgaataagtagtgtatggaacagtgccaccataaggtttcttttgttgtattctttcttataacatggtagcagcggaggatttctgcacctttacggcatttttcttatgtccatagagcatggatgctacatcctcaccgtttgtttcctcaagaagaatgggtgtatatgatcctatccaccaaattagcacgtgggaagaaaatttcaaaagtaatgatactaataatttaactgtatccacatccataattggggaggtggacatgaagttagataatcagtttcaggtgcaatcagaggatgatactcatggaatatttggcacatctgtgaagtacgaccaagacactaacagacttactgataagacacaacgacgtctagcacaaaatcgagaggctgctcgcaagagtcgattgaggaaaaaggcatacgtgcagcagttagaatcatgtcgtttgaagctcttgcagttagagcaagaggtagatcatgcaaaacaacagggattgtatattggcaacggattgggttctaataatttgggttttgctggctctgtaaattcaggaataacccttttcaagatggagtatggaaactgggtggaggaacaaaatagacaaattttggaactgagaactgctttaagttctcatatcggtgacatacagctcgggacacttgtacaaggcataatgaaccactacaccaaactctttggcatgaaatctgctgcagcaaaagcagatgttttctatgttatgtctggtatgtggaagacaacagctgaacgatttttcttgtggattggaggatttcgcccctctgaacttctaaaggttctggtccctctaagtgaacctttgacagagcaacaacggtttgatgcctatggccttgaaaaatcatgccagcaagcagaagatgccctttctcaaggtatggaaaaacttcagcaaatgctttcggactctgtaggaccaggacaactagttgaaggaacccacattccccaaatggatactgcaatggagaggctagaagctcttgtgagctttgtgaaccaggctgatcatctacgacaagaaacgttgcggcaaatgtatcgaatacttaccatacgtcagactggtcgatttctgcttgctttgggggaatattttcaacgcctgcgggctttgagcaaactttgggttaatcgtcctcaatttccaggacatgcttagtcagtcatcaaacattaattctagcaaaacacccttaaacttatcatcctgttccggctgctcgcatttttccagcattgagaagttgtaaatacgtgtttattaaggtcatgtaaaatgttaaatagtacacctgcgtgtttttaaaactgcataatccttttttcttttctttgatagaaataattaaagaaaactactataatgcaagttaaatctttagttcgttactaaaaaaaaaaaaaaaa

SEQ ID NO: 556 - DNA, 973 bp, Glycine max
agaatctatgtggatgcctcttctgagctgcaggaagttcagcactgattcaccacttcagccaaactcaacaacaccgcgtttggctcacacactaacacaactgttctgtacctttcttcctctcctcaacttgtttcctacttaacgcgtttccgtgaaccaatcgccgatctcgcgctttatctataaagcgcgagatacctcaccgcaaccagtggaactcaccgaattgaactcaagttttttctcttctctcggtttcatcgccatggatgaagaagtgcgcaagatcttcagcaagttcgacaagaacggcgacggcaagatctcgtgcgccgagctgaaggagatgatggtggcgctgggatccaaaacgacgtcggaggaggtgaagcgcatgatggcggagcttgatcggaacggcgacggctacattgacctgaaggagttcggcgagttccattgcggcggcggcgacgggagggagctccgggaggcgttcgagctgtacgatctggacaagaacgggctgatctcggcgaaggagctgcactccgtgatgcggaggttgggggagaagtgctccctcagcgactgccggaggatgatcggaaacgtggatgccgacggtgacggcaacgtcaattttgaagagtttaagaagatgatgactcgctcgtaggtggtggtggtagtagcactctctttcagtaagtgagtcatttatttaagtgaatgatgaatgacaccacattttacgataattctggtaacaaaaaaatattgtagtttcattttaattatatgtgtgggtgagtagaatgtagtgttcaagtacatcttaatcaatgggaaagaaaaaatcatttcttatcacgaaaaaaaaaaaaaaaaactatttaatttaaactacagataatttaactcataattaaaaaaaacatttttaatatggataaatcatcatttt

SEQ ID NO: 557 - DNA, 832 bp, Glycine max
caggcttctgccacactcaacaacaccgcgtttggctcgcactaacacaactgttcctttcttcctttcctcaacttgtttcctacttaacgcgtttacgtgagccaatcgctgatctcgcgctttctataaagcgcgagtcacaaccactggaactcaccgaactgaactcgtaagtttattattcttctctcggcgtcgccatggacgaagaagaggtgcgcaagatcttcagcaagttcgacaagaacggcgacggcaagatctcgtgcgcggagctgaaggagatgatggcggcgctgggatccaaaacgacgtcggacgaggtgaagcgcatgatggcggagctggaccggaacggcgacggctacattgatttgaaggagttcggcgagttccactgcggcggcggtggcgacgggagggagctccgggaggcgttcgagctgtacgatctggacaagaacgggctgatctcggcgaaggagctgcactccgtgatgcggaggttgggggagaagtgctccctcagtgactgccggaggatgatcggaaacgtcgatgccgacggcgacggcaacgtcaatttcgaagagttcaagaagatgatgagtcgctcgtaggtgatggtagctaagtgactcatttatttaagtgaaatgaatgacaccacattttaggataattctgtaaaaacaaatgttgcaatttcattttatttatatgtatgggtgtgttgaatgtactcctcaagtttaaattaagacgtagaattaaggtgagttgatttagacttaaaaaaattattttttaaattaattggtttttatat

SEQ ID NO: 558 - DNA, 1787 bp, Glycine max
tcagctacgtaggccccccccccacttcgttgaatattaagctgcgcgagatatgggcaaatagtacaagtgtgtttagcagctgtgatcccagtaatgataatattaatttcaagtatggaatatttgaaaatgcagtaaagaaacatgttgtctcttcaaactttatcccaaagtacctttattgtttatggtggggattgcaacaattaagttcttatgggcagaatctagaaactagcacgtttattggagaaacatcatttgctattgtcattgccatcttgggtcttgtattattttcccatttaattgggaacatgcagacttatttgcaatcaattactataaggcttgaggagtggaggcttaagcgaagagacacagaggagtggatgaggcatcgccaactccctgaagatttgagaagtcgtgttagacgatttgttcaatataaatggcttgctactcgtggagttgatgaggaaaccattctacgtgccttacctgctgatcttcgccgtgatatacagcggcatttgtgcttagaccttgttagaagagttcccttcttctcacagatggatgatcagcttctggatgcaatatgtgagcggctggtatcgtctctgagcactcaaggcacctacattgttcgtgagggtgacccggtgactgaaatgctttttatcattagaggtagactggatagttctactacaaatggcggccgtagtggtttcttcaactcaatcatattgagacctggagatttttgtggggaggaacttctttcttgggctttactccccaaatccaccattaatttgccttcttcaactaggacagttaaagccctaagtgaggttgaagcttttgctcttcgggccgaagacctcaagtttgttgctaatcaatttaggcgccttcacagtaagaagctgcagcacacttttcgattttattcccaccattggaggacttgggcagcttgctttatacaggctgcttggcgccgatataagaaaaggatgactatgaaagacctcagtttgagggaaaccattcctttagacgaagcagtagctggtgagagaaaacatggggactattctgctggttcaaattcaactcagactaaattgaaccttggggctacaattcttgcttcgagatttgctgctaacacacgaagaggggctctgaagatgaaagatgacatgccccagttacagaagcctgaagaacctgacttttccactgaagctgacgatgattagttacacttattcagtggcatttggttttcaaattcggttgggtcctgcattctatttcagtatggataatgattctgcaggtcacaaaaatcctgcgtaaccctctgcctgccgtatgacccttgctggtagggttgtcgatgtattttaattagtaagatacaaagggggaaatataaggttatgccagggaatggtgatggtgggttttttattgctcagttgtgtatactcatatttattgcaattttcatcagagtaagttgattactattctacaaagtatgcatcagaccctattagatggccccaatcttataaaagggtggaaaatgggggcaatgtgagaatcgttgtttttgttgcattattaatgctactcagtccttaaattcgagttgacattggagttctcacgagtgtagctaccgtcttttgttctaagtttttcttgtataaaaagatggagtttctatgggctacaaaaaaaaaaaaaaaaaaaaaaaa

SEQ ID NO: 559 - DNA, 590 bp, Glycine max
aaggcttcccacgcctcccccactgtctcagactcaatctcgcgtggatagtttagctgagaattcaagaacagaacctcgaagaggcatgggtccaaaacctgggtcagacatgaagatgaacgcgattaggtcagggatagtggtgctgggagctcttgcattcgggtacttgagcatagaaattggcttcaagccttatctggagaaagctcagaaccagaacgcgctctaccaatctgacccttctcaggaagaatcatcttcagctttctcagaacgcccttcataaccacacacactctgttcggcttaggagaaatggaaggaaattttgttgccccagttgtgtgttggtaattaactagttttgtattgttcaactttatttatctatttgtatttgctcacataataatatcatgcatctaccttgaggcttgtgtggttggtgatgatatcatcctgagttgttatacggttttatgtgtttggaattggcagtaatatttgttatcattactccaataacgaatcttttttatttgaaatgaaaattttcctgtgtttggtagggagttaaaaaaaaa

SEQ ID NO: 560 - DNA, 680 bp, Glycine max
ctatatacaagaagtcttctaatgtcactttcttcttccacctttgtttccacgttctacaattaaaagaaacaaagattcctttctgctccaaaaacaatggaaagcaaccaatcggctaaagagatcacggtggaagtagaagagttcgaggacttgctgcctgtgatggcaaagaagttggatgtggagacctttgtgtcggagttgtgtgggggtttcaatctcctggctgacccagaaacaggtttgatcactggtgagagtctcatgaggaattcaactctgttgggtatggatgggatgagcaaagaggaagcagagaccatggttagacagggagatcttgatggggacgggaagctcaatgaaactgagttttgcatccttatggtgaggcttagccctgggatcatggaagatgctgaggcctggcttcacaaggcacttgaacaagagctcaccaaatcctcaacttaaaattccaccctttagaaatcaattgtaagttatatatacatcaataagtgtgtgtggctgtgtacatgtgtcttgtatgtatcatgcaagttaaatatactcatttgacactccatgaatgctttctaaagggaatttgagtataataaaatgaatctgttcagtttgttcgattaaaaaaaaaaaaaaaaaaaaaaaaa

SEQ ID NO: 561 - DNA, 1032 bp, Glycine max
gttttttgtttatattcgttccattctgaaaagtaaaaaaatacaaaacaaaaattgaaaattccaagttggggttctcacgatttcgattcaccctttctcccacacactccgattctccttgtaaacagcggtgccagaagttgatataggatgggggcaatgatgtcgagattctggttcatgttattccctgcaaaagagtataagattgttgttgttggattggataacgctggaaaaaccactaccctttataaattgcatctgggtgaggttgtaactaccaaccctactgttggtagcaacgtcgaagagctcgtctacaagaatatacgatttgaggtctgggatcttggtggacaagaaagattgaggacatcatgggcaacatattaccgaggaacgcatgctgttattgtggtgatagacagcagtgatagagccaggatctctatcataaaggatgaactttttaggttgttggggcatgaagatttacaacattctgtcattcttgtctttgctaataaacaagatatcaaggatgctatgactcctgctgagatcactgatgcactctcacttcacagcatcaaggatcatgattggcatatacaagcttgctgtgctctctcaggagaagggctgtatgatggtcttggatggattgcccagcgagtaactggcaaagccccaacatgatgttgtgttgctgaaaacctgggatgagattcatttttcatgtattgaatttatatgacgagggacaaaaactctatgtatcatttatacttctaagagtcaagcaaagataatgtgtttgatttgctatgaggaaaaagattattcaataatctgattaagacacattttttttatcctcagatctagtttattattcaggttagatgaaagcatgagaggagtgaatttaatcatataatttcaatttatggttaagattagaattatttaaaacaattttggtcattcatatatagtttgtatggttaattttcttattttcat

SEQ ID NO: 562 - DNA, 1121 bp, Glycine max
cggaattcccgggtcgacccacgcgtccgcggacgcgccgccccaaactccaaattctcaacaacattctctctctcttttctttccactttattccaaaactggacctcactttaccccaatctaaatccgaacccgaaccaaccatgttcggaccagcccaattcacttccgaacctccgaaatccactctcaaattcctctgtagctacggcggcaaaatcctccctcgctaccccgacggcaagctccgctacctcggcggccacacccgcatcctcgccgtcgatcgctccattccattctccgagctattgctgaaactggaggagctctgcggcgcctccgtgaggcacctccgctgccaattaccctccgaagacctcgacgctctcgtctccataacctccgacgaagatctcgcaaatctcatcgaggaatacgaccgtgtttcgtcgctgaaaatcagagccttcctctcgccgcccacgccgcccacgccgcccacgccgccgagatcgccgaacaagttttccactgctccgtcgaaatcggcgtccatctcctcctcctccgcttcgtcatcgtcgtcgtcttcatcgtattacagccctaccggctccggtgaatctggccggagatacagggctccggcgctggtgtcagactgctgcgtacatcagatgtcgcagccgccggcgtatccggtcggcatggagaaatcgaaatcctccgggaggaatgttcctctgccgcggtacggttaccaccacgggaacggtggacacgtttatctgatccacaacgggaaccactggcaacagcgttacggtgtcgtttagaaggaatattgaaatactggaactgaagtactgagattaagacgcaggtgttactatagaaagaaattgataaacggaaatttacgatgatatataatataattaaacgaagatgaaataccaaaaaaaagaaaaaaagagggaaaggaaagagtcctgaatatatctgtgatgtaaagtggggactgtaaaaaaaaaaccttgacaaggattgcggttttagtagctcttgatccttgattgcccattaatgaatttcgctccaatttcgtgtttcct

SEQ ID NO: 563 - DNA, 1885 bp, Glycine max
ctctctttattccgctcatcccattcttgcaaaacctaaattctgagcggctccatatccgtcacttatctcaccaaccataaaatatactcatggccgagcacggttttgatggacatgatgtaggatatgtgcctgaggaccctaattttcctcagaatcattctgatgaacatgatgtagggactgtgattgatagctccggatttcctcacctgctacctgatgaagatgatgcaggcaatttgatggaggacgccaattttcctgaaaatgattttgttgggcatgaacatgatgttggaggtttggctggggacgcggattctccaccggaggagcatgttgaggaagttcatggtgctggagatgtgcctgaggattttgattctctgccgaaacagggatccgagattgattcgaagggaaatgaaataaaaaagtggccgggatggcctggagagaatgtcttcaggatgttggttccagtgcaaaaggttggcagtattattggccgaaagggcgagtttataaagaaaatcacagaagagactaaggcgcgaattaaaattcttgacggtccacctggaatctcagaaagagcagtaatggtttctgcaaaagaagagccagattgtcccataccacctgctgttgatggtttgttaagggttcataagcaagttatcaatgttgatcgtgaccttgcagatagtgcattggctgctgggcgatcagttgttaccaggcttctagtggcggatactcaagcaggaagcttgattgggaagcagggatcaaccataaaatccattcaagatggctctggttgcactatacgtgttcttggatcagaaaacctgccaatatttgctttgcgagatgatagtattgttgaaatacaaggggaatctgctggtgttcacaaggcagttgaacttattgcagttcatttacgcaagttcttggttgaccgcagcatagtaggagtttttgaaacgcagatgcaaatgtcagatgttagagttaaccagaatttgccaccgcatcaaaattggggtcctcctcctcaagggtttcctgctcctgctggtggtggtggtggaggaggacctgcttttgcacctaatcatcaatatatgccaccttcacatcactatgatagttattatccacctactgagttgcctcccatggacaaacaccttcatcaaggtccaccacctgcctatgcaagggatgcttctatgggaattcattcatcaagtgcacaaccacaacaatctgttgtaactaaggtcacacagcacatgcagattcctcttacatatgcagatgctgttataggagcatcgggcacaaatatcagctatatacgtcgtgctagtggagcaagtattacaattcaggaaacaaggggtgtgccaggggagatgactgttgagataagtgggacttcttctcaaatacaggcagcccagcagctggttcagaatttcatggctgaagctgcaagtgcgacacaggatcctatggggggatcagtcagccaaggttacagtgcctatccaacaactgctccagtttatgctcctccacccactagcgctggtggtcatacaggccatgcgccttctgcagattatggccccgtatatggtaccaattatgggtattaagatgcttcatttaattttggtcaaggagctttgtgtaaacaatatactgtaaactttacgttcttatagtatttcttttttcttttttatttttggctagtaggttatcatactgttggtcatcctgttttgacttcatttatcaaacgattcgatttttctaacctaaaaaaaaaaaaaaaaaaaaaaaaaaaaaaaaaaaaaaa

SEQ ID NO: 564 - DNA, 1036 bp, Glycine max
agaagagcaaggttacaggcacaattttcacaatcgaggcctgctgcaataacccctaatgtttcacctcccacgcctccgcgcccgcttgggccggcgccggggggacaacaatttttgtatgggcaagcagctccagccacgatacctcaagctgcatttggttaccagcagcattttgttcctggaatgaggccaggtggtgctccaaacttctatgttccactggttcagcagggtcaacaggggcagcgcccaggaggacaccgaggatcaggtcctatgcaacagctccagcagccattgccattgatgcaccaacagatgcttccaaggggacatgtctatcgatatcctcctggctccaatatgcaaaatattcaactggcaggagtacctggaggaatggtcacttacggcattggtcaaccaatgcccacacaggccctggcctcggcccttgccaatgctactcctgaacagcagaggactatgcttggtgaagctttatacccgttagtagataagctggagcatgaagcagcagcaaaggttactggtatgctcttagagatggatcagcctgaggtattacatctgattgagtcaccggatgctctcaaggctaaagttgttgaggccatggatgtgttgaagaaagttacacagcagcaatcaaacagcccagccgatcaactggcttcactctctctgaatgataatgtcgagtcttaagattatgtatgccagtttacaggaatacacatgttcttaaaacagtcacagttgtgtttctggtttttttgtaggattagcaaacactccttggagtaacttattgatttgcattttgatttggtttctcttcactactgcttagtttgacatggccgtcctattttggccccagttttctttaaaaaaataatggcttccagcttttaaaaaaaaaaaaaaaaaaaaaaaaaaaaaaaaaaaaaaaaaaaaaaaaaaaaaaaaaaaaaaaaaaaaaaaaaaaaaaaaaaaaaaaaaaaaa

SEQ ID NO: 565 - DNA, 921 bp, Glycine max
acgccgcaatgtaccggctaggaattccctactcgacccacgcgtcagacgacagaagggggagaatatggagctattactagtgctgtagtgatgagagatgtagatggtaaatcaaaaggttttggttttgtcaattttgcgaatgtagaagatgctgctaaagctgtggaggctctaaatggaaagaattttgatggtaaggagtggtatgttggaaaagcccagaaaaagtctgaaagggagcttgaactgaaagagcgaaatgagcagagtacgaaggagactgttgataaatatcatggtacaaacttgtatatcaagaacttggatgatagtgttggtgatgaagaactcatggaactgttctctgagtttggtacgataacctcatgcaaggttatgcgagatccaaatggaattagtagaggatctggatttgtttcattttcaattgctgagggagcaactcgggctcttggtgagatgaatggtaaaatggttgctggcaaacctctctatgttgcccttgcacagagaaaagaagatagaagagcaaggttacaggcacaattttcacaatcgaggcctgctgcaataacccctaatgtttcacctcgaatgcctctataccctctaggggctcctgcgataggacaacaatttttgtatgggcaagcagctccagccacgatacctcaagctgcatttggttaccagcagcattttgttcctggaatgaggccaggtggtgctccaaacttctatgttccactggttcagcagggtcaacagggacagcgcccaggaggacaccgaggatcaggtcctatgcaacagctccagcagccattgccattgatgcaccaacagatgcttccaaggggacatgtctatcgatatccttctggctccaatatg

SEQ ID NO: 566 - DNA, 1550 bp, Glycine max
ttcaaaaatacgagaagtgatgacttcacatatgcgagagtctggtaaacaacttgttactgatcctgaaagattgaaagatcctgtcgaatatgtgcagaggctcttagatgagaaagataaatatgacaagatcataaacttggcattcgtcaatgacaagtctttccagaatgcattgaattcctcatttgaatatttcatcaacttgaaccctcgttctccagagttcatttcactatttgtagatgataaactccggaaaggtctaaaaggggttagtgaggatgatgtagaagttacccttgacaaggtgatgatgctattccgatacctgcaagaaaaagatgtttttgagaagtactacaaacagcatttggcaaagcggcttttgtctggaaaaacagtttctgatgatgcagagagaagtctcatagttaagctcaagacagaatgtggttaccaatttacatctaaattggagggaatgtttacagacatgaaaacctctcaggacacaatgcagggcttttatggctgccaccctgaactaagtgacggtcctacgcttactgtccaagttcttacaacagggtcttggccaactcagtctagtgttacgtgcaacttgccagcagaaatgtctgcgctgtgcgagaagtttcggtcattttaccttggcacccatactggcaggagattgtcctggcaaactaatatgggcacggcagacttgaaagcaacctttgggaaggggcagaagcacgagttgaatgtctctacttaccaaatgtgtgttctcatgctgtttaataatgctgatagactgggctacaaggagattgagcaagcaactgagattcctgcttctgatcttaaaagatgcctgcaatcattggctttagttaagggaagaaatgtccttagaaaggaacctatgggtaaagatattggtgatgatgatgcattctatgttaatgacaagttcagcagcaagctgtacaaggttaaaataggaactgtcgttgcacaaaaggaatctgaacctgagaagcaggaaacccgacagagagtcgaggaagacaggaagccccagattgaagcagcaatagtgaggatcttgaaatccaggaagcaacttgatcataacaatcttatagccgaggtcacgaagcagttgcaatcgcgtttcctggcaaatcccacggaggtaaagaaacggattgagtctctcattgagcgggactttttggagagggatgatagtgacagaagattgtaccgatatcttgcttagaattggagaactagtttgcttcagtgattacaatgtatctttatgaaccaggtaataaatttacctttaaatagctccattgattttattgtacattaatttgttttccaattctttgtgatgtttcatcatttagtatctgtatgactgtattcccaagcaaattagggtccttgccacccatgtttgtaggatgtcaatgtgaggaagtcttgtattcaaatgaagtaaaccatgatttttttgtaaaaaa

SEQ ID NO: 567 - DNA, 1396 bp, Glycine max
tcagctacgtaggcccccccccctgcaacaaataatggaaattctggagttgttttggatgagcaacatggttagcagaacaatatttttaaaataaaactttttctgttgcttctgattttcatcattttttttaaggacttaatcttgttaggcccaaacattcttagcatgaaatccataccatatttgtattaatctaaagccatcaaggcttgaagtgtagttaaaagtttaaacttcatgctcagaggcgataaaaatggttgaatcgtgataaatatttaatctttctgggttagctaattttcctcctttcattcctaaggtaagtggagatattcaattgtataataattgtaactagcaataagatatttttgtgcgtcacgcagatatcaagaggataacttaagtggcagattgttgctaaaggtttggggcctatgctggttatacagtatttattgttcagttcatgccattgagttgtatattgctgatacaaaaatgtgtggaaaattatacatctttattttcccctttcataaaaaccaaccttttttttgtagaaggggaaatagattatgttggggtgctaaatcgagtccttccaaatgacattaggattatgggctggtgtcctgctcctgttgatttccatgcaaggttcagctgtttaagcagggagtataaatatttcttttggaaagaaaacttgaacatcccggtacaatgataatcaactttgggtgattaaaataagaggtagtgcttttctatggcatcaggttcgctgcatggttgctgtcctattcatggttggcaaaggtcttgaatctccaaatgtgattgatatgctactggacacttctagaatcctaaggaaaccccaatacactatggcttcagaggttccattggttcttcagtcctgtgaatttgacaacattaagtttatgtgttcatcagatgcgggagaagcgctgcgtgtacacttggtgaatgaatgccaaatttaccagcttcaagctgcaatctttcatgaagctcttctaaattgcgtgcctctatcaaatgatcaaagcttgctgccttttcaaggatccaagaagaaagtttcccatgtccctcttatgtcacgaccaactgagccatcatatgaagaacgccgagccaaactcaacacaattgcatgaagatttcgttggtcatctccgttatataatctgtttgggtgagcatttgtaaacttgattttggatgatcataattttgtaaaattgatatgaattttattgtttgtttttcaaatcttactaaatttggtaggaatttatttgattaaattgaagtatatggatcgattattttcaaaaaaaaaaaaaaaacttga

SEQ ID NO: 568 - DNA, 1302 bp, Glycine max
aactcctttcccccctccagttccaactttattgtgtttaaacggttccgggccccccctcgagtcagcacgtaggccccccccccccccccacctgtctcaactctatcaaacttcaaagttcacacacacaaaagaatcagcatggctttcaatcaagagttagaagctgtaacccaagctttctcagggcatggagtggatgagaaatcattggtaacattactgggaaaatgggatcctctggagagagaatctttcaggaagaagacaccacatttgttcagtgaagatcatgaacgccattttcagaggtgggatgatcaatatgtccgtcttctcaagcatgaattcgtgcgttttaagaatgctgtggtgctttggtccatgcacccttgggaaagagatgcccgtttagtaaaagaggccctaaagaagggtccaaatgcatatggagtgctgattgaggtttcatgcactagatcctcagaagagctattgggagctaggaaggcataccattccctctttgaccactccattgaagaagatgttgcctctcacatccatggcattgaaagaaagctattggttgccctactaagtgcctatagatacgaaggaacaaaggttaaagatgacactgcaaaatcagaagccaaaatcctttccaatgcaattaagaatgctcataagaagcctattaatgaggatgatgaagtgataaggatattggcaacaagaagcaaactacatctccaggcagtttacaagcactataaagagatatctggcaagaaccttgatgaggatcttgatgatttaagatttaaagaggctgtgcaatgcctttgtaccccacaaacatatttcagcaaggttttgaatgcagcattgcgaattgatgtggacaagaatactaagaaatcgcttactcgtgtcgttgttactcgagctgatattgatatgaaagacataaaggcagagtaccataatctatatggggtttctttaccccagaaagttgaagaggttgctagagggagctacaaggatttcttgctaaacttgattgttagaggaggctaattgaagaaattgaaaagagaacaaaaacttggaagatcaaataaaaaaggaaaattttttcctcccagttttccttgatttgttgctgatccttttcattgcatgatatttcttcatcttgtattactgtcgtcacaaaaacaaaaaaggaaaagtgtaatcaaataaaaatgttcaggtaatttcttccaacacaaaaaaaaaaaaaaaaaa

SEQ ID NO: 569 - DNA, 1376 bp, Glycine max
  misc_feature (1)..(1): n is a, c, g, or t
nagtagtcagctacgtaggcccccccccccaaatattcttcattcattcaattcctttgaatcttgttctctctaatctctctcactacaatggagactccatcatccacagcaagaagaatcacaagatcccaaatcgcctccaacaacaacatccccgtttcaagaaaaaagaacgaggactgctcagaaaagagcgtttcaaaaacgcggcagagaagcagcgtgcaacagcaggaacggtgtgcgctggtcgacatatcgaacgattcaccgatcgcggggctggcgaacgggaaggacatcattgagacgccgttgtcgtcgatggcgaagaagaagagggtgaagaagacgatgaagactccggggtcgggagaggctctgctgaggggccaggtgaagaccctcttgcagagagtggaggaagaggctgtgatttcgaagctatcgatggaaattgttgcaccctttctgaaacttgcgaattcttctccaatgtcgcttcttgcgcccactcccgcaaacacaccacaagtccccaatctttctgaagtggctttggtgtctccaccttctagtgtggttgaagaacaattgatctctcgggtggtgaatgaaatatttgaagggaagaagaacgagaatgctgaatgtgagaagagtgtgataaccaggtccttgctgttggacttctcggacaaatccgaggtttcagaatgctcttctgaggtgacatatcaggaagtgacacaaggaagtgttggtagccgtgggtccaccgaggatgatggtgcttccatttggtccattcaggtgaatgcgagcacgcatgacgaagatgaggacgatgaggaaatgggtgaagaggaagaagaagaagaagaagattattgcgaggatgctgaagagtgttatgattatgttggagggttgtcacttgaagagctatgtgctgggatgaataacattagtgtgaatgagaacaagggttgtgggaagcacacgaggtttgtgtacgatagtgaggatgagattgtggagaaagtgatagaatgttgtgctgagtctgatgtgatgcgtttgaagggtttgccaacacccaaaggaaagcaccttcgctttcctcaggaggaagaaaattcctctgacttgtgatttttgataattggtgctgctgcggtttggtttggtattgtctttcttgacaccactgttttggttaatggtgtgattggggaagctaaattgctgctccaataaacacaaccattgttatttttctttatcaataataaataaaccattgcttgtttaaacacaaaaaaaaaaaaaaaaaataagggcggccattgttatttttctttatcaccggg

SEQ ID NO: 570 - DNA, 1054 bp, Glycine max
gcataatagtaaaaaatgacacttaaatatctaataataatgatttgcttatggagataataccatcatgtggtatccatccatccatggacaaaaagttatcagaggatatgaatttaaacatgaaagagaagagtagtgggagccgaggaaggttggagaaaagcaagtggggtcccgcatcaaccaaaaggttatcatccatctcatttccacaacacctacgcgccaacatatttcaactacggctccgtgttgtcgcccgttgcggactcactgtccaatccaatgtgtgactatcaaactccccttttcccatgaaaccctcttccaccaccgtcacatacccctaccaccatggccacactccacaacaaccaaccaattccccgtccagcgccgccgtttccatccaatccgcctaccgcgcccaccgcatccgcgtcctctaccggaaaatcgccgccgtcgatgccgaagccgatcggctgcagcgcctgatccagcggcaggacacggtggacgccgtgcgcgccaaccacctcgagaaactgcgaatgaacgaggcgctcatggccctgctgctgaggctggactccgtgcccggaattgatccaacggtcagggacactcggaggaaagtcacccgtcggatcgtgggcctccaggagatactggactctgtctccgaggcccaaatcgatgagtccagttggtggcccatgaagaattgggacgaagtcttggccgacatggaagaaagtatttgtctggagaacggtggcgatgaaatggaacggttttgcgctcagaatctcggatttcgctgcctacaaaggtttcttcgtgaaccctgattcatcccccttttaattatgtatgtacgattgtacgtacacacacgctttcttatgtgtttttgtaattgtacaatataattaatctctatagttgcttacctttaaaactttgtgctttagctatagactatatagtaaatacaaagcagtgaaataaatatggtctaaaggaattaacataatgtcaaagaaag

SEQ ID NO: 571 - DNA, 2876 bp, Glycine max
cccgggtacgacccacgcgtccgtaaaaaaaaaaataataaataaaggaaaaagaaaaaaacaagctactgctaataatatttggttttgtttttctttataatcaaaacacaacctcgtgtgattccattgagccgcgcgtccgatttctgcaagtagtggtggtggcggcggcgacagcggtggtggcggcgaagagtggaaacaacaactggcagcattattgttgctgtatgtcagtggaatattattgcagtgggatttactacgctgagcttgctaaccctctccaatggccacagctcaggaaaaaacgacgccatgttgcgccacccaaaataacaacaaggtcgcactcgcagcacctccaacttcttcttcttctgcgccacaacaacaatcacaatcacaacaacggccctctgttgccaccttcatttccgccatcgattctcctcccaaaaccgcttctgccaaaggtatcactgtcatggtgagagctcaaaccagccaccctttggatccactaactgctgctgaaatatcagtagctgtagcgaccgttcgagcagctggggcaacacctgaggtgagggatggcatgcgctttattgaagtagacctggtagaaccagaaaagcaagttgttgcattagcagatgcatatttcttccctcctttccaaccatcactgctccctaggacaaaaggtggacctgtgattccaactaaacttcctccaaggaaagcaagactagttgtttacaataaaaagtcgaatgagacaagcacatggattgttgaacttagagaagttcatgcaacaactcgaggtggacaccataggggcaaagtgatttcatctacagttgttcctgatgttcagcctccaatggatgctgtggagtatgctgagtgtgaagctgttgtaaaggactttcctccctttcgtgaagcaatgaagaagagagggattgaggatatggatctcgtgatggtagatccctggtgtgctggatatcacagtgaagctgatgctcctagccggagacttgctaaaccactaatcttttgtaggactcaccccgacccccctcggcccgagggctatgcccgtccagttgagggaatccatgtacttgttgacatgcaaaatatggttgttcttgaatttgaagatcgtaaacttgtcccccttccacctgctgatccactaagaaattatacttctggtgaaacccaaggaggagttgaccgaagtgatgtgaaacccttgcagattattcagcctgaaggtccaagttttcgtgttaatgggcacttcattgaatggcagaagtggaattttcgtattggattcactcctagggagggtttggttattcattcagtagcctatattgatggaagtcggggacggagaccagtggcccatagattgagctttgttgagatggtggtcccatatggagatcctaatgatcctcactataggaaaaatgcttttgacgctggggaagatggcctgggtaaaaattctcattctctgaagaagggctgtgattgtttaggctatatcaaatactttgatgcgcatttcacaaacttctatggaggtgttgaaacaattgaaaactgtgtttgtttgcacgaagaagatcatggtattttatggaagcatcaagattggagaacaggtttggctgaagttcgaaggtctagaaggctgacagtgtcttttatatgcactgtggctaactatgagtatggatttttctggcacttttatcaggatggaaaaatagaagcagagatcaagctcacaggaattctcagcttaggatcattcaaccaggtgaaactcgaaaatatggcacaaccattgcacctggactatatgcgcctgtccaccaacatttttttgttgctcgtatggacatggcagtagattgcaagcctggtgaagcatttaatcaggtcgttgaggtaaatgtcaaagttgaaaagccaggagacaataatgttcataacaatgcattttatgccgaggaaaaactgcttaaatcagaattggaagcaatgcgtgattgtgatcctttatctgctcgtcactggattgttaggaacacaaggactgtaaaccgaactgggcatctaactggttacaagctagtacctggctcaaattgtttacctttagctggctcagaggctaagtttttgagaagagcagctttcttgaaacacaacctttgggttactccttatgcccgcgatgaaatgcatcctggaggagagttccctaatcaaaatccacgtgttggagagggtttggctacttgggttaagcaaaatcgatcactggaggaagctgatatagttctttggtacgtatttggagtgacacacattcctagattggaagactggcctgttatgcccgtggaacgcattggtttcatgcttatgccgcatgggtttttcaattgctcgcctgctgttgatgttccaccaaaccaaagtgatttggatgacaaagagaatggcctgccagccaagcctattcagaatgggctaattgccaagctttgaaaggataaaaaatgaggaggatctgcctctctacgtggttatgttcaaattattaaataaaatattcaatacaactgtttgtgctggtttcaacctggctggatatttaagaaacgcctattactgtaatttgtactgtataacttgtatgtacgtttgttgcatggtaatgcttggtaacttaaatgttcatttgatttgatgtggaaaaaaaaaaaaaaggcggccgatatattttttaaaaaatattttttattaaatttttttttaattaatttttttta

SEQ ID NO: 572 - DNA, 1852 bp, Glycine max
tcagctacgtaggcccccccccatgacaaaaaatagaatttttaacaaattttagaaaaaagaaaggaaaaagtgggtaatcctattccctatggctggtgcgacttgcgaggtgtagacatgatgtgatgtgatgaattgaggggaatccattgaagaggcgaggcgagttaatcagaaatcagaatgcacttgagcgagaacgaagggatagaggggaaggccttcgtggtcaccggtggactgggattcgtaggatctgctctctgcttggagctcatccgaagaggtgctagagaggtgcgagcctttgacctccgcctctcttctccatggtcgcgtcctctcaaggtcaagggagtcctttgcgtccaaggggatgttgcccgcaaagaagacgtggaaagggtcctccgcggttccgactgcgtattccaccttgcggccttcggaatgtcaggcaaagagatgctccaatttggtcgcattgatgaagtcaacataaatgggacttgccatgttatcgatgcttgcctccacctcggcatcaaaaggcttgtctactgtagcacaaacaatgttgtctttggcggtcaacagatcatcaacgggaatgagacattgccctatttcccaattgatcaccatgtcgatccatatggccgcagtaaatcaattgctgaacagttggttcttaagaacaatgcccgtactctcaagaacgactccgggaatcgtctttacacttgtgctgttcgtccagctgcaatctatggaccgggtgaagacaggcaccttccaaggatcgtagccttggcaaagttgggtctccttttgttcagaattggcgaccaaactgtaaagtcagattggctttttgtggataaccttgtccttgctcttatattggcgagtatgggacttttggatgacaatcttagcaaggggaaacgtcctgttgctgctggccaggcctactttatatctgatggctccccagtcaattcttttgaattcctgcaccctctacttaggagtttggattatgaactgccaaagacttccctaccggtcgaccgtgctcttgttctcagcaggatttgctgggctgtttatacaatcctatatccatggctcaatcggtggtggcttccacagccattcatccttccctctgaagtacacaagctgggagtgacccattatttctcttatcttaaagccaaagaggagattggctattttcccatggtgacctcgcgagaggtgatggctttgaccatatcttactggcaagagaggaaacgaacaactctggatggaccaacaatctacgcgtggttgttttgtgtcattggaatgatctcactgttttgtggtgctttcttacctgacatagggatcatgtcccttctcagagctacatgtctatttgtctttcggtcaatgtgggtgacaaggttggtgtttcttctggctacagctgcacatattgctgaggccatttatgcttggtacctggctaagaggatggatcctgccaatgcaagaggatggttttggcaaacttttgctcttgggatgttttcgttgcgtttactattgaaaagagcaaggaaataggtaagcttttgcagattacttgtacaattacagtacaggttaggaaatcaatactgttttctgtccattgcatgacaaatgcaaactaccattaccaataatatattccactatctagcgctatgagattcttagcattggccttgttaaaactagtccatcatagtggaagatgtcgtcttttatgatcaaaaaaaaaaaataaaaaaaaaaaaaaaaaacccccaag

SEQ ID NO: 573 - DNA, 745 bp, Glycine max
acgctgcgagaagacgacagaaggaggggaatctaggcgagttaatcagaatgcacttgagcgagaacgaagggatagaggggaagaccttcgtggtcaccggtggactgggattcgtgggatctggtctctgcttggagctcatacgtagaggtgccgtagaggtgcgagcctttgacctccgcctctcttctccttggtcgcgtcctctcaaggacaagggagtcctctgcatccaaggggatgttgcccgcaaagaagacgtggaaagggcccttcgcggtgccgactgtgtattccaccttgcggccttcggaatgtcaggcaaagagatgctccaatttggtcgcgtcgatgaagtcaacattaatggtacttgccatgttatcgacgcttgcctctacctcggcatcaaaaggcttgtctactgtagcacatgcaatgttgtctttggcggtcaacagatcatcaatgggaatgagacattgccctatttcccaattgatcaccatgtcgatccttatggccgcagcaaatctattggctgcacagtttggttcttaagaaccatgcccgcactctcaagagcgattccttccggaatcatcgtctatacacttgtgctggtccgtcagctgcaatctatggaccgggtgaagacagacaccttcccaagatcgttaccatggcgagggtgggtctccttttggtcagaattggcgaccaaactggtaaatcagattgg

SEQ ID NO: 574 - DNA, 1021 bp, Glycine max
ccacgcgtccgacggctgcgagaagacgacagaaggggatgcttcacaattaatagtgctattagattcttaggaactttactccttcaattaattatttatgcatttggtacattatacatgcaagctgtaactagtaaaaaaaaattgaatttgaaggaggaggtgaaggctgaagtgtggagaaggattagggtttgtgtttatatatttagatatagaatagcagaaaatttggattgtgagggaaaaaatgggtagcgaagaggattcgattgagcaaagcgttgcgtcccgtcgcgaaagactgctagctctcagagccgctcaggagttgtcgagtgttcccgaacctgaacctaacggcaacaaggacgatgataatgaagaagatcaagaacctcaagaaatgaagttccgtaactacgttcctcacgacaaaaacctccaggaagggaagcttgcccccgcggtgctcccaaagttcgaagaccctgtggatgatgtgcctccacccgagcctgaagctaaggaggatccgttcttgaatattgctccgaagaaacctaattgggacctgcgaagagacgtccagaagaagcttgataagctcgagaagcgaactcagaaggctctttatcaactcatggtggaacaagagaagcaaaatcaattaactgaaggagatgatacaaacggcacagtagagtagattgcaatttgttccggcagctgaaagatattgaagcagtatgttgaaaactcctgtcccatttaagctgcttaacgcataaaaaattggtttctaatacactagtctttgcaatttggcaatgtatcgtgaatgtcgtatcattcacttctctttcaatgactaagtatgagtgtattagatctgtttttagaggtgaaatatccctggattctgatagttgtattaattttagaacaaattacactcgtctcttttgtatttaatacttattacacccaaataaaaaaaaaaaaggaacctttcgcc

SEQ ID NO: 575 - DNA, 1153 bp, Glycine max
  misc_feature (963)..(963): n is a, c, g, or t
  misc_feature (968)..(968): n is a, c, g, or t
  misc_feature (973)..(974): n is a, c, g, or t
  misc_feature (979)..(979): n is a, c, g, or t
  misc_feature (987)..(987): n is a, c, g, or t
  misc_feature (995)..(995): n is a, c, g, or t
  misc_feature (1002)..(1004): n is a, c, g, or t
  misc_feature (1006)..(1010): n is a, c, g, or t
  misc_feature (1013)..(1015): n is a, c, g, or t
  misc_feature (1018)..(1018): n is a, c, g, or t
  misc_feature (1022)..(1023): n is a, c, g, or t
  misc_feature (1032)..(1032): n is a, c, g, or t
  misc_feature (1041)..(1041): n is a, c, g, or t
  misc_feature (1045)..(1045): n is a, c, g, or t
  misc_feature (1052)..(1052): n is a, c, g, or t
  misc_feature (1055)..(1055): n is a, c, g, or t
  misc_feature (1057)..(1057): n is a, c, g, or t
  misc_feature (1061)..(1061): n is a, c, g, or t
  misc_feature (1067)..(1067): n is a, c, g, or t
  misc_feature (1075)..(1075): n is a, c, g, or t
  misc_feature (1077)..(1077): n is a, c, g, or t
  misc_feature (1084)..(1087): n is a, c, g, or t
  misc_feature (1089)..(1089): n is a, c, g, or t
  misc_feature (1099)..(1099): n is a, c, g, or t
  misc_feature (1102)..(1102): n is a, c, g, or t
  misc_feature (1104)..(1104): n is a, c, g, or t
  misc_feature (1106)..(1106): n is a, c, g, or t
  misc_feature (1111)..(1111): n is a, c, g, or t
  misc_feature (1116)..(1116): n is a, c, g, or t
  misc_feature (1120)..(1120): n is a, c, g, or t
  misc_feature (1122)..(1122): n is a, c, g, or t
  misc_feature (1132)..(1133): n is a, c, g, or t
  misc_feature (1142)..(1146): n is a, c, g, or t
  misc_feature (1148)..(1150): n is a, c, g, or t
actttgccgtcgtgagttgcatctgcgtgtgactgcaagaaatggctcttgttctcaacgtctcattgtgttccatttctaaaccccatctttctctctcaacctccaatcccaacaaagcttcttcacctgcttcacttccccctccttctctgggactcaacacaaagcaaagtctccaaccatctcagaaactcacattttcattgggtgaatccgtgtctggtgccaccctcgttgctctcctctctgcttctttcatctttgttgatcccgcacttgcattcaagggtggagggccatacgggcaggaagtgacaaggggacaagatcccactgggaaggactttagtggcaagactctgatcaaacaagacttcaaaacgtccatactgagacaagccaattttaaaggtgcaaagttaataggtgctagcttctttgatgctgatttaacaggtgctgacctttcggatgctgatcttagaaatgcagatttttccctggcaaatgtgacaaaggcaaatttaagcaatgctaacttggaaggtgcacttgcaacaggaaatacatcttttaagggatcaaatattacaggcgctgacttcacggatgtaccactaagagaagatcaacgtgaatacctctgcaaagttgctgatggagtgaacccaacaactggaaatgctacgcgtgatacattgttctgcaattagtattccattgctgaatactcactccaagaccttcaaatgtttgcatagaatggtttcatagctaacaaaatactcccttcatgttgctggaatcttgtatttacatagcaccacaatttagattatttcaaatttccattccccatacacacacttgacaataacattgtgatgtaatgctcataaccagcctacctatgttatatattattattattgtaatcaaaaaaaaaaatacaaaagaacnaaagntgtcnnggaancctggggnttctaganttttgannngnnnnnatnnnggnggannttcgctttngctcgtttntggnaggcttnttngntctngtggtntgttgctntngtggggnnnncncataatattntantngnccccnccacngggncntccagttggnntataagggnnnnntnnngcg

SEQ ID NO: 576 - DNA, 1443 bp, Glycine max
cagaattataacatgctcgacttgtttcaaataaaaaagttttgttaagaatcgaaaatcttaatgatggtatcagaatgataaaaatgtaaaaatttgttgttgcgataaaagtatatataaaagtgatggtgggagtgggcagtggtgagtgaggagtgaagatggggtcagaggtgtctaaacagatggagcgaagaaagacaatccagacagagaagaagagtctgtccgatctgaaaagcagcggagaagactaccctggctccgactaccgtccccaagacagaaaaaactggatgtcccatctcgaccctcagaaactccgcatcaaccaaatcgtctggcccggcacccacgactccgcaaccaacaaaattggcatccctctcctcactcgccccttcgcccagtgccaatccctctccatctaccgccagctctccctcggcacccgcgtcctcgacatccgcgtccaagaacaccgccgcgtctgccacggtatcctcctcacctacggcgttgacctcgtcctcaacgacgtcaagaagttcctttccgacacgcagtccgaaatcctaatcctggagattagaaccgagttcggccacgaggaccctcccgaattcgacaagtacctggaggaacagctgggggagcatctgatccatcaggacgacgccgttttcgggaagaccgtggcggagttgttgccaaagagagttatctgcgtttggaagcccagaaaatcgtcccagcccaaacctgggagtcctctctggagtgcgggctttctgaaggataattggatcaacacggatctgccttccaccaagttcgacggcaatttgaatcacttgagcgagcaccctcccgttacgtcgcgcaaatacttctacaggatcgagaacaccgttacccccgtcgcggataaccccgttctctgtgttaaacctgttacccgacgcattcatggctacgccaggctcttcatcgctcaatgcttcgccaaaggattcgctgataggcttcaggtcttctccacggatttcattgacgaggatttcgttgacgcatgcgctggactcactcatgcaagggtcgaagggaaagcctgaatgcccgaattcaactattaatattgtttgttagggatggatgttttgctttgtgtgttcctttgatctttgatggtgtcgtcactgtactttttttatttatttgttgtaaagctgtatagattttattctaaactgtaaactggaatatcgaaatgcaccctgtccgtttacaaagaatttcatttcctgctgctagtacacagccccaagtcttgtatcaaatgctcatgatagggctcagaatattcaccttcataaaataaattaaattgctttctccaaaaaaaaaaaaaaaaaaaaaaaaaaaaaaaaaaaaaaaaaa

SEQ ID NO: 577 - DNA, 1402 bp, Glycine max
attacatcacctttcagtttttggtttctgattctgcattctgcattcaactttaaggcctattaatattattacacctgtgtttccaccttaattctcttatcaaccagaccagagtgcagagtatagcggcaacataccaggatcattatgacttgtggctgctttggagccaaatcgataaaggcaaaacgcccttcttatgttcctggtgaaattgatggctatccgctagataatgtcaggcaattttctgataaagaactgagattggcaactgataattataatccaaacaataagataggacgaggaggttttggaactgtttaccagggaacattaagagatggaaggcatatagcagtgaagactctctcagtttggtcaaagcagggagttcgcgaatttttgactgaaattaaaactttgtcaaatgttgaacatccaaaccttgttgaattgattggattctgcattcaaggacctagccgtacattagtctatgagtatgtggaaaatggaagccttaatagtgccctacttggcacaaggaatgaaaacatgaaactagactggagaaaaagatctgctatttgtcttggtactgctaagggtcttgcatttcttcatgaagaactttcaccacctattgtacacagagacatcaaagctagtaatgtactacttgacagagatttcaatcccaaaataggtgattttgggctggctaaattatttccagatgacatcactcacattagcacaagaattgctggaacaactggttacttagcaccagaatatgcattaggtggccagttaaccaagaaggctgatatatacagctttggggttcttatacttgaaataattagtggcagaagcagtgccagaaggacaaacgggggaggatcacacaaattcctcttggaatgggcctggcaactttatgaagagaggaaattgttggagtttgtagatcaagacatggaagaatttcctgaggaagaggtaatcaggtacatgaaggttgctcttttctgcacacagtcagcagcaaatagaaggccattgatgatacaagttgttgatatgctatccaaggcaatccaactcaatgagaaagaacttacagcgccaggattcttcacaaacgaaggagaatcctctagaaataactcaaaccctatctcttctattattactattactcaagtgaccccacggtaatgtgaattgcagggttgcaaatggagtaaaaaagtaatgtttgtttcttaaaagattatgtgatagtcttctattattttgtttcaatttttttccaaagaatataatataacatggcatgaaagcaatttggtgctagtgcatgttgaaaccaaaaaaaaaaaaaaaa

SEQ ID NO: 578 - DNA, 1223 bp, Glycine max
aaattgccgaccctggtggataaaaagggtgggaatcggattaggttctgcgtgcacaggcgaaaaccctaatcctgaggcactgaaagtgtgatatggcaagagtcatttcctcttcctgcgcacgcctcgcaatgcgcctcttctccaccaccaccacagccaccgcgttcgccgtcactttacccaaaccctcatcactctccctctcatcgcgtcgattcctcttccctctctcccatgccatcgtccctccctccacccgcgtcgccggaatccggtgccgcgttaaccgcgccggagactcggcgtactcaccgctgaactcggggtcgtcgtcttcgtcgttcagcgaccgcccccccacggagatggcgccgctcttccccggctgcgactacaaccactggctcatcgtcatggagaatcccggtggtgagggcgccaacaagcagcagatgatcgattgctacatccaaaccctagccaaggttctcggcagtgaggaggaagctaagaagaagatttacaatgtttcctgtgagaggtactttggattcggctgcgagattgatgaagaaacttctaataagctcgaagggttgcctggtgttctgtttgtgctgccggattcgtatgttgatcctgagaacaaggactatggtgctgaattatttgtgaatggagagatcgtccagagatcacctgaaagacagagaagggtggaaccacagccacaaaggcatcaggacagaccacgatacaatgatagaacaaggtatgtccggcgcagagaaaacatgcagtgaaggaccaatttgagatagggagagggatgtgatgtacatacactatggaagtactttgttacatgcactattttagtcttgcctttggagacattccatatatttccggtggggtaactcaaatgtttgttgtcaaacttctatggctgtatcagatggacacctcttcgttatcatttttactataaacataatgttggactcttttcacgtcattttttccccaacaaagttgccataggtgatttggttctgatgtgtttcatatccgatttctctcaactggacatggagaagagaattccaaaattgtatttataggttaggtttctcaacgccaacaaaatatcttacttataagttatacgcaagcttagtcatgctttaatctacaaaaaaaaaaaggaagttttt

SEQ ID NO: 579 - DNA, 1358 bp, Glycine max
tcatgcgcatgtcacgtgaagaactccatttggcttagtttaggtgctagtgaagtgagtgagcgagcaagtgaggctccgcagccactttcccaacccaaaacctctcttcagcccataaccatcatgtatctcccccgccaccacatcctcaccagactctccccttaccgccgtcacttctcccactccgccgccgccgtcctccgccccccggagccggagcccctcacctacctcgacggcttccctcgccccgatcccaagcacgacgagaccatcctcgccgtcccccgcgccgactccggcaagaacatctccgcgaaggagcgccgcgcagggcgcctgccgagcatcgtgttcgagcaggaagacggccagcacggcggcaacaagcgcctaatctccgttcgcaccgaccagatcagaaaactcgtcaaccacctcggccgctccttcttcctctcccgcctcttcctcctcgaagttcgctccggcttcgactccgaaaacgacgtcgtcgagaccgttcgcgtcttaccccgcgcgattcatttgaaagctgggacggatgcgccgttgaatgtgacttttattagggctccgtcggatgctttgttgaaagttgatgttcctcttgtcttcagaggagaagatgtatcgcctggactcaagaaaggtgcttctttgaataccatcaaaaggactgtcaagtacttatgccctgctgacattattcctccatatattgacgttgatctaagtgagttggatgtgggccagaagttggtcatgggagatctcaaagttcatcctgctttaaaacttcttcagccaagagatgaagccgttgttaaaattatgggccaaagagtttctgaactacaaaagaaaaagtaactgctttttgtatctttgggggttattgctgctgcactgaagcattttacagctaacatgtatcgttaatggtcattttattagttgattcatggcagcagtgagggacacagttgtagaattccaatgttagtctttttgttagcttccttttctgtgcctattcagttccttctcatatttcaattctttgattctgccgtttcttttggcaaaaatgaatacctaggggatgagaataggaagttgatgagttgagtttatgtatgcaatatcgattgttctgttttgggtcattgggtacaagcagagagggttactaccactgatgtcctcatgtccttgataaataaatacttcactccgcctttctaggactccagtttgaatttaaagtatctgacatttaatttatgaagttataaatttatttacatttagtcaaaaaaaaaaaaaaa

SEQ ID NO: 580 - DNA, 1348 bp, Glycine max
taggccaatgacatttattttttaagaataataaaaaaaaagagcaaacggaaaggaagtgagagagaaaaatcccaagacaaagcaaaagcaatagcccttagaagaagaccctcttcctctcagggaatgggcggaagatggagaaccctctcttcgttctataaccgcataaccacttctttttcttattcttccaaaccccattttccctccttcaaccgctccatctctctcgccgccgccgcaacttctgaaatacccgacccggatcaattcgggttcgtagacccggaactcgatccctgcgtcaaaatcccagtcaaagcttatttcctctccaccagtataaatttgaagggcattcaggctgataatcacagaaacgttgttcctccatcttcccgctcatcttcaaactatgttgctctccgcttctgtgacttcaatttggactccaatggacatgggtttcacatgaaagcaagcaactgtcgttacatggttgtatatcagtatgggtcagctgttttgtttaatattgaggatcatgaagtggaaagttacctggaattagttaagaggcatgcatctggtttacttcaagatatgaggaaagatgattatgcaataaaggagaagccactgcaagttgaggacatgcaaggaggtccagactacatagttctgaaatcgttggatactgatggtatccgtataattggaagtgtattgggacaaagcatagctctggattattttgtctcacaggttgatggtttagttgaagagtttgctggcataaaccgcggaatggagaaaactggaaccttcactatggataagaagaagctacttcagctagttgggaaggctaactcaaatttggccgatgtgattcttaaagttggtctctttgagagatcagaaattgcttggagggatgcaaagtatgctcaaatatatgagtatcttcgggatgagtatgaagttgcccaacgctttggaaacctggatttcaaattgaaatttgttgagcacaatattcatttcctacaagaagttctccagaacaggaaatcagatttcttggaatggtgcattattggtctattgactattgaaaatgttctatccttatatgagatacttggagctacaaatacagtttcttagtagatagtaagaagttgaagctagattaatttcttgtagtaacaattcaagcaaattttgagctaataaaaaaatttcccctttgtatttaaataaaaaaaaaaaaaaaacatatatcccagacccccggcactgtatgaaatttatttgaaattgtgatataattgaaaaa

SEQ ID NO: 581 - DNA, 1913 bp, Glycine max
gacaaaatatagattaaagtggaataaagtcttttttgggacattgcacagctgtaactacgatggattatgaacaataacaatcagtcatgataaaagggaaacctttaccatcgaaagatacacctaggtctcggttgttcagcatgctactgttgaaggcaatcatagttcatacctcacaaaacacagctacaactaaggtgcaaaacgaagtagcagcacgaatttaaatatggaaaaagctccccgagtccacaacactgaacctgtattcaacactacactaattatcatgtccgtcaattacattaggatgccgctgccttcgttgactcttctggcagatcatcttcgtcgtggtatatgttctctgccatctgccatatttgaagtatgttgtcttcggcgacactagcaacaacccaatcttcacatggattccaggaaaagtcagatattttgcttgtatgacctccatgaataaagagcaattctggtggaccatcttcggcatcttctggtgactgctcttcatcaatcctgctaagatcccacaccatgagtctcctacccagacaacaagaagccaagatagtctcattctttggattccagccaacctggaaaacctcctccttgtgagaatcaaagatgtgcagtggagtattgatcttccgcagatcaaacaacttcacagttttatctgtagaaccagtagcaacaacccattcgttaaagggattgaaagccaagcagttaacctcactttgatgagcaacaacagattggacaggcttgctggcagcgggcgttcgaaggtcccatataagtaagtattgatcatcgccaacagagccaaacaagtactcatgcctcaaatgccaagccacatcttccacgacaccttcatgtaccttaaaaatctgcattgcctctaggctcttattcttgggagtgccattaatatcccacaagcaaatctgagcatcatcagaaccgctaagcaagtggccctgcttgaacttactccaggacaaaccatagccttcagtgttatgacccctaagccttaaatcagggttacaggcaccatcaagagggggcttagagggatgcttgctataatcgaagacataaacctcagcactaacggtcttggtggcaatgatgaaggggttctggggcatgtagcgagccctgttaacctcaccctcatggttgatctgctggatgatctggaccttgccattggcacagccaaagccaccaatgtcagggcggtcatcatcatagtggcgggcatcattctcagcatcatcaagagggagttggacctgcgccagcatgaggtaattgggctcattttcagaagtgtgggtgcccaagatgaccttctggagggagtagtctttgccaggtggttcatggcggtcaggaagccactccacagtgagggaaggccactcgagggcatgcgtaatgaccagatcatacaagaaaggactgttcttcttccatatcttgtactcttcattaatcagtcgttcctcaatctcacccctcatctcttcctcctctttccccatccacactcagcctattctaacactaaccacccttctctctgcaatcccaacaatcacaatcttttaaaattgcaactaattatcagttctacttgggggcttgagttggttcactctgtttatttactcccctcacccgaacgattcggtctccgatgctgaaatccttctgctcgctcagaagaaacccgagaattaaggtcacggtagtaggaactaggaactgcaaagaccaagattgagaattgaaccctaactaagatgaaatgtacacttacgatattgaaaacaagtgggggggggggccctccgtgccggactcga

SEQ ID NO: 582 - DNA, 1973 bp, Glycine max
tcgagtcagctacgtaggcccccctggagagctagaaagtagagacacacaatccaaaagagtcttattgaagggtgagggtcaccttggaaatccatccatgccatggctcccactcttacatccaattcatcttttttaagcaccagtcctcattcaagggtgagcctccggaatccaaggctgagagtctttgccaagaagtctggatcattcccatcatttggactaggcaagcccaaagatgattcttcttctgctgaagaaaaagataactcatccaattccaacccctttcgtttggactttggaaagatacccgatgtaacgtctttgatcccagttccaagcaacacttctgcgccaggcttttcttttggaaacacaaggcgcaaggacccttcaacagtgtttgttgccggcgcaacggggcaggctggtattcgcattgcacaaacgttgttaagggaaggtttcagtgtacgggctggagtccccgaacttggttctgcccaagaacttgctcgtctcgctactcaatacaagattatatcaaatgaacaggcaaagcgtctgaacgctgtgcaatcaagctttgacaatgcagacacaatagccaaagcaataggcaatgccggcaaggtggttgtcaccattggtccgacagagaacggtccaaccgcagaggtatctgcatcagatgccttgcaagtggttcaggcagcacagctggcaggagtaggccatgtggccattgtctacgacaagagcagcgctggggcctcaacctacaatgtactggatggcctctcatccttcttcaacaacctcttctccaggtctcaaccgttgaccatacaagagttcttgcagaaagtcattgaaacggatgtcaagtacaccttcatcaagacaagtttgactgatgatttctcaccggagagttcctacaatgtggttgtcttgggcgaaggaagcgccagtgcaaacgactataaagtagcaaagtccaagatcgcatcgttggtggctgatgtcttctccaacacagaggtagcagaaaacaaggttgtgaaagtgcactcggatcccagtgcccccttgaagcgtgtagatgaacttttcagccctattcctgaggatggaagaaggaaagcctatgctgaaatgcaggaaaaagcaaaggcagaggaagaagcaagagtggcagctgaaaaggcccgtgaagcttctgaatcagcaaagaagttggaagaagaggtgaaaaggctttcacagcaagaaacacgggctgcaagtctggctcaagaggcccaagagaaggcagaggctggcggggcttcagttgaaaacctcttgaacaaggcaaaagactttggtgcagggttttcctgggaaaagttgagctcacagattactacttcaatccaaaagcctgatgaggatgagaaaccaaaggtgcagctagccactgtaaggggacaggccaaggctcggaatctcgcgcctaacaaagcagtggtcaaacaaacacctcagagaagtgcagctaaaccaaaggtggaaaaaccaaagcagacagagacaccaaaggaggtgaggaaagtatttggtggcctgttcaagcaagagactatctatgttgatgatgactagtggaagcggaacatattatcttgcacggcataaaactatgttgtttgagtctgtgttaacgtagataatttggttgcatgtgtatggtcttgtaaagttctatgtttgaagcagaatatttatgtagttgtactggttcagaaccctattttcgggggaaaacaataaaagggttttcccttatcttctctcctctcttgctaataattaatattgtctttggcaacggtcttgccttgcttcattaaaaaaaaaaaaaaaaaaaaaaaaaaaaaaaaaaaaaacaaaaaattttaaaaaaaaaaaaaaaaaaaaaa

SEQ ID NO: 583 - DNA, 2400 bp, Glycine max
  misc_feature (688)..(688): n is a, c, g, or t
cccctagagaaaaagatggctcatccaattccaacccctttcgtttggacttcggaaagatctctctgatcccagttccaagcaacacttctgcgcctggcttttcttttggaaacccaagacgcaaggacccttccacagtgtttgttgctggcgcaacggggcaggctggtattcgcattgcacaaacgttgttaagggaaggttttagtgtacgtgctggagtccccgaacttgcttccgcacaagaacttgctcgtcttgctgctcaatacaaggtaattgtcaatgtatcatctaatcgtattagtctctctagtcgcctcatcgtaaaattaagcttttttctatagtaaattatatattttcttttcatacaaaattatacttttaaaagaagaatatgatcaaattggccattacacaaaaacattgtagcaagtttactgtgatgcgggtttaatttacaacatcataataaaatattttaattgctccagtcagtttagttttagagagttttggtgttcttttttacttggtcaatgaaattgtgatgtgtgtcctcactactcgaatataatggtaatgtaagattcctattttaaacatttcagttataatatgatggcgtatggtatttctaagaatatcgcatcacaaactctattgttagttgaacaaaaanaattatcaatgccatgtaaaataattaaaaaaactatgcaaatcagacctcgggactgaaatgcaaatttaaaataatattaagactacttgatgcattggatctgatgtggatgcaaagcatattgattcaacaagagcatctccaatagtattcatttaagcaatccactttagattcttaactgggtttaaagtgagttccagtatgtcagattacatttaaacgacttactcacattttactccaataccaacccattaattgaacctttatgaagtttctattttggagtgtattccggatactaatgcatggtgtacaacaacacagattatatcaaatgaacaggcaaagcgtctgaacgctgtgcaatcaagctttgacaatgcagacacaatagccaaagcaataggcaatgccagcaaggtggttgtcaccattggtcccacagagaacggtccaaccacagaggtctccgcatcagatgccttgcaagtggttcaggcagcacagctggcaggagtaggccatgtggctgtcatttacgacgagagcagcgccggggcctcaacctacaatgtgctggatggcctctcatctttcttcagcaacctcttctccaggtctcaaccgttgactatacaagagttcttgcagaaagtgattgaaacggatgtcaaatacaccttcatcaagacaagtttgaccgatgatttctcaccggagagttcctacaatgtggtcgtcttaggcgaaggaagcgatggtgcaaacgactataaagtagccaagtccaagattgcgtcgttggtggctgatgtcttctccaacacagaggtagcagaaaacaaggttgtgaaagtgtactcggatcctggtgcccccttgaagcgtgtagatgaacttttcagccctattcctgaggacggaagaaggaaagcctatgctgaaatgcaggaaaaagcaaaggctgaggaagaagcaagagtggcagctgaaaaggccaatgaagcttctgaatcagcaaagaagttggaagaagaggtgaagaagcttttgcagcaagaagcacgggctgcaagtctggctcaggaggcccaagagaaggcagaggcagctggggcttcggtggaaaacctcttgaacaaggcaaaagactttggtgcagggttttcctgggaaaagttgagctcacagattactacttcaatccaaaagcctgatgaggatgagaaaccaaaggtgcagctagccactgtaaggggacaggccaaggctcggaatcttgctcctaacaaagcagtggttagacaaacgtctcagagaagtgctggtaagccaaaggtggaaaaaccaaagcaggcagagacaccaaaggaggtgaggaatgtatttggtggcttgttcaagcaagagactatctatgttgatgatgactagtggaagtggaatatattattttgcacggcataaaactatgttgtttgagtctgtgttaacgtagataatttggttgcatgtgtatggccttgtaaagttctatattttgaagcaggatatttatatagttgtactgtttcagaaccctctgttttctggggaaaacaataaaagggttttcccttatcttctatcctctcctctcttgctaataattaataatatctttggtcacggtattgccttgcttcataaaaaaaaatttgaaa

SEQ ID NO: 584 - DNA, 2265 bp, Glycine max
  misc_feature (7)..(9): n is a, c, g, or t
  misc_feature (11)..(11): n is a, c, g, or t
  misc_feature (15)..(15): n is a, c, g, or t
ccggaannncngggncgacccacgcgtccgaattcgagcggccgctttttttttttttttttttttttttttttttttaggctctgtgtgtgcagatggaattctcgtttggtccccgaagatggttgcctaaagaattactgcaagacagacgtgctgatgatgatgttggtaacaatgaaaattatgcgctgggattgcatgctcctggtttttttgataaaattctaaatgttgacaactgcttactgcaatctcatcctgctaataaggtacttgcagctgtccaagaatgttggagagatccacaacttggtttttctccctacagtgttcattcacacaagggatttcttaagcatttgatgctgagaactggaagggatgtaacaacttatcagcctgaagttatggtcaactttgtgacctcttcctacaagcctgagctgttgaagttcctagttgataaagtttccgtatttcctgaagtggtaagtgtcattaataatgtaaatacttctgttggcaacacatctgttggggaggaagaatacactttgtatgggaaatctagcattacagagaccttaagagggcttacattccaaatatcagccaactctttctttcaaacaaatacttatcaggcagaggttttatacaagcttattagaagattgtgctggagtcaagggtgacgactcagaaattgtccttgacctgttttgtggaacaggcaccataggtctgacgcttgcaagaagtgttaggcatgtttatggctatgaagtagttcctcaagccatcacagatgctcgtcttaatgccaagataaatggaatacaaaatgcaacatttgtccagggagatctcaataaaattgatgagaattttgggaagaattttcctaaacctgacattgtcatttcagatcccaatcgcccaggaatgcacattaagttgattaaattcctgctaaatcttagggcacctcgcatagtgtatgtctcttgcaatcctgccacatgtgcacgcgaccttgattatctgtgccgtggtggggtttgggccaggtggaacagaatataaaaggatgttacaagttaataagcctacagccagttgacatgttcccacacacacctcatattgagtgcgtttgccttctggagcttcagtaatctgtgataaattaaaactttccatttcaaggggattacaagcttaatacaagatgcaagtcaagattgggtcttcaaggtgatagataggaaaactcatacttttatgctgcaaagtgtgcctgatgctttgcctacccaaaactactgcatcagtgtacaaattacaaaatcattatgaatggtggtagcattggcaagcatgcagggatcacattgttgcaaccttgcaaaagtttctcatacatttccattcatgcggagcccccaaaaggttttggattcatgcttagcaacctccaaatgtggattattgttgagtgttgatcccacttcatatgatatgacaagttcatcatgaaatagatcatatgctacacatgtcagatccttgttgatagggaagtaactagcagctggcttcgagggccagtacctccaagaagaagaaggaaaagaaggcaagtattttttcattgatctgcagcttattacatcggtatatttatactgtgattctctaacagaattgtgattatgtgctagggaacattacaataacagaattggttatccttatctcctagaggtagacaacaatattctgcagatcccttgctgccagctctgccataacaagcaacattcacacataatccctcaggtacgcaggctttgtgattgttctcttggttctctcttctagttgcacccttgtcttcctttcttcactagaccccctgactgatgcttcctgcacccctgtttcgctatcacttgtgtacttgaggtggaaatgcaagtacatcttgaaacattagatgtttaactgtttgagtaaacagtattcagcgtgcatataaatggatcatattcttctcttcatttctttatctttagaaagaagactaagtgctatttttgtggctgtattgactggggtacgctttcgagtaattttgcatgctgtatttgtaccgttattagtcctgtgaaaagggggaaagtgcccaagaatgccattggaagaagttatcaagagggatctcatggtgaataatatattttgggatttttttttttt

SEQ ID NO: 585 - DNA, 1132 bp, Glycine max
caaaagggatccatggccaaaagtttctgataatgcaaaagacctagtgaagaagatgctagatcctgacccgaagcggcggcttactgcacaggacgttttagatcatccatggttacaaaacgcaaagaaggctcctaatgtttccttaggagaaactgttagagcaaggctcaagcaattttctgtaatgaacaagcttaagaaaagagctttaagggtgattgctgagcatttgacggtagaagaagctgccgggctaaaagagggattccagcttatggatacaaacaacagaggcaagattaacattgatgaattacgagtagggttgcataaacttggtcatcaagttcccgaatcagatgtccaagctcttatggaagctggtgatgtagatggggatgggcacctagattatggagagtttgtagccatttctgttcatctgagaaagatgggaaatgatgagcatcttcgcaaagccttccaattttttgatcagaacaaaagtgagtatattgagattgaggagctgcgtagcgccttatctgatgatcttgacacaaacagtgaagaagttatcagtgcaattatgcatgatgtggacacagacaaggatggaaggataagttacgacgaatttgctacaatgatgaaggctggcacagattggagaaaagcatcaaggcagtattcgcgagagaggtttgccagtctgagcctaacgttgatgagggacgggtcattgcatttaaacaatgaaaaacaataacggtagatgactactttagaaatgccaatttttactttggaaaggaaaattcgataaagaagtctattttttaattttaactctcttcattgtaattcttttctctaataccccatttttgggtgaaaaaagataggatattggccccagcagtgttgtctgtgatttgaagtatgtctttttttggtttgttgaggttgtggtaggagataggagagagggttggagggactggacattgaacaagttttcatttgtggctgtaaatatgttaaattatcaagctttatgtgtaatatgccattttgcacaaaccttgccctaaaaaaaaacagtgagaaaatgttattctataac

SEQ ID NO: 586 - DNA, 2478 bp, Glycine max
ccttcgcttccggtttactcagctacgtaggcccccccccccccgaaaaacacacacacttgctagtcccttcacaatcacaaggttgaagaagacatggccgaggatcgcagcctccctccacgcgcctccattccctccgccgataactccgtttgggccgatgtctcccctctcctccaagccgcctgccaagatcttcaagagggagagcttattcatggagacaacttcaatctttttgccgccatgtccgcattggagataatggacccgaagatggattctggaattgcttgtacatactactctctcgatgaagccattgagaatggtgttgctcctgttcctattagtgcggataaaactactgatgttcgatgcatgattgacatcatggaccatctacttgcctgtgaggcaacatggcacaagggtcattcattggcacaaactgtttattcttgcctctatcttctacgaccggaaagaacatcgtcgcatgctctgttgcactcttactgtaaagtcatacgtgcaacctgcaaagcaattctttcagttgtctcagaagctcgaacacatgaagaagaggatctatttaccatggcatatggccttcctttgagtggaaatggggatgaaaagtgtttatcaatgctaaatgcagttgaagaaacaatatctcgccaattgcgtgcttgtaaggcttcatcgtcaaaaagaagagtgtcagaagatgttgagccgcttcaaaataatcctgatctggaagaaggctactgcaaagcgctgttgtgtcgattacgttttcgtaagcatttttaccatcttttgatgtctatgaaacgaccccaaggaagaggtttggagttggcaagaaaacacatagcttcatgcatttcagagattgattacattcggaaatcttcagaatttcttagagctaatgctcatggaatgtctgaacaaaacatagacaatacaactgcatctggttgtcaaccaattggctttgatgctagtttaaactgtagattatctgccccaacaccaccccggtcaatcaaaattctttctttggaaaaggccctcgaatatttcatgaaactccttcaagacctggacgttatatgttcatactcattggacccatcattggaagctgctttactctttgtgattaaattccagaaatctcaacctgatttggttgctagagcccatcttcagcttctgctggtccaggacgggaaactctatggtcgggatcctatgttttctatgatcactagagctgctggattacctgaagtcacagagaatcatgacattcagaaaaatgaatttatggtgcaactaggacagttggtgataaatttactcaaaattctttgtacaaatgctgcatggcaaaggcgtaagctagggaaaatgttacaagactggcgtgtcacctatgtacagctggagatggcttttaaaggagagtttgcagaagcctcaaaaacttcaaacaataagaaaatatgtttcaaaatataccaacacattctcgcatgggtagaagagcaaacttattggatagcttttcgatttctcaatttgggatttgaattggagctctactctgtccatgactattgcatggtatactggtatatttatgttgtgttgatcaagcttgcagagaagaaacatctccggatggcaatgagcagtgactctgctaagaagaagacaaagaaaaaaagggattcttttaaggatggggaaatggattatcagatcccggcagctgttttgtttcttcaaagccaaatatatcttgctgaaggtctaagcatgctatccaattatttttctagatgtttgctgctttgaggaatgagcgcagaatagttccactgcaaagccctttcaacacagaacatgagatatttattcagcaattcgagcttttacagaaagcttgcgttcctgatcacatctcatatgtgacattcaaggagtcaactatgcatgctaatttctctaccctagccatctgtgatcacttcaaggaagctcagaagatagcaaaagaggtgaaaagtagttttgccaatgaccctgacacgatggccgagctgcgtagagtagagcaagtagcagaacgcaacagcattgcattgaatgtttgtcgggcaggagcccttgatccaaagttgaagactttttttacattctgtcatcatcctttctatgctactgctattgtgaagagatcctgatagtagattcaaccaattttgaaacattttatagggtgttaggagcaaatgagttgtggcattagcagttgtaacactagtatttattcaaacaatttttgtggttcatattattagattgaaattgtaatttttttatcataaggaaataaatacaaatatttatggtaattttccttccaaaaaaaaaaaaaaaaaaaaaaaa

SEQ ID NO: 587 - DNA, 1088 bp, Glycine max
tatggctggcgtggtcgtggccgaacacaaaccacaacggtccgggtgccccagtattatctctctctctctaaaaccacaaattacaaaatcccctcatattatctctctctctcttaaaccatcatgtcctccaccgcgcctcccgtcctccccatctccaactcccaaaccaccgcgggaaccaccggtgcaggcggcggcgccatcgaggctccggccaacaacccggccttccgcgctttcatcaacaacctctccaactccctccgccacggcctcgaccagcgccgcccctggtcggagctcgcggaccgctcagcgttctcgaaacccgagtccttctccgaagccaccctccgtgtccgcaaaaacttctcctacttccgcgtcaactactacgctgtcgtttcactcatcctcgcagtctctctcctaaccaatcctttctctctcatcctcctcgttggcctcctcgcctcttggaccttcctctacctcttccgtccctcggatcaacctctcgtcattctcggccgaacattctctgacttcgaaaccctagccctcctctccgccttcaccgtcttcgtcgttttcctcaccagcgtcggatctgtcctcgtttcggctctgatgctcggtgtcgccgtcgtttgcctccacggcgcgttccgcgtgccggaggatctgttcctcgacgatcaggagaattctcaggctaccggattcctctccttcctccgcggccctgcctccgccgctgccgccgccgccgccgccgccgccgctgttcccaccgttgcctcacgcgtttaggtaaaaaataaaaaatctcagtgaaatcgtcagatctggtgatgtttctccccgatctgatgagttttgacgcatggaggaagaatgaatcttgaaatgtagtttgtattttgttttcggtttttaaaattcctttatctgtctaaacgaattttattatacgtaggctgaataagaattatgattacattttgtatgcctctttggggttttttattttgttatataaattattcgctaatctctgatggatctgtgtgaattttatc

SEQ ID NO: 588 - DNA, 1042 bp, Glycine max
cacgtgaaaatctcctagcattctctctctctctcaacccacaagaatccctccctttctggctttctctctctaaaactatcatgtcctccaccgcggctcccgtccttcccatatccaacccccaaaccaccgccgcaggcggcggcgccatcgaggctccggcgaacaacccggccttccgcgccttcatcaacaacctctccgcgtccctccgacacggcctcgaccagcgccgcccgtggtcggagctcggggaccgctccgcgttctcgaagcccgagtccttctccgaagccaccctccgcgtccgcaagaacttctcctacttccgcgtcaactactacgccgtcgtttcactcattctcgcagtctctctcctcaccaatcctttctctctcatcctcctcgtcggcctcctcgcctcctggaccttcctctacctcttccgtccgtcagatcaaccactcgttattcttggcagaactttttcagatttcgaaaccctagcgctcctctccgccttcaccgtcttcgtcgtcttcctcaccagcgttggatctgttctcgtctccgctctcatgcttggcgtcgccgtcgtctgcctccacggcgcgttccgcgtgccggaggatctgtttcttgacgaccaggacaactctcaggccaccggattcctctccttcctccgcggccctgccgcctccgccaccgctgttcccaccgttgccgcacgcgtttaagtaaacaaaaaaaaaaagatctcagcgaaatcctcagatctggggatgtttctcccgatctgatgagttttggtgcctggaagcagaatgaatcttgaaatgtagtttctcttttatttttggtttttaaattcctttatctgtctaaacgaattctattatacataggatgaataagaattatgattacattttgtatgggtctctgttattttgatattgttatatacagggatctgcaaatctcgctgatgaatctatgtgaattttctcaattttattcaaaaaaaaaaaaaaaa

SEQ ID NO: 589 - DNA, 1038 bp, Glycine max
ccccgtcgacccacgcgtccgtaaaatcacaaattacaaaatcccctcaggttatggtggggggtctcttaaaccatcatgtcctgcaccgcgcctcccgtcctccccatctccaacccccaaaccaccgcgggaaccaccggtgcaggcggcggcgccatcgaggctccggccaccagcccggccttccgcgctttcatcaacagccgcgccaactccctccgccacggcctcgaccagcgccgcccctggtcggagctcgcggaccgctcagcgttctcgaaacccgagtccttctccgaagccaccctccgtgtccgcaaaaacttctcctacttccgcgtcaactactacgctgtcgtttcactcatcctcgcagtctctctcctaaccaatcctttctctctcatcctcctcgttggcctcctcgcctcttggaccttcctctacctcttccgtccctcggatcaacctctcgtcattctcggccgaacattctccgacttcgaaaccctagccctcctctccgccttcaccgtcttcgtcgttttcctcaccagcgtcggatctgtcctcgtttcggctctgatgctcggtgtcgccgtcgtttgcctccacggcgcgttccgcgtgccggaggatctgttcctcgacgatcaggagaattctcaggctaccggattcctctccttcctccgcggccctgcctccgccgctgccgccgccgccgccgctgttcccaccgttgcctcacgcgtttaggtaaaaaaaaaatctcagtgaaatcgtcagatctggtgatgtttctccccgatctgatgagttttgacgcatggaggaagaatgaatcttgaaatgtagtttgtattttgttttcggtttttaaaattcctttatctgtctaaacgaattttattatacgtaggctgaataagaattatgattacattttgtatgcatctttgttgttttttattttgttatataaattattcgctaatctctgatggaaaaaaaaaaaaaaaaaaaaaaaaaaaa

SEQ ID NO: 590 - DNA, 899 bp, Glycine max
attcacagcaatcacaaacacaactaagaaaccaaaccaatcagcgttgttccaaagaaactccacatgtcacgtcgcccccacgcgccgccgccgcccccgccgccgaggccactctacaagcagcagtcgtggtcgccggacacgcttcgcgacgaggcctggcagcggcggaaggacaacagccaccacatcagcggcgacaaccaccgctgcagccaccggctgagcaagagtctctcggaggacgacttggacgaactgaaggcgtgcttcgagctcgggttcgggttcgattcgcccgaaatcgacccgaaactatcgaacacaatccccgctttggagttgtaccatgccgttaacaaacagtacaatcaccacagcttgtctaggtcatcctcttcgtcttcccttgtctctgacagcgacattgctagccccaccactatattcaatcctggggatgatttggctgcgaagaagactcgtttgaagcaatgggcgcaggtggttgcttgttcagtgcgggaatcttcttcatcttcttgttcaaacccttccgaccaagttaattactagtttttgaatacctcagacatgtaccagaagcccgcaggaacaagaccattgtgaattaaattggactctgatttgttcatagatattctatggtggtttcttttaagttttttttttttataaaagatttgttatttatgtttcacaatttgatgttgactaatgtaatatagatgtggctgtgtacatttgcggactcaaacattagttgtgttaatttgagttcttttgcaagtggctagatgtccgaggaggctgaatttaggttgattgactggttggtgattcttttcaatacaaatggtagcattgatgtgttt

SEQ ID NO: 591 - DNA, 795 bp, Glycine max
cctcgagattattctgcaaaaccaaatcaagaaggaacagagaaagagagaggagaggcattgtaatcgtgacctctcaagcttctttcaaagacagagaagaaagaagaaaacaatctcaacaaacacaaacaaacaagcaaacatcaatggcaaactcgtatacgtggctcttcctcgcgatttctgccaccctcttgcttcttctgtcttcgtcgccgacagcggacgcgggagcgctgggcatggaaatgacatggataccctccatgcccatggaagaggagttccagctggacagcgagatcagccggcgcatcttagccacgaccaagtacatcagctacggtgcgctgcagaggaacactgtcccctgctctcgccgcggagcctcctactacaattgccagcctggcgctcaggccaacccttacagccgtggctgcagtgccatcaccaggtgcaggagctaaattatatatttattattattctcctttttttttaaaaaaaaatttcatattcgggtttcgttgtatacatgaccaagattgaatgtttatgtattattgtcctgttgccgataaataattattgaatcaatgtcagtgattcatcattttttttttatttccttcttatccactggtttttttttttctattttttatttcttattttggctttttaaaataaggaggtgtgtactcagaataaataaagtgcacttataatgttgattttctgatcaactgaatatgtatgcaacaaaatcttttgttctaaaaaaaaaaa

SEQ ID NO: 592 - DNA, 1279 bp, Glycine max
cccacgcgtccgtacggcgtcagctacgtaggcccccccgaaggtagatcccaatgcttttgtagccaggcgatcaaagaattcaacattgccagatcacagcccccttccagatgctttctgtaatgtggctgatgaagatatgtgggtgaaaatgaacaatggttatattgcggaccttgattcccttcaaactactcctcccaccaaccgaaaagttcagtcattcccgacaagtgatgcaactgttggttgtacaagtgaaattgagaagtatgaacgagaggttcaagatttgaggaaacaactggaactagctaaagaaagaataaatgaactcgagcaaaagcattcagaagaagtgccatcaagcaagcaattaatcgttgagacacccaaacatcaacaagaaacacgactaactcatgaattacctctgaggttatctgaatctgtgggaaacttcaaagatagctttgaggaggctttgtcagtaatgcagagatttgcatcgggtggcacattatcaactgcgaagatactttcaaccatgagtgaaattggagatcatctatttgcaactttggaaggtcattttgcagtgaatacgggtggtgaaaggtcttccactgggaacggtactctaatcaatgaacaacaaaaagtgttttgtgagaggattgataacataattacatcactggagttatccgaaagctcaataacagaaggacaggagtggaaacataagtgcagctgtgaacccaagggctctgatttgggaggtgaaactgctcagctacgtaggccccccccccatgaaaacctagaaagggagttactactgttgaaggtcgaaagagactctttgctgcagaagttctctgaatcatcagagaaactatcaatggtttccagccaaaaggaaaatgctttgaaagatttaaatactgaagtgaagagaaggaaaaatctagaaggggaagttaagcagattgctgcagcttttgctaatcgtcagaaatcactcatttctttccatagtgatcttaaaaccaaaattgagaattggagagcccagactccaatcttggtacccaaatcttttgggtttcaggactagatatgttgtatatcttgaatgtttgagtcttcagtagctcatgtattaaattaaatttattatacaattattttattctaggccaaaaaaaaataaaaaaaaaacaagtttgtacttatttcactatttagcaaggactgatcatagcacacctac

SEQ ID NO: 593 - DNA, 1531 bp, Glycine max
tttatttctctctttcctttatcaatcagctacaactgactcacacacacactctctctctctctctagtacctcctcctcctcctccttcttcttcttccctggcatcggatccagatccaaatccagtttaacaaagaaaatgcagtacaagaacctgggccgatcgggactgaaggtgagccagctctcctacggggcgtgggtgagcttcggtaaccagctagacgtgaaggaggccaaggccctcctccagtgctgccgcgaccacggcgtgaacttcttcgacaacgccgaggtctacgccaacggccgcgccgaggaaatcatgggccaggccatccgggagctgggctggaagcgctccgacattgtcgtttccaccaagatattttggggtggacaggggcccaacgacaaggggctctcccgcaagcacgtcgttgagggaaccaaggcctccttgaaacgcctcgacatggaatacgtggatgttctctactgtcaccgcccggattcctctactcccatagaggaaaccgtgagggccatgaaccatgttattgataggggctgggccttctactggggcactagcgagtggtcggctcagcagatcaccgaggcgtgggctgtggctcagagattggaccttgttgggcctattgttgaacagcctgagtataacctcttgtccaggcacaaggttgagtcggagtttcttcctctgtacaccaactatggcacaggcctcactacatggagtcctcttgcctctggagtgctcactgggaaatataagaaaggagttataccaccagatagcagattcgctttggaaaattacaaaaatctggcgtcgaggtcgctggttgatgatgtgcttaagaaggttgatggattgaagccaattgcggaagagcttggtgtgccgttgtctcagcttgcaattgcgtggtgtgctgctaatcctaatgtttcctcggttatctgtggtgctacaaaggagtctcagattcaagagaacatgaaagcaatcgatgtcattccattattgactcctgttgtgatggagaagattgaggctgttgttcaaagcaagccaaaacgccctgaatcgtaccgatgaatggaagttttttttaaggcggacacatgcattagatgggaggctccatcatccctgagcaccggagtggaaattcatgttgacatttattggtgtggttgatttgatttcttgagactttgctttttcttattttttcttcctgagactgattatgccttattttttatgggttcaaactttccaaattgattttggaagcaaaggattaagatcttggatttttaggtttacattgttatcattacatgtttttgcttctaggtttggttttgcccccctatgatccatgtatttctttcttacttgcttaacctagttgggattaaatgtctcattgtgatgcttaagcatgcatttttgcttaaaaaaacccggattaaagatctcattgtgatgctt

SEQ ID NO: 594 - DNA, 1592 bp, Glycine max
cccatctcgatcagtttacacgtagaaaaaattcccccgcgcgcccgcccccgcttcatcttttttgtcactcgcacacaccctttctttccgttctcaaactcactcacactctctctactgctagattcgacgattcccgaagtgccttcctcctcctcctccttcttcccctctaatcggatccaaatccaaatccaaatccagttcaaagaagatgcaatacaagaacctggggcgatctggcctgaaggtgagccagctctcctacggcgcgtgggtgagcttcgggaaccagctggacgtgaaggaggcgaaggccctcctacagtgctgccgcgaccacggcgtcaacttcttcgacaacgccgaggtctacgccaacggccgcgccgaggaaatcatgggccaggccatccgggagctcggctggaagcgctccgacatcgtcgtctccaccaagatcttctggggcgggcagggccccaacgacaagggcctctcgcgcaagcacgtcgttgaggggaccaaggcctcactgaaacgcctcgaaatggaatatgtcgatgttctctactgccaccggccggatacctctactccgatcgaggaaaccgtgagggccatgaatcatgttattgataggggctgggccttctactggggcactagcgagtggtctgctcagcagatcaccgaggcctgggctgtggcacagagattggaccttgttggtcctattgttgaacagcctgagtataacctcttgtccaggcacaaggttgagtctgagtttcttcctctgtacaccaactatggcacaggcctcactacatggagtcctcttgcctctggagtgctcactgggaaatataagaaaggagttataccaccggatagcagattcgctttggaaaattacaaaaatctggcgtcaaggtcgcttgttgatgatgtgcttaggaaggttgatggattgaagccgattgcggatgagcttggtgtgccattgtctcagcttgcgattgcgtggtgtgctgctaatcctaatgtttcctcggttatctgtggtgctacaaaggagtctcagattcaagagaacatgaaagcaatcgatgtcattccattactgactcctgttgtgatggagaagattgaagctgttgttcaaagcaagccaaagcgccctgaatcataccgatgaattgaagtttttccatggtggacacatatatgcattagatgggaggctccgtcatccccgtgcacttgagtgaaaattcttgttgaaaattattggtgtggttgatgtgatttcttgggacttcttttctttgtcattttttctttctggcactgattatgccttctcttttatgggttcaaactttccaaattgattttggaagcaaaggatttagatcttggattctaggtttacataggtcttccagattaatacatacccattgtttggatagttttaatattttttgaatatgtcaaactattatttggattttgagagctcaatccaaaatatttttcttgaaccatctaatgggacaaggcatggttattttgatccctgg

SEQ ID NO: 595 - DNA, 1507 bp, Glycine max
tcgagttaccgctgcgagaagacgacagaaggggtatgtccgccgtgtcttcatcatggacaactgtgaggagttgatgcctgaatatcttagctttgttaagggtattgtggattctgaggatcttcctctcaacatttctagagaaatgctgcagcagaacaagatcctgaaagtcatcaggaagaacttggtcaagaagtgcattgagatgttctttgaaattgctgaaaacaaggaagactataacaagttttatgaagccttctctaagaacctgaaacttggtattcatgaggattctcagaacaagacaaagctagctgaattgctcaggtatcactccactaagagtggtgatgagatgaccagcctcaaggactatgttaccaggatgaaggaaggacagaatgacatctactacattactggtgaaagcaagaaagctgtcgagaattcccccttccttgaaaagcttaagaagaagggatacgaggttctctacatggttgatgctattgatgagtatgctgttggccagcttaaggaatttgagggaaagaagttggtctctgctaccaaggaaggcctaaaacttgatgagagcgaagacgagaagaaaaagaaggaagaactaaaggataaatttgagggtctttgccatgtgatcaaggatgtgttgggtgacaaggtggagaaagttgtggtgtctgatcgtgttgtggattctccttgctgtctggtgacaggtgaatatgggtggacagccaacatggaaaggattatgaaagcacaggcattgagggacagcagcatggctggatacatgtcaagcaagaagacgatggagattaaccctgagaaccccatcatggaggagctgaggaagcgagcagatgctgataagaatgacaagtctgtgaaggatctcgtgctcttgctctttgagactgctcttctaacttctgggttcagccttgatgatcccaacactttcggtaacaggattcacaggatgctgaagcttggactgagcattgatgaagatgctggtgaagcagatgctgacatgcctcctcttgaggacgctgatgcagatgctgagggtagcaagatggaagaagttgattaaatctgacttaattgcctgttacgtttttagaaacaatgattggagaaacagtctttttactatgttttatgttttttgaattttcgaaattttggaacgttggctagttaggtgccgtatgtagtagtttctttatggtaaatttgtgtccgctccctggccaatgaatttgtgctttcttcgtataatcgtgtatgctgattgcggaagtttcagttcgggaatgaaaatgtttttactttagtggaattaatcactttgaggtggggataagaggatgggtctaatgacacaatgctgagtttaaaaatgtcattcctaattaacgttaagtgattttttaaaataaaaaaaaaaaaaaaaaaagaagaagag

SEQ ID NO: 596 - DNA, 1412 bp, Glycine max
ggctcgaggaagaagccgagccacctcaaacggtatgtccgccgtgttttcatcatggacaactgtgaggagttgatgccagaatatcttagctttgttaagggtattgtggattctgaggatcttcctctcaacatttctagagaaatgctgcagcagaacaagatcctgaaagtcatcaggaagaacttggtcaagaagtgcattgagatgttctttgaaattgctgagaacaaggaagactataacaagttttatgaagccttctctaagaatctgaaacttggtattcatgaggattctcagaacaagacaaaacttgctgaattgctcaggtatcactccaccaagagtggtgatgagatgaccagcctcaaggactatgttaccaggatgaaggaagggcagaatgacatctactacattactggtgaaagcaagaaagctgttgagaattcccctttccttgaaaagcttaagaagaaggggttcgaggttctctacatggttgatgctattgacgagtatgctgttggtcagcttaaggaatttgagggaaagaagttggtctctgctactaaggaaggcctgaaacttgacgagagcgaagacgaaaagaaaaagaaggaagaattgaaggagaaatttgagggtctctgccatgtgatcaaggatgtgttgggtgacaaggtggagaaagttgtggtgtctgatcgtgttgtggattctccttgctgtctcgtgactggtgaatatgggtggacagccaacatggaaaggattatgaaagcacaggcattgagggacagcagcatggctggatacatgtcgagcaagaagaccatggagattaaccctgagaaccccatcatggatgaactgaggaagcgagctgatgctgacaagaatgacaaatctgtgaaggatctcgttctcctactctttgagactgctcttctaacttctgggttcagccttgatgatcccaacactttcggtaacaggattcacaggatgctgaagcttggactgagcattgatgaagatgctggtgaagcagatgctgacatgcctcctctcgaggacgccgatgctgatgccgatgctgagggtagcaagatggaagaagttgattaaatctaacttaattattgatttgcctttgtgtttttagaaacaatgattggggaacagtcttttactatgtttatgttttgaattttcgaaattttggaatgttggctagttaggtgccgtttcctggattagtagtgtatttagtttctatatggaaaatttgtgtcagctttctggccaatgaatttgtgcttttcttcgtattatcgtgaatatggtgattgcagaagtttcagttcggaatgaaaatgttttgcctttttagttatacggaa

SEQ ID NO: 597 - DNA, 1985 bp, Glycine max
tcgatcagctacgtaggccccccccccataatgactaaaagcctcctctcttcttcttctgcttaggattttactctcttcgcaaattcattttctacattcccctctctctcgaatctcaacaatgccttccgaaaccctagaaaaccagaaacctcaagtggaagaccaacaagacctagctgaagacagccacacagagcaagaagataattcggagatgaaggagattgatggcaaaggcgaagaagagaaggagaaagaggaagaggtagaaggcgatgaagaaaatgaggagaaggaggaacgtgacgagctgaagtcaaaaaagtcaacgaaagaaagcgctttcgctactccaggaagtgagagaccaactagggagaggaaaacggtggagaggtacactgtttcttcgcccgacaagtttcccagatcttcttccatcaaagctctctcaattgaaaagggcagcggtacacagctcatggacattcctaatgtggctttcacgttatcaaagagaaaagctgatgacaacttgcgtgcacttcatagtatattgtttgggaaaaaagcaaaggcacaccatctaaagagaaatataggattgttttctggctatgtgtggactgaaaatgaggaaaaacagagggcaaagataagggagaagattgacaaatgtgtgaaagaaaagttggtggacttctgtaatgtgcttaatattccgataactaagaccagtatgaagaaggaggaactgtctgcaaagttgttagaatttttggagtccccacatgctacaactgatgttctgcttgctgataaggaaaagaaaggcaaaaagcgagccagaaagcaaactccaagcaaatcccctgctaagaagcaaaagcaaaattcacaagttgggaaaaagcaaaagcaatcttctgacatcgaggacagtgatgcagctgaaccttcagatgcaaaagttgattcccgggaagatgatgattcaagtcaaaaaagtgaaggtggtaataaggaaagcatatcagagaaagaggaagataaagaaaaggttcacaaacgttcttcaaaaaagattctgaaggaggatcaaaccacacctgtaaagaagaccactggtgtaaagactgccaagagcaatgaaaacacttctaaaaaatctacttcaaaaagggctgttactgacagtacttctaagtccaagaaacagaaatcagtgaaggaaaacctgaactcgaaaaggaaggatgcaaacaaaaaacaaactgacaagtctttgaaggctttattgaaggatcaaggcaaagataaaagtagtgagaaggccaaagcagaacctagtaaggaggagttgcatcgagtggctgttgatattttgaaggaagtagatttcaataaggcaactttatctgacatcctcaggcaacttggtactcactttgacgtggatttaatgcctagaaaagcagaggtgaaggatataattacagatgtaattaataacatgtctgatgatgatagagaggaagctgaaaatgttggggatgatgatgcagatgaagatgatgcttgattgtagaattatatatgggtaaataatcttaggctattgcagaaattagatgcatgtgtttcattccacaactatattttctcaccatgattctcgcaataataggtttcaatgaatatttggtttgtgttgtgacctttttccctgataggtattctcaacttcgttgtaattccatttagatttaactcctttcaccgtattattagtgcgaccttaattttatttcttatactgaataggtttattcacctgcctgtaaacaatattgccatttagattatcatttttttttcaataggtagaactagattatgaatctttaaaagatgagattgttatgaattgcaatggctttcctatttaattgctgataagataagcatttgcaccttgc

SEQ ID NO: 598 - DNA, 2099 bp, Glycine max
  misc_feature (2035)..(2035): n is a, c, g, or t
aaccggtccgcttttcccgcgctcgccccccccctccgctggtttttattctgaatccgaaacaatccctcttcccttgaattattttcatggcttatcatccaccaccattctacttgtttctatcatcctcattcactcccaattccgttccgttcaattccttccacatcatacttttccgtcatatttccattcaatcttgtaacaccttctgacgcttagcagttactaccaaactcagcagcgtaggagccgctaccgttatgggaaaacgtaattctcaacgtaaaaatactgcaatgttggataacgacgatgatagtagtagtagtgtgagttcgtcatcaacttcccgaactgatcacgtctccgtctccgtctcagggaacgaagaagtgcacttcgatcaagatgctctgctcgatcaagctctcgatgctttggatgaaaaaagggattccacgagggagagagcgttgtcagtgatcattggggcattcagtagcaaaatgcagcatcagtttgtcgacaagaaatttgctactttattacatcagtgccttgcttcaataaaaaagggatccaaaaaggcatctgcaaaggagatagctttggcatcacatgccattggtttgttgaccctgactgttgggtgtagtgataatgcacgtgaaatatttgaggaatcggttcgtcctctagatgaatttctcacatctaaatcacatttgacaaaaattccttcattgctggaatgcttggctataatcacatttgttggtgggaatggtctggaggaaacagagagatcgatggacatactgtggcgagtgattcatcccagattgggttccaatgtagttgcagtcaaaccttctgctccattaataactgctgtggtatctgcttggtcctttctcctatctaccatgcgtaatttgaagctaaattctaaaaattggcaaaattcaatatcttatttatcaagtcttctagacaaggaagaccggcctgtgcgtattgctgctggcgaagcactggctgtaatttttgagattggaattatagagaaattttctgctgattctaagggtgcaagtgatatgagtcaagaagagattaatctgcaggaaagttatacccatttacaaggattgaaagggaaggtcatcactcaagtcaaaaacctttctgttgaggctggtggaaaaggttctgctaagaaagatctgaataatcagaggaacttgttccgagatattgtagagttttttgagtgtggttactctcctgaaatttcaatgaaaattggtggtgattcactgcagacatcttcatggtcccaaatgatacagttgaactttctcaagcattttttagggggagggttcatcaagcatattcaggaaaatgagttccttcaagatgtatttaatttcaaaccaaagagaagatatcttaataacaatgaacatcggatgtctagtggtgagaagagaatgtttaagtctccaaattcagttcagaacaaggctaggacccaattacttaataagcaacggttgttatctgagggcagaaacttgggtcactacgcagccaatatggttgatgactgatgcgttttgagggggacatctaataattagcagggcttgtgttcatttgatgattcaatcattaattttatacttcatttttttctgccctcctgcccttttgacttaatggctaggaaaattatttctatgccagcttgatatcatattcacgtgttgcatatatgccaaaataaaaaataaaatttgtatgcatgttaatgaaacatacgaaatgactcttcattgcagtggcatcggcgatttagattattcattgtaatgatcttgttagcttgcttattgtaaggcaataaaagaagtctattataaagttaatttcactatttcagtgcaatcagtgagtgatataacgccatgccatgacccaaaagcctcgtctgtatagtgtgctgagtttacagagtgtcttntcctttgttctagtttcaaatagaagacggaagagtttgcttcaatcactgcttcctcaaggcg

SEQ ID NO: 599 - DNA, 1899 bp, Glycine max
tacggctgcggaagacgacagaagggtacggctgcgagaagacgacagaaggatacggctcccgtcagctacgtagggcgccccccctctggtttattctgaggcctgtgctgtgctctgaggggccatagtttgggaccctttgaaccctaatctccacccaaacccattttcccgggaaattgccttggaaaagaaagagcgaagaggaaaatgcagaatcacaggctgaagcagcagcagcagcagcaacaacaagctcttatgcagcaagctcttctccaacaacagtctctctaccaccctggcctccttgctcctcctcagattgaaccatatccaagtggaaatttgcctcctggttttgatccaagtacttgccgcagtgtgtatgttgggaacatccatacacaggtaactgagccgcttttgcaagaagttttctcgggtactggcccagttgaaggttgtaagcttatcagaaaggataagtcatcctatggattcattcattactttgatcgcagatctgctgctcttgccatattatctctcaatggaaggcatctatttgggcagcctatcaaagttaattgggcatatgctagtggtcagagagaggatacgtcaggtcactacaatatatttgttggcgatctaagtcctgaggttactgatgctacgttgtttgcatgcttttctgtctatcccagttgttcagatgcaagggttatgtgggatcagaagactgggcgttcaaggggatttggatttgtttcattccgtaaccaacaggatgcacaaagctctataaatgatttgactggtaagtggcttggaagtagacagatacgttgtaactgggcaacaaaaggtgctggtggtaatgaagagaagcaaaactcagatgcaaaaagtgtggtggaacttacaaatggctcatctgaagatggtaaagagacatctaacagtgatgctcctgagaacaatcctcagtatactactgtttatgtgggtaaccttgctccagaggtaactcaacttgatctccatcgccacttccatgctcttggggctggagtgatggaggaggttcgggtccagcgtgataaagggtttggttttgtgaggtacagtactcatgctgaagcagctctggctattcagatggggaacgcccagtctcttctatgtggaaaaccaattaagtgctcttgggggagcaagcccactccacctggaactgcttcaaatccccttcccccacctgctgctgcatctctgcctggcctgtctgcaactgatcttttggcgtatgagcgacagctagcaattagcaagatgggtggcgtccacgccttgatgcatcctcaaggacaacatcatcttaaacaagcagcagctattggagccagccaggcaatatatgatggtgggttccagaatgttgcagctgcacagcaaatgatgtactaccagtaacacacttcggttctcttgatgtattggggtttaatgctagctatatattctgccctgtgcacattgattcgtgttaaactctagggagccttttctttttacttttttacccgacggtagtgttgtagttacacctaccatattagacaattatgagtaaacatttgtatgggtttgtatcatgtatgcggttttctacttaatagtggtgagtgtttatgattttaagaggggattgtctgttcagacatgtttcttctcatcacccatttgggtgttactatgcgatagttgtcatcaatatcatcctgtctaaaaaaacaaaaaaaaattaattttataaaaaaaaaaaaaaaaaaaaaaaaaaaaaaaaaaaaaaaaaaaaaaaaaaaaaaaagcggccgttttaaaggatcc

SEQ ID NO: 600 - DNA, 1714 bp, Glycine max
  misc_feature (1539)..(1539): n is a, c, g, or t
gtaccgggccccccctcgcgagtcagttccgtggcccccccccccaagataactgatgtttccattgccagcatttctaattcgtgcgcaggtctaacttctctcaaaatggagtcatgtacactagttccaagtgaagcatttgtcttgattggagagaaatgccattatattgaggagcttgacctaacagataatgaaattgatgatgaaggtcttatgtccatttcttcttgttctaggctctccagcttgaaaataggaatatgcctgaacataactgacagaggacttacctatgttggcatgcattgctcaaaattaaaggagctggatctatacaggtctacaggggtagatgatttgggcatttcagcaattgctcggggttgccctggccttgagatgataaatacatcctattgtactagcattactgacagggcactaatcaccttgtcaaaatgttcaaatttgaagacacttgaaattcgaggatgtcttcttgttacatccataggtctggcagctattgcaatgaattgcagacaactaagtcgtctagacataaaaaagtgttacaacattgatgacagtgggatgattgcactagctcatttctcccaaaatctaagacagataaatttgtcatatagctcagttacagatgtggggcttctgtcacttgctaatatcagctgccttcaaagttttactgtgcttcacctgcaaggcttggttccaggaggactggctgcagccttattagcatgtggagggctaacaaaagtgaagcttcatctttcactaagacctctgttacctcagctacttatcagacatgtagaatcacgtggctgtgtgtttgaatggagagataaagagtttcaggctgaattggacccaaagtgttggaaattacagttagaagatgtgatgctataggattttctcaggtttgaagttttgataaagatgactcgccacatggctactcatggaattcaattcggaagtcatcatcttctctgaattcagaagttactctgttcacctacctacactacaagaaatgaagaaagtagaatgaaaaatgtcagaagtattctgtttagttcatcggaggctacacaggcatttggaatggaggttgctgattatccctctataagtctcgcctaactaggaagagtttttgttgtttcatcaactcaagcaattaagttgtccttggtagaatgttgaaggaggggcaatcgcttgtgtgtaatgtataaaagtataaaagttttgttcaatcttttttttttttttttgaactgcaaatagcaggattagttaagtgtaacaaaacccatctaacgtctttcattttattttaattatttattttgggagtacaattggaaatgctcagagaatggaaaaagcagtgctatcgaatgtataaaaacactaacttctgttcaaaaaaaaaaaaaaaagagaaaaaaaaaaaaaaaaaagaattcctgcaagccccgggggatccactagttnctaagcgcgcgcccccccgcgggggagcccccgctttttgtcccttttaaggggagggtaattccaaagttgcggaatctgggggccaaaaggttttccccggggggaaaatgtttatcccctccaaatttcccccaaaattaagaaggcgaaaaaaaaaaagggaaaaccccgg

SEQ ID NO: 601 - DNA, 1296 bp, Glycine max
tcgagtcagctacgtaggcccccccccccccgaggcaagaaatatcacagagcagagacaagttataattataatggggggttgggctatagcggtgcatggtggcgcgggtgtggaccctaatcttccaccagagcgtcaagagcaagccaaacaactcctcactcgcgttctcaatcttggcatctctgcccttcgttccgatgcttctgccctcgacgtcgtcgaacttgtcgtacgggaactggaaacagatcccctgttcaactctggtcgcggagcagctctgacagaaaagggaacagcggaattggaagcaagcatcatggatggttacaagagacgatgcggcgccgtttcgggcgtcaccaccgtcaaaaatcctatctcactcgctcgtcttgtcatggaaaagtcaccccactcctacctcgcctttaacggcgctgaagatttcgccagacaacagggagtggagattgtggagaacgaatacttcatcactcctgaaaatgttggtatgctgaaactggcaaaggaagcaaacacaatcctgtttgattatagggtgccattgcaaaatggatacgataactgcggtgtggaggttgagaatccattgcaaatgaatggactgccaataagcgtgtacgcgccggagacggtggggtgcgtggtggtggacagcgagggacggtgcgcggctgccacgtcgacaggagggttgatgaacaagaagtgcggtaggatcggtgactcaccactaataggtgcagggacttacgcgtgtaaggtgtgtggggtttcgtgcactggtgaaggagaagctataatacgtggcacgctggcgcgtgaggtggcagcggtgatggaatataaaggactgggacttgaggaggcagtggagtatgtgatggagcaccgtttggatggagggaaggcagggttgatcgccgtgtcaagttctggtgaggtggcctatggattcaactctaatgcaatgttcagggcatgcgccacccaggatggattcatggaggttggaatctgggaataaataattccttgcttcataaaaatgtgaaataattctagtagttctttctctctttctctgcaaaggaattcccctcagtgtgctcttatccaacaaccaccaataaaaacaaaatacaccaaataaactttttagaatttctataaaaaaaaaaaaaaattagtgtattttagccaaaaatatctcacaaagatttttcatttgccatatatcagtctattctaaaaatcttacttgtc

SEQ ID NO: 602 - DNA, 1078 bp, Glycine max
aaccaaacaaaccctagcgctgggtgaacgcgttttaaacgtgattatttcattgcataatagatttttgatgaggcggtgaaagactgaaaggcaaaatctttttgaacagacgaaggaaaaaaacgcagtgatcacgagcagacatgtatcatccaacaagaggtggcgttcgtggtggtcgagatcaattcacttgggaggatgtgaaagctgataagcatagggagaactatcttggtcacagtatcaaggctcctgttggaagatggcagaaagggaaagatcttttctggtataccagggataaaaagtcccaaaatgcagaaatggaggctgcaaaagaagagataaaaagaattaaggaagaagaggagcaggcaatgagggaagctcttggcttagctcccaagcgttctaaccgtcctcaaggtaaccgtcttgataaacatgagttttcagaactggtaaagagggggtctacagcagaggacgtaggtgcaggtcatgctgaagcagcaagggttcaaggtcttggttttgcaagagaaccacgcccttgggaagaacctggttcttcaaagccttcactcggtgatacaccagctgaggaggaaaatgtatctttgccaagtcaaccagcaatgaagactgcagatgattcagaagatgaaagtagaagaaagagaagacgtgaagagaggaaggaggagaaacgtgaaaagcgtgagaagcatcattctcgcgaggataggaagcaagagaaacgagagaaacatgagagggggcattctcgtgattcagatggcaggaagagacacaagaaagataaggagaggagaagacatgattctgattgaatatactctatgggggattttcttatctattgtgaaatagcatgtttatttctattttcataacttaatatggatgctgtaccttggtaattgaccgtcctaaatgtctgcatgtttgtcctaacaatcaggcattctcatgtgttattttaaattttggaattcgtgaagtgaaatgaagccaattacgctttaaaaaaaaaaaaaaagaattaacc

SEQ ID NO: 603 - DNA, 1334 bp, Glycine max
cggctcgagcacatggctacggctgcgtaggataacatctaacaaacctagcgcacgatagtcttccttcacccatgcttggagtactctgcgccactcgccccaaaccttggcttctctctacctcattccaccgcctgcaaactttttctctccggcggcgctgccgcctccatatggcacgctatcatgccccgaggtgatgacggattacggcgcggcgttgttgccgtccatgacttgaagggagagggatcgtggaatgtcgcttgggacgcgcggccggcacggtggctccaccgccccgactccgcgtggctcctctttggtgtctgtgcttgtctggcgccgccgccgggttgcgtggatgctgacactaattctgctggaatcgctgtggatgaaagttgcggccttctcgataaggaacgggaggaggatgaggtttctgctgattacagagtcactggggtacctgctgatggtcggtgtctgtttagagcaatagctcatggagcttgcttgagaaatggggaaaaagcacctgatgagaatcgtcagagggaattggctgatgaattaagagctaaagtcgtagatgagctgctgaaaaggccggaggaaacagaatggtttatagaaggggatttcgatacatatctgcagagaattcaacagccttatgtatggggcggagaaccagagctattgatggcttctcatgttttgaagacaccaatttctgttttcatgagagacacaggctcggttgatttggtaaacatagcaaaatatggtgaagaatacaggaacgataaggagatttccatcaatgtgctatttcatgggtatggtcactacgacatactagagaccttatgatatgaccataattacacctgaaaattgaaaataaacacttagtacagcacaaaacttacttgccttgatggtgcagtttaagacttctcaagtaaagagcttttttgaggggtcattttaggagtgtttcagtgaatttagtaactttttgcaactgtagttcagctgcagggaacttccattcgattcaacatgctgctggtggaatttttgtagtttgtttgttgtcatctgatgttaagaagtcaatataccacaattatcataggaagaaaatgatgataatttgctacaatagtaatttgggatttgtgattggcattagcaagtgaaacgtggattttacagggcattgattttacttgactatatattttgatgaaagatgaaaagagaaggaaaggttctgtaatcattttaatatttgtatagtttcttaacattaggaatta

SEQ ID NO: 604 - DNA, 2528 bp, Glycine max
tgcgagagacgacagaaggggaacacgatcttttcttacaccccctcaactacactacaatccacacttatagtcatgactcccccaccttcaccactctttataactcctctctccctcacattctcaccaccaccactatctccatctactactccttccccttattgacgacaccacattcatttaccatatccaacatggccgaggaagctccaaaccagacaaccacaccaccgcctcctcaagagtcagtggcgcaagtggaggaagtggtagtaaccgatgttccacagccaccagaaaaaacaacaaccactgttccagttgaagaaaccgtcactctcgagactcacctctccaaacccaataatgctgacgacaacgacaacatcatccctgaattcaaggaagaaagcaccaaactctctgaactcccagaaaacgaaaacaaggcactccaagacctcaagaagctcgttcaagacgctctcaacaaccaccacttctcttccaaagaagataataagaacccaccaccacaaactgctgctcacaaggaagaagttgtaactgaaactaaaactgatgctgccccagcaaaaaccgaagaggagcaagctgaaacaaaggaggaagaggaaaagaaggaggaagtgaaagaaacgaatgaagaagctgcggtggatgatgatggagcaaaaactgtggaggccattgaagagaccgttgttgctgtctcttctaccgttcagcctcaagctgaagagaaagcttcatcgccacttccacctgaagaggtttccatttgggggataccgctgcttgcagatgagaggagcgatgtgattctgctgaagtttctgcgcgcgagggagttcagggtgaaggaggcattcaccatgctgaagaacacgatccagtggaggaaggagtttgggatggaggagttgatggaggagaagctcggggatgagttggagaaggtggtgttcatgcatggctttgacaaggagggtcaccctgtgtgttacaacatctatggggagttccagaacaaggagttgtacaagaagactttttctgatgaggagaagagggagaagttcctgaggtggagaattcagttcctggagaagagtataaggaagctggatttcaaccctggtggcatatgcaccattgttcatgttaatgacctcaagaattcccctggacttgccaagtgggaacttagacaagccaccaaacatgccctacaattgcttcaagacaattaccctgaatttgttgccaaacaggtgtttattaatgtgccatggtggtacctggcagtgaataggatgataagcccttttcttactcagaggaccaaaagcaagtttgtctttgctgggccttccaaatcaacggaaacccttttgagatacatagctccggagcagcttcccgtgaagtacggtggactaagcaaagatggggagttcggaaatatcgatgctgtcacagaaatcacagtgaggccggcagcaaaacattcggtggaattttcagttactgagaactgcttactctcttgggagcttagagtaataggttgggaagtaacttatggggcagaatttgtgccaagctcagaaggaagctacacagtaattgtccagaaggctagaaaggttgcttcatcagaagaaccagtgctttgcaacagttttaaggttggtgaacctgggaaagttgttctcaccattgacaacacaagctctaagaagaagaagctcttgtatcgcttgaagaccaagccttccccttctgactaaaatcatcattgttatgtgtatgtgcaagtgggaaggggaagaacagtgccagaattgcttgcttacattcctgcatcaacttctaccaagacaccagtgcttcaaagattaactttccagctgttcatatatgaatataaagtttttgtttttaattttttggcctttttgttttgatgattattatgtgttcaaccatattatataattatatatacctctttctgtgtttttcttgctatgattatttattgttgttgttatcactgaagataaatatcaaggtccttctttcaaatttggggtatcttttgagttgttcttagggagggacttgttggctgttgccctatttgtatgttataaatatcatgtaaatttttgtggggtctctctctctatctctgtcgctctgtccgtacctaagcatgaagtgtgtttgagagctgtcatgatctgtgttcccaccagggaaaaaaaatgatgtgaatgtctatcatggctctggacttctgtaatatgtcacattgttacattatggttgagatttagatcagctttgttttcttgtccccgccaggatcttttggttgtctacctagacacattatcagtttggttcacaggatatgtaactgataatttctctgctgttaacaaactttttaaatcaagttcttggtatgactaaatttcacacacaacctt

SEQ ID NO: 605 - DNA, 1101 bp, Glycine max
aattcggtcagctacgtggccccccccccgttagccaccacggaggcatatcatccttatcatcatcttcataaaattatatcttttgcgcgcattctcattcaccaatggcgttcaccgtcgccattggcagtggcgtggctataatcccctgcggcaacaccaccaccgcaattccttacacccgtggtggtggtcaccgaacgagaagaaagctccatctccatgtggcgcgcgcgaagaagcccctgaacggcgacggcgtttccatttacactgagctcctcaaaaccgaagtttccgttttcgaaaataagcccctcggcgacaacgatgccgctttgaagttcgtagagaagatagaccgtcaatttcaataccccgatttctgggaaggatcccagtgggactggttaggcatcttcgtcaagttttccccaatcattggcgtcgctgttgcggcatgtcttgctatctacggttgctttacatttcatgaaccaccaaaagaaatgagggaggctgctgaaaggctgtattctgtgcagtccggcgtggagtctagtgcagagtccggtttggagtctagtgcagattccagtgtggagtccggtaaagttattgaagagcctgatgcatatgactcagatgtttttgattccaatccaacagaggtagcacctagtttggagtagactctccctagatacactgcaaatataccttatttttagcatttaaacccaggtgaatggattcaaacctttactgcaattaatttttaaggcaatgcttctggttacatgtaaaccctcttaaagtgtatcaattttgagacagatcaagggaattagttgtatgtgtaaatgtatggtagttattcgttgccctgcatctgattactcatatgttgtcgtcaatcttgtatatctgttctagatcagaactactgaaatagaatcttttacatacatacatagttcagggtaaaggttgagttccgatcgatactggttttgttgaactagaattatgtgttaccatctccttcatttggtatagaattttgctataattcattaagtgtgagtaggaaattga

SEQ ID NO: 606 - DNA, 1874 bp, Glycine max
tgtgtctcgattggacattagcaaatagcaaatccagatgactagtccattgtcactcctacagcgtacaactgatatggcacgaagatcgccttgtatatgcgtctttgccgtgttcttttttttttttttggagaatttgataatattttttttataagtattggtttattccaatgttggatccacactacagcataaaaaaagaaaaagtataatactcataaaaaaccagctttattaaagtcatattatgcgccgagtaaattaaacaagcaggctcttgatacaactcctcccaccacaactggaaaagactatggaatgatactagcctcatggagctgcgggtacaatcttgcctgagcaagtaccaaacccaacagagtaaccatttcccttgcaatatccagttaagatgacttcgtctccatcttcaagaaatttccgatttaactcattcactgacactgtgttttgtccattccatgttaattctagcaagcatgcacgggactctggctcaggaccactaactgtcccagttccaaggagatcgcctggcctaaggttgcaaccgttgattgtatggtgagcaagttgttgggtcaatgtccaatataagtgctttagattagtccgtgacaccacacccgaatcttcatgcccagcaggttttatgtgagcctctagggaaatatcatagattttgggttctttctcagtcaagtatggaagtggagaaggatcctgttttggggcttcactggcaaaaggttctaatgcttccaaggtcacaatccaaggtgatattgttgtgccaaaactcttgccaagaaatggaccaagaggaatatattcccatgcctgaatatctcgagcactccagtcattcatcagaacaagtccaaagatgtgatctttagcattgttaatatccacaggttttcccaattcatttccaggtccaacaatagtagccatttccaactcaaagtctagctttaatgaagggccaaagtagggggtagagctgccaactggatgagcttgacctcttggccggacaatatctgttccggaaataacaacagaagatgcccgtccatggtaggcaacaggcaggcgataccagttatctagaacaggagtctgcggcccacgaaatatgatcccacagtttttagtgtgatgcagagacgtaaagaaatcggtgtagtccccaacagcaacagggagaagcaactccacactactcataggcacaagtgctttctgcctcaaaaccgcattgtccctcaaggttggctcagttgctgataaaagcttttgaagagtagcacgagcttccttccaggctggtcttccaagtgatacaaacttatttagattaggctggagaaaagcatcggagtttttgaggagaggaccgtcgaagagaccagcggaagatatttcggagaggtcgaggacgaagtcgccgatggcgacgccgggacgaggaggcgaagcggattggggcttgaagactccgtaagggaggttctgtatggggaagtgagaatctgggtggaccgaaacgaaagattgcagcacagccatggtaccgtagtagtgctgatgatgttttactgctcaagctgaggtcaatgctgacagcaccaccgtcaaagagagacactgaaccgagaaagaacaaagagagagtggtgcgcatcagcaagttacaagagtgtgtttttaaattacggggatacctacttcgctgtctcgaaaatacccaccatagtatttttttataccaaaaaaactaactaaaaatttgtatatatttatatttttaaaaactaattaaatcattataataaagagat

SEQ ID NO: 607 - DNA, 1849 bp, Glycine max
cacgtaaagacttatttcataactctgaaatctttgcttaaacatgtcacccggcgtatattcagtaattgtgtatacattggacattattagcattgggcggtcggttcggtttggcattacagcgtacaactggtgtggcacgaaaatcgccttgtttgtaaacttacgactattatacttttttttttttttttttcttgtagaatttgataatattttttttataagtattggtttattccaatgttggatccacactatagcataaaaaagaaaaatataaaacaccagctttattaaagtcaaattatgagccgagtaaataaaacacgctatgtggaaaggagccagatacttgattctacaactcctcccaccacaactggtaaagactatgaaatgatactgacctcagggagctgcgggaacaatcttgcccgagcaggtaccaaacccaatagtgtaaccatttcccttgcaatatccagttaagataacttcatctccatcttcaagaaatttcttatttaacccattcactggtaccgcgttttgtccattccacgttaattctagcaagcatgcccgggactccggctcaggaccactaactgtcccagttccgaggagatcgcctggcctaaggttgcaaccgttgattgtatggtgagcaagttgttgggtcaatgtccaatataagtgctttagattagtccgtgacaccacacctgaatcttcatgccccgcaggttttatgtgagcctctagggaaatatcatagattctggatactttttcagtcaagtatggaagtggaggaggatcctgttttggggcttcgcaagcaaaaggttctaatgcttccaaggtcacaatccaaggtgatattgttgttccaaaactcttgccaagaaaaggaccaagaggaatatattcccatgcctgaatatctcgagcactccaatcgttcattacaacaagtccaaagatgtgatcttcagcattgttaatatcaacaggttttcccaattcatttccaggtccaacaatagtagccatttccaactcaaagtctagctttaatgaagggccaaagtagggagtagagctgccaattggatgagcttgacctcttggccgaacaatatctgttccggaaataacaacagaagatgctcgtccatggtaggcaacaggcaggcgataccaattatctagaacaggagtctgtggcccacgaaaaatgagcccacaatttttagtgtgatgcagagacgtaaagaaatcggtatagtccccaacaacaacagggagaagcaactccacagtactcacaggcagtagtgatttctgcctcaaaaccacgttgtccctcaaggttggctcagttgctgataaaagcttttgaagagtggcacgagcttccttccaagctggccttcccagtgatacaaacttatttagattaggctggaggaagcaatcggagtttttgaggagagggccgtcgaagagaccagcggaagagatttcggagaggtcgaggacgaagtctccgatggcgacgccgggacgaggaggagaagcggattggggcttgaacactccgtaggggaggttctgtatggggaagtgagaatctgggtggaccgaaacgaaagattgaagcacagccatggtaccgtactggcagtggtgatgacggttactgctctagctcaggtcaatgctggcagcagcagcactttgaaagagacactggaccgagaagaaagagagagactagtgcgtggggggggggcctacgtagctgattttatacagttgttacagtattctttttatt

SEQ ID NO: 608 - DNA, 1445 bp, Glycine max
tcagctacgtaggcccccccgaagaaaaaggaagaagtagaagtaggagcagcagcacattcctcgtgactcgtgaggttcgttactagcgtgtgtggattttaaatcaggtgcgacgcggtgtagagagtggcggtggtgtcgccgtggcggaagtgagaatgacttcggacggagcaacgtcggcggcgactaaccggaggaagccgtcttggagggagagggagaacaaccggaggagagagagaagaaggagagccatttcggcgaagatatactccggtcttagggcgcaagggaactacaatttgcccaaacactgcgacaacaacgaagtcttgaaggctctctgcgctgaagctggttgggccgtcgaagaagacggcaccacctatcgcaagggatgcagggcaccatatccaggtgatggtgtaggcacctccaccagaaacactcctttctcatcacaaaatccaagtcctctttcgtcgtcatttccgagtccaattccttcatatcaagtgagcccttcctcctcctctttcccgagcccttctcgtttggatgcaaacaacccttcaaacctgattccatatattcggcatgcgtttcctgcgtctgtccctcctttaaggatatcaaacagcgcccctgtgaccccacccctgtcctcgccaacttccagaaaccccaaaccaattcccacatgggattccattgccaaagcctccatggcatcatccttcaaccacagccaccatcctttctttgcggcttcagcaccggctagccccacacaccgccacctttatgccccacccactattccggagtgtgatgagtctgatacctccactgttgagtctggtcagtggctgaacttccaagcatttgccccttctgtttctcctgtgcctatctctcccaccatgaattttatcaaacctgttgtgagtcagcagcacaagcacaacctcaatctccctggtaatggaatccaagagatgagaatttcggagcccgaatttgcgatgcaggtgaagccttgggttggggagaggattcatgaagtgggattggatgatttggaactcacacttggaagtgggaagacgcctgcttaggcttatgtctgagaccccacaaaacacaattgttgactcgatttgggatgtcgaaattcaagtaactgttatagtaaatggtccagctctcttgccgcaagtagcagctcgtatgtaaccacctcaaacttgttattggaatcgggaagtatcagatgtcatgggcattttatgtttacagttatgtccaaaaccaaaactcttcttttattcactctttttaacatattattttaaaggattttaaacatataaacaaatagaataagaattgttattttttgttttcacttcctttcatcaactgtgttttttttagat

SEQ ID NO: 609 - DNA, 1592 bp, Glycine max
tcgagtagctacgtaggcccccccccatgcaaggcctccgcgaggcaaatcccaccctgcctttatctcgtctccctcatcaatcacgcccgttgatcctttaacggtgctgatgacgcatcgccctcaggagattcggtgagggttcgcgcactctataataaccctcagactagcttgatctgctgttaaacttaataaacagggagagaagtgaagtagaagaaaaagaaacaagtagaagcagcacattcctcgtgaggggtcgttactaacttgtgtgggttttaaatcaggtgcgacgccgtggcggaagtgagaatgacttcggacggagcaacgtcggcggcgacgcatcggaggaaaccttcgtggagggagagagagaacaaccggaggagagagaggagaaggagagccattgcagccaagatatactccggccttagggcgcaagggaactacaatttgcccaaacactgcgacaacaatgaggtcttgaaggctctctgcgccgaagctggttggaccgtcgaagaagacggaaccacctatcgcaagggatgcagggcaccacttcctggtgatggtgtaggcacctccaccagaaacactcctttctcatcgcaaaatccgagtcctctttcttcgtcatttccaagtccaattccttcatatcaagtgagcccttcctcctcgtctttcccgagcccgtctcgtttggatgcaaacaacccttcaaacctgattccttacattcggcatgcgtttccctcgtctctccctcctttgaggatatcaaacagcgcccctgttaccccgcctctgtcctcgccaacttcgcgaaaccccaagccaattcccacatgggattccattgccaaagcctctatggcatcatccttcaaccacagccaccaccctttcttcgcggcttcagcaccggctagccccacacaccgccacctttatgccccacccactatcccggagtgtgatgagtctgatacctccactgttgagtctggtcagtggctgaacttccaagcatttgcaccttctgtttctgctgtgcctatctctcccaccatgaacttgatcaaaccagttgtgagtcagcagcacaagcacaacctcaatctgtctggtaacggaatccaagagatgagaatttcggagcccgaatgtgcgatgcaggtgaagccctgggttggggagaggattcatgaagtggggttggatgatttggaactcacacttggaagtgggaagacgcctgcttaggcttatgccagattgagaccccacaaaacacaattgttcattcaatttgggatgttgaaactcaagtaactgttattagtaaatggttcagctctcttgccgcaagtagcagctcgtgtgtaaccacctcaaacttgttattggaatcgagaagtatcagatgtcatgggcattttatgtttacagttatgtccaaaatcgttcaaaactcttcttttattcactctttctaacctattatttttctttctattttaaaggattttaaacatataacaaataaaaaagaatgttatttttaaaaaaaa

SEQ ID NO: 610 - DNA, 2545 bp, Glycine max
ccacgcgtccgtgcacactccagacggaagagaagagacgataatggcgggttctggcgggaaaaaggtgcaccaaatgatcgtcggtttcggcggcagtggcctcggccaggttgtcatcgccgtcgccgtctctttcctcgtccgcgtcttctccgctcccggcccggccctctcgccggagaacgaagctgacgacgtgccggagaacgattccgacgacgcagaagctccaacttccggcaaggtcacgccggtcacaatccagtggagaaacatcaattgctccctttctgataaatcttccaagtccgcgaggtttctgcttaaaaatgtgagtggagaagctaagcctggaagattattagccataatgggaccttcaggttcagggaagacgacgttgcttaatgttcttgcgggtcagctaacagcatctcctcggttgcatctgagtggcgttttggagttcaatggaaagcctggttccaagaatgcttacaagtttgcttatgtgagacaggaggatctctttttctcgcagctcacagtgcgggagacattgtctcttgctacagaactccagcttcccaacatatcttctgcagaagagagggatgaattcgtgaacaatctccttttcaaactaggcttggttagctgtgctgataccaatgttggtgatgcaaaagttcgtggaattagtggtggtgaaaagaaacgcttatccatggcatgtgaactgcttgcaagcccatctgttatatttgctgatgaacccacaacaggacttgatgccttccaggctgagaaagtcatggaaactctccaacaacttgcacaagatggtcatactgtaatttgttctatacatcagccaagagggtcagtgtatagtaaatttgacgacatcatcttgctaacagagggttcacttgtttatgctggtcctgctcgtgatgaaccactggcatacttctcaaaatttgggtaccaatgtccagatcatataaatcctgctgaatttttggctgatcttatatccatagactacagttctgctgatagtgtctatacctctcaaaaaaggcccgctggtcttgttgagtcattctcacaaagacaatctgcagttatatatgcaactccaattactataaatgatctctcgaacagtagaaaaaaaatcagccagagggctgtagtaaagaagaaaggagtttggtggaagcaattttggttgctccttaaaagagcatggatgcaggcttcccgtgatgcaccaacaaacaaagttcgggcaaggatgtcaattgcatcggcaattatctttgggtcagtattttggagaatgggaaattctcagacttcaatacaagacagaatgggattacttcaggttactgcaataaacacagctatggctgctctcacaaagactgttggtgtgtttccaaaggaacgggcaattgtagatagagaacgtgctaaaggctcctattccttgggcccctatctgttctcaaaattgttggctgagattcccattggagcagcatttccattaatgtttggtgctgttttgtatccaatggcacgtcttcatcctactatgcaaagatttgggaaattctgtggcattgttactatggaatcttttgctgcatctgctatgggtcttactgttggtgctatggttccaaccactgaagcagcaatggcagtaggcccctctctcatgacagtttttattgtatttggagggtactatgtcaatcctgagaataccccaatcatcttccgttggattcctaatgtttctctgattagatgggcttttcagggactttctatcaatgaatttagtggtcttcaatttgaccatcagcattcatttgatattcaaactggagaacaggcactagagcgtatttcctttggaaaaagtaggattagggatacggtgatagcacaaaatagaatactgctattttggtattgcaccacctaccttctcctcgagaaaaacaagcccaaataccagcaacttgaaagccctattgaccacagcaaacctcatttaaaacttgaggagctcaattctgaacaagttgatcagacaattgaagctccgccagtcagtcaacttgattccaaacagcccctcgagtcacctgaagtagatcttgttggctcttttgtccttgaaggtactaaatagaaagatacctttgcaaaggatgaccaacaaatactgagacagtaagccgtttcctatagaacaggacaacaaacacaatgtgatattggacaacgaaaacatcagcttatgcttacaggttgttagttttttggtcgaattacagattgttatatgtaataataaacagtcatggtggataatcttggactgtctcatggtggttcctttgattatagtgactattttcattaaatgatcagagattctgtggaaatcatccatgatatggatttttcttgaggttggtcacaggtttcctttatatgaacttagttatgaatt

SEQ ID NO: 611 - DNA, 1572 bp, Glycine max
ggtccggaattcccgggtcgaccgacgcgtcaacaacactaaaaaaaaaaaagaaaaaaggagaagcatactcagcgcggcggtggaagatggtggcgacggcgatcgaggaagtgcgaaccctctggattggcgatttacagtactgggtggacgagtcctatctctctcagtgcttcgcccacaacggcgaagtggtttccattaaaatcatccgcaacaagctaacgggccagcccgagggctacggcttcgtcgagttcgtctcgcacgcctcggccgaagcctttctccgaacctacaatggagcccaaatgcccggcacggagcagaccttcaggctcaattgggcctcgttcggggactccgggcccgaccactccatcttcgtcggcgatctcgcccccgacgtcaccgattttctcctccaggaaacctttcgggcccattatccgtccgttaaaggggccaaagtcgtcaccgaccccgccactggccgctccaagggctatgggttcgttaagttcgccgatgaggcccagaggaaccgcgccatgactgaaatgaacggcgtttattgctccacgcgcccaatgcgtattagtgctgccacacctaagaagaacgcttcttttcaacaccaatatgctccacctaaagcaatgtatcaatttcctgcatacagtgctccagtgagtgctgttgcgccggagaatgatgtgaataataccactgtttgtattggtaatttggatcttaatgtgacggaggaggagcttaagcaaacctttatgcaatttggagatattgtgttggtgaaaatttatgcgggcaaaggatatggttatgttcaatttggaactagagtgtctgctgaagatgccattcagagaatgcaagggaaggtaataggtcagcaagtgatccaaatttcttggggcagtaccttgacagctagacaggatgtacccggtggctggggtgcacagatggatccaagtcaatggagtgcctactacggatatggacagggttatgaagcatatgcttatggtgctactcatgatccctccttgtatgcttccacgcgtccggctgcatattggttgcttacttttcaggttgaaggtgctcaagacatgtcagcagtgtctatgcctatggaggaattgtatgaccccctggcaatgcctgatgtcgataaattaaatgctgcatatctttcaatacacggaagttccattttagggcggtccctttggcagagaacttcacaatctttacagcaagcctaggatctatatgtattgtcaggtcaattttaggcattaaggcttcaaaatatggctgtcttacaattttgcgtttgtttcaacatgagtggaagagcatgttaattagatcaatggtagtattttatgatgtaatactgaatatcaatgattttattttagtttaggatttgagttttaatagtaatcttgtattaaaatttagatatgatgtcataaggatattgtgtcgtaatttccagaatttgttgtaatgtagctcttttcctaaaaaaaaaaa

SEQ ID NO: 612 - DNA, 1294 bp, Glycine max
tcgagtcagctacgtaggccccccccccaattttcttctcctctcacgcagtgtctcactcaccccagtcacaccatggaggttgctacagcagcttctagcttcgcactcaacaagcccatgctggcattgccctcttcatctcgaactgtaaccccaatcagatgcatgaacacctccacctcccccgtcaggacctctctctctaccagcttcgtcgctccttacgccggaatctgcagcgcgtctagccctttctccggccacaagctccgtccctcctccctcaatccggcgtcgtttcttggctccaacgctaaacgaggcgtcgttaccatggttattccttttcaacgaggaagtgcatgggagcaacctccaccggacttagcttcttacttatacaaaaatcgaattgtttatttgggcatgtctcttgttccatctgttactgagttgatactagctgaatttctttaccttcaatatgaagatgatgataagcctatttacctatacataaactccactgggacaactaagggaggtgagaagttgggttatgagactgaggcctttgcaatttatgacgtgatgaggtatgtcaagcctcctatttttactctttgtgttggtaatgcttggggagaagcagcgttgcttttggctgctggtgcaaagggaaaccgttctgctttgccatcatcaacaataatgataagacagccaattgcaaggtttcaaggtcaagcaacagatgttaaccttgcaagaagagaagtcaataatgtgaagacagaattggttaaattgtatgcaaagcatatggaaaaaacacctgagcagattgaagctgatatccagcgtccaaagtattttagccctagtgaagctgttgagtatggcatcatagataaggttatatacaatgataggggtactgaagatcgtggagttgtttctgaccttaaaaaggcacggcttatttgacagttggaattaaaatgcccttttcttggagttcagaagtagatcaattgaaatggaagaagatcaagatcagcagtcaaattgtacaaccgcgccaagcaagtagcggacattggagtctcattgttaatatcgtagactacatttccctcccccaacaatataggctgaaggatctaccattacttgttttctaattgtacacatgattggtttctgttgtgcacatcacattattgtattctggttcattctaattcaaaatgtttttctgtcaaatcaaaaaaaaaaaaaaaaaattgat

SEQ ID NO: 613 - DNA, 1274 bp, Glycine max
ataaatgagtctgaaaaattaaaacggaatattgaatattgtgtgtgttccattgaggcacacatgcgtggcaaataaatgggacaagggacgaggtagagggagaggcagacacaagagacagcagagcagagatctagcgtattctctcgctctttctttcactgtcacagagccacatccatgggcttcccagccaacggcgcctctgcggcccagcccctaaacttcctcatctacggccgcacgggctggattggcggcctcctcggctccctctgccgggcccagggcatctccttccattacggctcgggccgcctcgagaaccgggcctccctcgaaaccgacatagccctcctcaagccctcccacgtcttcaacgccgccggcgtcacgggccgccccaacgtcgactggtgcgagtcccacaaagtcgagaccatccgaaccaacgtcgtcggaaccctcactctcgccgacgtctgccgcgaccacggcctcattctcatcaactacgccaccggttgcattttcgagtacgactccgatcaccccctcggatccggtatcggcttcaaagaaaccgactctcccaatttcaccggttctttttactccaagaccaaggcaatggtagaggatctgctgaagaactatgataatgtgtgcacattgcgagtgaggatgcctatctcatccgatttattgaacccgcgcaattttatcactaagatcactcgatatgagaaggttgtggatattccgaattcgatgactatattggatgaactgcttccaatttcaattgagatggggaagaggaatctgactgggatctggaactttactaacccaggagtggttagtcacaatgaaatcttggagatgtacagagattatgttgacccgaacttcacctggaacaacttcactctcgaggaacaggccaaggtgattgttgctccgaggagcaacaatgagcttgacgctgccaaattgaagaaggaatttccagaactgttgtctattaaggattctcttattaagtatgtcttcgagccaaaccagaaggttaaagctcaagtctaaaggttcaagcttttctcatttttatcatcatcattattattattattattattgtcctcgtttgatttaagtttgtgtggattttgtgtagatgtcactctcccttatttttatttgtatgttgtatttttaccgctcgtgattgaataaatttcttgtcgtttttaagtgcaaaaaaaaaa

SEQ ID NO: 614 - DNA, 869 bp, Glycine max
aaaaaaacctacggtcagctacgtaggccccccccccagaagaaaaagagagagagagagatacaaaatagaaagtaaaaattagaaaaactcttgtacttggtttcatgccagattagggaactcttttagttgtcaattagatcacagagacatggaggttgctatggaactggaagatgatcttttttttgctgatttgagcaaggaaattgctctactaattatggatgaagatgaagatcctcttgcttcttgtcctcctgactctcttcaggctttttctggggcaattcatcctcctccacagtttgctttcatctatgagcatgctttgagaagagaaagcaaagggacaggtgtgtttatccctcaagcaacacagccaagaaggaagcagaggaaaggaagggctaataataattcatatgcaaaacatcaaaagcagtctcaagataccagaatggcttctcaagttcctaacaagaattctttcaaatcccgaaatggctgaggatactatattatatcatatagatccttgtgaaaaacctgcataatcttacagattctactgattaatttgtctgccaagtttaataatttgtggatctaattctttagcctttaggcaataattgtatggttaattattttgtattgtttatgtataggtaaatgtacatgggaaaaccttatatacctaaatattaggcatgatgtaggaaggttcacccaaggttttgctaccttcctctgcagacaagcatttcattgttatcttgtttcatgtgataagtttgtcctggttgcaaagatattagtgtgactatttaatttcttcatagttcaaaaaaaaaaaaaaaaaa

SEQ ID NO: 615 - DNA, 2723 bp, Glycine max
  misc_feature (11)..(11): n is a, c, g, or t
agcaatgaggntggaggattttccaatcaaatatagatatggaaaatatgacaggagtgggaacttttctatagagagtggtccaaatcgagaagtctatgctaactccccaaggaatgaggcgaaatatatttttctttcagatggcatgatgcgggaaataccttggcgtggtgctggtgtagcagtccccatgttttctgttaggtcagaatctgatctgggtgttggggagtttcttgaccttaagttgctagttgactgggctgtagcatctggtttccatttagttcaacttttaccaatcaatgatacatctgtgcatgggatgtggtgggattcttatccatacagttcactctcagtctttgcattgcatccattgtacctgagagtacaggcactttctaagaacatacccgaggagatcaagaaagagattgaaaaggcaaagcagcaactagatgggaaggatgttgattatgaggctacaatggctactaaactctcaattgctaagaaagtttttgctcaagagaaagatttgatacttaattcaagttcctttaaggagttcttttctgagaatgagggttggttgaaaccctatgctgctttctgtttcctgcgggacttctttgaaacatcagatcgcactcaatggggtcattttgctcattactcagaagataagctagagaaacttgtatccaaggacagcctgcattatgagataatttgcttccactactatgttcaataccatttacatttacaattatcagaagctgcagaatatgcaagaaagaagggagtgatactaaagggagatcttcctattggagttgacagaaacagtgtggatacctgggtttatccaaatttgtttcgaatgaacacttctactggggcacctccagattattttgataaaaatggccagaattggggtttccctacttataattgggaagaaatgtcaaaggacaactatggttggtggagagctcgattgacacagatggcaaaatattttacagcttacaggattgatcacattttgggattcttccgaatttgggaacttccggatcatgctgcgacaggtcttgttggaaaattccgaccatctattcctcttagtcaggaagaacttgaacgagaaggaatatgggactttaatcgcctaagttacccatatattaagcgggaactattacaggaaaaatttggtgatgcttggacttttgttgcaacaacttttctaaaggaaattgacaagaacttctatgagttcaaggaggattgcaacacagagaaaaaaattgcttccaaactgaaaacttgtgcagaaagttctctcttgttggagagtgtagacaaattgcagcgtaatctctttgatctttcacagaatatagttctaatccgagatccagaggatccaagaaaattttatcctcgtttcaaccttgaagataccataagtttccaggatttggatgatcatagcaagaatgttctcaaacgattataccatgactactatttctgtcgtcaagagaatctttggaggcaaaatgcattgaagaccctgcctgtacttctaaattcatcagacatgctggcctgtggggaagatttgggtctcattccatcttgtgtccatcctgttatgcaagaactgggattagttgggttgcgcattcagcgcatgcccaatgaacctgatctggaatttggtattccttctaagtacagctacatgacggtatgtgccccttcatgtcatgactgttccaccttgcgtgcttggtgggaagaagatgaagaaagaagactccggtttttcaagaatgtgatggagtccgatgggttgccgcccgatcaatgtgttccagaagttgcacattttgttataaggcagcattttgaagccccatcaatgtgggcaatcttccctcttcaggacttgttagcattaaaagaagaatatacaacacgccctgcaacagaggagacaatcaatgaccctacgaatccgaagcactattggagattccgtgtgcatgtgactttggaatcattgatcaaggataatgacctccaaaccaccatcaaagatctcgtcagttggagtggaagatcactccctaaggaagacgactcagaaatagaagcgagcccagtgtcggtgttgtcagcagcagaagctctttctgagaagcagaagtttgccagtaccacggaaaagcctgttcttgtcaaataaaaattgtagctgatgttattcatgctagtccttcaaatcatattatatcctataacctgctaagatgaagataacaataaggatcatccgtgctctgttccatctgtttgcattatgtttcttaatgaagtctacaaataaatcttgatgcatgtattgtttatgtcctgcccataagttgtagcttttataataatagtaatagtaattataagaggtactccgtactcataatgcaagtgtaaataaaacaatattgtgcaacatttaagtcaggctttctgcttgatactcactggcctgctacaaatgtcttggaattgagaaaaatatttacttagattaaattaacaactgttagtttatcacgcaatgtaaagatctatatgattaatagatatttaatttaattcagtataaaaaaaaaaaaaaaaaagaaaaaaaaaaaatt

SEQ ID NO: 616 - DNA, 1364 bp, Glycine max
gcgacaggtcttgttggaaaattccgaccatctattcctcttagtctggaagaacttgaaagagaaggaatatgggactttaatcgcctaagtcgcccatatattaagcgggaattattgcaggaaaaatttggtgatgcttggacttttgttgcaacaacttttctaaatgaaattgacaagaacttctatgagttcaaggaggattgcaacacagagaaaaaaatagcttccaaactgaaaatttgtgcagaaagttctctattgttggagagtgtagacaaattgaggcacaatctctttgatctttcacagaatatagttctaatccgagattcagaagatccaagaaaattttatcctcgtttcaaccttgaagatacctcaagtttccaggatttggatgatcatagcaaggattgttctcaaaagattataccatgactactatttctgtcgtcaagagaatctttggaggcaaaatgcattgaagaccctgcctgtacttctaaattcatcagacatgctagcctgtggggaagatttgggcctcattccatcttgtgtccatcctgttatgcaagaactgggattagttgggttgcgcattcagcgcatgcccaatgaacctgatctggaatttggtattccttctaagtacagctacatgacggtatgtgccccttcatgtcatgactgttccaccttgcgtgcttggtgggaagaagatgaagaaagaagactcaggtttttcaagaatgtgatggagtccgatgagttgccgcccgatcaatgtgttccagaagttgtacattttgttctaagacagcattttgaagccccatcaatgtgggcaatcttccctcttcaggacttgttagcattgaaagaagaatatacaacacgccctgcaacagaggagacaatcaacgaccctacgaatccgaagcactattggagataccgtgtgcatgtgactttggaatcactgatcaaagataatgacctccaaaccgccatcaaagatctcgtacgttggagtggaagatcactccctaaggaagacgactcagaagtagaagtgagcccagtgtcggcgttgtcatcagcagaagctctttctgagaagcagcagtttgccggtaccatggaaaagcctgttcttgtcaaataaaaattgtagctgatgttattcatgctagctcttcaaatcatattatatcctataatctgctaccttgaagataacaacaataaggatcatccttgttatatgttccatctgtttgcattatgtttcttaataaagaatacaaataaatcttgatgcatgttaaaaaaaaaaaaagaaaaaaaaagcggcc

SEQ ID NO: 617 - DNA, 883 bp, Glycine max
ccctcgcgttcgcccacgcgtccgcttgtatatccattgcgtgtggacgacagaaggggagagagagagagagagaaaaaagagaaagtgaaaattagaaactcttgtacttggttttatgccaaattagggactcttttggttgtcaattagatcacaaagatatggaggttgccatggaactggaagatgatctattttttgctgatttgagcaaggaaattgctctactaattatggatgaagatgaagatccacttgcttcttgtcctcctgactctcttcaggctttttctggggcaattcatcctcctccacagtttgctttcatctttgagcatgctttgagaagagaaagcaaagggacaggtgtatttatccctcaggcaacacagccaagaaggaagcagaggaaaggaagggctaataattcatatgcaaaacatcaaaagcagtctcaagatacaagaatggtttctcaagttcctaacaagaattctttcaaatccagaaatggctgagaatattatattatattagattatatagatccttgtgaaaagccagcataatcttacagattctactgattaatttgtttgctaagtttaataatttgtggatctaattctttttagcctttaggcaataattatatggttatttattttgtattgtttatgtatagctaaatttacatgggaaaaccatatatacctaaatattaggcatgatgtaggaaggttcacccaaggttttgttaccttcctctgcagacaagattttcgttgttatctggtttgatgtggtaagttttgtcatgatttcaaagatactagtgtgactattttcttcctaaaaaaaaaaaaaaaaaactcgagac

SEQ ID NO: 618 - DNA, 1154 bp, Glycine max
  misc_feature (662)..(662): n is a, c, g, or t
  misc_feature (674)..(674): n is a, c, g, or t
  misc_feature (723)..(723): n is a, c, g, or t
  misc_feature (801)..(801): n is a, c, g, or t
  misc_feature (1061)..(1061): n is a, c, g, or t
  misc_feature (1090)..(1090): n is a, c, g, or t
gtgtaggaaaggaaagggttttgtagagggagagaattccaaaatattatcgtaaaataaaactttttttttataaaaaaaaaaaacgtgtgtgtgtgtgtgttagtgttagcggaggcagatcggaagcgggaagttgggagatctgtgctagatggagggagttggggcccggctggggcggtcctcgacccggtacggaccggccacggtgttcactggaccggtgcggaagtggaagaagaaatggatccacgtgtccccctcttctgcttcctctaattccaacgccaataaccacgcttccaatgcctctcatcttctcctctacaagtggacccctctcacccaaagccagaacaccaccaacaacgccaacgctaacggtaatgccaaggacgcgccgccggagccacccgcggaaccgcctcgaagaaaattcaaatatgttccggttgctctactagaggagcaaaaaaatgaggctgcagaaaatgagggtactgagaaggttgacgaggaatctaaaccaattgatgttgattcaggtgcagcagaggtaactcgcaagaatgagactttggatgaaaaacctgacataaatgatgtcccaatggaagaaagtcagtctcagtacaaaaatcaggtggtgcgccaagatntgaatgaaagcnccttggatttaagtttgggcttgacatcacatgatgatgaacatgattntgattcaaaaactaatcaaacgagagatggccagtaatgcaagttaactcaagtggtactgaaacatgaacaggggtntcatgattctccagatagtgagaacataaatgattcaggctatataccttgttgatgggagggaattttcccctggctttatgttcaaccactggttattttaggttggattattgtaacgaatatgcctataatatggattttttttgttgagtttctttgccgggctgaatgtaatatgtattggaggaacggatagtgtacctttttcccaatcattggacagattttttccagatatttattgaaataggatattntggactttgaaactacaatggtgtggagntaaattgttttttttttctttttcaaaataaaataaatagcattcctgaaaaaaaaaaaaaaaa

SEQ ID NO: 619 - DNA, 929 bp, Glycine max
acatcattgttgttttctgtgttggggtcaaaggcaccgcactgaagcgaatctggtaaagcagaaaagcgtagttggtgaaattcctgggatcccccactggacggagtttttgttgctttttctttcattcatctcttacactctacgactactcttccattcccaaacgaaacgcagcgtttcttctgatcatggcaagcacgttgcggttatacttgacctgcattcggaacacgctcgaggccgcaatgtgcctccagaactttccctgccaagaagtcgaaaggcataacaagcccgaggttgaactcaaaaccagccctgaactcctgctcaatccggttttgatatgccgaaatgaggccgaaaaatgcttaatagaaacatctatcaattcattgcggataagtctcaaggtgaagcaggctgatgaacttgaaaacatactgaccaaaaaatttctaagatttctgtccatgagagccgaggctttccaagtcctgaggagaaagcctgttcagggatatgacattagcttccttataacaaattaccactgtgaggagatgcagaagcacaaacttattgactttattgtgcaatttatggaggacattgataaagagataagcgagctcaaaatgtcggtgaacacaagggggaggcttgtagctacagaatttctgaagcagtttatctgatgctttagactagttagaacttccatatccgtgtaaattgtactattgcaggtctagttttcacttcacttatgaagtgcttggtcctttgagccaatggtttgtgtttttattatatttaacagaagtgcagaataaattttgtagtttagtacagaaaaaaaaaaaaaaaaaacctgcatgtgacgcggagaaaatgaagctacagaagctagcagttagcac

SEQ ID NO: 620 - DNA, 1811 bp, Glycine max
atgagaaatattcacttggaaaattgtaaaaagaggcggggtcaaccagtttatcccggtcgcggcccgaatccaagggtcatcatcctctttaaaacgacgtcgttgactgcacttctttgctgaaaaagcgagcggcgagtaacaatgtgcggcgacgccacgaactgggacgaagacgcatacagagaaaccgtactcagggagagggaaatccaaacccgaaccgttttccgaaccgcttgggccccaccctacacctctaacctcgacactctccttgtcgcctctagcgacggttccgtcgcatcctactccatctcttcctccgtcgtcgcctctaagctcaaaaatccattcggttttgtcaatgccgatacagatgagttattggctgaaccaaattgcttcgttcaagcgcacgctggacctgcttacgatgtcaagttttatggtgacggcgaagatgctctgttgctgagctgtggtgatgatggtcagattcgaggatggagatggaaggaattttcaagctcaaattattctgtttcttcccaaggaaatgatatcaagcctgtacttgatgtggtgaatcctcaacacaaaggtccttggggtgcactttcacccgtcccagagaataatgctattgctgtcaatactcaggggggatctgtttttgccgcatctggtgattcttgtgcatattgttgggatgtgggtgcatattgttgggatgtggaaactggtaaagtgaaaatggtattcaaggggcacatggactatttgcattgtatagttgctcgcaactcatcaaatcagatcataacaggttcggaggatgggacaacacgaatttgggattgcaaaagtggaaagtgtacgcaagtgattgatccagcaagagatttgaaattaaagggatctgcttcatgggttggttgtgttgctttagatgcaagtgagagctggttggcttgcagtagtggacgtaatatatcactttggaaccttcctgcttcagaatgcgtatcaaagattccaactcgtgcttgtgtacaagacatgtcatttgacaataatcaaattttgacagttggtacagatcctctactcaatcgctttgacatgaatggcactatcctttcacaaatacagtgtgctccttcgtcatctttttctatctccttacatcctgcaggggttatggcagttggaggttatggatgtcttgttgatgttatctcacaatttggcagccacatgtgcacatttcgttgccagtgtgtctaagcgaagatctaatatagtttgacaattttgatacctcaaggccacccaaaacaatttcgaagtcaacgaatgacaagctttgggatttagtacagaattgcaagctcttccaaaattaagtttgaaatttgattgagtgaattgtggatatcttataattatgtgaattgcctgaaaataaaaaagatattattttttctatgactgtatttaggcttctagtgcgaggttttaaaaaaaaaaataaaaatgggagtggtggctgaaatattaaagtaggaaaagcttggatcacttcggaagtttttgcttcctgtgttaagtgttaacatctaaagcccttatgctgaatgagcaacacatggcctgtctgtactctggattccattcttctctacatatgccactcagcttatttaccaaaatacaaagactcctcagctgcatcatttgtatgtttctgaagttcatatcgtcaaaatgagtgtatcatgaagataaaagtacaatagtgtttg

SEQ ID NO: 621 - DNA, 851 bp, Glycine max
cccacgcgtccgcccacgcgtccgcccacgcgtcccgacggcgccgcgtaggcccccccagctgatccatttctcgcaacaacgcttaacctctctcattccccatttcctcacctccttcaaccgctgctaaattctagggttccgaaatggacgctggcggaaagatcaagaagggcgccggaggtagaaagggcggcggcccaaagaagaagccggtttcaaggtccgtcaaagccggtctccaattccccgtcggaagaattggccgttatttgaagaaaggaaggtacgctcagcgtgtcggtaccggtgctcccgtatacttggctgcagttctcgaatacctagctgccgaggtgcttgagttggctgggaatgccgcacgtgacaacaagaagaacaggattattccaagacacgtgcttttggcagtgaggaacgatgaagagttggggaaattgcttgctggagtgacaattgcacatggtggcgtgcttccaaacatcaaccctgttttgttgcctaagaagactgagagggcttccaaggaacctaaatctccatccaaggctaccaaatctcctaagaaagcttagattacttttttattttccatatttaatttagtgttgtatatcggtgtttaggtgcttttggtgtaacaggatattttatgtgtttcgaaaacactgtaattcttgtcccaatttgttgcttgtaggagtgagtttgcttcgttaatgaaaagtggaaacccccttgttttcaatcaaaaaaaaaaaaaaaaaaaaaaaaaaaaaaaaaaaagactagttctctctctaaaaaaaaaaaaaaaaaaaaaaaaa

SEQ ID NO: 622 - DNA, 760 bp, Glycine max
ccgtccgaccgccggccagaagacgacaggcggggatcgctctcacacctgtgattattcctcttttaacaatccacacccaaattctagggttccgaaatggacgctggcggaaagatcaagaagggcgccggaggtagaaagggcggcggcccaaagaagaagccggtttcaaggtccgtcaaagccggtctccaattccccgtcggaagaattggccgttatttgaagaaaggaaggtacgctcagcgtgtcggtaccggtgctcccgtatacttggctgcagttctcgaatacctagctgccgaggtgcttgagttggctgggaatgccgcacgtgacaacaagaagaacaggattattccaagacacgtgcttttggcagtgaggaacgatgaggagttggggaaattgcttgctggagtgacaattgcacatggtggcgtgcttccaaacattaaccctgttttgttgcctaagaagaccgagagggcttccaaggaacctaaatctccatccaaggctaccaaatctcctaagaaagcttaagtgtttttattttattttatttgaatatgtaaatcagtctttagatgctttttatgtgaaagaaaaaattatctattgcaaacactgtaattcctatcgtctcgcatgtaggagtttgctacattaatgaaatcttctttatttttttttgggggtccaaaaaaaaaaaaaaaaaaaaaaaaaaaaaaaaaaaaaaaaaaaaattaaaaaa

SEQ ID NO: 623 - DNA, 814 bp, Glycine max
cccacaccacccccacccctacacaacacattaacctttctcattccccatctcctcaccttattcagccactgctaatttctagggttccgaaatggacgctggcggaaagatcaagaagggcgccggaggaagaaagggcggcggccctaagaagaagccggtttcaaggtccgtcaaggccggtctccaattccccgtcggaagaattggccgttatttgaagaaaggaaggtacgcccagcgtgtcggtaccggtgctcccgtttacttggccgcagttctcgagtacctagctgctgaggtgcttgagttggctgggaatgctgcacgtgacaacaagaagaacaggattattccgagacatgtgctattggctgtgaggaacgatgaggagttggggaaattgcttgctggtgtcaccattgcacatggtggtgtgcttccaaacattaaccctgttttgttgcctaagaagacggagagggctgccaaggagcctaagtctccatccaaggctactaaatctcctaagaaggcctagattatcctttttttttttttttttttaaatctagtgttgtatatcggtgcttagatgcttttggtgtaacaggaaatttgatgtgtttcttaaacattgtaattcttgtcccattgtgttgcttgtaggagtgagtttgctttattaatgaaaagtggaaacctcttgttttcaatcaaaaaaaaaaaaaaacctttttatttttgttatgggttattgccatattgtattgattcagttgcaggtaagtgaagttattggtttttgaag

SEQ ID NO: 624 - DNA, 916 bp, Glycine max
tcgagtcagctacgtagggcccccccatcccaccatcactctcgctcttgcaattagtcctcttccaacaatccgcacctaaactctagggttctgacatggacactggtggaaagatcaagaagggcgccggaggaagaaagggcggcggcccaaagaagaagccggtttcaaggtccgtcaaggccggtctccaattccccgtcggaagaattggccgttatttgaagaaaggaaggtacgcccagcgtgtcggtaccggtgctcccgtttacttggccgcagttctcgagtacctagctgctgaggtgcttgagttggctgggaatgctgcacgtgacaacaagaagaacaggattattccgagacatgtgctattggctgtgaggaacgatgaggagttggggaaattgcttgctggtgtcaccattgctcatggtggtgttcttccgaacattaaccctgttttgttgcctaagaagactgagagggcttccaaggagcctaagtctccatccaaggctactaaatctcctaaaaagtcttaactgacttagtttattgtttctctatttagtgtgcacaaaatgtaaatctgtgtttaggttccttcttgtatcaccattatttgtagttctcaagtcgctgtttctttttcacattttcattcaatctgttgagacagcaagctctcagtaatggattgatttaattttcttatattcgtataattgtatcccgccttctctctatcgaaagattgcgcaatttgatttaaaaaaaaaaaaaaacaatcataattattgtttggataggtgtatgtgtgatccaagaaagaaatggacgttgatagtatgttacttagcactattgtaggcagtgacaagagtttaatgtcaaattatgcatttgcttg

SEQ ID NO: 625 - DNA, 1564 bp, Glycine max
aactttctgggcacaataccacatcacacagtagtaacaccaaccactcttctctcactctcgcaaaagctctctccaaccttattgctatcaacaaacaattcacggtttaactctcttttgttgttgtttgatggaaagctgcatcttccgctaccatcacccaacactcctcactctcccatcaatttcgcacaaaccccacttcagattcttcacaaggcctgatcttggtggtggtggtgtttcttcttcttcttcttgttttttatattataggcgaagaccctttatcagagcaagtgctggagcaagcccatgtgagttcagtagcctgaactctccgctggagccacgttccatggtggggaagttcctcagtgctgttcttcagaaccaccctcagatgttccatgtggctgttggggaggagctgaagctcttggctgaggatcgtgatgcggcacatgcccgcatggtgcttggttctgcctccgatgaggccttgcttcacaggaggattgcacaagtaaaagagaaccaatgtcaaattgctgtagaagatgttatgtacttgctgattttttacaagttttctgagatcagggtccctatggttccaaagctttctagttgtctttataatggcaggctagagatattgccttctaaggactgggaactagagtctattcatagctcggaagttttggatatgataagggaacacataactactgtaactggcttgagagcaaaatctagtgtaactgagtgttgggcaacaacccaagttagacaattcttacttgcccgggtttacgttgcctccattttatatggttactttttgaagtcagtttcattgaggtaccacctagaacgaaatctatcgttggctaatcatgatcttcaccttggtcataagacttcccttatgtgttcttatggattcaaagatgccatctttggccacttgagtaatatgccatccttagggcaagggttaataaggccggaagaggaaattgaggacttaaaatgttatgttatgagctttcatcccggatcattgcagagatgtgccagattgaggtctaaggaggctgtgaatttggttgggagttatagttgtgctctttttaacaacaaggaatcgggttcggttgagaatgatgatgttattttgacttcattttctagcttgaagagactagtcttggaagctgttgcttttggatctttcctgtgggagacagaagattacattgacaatgtatataagcttaaggatgactgagtagtataaaggcactagttgccaaataaattcttaagttgtcgagcgaattctccttgtatatatagtgagttttggttttagctttgaagtgttgggttatgtttatattgtatatatggcacatctttactctatatataatgtaaagttctagtgcttgaactttgtttaagttgatagattatagatattttaaatagtacaaagttattcactgtaatatggatctatatcttttttccaggtttttactttgtcccc

SEQ ID NO: 626 - DNA, 700 bp, Glycine max
aaatctctttacggctgcgagaagacgacagaaggacacgcacacgccaacgcacacgccacgcacaacacaatctcagctccagccttcttcttcttttcttttttttctctcccttccgcacccaagagagagaaagacgctgctagagaagaagaatatggcgggtgctgctcccaaacaattgttcggattcggagttgtggcgatgctcgccactctcattcttgctctctttatgcccgccgctgttcaggctcaatccgcatcccctgcacctgcacctactagcgacgggacctcccttgatcaagggatagcatatgtgttgatgctgctggctctggtactcacatacatcatccattcgccctaaatttcctccaccttctgaacttagagcagaaagggatatgggtgtttgatagggggttgttgtgtctgttatgattaacaagtttcgtacattgtgtagcaagaagtggaaaatgtaatattgctatgatacttttgttacaagagtaggtggtatgtttattttcccagttaagaaagtggtctgtgccatttagttgctagtggctagtggttgtggttagtaccaggttacagagttagctattattgtcgatgcatttcttagtaatacaataattatcttgcttttggcataaaaaaaaaaaaaaaaaaaaaaccccaa

SEQ ID NO: 627 - DNA, 725 bp, Glycine max
tacggctgcgagaagacgacagaaggggacgcatacgccacgcacaacacaacacaattctcagcttcttcagcgttcttttttttctctctctctctcttccttacgcacccaagagagagaaagagaaagagaatcgatcgacgctgctagagaagtagaagaagatggcgggtggtgctcccaaacaattgttcggattcggagttgtggcgttgcttgccactctcattcttcctctctttatgcccgccgctgttcaggctcaatccgcagcccctgcacctgcccctgctagcgacgggtcctcccttgatcaagggatagcttatgtgttgatgttgctggctctggtactcacatacatcatccactcggcctaaatttcctccaccttctgaacttatagagcagaaaagggttatgggtgtttgaagggggtgttgtgtttgttatgattaacaagtttcgtacattgtgtagcaagcagtgggaaatgtaatattgctaatacttatgttagaagagtaggtgttatgtttattttcccagttaataaaacggtctgtgccatttagtggctagtggttgtggtcagtacctggttacagagattgccaatgcatttcttttaataataattatcttgcttttggcataaaaaaaaaaaaaaaaaaaaaccccatatcactggaacctcatttgcatactatttatcctcatgg

SEQ ID NO: 628 - DNA, 1159 bp, Glycine max
tcacgtaggcccccccccccctaatgctcctgccattcaggggcagagttggtgtgttgcaaagcaaggagcccctgaagcttctcttcaatcagctttggactatgcttgtggaatgggtggtgcagattgttctcaaattcagcagggtggaaattgttacagtccagttactttgcagagccatgcttctgttgccttcaacagctactaccagaagaatccagctccaacaagctgtgactttggagggactgccaccttagttaacacaaatccaagcacgggttcgtgcatcttcccatcatcatcatcaacaacaacaacaacgccaaagtcatcatcacccccaacaccacctacgcaatcaagtccaacaacactaccaccaccaagtccattaacacctgcaccatctattccaacagcaccaccaacatcttcatcttcaggaacaggccctttcgggtatggtgccccaccttcagagttaaattcaagcaatccagcgtcaggtataatgccaggttttgcttctgatagccctcctgttgtaaataccacttcggtgtcgcgttctgtgggtttgagaccttttgttggcttcactattctgatggtatcatttggcactacgagactcagtatgcacccatagagtacttcaaaaccaagatttccatgaagaacatatagtatgagatgctcagtagtacctctagctatacgttggagttgtaatgttatgtagcattacattagatgcagtgcgtaggtctgtaggtgcagaaagttattagggtaagaaaggaacaaaagtaaggtacgtaagtgattatgagctgccaaaatgatcatagatgtgctaaaattcagttgaggtgaaggtgagggaaataattgctgctttatggtatgtaggttgtacaacagactaagattaatattggtcatgtacataatttttgaaagctagtagttcttttcattgtatggagtttgtagttcatgtaaattggtcatagttgttctggaaattgatcttcttaaatggggggggggggggggggggggggggggggggtgggtattcatcaaaatagtccccttcgcccatttcaaattttataaaaagtgtgatatatgaggccccttatgt

SEQ ID NO: 629 - DNA, 771 bp, Glycine max
cccacgcgtccgtattgtaaacaaaacaaatctcatgcggaagcaagcaaacaaagtcataaagtggtggttgagaattttcttttccaaagaaaaacaaacgaacaactcaacgcgttctagtttttcttatagacaccttctagaaaaaaataactcaaccccaacattctcgtacgcttgatccttcctgggctgtcaacaattttccctcttttcattttctgtttctgaaaaatcataccttgaaattgaaagtcccttgttttttttttattccttggtgttttttttgttgctgtgagagaaatgtgccctttaaggtttatcttggtgttcttctccgccgtgctggcgggttattttgcgtggaaaacggtgcgttctgacccgaagatcgaggtgttttccgaggattctgccaatgaagataaatccttcaagaaggaagattttgatttcaagaagatgattcagaatggattttggggtttcgttgacatggctagtgggagctatctgtggaggaatttgaggccaaccaacaaagatgccgaattgaagagttcttagtgacctaaccctcttctttaatcatgagtctttgtttagtgatttgtcttgtggaaatgtatgtgtaaattattgtattcccacttctctttatccttgtttgtgggttcaagaatgtttggtggataaatttggccaaagaaacgttgtggaattctcatcattctgcaggttgtcgcatgttttggaaaaaaaaaa

SEQ ID NO: 630 - DNA, 1653 bp, Glycine max
agagaaaacagggtttgtattatttgcggggcaaatgtcatgattgagataactggccttgctgacataagtcatcattgaacttacacaccactcccacccattctctctcctttctattcgaccccgctccctcgccccccccccgatcactccaaaacctaaactccccttgcttttcttaccatctccttcaattctctctcactctcttttttctctcaccaaaacctttcacccaatatcctcaaactactacttctgataaattgctaatttttataaagctagctagagatgatggttcaaaaggaagatttgggtttgagtttaagcctcaacttccctcatcacaataccccaaatcctcaacatccgagtctcatgtcatcctctactcattcctcttctccttctggttgcaaccctcaaaaaccctcttggaacgaggctttcacttcttcggatcgaaactccgacacatgcagaggcgaaacgcgatcgttcctgcgcggaatcgacgtgaaccggttaccttccgccgtggacaccgaggaggaaacgggagtttcgtctccgaacagcaccgtctctagcgtgagtggaaaacgtagcgagagagaagaaccgaacggcgaagaacacgacatggacagagcctgttcccgcggaatcagcgacgaggaagacgctgaaaccgcaaggaaaaaacttagactctccaaagaccaatccgctatactcgaagaaagcttcaaagaacacaacaccctcaaccccaagcaaaaattggcactggcgaaacagctaggacttcgacctagacaagtggaggtgtggttccagaacagaagagcaaggactaagctgaagcaaaccgaggtggactgcgaagtattgaaaaggtgctgcgagaatctgacggaggaaaatagaaggttgcagaaggaggttcaggagcttagagcactgaaactttccccacagttttacatgcaaatgaccccacccacgacgctcaccatgtgcccctcttgcgagcgtgtggctgttccgtcctccgccgtcgatgctgccacgcgtcatcatcccatggcccaggcccaggcccaggcccagattcggcacaggcccattggcccgtgggcttccgcctctcccattacgcaccggccgtttgatgtcttccaccactgatcttgagggtgttttggtcattgtgaaattattattatttactattctgggcctacttgtaccaccgtgtaggtgtgtaaccccaaaaggagagaaaaattgggggaaacagaaagagtgagggagcggtcgaaacagcgtgctgtggaattgtgcggtctaaggatatggtcattagaagaagggatttggtgggtctccaatgttttgtaccagtttgacctatcatcttttgttttgttgggtatgacctatatattagttactagttaggtgtttttttttattcagtttatagtattacttaacttttccccctctaaacagagactttgtgtaaagtgcaattatctagttaaattatatagggtttggttcccgtggcctatttcacttaattgagatcattatttattattcttttataaatcaagggcggccgccgactagtagctc

SEQ ID NO: 631 - DNA, 1404 bp, Glycine max
cacgcgtccgctcaaactcccctgctattcttcttctccctcaattctctctcaccaaaaccctttgcacccaataccctcaaactcaacttcaattgctaatttttataaagctagccggagatgatggttcaaaaggaagatttgggtttgagtttaagtctcaatttccctcatcacagtaccccaaatcctcaacatctgagtctcatgtcatcctctactcattcctcttccccttctggtttcaaccctcaaaaaccctcttggaacgaggctttcgcttcttcggatccagatcgaaactccgacacatgcagaggcgaaacacggtcgttcctgcggggaatcgacgtgaaccggttaccttccgccgtggacgccgaggaggaagcgggagtttcgtctccaaacagcaccgtctcgtgcgtgagcggaaaacgaagcgagagagaacccaacggcgaagaacacgacatggacagagcctgttcccgcggaatcagcgacgaagaagacgctgaaacctcaaggaaaaaacttagactctccaaagaccaatccgctatcctcgaagaaagcttcaaagaacacaacaccctcaaccccaagcaaaaattggcactggcaaaacagctagggcttcgacctagacaagtggaggtgtggttccagaacagaagggcaaggactaagctgaagcaaactgaggtggactgcgaagtattgaaaaggtgctgtgagaatctgacggaggaaaatagaaggttacagaaggaggttcaggagcttagagcactgaaactttccccccagttttacatgcaaatgagcccacccacgacgctcactatgtgcccctcttgcgagcgtgtggctgtttcgtcctccgccgttggttctgccacgcgtcatcatcccatggcccatgcccatgcccatgctcggcccatgcccaatggcccgtgggcttccgcagctcccattccacaccggccgtttgatgctttccaccaatgatcttgagggtgttttggtcattgtgaattattattatttacaattatgggcctacttgtaccaccgtgaatgtgtgtaccccaaaagagagaaaatattgggagaaacagtgagggagcggttgaaacagcatgctgtggaattgtgcgtgttccaaagtgcggtgcggtctaaggatatggtcattagaagaagggatttggtgggtctccaatgttttgtaccagtttgacccatcaacttttgttttgttgggtatgacctatattagttaggagtttttcagtttttagtattacttaaattttctcctcaacagagactttgtgtaaagtgcaattttctagttaaatttcacttaattgggtttgggataaaaaaaaa

SEQ ID NO: 632 - DNA, 957 bp, Glycine max
ccgcccccccattcggcccggaacccctcttttggtgttcgaacaaattagggttttcccaaccctcttcccttgttcgaaactagcctaatcaaaaccgaaacaaacgattacaaaaacaagaaaagaagaaaaataatcattcattgctcggtgagaagagagagaggaacggcccgatgaccgggaaggcgaagcccaagaagcacacggcgaaggaaatcgccgcgaaggtggacgccgccaccactaaccgcggcggcgggaaggccggcctgaaggaccgatccgggttggagaagggcgggcacgcgaaatacgagtgccctcactgcaaagtgacggcgccggacgtgaaatcaatgcaaattcaccacgacgcgcgtcaccccaagattccctttgaggaggacaaagtcgtcaatcttcacgcgacgcacgttcctgaatcctccaagcctcgccccggtgttcgcggaagcctcaagaagtgatcgtgatcgcaatcgatcgtcgcttttgtttttatggccccttcattcgtagtgttctcagtctctgttttttttttctttttcttgtttttttttgttgcctaagttgttgttgttaaatattttggaagtgggttttttaagggaaggggttatgaattgtgatgatgccgtgtatgaaggggcggcagagaagggtttttcctcctttgcaggaatgagattgactatgttgttaactgagcccttctttttaaagatggaatatgtatattgttccatataatgaaagttaaagtggtgttgttgacctactactaaaaaaaaaaaaaaaaaaaaaaaaaaaaaaaaaaaaaaaaaaaaaaaaaaaaattaaaaaaagggcagatctcctattttattatttttttttcagattaaaaaataatatatggggggggcgggcgggccttccttttttatt

SEQ ID NO: 633 - DNA, 1546 bp, Glycine max
acggctgcgagaagatgacagaaggggactatttttattattattataatattattctctcacgtaatggcgtcttcagctcaagtgcctaacctcttcggcggcgccacctcagctccgccgccaactccggcggcgcaccatgacaacatcatgtcctcatccgacgccgccgatgcgctctcgcgcctcctccagcgcctcccgcccacgctctccctccccacgcgcctcccctcgccttcctccgcagccgccacgtgtcctccctgcctctcccttaacgacgtcctctcctgcgtttccaaactcggttacgcgcaactcaccgatcactcagtcccctccgaactcgccaactcggccgagtcagaagcgctggcactattcgacctttcgcaagaccagaagcagtccttgttccccaaaaactggcctcttggctacggaaacgatgaagatgaagacgaagacggggtcgccgactcgttccgcttcgactcggcgtgctcgaccgagtcgagcgagttggcactcttttccctgcgcaagttcgcgcgtgaactggagaagctgggtttaatgatcgttgatgagttaacaaaagacttggggtgtgagaacccgctgggtgatgacccgaccagggtatgttcggttatgtgggtttcggagtctctgcccggaaacaaatcgggtgggttttacccgtttgtaatcgggctgcagtaccagataaggaatcagaaatactcattgctgtcggattcgggatgggtttctgtgctgccacacgtggactccattttggtcacttttggtgacattgctcaggtgtggagcaatggcaagttaaagaaagtgagaggtagaccaatggctacagtgggagatgaaaatggttcgcgctgcataacaatgtcattgctgataactcttcctacagatagcagagtggctccactccttcccaaggtaacatgcaacaaggaccaaaaggaagaagaaattgaaggagaagaagaagaaaacaatgatggtggtgatgaagaactagagaagagggtgttcaactcttttgactttgaggactatgcttggagagtttaccatgaacgcatccttttcaaagatccattggataggtaccgtgttgtttgatcttctcagccatctatgttttgtgtgagagattcattaatttgtcatgctagtgttagtctagtaaggtttgaattttggatgagtgaaagtgaaagggaaaaatgagaggaccacaataatgagatgtatatcatatgctccatttatttattggattgattttgaagttagagaagtgtcacttagacacttattttttactttagctttcaatcaggaattcagagtttgtgtcagttactctagggactggggtccaactctgccatgccgatattgacgagacagtacagtggcttcaattatatatctttcaatgaagtatcattaaatcttgaatatcggaaaaaaaaaaaaaaccaccagcggccgctctacaagc

SEQ ID NO: 634 - DNA, 772 bp, Glycine max
  misc_feature (748)..(748): n is a, c, g, or t
acactatttcttattattctctcacgtaatggcgtcttcagctcaagtgccaaacctcttcggcagtgccacctcagctccgccgccaaccccggcggcgcaccacgacaacatcatgtcctcctccgacgccgccgacgcgctctcctgcctcctccaccgcctcccgcccacgctctcccttcccacgcgcctcccctcgccttcctccgcagccgccacgtctcccccctccctctccctaaacgacgtattctcctgcgtttcaaaactcggttacgcgcaactcaccgatcactcagtcccctccgaactcgccaactcggccgagtcggaagcgcttgccctctttgacctttccaaagaacagaagaactctctcttccccaaaaactggcctctcggatacggcggcgacgacgaagacgaagacgagctcgccgagtcgttccgcttcgactcggcgtgttcgaccgagtcgaacgagttggcactcttttccctgcgcaagtttgcgcgcgaactggagatgctgggtttaaagatcgttgatgggttaacaaaggacttggggtgtgagaatccgcttgggatgacccgaaccggttctgtgtcggtccggtgggtttcggagtctctgtcccggaacaatcgggtgggtttaccccgttggtatcggatggcggtacagaaaaggaatcaaaaatctccttgctggcgaatcggaatgggttcttggctgccaccngggactccatttggggcatggtgg

SEQ ID NO: 635 - DNA, 1157 bp, Glycine max
tactcgagccgaatcggctcgagacggctgcgagaagcccacgcggccttagggttagattcgttgttgttgttctaaaacgtccacacattctccgtcgccacaacaacaatggctccgaagaaaggtgtgaaaggttccgttgtagcagcgaagaagaaggttcaggagaaggtgacgaatcctttgttcgagaagcgtccgaagcagttcgggatcggaggcgcgctgccgccgaagcgggacctgacgcggttcgtgaagtggccgaagaacgtccaaatccaacgcaagaagcgcatcctcaagcagaggctcaaggtccctcctgcactcaaccagttcaccaaaaccctagacaagaatctcgccacgaatctatttaagatgctgctcaagtacaggccggaggacaaggcggagaagaaggagcggctcttgaagagggctcaggctgaggccgatgggaagcctgttgaggccaagaagcctattgttgtcaaatacggtctcaaccatgttacttaccttattgagcagaacaaggcacaactggttgtgattgctcacgacgtggacccaattgagctggtggtctggcttccagcattgtgcaggaagatggaaattccatactgcattgtcaagggcaaagcacgcttgggaacgattgtccacaagaaaactgcttcagttttgtgcttgacaactgtcaagaatgaagacaagatggagttcagtagaatcctagaagctattaaggccaacttcaatgacaagtatgatgaatacagaaagaagtggggtggtggaatcatgggttccaaatctcaagccaagaccagggccaaggagaagctccttgccaaggaagcagcccaaagaatgaactagattcacttgtttttacattattgaggttgccatttttctatattttatatgggagcatttacaagttaaaatgtgaggttttacttcattttggtagctcgtaatccacaaggaccgattttgatctttgattattcgtagttattttaaacttagaaatggaatgtttcccctttttcggttcaggagttgctagtcagtattcgagattttgcagcaattcagtagtttctgaccgtcgcgttgcttaaaaatcggggtcc

SEQ ID NO: 636 - DNA, 938 bp, Glycine max
cgtttcatgggttgggtttggaccaatccatagccgaagagaaaaagagacaaggaccgtctagaattgatttcattgagtgtagcagcaaccaattccatttccagtttctgattcgtcaaacggacaaaggaagtgaaagggtttagggtgtgacctgagatcaacatgttgcggaggcttctctcttctcacctcaaaaccctagccgccaccgcttcttcttccactccccgatctgcttccgccgccgccagattcgccgctctctctcgctcctcccgctacttctcaacccagtccgaggatgctactgccatcaaaaagaaggttgaggatgtaatgccaatcgctactggtcacgagcgcgaggagcttcaggctgagctcgagggaaggaatattcttgaaatagaccatcccgaaggtccattcggcacgaaggaagcacctgctgttgtcaaatcttactatgataaaaggatagtcggatgcccaggaggtgaaggtgaggatgagcatgatgttgtctggttttggctggagaaagacaagccccacgaatgtccagtgtgcgcacagtattttgttcttgaagtggtaggacctggtggatcacccgatgggcatggcgatgatgatcaccattgattgcaatccttcaattaaatctggaataaattctggaaagatggagagacattgtttagaatacactctggcctttcaaaatcctgtggcctatgtttgattttgatttgtctataccttgttgtgttgcaacttttgagctagaaagtttatgcgattatttgaacgcaggatgctcatttgcttgagctaccaattctgttagacaatgttttgtgcattgtgaaataattgatagaacttgacgattttttaaaaaaaaaaacgcgagactagttctctctctc

SEQ ID NO: 637 - DNA, 803 bp, Glycine max
ggactcaaaatcttggtagttttgtttatgatcaatgaggcatcaaatttttgtctgcattttacaaaatgacaaagttttgtcaattgtcacgcaccacactatgtatacatcattatatatttactctcttggacacaccggtcttcaatctactagattttttttttgctcagccttcaatctactagatgatgcaaaatactagtacaaataatattaaaagcaacaaaatgactacttggtcttttatttatttatcaaactttccaatattctgaaatttagcagatgacacagccactaggatcctcttcgtaacttgtgacatagtgactttgaccataatgtggtgtcatctgataataaaggggataggcttcatggagctttagaggaactggtacttttgctggctccacattctccttcttctcctcttttgctggtccaactgaaactatttcagtgtgacaacactttcgtagcttggacactgcactcactggatcaatgtcccccaacacgatcattttcatgtctttcatatcaacagaaactgattcaacccctgaaaggccagatgctgttttcatagctttttgcttgattctatcaccatgtaagtccaactgtaagactactttcttcattgtcgttgctgaagcttgcttgtgagagctaacaacaattgtttggtgacaaatgacaattgcaaaaaaggaagtctttttattttggaaatgaagttgtgatcggggggggggggacctacgtacctgactcgagggggtgcccggtac

SEQ ID NO: 638 - DNA, 2031 bp, Glycine max
tcgagtcagctccgtggccccccccccattcttcaaattagagactctgggaaccttgttgatgtacgtgctattggggaattctgccgtgaagatgatgagctttttctcaattcaaatgctcagggcatggcattttctgacaaaaataaacagcttcaattgcctgggaaccacattgaaaatcacatgcatcaaggccagcctaatctggggaattcttttttaagtggtataaagcagcgattactttcattcatattccagggactatggaatgaagaaagagatgataccttgaggatccaaaggctcaggaagaaattttacttccactttcaagattatgttgatttgattatctggaaggtgcaattcttggaccgacaccatttactaatcaagtttggtagtgtagatggaggggtgtcccgaaatgctgatcaccacccagcttttgttgctgtatataacatggatacaactgaaattgtatcattttatcagaattcaccagacgagctttatctgttgtttgagcagttctgtgaccacttccatgcaacatcaaggaattcaatgtatatgaatttcatatcttctcattcaaataatatccacgcactggaacagctacggagcattaaagataaggcaagcagctctgcacagtttgtgaagaagatgcttgcctctttgcccttcagctgtcagtcacagagtccttctccttacttcgaccaatctcttttccggtttgatgataaggtttactattgatgtttgtttgcttgtctagtttccatgcagtgaccagagttttttaattgaattatatatatttgggacaaagttggggatataccggtgaaagtggaattccagctgttagatgagcattaataaataagttagctggaatgtggaatcaaattggggtcctccctttggagacaggtcataatatcagtttgacttattacttaaggcctgtctttttatcctgttgggagggtatcatgtcgatctgaatgtccattttatgacttttatatatctggaaagaaatttgaagctgagtttctttgctggtggtggcaacctttccaacactaatattgacaactggtgtattagaaaggatatggtaattggaatatagattctagaggctgattactgtttgagattccaattttattgaaaaaagaggggtgattggaggcatagaattttacgttgaattactttgggaagaaagattttctatggttattcatgtgaaaaaaagggattggagggggtggagggggaaaaaattggcatgcaagttgatgtgccatgtaaaaagcgtttgtcttatatacatacattaaacatacacgcacatgcacaaatatctgcaagatttactaaacaatgaatgaaagttctcagtcgtttaatttccttttgtctcctttatcatccacaaaaattgtgattcttcactgtagcactttttaattctcccccgtcgttgcagctgatttctgcaactgatcgacataggcaatcaactgaccatccaatcaagtttattttaaggaggcatccgtattctctcaaatttaagatcaaaccaggtcctgaagctggtagtatggatggtcgtgcaaaaaagatctcgtcgtttctttttcatccaattttgccccttgctctctctgttcaacagactttgttcttgcagccttcagttgtaaatattcactttcgaagatgagcgtagatttatagattacaaatgagagtagatttacatttacttgtcttccactgttaccgtctttactgaatcaagaggatgtatattcagtcggtacttgcaagccaaaatgtatgtcaatcagattctaacgattgctgtgacaatcgacgctcttctaaattttggtcattttattttattttaaaattttaaactaattaccgaaatttttatcatttaaaaaatattggaaaagtattatttgcaacagcattctaatt

SEQ ID NO: 639 - DNA, 1209 bp, Glycine max
  misc_feature (105)..(105): n is a, c, g, or t
cgtgctattggggaattctgccgtgaagatgatgagctttttctcaattcaaatgctcagggcatggcattttctgacaaaaataaacagcttcaattgcctggngaaccacattgaaaatcacatgcatcaaggccagcctaatctggggaattcttttttaagtggtataaagcagcgattactttcattcatattccagggactatggaatgaagaaagagatgataccttgaggatccaaaggctcaggaagaaattttacttccactttcaagattatgttgatttaattatctggaaggtgcaatttttggaccgacaccatttgttaatcaagtttggtagtgtagatggaggggtgtcccgaaatgctgatcaccacccagcttttgttgctgtatataacatggatacaactgaaattgtatcattttatcagaattcaccagacgagctttatctgttgtttgagcagttctgtgaccacttccatgcaacatcaaggaattcaatgtatatgaatttcatatcttctcattcaaataatatccacgcactggaacagctccggagcattaaagataaggcaagcagctctgcacagtttgtgaagaagatgcttgcctctttgcccttcagctgtcagtcacagagtccttctccttacttcgaccaatctcttttccggtttgatgataagctgatttctgcaactgatcgacataggcaatcaactgaccatccaatcaagtttattttaaggaggcatccgtattctctcaaatttaagatcaaaccaggtcctgaagctggtagtatggatggtcgtgcaaaaaagatctcgtcgtttctttttcatccaattttgccccttgctctctctgttcaacagactttgttcttgcagccttcagttgtaaatattcactttcgaagatgagcgtagatttatagattacaaatgagagtagatttacatttacttgtcttccactgttaccgtctttactgaatcaagaggatgtatattcagtcggtacttgcaagccaaaatgtatgtcaatcagattctaacgattgctgtgacaatcgacgctcttctaaattttggtcattttattttattttaaaattttaaactaattaccgaaatttttatcatttaaaaaatattggaaaagtattatttgcaacagcattctaatt

SEQ ID NO: 640 - DNA, 982 bp, Glycine max
acatcaaagaattcaatgtatataatttcatatctctcattcaaataatatccacgcactggcgcgcacgaggccccgtgccgatttggcacgcagcgttctgcacagtttgtgaagaagatgcttgcctctttgcccttcagctgtcagtcacagagtccttctccttactttgaccaatctcttttccggtttgatgataagctgatttctgcaactgatcgacataggcaatcaactgaccatccaatcaagttcattttaaggaggtatccgtattctctcaaatttaagatcaaaccaggtcctgaagctggcagtatggatggtcgtgcaaaaaagatctcttcgtttctttttcatccaattttgccccttgctctctccgttcaacagactttgttcttgcagccttcagttgtaaatattcactttcggagatgagcgtagatttatagattacaaaaaaatgagattagatttacttgtcttccactgaatcaagaggatttattttcagtcggtacttgcaagccaaaatgtatctcgatcagattctaatgattgctgtgacaatcgactctcttttaaattttggtcattttattttatttaaaaattttaaactaattaccgaaaaatttatcattttaaatatattggaaaagtattatatgcaaaaaagatgctactgcaaatcaaaaaaaaagatgaggacataatgccaatcgctactggccaccagcgcgaggagcttccggctgagctccagggaaggaatattcttgaaatagaccatcccgaaggtccattcggcacaaaggaagcacctgctgttgtcaaatcttactatgataaaaggatagtcggatgcccaagaggtgaaggtgaggatgaacatgacgttgtctggttttggctggagaaagacaagccccatgaatgtccagtgtgggcgacgtattttggtcttgaagtggta

SEQ ID NO: 641 - DNA, 968 bp, Glycine max
ataagtatttcattttcagcgttccatgggttgggtttggaccaatccatagccgaagaagagaaaaaagagacaaggaccgtcttgagttaatttgattcagtgtagcagccagcagccataagcaacgcaacaattccatttccagtttctgattcgtcacgtcagacaaaggaaggggttagggtgtgacctgagatcaaaatgttgcggaggcttctctcttctcacctcaaaaccctagcctcctccgccgccgccgccgccaccgccactccccgatctgcttccgcctccgccagattcgccgctctctctcgctcctgcctctacttctcaacccaatccgaggatgctactgcgatcaaaaagaaggttgaggacataatgccaatcgctactggccacgagcgcgaggagcttcaggctgagctcgagggaaggaatattcttgaaatagaccatcccgaaggtccattcggcacaaaggaagcacctgctgttgtcaaatcttactatgataaaaggatagtcggatgcccaggaggtgaaggtgaggatgagcatgatgttgtctggttttggctggagaaagacaagccccatgaatgtccagtgtgcgcacagtattttgttcttgaagtggtaggacctggtggaccacccgatggacatggtgatgatgatcaccattgattgcatccttcaattaaatctggaataaattctggaaagatggagagacattgtttagcatacactctggcctttcaaaatcctgtggcctaagtttgattttgatttgtctataccttattgtgtcacaacttttgagatagaaagtttatgcgattatttgaacgcaggatgctcatttgcttgagctaccaattctgttagactatgttttgtgcgttgtgaaataattaatagaacttgacgattctttaaaaaaaaatgatttctga

SEQ ID NO: 642 - DNA, 1001 bp, Glycine max
ataacccatctctgatggctctttgcgttcccactgccactgctactctgccattcaaatgtataattgattcccactcttcaaagccaacttctctattctcattctcaccaaaaaaattgaacaccaccccccacctcaacctcatattacaagtacaagtagctgattctggcaagtggaggaacatggtttcatttttcccaggttttctaactaaaggtagcgatgttcagaagctcaaggtggagctctatgaagcaattgcaccccttgaccgaggtgccgaggctactcctgaggaccaacaacgtgtggaccagattgctcgtaaacttgaggctgtgaatcctgttaaggagcctctcaagtctggtttgctcaatgggaaatgggagcttttctatacaacatctcaatcaattctgcaaacacagagaccgaaactcttgcgaccaaatggaaagatctatcaggcaattaatgtggataccttgagagctcaaaatatagaaacttggccgttctacaaccaggccactgccaatttagtgcctcttaactcaaaaagggtggctgtcaagtttgacttcttcaagattgctagtctgatacctattaaatcacctgggagtggtcgtggtcaattggaaattacttatttggatgaagatctacgaatatcaagaggaaatagaggtaatttgttcatcttgaaaatggtggatccatcctatagagtccctctttgacgtggattctccaagaatcagtagtggccggtggcttcaattttcactttttggcataaatgctccagtttgtctgtctaaaatttccgccagtttatgctttctttctgttgtatcattgtatatttttttcagttacaaccatttacataaatttaattaacacaaaaaaaaaaaaaaaaatgctttctaagaaaatttataaaatagtaattttctaaattaaaaaaacaaaaaaaaaaaaaaaaa

SEQ ID NO: 643 - DNA, 1133 bp, Glycine max
tctcgagccgattcggctcgtctacggctgcgagaagacgacagaagggggcgcattgaacgaaaattagggtttgtagtgtagcaggaacaagcagcaatggcgccgaaggtaacacgcaaggttagcagaaaccccgaattgataaggggaattggaaagtactcgaggtcgcagatgtaccacaagaggggcatttgggctatcaaggccaaaaatggtggcgttttacctcgccacgaccctaaacccaaacctgaaacacccgctgaaaaaccacccaaattttaccctgctgatgatatcaagaagccccttgtcaacaagcacaaacccaaacccgctaagctcaggccaaccctttctccgcagggctagcattactccgggaacagtgttgattcttcttgctggtagatttaagggaaagagggtagtctttttgaagcagcttccttctggattgcttcttgtaactggtcctttcaaggttaatggagttcctttgagacgtgtgaatcaggcctatgttattggcacatcaaccaaagtagatatctctgctgttaatgttgacagctttggcgacaaatactttgcgaaggaagcccagaagaagaagaagaagggagaaggcgagttctttgaggcagagaaagaggaaaagagtgtgttgccccagcagaagaaagatgaccagaaaactgtggacgctgcagtgttaaaagccattgagagtgtgccagacttgaagtcctatttgggtgccaggttttctctgaaggccggggtgaaaccacatgagctagtcttctagaggaaagaggggtgttactcttgtttttgatatcgtgtttgtttattgatgctggttcttatagttgccctcttataacattcttgttagcagacaaatgaagaacctaaaattttgttagtcaaattgtgacgcgtgctctttacattttgttgattgtgtgaattttagatattgtgtggacctttagcatgccaaatgaaaaaaaatttggaaacagatatacatgtggcaaggctggtgaatggtacttgtaaagaaccgtggtagtagtaaaatgggtatgaacaattatcatgcaaaattttctgaactt

SEQ ID NO: 644 - DNA, 1017 bp, Glycine max
ggctcgaactcgagccgaatcggctcgagtacggctgcgagaagacgacagaagggggcgcattgaacgaaaattagggtttgtagtgtagcaggaagaagcagcaatggcgccgaagataacacgtaaggttagcagaaaccctgaattgataaggggaatcggaaagtactcgaggtcgcagatgtaccacaagaggggcatttgggctatcaaggccaaaaacggtggcgttttacctcgccacgaccctaaacccaagcctgaagctcctgctgaaaaaccacccaaattttaccctgctgatgatatcaagaagccccttgtcaacaagcacaaaccgaaaccagctaagctcagggctagcattactcccgggacagtgttgattcttcttgccggtagatttaagggaaagagggtagtctttttgaagcagcttccttctgggttgcttcttgtgactggtcctttcaagattaatggagttcctttgagacgtgtcaatcagtcgtatgttattggcacatcaaccaaagtagatgtgtctgctgttaatgttgaccagtttgatgacaaatactttgcaaaggaagcccagaagaagaagaagaagggagagggcgagttctttgaggcagaaaaggaggaaaagagtgtgttgccccagcagaagaaagatgaccagaaaactgttgactctgcattgataaaagccatcgggagtgttccagatttgaagacatatctgggtgctaggttttctttaaaggctggcgtgaaacctcatgagctagttttctagaggaaagaatggtgtttttcttgtttgcatatcctgttatttttattgattttggtcctaatagttgcacttttataacttccttgtcaacagacaaattaagtacttaaaaattttgttaggcaccaattgtgtctcggatataaatcacaaaaaaaaactcaagaccaaaaaaaaaaagcgcccgctctagaggatcccagcttacgtac

SEQ ID NO: 645 - DNA, 1031 bp, Glycine max
aggtaccccggtcccgcggctgcgccatgttcattcgcgcagtaaacgagaattagggtttgtagtgcagcaggaagaagcaataatggcgccgaagataacacgtaaggttagcagaaaccccgaattgataaggggaatcggaaagtactcgaggtctcaaatgtaccacaagaggggcatttgggctatcaaggccaaaaacggtggcgttttacctcgccacggccctaaacccaaacctgaaactcccgctgaaaaaccacccaaattttaccctgctgacgatgtcaagaaaccccttgtcaacaagcacaaacccaaacccgcgaagctcagggctagcattactcccgggacagtgttgattcttcttgccggtagatttaagggaaagagggtcgtctttttgaagcagcttccttctgggttgcttcttgtaactggtcctttcaagattaatggagttcctttgagacgtgtgaatcagtcctatgttattggcacttcaaccaaagcaaatgtctctgctgttaatgtcgaacagtttgatgacaaatactttacaaaggaagcccagaagaagaagaagggagagggcgaattctttgaggcagagaaggaggaaaagagtgtgttgccccagcagaagaaagatgaccagaaaactgttgactctgcgttgataaaagccatcgagagtgttccagacttgaagacttatctgggtgccaggttttctctaaaggctggcgtgaaacctcatgagctagtcttctagagtaaaggggtgttactcttgttcttcatatcctggttgtttattgatgtttgtccgtatagctgcgctcttataacttgttaacagacaaattaagtacttaaaattttgttaaggttaccaactgtgtctcggatattccttcctgcaattttgctccttttcacactttgttgattgtatgaattttagatgtgtttggggctttcgtcttgtcatggcaaatgaagtggtgcaaagtcattagtgg

SEQ ID NO: 646 - DNA, 977 bp, Glycine max
  misc_feature (970)..(970): n is a, c, g, or t
aaataaaaatttctttcctcgcctccgccctcgcgtccgttcgcccaaaaccttacacacatacatcagagggacacgaactcaaaccgtttaagcttctccgagttttgacctacaacactctcgaatcccctcttgtgtgttgtagccgccccgtgaccatcaatggcggaaactgctgtcgacaaatcccaatctctcgctgaggaatattatgtgaaggataagcaaacagctgtagttgaaaaacctgttgaggtcaaagaagttgaaaacccagaggaggctgcttctgaggaacccgttgctgagaaaactgtggaagaaacaactcctgttgcccctgcagttgctcaggaaagcagtgaagtcacccctcctcctgctgaagaaagcactgaagagcaaagtagtggaaatgttgaagaaaactctggcaatgaagatgcagctgaagagacccctgaaattaagcttgaaactgctccagcagatttccgttttccaactacaaatcaaaccaggcattgctttacccgatacgttgaatatcatcgatgcgtagctgccaagggagaaggtgcaccagaatgtgacaagtttgccaaatattatcgttctctttgccctggtgaatggattgacagatggaacgagcaaagggagaatggaacattcccaggcccgctgtaggtggtgtgcataactgaaatggctgcacaattcgtttttcagtattatatttcaaattgctagagataaactcccatacatttggggaatgtacgcattggcctaataagaaattttggatatatgtttgaactaagcttgagttatacaattttcaggaaacgcacctggtgaaatgtccagagatatatgctataatttaactggattctttaagccgaaaaaaaaaaggtattccgcattgcaaaaaaaaaaaaaaaaaaaaaagcggccgctntagagga

SEQ ID NO: 647 - DNA, 933 bp, Glycine max
cgcgtccgcccacgcgtccgcccacgcgtccggttggtattgaggggaatgttggctggctcgaggcttttcacaaaggaggttcacagtggatggaactataaggcttcggaccaggcttcattcccctcaaaagtacttccttcatttgtttatacttcaaacttcaaaccacaagatcataggtgtagctacgtacctagctagcttctctctttattttgaaggatctctctacacacacgtcatgtgtgtggttgagaacttgagatgtttccttgcaaaggtgaggttgagaggaatgttgtctggctcgaggtcatggaggaagaggagagtactgagatcagtgaaagtttccaatggaaatttaccctcttaacacacacacagaaaaaatgattctcggaccaggcttcattccccccacccaacttttgttttctattcctttcagtttctttctctccattttcatatctttcttgcatgcccttatggtaaggctttctcttcctttcatctttctctcaatttgcacacacacacaacaacaacaacaaaaaagctctttttacagtttgtttttgcagggtcagaattttcaactcactggtggcaatcttgttttgtaaaggccctcagacctgcgggaatgtttatttcacgtggacaagaaagctgaatgaaagcatcaatagtgaaaacctatcatatgtgaaattcttttctttatctgcaactagctgctatgcctcttaggccggtgaaaattatagggaagccaacttcataatcttgccatcattttcatcaacatctgaaagaatgtacttcagtgaaatgacagtgatgagtgttgaaggcatgcactcactagatgctgaagttgctgatgcatatacatgtgaaagagaaatgaaataagagatg

SEQ ID NO: 648 - DNA, 1281 bp, Glycine max
ggctcgaggtgtgggcataaagtcgttgacagtgaaaaacaaactcctctcactcttccttccatctcttcttcaacattccaatccaatccaaaacgctgcgttttattttgtattcaattctatcaatcccaaaattcctcgccggagatagagaatcttaacaattccaccactttccggcgagacatggccgtcgccgtctccgtccccgcccgccagaagccgagctccgacgcgagcctctttacactctgccccttctggagttcgcgcaacgccaatcaaagctcctccaaaacggtgtcttccgtcgccaggtcgctgctccctccccgccgcagactccgcctcgatccttccaattacctctattttccatatgaaccggggaagcaggtaaggagcgcggttcggttgaaaaacactagcaagtctcacgtggctttcaagtttcaaacgacggcaccaaagagttgttacatgcggccaccgggaggtattcttgctccgggggaaagtttgattgcaacggtgtttaagtttgtggagcaacctgaaaacaatgagaagttgtcggatcagaagcacaaggtgaagttcaaaatcatgagtctcaaagtgaaggaaggagtggactatgtgcctgagctgtttgatgaacaaaaggatctagtgacaatggaacgaatattgagggttgtctttatagatccagaacggcaaagttctgttttggaaaaactgaaaagacaattggctgaagctgatgccgcagttgaagctcggaagaagcctcccgtggaggcaggtcctcgggttgctgccgaagggcttgtaattgatgaatggaaagagagaagggagaagtacttggcccggcaacaagttcaagcagtagattcagtgtaaaacgcaatttgttcttccagctaattcttttcttcagggaaacacaatcaagatatcattgctatgccactgttgccatcaaccttgggtgcgcttcaaaataactgttaggggaattggttggtacccaattggtagtttgagaacgcaatctaatggaaagattcgttgtataatttgtcagaattcttgttctttggaggaacagtccgatttgtgcatagtagagtttgcttgtttgaaaataaatgcaattcctcactgctgctgcttgtgaaataatcttgaaataacaggttattcatgataaatcatatttttttgtgcatctttgtcattaaaaaaaaaaaaaaaaaactcgagactagt

SEQ ID NO: 649 - DNA, 1638 bp, Glycine max
tcccttcttactccttatcccacaacttgcaactcttcccggatccccaacgccatacctcagatctgtacgtcgtcgtttctatctacctcttcagctacgtaggccccccccccaatttagatcccctgatgttgcaacagaacaaggaatcttcttagattctttttctgcgtttattagcgtttcacaaatagagagagagaaacagaaacagaaacagaagaagaaacttttcttatttatatacagtctctgattgatcggtttttcggaaactctttttccgtgaaatccacgcgcgcgcttcggttatggatttggacgatttccgatccgtattggacaccgcgggcgtcgacgtgtggatgttcatcgacgccgcaatcgccgtcgcctccgcggattccgccggtgagctgaagcgccgccgcgacggaatcgtcgagcgcctctacgccgccacggcggctactccgaagtgccggatttgcgacgacggaggcaatgacctcaacggtcaccaaatcaagaagcagagcagccccagccctgaacggcaaccgcaccaacgccgcgccgctgccatcgcagctgccgcttccccggcgacgccgcagtctctcgaaaacgacaacgacggcgaggaggatttagatccttacggtggtttgttcgacgacgaacagaagaagattctcgagattaaagagcaactcgaagagcctgaccagtctgaagattctttggtggagttgctgcaaagcctagcggacatggatattacattccaagcgttgaaggaaactgacatcgggaggcacgtgaatcggttacggaaacatccttcaaacgacgtacggcgattggtgaagttgcttgtcaggaagtggaaggaaattgttgatgaatgggtgaagttgaatcctcagggaagaagcaacactctgatggctgatggagactcgccgcctgtgcagaaaaccacccaaaatgggcatcatcatcagcagcagattcctgattttgcatactctcccaatccacacaatggtagctcagggtctgaccgtaacaactcagaagcagaacacaaacccaaagtagttccccgcagtgaacctaggccaaaacccgcgccatcaccctcagtttcaacccctgcttccgctactcaaaacagacagagggatagcaattttgacgcggagaggcttgcttccgcgagaaggaggcttcaagagaactacaaagaggctgaaattgccaaaaggcaaagaacgattcaggtgatggacatccatgagttaccgaagtcaaaacccaagaataatgccttctttgggaagaacaaaggtggtggtggtggtggtggttctcagggaaggcactggtgatggtgattactattatgatgatgcatgtttttccattgttggtgccattttgcgtgtaaaaaagccttgtgggaggggtgcggatataagtcaagtcccaaaccctgttcatcatccctgtggaatttttctccataaaccttttttttttccttgtggtttttatttaaattaataaataagcgaagaaaagaactcctcaatataattttcttttcttctcaaaaaaaaaaaaaaaaaa

SEQ ID NO: 650 - DNA, 1719 bp, Glycine max
  misc_feature (328)..(328): n is a, c, g, or t
ttggcctttacaagggacttggaactacactcttgactgtagggccaagtatagctatcagcttctctgtgtatgaaaccttgagatcttattggcagtcaaatagatccgatgattcacctgtcgtgattagtctggcttgcggcagtctttcaggcattgcatcatcaactgagaaagagagtttggtgcaggaactgcaccaagtatctaaccagactgacccatagaaccagagaccaggtgggagttgttattgtatctgtggcatatgacaatttagtaaggaaaatgacaaaataacatttttcttgcctttctgtaactntatttcttatctaaagatcttgctcaagtaatcatcttcccaagttttgttctatggcatgtctccccaagctatgcaggggattccatcatggggtggcattacttggatgaacctatatgattccctcagttaccaaatgtgagaggtgtcctctttgaggtatgcttctcacttaggctaccttcacctgatgtttggacgggtaccagaatccttttcagccctaagtgtttcttgaagaatctgttcttattgctttcagcatactctaaatgatgaaaattatggcaaaaaattacaatatagttgtttatgatataagaaaatttataaatgaaattgtcaataaagaacgactgttctttacatgggaaaaacactaaatcatactgattggggaatggatattttgtgtcaaaaccgtattatacagatagatactaaccacatgtatccaaaatattcacgcataaaaaactttagtatgccctttttatcaattgtgttaataaaggttctctgcccctttgctacaataaatgtatgttcaggtaaggatgtgttttacttcaactcttacctcttgatgccaattttacaggtaatgtttttacatgtttggatttgttaaatgctgcgtctaccatgttaagataggcttgtgcatccataaatttcttgctgtcaattgatcacaaattcagtagagccacatggtatcaataatatgtttgccacagttattctttagaatagccactgatgttgaggtgcaggtttgcaactttctcagagacacaattagaaactcctattttgtctacaatttataggttattgatttcaaacatcgttgattttgatggccaaaatatcgattagaagatttagcttgtataaattgatattcatttcatttattgttttggaattggtttgcaattcaatcgattaatcatcttaccacctttgatgatgcactgtaatgtcacagactactggtctgatgtaaaaattgaatttctgttgagtagaatgggtgtagttcaattcaattcatctgttatactatatgcagcaacatttccgctggatcttgtaaggcggaggaagcaacttgagggggctggtgggcgagctcgtgtgtatacaacaggcctctatggtgtgtttaggcacataatccggacagaaggctttcgtggtctttacagaggaattttgcctgaatattacaaggtggtgccaggtgtaggtatttgttttatgacttatgagacgttgaagatgcttttagcagatattgctactggataattacacccatcaaccttggagtctgatatacaagaagtaaatgtatgaagttatttacccatacaaaaaag

SEQ ID NO: 651 - DNA, 1496 bp, Glycine max
ttgttcgcgtggggtcgcgtcgcaaaaacgacggggccgacgcccttgtttgatacggctgcgagaagacgacagaagggggaagaaaagagcagatagaagaaaaagctcggtgcatagttccgaatccttgttcttctgatagtgaaggtagcttgaggtttatttaatttaattcggttcgagaaaagtgctgagagagagaaaatagaaaaggtgaaaaatcgaaggtcggagatgcaaatggaagctagggttggtatggcggtggatggtggtggtgtacggaagttggtgcagccgccgccgaagcagattggaactgtttctcagcttctcgccggaggagtcgccggcgcgttcagcaaaacctgtacggcgcctcttgcgagacttaccatcctctttcagattcagggaatgcattccaatgttgcagctttgagaaaagtcagtatatggaatgaggcttcacgaattatccatgaagaggggtttagggctttctggaaagggaatctggttaccattgctcaccgcttaccttattcgtcagttaacttttattcgtacgagcactacaagaagttgctaaagatggttccacgacttcaaagccatagggataatgttagtgcagatctttgcgtacattttgttggtggtggcatggcaggaatcactgctgctacatctacttatccattggatcttgtaagaacacggctggctgcacagacaaattttacctactacagaggtatctggcatgctttacacacaattagcaaggaagagggaatatttggcctttacaagggacttggaactacactcttgactgtagggccaagtatagctatcagcttctctgtgtatgaaaccttgagatcttattggcagtcaaatagatccgatgattcacctgtcgtgattagtctggcttgcggcagtctttcaggcattgcatcatcaactgcaacatttccgttggatcttgtaaggcggaggaagcaacttgagggggctggtgggcgagctcgtgtgtatacaacaggcctctatggtgtgtttaggcacataatccggacagaaggctttcgtggtctttacagaggaattttgcctgaatattacaaggtggtgccaggtgtaggtatttgttttatgacttatgagacgttgaagatgcttttagcagatattgctactggataattacacccatcaaccttggagtctgatatacaagaagtaaatgtatgaagttatttacccatacaaaaaagggtaagagttacatttacgaattaacaattgtaagttcattttatttctcgagccctcacctgggcaattttgtaatgtgttcccgtcgggattgcatttttgcatgtacagagacttgcataacatttaatattaagctgttatcgtcatgtaaaaaaaaaaaaaaaaaaaaaaaccccagactagttctctcgctctcctggtgc

SEQ ID NO: 652 - DNA, 2673 bp, Glycine max
  misc_feature (588)..(588): n is a, c, g, or t
atgaaactgagtccaagggaggtggagaaactaggccttcacaatgctggctaccttgctcagaaacgtcttgctcgtggtttaagactcaattatactgaagctgtggcactcattgccacgcagattatggaatttgctcgtgatggtgaaaagactgtggcacaactaatgtgcattgggaaacatctattggggaggagacaagttcttccagaggttcaacatctcttgaatgctgttcaggttgaagctacctttcctgatgggactaagctggtcacagttcatgatccaatttcctgtgagcatggagatctagggcaagcactatttggttcttttcttccagtaccttcacttgacaagtttgctgagaacaaagaagataatagaattccaggtgaaataatatatggagatggaagtctagttcttaaccctggaaagaatgcagtgattctcaaagttgtcagcaatggagaccggccaattcaggttggtagccactatcattttattgaagtaaatccctacttgacttttgatcgaaggaaagcatatggcatgcgcctcaatatagctgcngggaatgccacacgctttgagccaggggaatgtaaaagcgttgtgcttgtaagcattggaggtaacaaagtcatcagaggaggtaataacattgccgatggtccagttaatgattctaattgcagagcagccatgaaagctgtggtcacaaggggatttggacatgtggaagaggaaaatgctagggaaggtgttactggagaagactattcattaactacagtaatttctcgagaggaatatgctcacaagtatggccctacaactggtgacaaaatccgtcttggtgatactgacttgtttgctgaaattgaaaaagattttgctctctatggtgatgaatgtgtttttggaggtgggaaagttttaagagatggaatgggtcagtcatgtggggatccacctgcaatctccttggatactgttataacaaatgctgtgatttcggctcgtggtggaatcatcaaagcggatataggcattaaagatggtctcattgtttcaattggaaaagcaggaaatccagacatcatggatgatgtattttttaatatgatcattggggctaatactgaagttattgctggagaagggttgattgtaacagcaggggctatagattgtcacgtgcattatatatgccctcaattagtagatgaggccatatcaagcggcatcacaacattagtgggaggtggaaccggaccgactgctggaacacgtgccacaacttgtacaccagcaccatctcagatgaaactaatgctgcaatcaactgatgacctgcctctaaactttggtttcactggcaaaggaagtagttccaagcctgatgagctccctcgagccgattcggctcgagcaatgggactgaagctgcatgaggactggggaagtactcccgctgcaatagacagttgcttgactgttgctgatcaatacgatatccagattaacatacataccgacaccctaaatgaagctggatttgtcgaacatagcattgcagcatttaaaggaagaactattcatacttaccacagtgaaggtgcaggtggtggtcatgctccagatatcatcaaagtatgtggtatgaagaatgttctgccctcatcaacaaacccaacacgccctttaacactcaatactatagatgagcatcttgacatgttgatggtctgccatcatctgaatagggaaattccagaagacttagcttttgcatgttcaaggataagagaaggaacgattgctgccgaagatattttgcatgatattggggcaattagcatcatatcttctgattctcaggctatgggtcgagttggagaggtgataagcagaacttggcaaactgccaataagatgaaggtacaacgaggaccactccagcctggtgaatccgacaatgacaacttccggatcaaacgatacattgcaaaatacactataaatccagctatagcgaatggtttttcacaatatgttggttcggtggaggtgggaaagttagctgatcttgtgatgtggaagccatctttttttggggcaaaaccagaaatggtgatcaaaggtggggtggttgcatgggctgatatgggtgacccaaatgcaagcatccccactcctgaaccggtgaagatgaggcctatgtttggaacactaggcaaggctggtggtgctttatccatagcttttgtgagcaaggcagctgtagaccagagagtacatgctctatacggactgaacaagagggtggaagcagtaggcaatgtgaggaagctcactaaactagacatgaaacttaatgactctcttccacaaatcactgtcgacccagataactacactgttacagcagatggcgaggttctcaccagttttgcaaccacctttgttcccctttctcgaaattacttcctcttttaagtactagctcccataaataaagcttaaaaatgatctctcttctaaggttttaatgtgtagcactacccttataaattttttagttcccctgctcttgttcttatgaattcagatgcaataaaactaagtgtgttggtttggtaaaaaaaaaaaaaa

SEQ ID NO: 653 - DNA, 1451 bp, Glycine max
gtgccctccatgcatgactgacaaacatcagaaaatgaatggtgaggatgaggagtaactcccaaagagttactcttggtgttgcaatgtgcggggttttagcaatggtattgcgtcggaagcctgatgctcttatatctgtattgcccacattgagggagagtacaaagtatcaagggctagataagcttccagtcattgtatggatgatagctcaggctgctgtaggagatctctcagtaggtttgtatgcttgggcacggaatctcctacccatagttattggcaaaagtggtaacccccaatccagggatttggttttgcagctagtggaaaaaattttgtctacccccaaagcccgacctgttttagtaaacagtgctgtgagaaaaggggaacgattaattccttcttccgcgtttgaaattttggtccgggttactttccctccatcttcaactagagtaaaggctactgaaagatttgaggccatatatcccactctgaaagaggtggctcttggaggttctgctggaagtaaagcaatgaaacaagttgcactgcagatattcagttttgctatcaaagcagctggagaaaataatcctgagttatcaaaagaagcagctggtatttttatttggtgtttgagtcaaaacactgaatgctacaagcaatgggaaaaagtttatcaggacaacattgaagcaagtgtttcagttctggagaagctttctgatgattggaaggagttatcaacaaaattgtctcctcatgatccactgagggataccataaagaacttgaagcaaaagaatgagaaagtattggactctgagactgatgctgctcgtcatgcacacttcaaggatgccgataaatattgtaagataatcttaggaagagtttcgcgaagtcatgggtgcacgacttgtttaacctttacagttcttgctttggctgtgggtgctgctgtttccttgtcccccaatttggaatctttggattttaagaagctctcggaacttttcatcgttcggcactgagtagtctggagaatattccgcattaccggcagttggttggttcaaaacggcgattttcttttcagcccatctcattcacaaatcacaatgggtacagtaaaccaatagcctcataataaagtgcttaatgcggagattgtacacttagttcaaatcctgttcggatgacagagaatggaggtcaacaatgctttgaggtttactttagtttgaccattttataatttatttgttgttcttgtttctgttgagttttaattttattttagtttctatgtctttacattaacttatgctggcaaaatgccaatgaggtaactacagctgtatcctgaagttagttttaatcaaaggaattttggtggtacatggcgaaaaaaaaaaaaaaaaaaaaaaaaaaaaacc

SEQ ID NO: 654 - DNA, 2297 bp, Glycine max
  misc_feature (1531)..(1531): n is a, c, g, or t
ggctcgagcttcctccccgcgtaccattttcctttcactttccatcactttctctcgtttccccttcgcaatttcccctctcgaaagagacacgcatcgaagaaaatcacatcacggcaatggaggaaaagcacgcagcagccatcgaatccgcacacgccgaatctaacggcgtctctcacggcgccgaccacggctggcagaaggtgacctacgctaagaaacagaagaagaagactgttaacgccgctaacggcggccccgattcccgcgccaattccagcaagctcgttccgaacggcacgctgtccggcaacgacggcgtgttccggtcgctcgaactgcaatcggaggaccggcgccgaaaaattgtggaggcgaagaagctggctgatgccgcgtacgacgacgaagacgcgccgctcagatcgaagcagcggcatcgcgacgacgacgacgaatacgactacgatgacgagaatgtggaccgttccgcggagaacgggaaggccgaggaggcgaagaaggtgaagccgaagaaaccgaagaagcctaaggtgacggtcgcggaggccgcggcgaagatcgacgccgctgatctgggcgctttcctcatcgagatatcaggatcgttcgagaaacagcaggatatattgatgatgcgattcgctgattattttggacgtgccttttctgctgtgaccgcatctcagtttccctgggtgaaattgttcagggagtcaagcgtggctaagatcaccgatacgccactttctcacatatctgatgctgtatataaaacatcaatcgactggattaaccaccgttctcctgaggcacttagtacctttctgatttggtctttagatagcattcttgctgacttgggtagccagcaaaatgtggccaagggttccaaaaaggctgtgcaacaagtgtcctcaaaatctcaggttgcaatgttcgttgttttagcaatggtattgcgtcggaagcctgatgctcttatatctgtattgcccacattgagggagagtacaaagtatcaagggcaagataagcttccagtgattgtatggatgatagctcaggctgctgtaggagatctctcagtaggtttgtatgcttgggcacggaatctcctacccatagtgattggcaaaggtggtaacccccaatccagggatttggttttgcagctagtggaaaaaattttgtctacccccaaagcacgacctgttttagtaaacagtgctgtgagaaaaggagaacgattaattcctccttctgcgtttgaaattttggtccgggttactttccctccatcttcaactagagtaaaggctactgaaagatttgaggccatatatcccactctgaaagaggtggctcttggaggttctgctggaagtaaagcaatgaaacaagttgcactgcagatattcagttttgctatcttagcagctggagaaaataatcccgagttgtcaaaagaagcagctggtattggtatttggtgtttgagtcaaanaacactgaatgctacaagcaatgggaaaaagtttatcaggacaacattgaagcaagtgtttcagttctggagaagctttctgatgattggaaggagttatcaacaaaattgtctcctcatgatccactgagggataccataaagaacttgaagcaaaagaatgagaaagtattggactctgagactgatgctgctcgtcatgcacacttcaaggacgccgataaatattgcaagataatcttaggaagagtttcgcgaagccatgggtgcatgacttgtttaacctttacagttcttgctttggctgtgggtgctgctgtttccttgtcccccaatttggaatctttggattttaagaagctctctgaacttttcaacgttcagcactgagtactctggagaatattccgcattaccgcagttggttgcttccaaacggcaattttcttttcagcccatctcattcacaaatcacaatgggtacagtaaaccaatagcctcataataaagtgcttaatgcggagattgtacacgtagttcaaatcctgttcggatgacagagagtagttgaggtcaacaatgctttgaggtttactttagtttgaccattttataatctatttgttgttcttgtttctgttgagttttaattttagttactatgcctttacattaacttatgctggcaaaatgccaatgaggtaacagctgtatcctgaagttagtttttaatcaaaggaattttggtggtaaaaaaaaaaaagaa

SEQ ID NO: 655 - DNA, 1718 bp, Glycine max
  misc_feature (1564)..(1564): n is a, c, g, or t
  misc_feature (1575)..(1575): n is a, c, g, or t
  misc_feature (1585)..(1585): n is a, c, g, or t
  misc_feature (1592)..(1592): n is a, c, g, or t
  misc_feature (1615)..(1615): n is a, c, g, or t
  misc_feature (1634)..(1634): n is a, c, g, or t
  misc_feature (1641)..(1642): n is a, c, g, or t
  misc_feature (1644)..(1644): n is a, c, g, or t
  misc_feature (1648)..(1648): n is a, c, g, or t
  misc_feature (1662)..(1663): n is a, c, g, or t
  misc_feature (1665)..(1665): n is a, c, g, or t
  misc_feature (1674)..(1674): n is a, c, g, or t
  misc_feature (1676)..(1676): n is a, c, g, or t
  misc_feature (1681)..(1681): n is a, c, g, or t
  misc_feature (1686)..(1686): n is a, c, g, or t
  misc_feature (1690)..(1691): n is a, c, g, or t
  misc_feature (1702)..(1702): n is a, c, g, or t
  misc_feature (1707)..(1707): n is a, c, g, or t
  misc_feature (1709)..(1709): n is a, c, g, or t
  misc_feature (1716)..(1717): n is a, c, g, or t
tcccacgcgtccgaattccgcctccctcgcctccttctaccattttcctttcactttccatcactttctctcgtttccccttcgcaattttcccctcggaagagacatcgaagaaaatcacgtcacggcaatggaggaaaagcacgcagcagccaatgaatctgcacacgccgaatccaacggcgtctctcacggcgccgaccacggttggcagaaggtgacctacgctaagaagcagaagaagaagaccgttaacgccgccaacagcgccgattcccgtgcgaattccaacaagctcgttccgaacggcacgctgtccggcaacgatggcgttttccggtcgctcgagctgcagtcggaggaccggcgccggaaaattgtggaggcgaagaagctggccgatgccgcgtacgacgacgaagacgcgccgctcagatcgaagcagcggcaccacgacgacgacgaatacgactacgatgacgagaatgtggaccgttctgcggagaacgggaaggccgaggaggcgaagaaggtgaagcagaagaagccgaagaagcctaaggtgacggtggcggaggcggcggcgaagatcgacgccgctgatctgggcgctttcctcgtggagatatcgggatcgttcgaggagcagcaggatatattgatgatgcgattcactgattactttgggcgtgctttttctgctgtgaccgcatctcagtttccctgggtgaaattgttcagggagtcaactgtggctaagatcaccgatacaccactttctcacatatctgatgctgtatataaaacatcaatggactggattaaccaacgttctcctgaggcacttagtacctttctgatttggtctttagatagcattcttgctgacttgggtagccagcaaaatgtggccaagggttccaaaaaggccgtgcaacaagtgtcctcaaaatctcaggttgcaatgttcgttgttttagcaatggtattgcgtcggaagcctgatgctcttatatctgtattgcccacattgagggagagtacgaagtatcaagggctagataagcttccagtcattgtatggatgatagctcacgctgctgtaggagatctctcagtaggtttgtatgcttgggcacggaatctcctacccatagtgattggcaaaggtggtaacccccaatccagggatttggttttgcagctagtggaaaaaattttgtctacccccaaagcacgacctgttttagtaaacagtgctgtgagaaaaggagaacgattaattcctccttctgcgtttgaaattttggtccgggttactttccctccatcttcaactagagtaaaggctactgaaagatttgaggccatatatcccactctgaaagaggtggctcttggaggttctgctggaagtaaatcaatgaaacaagttgcactgcagatattcagttttgctatcaaagcagctggagaaaataatcctgagttatcaaaagagcagctggattttatttggtgttgagtcaaacactgaatgctacagcaatggaaatgttattangacaacttgancagtgctcanttctaanaactttttgtgattgaaggactntacaaatgtctctatgatntttgggnncntaanactcaacataaatnnantttgacttngnatgtntgtcnctgnnctcaggtccanattgngnaattggnng

SEQ ID NO: 656 - DNA, 2103 bp, Glycine max
agaacagtaaaggacgggcgaagtgcaaaaaaccaaaaccctttgcgagtgaagccctagactacactacacactttgcaatggcggttgttgcgcaaacccctgacatcgccggcgagcgacagtccggccaagacgttcgcacccaaaacgttgtggcatgccaagccgttgccaacatcgtcaaaagctctttaggccccgttggcctcgacaagatgctcgtcgacgacattggcgacgtcactatcaccaacgacggtgccacgattctcaagatgcttgaagtggagcatcctgctgccaaggttttggtggaactcgccgagcttcaggaccgagaagtcggagacggcactacttcggtcgtcattgtcgctgctgagcttctcaaaagggcaaatgaccttgtcaggaacaagattcatcctacctcgattattcagctacgtaggccccccccccgtgaggcttgtaaatatgtagaagaaaaactagctgtcaaggttgaaaagctgggaaaggattcactaattaactgtgccaagaccagtatgtcctcaaagttgatagctggtgatagtgacttcttcgccgttttggttgtggatgcagtgcaagctgtaaaaatgaccaatgctcgaggtgaagttaaatacccaatcaagggaatcaatatcttgaaagctcatggaaaaagtgctagagacagctttctgatgaatggttatgctctaaatactggccgtgctgctcaaggaatgcctctcagggttgcccctgcaagaattgcttgtcttgatttcaatcttcagaagacaaaaatgcagttgggtgttcaagttttagttactgatcctagggaactagagaaaattcgtcaaagagaggccgatatgactaaggaacgcattgaaaaactgctgaaggctggagctaatgttattctgacaactaaaggaattgatgacatggctcttaagtactttgttgaggctggggcaattgctgtaagacgtgtgcggaaagaggacatgcgccatgttgccaaggctactggtgcaacattggtctcaacatttgctgatatggaaggggaggaaacatttgaaccatcttttcttggatatgctgatgaggttgttgaggagcgaatttctgatgatgctgtagttatgatcaaagggaccaaaactacaagtgcagtcactttgattctaagaggtgcaaatgaccatatgcttgatgagatggatagagctctgcatgatgcattgtccattgtcaagagaactcttgaatcaaatacggtggtagctggtggaggtgctgttgaagcagcattatcagtttatttggagtaccttgctacaactttaggatctcgagagcagttggctatagcagaatttgctgagtctctattaatcattcctaaggtgctttctgttaatgctgctaaggatgccactgagctggtggcaaaattacgggcctaccaccattcagcgcaaactaaagccgataagaaacatttatcaagtatgggtttggacctttcgcaagggaaaatcagaaacaacttggaggccggagtcattgagcctgcaatgagcaaagtaaaaattattcagtttgcaactgaagctgctattaccatccttcgaattgatgacatgatcaagcttgtcaaggatgaaagtcaaaatgaggattaaagtataactgaatctaaggaggtatctacttcccagtgcttacaaaagggagagttttgcaggttgtgctggtgtgcatttaaagagggtatctgcattttatcttcaatgcccttgttcttggagaaatgttctaattatttttctgaaagtagcgtttatttaaatcttagcattttatattccaacaaattttaggcaaacatttttggtcatgcattggctggttgcatgcttgtacatgtctttctgaggcagtgtttggtttgtgaaattttgatgtttcgttggtagtaatgagaactaaatacgtgtgcgaatgggattatgatgccattttattcttcttccatattatgagggctcagaacatcttctacatgcc

SEQ ID NO: 657 - DNA, 2120 bp, Glycine max
tcaccggcgcaggtccccggtcgaccaaaaagaaaaggaagggcgaagttgaaaaaccaaaacccttggcgagtgaagccctagactcactagactacacacttcgcaatggcggttgttgctcaaacccctgacatcgccggcgagcggcagtccggccaagacgttcgcacccaaaacgttgtggcatgccaagccgttgccaacatcgtcaaaagctctttaggccccgttggcctcgacaagatgctcgtcgacgacattggcgacgtcaccatcaccaacgacggcgccacgattctcaagatgctggaagtggagcatcctgctgccaaggttttggttgaactcgccgagcttcaggatcgagaagtcggagacggcactacttctgtcgtcattgtagctgctgagcttctcaaaagggcaaatgaccttgtcaggaacaagattcatcctacctcgattatcagtggatatagacttgctatgcgagaggcttgtaaatatgtagaagaaaaactagctgtcaaggttgaaaagctgggaaaggattcactaattaactgtgccaagaccagtatgtcctcaaagttgatagctggtgatagtgacttctttgccattttggttgtagatgcagtgcaagctgtaaagatgaccaatgctcgaggtgaagttaaatacccaatcaagggaatcaatatcttgaaagctcatggaaaaagtgctagagacagctttctgatgaatggttatgctctaaatactggccgtgctgctcaaggaatgcctcttagggttgcccctgcaagaattgcctgtcttgatttcaatcttcagaagacaaaaatgcagttgggtgttcaagttttagttactgatcctagggagctagagaaaattcgtcaaagagaggctgatatgactaaggaacgtattgaaaaactgctgaaggctggagctaatgttattctgacaactaaaggaattgatgacatggctcttaagtactttgttgaggctggggcaattgctgtaagacgtgtgcggaaagaggacatgcgccatgttgccaaggctactggtgcaacattggtctcaacatttgctgatatggaaggggaggaaacatttgaaccatcttttcttggatatgctgatgaggttgttgaggagcgaatttctgatgatgctgtagttatgatcaaagggaccaaaactacaagcgcagtcactttgattctaagaggtgcaaatgaccatatgcttgatgagatggacagagctctgcatgatgcattgtcaattgtcaagagaactcttgaatcaaatacggtggtagctggtggaggtgctgttgaggcagcattatcagtttatttagagtaccttgctacaactttaggatctcgggagcagttggctatagcagaatttgctgagtctctgttaattattccaaaggtgctttctgttaatgctgctaaggatgccactgagctggtcgcaaaattacgggcctaccaccattcagcacaaactaaagccgataagaaacatttatcaagtatgggtttggacctttctgaagggaaaatcagaaacaacttggaggctggagtcattgagcctgcaatgagcaaagtaaaaattattcagtttgcaactgaagctgccattactatccttcgaattgatgacatgatcaagcttatcaaggatgaaagtcaaaatgaggattaaagtataactgaatctaggaggcatctactccccagtgcttacaaaagggagggttgtgctagtgtgcatttgaagagggtatctgcatttaatcttcaatgcccttgttcttgaaggaaaactgctctaattatttttctgaaagtagctttattatatttacatctttgcattttatattccaacaatttttaggcaaacatttttggtcatgcattggctggttgcatgtttgtacatttctttgaggcagtgtttgatttgtgaaattttgatgtttcgttggtagtaagtagtttttaatactataagaactaaattatgagggttcagaacaaaaaaaaaaaaaaaaagaaaaaaaaaaaaaaaaaaaa

SEQ ID NO: 658 - DNA, 866 bp, Glycine max
  misc_feature (732)..(733): n is a, c, g, or t
  misc_feature (755)..(755): n is a, c, g, or t
  misc_feature (760)..(761): n is a, c, g, or t
  misc_feature (765)..(765): n is a, c, g, or t
  misc_feature (780)..(780): n is a, c, g, or t
  misc_feature (783)..(783): n is a, c, g, or t
  misc_feature (789)..(789): n is a, c, g, or t
  misc_feature (800)..(800): n is a, c, g, or t
  misc_feature (807)..(807): n is a, c, g, or t
  misc_feature (812)..(812): n is a, c, g, or t
  misc_feature (814)..(814): n is a, c, g, or t
  misc_feature (816)..(817): n is a, c, g, or t
  misc_feature (826)..(826): n is a, c, g, or t
  misc_feature (828)..(828): n is a, c, g, or t
  misc_feature (831)..(831): n is a, c, g, or t
  misc_feature (838)..(838): n is a, c, g, or t
  misc_feature (840)..(840): n is a, c, g, or t
  misc_feature (844)..(844): n is a, c, g, or t
  misc_feature (847)..(847): n is a, c, g, or t
  misc_feature (851)..(851): n is a, c, g, or t
  misc_feature (854)..(854): n is a, c, g, or t
  misc_feature (858)..(858): n is a, c, g, or t
  misc_feature (865)..(865): n is a, c, g, or t
aaaaacgacacgtcgttcgctggtggacgcaaagaacggagtgcggtgcaaaataagaagcagcacttgtccctcttcctcagcgattgttcgagaaactctaacgaaagagcgagaaagcgaagacagccatggcgtcgtttcttcaatcgtttctggatccgaagaagaactggttcgccgctcagcacatgaaatccctctccaaacgcctccgcaaatatgggctccgatacgacgatttgtacgatccttactacgatctggatgtgaaggaggcgctgaatcggcttccgaaagaggtggtggacgctcgccacgcgcgtcttaaacgcgccatcgatctttccatgaagcacgagtacctccctgacaatctgcagtcaatgcaaacaccattcaggggctaccttcaggatatgctgactcttgtgaagagagagagagcagaacgtgaagcattgggaggtttgcccctatatcaacgatccattccttgagtgcatcaagtatttcatgaaggtattttgattgaagtgggaggtttaaattgtattgatcttgtggtagaatgttttcttataagaaaaaaatatggacagctttgttggtataaacttatatggaatgcattttttaatggtataaacttgcctcgggcattttctaataaatggcaacaacagactttttttgccttgaaaaaaaaaaaaaaagaaaaaagggggctcnntgtttcctttaagggtatttanttggnnattngttaattttctgtgnaantttccntaattccaatngacgtantatgntncnnggctttatngnatncttatgntngttngtntgtnggnattngcttttng

SEQ ID NO: 659 - DNA, 739 bp, Glycine max
tccggttgcaaaagacaacagaggggggcataattcatgcgtaaatagaaaacctggtaaacaaatttgaaatggctttcttgcatcaccactttggcaggtattcaaccatcgcatcacatcacatttacaaataaaactcaaaatccacacaccaccttgtctatatattatcatatttattgtaagcatcaccactaactctactgctactttcacctttcatcatcattcaatttcagtccaatggagtggtctttctccatatccgtggtgttgtttcttacccttctcattcaaatacatggaagtggttatcttgatcacaagcaagcaagaggctttgcagagaattatggttgtaatttgttccaaggaagctgggtttatgatgattcataccctctttatgaaacctctcagtgtccctttatagagagggaatttgattgtcaaaacaatggtagaccagataagttttatctcaagtatagatggcagcccgcagggtgtaacttaacaagattcaatggtgaagatttcctgacaagacttagagggaagagtatcatgtttgtgggagactctttgggtttgaaccaatggcaatcactcacttgcatgcttcacatagctgtgccacaagccccatacagcttagcaaggaatggagatgtctccattttcacctttttgacctatgatgttaaggtaatgttctcgcgcaatgcattacttg

SEQ ID NO: 660 - DNA, 1381 bp, Glycine max
acgagaaaaaacaagattccttgccgtgccaaaggacaaagcatttgaagaatcactagtgactcactcaccatcttctgtctctgcactctacaaagaaaagaaacatgatgaactttgacggcttccagaaggctctggcggagtttcagggccgctgctccacgctgctgggcagcctgacccgtctccagcccaaccgcgcgaggccaccatgggctcggatagcccagccctggggaggcaggcccatggccatgacggtggaggcaatcgaggagcgcttagagggaattcccgtttacgccctcagcaacgcttccgaggagtttctcttggtctcgggctcttcctccgggaaaaaccttggcctcttctgcttcaacaaggacgacgccgaggctctcctcaaccaggttacgcttatcgacccccacgctcgccagggctccaaagttgtccccgttgctttgaacaaggtgtttcagctcaaggtgaacggcgttgcgtttagattgatacctgagttctctcaagtaaagaatgccctgcaagagagggaaaaatctggctttgcttccagtggcttttctggtgttccagttttccagtccagaagtctgatattgaagagccaaaataagagatttcgtccacttttcttcagaaaggaggacttggaaaatacacttaaatcggcagcccgtgagcagaacaaattaaatcccactatgagaaaaggagatatccaggttgccactctagaggatgtaataaaagaaatgaaggaaaattctacatcgaactgggatgatgttatttttatacctcctggatttgatgtttcagacgactccaatgagcagtagggcaggatgatgattaaattcatgacaccttttatgcttgtggtattagcttttaatccatagcacatggcaaacaattatttaggttttgtgcatacgacaaacttctgactgcagactcttctatcctgtcttcaatatgaaacgttattggaaagtttgggttttgcattttctaaaaaggctttcattatcgagtaggttttatcagaaaaaaaaaaaaaaaaaaaaaaaaagcttattccctttagtgagggttaattttagcttggcactggccgtcgttttacaacgtcgtgactgggaaaaccctggcgttacccaacttaatcgccttgcagcacatccccctttcgccagctggcgtaatagcgaagaggcccgcaccgatcgcccttcccaacagttgcgcagcctgaatggcgaatgggacgcgccctgtagcggcgcattaagcgcggcgggttggtgggtacgcgcagcgtgaccgctacacttgccagcgccctagc

SEQ ID NO: 661 - DNA, 1363 bp, Glycine max
gaaagagaaatcttagcacaagaaaggtccatagccgcagccaaagacgcagccgttatgtcattccttcaaaaaatagccgaacaacaaaacctcggtcaagcgttgaccaacatcaacctcgtacaaccacaaccacaactacaaccacaaccaccggtacaacaacaagtgacaccacctaatatagtaccagctcctatgcaacaaccactgcctgtgattgttacacagcctgtggtgttgccagtggtatcacaagtgaccaatatggagataatgaaagccgataataataacaacaataacaataataacaactgcgaaaatttcttgccaccgagttcttctcggtggccgaaagtggaggttcaggcattgataaagcttcgaacgagcatggatgagaagtatcaagagaatggaccaaagggtcccctctgggaggagatctcagcctcaatgaagaagctggggtacaaccgaaacgcgaaaaggtgcaaggagaaatgggagaacatcaacaagtacttcaagaaagtgaaggaaagcaacaagcggagaccggaagattccaagacgtgcccttatttccaccagctggacgcgctgtacaggcagaagcacaaagccgaagagagcaccgcggcggcgaaggcggagagcgcggtggcaccgttgatggtgcagccggagcagcaatggccacctcagcagcaggatgatagggacatcacaatggaagacatggagaacgaagatgatgaatatgaggaagagagggaaggagaggaagaagaagaagaggatgaagaggatgaagaagggtggtggtgggaactatgagatagtggcaaacaaaacaagtggcggtggtggtgctgctgcttcagtgggggcttcaacggagtagtgtggggtgggtcagagaaagtgcaggggttgtcggaggtggccattgtggtggagaaatttaagaaactgaatattcaagtagggtgaagttacacatggcaatggcatgggtaatggtggtatcgacctgtggtggaaagatgaggtttgctttggttggttggtactttgttgtagcatatagtcagtaagattatatgtttcttttttctgttttataaaaaaagttgtttattttttgggagaataaataaaagtccgatcagagagggaatttaagatagagaccaataaagaagaagaggggccttaattaaggttgtatttttttttttttttatcttcatcttgttttttatgttcgttcctggtgctgtaaatgggaggagattaattcgggttttgtccttttcttatctctcagttttgacatctttttacccttccc

SEQ ID NO: 662 - DNA, 1512 bp, Glycine max
tcagctacgtaggcccccccccgaccttcattcatatctaccacttggccaacatggaccatcatctaagacttattctcctactcttcctgtttctacccaccacctgcttctctttctcatttcaaactccttcaagcaataatgaattctcgaatcaaagttcttctctgaagcagcagattctggagctagctaatagtcccagaacggtgaaatggatgaagagaataaggagggaaatccatgagcacccagaacttgcatatgaagagttcagaacaagtgctatcataaggcgtgagcttgacctgttgggtgttggttacaagtggcctgtggctgggactggtgtggtggcaaaaattggttctgggtctcctccttttgttgctcttagagcagacatggatgctttgccaattcaggaaatggttgattgggatcataagagcaaagtagatggaaaaatgcatgcttgcgcacacgatgcacatgttgccatgctacttggggctgcaaagatactgcaagaaatgcaagacatgttacagactactgttgttctaatattccaaccagctgaggaaagaggcacaggtgcaaaagacatgatccaagaacaggtgcttcaagatgttggggctattcttggattgcacttaggagcagcgtatcccacaggtgtcgttgcatcacggccaggagaatttttagccgggtgtggaagcttcaaagcaaagatcaatggaaaaggggggttagcaggagttccccatcattgttttgatccagttttggctgcttcaacgtcagtgatcagcttgcaaaacattgtttcaagggaggctgatcctttagattctcaggtgctttctgtggccatgatccatgcagggtctgctcatgacataatccctgattcagctacatttggaggtacttatagagcattcagcaaaaagagcttctatggactgaggaaaagaatagaagaggttattaaagggcaggctgaagtacatagatgctctggagaggttgagttctttggcaatgaacatcccacaatccctccaaccacaaatgatgtgagaatataccaactagcacggctagtgtctagcaagattgttggagaagataacatagaattagcacccctcttcacagggagtgaagattttgcattttacttggaaaaggtacccgggtcattcgttctagtgggtacaagaaatgagaagagtggatccatacatcctgctcatagtccttactttttcattgatgaagatgtgcttcccatcggggctgcaatacatgcagcatttgctctttcattcaattcatattcaacaaattcattccttttgtaatacatatctaccacttgtaattcaacaaattctttggcttaagatgttaggaattttataattcataattaattaattaatgcgggttatatattatattataatatttatatttaaaaaaaaaaaaaaaaaa

SEQ ID NO: 663 - DNA, 2524 bp, Glycine max
  misc_feature (20)..(21): n is a, c, g, or t
tcgagtcagctcacgtaggnnccccccgggtgaagcaaggaaccctaatgctatgctatatgattttctgaacgttctcacgacacgcctactcattgcactcttcgatcgcaactctctttttcttccaaaagggaaaacgaatctcaaacttcacaagtgtttgaggcgccatggcggatcggttgacgcgtattgccatcgtcagcaacgacaggtgcaagcccaaaaagtgccgccaggagtgcaagaagagttgccccgtcgtcagaaccgggaggttgtgtattgaggttacttcctcgtccaagattgctttcatttcggaggaattgtgtattggatgcggtatttgtgttaagaaatgtccttttgaagctattcagattatcaacttgccgaaggacttggacagggatactactcatagatatggtcctaatacttttaagctgcataggttgccggttccgaggcccgggcaggtgcttgggttggttgggactaatgggattgggaagtccaccgctcttaaagttttggccgggaaactgaagccgaacttgggtcgattcactaatccccctgattggcaggaaattttgacctattttcgaggatctgaactgcagaattattttactcggattctagaggatgatttgaaggctatcatcaagcctcagtatgttgaccatattccaaaagctgtgcaagggaatgtggggcaggtgctagaccagaaagatgagagagagaagaaggaggagctttgtgctgatcttgagcttaatcaagttatagatcgtaatgttggtgatctttcgggtggtgagctccaaaggtttgccattgcggttgttgcgatccagaatgctgagatatacatgtttgatgaaccttctagttatcttgatgtgaaacagaggctgaaagctgcccaagttattcgatcattgcttaggcctaatagctatgtaattgttgttgagcatgatcttagtgtcttggactacttatcggactttatttgctgtctatatggtaaacctggtgcatatggagtggtgacacttcctttctcagtcagagaaggaattaacattttcttggctggctttgttccaacagaaaatcttaggttccgtgatgactcactcaccttcaaggttgctgagactccacaggaaactgctgaggaagctcagacatatgctcgatacaaatacccaaccatgagcaaaactcaaggcaattttagacttcgtgtagctgaaggagaatttactgattctcagattattgtgatgctgggtgagaatgggacaggaaagacgacatttattcgaatgctggctggtttattgaaacctgacaccatagaaggtggatctgaggtggagatgcctgaatttaatgtttcatacaagcctcagaagattagcccgaagttccaatcaactgttaggcacttgctacatcaaaaaatacgtgatgcatatactcatccccagtttgtgtcagatgtgatgaagccacttcttattgaacagttaatggaccaagaagttgtgaatctttctggtggagagttgcagagagttgctctgtgtctctgtcttggaaagcctgcagacatctatctgatagatgagccaagtgcgtatctagattctgaacagcgaattattgctgccaaagtcattaagaggtttattcttcatgcaaagaaaacggcttttgtcgttgagcatgatttcatcatggcaacatatcttgcagacagagttattgtttatgagggccaaccatcaattgactgtattgcaaatactccgcaatcattgttgtctgggatgaaccttttcttatcacatcttgatatcacatttagaagggacccaactaattttcgcccaaggatcaacaaacttgattcaaccaaggacagagaacaaaagtctgccgggtcttattattaccttgatgactgagttcatactttggggctgttctttcaccaacacaaccttgcatctgtttgagcttttcatgggatctcagatttggttcagttcatgccttgaaatataagattgccatttttgccgatgaaagcatctttctcaatgaatagaggagcctgcatgcaattgcaagccctatgttggttggtgcattttgtatatttacccttatatttagtgcagttactcatcaccaggtttgctacgacttgggtgggtgaatctgaatattacatgagtttatattggtcatggttttcattcgatgtcctaagtccagaggaacattcataatgtcagactgagtttatcgccaatttcagttgagtatgtaacgaagtttacgttcattccatgttacttaatttagatagatgtcttctgtttggaatatgttgtcgttgaggctgatatcttcgtggatatatatcattacattttttagatgaaattgcggctattatgtgattttatttgaagggtggttgttatttttt

SEQ ID NO: 664 - DNA, 1716 bp, Glycine max
  misc_feature (21)..(21): n is a, c, g, or t
  misc_feature (1701)..(1704): n is a, c, g, or t
  misc_feature (1707)..(1709): n is a, c, g, or t
  misc_feature (1713)..(1713): n is a, c, g, or t
tcgagtcagctacgtagggcnccccccccaaaacgcttcctcgctccctcaacatgcttttcctaataataataccaatcccacactgtttcattaggaattcggatgcgcacctactccttctaccttccaacacaagctgtctctgtctttctagtcacagttgggttggttggtaccaaaggtgaggcaggggagactcagaaagagatggctgagctcggaggagttatgccagactgtgtatatgctccaaatccctaccatgaatgcacggaggcttgcgtgcataggatcaaggaagccaagcctggcaagccatctaaaactaaaaagggtaccgctttcaaagattatcgcagaagtgttacagatggtgaactgggcaaaacgatgaaagaagaaaaacgcaggccctcaggttgccctaaagcgtctaatccttaccatgtctgtgatgagtattgccagaaggctgattcaggtaccatgtctttaaactttgacaggagaaagaaggttggttctaagccagaactccccgttcttgacagtgttccaccctcaaaaattggggctatttatctctctgatgcttcatcgccattatcaaattattctgaaaagacaaaggaggagtcaaaaagcaatgagatcataccagtttctggagaaatacatgtccaagatgtcatgccttgtttgtttgaaagcctaccaatcacaaggtccaagcaaagcacaatggggacaaaaatgcttcaccaaaagttgttccaatcacctctgttgatgacacgggatgtcttactaaaccagatggtgggtccatgaatttttgtttctctggtctccatgataatgaggacagtgatggagaggagactgagtctgtggtttctgagtcgcgagtcccggttggaaaataccatgtgaaagaaagctttgctcccatcctgagatccatctttgaaaagtacggggacataggagcaagctgccatttggaatcagttgttatgcggtcatattacgttgagtgtgtgtgctttgtggtccaagagctacaatctaccccaataatgcaattgacaaagtctaaaatcaaggaattgatggctattcttaaggatgtagaatctgctcagcttcgcgtggcctggttgcgcagcatagttgatgaaattactgagaacattgaactcatcgatgagcactgcgtggcggagacggcaaaggctaactctgatcgtgaagtggaatcattgaacaaagagctagaatcaaatctggaaattttggctcagaaagaacaagaggtaactgatatcaaaacaagaattgaagcgatcagagagcgtttaagcgagcttgagctgaagtcttgtgatttggacaagaacatcttgtcaatcaagtccaaggttgataatttagacagcaaatccttgctagatgaactagtttaatgaaactctctagccaatttgtctttgaatttcatcctcagaattatggtaatgcttaaattgtagaatatggtactgaataaacgcatgagctatatttttaagctaggcaatggtatgaatacaaattgcacacactcacatgcacatttttaagttgaacttcaatttattattattatttatttatatctaaatatcccaacaactttgggttgaaattgcaaaaaannnnaannnaaanaaa

SEQ ID NO: 665 - DNA, 2182 bp, Glycine max
ccatcatacacacttgcacaaaaacaaaactcgcttcccaattccgatcctcaaggccgaacccgaaaacttctcataccacaatgctctttccgttgtttccacttcctctcccactctgagtcagttcccatttaaaaacaaagactccctctaacccttgtcctcatcatcatcatcgcatttttcactctttcgtaattttacattgatatataattatgcaaccctgtagcagagaaatgcaaggcctcaactccctcttaaactcttcctcccaaatctccctccaagaccttcaaaatcacaccactaaccagatccaaaattcacacatgaaccaccaacaccaacttgctcactttgattcaacttctcacgacgactttctcgaacaaatgctctcttcctgctcttggacagacctcaacccaaacaagcccttattatgggaccctaacaccctcaacgacatcaagccccccgacgaaacgacgccgtccaacaacaacaacgacgctactactaatgtcgcatctttttcctccttcgatgagcactccaccttagcctccaagttccgcaaccaccagatcagctccaataacaacgcgcccaaaaacgccgcggcggcggctctcatgctccaacaccaactcctcagagactctggtcttctcaacatgcctctttccttgcccggaaacgacgtcgtggttgacgcttctaccttcgaatcccccaatccgagtggtaaagcttcagtccaaactctctacaacgggttcgccggatctctgcatggcgtaggccaatcctcgaaccagactcaacattttcaacaccctcagggaagttcgaatccgatgcaagggcaaaattttggggcggtgccagctggtggtggtagcgcgacgaatcaggctccagcgagtggcgctgccgcgggtggcgcgccggctcagccgaggcagagggttcgagcgaggagaggtcaagccacggacccacacagcatcgctgaaaggttacgtagggagagaatcgccgagagaatgaaggccctacaagaactggttcccaatgccaacaagacagacaaggcatccatgctagatgagatcatcgattacgtgaagttcctgcagctccaagtcaaggttctgagcatgagcagattgggcggtgctgctgctgtcgctccccttgttgctgatatgtcctctgagggaggcggagactgcattcaagccaacggcaagagtaacggcggtggggcccaggcttcaaccaccaacaccaacaccaaccaaacgacagcgacaacaacctcaaacgatagcctaacgatgacggagcaccaggtcgcgaaactaatggaagaagacatgggttcggctatgcagtatcttcaaggaaaaggtctttgcctcatgccaatttcacttgccactgcaatctccactgccacgtgtcccaccaggaacgttaacgttaaccccttgatcaacgccgccgccggagccacccattttccgaccgcagccaaccccgccggcgaagggccgtcgtctccgagcatgtccgtactgacggtgcagtccgccatcgcaggcaacgacggcgccgcctccgtttcgaagccgtgatgacggtgtttgagtgactttataggaaaaagaagaaaaaaacaaagtgaacaaaggacagaaaatgacgtgtgtttttttttcttaaaaaaaaaggagccgttaaagtctacgaaaataaggcgtcagggatacggaggactcgacgacgccgtatttacctagactttgtttggctgatgctaactttcaaccaaccaattacaaactccaccatgccaattacctacttcttcgtcttctttttctttattattattgttaattgttaactgtcgctttgggtttcttctgttcattgtttttaaaaatctgtagtggaatttctctttttggtgtttcatttccgtctaaacaagttaatcttgtactggctagcgtttacgttttttttctatgcgttctattcacttacaactgttactatgaagccttaaattatgttacgagtgtatttagcaatgattgtggatgcagtcaacaaaaaaaaaagcattgattgtggatttgacattccatttgtctaatggagt

SEQ ID NO: 666 - DNA, 3295 bp, Glycine max
acgtgcttaagtgctaaacgctctttctctctctctccatgtctccgttcatctcattcgtcaattaataacacaaagcaacaagcaaacaaacctcactttgtgtctctccccacccgtccccaacaaacaaaccccttctctctccaccacctctactttctctctctagggtttcgtcgcgaattctcactctcgctcctctgctaaccacgtttgtagggttccaatcctcgcgcgaattgcatcacagtctgtgatcaaccgagttttgagtcttctccttcctcgtcgattgcttcctcgggctaaaggattgttgtaatcactgacacacaaaccaaatgttgctgtagggtgttgaggtttataccgtggtgggtgaatgttgttgcttgatgcttgatgatagtttctatggacttgaatgcctcgccagttccagaggaagatgaagatatctttgaggagaagatacatgttgaagagtttcatgaacctgaagaacgcatagaaactggagctgatatagcacgccgggagcgtgaagaaagaaagagacggttgaagagagaacgaccggatgatagacctgtacatgtgtcacaatcacctggatatgatcagctttttcataccaagaatcaaagatcccctcgcgtacgcaggcttcctcctgggtggttggattgcccttcatctggccaggaaattcgttgcatgataccttctaaggttccacttggtgaatcgctcaatgactgcattcctcctggtaaaagatactcatttaaacaagtgatacatcaacagagagttttagggagaaaacttggtctggtgattgatttgacaaataccactcgatactatcctgtgtcagatttaaaaaaagagtgcatcaagcatgttaagattcaatgcagggggcgagattctgtacctgataatttatctgtgaaccagtttgtctatgaggttacacaatttttgtcacgtcaaaagcactcaaaaaagtatatacttgttcattgtacacatgggcataatcgtacaggatacatgatcatccactatctaatgcgtgctatgtcaatgtctgttactcaggcaataaaaatattttctgaagctcgccctccaggaatctacaaacctgattacattgatgcattgtactcattttatcatgagaaaaaacctgaaatggtagtttgtcctcctactccggagtggaagagatcttctgaatttgatctcaatggtgaagcagttccagatgatgatgatgatggagtaccagaccctgatttgcaggagaaccatgagacagacacacgtcgggccaaccacgttggtccccccccccagatacctactgatcagcaagatgcattgcgtcagttctgttatcaaacgcttaaattgggtgttggggccaggggacacacacaatttccaggttcacacccagtttctctcaacagggataatttgcaattgttacgacaacgctattattatgcaacatggaaagcagatggtacaagatatatgatgctaataacaatggatggatgttacttgattgatagaagttttaattttcgaagggtccaaatgagatttccttgcagaagtacaaatgatggtttgggcgagaagacccaccacttcacattacttgatggtgagatggttattgatacattgccagattcacagaagcaggagagaagataccttatatatgatatgatggcaatcaaccaagtatcaataatagagcgtcccttctatgaacggtggaagatgcttgagaaagaagtgattgaacctaggaatcacgagcgacataatatatatcagagcagaaatccttactatagatatgacctggaaccgttcagggtgaggaggaaagacttttggttgctctctactgtcacaaagcttttaaaggaattcattaaaagactctcacatgaggcagatggtctcatatttcagggttgggatgatccttatataccacgtacccatgaaggactcttgaagtggaaatatgcttatctgaattcagttgattttcttttcgaggttgatggtgatcgtgagctactttttctcaatgagcggggaaagaagaaacttttggaagggaatagggttgaattcacagatggttcagatccctcactttattctggaaagataattgaatgttcttgggattttgacaaactggaatggaagtatatgcgaatcagaacagataaatcaactccgaatgagtttaatacttacaggaaggtgctgcgaagcataagagacaacatcaccgaggaagatttgttgaatgaaataagtgagataattcgccttcccatgtatgctgaccggatcagaattgatagtaaagcgaatcagcatgctaatgtcgcaaggcgaaggtgatttggtggtggttagatcagatctgggacttttatgccttcaatcttttcattggtggtagtgggtgacatcaagttaaaacaaaatgtagtgtatccgttgatatttgtctctgggatttcaatgaaattgtattggttttggctatgtattttggccatcaaccaaaagttgcttatttatgtaattagttaatccttgcggtaagtattgctgtgctgctgagctgtatggtgcagttagtatggctcaaattccggcctgaatccgttgtctatggttgtccagatcaagagagttaggtttagaatctcaaatctcaatgtatattatcaattttcttttagtgattctaagttattcaaagggtagccggttcttagagtcaagttccaattgggtagaatttcccctgtatgtgaatattaatttgagtagtagtaacaagccttccattctctctaatgttctgtggatgtggaagatatcatgcgtttaggctgtcatcagtgcccgaatcagattgttacttagcatgtttgacggtagcccagtcactgctactcattctactagtagctctggaaatctaccatggaaggatgaggaaggtggcaactgtgtgaactgtttggcagtggtgaaaatgtgtaaggttcagataaatggatgtggaaagaaacagtgttaatttgctagcctcattttcatgatgaatgactatattaaaaatatttgcaacacaaaaccccatgtaacagtgaaatttcactttttttccaacgattctttatacacctgaactttgcttcaaaaaaaaaaaaaaaaaaaaaaaaaa

SEQ ID NO: 667 - DNA, 757 bp, Glycine max
ggttgggatccctcactgcattctggaaagataattgaatgttcttgggattttgacaaacgggaatggaaggttatgccacgcggccccgtcccatcaactccgaatgagtttaatacttacaggaaggtcatgcgaagcataagagacaacatcaccgaggaagatttgttgaatgaaataagtgagataattcgccttcccatgtatgctgacaggatcagaattgatagcaaagcgaatcagcatgctaatgtcgcaaggcgaaggtgatttggtggtggtttagatcagatcagggacttttatgccttcaatctttacattggtggtagtgggtgacatcaagtgaaaacaagatttcgtgtataccccgatacttgtctctgggatttgaatgaaattgtattggttttggctatgtattttggccatcatccaaaagttgcttatattatgtagttagttagtccttgcggtaagtattgctgtgctgctgagctgtatggtgcagttagtacggctcaaattccggcttgaatccatttactatggttgtccagatcaagagagttaggtttagaatctcaaatctcaatgtatattatcaattttcttttagtgattctaagttgttcaaagggtagccgtttcttatagtcaagttccattacatgggtagaatttcccctgtatgtgaatattaattttagtagtaacaagccttccattctctctaaaaaaaaaaaaaaaaaac

SEQ ID NO: 668 - DNA, 1759 bp, Glycine max
cccacgcgtccgctcccttgattttctctgtgacttacacacaaacacttagtactccctagctaaatatctctgtctccgtgcaagccatgtgccagttatcgtcatctccctccactttgtgtgatagcaatgagggccatccaaacatgcccacaaccaaaattcatgaggagccagctcacatgctcccccttttgatccccaaacccccaacaacattattcgaacaaggccaaaataaccatcaaactaaaacccatttttccctcgctctcaacgaagtcaaatgcatagccaacatagcattacccatggtgctaaccgggttattactctattctcgctccgtaatctccatgctcttcctcggtcgtgtgggtgagcttgccttagctggtggctctctcgccattggattcgccaacatcacgggctattctattctctcgggcctcgccatgggcatggagcccatttgcggccaggcttttggggccaaaaggttcaaacttttgggtctcgctatgcagaggacaatcgtcttgcttcttctaacttcagttttgatttcattcttgtggctcaacatgaagaaattattgatcctatgtggccaacaagaagacatcgccaccgaagctcaatctttcatactattttctattcccgatcttgtagcacaatcattgctacaccctttgagaatctacttacgaagtcaatctataaccctacctctcacatacaccgcatctctgtctattctccttcacgtacccatcaactactttctcgtctctgtgcttaagcttggaatcaaaggcattgccttaggcgctgtttggacgaattttaacctcgttgtttcgttgattctctacatatgggtctccggcgtatacaaaaaaacatggccaggtgtttcgttgaagggcatcttgagcggttggaaatcgcttttgaatttggcaattccaagttgcatttccgtatgcctcgagtggtggtggtacgaaatcatgattttactttgcgggttattgattaatccccaagcaacggttgcatcaatgggggttctgatacaaaccactgctctgatatacattttcccatcttccctgagctttgcggtttccacacgtgtcggaaatgaactgggtgcggagaatcccaaaaaggcaaaagtcgcagcactggtggggttatgtatcagttacggtttgggtttctcggcattatttttcgccgtttcggtgaggcaagcgtgggcttcgatgttcacacgtgacgcggagatcattgctttgacgtcgatggtgttgcccatcattgggctctgcgaattgggaaactgtccgcaaacaacggtttgcggcgttttgaggggaaccgcgaggcccccgttgggagcgaatataaatttgggttgcttctacctagtgggaatgcccgttgcggtgaggttgagtttctttgccggctttgatttcaaaggcttgtggcttggtttattggccgcccaagcctcttgtatgttcaccatgttaattgtgttggctcgcaccaattgggagggccaagttcaaagagccaaagaactcacatcatcgtctgaggaacaagatcagaattgcttcttcagttcctgcgctaccaaggaatattgctctgattcattattagtttgattgatcatcacaacgacgtcacctccattcttttatattttttgcatcaaattgattctttctag

SEQ ID NO: 669 - DNA, 534 bp, Glycine max
gtcatggaaacgccccaaataaagcttcagtgcagtgttgtaattgtgacatacaacaaaaaacgatgaacatcatgagtggttgttcagaatcttcaaccaaaccaaacaccatcatcaacaattcacccaaatccaagcctcctttcaagccagcaaaggatgacaccaagcccgttcttcaagatcctatactgagatccgacccaattgagacagaggaagctgtgctgcgattgccaccattcaaaatccccacttcaacttcaacacctgaaatggcatgaatgtatttaatttcactcttttttttctcttcttttttacgttttttcgtcttcaacaatgggtttatgaggtttggtttgagtgttttttttatgagcaaaataatatattttagtagttttaattaaaataaaggtaatatagaaataaaaaataattatttattttgctcgcttccttatccgagaactttgtaatattttattatagcatattggaacaatggaatggaggatttattctatt

SEQ ID NO: 670 - DNA, 882 bp, Glycine max
  misc_feature (852)..(852): n is a, c, g, or t
ctaaaaatttcccctctcccttctcatttcttatccatccaccttattatatttcccaggggaaccaaacctgtggcttccatctctcaaaagctcaacaaccacatgccatggcaacagcgtcaatgtgtatgagcttcaacctggcaacagcattcaagggtctctctttatcttcttcttcatcgttcttcggtggaagtagtggttctctccgcgcgggtcctgcctcggtggtgtcgctgccccggcgctgcccgctgaccatagagaacgcgcacaagaagggggcgggcagcaccaagaacggccgcgactcgcagggcaagcgcctcggagtcaagatttacggcgaccaggtcgccaagcccggctccatcatcgttcgccagcgcggaaccaagtttcatgcaggaaagaatgtggggcttggcaaagactataccattttctccttgattgatggagttgtaaaatttgagaaatatggacctgacaggaaaaaggtgagtgtttaccctcgagaagtacagcctgagaaccccaacagctatagagcaaggaagagagagtacttcagggtgaggcgtgaacgcaaaaaagctagacaaggagcaatacttaaatcccaactcgtgctggcttccgctgatgatgcagcaatcactaatccaatgtgttgactcttattcaatcgcttaaatgtgtaaaataccccgctcccaattttttgcttttgtgtacctgtaaaacctttagcattgttttgagttttattgaagtagcaatgtaccattagtcaaaaaaaaaaaaaaaaaaaaaactcgtgcctggttcttccatcagccattntagtttatgaagaaagatccttatgttttt

SEQ ID NO: 671 - DNA, 1318 bp, Glycine max
ccggggctatagtgtagtctagtttttcatttataatgtaaaataaaagccatagtctccctctcttaagccctgaaccctcatctccaatctgcaaatccaactaacatgggaagccagcaagccgccgtgtcgttcctgacgaacctggcccgcgccgctttcgggctgggcgcctccgcgaccctattgagctcctccctctacaccgtcgatggcgggcagcgcgccgtcctcttcgaccgtttccggggcatcctcgacgagaccgtcggcgaggggacccacttcctcatcccgtgggtccagaaaccctacatcttcgacatccgcacccgcccccacaccttctcctccgtctccggaacaaaagacctccagatggttaacctaaccctccgcgtcctctcccgccccgacaccgacaagctctccctcatcgtccagaacctgggcctcgagtacgacgagaaagtcctcccctccatcggcaacgaggttctcaaagccgtcgtcgcgcagttcaacgccgaccagctcctcaccgaccgtccccacgtgtcggcgctcgtgcgcgacggcttaatccgtcgcgcacgagactttaacattttactcgatgacgttgcgatcacgcatctgtcttatggcgcggagttttctcgtgccgtggagcagaagcaggtggctcagcaggaggccgagaggtcgaagtttgtggtgatgaaggccgagcaggagaggcgggcggcgattattagggcggagggagagagtgacgcggcgaagctgatttcggatgccactgcgtccgccgggatggggctgattgagctcaggaggattgaggcgtccagggaggtcgctgccacgctggccaagtcgccgaacgtggcctacttgcctggagggaagaacttgctcatggcgctcaatgctggtggacgttgattcatgtatctctgtgtgtggttttcacgatacggtgtaatggcatgcttggaagggatgctgttgaggttcttctttgctggggttattttttccccaccttgttttgtagaccccatttgtaacatgtagaatttggaccttcgcgttgaggattaatgaaaaatttggaccttcacgttgaggattaatgaaaaatttggaccttcatgttgagcataaatgggtcttttacagttgtacttgtagaattacatgctaagacttgaaatcgagtccttgtttgaggataaaggggtcttttagagtttgtacttgaagacttaatgtagctattttatcatctatttccatttcttttcacaga

SEQ ID NO: 672 - DNA, 1515 bp, Glycine max
gaattcccgggtcgacccacgcgtccggtgggcaaaaccacctggccttacggctccggcgtctggcgccccacgcgtccggtcctccccgagatccacgacgacgatatcgtctccgccttcgagggtaactccaacctcttctgggccgagcgtttcggcaaacagttcctcggcatgaacgatttgtgggtcaaacactgcggaatcagccacaccggcagcttcaaggatctcggcatgaccgtcctcgtcagccaggtcaatcgcttgagaaaaatgaaccgccccgtcgtcggtgttggttgcgcctccaccggtgacacatcggccgctttatccgcctattgcgcttccgctgccattccttccattgtgtttttgcctgctaataaaatctctcttgcccaacttgttcagcctattgccaatggagcctttgtgttgagtatcgacactgattttgatggttgcatgcagttgatcagagaggtcactgctgagttgcctatttatttggctaactctctcaacagtttgaggttggaagggcagaagactgctgctattgagattctgcagcagtttgattggcaggttcctgattgggtcattgtgcctggaggcaaccttggcaacatttatgccttttacaaagggtttaagatgtgtcaagagcttgggcttgtggataagattccaaggcttgtttgtgctcaggctgccaatgctgatcctttgtatttgtactttaaatccgggtggaaggagtttaagcctgtgaagtcgagcactacatttgcctctgccattcaaattggtgatcctgtttccatcgacagggcggttcacgccctaaagagttgcgatgggatcgtggaggaggccaccgaggaggagttgatggatgctacggcgcaggcagattccactgggatgtttatctgcccccacactggggttgctttgactgctttgtttaagctcaggaacagtgggcttattaaggccactgataggactgtggtggttagcactgctcatggcctcaagttcactcagtccaagatcgattaccattctaaggacatcaaggacatggcttgccgctatgctaaccctcccatgcaagtcaaggctgattttgggtcggttatggatgttttgaagacgtatttgcagagtaagactcattaggttagcattgcaactttttctcctctcttcctgagtttgctgctgattatttacttactattattagccacttctactcctgttttgtcttttctataagctaggtttgagtattgtagtaatttgcctgctgcattatgtatgctgtgctccatattggggcatcttagtatttgttgtagattttctttgttgagcatttaatataatagctcaagtagaaaaaaattaattggatacaatgagggaggaatgcacattgttggcttgttattactggattccagaccagaccacgccatccacaaaaaaaaaaaa

SEQ ID NO: 673 - DNA, 892 bp, Glycine max
cccacgcgtccgaaaaaacaattaggatttgttaataaaagcgtaggctttcggttttccacatcgtagatctggagtgagtcgcggcggcggctggcaagtagtagtattaaaaaagttgatgggataattggcattggttgagtttggttcaaattgagaaaatcattactccattaaccattcattcaccaatcctccatggcttcctcttctctgtttcagtctctccctttctctctccaaacctctaaaccctacgcgcctcccaaacccgccgcccacttcgttgtccgcgcccaatcccccctcactcagaacaacaactcctcctccaagcatcgccgccccgccgacgagaacatccgcgacgaggcccgccgcatcaatgcgccccacgaccaccacctcttctcggccaagtacgtccccttcaacgccgactcctcctcctcctcctccacggagtcctactcgctcgacgagatcgtctaccgctcccaatccggcggcctcctggacgtccagcacgacatggatgccctcaagcgtttcgacggcgagtactggcgcaacctcttcgactcgcgcgtgggcaaaaccacctggccttacggctccggcgtctggagcaaaaaagaatgggtcctccccgagatccacgacgacgatatcgtctccgccttcgagggtaactccaacctcttctgggccgagcgtttcggcaaacagttcctcggcatgaacgatttgtgggtcaaacactgcggaatcagccacaccggcagcttcaaggatcctcggcatgaccggcctcgtcagccaggtcaattcgcttggagaaaaaaatggaaaacaccgggccccccccggtgtatgcagttgttccacg

SEQ ID NO: 674 - DNA, 1612 bp, Glycine max
agatggaatacattaacacagcgagacagacatctcttccagaagcataaatggcattgcgtcatttacgaatcttccctcacacacttcctctaactctcactcccaaacccaaactcaataacagtaaccgtttttcgttcttcacttcctcactctctctctcttccaccacactcatggccactgctcacaaggtcctcgttcccatcgccgacggcaccgagcccatggaggccgtcatcatcatcgacgtcctccgccgctccggcgccgatgtcaccgtcgcttcctcctccgccaacctcgccgtccaagctctccacggcgtcaagatcatcgccgacgcctccgtctccgacgtcgccgccaccgcctttgacctcgtcgctctccccggaggtttacagggtgatgagaatctgagagactgtaaagttcttgaagggtttgtgaagaagcatgttgaggacggacggctttatgcggcggtgtgtgctgctcctgcggtagtgcttgggccttggggtttgctgaatgggaaaaaggcgacttgttatcctgcattgatggagaaattggccgcttacgtagccgctacttctgagtctagggtgcaggtggatggcacagttgtgaccagtcgtgcgccgggaactaccatggagtttgccattgctctgattgagcagttaattgggaaagagaaagcgtatgaagttgcaggtccattggtcatgcgttccaatcatgatgatgaacatacttttaaggagttcaactcagtgcagtggacatctgacaatccgcccaagattcttgtaccaattgccaatggttcagaggaaatggaagctgttattatcattgatattctgcgaagagcaaaggcaaaggttgtggttgcatctgttgaagataaactagagattgtggcatcgcgcaaagttaaactggaggcagacatgctccttgatgaagcaaccaaactttcatatgaccttattgtgttacctggtggacttggtggtgcccaaacttttgcaaactcagaaaccttggtgagtttgctgaaaaagcaaagagaatcaaacaaatattacggagcaatttgtgcatccccggctttagttttggagccccatggcttgctgaagggcaaaaaggccactgcctttcctgtaatgtgcgacaagttatcagatcagagtgaagtagaaaacagggtggtggttgatggcaatcttattaccagcagaggcccaggaacttccattgagtttgcgttagcgattgtggagaagctgtttggacgcaagttagcactagaacttgcaaatgcagtagtgttcgcacgcccttaggatttttgaacgcgaagctttttgtaccgatgcactatagctatgtgtatgaataattgagtgtatctgaaccttgagttgtaaagatcacgaagataagtggttgccaataactttgatatctcattggtagttgctttccatatgccgtggaatctaaattacttaaatgaaaggagggtgctatggttataatgctgtgtaagataagatggtgttggtgtttttattttttatttttatgtagg

SEQ ID NO: 675 - DNA, 1421 bp, Glycine max
ggctcgagctcgagccgctcgagccgattcggctcgagggcgatcccacatcgatcatgatcctatttcgtaaggaattgaatcacaccccatagaatagtatatatcagctacgtaggcccccccccccccattaacaataaattggaggcaacccaacatttgaagaattgaacctgccattattgtaagtaagaattgggaaaggaaggaaggagatgaatctccctatcatagatctgtcctcacctgatcctctttccactgccatttccatccgtcaggcgtgcattgagtatggtttcttttaccttgtgaaccatggcgtggagaatgacttggtcaaagcctttgatgagagtaagaggttcttctcacttccaccaggagagaaaatgaagttggcccgcaaggaatttagaggttatactcctcaggatcctactttaggcctccatggtgattcaaaagagagctattatattggtcctatggcggattcagcaagtgttaagctgaatcaatggccttcggaagaattacttgaaaattggagaccatcaatagaagccatctactggaaactctttgaagctggaaaaaagttgtattctctaattgcactttccttgaatatggatgaagatttctttgataagataggtgccgtggacaaaccatcagcttttcttcgccttttgcgctatccaggtgaaatgggacctcaccaagagatatgctctgctcattcagatactggcgcgctcaccctcctaatgactgatggagtcccaggactacagatctgtcgggacaagttaaaggaaccacgggtctgggaggatgtgccttacatggagggggcctttattgtgaacatcggagacttgatggagaggtggactaattgtttataccggtcaacaatgcaccgggttaaacgaactggaaaagaacgctattcgatggcattcttcttagaccctcatccagactgtgtggtggaatgcctcaaaagttgttgtagcgaatcatgtcctccaagattcactccaatccgaagtggagactacatggatgaaattttaagcaacacaccagtctgacaaggatttaaaatgctccatcctttcatttatttaaagagcttaaacttgtatgtggctgtaaacagaagaaggatgcgagactcaccacaagaccttgcttcattttaagtcatttcttgtgcattatggctgtagccatgtaaaacggacacgttaataatgcttgtgctgttttatttactgagcacttgatacaagacactcttataaagatcctttggaatgggatcatgcttttataaattattatagcgctcttatcagaattttaatttaattggtgaagtgtgcaatattatttgatgtaaaaaa

SEQ ID NO: 676 - DNA, 1075 bp, Glycine max
tttcggctaaaaagaattattagtaacctaatgaaggaggtttcctttccatcagtttcagttccaccaaaattcaaaaatctctcggcatggggtgcgtgtcttcgaatttgctgaaccaagacgaagacttcagcacccaacttggctcctccgcactgggccaccacatcgtgtccctcacctccaccacctacggcctcctcaccctcgaccctccttccacgcctccttcccgctttacccttggatctctcttcccctccgaaccagaggtcatcaactcatgggagctcatgtccggcctcgacaccgacagcttccgcttctctcctttacctttacccaaacccaaagaaaaccgcctcactcccccaaccggttccaaactcttattaaccccaactctggcggaccggttcgagaaaatatgcccccccaacggtgagaagcgcgtggtgatctatacgacgtcgttgcggggcgtgcggacgactttcgaggcctgcaacgcggttcgcgccgccttggagggattcggggtggtgatctgcgagcgtgacgtgtccatgcacagcggcttcagagaggagctcaggactctattgaaggggaagcaggtgatggtgcctccgagagtgttcgtgaaggggctctacatcggtggcgccgatgaaatgcttaaggtcgccgaagagggtctccttggagacttgcttgatggcttgcctagaaagaaggttggggctgtttgtgtgggttgtggggacttgaggttcttgccttgcttcaactgcaatgggagctgtaagactcttgttaaggaacaggggaggacggttgtggttaagtgtacccattgtaacgaaaatggcttagtcttgtgcccgctttgtacttgattactttttcacaatcatgtcatcactctcttcactgttcatattaacctgtattcctcctctcttctcttggtgatcttgtatcccgattcaccattttcaaatcagccttcattgttaaaaaaaaaaaaaaaacgcacattagtatttatcaatggattttcattagtatc

SEQ ID NO: 677 - DNA, 967 bp, Glycine max
actgcaaaagtaattctgtatctctcatctttcaatcttcacttctctctttctctcaaaacacaccaaaccaaccattcattcattcattcatagtttcattcaacaaatcaaataatatcaaacaaataaatgtcacctaacaatccttccacgattgttcccgacgcggtggctcggcactacacccatgtcgtgtccccgcaccagtgctgctccgccgtggtgcaggagatcgccgccccggtctccaccgtgtggtccgtcgtgcggcgcttcgacaacccgcaggcctacaagcacttcgtcaagagctgccacgtcatcctcggcgacggcgatgtcgggaccctccgcgaggtccgcgtgatctccggcctccctgccgccgtcagcaccgagcgcctcgacgtcctcgacgacgagcgccacgtcatcggcttcagcatggtcggcggcgaccaccgcctctccaactaccgctccgtcaccatcctccacccccgctccgccaccggcaccgtcgtcgtcgagtcctacgtcgtcgacgtccctgccggcaacaccaccgaggacactcgcgtcttcgtcgacaccatcctccgctgcaacctccaatccctcgccaaattcgccgaaaacctaaccaacaaactccatcaacgatgatttcacaaaaacactgtccgtatctttcttttttaatttttaccttttgtaatttagctattaattagttgttgtgtactttttgattaatatcacaaggttgtgtgagtttgtgactttgtgtctgagaggaaaaacaaaaggagtctcttaattttacccttgtgtgatcgttttgtgtttctctttgttgagaaagtgaacatgaaccaaggattttatgtaatgttggtgtaatctttgttctcattgtagtaattttcatctgctcaatacaattgtagaaatgtttgtttat

SEQ ID NO: 678 - DNA, 1708 bp, Glycine max
caaagaaatatatatctaatttttttgttcaggttactgattcaactcacgccgtgacacatcacaccttatcacgatatcgatcaccttcatcacaaatggagcttctttccttcctcttcctctcccttctcttcttcctctatctctacatccagttcctcgctagaaaaaaaccccgcaacaacaaagccttcaaagactaccctctcatcggaaccctaccggagttcctcaaaaaccgccaccgtttcctcgagtggaccacccaagtcctccgcgactcccccaccaacaccggcgtcttctctcgcccctacaaactccacggcatcttaacggccaaccctgacaacgtggaacacgtgctcaaaaccaaattcgacaactaccccaagggagaacgcttcatccacctcctccaagattttttgggtaacggaatcttcaactccgacggcgacctctggaaggtgcagcgtaaaacagccagctacgagttcagcaccaaatcgctccgaaacttcgtcgtcgacgccgtcaccttcgaactccaaacgaggcttcttccaattctctccaaagcctctgaaacaaacaaggttctcgatttgcaggacttgttggagcgcttcgccttcgataacgtgtgcaagctagcgttcaatgtggaccccgcttgtctcggcggcgacggcacagctggcggcgagttcatgcgcgccttcgaggacgccgcggttctgagctcagggaggttcatgagcattttaccggttgtgtggaaaataaagaagctgttcaactttggatcagaacggaggctcagagaatcaatcaccaccgttcaccaatttgctgattcaatcatacggtccagattggaatccaaggaccaaatcggagatgaagatttactatcacgtttcatcagaacagagaatacctcaccggagtttctgcgcgacgttgtgataagttttattctggcggggcgtgatacgacgtcgtctgctctgagctggtttttctggattctgtcctccagacccgacgtgcaaagaaaaattcgggacgaaatcgaaacggttagatcggaaaaatcaaagggcgcgtttggatacgaggaggtgaaggagatgcgctacctgcaagcggcgatttcggagacgatgaggttgtacccgccagtgccggttgacacgatggagtgcctaaacgacgacgtattgccggacggaactagggttgggaaggggtggttcgtgacgtaccacacgtacgcgatggggaggatggagagcgtgtgggggaaggactgtaccgaatttaagcccgaaaggtggttggagaatcgagccgagagtccgtttcggtatccggtgtttcacgcgggtccacgaatgtgtctggggaaggaaatggcttatattcagatgaagtcaattgcagcttcgttattggagaggtttgagattgaggctttggataaggacacgtgtccggagcatgttttgtctttgacgatgaggatcaaaggagggttgcctgtgagtgtaagagtaaggaatgaatgaatgctagggtcaggaatattctctccacatgtacctgtcttccaccactctgcaaaataattgtaatttctgctgttttaatgaaatcattagttagaatatataaaaaaaaaaaaaagttctaattaatt

SEQ ID NO: 679 - DNA, 1754 bp, Glycine max
  misc_feature (854)..(854): n is a, c, g, or t
tcgcggctgcgacgtggccccccccctcggctcagatcgaagaagcaaaacaaagccaaaactacagttctctcaatgaagctcccagcacattgttttctggcttcaactttgaagtcacttgtccgtttgacagtactattactagttgtttccagcaacaaaacaaagggtgccgtgaaacttccaccaaatatctcggttccagcagtgttggtatttggagattcgatcatggacactggcaacaacaacaacaacttgataacatcagctcggagcaacttcccaccatatggccaagattttaagggagggatccctactggtcgattttgcaatggaaaggttccttcagatattctagttgaagaattaggcattaaagagtttctacccgcatatttggatccaaatctccagcttaatgaattacccaccggtgtgtgctttgcatccggtggttccggatacgatcctttgacatcccaaactgcgacagctataccattatctggtcaactagacatgttcaaagaatacatagtgaagctaaaaggacacgttggagaggacagaacaaacttcatcctagccaacgctcttttctttgtcgttttaggcagcaatgacatttccaacacatactttttgacccatctcagagaactgcagtatgatgttcccacttactccgacttcatgcttaacttagcttctaatttcttcaaggaaatatatcaactaggtgcgcggaggattgcagtactcagtgcaccgccagttgggtgtgtaccgtttcacagaacattgagtggtggaatagcaaggaaatgtgtacaaaagtacaacanggcagtggtgttatttaacgacaaattgttgaaggagataaattcccttaatcagaaccttccaaacagcaggattgtttacttagatgtgtacaaccctttgcttgatgtcactgtgaaccaccaaaaatatggttccaaagtcggggacagagggtgttgtggcacaggcaatctagaggttgcattgacatgcaaccatttggatgccacgtgttccaacgttttggattatgtgttttgggacggttttcaccctagtgaaagcgtttacaaacagcttgtgccccctctcctacagaaatatatacaccggtttgcgtgagcaattaatctatttcctttttacacaaatctatctctgattttttatgtaatttcgggtttgattaattcttagctacgtggctaccaaataattcgttatatctaaaagctaaaaaatcatgcatacaatttctagagggttgtggctttttcagacaatagtagcagaaacaagtgcctctgagatgcattttctttgagatgcattttatattttgagtgcatagcttgctcaaaagtatggaagctaaattggattatcattttctcagctttgcgtaataattgcaaggtctgttatcttcaatttctcgcttaattactaagttgttgttcagtcttgaggaaggagcggcaaactatttggcacgcagtagtatgaaatagaattattttgtaataaaaaaagatcggagatagaagaaatagtggattcaggtttatgatatggtatcttgcttttaaatttgatgtggtattttttattcaatcttattttaaggggtcatgtaaatttgactcgaaaaaaaaaaaaaaaaaaaaaagggcggccgctcagaggatcaagcttcg

SEQ ID NO: 680 - DNA, 1385 bp, Glycine max
tttgtctgctacgtgtttggccccccccccagaattatatccgtcctttagtcgatctcaaaaattcttatgttggcaacatgccccttttcattgaaatggaagagaaacttaagcagggacacaacatcatcttgatgtcaaatcaccaaactgaagctgatccagccatcattgctttgctgcttgaaacacgaatcccatatattgctgaaagcatgacctatgtagccggagatagagttataactgatcctctgtccaaaccattcagtattggcaggaatctcatttgtgtttactctaaaaagcacatgcttgatgatccagctcttatagagatgaaaagaaatgcaaatatacgagctctgaaggaaatggctatgcttttaaggagtggttcacaaatagtctggattgccccaagtggtggtagggatcgcccagatccccacaccggagaatgggcgccggcaccctttgatacttcttcggtagataatatgagaagacttgttgaacattctggtccaccaggtcatgtatatcctttagcgatattgtgccatgatataatgccccctccactgaaggttgagaaagaaattggggagaaaagaattatatcctttcatggggctggcatatcagtggctccagcattaagcttttctgaaaccactgctactagtgaaaatcctgaaaaggctaaggagttattctcaaaagccctgtacgattctgtgaccgagcaatataatgtgctgaaatctgcgatacatggcaaaaaaggatttgaagcatcaactcctgtagtttctttgtcacagccatggaagtagttgaaattggcatttcttcattacaatttgctctgatgcagaggctccaactgctttgttccctttcagaagcaagttacaagacttcagtcaaacaatttcaactgatttacttctgagggactgcctattactacaccggtcaccgaatgatttgagcttgatggaagtttgcagtcaaatacatatttttcatttcatttgtccttttgctcttggttgccgttatcagcattcaattcatctggaatctgtttcagttcagaaggttcaaattcagctgcgtactgtacaggtctctcttagttcggtgtcagattcagttcattgactgataaaatactaaattttttccctgcaattttgtgatcaggcttagctagctgaatagataaaatctaattacttccgtttgtattttaagttaactttgttccattatagatgaatagatgttaatattacatgttcagaatcaagttgttcagacggggtcagtgaataaactggtccaaatgctaatgcaagattatttatattggc

SEQ ID NO: 681 - DNA, 1185 bp, Glycine max
  misc_feature (692)..(697): n is a, c, g, or t
  misc_feature (773)..(777): n is a, c, g, or t
gctttttatgtaacgatcaggacaagccaatgctcgtggcagctccgtagcgcccccccccccatttgtcaggagagatacctgattgctggatgaattggacatctcttgtggatgtaaatttacaaagcaaccattttgttgggaacttaccccaatccatgggttccttggcagacctgcagtctttacaaattcgtaacaacacactctcaggaatatttccaaccagtttgaagaagaataaccaattgatatccttggaccttggggaaaataatctttcaggaagtattccaacatgggttggagaaaagctcttaaatgtgaaaatcctccgccttcgatcaaacagttttgccggccacattccaaatgaaatatgtcagatgagtcatcttcaggttttagaccttgcacaaaacaatctgtctggcaatataccgagctgtttcagtaacttgagtgccatgacactaaagaaccaaagtacagatcctcgtatctattctcaagcacaatatggtaggccttactcttccatgcaaagtatagttagtgtgctactatggctgaaaggaagaggagacgagtacagaaacattctgggtttggtaacaagcattgatctgtcaagtaacaagttattaggggaaataccaagagaaatcacatatctaaatggattgaannnnnnaaacttgtcccacaaccaattgattggtcatatcccacaaggtataggtaatatgagatcattacagtccattgannnnncgaggaatcaactttctggtgaaatccctccaaccattgcaaatttgagctttctgagcatgctagacttgtcttacaatcatttgaagggaaatattccaacaggaactcaattgcaaacctttgatgcctccagcttcatcggcaacaatctatgtggtccaccactgcccataaactgcagccccgctgtgaaaactcatagttatgaaggaagtgatgggcataggtcagttgcttaactttgaaattgatcccttggtgcttgaatttctcttgaaatgagatttcaaatattcacatattactgggtattacatccatttccatccaattatgagtgcatattagaattggctgcctttggagcaaatttgtttccaacaatgacgaaggtgattgtagaag

SEQ ID NO: 682 - DNA, 1068 bp, Glycine max
aggttttagttaaaccggagaaagaagaacaaaagatgagaccagacagtgtcgcagctctttctccaatctccatcctttcgttttgataactcgcgaaatcgcacgataccgacagcgtcgtgcggtaatacgacacatttgttgattgatcatgttggccaagagattaagctctttcttcaaactctccccaaaacctcagatttccacttccacgaagaaagtggatgaagagacgggaaaatactatggtaaaaaggccgtgtcatttttcttgattactattacaggtggtgttgctttgagtgcccttgatgaccttgccatctatcatggatgtagccgcaaggcgatggagaaagtgagcaagaaccaggcattaatagatgctattggagaaccaattgttaaaggtccatggtacaatgcatctctttcagtagctcataaaagacattctgtttcatgctcatttcctgtttctggaccacaaggcactggtgtcttgcagctgaaggcggttcgaaatggagatgacacttggtcttcctttttccttcctcgtgattgggacattttaatcatggatgctctcctccatgtacctgggaatgaggagaagcaccaaacactgcggatcaatcttgctgacaagcctctttcttgtactacttgcaccgagtgcacacctcatccatcagaaaattcaaaggcaaaattgagttctaagcaataaaagcttaattggcagtttgacacaatatttaattcatctaaaatcaagtttttgacatttttatgttctaaaccatttacatgatttttagactaggtgggcgtcaatatttggccgacagaataaatttattttcaaattttcttctggtaatgtgttgtagtattattcaccagtcttatttcattgtgaaaataaattttgccttgtgcaatgatgtaaattttatttaaaaaaaaaaaacccatttttccttttgatgttgctaactattttttgagattgtaatttcctttactactaaagtgaggtagtttttgtttggtgac

SEQ ID NO: 683 - DNA, 1391 bp, Glycine max
cgagaagacgacagtcagctacggagtccctcccccccccccacagaaagaagaaccaccaagaaagaagcataggggaaaatacatcgatagagagaaattgaagggtgctacgtccttctattgtattaatgattgaaattcgtgtgggaattgtcttgttggtgtggtagagataataagagaggatcatagtagtgctagaaattgaagtgtgtaatagaatagtgatagagagagagagatatggggagaggaagggtgcagttgaagaggatcgagaacaagatcaataggcaagtgacgttctcaaagagaaggtctggtttgctcaagaaagcacatgagatctctgtgcattgtgatgctgaagtggccctcatagtcttctccaccaaaggcaaactctttgagtactccagcgatccctgtatggaaaaaattcttgaacggtatgagaggtattcatatgcagagaggcagcttgttgcaagtgatcaaccactaactgaaaattggactctggaacatgcaaagctgaaagcaaggttggaagtcctacagaaaaatcaaaggaattttatgggacaagatttggagggcctaagtatcaaagagcttcagaatttggagcatcagcttgaaagtgctctcaaacacattagatcacggaagaaccaactgatgtatgaatctatttcagagcttcataaaaaggataaggccctacaagaacaaaacaacactctcgctaagaagataaaggagaaagagaaggcactagcccaacaggcacaactggagcgacttggtgatgaagtggatctgacttcctctgcccttgttccccaaccactggtgacatcaaacattagaacctcctcacaaatcagaggtgaaggagataacgaaggaaccccaactccaacccaagctaatgccattcttccaccttggatgcttcgtcctacaaatgaatagaatactatttaattaatgacataaagttttaatcaaattaaatatgaatatggccaatacaaagctcaccctacaagatgtaaaatggtctagtgtgttgatttgggaatggcacccggtgacttgatcagttggaatatcaacgatatgtaatatgtctgtgactaccacatttcaaggatgcttagtaaattatatggtatggcctgtctatacaggcctacaatacatatatagtgtcaattatgtatgtttggttcttatcaaaagtttaagttgtgctagaaactacgatattgggcgatgttagatccctcaaaatctatgattttttacaacagaaatattaaattttgtatgaactaatggttttatctaagtgttacgagaataaaagagaagaattaaag

SEQ ID NO: 684 - DNA, 1291 bp, Glycine max
cacgagtccttgtccctccctcgccgatttccataatagcagagaaccttcagaaaccctaatttctcaaaatcttcagaggacacacagcacaaccaacacctccacagcctctcctacctcccggagccatggccgccgccgactcctccgccgctccatcgcaccagttgtcgcagagggagacggacatccagatgatgctcgccgccgacgttcacctcggcaccaaaaactgcgactttcagatggaacgctacgtcttcaagcgcagaaccgatggtatttacataattaaccttggcaagacatgggagaagctccagctcgctgctaggattattgttgccattgagaacccacaggatatcattgttcagtctgccaggccttatggtcagagggcagttcttaagtttgctcaatacactggtgctcatgcaattgccggaaggcacactcctggaacattcactaatcagatgcagcaatcctacaatgagcctcgtcttctgattctaactgatccaagaacagatcatcagcctatcaaggagggtgctcttggaaatattccaactattgctttttgcgacactgattctccaatgcggtatgttgatgttgggattcctgccaataataaggggaagcatagcattggttgtctcttctggctattagctaggatggtactgcagatgcggggtactattcgtccaggtcacaagtgggatgtaatggtggacttattcttctatagagaacctgaagaggccaagcaacaagaggaagatgaagcaccacctgcccaagattatgccatttcagacttcaatgccgctggcattggcagcttccctgcttctgatggccaatggcctgctgcagtcgaacaaccttggactgaagaagcaccacaaccaatctcagcagctcctactaacttgacaccagaagcagctgttgcaggcgattggggtgaggctgttccagctccagttccagctccacaagctggtgtgcctccagcccaagcttttcctcccgctactggctgggactagcttttgacaagagagtttgattccatggtgtcaaaaccataatttttcttcccctcggctcagaaatttccctttcgagatttatttgttagaaaagaaacaccatttacttgatattgaatctcggtaaaattttgtttgttgacatatattgaagcaaacttaatcgtttaattgcagtgatttaattgtttcataatgggtttttatacaagttagctaca

SEQ ID NO: 685 - DNA, 1765 bp, Glycine max
tctcccacgtttccgcgaccatctctctctctttttctctctatctctcaatctctcacagaaatggctctcaaggccgtccatgtcaccgacgtcccttccctggacctggtgaccgagaatgcctctctgtccctctgctcctcccgcttccccaacggggtggaaatgagtcggagtgacttcaagatgccaaagttcgtcgtgatcggacacagaggtaatggcatgaacgttctgcagtcttccgatcgaagaatgagagccatcaaggaaaataccatcttgtccttcaacaaagccgccactttcccgctcgatttcatcgaattcgacgttcaggtgacgagagatgactgcccagtcattttccacgacgatttcatcttcacagaggagaatggttctgtgtttgggaagagattaacggagctgaatctgtctgagtttctttcctatgggcctcaaagagaggctgaaaaggagggaaaggttttgcttagaaaaaaagaagggaagataatgcaatgggacgttgaacaagatgaccctctatgcactcttcaagaggcttttgtcaaggtggaacccactttgggttttaacattgagttgaaattcgatgaccactttgtctatgagcaagattatctcgtccatgtccttcagaccatcttaaaggttgtgtttgattatgccaaggacagacctattatcttctcaacattccagccagaagcagcaatgctcattcggaaattgcaaaccaactaccctgtgttctttttgacaaatggtggatgtgaaatctatgaagatgtgaggaggaactcattggaggaggccatgaagctctgtttggagaatggattggaaggaattgtctcagagatcaagggaatattcagaaatcctggtgcagtaaccaagatcaaagagtccaagctttctctactttcttatggaaaattaaacaatgttccagaggcagtttacatgcaacatctaatgggaatcgatggggtaattgtggatttggttcaagaaataactgaggcagttgcggatatgataaagccaacaaagggtggtgaaggagagggtttggttgagggttgtgggaaggtgcagggaaactcaaagcctcaattttcacagcaggagttgtctttccttttgaagctcattccacagttgatacaaatttgaatagcagaagagaagacatttcttgaggctttttaattaatttcacaatatgtactgtgtggcccttcacaaaatcagtggacccccttggagggggtccataaaaagcttaacctttgtacatatatttcttcttttcactttgtagatataaaggaaagaatgattcatgtgtcaacttactggtttggtggtcgccatccaaatatacttgtcagataatgcttttcattgtttcaaaattgttacactggcatttgtctaccactgcaatgagaaaatacggaaacttggcctcttcctgtttgtgttcttgccgttagcttttagcttggaacaaggaattttgctatgatataaaatatactcttatgttgaattctctttttccagtatatatatatatatatatatatatatatatatatatatatatatatatatatatatggaaaaagaaagtttgatattgttagtgtaaatttatactgtttagttaattcattaaaaatcattttagttataaaaaaaaaaaaaaaaaaaaaaaaaaaaaaac

SEQ ID NO: 686 - DNA, 943 bp, Glycine max
gagtcagctagtaggcccccccccccaatttgcatggaggaccggatgagatctctagggatgatttccagtgaaagtgactatgcatcaaacattgaactttgctgtaagttgttgaagggtattgatctggaagctactattccagtgaaaaagataagagcagctgttttgtctatgaagtcaaccaaagcatggaagctactggaagtgttactggctgcatggaaatcaaggtcatctagtggaaagtatattcttccatggatatacagcatattagtgaatcatgatctcaatcacattcctcggcaatatgtgacatgtacactcaattccttagacaagattaccaattttagaggggcaactcatcagcctttgttacaattatcaggtcgtctgcaactcctgacatcacagattgagaaggcttctcagactataagccatccggtgcatgaactccaaatgcaagaaagtgaagatgaagatgaggatgaggttgaagatgaatattatcacgaggaagatgatggttctgaaatgagtactgatgatgaaagctagtctgattttttcgagagattgggttccaagttgtctcttttgcggctgacgaagatagaggaatggaagctgtatttcatccagcctcttgttcacaattttgttgctatatagatagatacatcctcagaaagaaactttggtactatccagatttgttaaaaatgacacggcccctaatttatgtaatttgagaattttattaagtaaaaatacataaatatagttcgggcatatttactatatgtttgaatacatgctcaaaatactacgataaagattttgtattttccagatctaaaaaaaaaaaaaaaaagtgatagcagttttgcataccccaaattggccctacacgtagcaagttaattgccag

SEQ ID NO: 687 - DNA, 2279 bp, Glycine max
  misc_feature (1606)..(1606): n is a, c, g, or t
tgatattaatattattattttattgtgtggtctcgtgcctaaaaatgtcaaattatttgtcttaaatgatttaatactgtatgcattaaatacttcagacaaacaagttcactgaaaattatatcaggcaaaagcttaatgcaagtacaaattcaatctatacggattacctcaacaattaacatagaatccgtatcgaaaatacacagaaaatatgagctcgtgaaaaagcctattgtacaacaaagcggggtaaaattgagacccctcttctgtatactgtgtgccaggtactagcaaggagaaagtgaaggaaacaaaatccactgcaagatgtcacatactgtgccatgtactaacaatccagcatgcaatataaaccaagacaaatggacctttctctcatggttctgattctgcatcttcaagggtattgtagaattgtcaagttaaattcagtttagaagagttatgctatttctgctccaacaagatatcagcaactttcaagcaccttcgtagtaacaaaactggccgcaatgaaaggaaaaaacattgcaagccacgtatgagatgtgaatcagaaaattacagatcaccttccattccaccactcaagctcagatatcagcagtttcaaccccaaaacactcaacatccaaggcttttcattatgttcgccagttctttgatcacggctccaggatcagcatgtgatccagcaaggttgattgcatgatactctaatcctctccaccgcgaaatataagcaaaatgtggtcgtctgtaatagctgctaatgatctccagaatcacagttttaggcaatgcagatactatatgagtaagaccagcaccgtgggcaccaatgatgaccgatgcatcatgaatggcttgaacctgatccttcatagacatgtgagcaaacaatccgttgacaaggttaattttacaccctttataattggatgcccagctcttcaacgagtcgaagacttcttgctcgttacttagtcgtgattcaagttttccactgtgacgtggatgagctaaataatcttcgcgacgaacaaagaggacattatgtccagcgagtggttttccatcatggtttacatttaaaggtagcccaaaagctgctctgaccatttctccaaactcagaaaggcgcgcggttttgtggtcattagggttttgcaatagttcttgtgcaggagctccataacaatctatatgttctgaaagccctctaaacattgccgtctcatatcccaagggtgagagaatagcatgatgaaaacaaactgaaccactgaagctcttagcatatctgacgcttgagaataaggctttccatgtctcttcaagaggagccttacagtggccatcaacaaagatcacatgaggtcgattaggcagagcggtgactctagaagaaacataagcactgtaccagtctgtaacagtgtgaaaaagattagcatactcaaagcgtgtcaccagaagtgttggttcctcaatccactcatcacattgaaaatccttccctctcacgatccgaatcttggcgatcaaatcccgccatggtgtgtctatcaatccctcncccttggcacatactcatccaaaaactcttggtcaaccagaaccttccggtccaccggcgacctccacccccgtcaccttgaaacgcaccgttttgaaacacgggcatctcctcgtcctccgtgcgccccataaccgccgccaaatcctcgccacccttcgccatcgtgattttctccggctccatgcgcagcctcccgccctcgcacaccgagctccggagcgcgtcgttgtggtggcaccggaaccaccccgcgccgccgcgggaaaggagggcgtcgcggcgccgcgtgaagccgttcccgaagtaggcctcgcaggagtgggatcgcgcagaagtggtccaggggaggtaggaagggagaataggccatggctttgaagagtgaggttcgtgtgaaaagggtgttaggtatgtgtctggttcgagttctgatttttctttttcttctgaaggagaagaagaagagggtttgtgggtgaagtagagggagagatagagggagttgaggacgaagaggaacaagagggttcgaataagcaacgtggttcttttgttcatggtttcttcttcttcttctcactcactcccactcctactctcaccctcactttctctctcttgtttttctctctctacggtaaccacgatagagtttgtgctcgagccccat

SEQ ID NO: 688 - DNA, 2107 bp, Glycine max
gtggaagcagtagcaggctcccgccatttctccactctccccctttctttctctcaaaacaaaaccttgcgctcttcttctgccaaatcaattaagctttcctctccttggaccaacgctcacgtttagtgactattaatttggcagaaagaggtatggggttgggtgaactccaactccaagggcgtcgccgtgagaagggacacccgcggagtggtggtgagggctgaaatgttcggccaattgactagtggccttgagactgcatggaacaagctcaaaggagaagaggttttgtctaaagagaacattgtggagcccatgcgagatattaggagagctctcttagaagctgatgttagtcttcctgttgtcagaaggtttgtgcagtctgtcagtgatcaggctgtgggtgttggtgtcattcgaggagtgagaccggatcagcaattggttaagattgtacatgatgaacttgtacgattgatgggtggagaagtttctgaactggtttttgccaaatctgggcccactgtcattttattggctggacttcagggagttgggaagacaacggtttgcgcaaagttggcaaattatctcaagaaacagggaaaaagttgcatgctagttgctggggatgtttacagacctgctgctattgaccagcttgctattttgggaaaacaggtggatgtgcctgtctatacagcaggtaccgatgttaaaccttcagaaattgccaaacaaggtttagaagaggcaaaaaagaagaaaattgatgttgttattgttgatactgctggtaggctgcagattgacaagacaatgatggatgagttaaaagaagtgaaaaaggcattgaatccaacagaagtgttgctagttgtggatgcaatgacagggcaagaagctgcagcgttggtgactactttcaatcttgagattggaataacaggtgccatcttgacaaagcttgatggtgattcaagaggtggagcagctttgagtgtcaaagaggtatccggaaagccaattaaacttgtaggacggggtgaacgcatggaggatcttgaacctttctaccctgatcggatggcaggacgcattctaggaatgggagatgttctttcttttgtagagaaggcacaacaagttatgcgtcaagaagatgctgaagaactgcaaaagaagattatgagtgcaaagtttgacttcaatgattttctaaagcaaacccgtactgttgcaaaaatgggttctgtctctcgtgtcattggaatgattcctggtatggggaaggttactcctgctcaaattcgagatgcagagaagaatttgctgaacatggaagcaatgatagaagcgatgacccctgaggagagggaaaagccagaactgttggcagaatcccctgtcaggaggaaaagggttgctcaggattcagggaaaacagagcagcaggtaagccaacttgtagctcaacttttccaaatgcgtgttcgtatgaagaacctgatgggtgtaatggaaagtggatcacttccaacacttagtaatcttgaggaagcgcttaaagcagaggaaaaggctcccacctggcactgctaggaggaggaagagatcggaatcaaggagtgtatttggggactcaacaccagcaaggccaagtcctcgtggttttgggagcaaaaattgaaaatccctaaagggtttaacacaacaatataatgggaagtctggatcaacaggtcaccggtgatcaacttgtttgatttagcgttattcagctaaaataattctttaccatcattagagcaattcatatagctccaacttgtttgattcagctttcttcggctaaaatgattatttaccattattagttcaattcatattgcaatgaatgagggttgtccaggagaaagatgtaatttaggcagagatgagtcgtatcatacatatgcgggatatgttgtaaggaatatgcgtgtcattcttgttcttgtacaactcaactttgtatcttggcgtgggagtggaatgttactcataaagaccgtccaatatttttcatttgatcttctaaaaaaaaaaaaaaaaaaaa

SEQ ID NO: 689 - DNA, 931 bp, Glycine max
agtttccattctgcggagcaacaaacacaatggttttccagtgattgatcacacaagaagtggagaaccacttgttattggattagtgcttcgtagtcatttattggtaattctgcagtcaaaggttgatttccagcatagccctttaccctctgatccaagaggtgggggcagatcaattaggcatgattctggtgaatttgcaaagcctgtttctagtaaaggaatatgtattgatgatatacatctaagttcagatgacttagaaatgtacattgatcttgctccatttttgaatccctcaccatatattgtaccagaagatatgtctttgacaaaggtatacaatcttttccgtcaacttggtcttaggcatttatttgttgttcctcgcccatcatgtgtggttggtttgataacaagaaaagatttgttgattgaggacaaagaaaatgtgaatacgttagagcttcagtcaactagtgtaagaattccgcaacagaataaaagattgatgacaagaaatatagatgtggagcgccctttgctaaacggactgcttcaaaatcagatacctgactaacactgcatgtagcatactcaaagtccttcccgcttccaattttccttgaagatcattctttattatttcttgtatccatgttcaaataggttagataaaccaatcttagggaatggggttgtagacagaacgccctagaattttgtatattagccactaggaaaagagaggaagacttcattataatgatagttgaattcagtgtaatctattaaagatctgaatcttcattccgtttttttgttcgaggtcattgcttttagtttggaatattatattataaaattcattcaaagcatcaaatatcatattttataagataattcttaccaaaaaaaaaaaagaatg

SEQ ID NO: 690 - DNA, 1345 bp, Glycine max
agattgttacatttttcatccgataataagataaggcgagtttctccacactgatccccatgtaaagatgctgaagccattgatataggaagtcaaccaaaggacttgagtgttgcacttctttctcctgaacttgccctagtttcaattgattcaggagttgtcatgttgcgtggtgccaaaattgtgtcaaccattaatcttgggcttattgtgactgcatcggttgtctcacctgatggaaatgaagccattatcggtggacaggatggtaaattgcacatatattctatttctggcgatactcttgtagaagaggctgtccttgagaaacataggggtgctattagtgtcatacgttattccccagacctttcaatgtttgcatcaggggatgtcaatcgagaagctatagtgtgggaccgtgcctcccgagaggtgaagctgaagaacatgttgtaccatactgctaggataaactgccttgcgtggtcccctgatagccttaggattgctacaggatcacttgacacatgtgtcatcatatatgaagtttatcagcctgcatctagtagaattaccataaagggtgctcatttaggcggggtttatgggttagcatttactgatgagtatagtttggttagctctggtgaggatgcttttatccgtgtttggaggataacccctcgttgactgatcaaggtcaatttggaagataagtgaatttgggaaatatttgttggatttcaaatttcttcctttagaaggcttctaaaagtcaagactggtgaggatgtgcttatcaccataagttggtcatacacaatcctcttgcaaatttcaagcatcggtttggtggtcactcttgacattggtggtataaagttggggccattttcttgttgccttttataagtagctgctttttgtgagttttgatatctagactatgatggtaccagtgtacatcactatttgtcttggtttgctctggaatctaaaagcaatttatgataccaaagatttttaatagttgtgtcaattgtcaaaaggatcttgtgaacatttcaggggatcaatatagatagttcgagtttttgtgttaaaagtgttgatagattagagaacacagatagtgatttctcctcacccaaacccccccaattctttagaggatacactaaatcagctgcccctgtttgaggccagattgattgtaatgtttctttgtagttggaatgcagttttgtgtgtttgttgtttttcaatttattcaatgtggttaacaatttttttttttttttcaagaattaatgaagacctctgtttgggtcctacatac

SEQ ID NO: 691 - DNA, 2521 bp, Glycine max
ccacccctcgcgcttggtcggttccggcatcgtgctctgctctgcacacctttctctttctctctgtctgaggctctgagcagtgagcacaccacaaactgaaacaaatccctttgagcattcagcaagatgagccacgagctgttggagacgtacgcgtgcatgcccacgacggagcgcggccgtgggattctgatctccggcgatgccaagtccaactccatcgtctacaccaacggcagatcggtggtcatgatgaacctccagaaccccctaaacgtgtccgtgtacggggaccacgcctaccccgccaccgtggcgcgcttttcccccaacggcgagtgggtggcctccgccgacgcctccggctccgtcaggatctggggcacgcgaaacgacttcgttttgaagaaggagtttagagtcctctccgctcgcatcgacgaccttcagtggtcccccgatggtctcagaatcgttgcctgcggcgaaggcaaagggaagtccttcgtccgcgcttttatgtgggattcggggactaatgttggtgaattcgatggtcactcacgtcgggttttgagttgtgcttataaacccacgaggccttttcgcgttgtcacttgtggagaggattttctgcttaacttttatgagggacctccctttagatttaagctgtctcacagggatcattcaaattttgtgaattgtgtaagatattctccggatggcagtaaatttataagtgtaagttctgacaagaagggtatcatattcgatggaaacagtgcagagaagattggtgagttgtcttctgaaggtgggcatactggtagtatttatgctgttagctggagtcctgatggaaagctggtgctgactgtatctgccgacaagtctgcaaaagtatgggacattactgaggacaataacggaaaggtgaagaaaacattgacttgtgctggctctggtggagttgaagacatgctagtggggtgcctatggttgaatgattatcttgtcactgtttctcttggtgggacaatatctatatttttagcaactgatcttgataaagccccgacaacattttctggacatatgaaaaatgtttcctccttaactattcttagaagtaaccctagggtgctattgtctagcagttatgatggcttaatagttaagtggattcaagggattggatatagtcggaaaaactacaaaggaaggaaaattctcaaatcaaatgcttagcagctgtagaagaagagattgttacatctggatttgataataagataaggcgagtttctttacatagggatcagtgtggagatactgaagccattgatataggaagtcaaccaaaggacttgagtgttgcacttctttctcctgaacttgctctagtttcaattgattcaggagttgtcatgttgcgtggtaccaaaattgtgtcaaccataaatcttgggtttattgtgacagcatctgctgtctcacctgatggaagtgaagccattatcggtggacaggatggtaaattgcacatatattctgtttctggtgatactcttgtagaagaggtagtccttgagaaacataggggtgctattagtgtcatacgttattccccagacgtttcgatgtttgcatcaggggatgtcaatcgagaagctgtagtgtgggaccgtgcctcccgagaggtgaagctgaagaacatgttgtaccatactgctaggataaactgcctagcgtggtcccctgatagccataggattgctacaggatcactcgacacatgtgtcatcatatatgaagttgatcagcctgcatctagtagaattaccataaagggtgctcatttaggtggggtttatgggttagcatttactgatgaatatagtttggttagctcaggtgaggatgcttttatccgtgtttggaggataacccctccttgactgatcaaggtcagtttggaagtgaatttgggaaatatttgttggatttcaaatttcttcctttagagggcttatagaagtcaagactgatgatgatgtgcttatcaccataagttggtcatacacaatcctattgcaaatttcaagcctcgtttggtggtcactcttgacattggtggtataaagttggggccattttcttgttgccttttataagtagctgatttttgtgagttttgatatctagactatgttggtaccggtgtacatcactatttgtcttggtttgctctggaatctaaaagcaatttatgataccaaagatttttaatagttgtgccaattggccaaaggaccttgtgtacattacaggggaccaatatggatattgagagtttttgtgtttaaagtgttgatagtttagtgggcccagacaatgagttctccccacccaaagccccacctctttagaggatacacttaatcagctgcccctgtttgaggccagattgattgtaatgtttgtttgtagttcgaatgcagttatgtgtatgttg

SEQ ID NO: 692 - DNA, 1422 bp, Glycine max
gtcctcacacgagacacgcacacgcgggcgctcggcccgaacggggccgggcgggggaactcacacactctttcttaagttctcagaaaccttaaaaacaacaacgtaggagtgttcggaaaagatggctaagcaggaagtggtggaagggttcaagttcgagcagaggcacgggaaagaacgcgtgagagtggcgcgcgtgtggaagacgaggcaggggcagcacttcattgtggagtggcgcgtggggatcactctcttttcggattgcgtcaactcgtacctccgcgatgacaactctgacatcgttgctactgataccatgaaaaacaccgtgtatgcaaaagcaaaggaatgctctgacatactttctgccgaggagtttgctattctgcttgctaagcactttgtatcattttaccagaaggttactggtgctattgtgaatattgtggaaaaaccatgggagcgtgtcactgtggatggtcaacctcatgaacatggtttcaaacttgggtctgagaagcatacaacagaggcgatagtacaaaagtctggttcacttcagttgacttctggtattgaaggattgtcagtgttgaagacaacccagtctggttttgtgaatttcataagagacaagtacacagcacttcctgatacccgtgaaaggatggtagcaacagaagtaaccgcactgtggaggtattcgtatgaatcgctgtatagcctccctcagaagccgctttactttacagaaaagtatcaggaagtgaaaaaagttctggctgacactttttttggcccaccaaaagggggagtctatagcccatctgttcaaaacacactctacctgatggcaaaggccacactgaacaggtttcctgacatagcttatgtcagtctaaagttgccaaatcttcatttcatacctgtcaatatctcaaaccaggatggccctattgtgaagtttgaggatgatgtgtacttgccaacggatgagccacatgggtcaattcaagctagtttgagccgcctttggtcaaagctgtagaaactgcagaaactatggtgctcatcccttctggtggattgctagtgcagcctaaactagcaaacctggcctcagataatgctttccattaatgtgtcttgtaattctggtttttgttatctttatcttttgttttgtttcatgaagaactattatgcatgaataacttccaggagggatattctgtgggttgcaccaatgttaagctttttgtttctactattccaataatttcctagtgtccttgtggaatctgaaataagtcttactatgacgttgatgcaatgcttttttatggtcatataaagatggtcatactcgtacattatagtcaagatttttaaaacgagagttgtcaccaaattggt

SEQ ID NO: 693 - DNA, 1872 bp, Glycine max
tcagctacgtaggcccccccccccattactcattactcaatgagtttcactgcttgaatttttctaattttctgcagagaatctgaactctgcatcttgttgtgcaaatgaaatcaggtgtttgggtttgtgaagtatagaatagaattttgattattcaggttcttcaaaggggctgaatagaatagccagtgattgggagacccttttgatctaaatgtgtgctccttacttgagatctattttgaatggtttattcatattagttgaatttcaatatgggggtttgttatgctacttgggaattgattggattatagtcaaacatgttttattgcaaatgagactcacctggctattcctgaagcattggtatttaaccatgccgaatgacgtggtgtggtccatgtagttgacctcacctagcgaaataaggctttgttgttgtttttattgaatgttggtactcacctggctaatcaaaatgcttttattgtgcttgtctttcatgtggaacttatgaattttcatgaagtgggtaaactttgacatatcaaaggatgtagtgcaccactcaagcggaaatatctgaaactaatatgatattgtccttgtgccaaagacatagtaataggatttagtttgaacttttcagggttagatcatatatataaaggtaaatcctattttcttgttctagtacatgtttctgtgaagttgactttatccagaacaggaaatgtttgcctgtggttgtgtgaaggtaacatatcatttactactagttcattttcatttggtttttattcaccattgtcagttcactgagttttgaatttttaactaatgtgccattaggtgtatgcaaaagcaaaggaatgctcagacatactttctgctgaggactttgctattttgcttgctaagcactttgtatcattttacaagaaggttactggtgctattgtgaatattgtggaaaaaccatgggagcgtgtcattgtggatggtcaacctcatgaacatggtttcaaacttgggtctgagaagcatacaacagaggcaatagtacaaaagtctggttcacttcagttgacttctggtattgaaggattgtcagtgttgaagacaacccagtctggttttgtgaatttcataagagacaagtacacagcacttcctgatacccgtgaaaggattctggcaacagaagtaaccgcactgtggaggtattcgtatgaatcacagtatagcctccctcagaagccattttactttacagaaaagtatcaggaagtgaaaaaagttctggctgacactttttttggcccaccaaatgggggagtctatagcccatctgttcaaaacacactctacctgatggcaaaggccacactgaacagatttcctgacatagcttatgtcagtctaaagatgccaaatcttcatttcttacctgtcaatatctcaaacaaggatggtcctattgtgaagtttgaggatgatgtgtacttgccaacggatgagcctcatgggtcaattcaagctagcttgagccgcctttggtcaaagctgtagaaactgcagaagctatggtgctcatcccttctgtggtggattgccagtgcagcctaaaataccgaacctggccttagagatagtgctttccattaatgtgtcttgtaattctggtttttgtcatcgttgtatttgtttcgtggagaactattatgcatgaataacttccaggagggatattctgcaagttacaccaatgttaagtttttgatgtcctaaattccaataaattcctagtgtccttattatggaaaaaaaaaaaaaaaaaaaaaaatcttactatgacgttgatgc

SEQ ID NO: 694 - DNA, 1262 bp, Glycine max
tcgcgtctgcctacgtggccccccccccaaaaacattcttcagttctaagaaaccttaaaaaacaagtagtgttccgaaaagatggctcagcaggaagtggtagaagggttcaagttcgaacagaggcacgggaaagagcgcgtgagagtggcgcgcgtgtggaagacgaggcaggggcagcacttcgttgtggagtggcgcgtgggcatcactctcttctcagactgcgtcaactcgtatctccgcgatgacaactctgacatcgttgctactgataccatgaaaaacacagtgtatgcaaaagcaaaggaatgctcagacatactctctgctgaggactttgctattttgcttgctaagcactttgtatcattttacaagaaggttactggtgctattgtgaatattgtggaaaaaccatgggagcgtgtcattgtggatggtcaacctcatgaacatggtttcaaacttgggtctgagaagcatacaacagaggcaatagtacaaaagtctggttcacttcagttgacttctggtattgaaggattgtcagtgttgaagacaacccagtctggttttgtgaatttcataagagacaagtacacagcacttcctgatacccgtgaaaggattctggcaacagaagtaaccgcactgtggaggtattcgtatgaatcacagtatagcctccctcagaagccattttactttacagaaaagtatcaggaagtgaaaaaagttctggctgacactttttttggcccaccaaatgggggagtctatagcccatctgttcaaaacacactctacctgatggcaaaggccacactgaacagatttcctgacatagcttatgtcagtctaaagatgccaaatcttcatttcttacctgtcaatatctcaaacaaggatggtcctattgtgaagtttgaggatgatgtgtacttgccaacggatgagcctcatgggtcaattcaagctagcttgagccgcctttggtcaaagctgtagaaactgcagaagctatggtgctcatcccttctgtggtggattgccagtgcagcctaaaataccgaacctggccttagagatagtgctttccattaatgtgtcttgtaattctggtttttgtcatcgttgtatttgtttcgtggagaactattatgcatgattaacttccaggagggatattctgcaagttacaccaatgttaagtttttgatgtcctaaattccaataaattcctagtgtccttattatg

SEQ ID NO: 695 - DNA, 1679 bp, Glycine max
attttcataaaattcaatttaccacgctatgaatttaatacaaatattaaaaccattttataatatcatccaattataaatcatcaaattatttttaaaattaataaactataattaaatgattataaaatttgtttataatttatgatacgcggtcgcccacgccaactcaaaagccacattggtaataggaagaaagaaagaaagaagattaagatagtgcatctcccgaaacagttgaccttgtgagatacagacacagcaccttcaattcttcatttctcaaatcgcaattcgtaaaaccataacaacacaaagtgtctcaaattcacattaaattctccctccccgaaaaggatgtcgttcgaggtggaggaggaggaggaggcgttcgagcacacgctcttggtggtgcgcgaggtgtcggtgtacaagatcccgccgcgcagcacctccggcggctacaagtgcggcgagtggctccagtccgacaagatctggtcgggccggatccgcgtcgtgtcccgccgcgaccgctgcgagatccgcctcgaggatccgagctccggcgagctcttcgccgcgtgcttcgtctaccccggccagcgcgagaccgccgtcgagcccgtcctcgactcctcccgatacttcgtcctcaagatcgaggacggccagggcaagcacgccttcatcgggctagggttcaacgagcgcaacgaggccttcgatttcaatgtcgcgctctccgatcacgagaagtacgtccgccgcgagcacgagaaggaggccggccacggtgccgccgccgccgccgaggagtcgcagatcgacattcaccccgccgtcaatcacaggctcaaggaaggggaaaccattaggattaatgtgaagcacaaatcaactagtggaactggcatgctttcagctgctggcctaaccggtgggcatgctgcaacaccaaagccaaaaaccgtgagtcttgctcccccaccaagtggggctgggaaaatcaggtctcctcttccacccccaccaaatgatcccgttgctgctcggattgcttccaccggttgcgctacaggtcctaaagggacatatgaaagtgtgaaacattctaccgacgctttatcagatttttctcaacttcagaaaaatcttccctcaacgaccacctccgggtcgaccacagcttcaggatgggcagccttctgattatatatatgagcattttaacaatgaggcttttattattctctgatttttttggttctttattttgagaaaagaaacggtggaagaatctgcagaaagaggttgcataagtgaagttagcacaaaataccaagtaattcgattgcttgaggaatgaatatcctggaaatatttatgtttttctttgtttgtaataacagttttctcatatctctataaaaagtattactccccgatctcctacccccgaaaagaatctttctttgactgaggtgtgcttgtgattttatgttcaagggactgttccggatgtcatgtgtcattgtaataattataattacaaagtgacaatgttcatttcaaaaaaaaaaaaaaaaaattacactcgtgccacagacaacagctttgtgcctatgtagctctactaggacgattgtactaaattctaaaactcagaacttgacatt

SEQ ID NO: 696 - DNA, 1545 bp, Glycine max
gaaaaagaagataaagcaaaaaaagaaagaaagaagatttggatagtgcatctcccgcaacagttgaccttgcgagacacagacacggcaccttcaattcttcattcctcaaatcgcaattcacaaagcgtctcaaattcacattaaattttcccaaaactcaaactcaaactcaaactcaagtaattctaattttccctccccgaaaacgatgtcgttcgaggtggaggaggaggaggcgttcgagcacacgctcctggtggtgcgcgaggtgtcggtgtacaagatcccgccgcgaagcacctccggcggctacaagtgcggcgagtggctccagtccgacaagatctggtcggggcggatccgcgtcgtgtcccggcgcgaccgctgcgagattcgcctcgaggatccgagctccggtgagctcttcgccgcctgcttcgtctacgccggccagcgcgagaccgccgtcgagcccgtcctcgactcgtcgcgctacttcgtcctcaagatcgaggatggccaaggcaagcacgccttcattggcctagggttcaatgagcgcaacgaggccttcgatttcaacgtcgcgctctccgatcacgagaagtacgtccgccgcgagcacgagaaggaggccggagacggagccgccgctgaggagtcgcagatcgacattcaccccgccgtcaatcacaggctcaaggaaggggaaaccattaggattaatgtgaagcacaaatcaactagtggaactggcatgctctcagctgctggcctaaccagtgggcatgctgcgacaccaaagccaaaaatcgtgagtcttgctcccccaccaagtggagctgggaaaatcaggtctcctcttccacccccaccaaatgatccagttgctgctcggactgcttccaccagtcgtgctactggtcctaaagggacatacgaaagtgtgaaacattctaccaacgctttatcagatttttctcaactacagaaaaatcttcccacaacaaccacctctggatcgaccacagcttcaggatgggcagccttctgattatatatatgagcattttaacaatgaggcttttattattctctgatttttttggttctttattttgagaaaagaaacagtggaagaatctgcagaaagagatttcataagtaaagttagcacaaagtaccaagtaattcgattgcttgaggaatgaatatcctggaaatatttatgtttttctttgtttgtaataacagttttctcatatctctataaaaagaatcaccccccgaaaagaatctttctttgactgaggtgtgcttgttattttatgttcaaggtactgttccggatgccatgtgtttaggtatatatgaagttattatgttgcttgtaataataattataattacaaagtgacaatgtccattttaacagctgctatatgttacacttgtagctctactcggacgattgtactaaattctaaaactcagaacttgacattatattttttgggggctataaaaaaaaaaaaaaaaaac

SEQ ID NO: 697 - DNA, 1413 bp, Glycine max
tcgatcagctacgtaggccccccccccgatgcttgattcaaataacaaccacctttcaaatataaaagtaacaccaatctcattgcaaacatttcaaacaccttcaatactattatttctcttgaagcctctccaatttgccttcacttcataataataataactcctcttttcctgtaccaaaccaaattgatattttggactcaatggatggtggcacaacaagctctgaactcccccctggctttaggtttcatccaacggatgaggaactgattgtgtattacctttgtaaccaagccacctcaaagccatgccctgcatctatcatcccagaagtggatctctataagtttgatccatgggaattgccagataaaacagaatttggagaaaatgaatggtatttctttactccaagagacaggaagtacccaaatggggtgaggcctaaccgagcaaccgtgtcagggtattggaaggctactggcacagacaaggcaatctacagtggatctaagcatgtaggggtgaagaaatctttagtcttttacaagggtaggccaccaaagggtgccaagacagattggatcatgcatgagtatcgattggctgaatcaaaaataccatctagcaggaaaattggatccatgagggtaaaccatttaatcctttgccacattcttgttactttatgttcacgtcagagataaccgctgcctacggaggagaccttgagtttgtgttaggattctcgagacatgcaaactcaggatttcctctataaatagtgacattctctgttaacaatttattaacttttagaatatgatttggtattcaatgttgctttataattgacatttcccttggtgttgttggatgtgttatcagctggatgactgggtcttgtgcaggatctataagaagaagagcatggtaaaggcattggagcacaaagaggcacagcctaaagtccaaattgctaatcttgcagctgcaaatcaagatgttgaacagaaaatgatgaaccttcctaggacttggtcccttgcttaccttttggatatgaattacttgggtccaattttatctgatggctcttattgcccaaccttagattttcaaattaacaatgccaatattgaatttgacccttttgtgaaatctcaaccggttgaaatgaactacaattatgaagcagattcagggaagtaccaagtgaaacagagtagcaccattgaccaacccatatatgtgaaacaaatgtatgatttgctaggataaaaccaataggaataaaaaaaaagaaacaaaaaaaaaagagcttgtattgttgtctagtcatgacgataagtatcatctataaaatatcatctagattctatgtagaagaaaaaaaaaaaaaaaaaa

SEQ ID NO: 698 - DNA, 2058 bp, Glycine max
gcctattattgtttcatacaagaacaaaacccacgcactctcttcttcttttttaatctcgctacgtaggccccccgcgcgatgaaattccgtcctatattgttacacattcaacaaatgatgtgaatcccttcttgttgccgtagcctcacacactcacttcttccgttgtaactaactttacttttccttccaaacggcttctaacaaactctcgccgcgatgttggatctcaacctcaacgccgattctgcctccgacgcgcaaatggagagctccggcagcttcaattcctccgtcgtcaatgccgccgacaccgacgactcctgctcctacggcgacgccgtcgcctacaacttcgccatcctcaacaccaccaccaccgccacctccgacggacctcccctggccgccgccggagaatcctccgttcgcaccatccagctctttccggcggtcgaatcgggagcctcgccggcgtggctggatttttcgtcgaaggtggatcagaacggtgctccgcaggagcagaggatccctccccggcaaccgccggtgaagaagagccggagaggaccgcggtcgcgaagctcgcaatatcgcggcgttacattctatcgcagaaccggaagatgggaatcgcacatttgggactgtgggaaacaagtgtacttgggtgaggacgcaacgcaagtagaagattcgttttatgctaactgcttcagttttctttaatatcgctttctttttctttattttcttttaggtggatttgacacagcgcatgctgcggcaagggcttatgatcgagctgcgatcaagttccgtggcgttgatgcggatatcaatttcaacgttagcgattacgatgaagatataaagcagatgagtaacttcacgaaggaggagtttgtgcatattttgcggcgacagagcactggtttttcaaggggaagctccaaatacaggggagttactctgcacaagtgcgggcgatgggaggctcgtatggggcagtttcttggtaaaaagtatatatatcttgggctattcgacagtgaattagaggctgcaagagcgtatgataaggctgctataaaatgcaatggaagggaagcagttacaaacttcgagcccagcttctatgaaggggaggtaatttcccagtctgataatgaagataacaagcaaagtcttgatctgaacttgggattagctcccccttcttactctgatggtcaaatcaagaacacacccagcaatgggagtggtatgataactccgcacagctgggataatatccctctcgacaagagagtaatgtttgagcactctgcatcaagatcactgaccgttcagccatctcatcatggcttctccgtagcatctgggcaacatccttccgtctggaatggtagcaatttctttcctatctacgaggaaacagcaatagagaagaggatggaagctgctccagtgccaaattgggcatggcaagtcaaaggtccttatggcggggcaactcttactccacccctctctactgcagcatcatcaggattcccttcaacaatattaccatcagctgcggatactcaaattcgttttccaaacatgacattcctccactcacattttccaccatcaatcactaactccggcaccatatcccctttcttctgcggtagctgaatgcatcgcattgcattgctaggtagaccaaatcaactgcaaatcttcttgatttcaccatatggttgacaaactagtaggactatagctacaagtagtaattgaattgcttggttccagagcttttactatttgccactctactaattttcttcaatgtaaagaaatgccatgccgcgatgacatgttgaactctgctttttactgatttgagactaagcatttactttggtatccaacattcagcctcggtgcttttctatctagaaaatacttgaaaagatgagtttgatctttgaagagacggaatttgtagatttgaaagcatgctaagttcaatccggctttgtgggtaaaaaaaaaaaa

SEQ ID NO: 699 - DNA, 1118 bp, Glycine max
ctcgagccgaatcggctcgagtacggctgcgagaagacgacagaagggtcacttatgaagagagactcaagaaaggattcttcaaatggaggactctctgatgcaccagatgtttctgatgttcgtagcagcatgattggagaaattgaaaaccgttcatcacatttgcttgccataaaggcagatattgagactcagggagaatttgtgaattcattgattagagaggtgaacaatgcagtttatcagaacatagatgatgtagtggcatttgtgaagtggctggatgatgaactttgcttccttgtggatgagagggctgtccttaagcattttgattggccagagaagaaagctgacacattaagagaagcagcatttggctatcaagatttgaaaaaattagaatctgaagtttcctcttacaaggatgatcccaggctacctggtgacattgctctaaagaaaatggttgcattgtcagaaaagatggagcgtacagtttataaccttcttcgcacaagagattcattaatgcgtcatagcaaggagtttaaaattccaatagaatggatgcttgacaatggaattattggcaagataaagctaagctcggttaaattggctaaaaagtatatgaaaagggtagctatggaacttcaagtaaagtcagcattagaaaaagatcctgcaatggattacatgcttctccaaggagtgagatttgcttttagaatccatcagtttgcaggagggtttgatgcagaaacaatgcatgcattcgaggagcttcgcaatctggcctctcttcttaacaaaacatgagcgaatgatggttgatgatggatttcagcttaccatctcagtaagccatatattaaccctgttcatagttgcaaaagattggtttggtctgtgattgcattacattttggtagtgaaaaataggcaagattttgttatatgtacaaacccggtctttttttctgagatcagttgttgctaaaaatagcatagcaacttcaaaatcaaattatgttgtgtaactcagtccaactgagaaaatataatatattattatttggtagagtgaaatcctccagcactagatttgattt

SEQ ID NO: 700 - DNA, 2059 bp, Glycine max
ctcgagccgctcgagccgatttgattcttgtcttcctcgccactgttcccctgtctccataacaaaccaacactcaacctcactcactcgctcattcgctctcttcacaatttccagatctgaaatcaaaatcgaaatcgaaaccgaagagagagaaaacgtgaaaccgagagagagagagagagagatgagggaaccatcgtcggtgggattcgaaggcaacggcgtcgtttcttcgccgccgcaagctctcatcgagagactgaaagactacggccaagaagacgttttcgccctctggtacgagctctcccccgaggaacgcgagtttctcgtcaaggacattgagagtttagatctttcgagaattgaccggattattcgatgctcgctgcgatctcaaggactgccggcggcggccattgagccggtgccggagagcaatgtgtcgacggtggaggagagaagccaggaggatcgagagagatggttgaaaatgggattgaaggccatttctgatggcaaattagctgtgttgcttttatctggtggccaggggactcgacttggaagttcagatccaaaaggatgtttcaatattggacttccatctggaaaatcactttttcaacttcaagctgagaggattttgtgtgcacagagactagctgctcaagctacaaatgagaattctgcttcttcagtgcaaatacactggtacatcatgaccagtccattcactgatgaggcaacacgcaaattctttgaaagtcataaattttttggtctcgaggcagaacaggttacctttttccagcaaggaacaatcccttgtgtttccaaggatggcagatttattatggagactccatacagggtagcaaaggctcctgatgggaatggtggagtgtattcagctctgaaatctaccaaattattggaggatatggcctcaaaaggaattaagtatattgattgctatggagttgacaatgcactggttcgagttgctgatccaacttttttaggttacttcattgataaaggtgttgctgctgctgcaaaagttgtccgtaaggcgtatccacaagaaaaggttggtgtgtttgtaagacgaggtaaaggtggtcctcttactgtagttgaatacagtgagttggaccagtcactagcttctgcagtcaatcaagcaactggccgtcttcgtttttgttggagtaatgtctgcttacacatgttcactctggattttctgaaccaagtggcaaatggccttgaaaaagacagcatttatcatcttgcagagaagaaaataccttccatacatggatatacaatgggattaaaacttgaacagtttatatttgatgcatttccatatgctcctacgactgcactttttgaggtgttacgggaggaggaatttgcaccagtgaaaaatgcaaatggatccaatgttgacactccagacagtgcgaaactacttgttcttcgactccatactcgttgggtagttgctgcaggtggcttcttaacacattcagtgcccttatatgcaacaggtgttgaagtgtcaccactctgttcgtatgctggtgaaaacctggaaccaatatgtcgaggaagaacatttcatgcaccttgtgagatctcgttctagttccaccctgtttgtgcggcttttttgtgacttacactacaatgagggagttctcagtcccatacatgttgcaagattactttgcgtatgccactcatcattcacagttatcaatgtatattatcttctccaatctgtttctgattggtttttggttttttcttttttggccactgatctgttttagtgtgctgaggaatgtacatgtatcataattttactgagcatttatttgcccatgcagactccaatatatcgccccattttcctttttccaaaaaaaaaaaaaaaaaaagagcgaacaacaaataatctatggaaaaaggaaaaaaaaaaaaaaaaaaaaaaaaaaaaaaaaaaaaaaaaaaaaaaaaaaaaaaaaaaaaaaaaaaaaaaaaa

SEQ ID NO: 701 - DNA, 1748 bp, Glycine max
gagcgtgttgaaggatcgaaatcggaagaaggattagggtttgtggagatgcaagggcaaggcgttgatgaagtgagcatagaagagttggcgtcgaatctttccctctacaaagatcaactgaaccaggttagagaactcttaaacgatgaccctgcaaattctgaatatgttgacatggagagggaactttccgaggtaagctcaattcaaccccagttttgatgttttgtttccgccttgttctctatcattcattcatcatcgagtaagcagatagatccctcccattccatcggaggatgtcattctatatattactactaatcaaactagtttcttcgaaaaggtgagggtactactactagtattactgcggcaatttgtaatatcattcaaattgctcaacctcaggaggagcattaaaaagtgagtgttaggtccaaatgcacatcacgtctatcttggttcttgtgcaggtctgctctgtctcctgatgtccagcatgctttctcctcagagattctaagttagatttttgtcattattttgctttatcgtcgtctaacacaatactacttgctttactgaactccaaatatgtgccctaaaattgtgttacacaggtcattgccttgaccgaggaactccttgcaactgcaaagcagaatgaaatctctgctcctcctaataatgctgctgcatctccaaccttgtccatacataacgagaatcaattgctagatagtagttctgatcatcaagagaaacttcctgttggcaccaaagttcaggcagtttggagtgaagatggggagtggtatgatgcgacaattgaggcttatactccaaatggttattatgtaagctatgacaattggggtaataaagaagaggttgatcctgccaatgtaaggtcaattcaagaaggttctgttgatgctttattagaagctgagcgagttgctgaagcaacaaaacaggccatcaaacgaaaaattgcacaagctgcatctatcgatttacagtctcggagtctacctacaaagcttcgtatagaggctgatgatcctgaggatgtgaaagcttcaaaacgcaagaaaatacatgcttttaagtcaaagatgcggatggagcaacttgaagtcacacaaaataagcggcaaaatgcttggcagcagtttcagtcaaccaaaggaaaggcaaagaagattggtttcttctctggaagaaaacgggagagtatttttaaatctcctgatgatcctcagggaaaggttggtgtgacgggaagtgggaaaggtttgacagagttccagaagagagaaaaacattttcacctcaaagatggtactgttgaaaatgatgattaggttatgcaccgactcggctagatgccctttcaattgtatgtaacatgctcaaacaaccattctctgtagaggttcactgatggcaaaccaaacaatgttatctactgaaatgtgtcgagacttcagaactgttctagattgtagctttcgccccacatatatatatttttttttctttcactattttatcatgatgcaaacctcccgccttttcattttgatgttatattaactagatgctcatatttgttggtttgttggtcttagctttaaattagttattcgaaagacgatacttaggtgcagtattttatgaaaattcaaaactgaatttcatctctcggtaataattcattggttcctggtgtcgagatg

SEQ ID NO: 702 - DNA, 763 bp, Glycine max
  misc_feature (28)..(28): n is a, c, g, or t
tcgagtcagctacgtaggcccccccccngagcgtagcgtgttgaagaatcagaattggaatcggaagaagaaaggagaattagggtttgtggagatgcaagggcaaggcgttgatgaagtgaacattgaagagttggcctcgaatctttccctctacaaagatcaactgaaccaggttaggcaactcttgaacgatgacccttcaaattctgaatatgctgacatggagagggaactttccgaggtcattgctttgactgaggaactccttgcaactgcaaagcagaatgaaatccctgctcctcctaacgctgctgctgcctctccaaccttgtccatacataatgacaatcaagtgctggatagcagctctgatcatcaagagaaacttcctgttggcaccaaagttcaggcagtttggagtgaagatggggagtggtatgatgcaacagttgaggcttatacaccaaatggttattatgtaagctatgacaattggggtaataaagaagaggttgatcctgccaatataaggtcaattcaagaaggttctgttgatgctttattagaagctgagcgagttgctgaagcaacaaaacaggccatcaaacgaaaaattgtgcaagctgcatctatcgatttacagtctcggagtctacctgcaaagcttcgtatagaggctgatgatcctgaggatgtgaaagcttccgaacgcaggaatacatgcctttagtcaaagatgccgatggagcaacttgaagta

SEQ ID NO: 703 - DNA, 1453 bp, Glycine max
  misc_feature (1028)..(1028): n is a, c, g, or t
  misc_feature (1061)..(1061): n is a, c, g, or t
  misc_feature (1083)..(1083): n is a, c, g, or t
  misc_feature (1103)..(1103): n is a, c, g, or t
  misc_feature (1246)..(1246): n is a, c, g, or t
ccaaagtgtgttgcatcttccgcgggcgcaatggagcaagagaatcacaaaatcaaagcagtgagtttgcttcgaagcagaatctgtgatcccaaattcatcttcatcagtgaatctccagaaagcaactacagcaagctgaaattcatgatatcgagttcggtaacggaagcatgcaacaattctattcttcttctcggtccccgcggctccggcaagaatgcggttttggagcttgtcattcaagatttgctgcaagagtatccggactcggtctcagtgatgaggttgaatgggcttttacatagtgatgacatctctgcgttcaaggaaatagctaggcagttatgcatggagcatcaattgctattctcaaaagcggcatcatttgatgacaactcccaatttatggtggccatcctaaaggaatgtggattagcacataaaacagtaatttttgttctggatgagtttcacctgtttgctcagggtaaacagagattactctatagcttgctagatgcaatgcaatcaataacatcacaggctgttgtacttggcattagttgccgtctggatgcagatcagctgttggagaaaagggtacgatctcgtttttcacatagaaagctgttgttcctaccaccttccatagaagattcacaaaagttactgatgcacatcctgacattaccaattgattcaagctttccacatgcttatgctgttgaatttaacagaaaggtccaaaatattatagaagatagaaggttcaaagaaaccctcaataaatatttaaatgttgactcctctgtcaaacatttgctgaggttcctattctgtgcagtctctcatatggatttgcagactgggttcctgtctcgggagaactttgaaattgcatttacaagtatccagaggcagcccaaactggaatgtttaagaaattgctccattttagaactccaaattttggtttgcatgaagagattggaagttaaagagcaaagtttatgcaacttcaattntgtgatgaaagagtatataagcaccctgacttntgaacgttatgcaagacatgtntgcttaagggcatttgaacnccttatacatcgtgaattgatatgtttcacagacaatagaggacaaagtttgtctgttgaattccgtcctgtaaagcttttaatttcatctgctgaactacatcaaggactaagagcaaatacttcatgccctcctaagcttntaaaattaatggatcgtgaaggctaaaaccacttgagggacacgactgtttgtgtttcacgttatactgtatgtggtccgattccaaattctgataaattcagcctgtttatgaataaataaaatgttttgtgtagtcaacactttttcgtgattataattggtgtacatggaaatgacttcagtttaaacaaaaaaaaaaaaaaaa

SEQ ID NO: 704 - DNA, 1728 bp, Glycine max
ggcaaagcaaaagccatcgcaatctcattcttcattcttcagcccacagagagagtcatcaatctaaacaaaattgggttccaaaggaacagacggacaatcaaaggaataggatttgcaacgatgcatgtactctagtacagaaattggatatatattctgctacgtaggccccccccccaaaactctctctctctctctctacgctaattaaggttcattgggcattggcggattctatttccttttctcaaaacccaatttgcttcttcttcatggaagcactctccttcatcatccccaaagactcttgttctcttctccttcgcactccttcttcatattcctcttcgtctgtcagaactccgccgccgccacttgctttcttcaaaaccacccaacactctcactcgcctcaccttctccgtcttcgcgtttttgccctccctaaccccgacgccgatgaacccaccaacgacttcgctttagcgtctcatcctcaggaaaatttaagccattctgagactgagagttccgaagatgatcaagatgctccaccacaaatggacatgtcgtggtcaacgatcacagccccagctggaagtggatccggtggtggcaccagggctggacttttcagaacacccatttctggtggcgtgcagagtgccacctcagctcacggtttacctagaccggctttagcagtacgcaatttgatggagcaggcaagatttgctcatttgtgcactgtaatgtctcgtatgcaccaccgacgagaaggatatccatttggttctctggttgattttgcaccagactcaacgggtcatccaatattttcattttctcctcttgcgattcacacaaggaatttgttggctgacccaagatgcacactggttgtccagatacctggatggagtggcttgtccaatgcaagggtaactatttttggggatgtctatccacttccagaagatcaacaggaatgggctcataagcagtatattgcgaagcatcaacagggtccttctcaacaatggggcaacttctactattttaggatgcagaatataagggacatatatttcattggaggctttggtactgttgcttgggtggatgtaaaggaatatgaaacccttcaacctgataagattgcagtcgatggtggtgaacagtatttaaaggaactcaatgctatcttctcaaagcccctaaagaagcttctatctaatgagaccgaggtagatgacgctgcactcatatctatagacagcaaaggaactgatattagggtccgtcaaggtgcccagttcaacattcagaggatatcatttgatgaaggacagagtgtagaaacattggaagaagctaaagctgctcttcggaaattaatacacaaaggaaaagtgtacaatttgcagaaataagatgttggatgtcctcttcccctttgactagagtagacaacaagatatggaaccatgcgagtttctaatcggactttagaatggttaattttatacattttgcctggttgacatgcaccagacagtgtattatatccatgcatctgcaagcatatttgctaaagtctgatcgtgagaggactttttgtgggctataccaccatagtcaaactagaaataatatatcagaactcaataaataatagtatgcttctcccccctaaaaaactcacttgaaaaaaaaaaaaaaaaa

SEQ ID NO: 705 - DNA, 1098 bp, Glycine max
tcgagtcagctacgtaggccccccccccccacagattgttctactcatacctcacaaaaggcaaagcttattcccccaagacttagctggcactagcaaacacctctatatctaaaatggtttcaatttctgatcatgaactggttttgatctttggtctcctaggtaacattgtgtcattcatggtgttcttagcacccttgccaaccttctatacaatttacaagaagaaatcatcagaaggatttcaatcaattccatatgcggttgcacttcttagcgcactgttgcttctatattatggcttcataaagaccaatgctactttgattatcaccattaactgtattggatgtgttatagaagtttcatacctagcaatgtacattatatatgctcccaggaagcagaagatttccactttggtaatgatactcattgccgacattggaggttttggcttaaccatgttaatcaccacctttgctgtgaagggaattaaccgtgtccatgctgtgggatggatttgtgccatttttaacattgcagtgttcgctgctcccttgagcataatgaggagggtcataaaaaccaaaagtgtagagttcatgccattttcattgtccttatttctcacgctctgcgccaccatgtggtttttctatgggttctttgataaggataacttcattatgttgccaaatgtgctaggatttctgtttggcatctctcaaatgatcttgtacatgatatacaagaatgctaagaagaatggagaaattaattgtacagagcagcaagaaagggatggcacagtgaactccaaacagcacagctgcaatggcaacaaactcgatttcccttcactggtagaaatgaaagagaatcaactcaatcaagtttgatgttatgttgataagtatctaagttctagagttgatggaggactatatataggcttaggatgaatatcgaataactaatgtctcgtatctaattatactgttgtaataacaactattgccacttggtatgcattgactatgtaatagactaatgatcatagttctggttaaagcgaaaaaaaaaaaaaaaaaa

SEQ ID NO: 706 - DNA, 1349 bp, Glycine max
gaaaatccaaaaattccccaaacttcacaccgtacaaaaaccctaacccaatttcaccattccccaaattcaattccctcaaatcccttccctaataatcgccattttgcttcgtgcaatctctctgcgatcccaatagccatggacgacatggaagacgacgcaaggtaccctcccaagtccttctctctcaaccgccagaacccctcccaccgccacaaacaccccatacgcgccgccccctaccaccgcccaatgcccacgcgctaccaggaacccgacgacgatgatgatgacgacaacgaacccgacgatttcgacgacggcgaagccgaaaacggttacgacgacgataacaacgtcgcgtatcctcggatcccgaagaagcgcaaggtagtcgcggccgccgcagcagcagcagcaggaggctcctacgagttcgcgccacgcgtcaaattctcgtacggctcccgcggttcgggttcgggttcgggttcgggcgaggaatggaacgagtccgagactttcgtgctgttagaggtttggggcgacaagttcctccagctcgggaggaacagtttgagatccgaggaatggcacgaggttgcagaaaaagtttccgaggaattgaaaacagagagaacggtgacgcagtgtagaagcgtgtttgacaagctaaaaagaaggtacaagaaggagaaagctagaatggacgaaatgggccttggttcctgcaaatggaccttcttcaagaagatggacatgttgatggcttcctccgcaagacaagagtatgggcttgcttgtggcgtggattctggggagtatgtgtttatgaacactagggtttacttgaacagttccaatgggtttgatgagatgagggacagtccaggggagtctgagagtgatgatgatgacgatgaagaggaggatgttggtggtgggggtggggatgaggatgaggatgaggacgacgagatgtcgtgccgcgtgttggcggattcgattcagaagtttgggaagatatatgaaaagattgagaatagtaagaggcagcagatgatggagctggagaagatgaggctggattttaacagggagctggagctgcagaagaagcaaattcttgagagggcgcaggccgagattgccaaaattcaggatgtggatgaggaggatactgacacttccggtggcgagaatctcagtgaatgatctaggtaggtcagtcattcaagttgcaattggaagaacttatttaatgatataagcaagttatgtaagtatttgggaattgggagaaattatgaaaataacttttgatatgtccaaaaaaaaaaaaaaaa

SEQ ID NO: 707 - DNA, 1041 bp, Glycine max
tgttccggttccatcctctggaccatgtcatacaactgattctaattgcaattcctgtgagccgtggcaaagcttttgaatttagtgcctctcctctctgtttacccttccagatattgcagatacagcaagatcatgagtgggacttcggaaaagaaacttgtaagaatcgatgttagttctgatactgtatgcccatggtgctttgttggcaaaaaaaatctagacaaggccatagctgcctccaaggataaatacaactttgagataatatggcatccctttcaacttagccctgatgcccctaaagaaggcattgacaagagggagtattacagaagaaaatttggatctcaatcagaacggatggaagctcggatgtcagaggtgttcaagaatgttggcttggaatatagcttgtctggactcacgggaaacactattgacagccacaggcttatatattttgctaggcagcagggtcttgacaagcaacatgatctagttgaagaacttaacattggctatttcacacagggaaaatacattggtgaccataagtttcttctggaatctgctgcaaaggttggtatagaaggagcagaagagtttcttaaggaccccaacaatggtttgaaggaggttgaggaggagctcaaaacttactcaggaaacatttcaggggttccatattacgtgattaatgggaatcacaagttgagtggtggacaaccccctgaagtcttcttgagagcttttcaagttgctacaaattagaatttcaccttctcacattttctgcttccctctataagaatgaaaccttggaaataaaaagttggccattcactgctttataatactctatcaaatgtgaaacttgtatggatataatgtaagacaatattcataattcatgtcttatataattatatcaccgtttgtgtctttgaacgtgcaccggatgcaaccataataaattgaatgacttactatttaattggcattgcagtcaatcatcattgtttatatattgcaagt

SEQ ID NO: 708 - DNA, 1160 bp, Glycine max
cggctgcgagaagacacagaaggggatgtgaaagattagatattatccggagtgggtggttgggtctgaaggctgaacaaacagcctgagacggcgactttccaacacgtccggaaaagaaaataggacagaacatattgtataataataataataaaaaacaacagacaagtttgtttgttcctgttctaatctctggaccatgtcatacaactgaatctaattgcaattcctgtgagccgtggcaaagcttttgaatttagtgcctctcctctctgtttacccttccagatacagcaagatcatgagtgggacttcggaaaagaaacttgtaagaatcgatgttagttctgatactgtatgcccatggtgctttgttggcaaaaaaaatctagacaaggccatagctgcctccaaggataaatacaactttgagataatatggcatccctttcaacttagccctgatgcccctaaagaaggcattgacaagagggagtattacagaagaaaatttggatctcaatcagaacggatggaagctcggatgtcagaggtgttcaagaatgttggcttggaatatagcttgtctggactcacgggaaacactattgacagccacaggcttatatattttgctaggcagcagggtcttgacaagcaacatgatctagttgaagaactgaacattggctatttcacacagggaaaatacatcggtgaccataagtttcttctggaatctgctgcaaaggttggtatagaaggagcagaagagtttcttaaggaccccaacaatggtttgaaggaggttgaggaggaactaaaaaataattcaggaaacatttcaggggttccatattacgtgattaatgggactcacaagttgagcggtggacaagcccctgaagttttcttgagagcttttcaagttgctacaacttgaatttcagctactcacagtttctaattctatagtaagaatgcaacctaggaaataagaagttggtcattcattgctttataatataatgatctatctaatgtgaaacttgtattgatatcatgtaagacaatattcataattcatgttgtctttgatcgcgtaccggatgcaacaataataaattgaatgactttgttattcaattgaaaaaaaa

SEQ ID NO: 709 - DNA, 1525 bp, Glycine max
cggctgcgagaagacgcagaaggggctgtgaaagatgagataatctcgggagtgggtggttgggtctgaagtctgaacaaacagcctgaaacgacgactttccaacacgtccggaaaagaaaataggacagaacatattgtataataataataataaaaaacaacagacaagtttgttgttcctgttctaatctctggaccatgtcatacaactgaatctaattgcaattcctgtgagccgtggcaaagcttttgaatttagtgcctctcctctctgtttacccttccagatattgcagatacagcaagatcatgagtgggacttcggaaaagaaacttgtaagaatcgatgttagttctgatactgtatgcccatggtgctttgttggcaaaaaaaatctagacaaggccatagctgcctccaaggataaatacaactttgagataatatggcatccctttcaacttagccctgatgcccctaaagaaggcattgacaagagggagtattacagaagaaaatttggatctcaatcagaacggatggaagctcggatgtcagaggtgttcaagaatgttggcttggaatatagcttgtctggactcacgggaaacactattgacagccacaggcttatatattttgctaggcagcagggtcttgacaagcaacatgatctagttgaagaacttaacattggctatttcacacagggaaaatacattggtgaccataagtttcttctggaatctgctgcaaaggttggtatagaaggagcagaagagtttcttaaggaccccaacaatggtttgaaggaggtaaattatttttataagcaaactcctttattcggtttctaaattcaaatcataactaaaacatgttgtattgtattgatatttgaatcattaggggttctaaccttctaacttaattataaccttttataaatttaaatagcataccgaagcgtacaggttatgtatacccccgcgtaccaattcttcctaaggttgcaaacccaaacccgtaccgcatattggagcatactgcaaattatgtgactatgcttctaagttctagcttcaaaatgcttaatgtattctctttttttggatgttaacgtcaaaatgttagtatgatctttagttgttaggcagtcacaaaatggcatcaatgctgatcttgctttccatggctctataaacctaggttgaggaggagctcaaaacttactcaggaaacatttcaggggttccatattacgtgattaatgggaatcacaagttgagtggtggacaaccccctgaagtcttcttgagagcttttcaagttgctacaaattagaatttcaccttctcacattttctgcttccctctataagaatgaaaccttggaaataaaaagttggccattcactgctttataatactctatcaaatgtgaaacttgtatggatataatgtaagacaatattcataattcatgtcttatataattatatcaaaaaaaaaaaaaaaaaa

SEQ ID NO: 710 - DNA, 1419 bp, Glycine max
tttttacgttacagagtttggtgtggtcactcacatctccacctactgcgtttcaggagtcgacaacctttgaatttctcatttctcatccactaacttctttctcaatccctctttttcttttttatgttttaaactcttttaaaagcttcttccctctttgccgaattttccataaaccacattcttgttggttctctttcaatggagtctaagcttttaagagccaccaccatctcagtcccttcaacaccctcatgcgctttccatcgcacaactcgcaaggcttcgatttccttcaaccccacctcggatttcgccccaaaaagcaatctttctctccaggcacatgcggcttccatcgagtcagtgccaacaaagaaaagaattgatgagagtgacaacctgacccttgatcatataagacgttctttagttcgtcaagaggatagcataatcttcagtctcatcgagcgagcacaatactgttacaatgaagatacatatgaccctgatgccttctccatggatggatttcatggctcattggttgagtacatggtcggggaaactgagaggcttcatgccaaggtgggtaggtacaagagccctgatgagcatccattctttccagatggcctacccgaaccagtgttaccacctttgcagtaccctcaggtgttgcaccctattgctgattcaattaatataaatgaaaaagtatggagtttatacttcagagttcttatcccacaaatagtcaaacaaggggatgatggtaactctggatccagtgctgtttgtgatgtaatatgcttgcaggctctctcaaagagaattcattatggaaaatatgtagctgaggcaaaataccaagctagtccagattcatataaagatgccattatagcacaggacaaggacaagttgatggaattgctaacatatcctgaagttgaagaggcaattaagaggagagttgacatgaagaccaagacttatgggcaagaactggttgtaactacgaaggaacatcgaactgaacctgtctacaaaataaatccaagcttggttgctgatctatacagtgattggatcatgccattgacaaaggaagtccaagtttcttatttattgagaaggttggattgaacataacaaaaagtaccttttcaattacagtgttcatagggtatttatattttctaggaaatgatacttgcaatgggtaatttctcttgaatcatgactataaactttagtttttgtaattaacatatgaggaagctcatattgggttcttatataataattaatggcatcctttatgttgttaaaaaaaaaaaaaaaaaaaaaaaaaaaaaaaaaaaaaaaaaaaaaaaaaaaaaaaaaaaaaaaaaaaaaaaaaaaaaaaaaaaa

SEQ ID NO: 711 - DNA, 781 bp, Glycine max
attctggatttctggttgtttgattttacttctttatcctcttcctcttcctcttcttcttcttcttcttctcccgctcgggactttctgtctcaaacgcaatccaacagaaatggcagcgatagttagccaccaccaccaccgcctattctccgcctccacgcgcttcaactctacttcgagagactcgcggcggcgaaggagcggcgcaaactctgttcggtgcgctgacgtaagcacggccacgagcgagaatcggcgagtgacggtgagtaacaggaacgattcgctggagatatgccgcgtgctgaacggaatgtggcagaccagcggcggatggggccgaatcgatcgagacgacgccgtcgaggccatgctccgctacgccgacgccggtctaaccaccttcgatatggccgatcactatggacctgctgaagatctatatgggattttcattgatcgagttcgtcgagagcgtcctccagaattattggaacaggtcagaggtctcactaagtgggtgcctccgccagttaagatgactagtagctacgtaagagacagcataaatgtttcaaggaagagaatggatgtggaatccttggacatgcttcagttccattggtgggattattcgaatccaggctacctggatgcactaaaacacctaacagatttgaaagaagaaggttagttcaagactgtggctctgacatttctgattaacggttacaaattcacttataagttcacgtttcttgcaaactacttctgttag

SEQ ID NO: 712 - DNA, 1609 bp, Glycine max
tcagctacgtaggccccccccccgaccgtgttctgctagagctgttataggcacttgagcaatttggaaatgtcggatttattgcggcattctttgagcaaattcactttcagtccaaatggaacaccaactgggagagaaaaagtaacggtaaaacataagcatctgagaccatttcagtgtgtgctgacacaggataacagaagcattgtcgtcaagaatggcaatgattcattggatatatgccgggttgtgaatggaatgtggcagacgagtggtggatggggcagagccgatagggatgatgctgttgatgctatgcttaaatatgttgatgctggcctcgccacttttgatatggctgatatatatggacctgctgaagatctatatgggattttcattaatcgagttcgtcgagagcgtcctgctgaattgttggaacaggtcagaggtctcactaagtgggttcctccgccagttaagatgactagtagctatgtaagagacagcatcaatgtttcaaggaagagaatggatgtggaatccttggacatgcttcagtttcattggtgggattactcgaatccaggctacctggatgcactaaaacacctaacagatttgaaagaagaaggtaaaatcaagactgtggctctgacaaattttgatacggagagattacaaattattcttgaaaatgaggttcctgttgtaagcaatcaggtgcaacattcccttgttgatatgcgtccccaacagagaatggcagagctttgtcagcatacaggagtcaaacttataacgtatggaacagtaatgggtggtctgttgtctgagaagttccttgacaccaacatagctattccttttgctggtcctgcaataaacactccctccctccaaaagtacaaaaggatggtagatgcttggggaggatggagtttgttccagggactgcttcggactcttaaacaagtagcttctaaacatggcgtatcgatcgcaactgttgctgtgaagtatatactagatcagcctgcagtagcaggatcaatggttggtgtcagacttggcttggcagaacatattcaagataccaatgctatcttttcacttgttctcgatgaagatgacgtgaacagcataagagaagccacagcgaaaggaaaggatctgcttaaagtgattggtgattgtggagatgagtacaggcgtgcatgagtcatgttggcttatcaacctggtgaagtgctttaatttatataggacaaggggatggaaaaaaagggagggggacacaggaaaagtgttcaagctcaattttttgtcagttgaagaatttgtgtgtaatacttttatggattacccagtaatgatcaaaagacaaaatagatgaaaggaggaagtaatgtattctgtagtatatatcttgtgagatttatgcaaactttcctcacatattggccacctcaaagtatagaaactttggtgaatcacctgaacacagaattagacattgctctgtttaagttgatttttgcatggaaggaagtagtccaaaaaaaaaaaaaaaaaaaaaaaaaaaaaaaaaaaaaaaaaaaaaaaa

SEQ ID NO: 713 - DNA, 1220 bp, Glycine max
  misc_feature (628)..(633): n is a, c, g, or t
  misc_feature (806)..(810): n is a, c, g, or t
  misc_feature (980)..(1009): n is a, c, g, or t
cggctcgagcggctcgagcggctcgatacggctgcgagaagacgacagaagggggatcgcagtgggtatagtagatgaagggaaagggacagcagccagcttcgggactcacggaaccttctaggctatatataaaaaaaaaaatattgcacgctcctccgggctcctggcatttcaaattcaaggcctctttccaatcttcaaagcagctactgcggcagctccattttccaattgaagttagcagagcagccatctgtgtgtgaaggggacatgatggatgattcccaaaagcatagaatcctgatggtctcagattttttctatcccaactttggaggtgtggagaatcacatatattatctctcacagtgtttgctcaagttaggccacaaggtggtggttgcaactcatgcttatggaaatcgatctggggtccgatatatgaccggtggtctgaaagtctactatattccatggagtccatttgttatgcagaatacattaccgaccttctatgggttactaccaattattagaactattcttattcgagaaagaattacagtggtgcatgggcatcaagccttttcaacattttgtcatgaagctcttatgcatgcaagannnnnnggatacaaggttgtgttcactgatcattcactttacggttttgctgatgttggaagcatccacatgaacaaggtgttgcagtttaccttggcagatgtgagtcaagccatatgtgtttcccatacaagcaaggaaaacactgtgttgcggtcaggtttgccaccagaaaaggnnnnngtcgtacccaatgctgttgacactgccattttcaagccagcagtggatcgtccaagtggatcagaaattgttattgttgttatcagccgattggtttatcggaagggagttgatttgcttgttgaagtcattccagaagtatgccgattacatcccaatgtgagttgctnnnnnnnnnnnnnnnnnnnnnnnnnnnnnnctaggaaatttgggccctgacatcttggaagaaatgttaataagctaaagccccttttcagaatgctttacctttatattatggtgcttaaagttgcaaactttagtttggtaaaatctctttatggtgctttttctgttgctctgaacaattatattatagatgctattcagaacagcttaaggactggctttcaaagctgcaggcatgc

SEQ ID NO: 714 - DNA, 1206 bp, Glycine max
cgtataatcaatctattggagcaaacgaggtgagaccgcatcatgggaccccaaacctaaacgaggaaaaaaaaaatatggaaaagaaacaagattaagaattggggtttgaagaagccggtggtgtctccttgcttgttctcgatcgatcttgttattgtaaaatataataacttttttatatcgtgatcaagatgcgccgagggagagccaccgccgccgtcgtggatccgacggcggagcaggcgaaggagacgcggttccgcggcgtcaggaagcggccgtgggggcgattcgcggcggagattcgagatccgtggaagaagcagcgcgtgtggctggggacgttcgattccgccgaggatgccgcgcgggcttacgacaaggctgcccgatccttccgcgggcccaaggccaagaccaatttcccctccttccccggcccgacggaccaccactcctcgcagcagattccgccgctctaccaggcccacgggctttccaccaagttcgagcccgcccaggtgaaccggcccaccaccagcggcatgagcagcaccgtggagtccttcagcgggcctagggttcccccctcctcctcctcctctcgcaagccccttgtggttgttaaccctatcatccctctcgacgacgacgacgacgattgccacagcgattgcgactcttcttcctccgtcgtcgacgaccaggactgcgtcctcacctcctccttccggcaaccgcttcccttcgatctaaacctcccgccgcccgatgccgcctacgacgacgacgacgacgacgacgtccccgccaccgcgctgtgcctctgatgaagaagagcctcttctcggtataatcataattttcttgttgttgttgttgttgttgttgttgactatctctggtttaattaattgaagttgttagattgtgttgtggtgttgtagagtaatattataatataggcatggagatggatggatggatggaaggttgtgttgttgtaagttatttggatccatagcattggacctcatctggaaaactggttgctgcttctgctttcttcatggatctgcttcttacccttacccttaccccccaattagaacttactctctttttcttacttttctgtacaaaaattatggcaatcagatcatagaataaattacattctaatcaattactctttccctgctt

SEQ ID NO: 715 - DNA, 2209 bp, Glycine max
gaaagaagttatttgaggaaaaaagagagagtcagctacgtaggccccccccccgaattaaacaatattaacttcttgagagaagtagctaatagagaaatggatgaaatgaagcttcaaagaagtaagttagagaaggagaaacaagaagctgatgagaataaaaaacatcttgaaaggcaaaggatggaaatgcaagaggacatagatgtacttgttgacctcaacaggaagctgaaaaatcagcgggaacaatttattgtggaaagacgacgctttattgagtttgttgagaaacttcggagttgccagaactgtggggaaatgatctctgaatttgtgctttctgatttacaatcctctgttgacattgagaacttggaagtgccatctctcccaaaattagcagctgatattgtacagggagtttctaatgaaaatttagcttcttcaaggcaaaatactggattgtctcctgcaactgatcccaagtcacctgtttctggtggcactgtctcttggctacgtaaatgcacctctaagatttttaaaatctccccgattagaaagattgaatctgaagattcgggtactttaagagatgttgtgactttgtctgttgagcaaactaatgtggaagattcaccaggaagaattcctgatgctgaaaatgaagcagagttgtcatttgctgttgtaaatgattcttttgatgttcagagggtacaatctggcaatgatatcgtcgaggttgaagctgaccatgaaccttcagttgaaaacctgaacaatgttgacagtaaggcaccagaagatttgcaggctcctgattcaaaggttgggcagcagaaatcccgcaagggagggggaagacccagagtaaagcgtacgcacactgtgaaagctgtcatcaaagaggccaggggtatacttggggaatctgctgaagcattacctggggaatctgtggatgatcatgagactgagtttccaaatggaaatgctgaggattctgccaatgtgaattctgaaagtcagaaaccatacaatagaagaataccagcgaatgtcaggaagcgtaaccgggttcaaacatcatctcaaatttctgtaagtgggcatgatggcgctcccgcgtccgcggctgcgagaagacgacagaaggggcagcgcaagagaaggcgacagaaggctgctgctccccccgcacaaactgctggtgaatcaagatataatttgagacgactcaaaactggagcaacaacttcatctgctagagctatgtctggtggtggcaaagaaagtcagggagaggttgatcgtgtaaaagatacagaagagggaattattgactcaaaaacttctcattcacattcagtgggcattactaatgagaatggtgaaagcatacatcttgagcagtctctgaaaggtgtggagacaagggccggttatggtggtgataccacggagacctttgccaacaatatggccttgagtgaggaggtgaatggaacagcagatgatgtggaggagaatgatgctgagtataggagtgaatcccgtggggaagatgctggtggagttgacaatgaggatgatgaagaagattacctgcaacccggtgaagcttcaatagggaagaagctttggaatttttttacaacataacaacacaagcttattgataacaatgaagctgtgtcttgacctcatcaactttagggatgatgtcggaagttatcttgtattaacacaattggaagtagatctctaaattataaccacgaggggtagtacttaggtgaggtgattgagtttctctattttttttttcttgtacgttttcatggatgtttggatggaacctctggtatttgtttatagttttaggcattcgatagtgtagctaaagtttagatattggattttagctacctccccttggaaattgattgaatccaaatgtttgtatctcttatgctaaatgtgattgtttgaatttattgagggtgcttttgtagtcccatcgtgtgaactacgggtgacaatttgggtttgccagttgggcgtgtcaaggagtgggtaatttcattgagagaacccaaggggttggcgtagtagtatgagacacctttgtgtttccatgagtgaaaatgttttattaagttgagagtaatccaaaggaacttgcttttgatgcttaaaa

SEQ ID NO: 716 - DNA, 1090 bp, Glycine max
ccagaccacatggcatctcggtctgggacctcttcacaaatcccggaccaaaccccccggcactggagagactgtccccattcaccccatagcctccattctctgttgcaattgcagctgtagcagattgtcagacatgaatgtgtctcgttatgacttcgcttgtgctgaagtcaatggtttggtttatgctgtgggaggcgatggcggcacgggggacagtctctccagtgctgaggtgtatgatccagataccgacaagtgggcactgatagagagccttcgccgcccgagatggggttgttttgcttgtggatttgagggtaagctctatgtgatgggtggaaggtcaagctttactattggaaactccaagtttgttgatatatataaccctgagagacacagctggtgtgagattaagaatggctgtgttatggtcacagctcatgcagtattaggaaagaagttgttctgcatagagtggaagaaccagcggaagctagctatattcagtccagaggacaattcatggaaaatggtaccagttccgttgacaggaagctcaagcattgattttcgaattgggatactagatgaaaagttgttgctattccctctggaagctgaaactgcttttcaaacattgctgtatgatccaaatgcaactctggggtcagagtggcaaacttgtgacataaggccatctggtttgtgcttgtgttgtgtaacaatcaaggcatgaaaccttgtcttatctggctctatggagtgatggatacatctatggaattctctgcattttatcaagaatgaagacagcagtgagtgtgagtgttcctcacgatcacatcatactattatctgattttaattttgtgttttagcttgtttgtggctgttagttacttggctcctagtgttatgagggactaattcccttggtcttgtgattgtctacttttgagtagcactatttcaaaccgtggtgggtgagttaattgtttattgttctcttttgggctttttgatataatataaatcaagcgatagctttagaattttaaaaaaagaaaaaaaaaagcataaa

SEQ ID NO: 717 - DNA, 665 bp, Glycine max
tcgatcagctacgtaggccccccccgcataaaaatgaaggatttgagaaagaaataggtttggtttccgagaggaagagtttgtggaatctagtgagagagagcagaggaaaaggggaagaaaaatgttgagtgcgacggcgatcggcgcgttattgggtttgggaacccagatgtactccaatgctctccgcaaactcccctacatgcgccatccgtgggagcacgtggtcggaatggggttgggcgcggtgtttgtgaaccagcttctgaaatgggaggcccaagtggagcaagacctcgacaagatgctcgaaaaggccaaggccgccaacgaaagacgttatatagatggagatgatgattaatgcatgtcttcatggattgtggcagttggtgaaaataatcatgaaatatgttgaacttgttgcctttgttttctgatttgatgatgttatgtttgtaaggctgttaaaactttttcgtgctaatcagcctattttttgcacaagtttttgcaagcagtgaaattgttgtagatgataatgttctggcctggtggcttcattggtaataagattatcacgatatctgtgactccaaaacgtcttaaaaaaaaaaaaaaaaaaaaaaaaaaaaaaaaaaaaaaaaaaaaaaaaaaaaaaa

SEQ ID NO: 718 - DNA, 1002 bp, Glycine max
  misc_feature (650)..(650): n is a, c, g, or t
  misc_feature (680)..(680): n is a, c, g, or t
  misc_feature (693)..(693): n is a, c, g, or t
  misc_feature (923)..(923): n is a, c, g, or t
  misc_feature (982)..(982): n is a, c, g, or t
ccacgcgtccgcccacgcgtccgtacggctgcgagaagacgacagaagggggtttcagtttgttgaggttataccaccttcctccaatcaatatactctacctatctatctcttcttctttgcaaatcaataatgggtttggatttgttcttttggtttgtgctttgtttgcctctcaactttgcttttttagcctcaacgttctaccaggttttgatgttgtctgacttggaagctgactttatcaacccctatgacgctgcatctcggattaactactttatcgttcctgagtttattgggcagggattgttgtgcgctttctgccttttaactggtcattggatcatgtttttgattacggttcctgttacatgctatcatgtgatgctgtacatgaaacggaagcatctcattgatgttactgaagtgtttaggttacttaatgctgagaagaaatttcggatagccaaaattgcttattacttaacaatcatctttatatctatcttcaggcttgtattgatgcttgtctactatttagattctgaagatgaatgaagtggacaaaactttcaatacccactacttatggtgtaaggtggtgcgtctttttcattttctctttttttgagggtgtgattgagttntatagcataacatttagaactaaaaaatcncagctgtagcctntaggaggaaacaaaaatctgtcactaatttgaatgaatattgccaactcaggtataccattgtttgactccggttaagcatgatccctagaaatagcttgccaactgaatttttatggtaactaattatcatagaattgaaagattatatttggcaatggcaacgggtgatttgaagattgcatattatttgggtgtcataagaatgctacaacttgttataaagtagcnacaccttgtgtaaatttagcatgaactattgtaattgtaatactattacgaggctttcnagtcaaaaaaaaaaaaaaaa

SEQ ID NO: 719 - DNA, 1823 bp, Glycine max
atcgatgcttctgaggtactgtcagtgatatttgactgcctccatcggtcatttatatgtggttcaagtgtttctgatgcagaatcagctgaaagcaactgcatgggatcttgggattgagcaaatggtagttgtatagcacatccactcgctgccttggccacccccccacaaatgaactgctatcactgtggtcttgaatccagacatttgaaatatacttccttctttcacaatataaatgccagtgccctccggacaatgaaggatatgtttgctgaaagttccttcgataagcttttgaatcttgtggagatgaaccatcagttggcttgtgatctagaagctggtggctgtggcaagctcaaccacatccatcacttactttcaactccaccccatgtttttatgacagtcctaggttggcaaaatacatgtgagagtgccaatgatataacagagactctggcagccctgagcaccaatatagatatcagtgtcctttatcctggtttagatcctaaatgcatccataacttggtgtcagtggtttgctactacggccagcattatcattgctttgcttatagccatgaccatgaacagtggattatgtatgatgacaagactgtcaaggtaattggtggatgggcggatgttcttacaatgtgtgaaagagggcatctacaacctcaggttcttttctttgaagctgtaaactagatttttggtggaactgataacatcatttgctggactgaagaatgttgacttttgggtttcaattggtttctggagtggccttgtttatgcagatgcattgcataacacaaaagtggttcgggcaaataaaattgcaagttgcattgcataacacaaaactagttttggcttacatacctctgtgttgggatgtatagcattttaaaatttacgatacaattcaggattttaataggagcaggttctggcgagggataatgatgacaaatgcatttagtgtaacaggatgacttagaagagccgagagtgtttggtaccgagcatcactgaacacaattggttcgttttgagaatatcggattcattccttgtatcctaccaataagcaggttttggtattttgctagatgaaccacaatttgtggaggttgaccagcaatgtacgagaagatcttgggctgttttatgatggaaataattgcccattattgtcgggaatatatatatagcatttgtacgaggggagtttattcaccagttgtcgaagaaatttccttcccacccccttcccccaaaacaaaaaagggatctgtatagttcttatacaattagatttgtcaaaatgtcagcttcttgtcacttcggctgtaaaaggagggtcgtttactgatctactggactactattctcccttccaagaaacctgtgttggaacgtgcttcatgacagattttgtgcaactgtaaattgagggcttccatcctttggatccacaacactactctattcttgttttcttccatttgggtgtgtggtgttggatggggatccgtaagttgagtatgattgaaggtaatgaactaatgatatcaattgttatagttggagaggttaactgtagctttgagtgtggaaaaagctgaaaggttttggcacaattttgccatattctagcgtcaagtgagatggattattatacttcattattctatatacattagtgcaaaatattgtgcaatttaacatctaaatttgcactcgggttcccctaattgtgttaatgttaatattttttaggttaaatacatttttatccatgc

SEQ ID NO: 720 - DNA, 2412 bp, Glycine max
ggctcgagagcacgaagtagcaatcttaatctttcacaaagtattttttcgagtcagctacgtaggcccccccccaaaaactactttttcattccatttcgcgtccttccttctcaccatctcccacactccaccgccatgacggacaacgaccgcgtctcccgccgcaccgaggtcctcaccaaccacctcctccgccgcacacccccaccctcccttctccgccccctcccctgcctgagctactcccccccggagctctccaacaccatctccttcgacactcgcgagatgcgaaaactgatggactgccacaaccttgaggaccgcgactggctcttctcccttatcctccagagccccctcttcaatccccgccaccgcgccggaagattcttcgtctgccccgactacaaccagcccatggagcaccagcgccaggccaccatgaagcgcatcgcctatctcctcgacaaaggggtcttccgaggctggctcacgggaaatggccccgaacaggagctcaggaagctcgcgctgcacgaggtcattgggatgtacgatcattctctcgcggttaagcttggcgttcacttcttcttgtggggtggggcagtaaagtttctgggaaccaagcgccatcatgacaagtggttgaattctactgaaaactatgatatcaagggttgttttgctatgtcggagttaggccatggaagtaatgttcgaggaattgaaacagtcactacttatgattcaaacaccggggaatttgtcatcaatactccatgtgaatcgggtcagaagtattggattggtggtgcagcaaatcatgcaacgcacactatagtcttttcacagctctatataaatggaagcaatcaaggggtgcatgcatttattgcccaaatcagggattcagatggaaacatatgtccaaacatccgaatagctgattgtggtcacaaaattggtttaaatggagttgataatggccgtatctggtttgataatgtgaggatacccagagagaatttgttgaattctgtggctgatgtttcaccaagtggtgaatatttgagtgcaataaaaaatgcagatcagaggtttgctgcattcttagcccctttgacttctggtcgtgttaccattgctgttagtgctgtttacatctccaagattagcttggccattgctataagatatgcattgacaaggcgagcattctccattacaccaaacgggcctgaagttttactgcttgattaccctagtcatcaacggcgtctgttacctttacttgcaaaggtatatgcaatgagttttgctgcaaatgagctgaaaatgatgtatgtcaacagaacacctaagtcaaacaaagcaattcatattgtttctagtgcttacaaggctactttaacttggaataatatgcgcactctccaggaatgtcgtgaagcctgtggaggacaaggagttaaatctgaaaatcgtgttggcaatttcatgggtgaatttgatgtgcattcgacatttgagggggacaacaatgttctaatgcagcagattagcaaggcactctttgcagaatatgtagcaagtcagaagaaaaagaaaccattcagcggtttgggattagaacacatgaacaaacctttgcctgttatcccatctcagctaacaagttcctacattaggaacagtgaatttcagattgatctgttccacctaagagagcgagacctattgagacgttttgctgaagaggtctcagaatatcaatctcgtggagaaagcaaagagtctgccttcattctaagttatcagctcgcagaagaattgggcagagctttctcagaacgagcaatattaaaaacattcatggaggctgagtcaactgtacctgctggttcattgaagaatgtcttgggtctattgagatcgttgtatgctgtgatatgtgtggatgaagattctgcctttcttcgatatggatacttgtcaacagagaatgcttctgcagtgaggaaagaagtgccaaaactctgtgctgaacttcgaccacacgcacttgccttggtcagttcctttggtattcctgatgcatttttgagccctatcgcatataattgggttgattcaaattcttggtcttctcaactttagcaagcttatgcaaatttctgcatatgattgagatatgaggttggcgtgtttgtggtaagcatatgtgaataatgtttttgttacactatgtagaatattgctgaacagtgcaaataagtttgtaccaatctaatcacgaaataacgtggttacatattgtagggtgaataataagttaagaacaaaataaaagttgggctttgacgaaaaatcaatgccagatcattcagaaaaaaaaaaaaaaaa

SEQ ID NO: 721 - DNA, 1574 bp, Glycine max
  misc_feature (2)..(2): n is a, c, g, or t
tnccccacgcgtcacctctatttccatttatcatttcatttgttgtctgttacgttaacgtccctgcctccgattctttccatttcttactttctttctagtttctcccttccctctcacacaacacaagagaacacgaataaaacgcactgcacgtgaatcgcaattattagggtttacacaccctcgcagatggtttgagattgcgaattcgacgacgatgatggaaggagcgagcaatggagggatgctgtaccacgaggtgcaggagtcgaagctctgcgcggtgcattgcgtgaacacggtgctgcagggcccgttcttctcggagttcgatttggccgcgcttgcctccgatctcgaccgcaaggagcgtcaggtcatgctcccagcgctcgcgtcggcggatttcgagtcgcacaatgtctcgctcgacggggatttcagcatccaggttttacaaaaggctctggaagtttgggacctacaagttatccctcttgactctccagttgctgagcctgcccagattgaccctgagctggaaaatgccttcatttgtcatttacaagaccattggttttgtatccgcaaagtgaatggggagtggtataattttgacagtctctatgcagccccacagcacctttccaagttttacctctctgcctatcttgactctttgaaaggctttgggtggagcatattcctggttagaggaaattttccaaaagagttccccatctcctcatctgaagcttctaatggatttgggcagtggctttcacccgaagatgctgagaggataactaaatcttgcaactcagtacaggctccacacccgagagttaacgagcaccaacagcattacgatcagtttctttctcatggggaaaatgaaatgctattagacatggaagatgaggatctaagggctgcaattgcagctagtctgatggattcgtccccagctgtgaccaatgctgaagccagtactcctcaaaatgataatcatagtagtaaacaagtggcaaccactgaagctacccctctaaatgatcaacactccaaacaagtggaacccattgaagccactccacctgtcaatgctctaagcaacaaacatgtgcctgctattgaagcttgttctctgaatgatcaaaacagcaaagaagtggcatctactataggtgataatgctcaagatgaaaaccagaataaagaaaaaacagcctaagagtgtgttcttatttgctcctaatttgtttttgcaattgaggacaaaaatcttttccggtttaggtgatcgaaacatacatcagtggcttaaagtcatggtgctgtgcagtatacacattctcatttcaattgcatgatgtataaactgtaaggaaaacccttaagcatttccatcgattatatgatagttaccaagttttgacagtgttttggaaagccctttcggcatttccatgtgcttgtgattgataccaagttttgaccatgctgcatgctggtactactacaataaatttgcttatggtggtgattacgacaaaaaaaaaaaaaaaaaa

SEQ ID NO: 722 - DNA, 1364 bp, Glycine max
ctttcataaatatttctttcgtataactcggtcccacttgccttcttctgtaacgtgtaaaaaacaaacactaaatctcccgcacccccgagcccggaaagagatctagtgtgtctgtgactgtcagaaacaaacattatttggttttctgaattgtttggattgcgagaaaaaaaaagggggggaaatggcaaaggatattcgattcttcgacctcaacacgggcgccaagatcccttcagtcggcttgggaacttggcagtctgatcctggccttgttgctgaagccgtcgcggcggccatcaaggttggttaccgccacattgattgtgctcaaatctatggcaatgagaaggagattggctctttgttgaagaatctgtttgaggagggtgtagtgaagcgcgaggatttgtggattacatctaaactctggaatactgatcatgctccagaagatgtaccactggcactggaccggaccttgaaagatttgcagctggattatgtagatttgtatcttatccactggcctgctccgatgaagaaaggatcagctggctttaagcctgaaaatcttgtgcaaccaaacatacctaacacctggaaggcgatggaagcactctatgactctggcaaggctcggaccatcggtgtaagcaatttttccaccaagaagctctcggatttgctgctaattgctcgtgttcctcccgctgtcaaccaggtggagtgtcatccttcctggcagcaggacaagctgcaggctttctgcaattccaaaggtgtccacctctctggatattcacctttgggttcccctggaacaacctggcttaaaagtgatgtcctcaagcatcaagttataaatatgattgcggagaaactaggcaagacgcctgcacaagtagctcttcgctggggacttcaaatgggccatagtgttcttcccaagagtacaaacgaaactagaataaaggaaaattttgatgtttttggctggtctatacctgaggacctgctcgccaaattttctgagattcaacaggcaagattactcaggggtaccacatttgcccatgaaacttatggtgcctacagatcccttgaggaactttgggatggtgaaatctgagaaatctatctgtaaatttgataagtgaatggatcgaggagtgagagttctgtgaaactgtgaatcagtatactcctttgttgacttgagcaaattttattttattcctggtttgatgaaactttgcatcatggcattcatgcaaatctctcttttcgaataccccccctgtcttaatgtatctataatgagaggatgattagttggttccactgttgagtggccttaa

SEQ ID NO: 723 - DNA, 1524 bp, Glycine max
cacatctatgcaatcaccagctgattcaaggatggtttcccaaaattacttattaaagaatagtcctcaacatgctggtattgcttctggttctcaaggattgtatgaccaaaggtttttgaccaaccaacctcctttaccacccatgccacctccacctacagtctcgcctgtaatatcgcatgctacagattcagttcctggtcattcatctccatttgttaattctctagcaggcacacagcgtcctgtggcattccaagttcggtcagactattcatctccattcatcaatggttcaactgctgcatcttctgttcctgtgccagattcaaaatactccaggacttctgtgtcttcccctggtggacctagtagagttgctcctccccttcctcctacaccacctccttttgcatctaatcagtataatttaccatctgttaaaacttctgcctcccaaccttctatgtataatcagacaagtattggggccactgaactttcccaggcctccatttcatcttcaggagccagattgtcatcttacccaaatcccccaatgatgtctgcgggttttagtaggtcagcttccatgccattgactatgttcggtaactccccaaatcagcaacagactgagaaccagccaagcatcttacaaagtatctctgttcctccagcttcctttcagtcaatgcatccagttactcagttgcagcccctccagccaccccagcttccacgcccaccacaacctcctcagctccttaggccgcctgtccacgctttacagcagttggagcaagggatggctgtgcaaagcaatgttcaagtgcatcatcaattacagatgctgcaacagcctcaggttccttcaatgcagacgtattaccaaacccagcagcaacagttttcacatgagcagcagcaagttgaatatactcaacagccagggaattctctatcacagcagcaacaagatgcagcaatgtcgttacatgagtatttcaagtctccagaggcaattcagtctttattgagtgatcgggacaaactttgccaacttttggagcagcatccgaaattaatgcagatgcttcaggaaaaattgggccaactgtagccgcatgatgatgaccaagtagaactgtttcatgtctgtaaatgtccattcattatccaaatgatgagttgcgctgatgcttatgcctcagggcattgaaattttgttaatatgtactttctgggttcatttttttatttttatttttaaatttcaatgagcacaatattgatgcccaatatattaatggttggagagtggcttctgatgagagcttaagtgggatatttacattgaagtcactggggcagtggttcaactgttaataactggtgcaatcattttgccgtttgttgtattaaatgttgtacaggtattgctcctggacggggctaggttggttaaaattgaaactcagtgaataatgactaatgtgtgtttgggtgttgtttcctgcc

SEQ ID NO: 724 - DNA, 1318 bp, Glycine max
actcgacccgcgtacttgccctcagcaccagccgaaagccaagaaaaagctttcgatccctgtaactgcgttcgactatttagggttttttcggagacaatggcggatgaatcggagcacacggcggcgccggctgccggcgaatcgctgctcgacaagatcgccgagaagattcacggccacgacgactcttcctcttcctccgattccgattcggataaaaaggaatcttcgtcgattaaggagaaggttttccgcctctttggaagggagaagccagttcactccgtcctcggcggcggaaaacctgctgatgttctcttgtggaggaacaagaagatatctgctggtgtacttggtgtagccacggctatttggatcttttttgagttgcttgaatatcacctgcttactctagtctgtcacatttccattctgttgcttgcggttttatttttgtggtccaatgcccatacctttattcacaaggcaccacctcgcatcccggttgttcatatccccgaagaaccaattctccaatttgcatctgcattgacaattgaaatcaaccgtggatttgctgccttgcatgctattggttctggaagagatttgaagacatttctcattgttattgttgggacgtggattatatcaattgtggggagctggtgcaatttcttgaccttgttctacattgcttttgttttgttgcatacggttcctgtcttgtatgacaagtatgaggataagatagaccctctagcagagaaggcactcattgagttcaagaagcagtatgctgtgtttgacgaaaaggtcttgagtaagatcccgaaaggcccattgaaagagaagaagttagcttagtgtttaagtatttgtactctcatcaagaactaaaaaggaggctacaacttcagtcttttttatttactagagcctcgtttctttcaaaccatataccaagccttgttttggattttctttaggcgggtgtggtactcgcgggtttagcttcaagatgtagcttttgattttgctataagcatgtcgattttgcttattacagtgtttgttggacttgtagtcttcaatggacaattaatttgtaagcaagaaatatttatgttaattgtcaacgttatttttcattgatgaaaaattgcatggtgagtctacggtgttggtgtgattcatggtattattttaaatcgaggtaaaatgtcatctattgaaggtgatgttatcttcatggtatcctaaatcccaagaaccgaataccatgactcacaagattaataaaatattttattat

SEQ ID NO: 725 - DNA, 1237 bp, Glycine max
cgggacccgaacctcgttatgcgcaacacaataaaaggcgacaccgagcgcatagcacgctactactacctgccctcagcaccagccgaaagcgaagaaagagctttcgatccctgtaaccgcgttcgacgatttagggtttttttcggagacaatggcggatgaatcggagcacacggcggcgccggcgagcggtgaatcgctgcttgacaagattgccgagaagattcacggccaccacgactcttcctcttcctccgattccgattcggagaaaaaggaaacttcgtcaattaaggaaaaggttttccgcctctttggaagggagaagccagttcactccgtcctcggcggtggaaaacctgctgatgtgctcttgtggaggaacaagaagatatctgctagtgtacttggtgtagccactgctgtttggatcttttttgagttgcttgaatatcacctgcttactctagtttgtcacatttcgattctggtgcttgcagttttgtttttgtggtccaatgcccatacctttattcacaaggcaccgccttgcatcccaaccgttcatctccctgaagaaccaattcgccaattcgcatctgcattgacaattgaaatcaaccgtggatttgctgccttgcatgctattggttctggaagagatttgaagacatttctcattattattgttgggacgtggattatatcaattgtggggagctggtgcaatttcttgaccttgttctacattgtctttgttttgttgcatacggttcctgtcatctatgacaagtatgaggataagatagaccctctggcagagaaggcactcatcgagttcaagaagcagtatgctgtgtttgacgaaaaggtcttgaataagatcccgaaaggcccattgaaagggaagaagttagcttagtgtttaagcatttgtattctcaagaacaaaaataggaggctccacttgagtcttttctattttctagagcctcgtttcttttaaaccatacaccaagcattgttttggattttcttttaggcgggtgtggtattcatggttttagcttcaagatgtaaccttttgattttgctacaagcatgtcgattttgctgattacattgtttgttagacttgtactcttcaatgggtaattaatttgtaagcaaaaaatatttatgttaattgtcagcatttttcttttctttgataaaaaaattgggcgtttgttgt

SEQ ID NO: 726 - DNA, 1515 bp, Glycine max
  misc_feature (193)..(193): n is a, c, g, or t
attttgactatcacaaaagctattcctggggagggactgaaataaaagtatggcatggaaaagttgaaggcctctctgtctactttttggagcctcaaaatggattctttcaggttggctgtgtatatggtcgtgggaatgatggagagagatttggttttttttgtcatgccgctctcgagtttctactccnaagtggatttcatccttgatttcttccactgccatgattggtcaagtgctccggttgcatggctatttaaagacaactatgcacattatggtcttagtaaagcacgagttgtcttcacaattcataaccttgaatttggagcccattccattggaaaagctatggcacatgctgacaaagctacaactgtctctcccacatattcaagagagattgctggtaatcctgtaattgctcctcatcttcacaagttccatggtataataaatggaatcgacccagatatatgggacccatataatgataaattcattcccgtatcatactcttcagaaaatgttgttgaaggaaaaagagcttcgaaggaaaccttgcaacaaaggcttagtttaaaaaaagctgatcttcctttagtgggaattattactcgattgactcatcagaaaggaatccatctcatcaaacatgccatatggcgcaccctagaacgtggtggacaggttgtactacttggttcagctccagatcctcgtatccaaaatgattttgtgaatttggccaatgaattgcattccgctcatcatgatcgtgctagactttgccttgcatatgatgagcctctttcacacttgatatatgctggtgctgatttcattctagttccttcaatctttgagccatgtggactcactcaactcacagcaatgagatatggttcaatacctgttgttcggaaaactggaggactttacgatacagtattcgacgttgaccatgataaggatagagcccaagcgcaaggtcttgagccaaatggatttagttttgatggagctgatactggaggtgttgattatgctctcaatagggcaatatcagcatggtatgaaggccgtgattggtttaacagtttatgcaaaagggtgatggagcaagactggtcttggaaccggcctgctcttgactatttggagctttaccatgcagcacgcaaagcagaatgagatttaaatgaacagaggaagtaagatgcatattaaaattcattccttttatacagatttagtggtaagctattagtctttagaataatttagttgcaatagcaaatcttagtgaaaaatgccgcaaggtgacattagtttgtagagacattgcagaatacattgaaaaatagcaaatattagctttacatggttttagtatgttgttagaggtcatgtttttaacttgtggaatacattgcagaataaatcgaattctgcaagttcttttggtgcattactgatttgaaaatcaagaacaaaaaaaaaaaaaaaaaa

SEQ ID NO: 727 - DNA, 2593 bp, Glycine max
ctcgagccgattcagctacgtaggccccccccccagcgtgtctgagaattccgtgtcgttgacgagcgagggtgcgactatgacctgcgacttcgatctccggcaatccgcggcgaggttcgtccagtaaaacggcgccgtatagcgggatctgcgacgctgggcggagtggcaatggagggcgagaacgcgagcaacaaggtgatcgagttgatgaacgagatagccagcatctccgattacaggcctccggtgaagaagcagtactgcaacttggcgcggaggctgaagcttctgatcccgatgttcgaggagattagggacatgaacaaagacgcgcttcccgataacacttccaacgccgtcctcgccttcaaggaagctctcgaatccgctatggaactcctcagattcggaagcgagggcagcaagctttacttggtccttgagcgggacgaaattatgaataaattctacaaggtgacagctcagttggaacagtcgttgggtggtatttcctatgataaacttgatatatcagatgaagttaaagagcaggttgagttggttcttgcccagttcagaagagctaaagggagggttgatgaaccagatgtcaggttgtatgaggatatgttgtctgtttacaacaacagcagtgatgcagctacagatccatctgttctaagtcaattagctgaaaagttgaaattgatgggaatagctgatcttactcaagaatcacttgctttgcatgagatggtggcatcaagtggtggggatccaggggcacgcattgagaaaatgtcaatgttattgaagaagataaaggatttcgtgcaaatagaaaatctagtcaaggatgataatttaggaggaaaaggcattttctcaaaagtctatggacttgggacaaatgaaaagagtcatcaagctcctgttatccctgatgattttcgatgtccgatttccctggaattaatgaaggaccctgtcattgtttcaacgggacagacttatgagcgtacttgtattgagaagtggttgcaagcagggcatggaacctgccccaaaacacagcagactctcactagtactgttctcacgcctaactatgtattgcggagcctcatagcacaatggtgtgaagccaatggcatagagccaccaaaacgacctagcgattcacaacctagtaaatcagcatcagcctactctcccgctgagcaaagtaagattggaagtcttctccaaaagctcacatctgtgagtcctgaagaccagagatcagctgctggcgagatccgccttcttgcaaagcgcaacgcagataaccgcgttgccattgctgaagctggtgcaatacctctccttgtcggtctcttgtctgtgcctgactcccgcactcaagaacatgccgtgacagcgctcctgaatctttccatatacgaaaataacaaaggaagtattgtttcttcaggagcagttccaggtatagttcatgtgctgaagaagggaagcatggaggctcgggaaaatgcagctgcaacacttttcagcctttcagttatagatgaaaacaaggttacaattggatctttaggagccataccaccactagtgacactgctaagtgagggtaaccaaaggggtaagaaagatgctgcaacagcactcttcaatttgtgcatttatcagggcaacaagggaaaggcagtgagggctggcgttattcccacgctgatgcgactactgactgaacctagcgggggaatggtggatgaagcattagctattttggcaatattggccagccatcctgaagggaaggctactattagagcttcagaggcagtgccggtgttagtagagtttattgggaatggctcaccaaggaacaaagagaatgctgctgctgttttagttcacctctgttctggagatcaacaatatctagcacaggcccaagagctgggggtgatgggtccactgttggaattggctcaaaatggaacagacagaggcaaaagaaaggctggacaattgctagagcgtatgagcaggctagttgagcaacagcaggaagttccaacacaaactgaaactcaagctcagaacgaggataccgaaccacctttgattactaaccccgatgattcctaagatgtcttgttataccttgttttcattttgtctttttgttcttttaaaagtgttgaaagaagcatctgtttggaggaaagggtggaagatcaccttcctactccataagttatttgtttgtttgtgtgatattcagagatgcaatgcaaaaacttgtgaaagtgggcaagaagaaatcgaatcaaatgggcaagcctgacgtggaaaaatgtataattgtaacatgtactatattctaatcatcctcagattttaatgaagagatgttttgtttattcgtaccgcatcagatgatgttagagatgttataacagtataaagtcaatcatttgtcttttttaacctagaaatttatcctttcgaaaatgttagttcgcgccgtcatattagagttattatgatcaagtgatttgaagttgaattcttgtcc

SEQ ID NO: 728 - DNA, 2776 bp, Glycine max
acgaggttgtcaggcgcggacttcttactgtcactcgacctcgacctcgacgacggtcagttgttttcttttccatatctcgtggctttgctttcgtttcgttgtagtgtatatcctgaatcccgatcgcagaaatagtgttagtattcggaatataaacaagttaactagtgatggataacgaggtcgaggtgctagaatttgatattgggctgggaggaggcgagggagaatatgacgatgacgacggaggaggaattgatgaggaggaattgggtgtagccactggaggtggggaaatatatcttcctgaggtggacctcttagatcttgaaccttgcgagggcatggaattcgagtctgaagaggctgccaaggccttctacaattcctatgcccgtcgtgttgggtttagtactcgcgtcagctcatcccgtcgttccaggcgcgatggagctattatacagaggcaatttgtttgcgcgaaggggggtttccgcaacttgaatgagaaacgcacgaaggatagagagatcaggcgccctcgaacaattacccgagtcggttgtaaagcctctctttctgtcaaaatgcaagactctggcaagtggatcgtctctggctttgttagagaacataatcacgaactcgttccaccagaccaggtgcattgccttcgctctcacaggcaaatttcaggagctgccaagacgctcatcgatactttacaggctgctgggatgggtcctcgtagaattatgtctgcactaattaaagagtatggtgggattagcaaagtcggcttcacagaggtggactgtaggaattacatgaggaataataggctaagaagtttagaaggtgacattcaacttgttcttgattatttgagacagatgcatgccgaaaaccctaatttcttctatgctgtgcaaggagatgaggatcagtccataaccaatgttttctgggctgatcccaaggctaggatgaattatacattttttggtgatactgtaacctttgacaccacataccgatctaataggtatcggttaccatttgctttctttactggtgtaaaccatcatgggcaacctgttctctttggttgtgctttcctaattaacgaatctgaagcatcatttgtgtggcttttcaagacatggcttatggccatgtctggatgtccgccagtgtcaataacaactgatcatgattctgcaattcggtcagccataatacaagtcttccccgagactcgtcaccgtttctgcaagtggcacatctttaaaaaatgccaggagaagttatctcatattttcctccaatatccaaattttgaagcagaatttcacaaatgtgttaacttgactgagtcgactgaggaatttaagtcttgctggtcaacacttgtagataaaaatgatctcagggaccatgaatggcttcaagcaatatattcttcttgtaggcagtgggtacctgtatatttgcgagacacattctttgcagaaatgtccatcactcagcgaagtgatagcatgaactcttacttcgatgggtatataaatgcttccaccaatttaagtcagttctttaagctctatgagaaagcacttgaaagtcgcaatgagaaagaagtgagagctgattatgacacaatgaatactttgccggtattgagaaccccatctccaatggagaagcaagcatctgagctttacacgagaaaaattttcatgaggttccaggaggagttagttgggacacttacattaatggcatccaaagctgatgatgatggggaggtcattacatatcatgtagctaagtttggagaggaccataaagggtattgtgttaaattcaatgttctggagatgaaagcgacttgcagttgccaaatgtttgagttttcaggccttctttgtaggcacgttttggcagtctttagagttaccaatgtgcttactctcccatctcattatattctgaaacgttggacaagaaatgccaaaagcaatgtaatattagaagaacatgcttgtgatgtatatacttactatttggaatctcatatagttagatataacaccctccggcatgaggcttttaaatttgttgatgaaggcgcgcggtctgctgaaacttatgatgttgcaatggatgctttacaagaagctgcaaaaagagtttctcagggaatgcaaaatgagggaaaaattcctatcaataatggaaaggtaaggagtcacgtgctgaatgatgaaagtcatgctaattacacaagtgggtgccaggaagaaagcttgagccagcatatgtctaaggatgatttggataagaatattagaaaacttatgaatgagcttgagtgtgcaaatcggaagtgtgaaatttatcggtccaacctgctttccgttttgaaagctgttgaggatcacaagctagagttatcagttaaggtggaaaacatcaagataagcatgaaagatggcatctaaagactatggagaattaacattgaaactgataggaaaacaaattctattttggcaatccagtcgcgcatcaataatgatcccatgacaacccgccgccccacaattgtcttgtagccctcttgtgatgtataaagttggtttgcactgtattatttttttgttcagtactaaatttattatattgatgtcaacttttatagtccaagttttctttaagaaaataataatttagcacatatacgtcatcgtattaatatttttctgagttt

SEQ ID NO: 729 - DNA, 1199 bp, Glycine max
  misc_feature (1180)..(1181): n is a, c, g, or t
aaaaatcctcatctgctccatttctgagcgtactgaaagttacaagcacacacagagaagaagagaagaagagaagaagcaagatggcgtcatctcgtccccctccttcgaaatccgtggatctggacctaacaatcgtgtcggcgaagcacctgaagaacgtgaactggaagaacggcgatctgaaaccctatgtggttttctgggtggaccccgagcggcgcctggccacgaaatccgacgactccggcaacacctcccccgtctggaacgagcgtttcgccctccctctccctctccccctccacgactccttcctcacgctcgagatcttccactccaaaccctccgacacccccaaacccctcgtcgccaccctccgcctccccctcaaagacctccacgactcaactcgcctccgcaagttccccctctcccgcccctccggccgccctcacggcaagatccacctcaaactcggcctcctcggccgcccccaattcgattacgcctccctcaacactaaccctaaccctaatttcgtctgctacagaggatacaccccttcccattccccttctccaccagcctctccttacacatcatacacctcttacactgactcctattctaattactaccccgcttactattctggcgctcctccccctcccccccctagacccttcttcgaccgttacgctgggcccagtgggccttctgctccgcttgattactcctccacttatgaccccatgcccaagcctcccaaaatgggcctcggcgctggcctcgccattggcgctgttgctggggctctcggcgggcttgctctcgacgagggccttaactacgaagaggacaagatcgccgagagggtcgagaacgacgtcgctgctgctgcgcgcgacgattacagcgattaccgagtggattattgaactctcactactaccggtgttgtcttgaggtttgaaattcgaagggtatttcgattcggattcggattcgctctaatgttattacagtatatagatatatgtctatgtatatagtttgacttggtgttgaatacgaatgatgcatcggtgttgttttccttgctgcttgtggtgattttttactgttcttgcggctctttatattgtatttaaagtgtaataaagctggtttcaccttnnaaaaaaaaaaaaaaaaaa

SEQ ID NO: 730 - DNA, 813 bp, Glycine max
acctttagtacgttctactgctctagcgaggcacaatggcaacgcaatcttatcttctgaatctaaacacttttcgtgttcatgcgggaatcagtggacggcaatgcaaaccttcaatattcaaaccaagcaattttggctttagggtctggaaaagttcaaagtatcacactaaaagaaatgtcaatggcaattccggagtcatgcaatgttgctcatgctacacagaagttggagcttctgctggcataacaatatcctcactagtgaatgcagccaccacacatatatctcttaattcagatgtagacttgaatactctcaagctgagcatacaagaaacttcacccgcttccacagatttaatgacaagattggtgcttgcagatcttgaccctgatactgcaaagttggccattggatttctaggtcccttcctctcagtgtttggttttctctttatattgagaatagtcatgtcttggtacccaaaactcccagtgggaaaatttccatatgtaatagcctatgctcccactgagccacttctcattcctacccgcaaagtgattcctcctcttgctggtgtggacgttactcctgtagtctggtttggattgatcagttttcttaatgaaatattagtaggtccacaaggattactagttctcctttcccaacaagtcaattagcttacacatttggaatttatgaatgacataaattctatatcatcttattggatgacacatgtatacaaaattacatcgatatattgcatatattcaaggggaaaaaagtttttctctcccc

SEQ ID NO: 731 - DNA, 846 bp, Glycine max
gtgagactactatggggaagacaaagcctgaaactcgagccgattcggctcgagccaagaaaggacaggtctacagcatgcttgagggaaaaagagacgtagaaactgtattgactatgggaatcatggaagatgttagcattattccccaaccagctgatacagggaaggttgatttggtgatgaatgtggtggaacgtcccagtggaggattttctgctggtggtgggatatcaagtgggattacaaatggtccactaagagggcttattggaagctttgcctattctcataggaatgtttttggtaaaaaccagaagctcaatatttccttagagaggggccagattgactcagtctatcgcataaattacacagacccttggattcaaggagatgataaacgaacatctagaacaataatgattcagaattcaagaacgcctggaaccattgttcatggtaatgcagatggtaatggtagcctgaccattggtcgcatcacaggtggtatagagtttagtcgaccaatcaggcctaagtggagtggaacagcaggacttgttttccagcatgccggagtgcgtgatgagaaaggtattcctatcattaaggattgttacagcagtcctcttactgcaagtggcaatacccatgatgatacattgcttgctaaacttgagactgtttacactggttctggcgaccatggatcttctctgtttgtccttaacatggaaaagggacttcctcttttgcctgaatggttgtccttcactagggtgaatgcacgtgccaggaagggtgttgagataggtcctgctcgccttcatttaagtatctctg

SEQ ID NO: 732 - DNA, 903 bp, Glycine max
gcgggcattagtagctgcgccgaacgctcaaaatgtcactttcccatatcaaccacaagccatcttacttgacttgtctctgtctgtccatatataacattctattcgtacttcattttcattctcactccctcaaacagtcaaactttcatctttctcattcacttaacccaagtgtaaaaatggcagcattgaatatgtccactgtgagacttccaagagcttccttgtctggaacgacaccagctaggagatcttgtgctctcatcaagaatccatcatctttgaggtctgtgaagaacgtgtctaaagtatttggattgaaatcatcttcctttagagtgtcagcgatggcggtatataaagtgaagctgattggaccagacggtgaagagaatgaatttgaagcccctgatgacacttacattctggatgcagctgaaaatgctggagtggagctaccttactcatgcagagctggagcatgctctacttgtgctggccatgttgtttcaggctctgtggatcaagcagatcaatcctttcttgatgaccatcaaatcaaaaagggttaccttctgacatgtgtttcatacccgaaatcagattgtgtgattcacacccacaaggaggaagatctcgtttaagtggtggtggtgtgtgtcttgtgttagtttttctaagcttggatatgtgtcatggtagctagacatattgtgaaactctgttggtgttggtacaactttttgaatcgttctaaatttatgtgaactttaatatgtagccattagatcgattcattcaagaataaggctatgtttcgcccaatattatgttcaaccttaaaacttattttgaagttcaaaatataagctttaaaaataaagtgaaagtggtggcgcc

SEQ ID NO: 733 - DNA, 1620 bp, Glycine max
cgtccgcccacgcgtccgaaattttccatctcatggtcttttaatattccccaagggcaagggagcaggtgacaccttgggggtcaagttctacaacgatctcattaatgagattatagcaaatggtaaacatgaattgatatttgagttacccatgcattcatttattttcaaccttttcgttgataactttgttctcgagccgattcggctcgagcttaaaaccatttgtcacgctgtttcattgggacctcccacaagctcttgaagatgaatatgggggatttctcaaacctgaaatagtgtaaataaatactcaattatatatgattcactatagtatttttaaataatgaaaaagaaaatatagtaaatgtttatggaaaaataaaaatagggaggacttccgtaactatgctgacttttgcttcaagacatttggtgatcgggtgaagcactgggtaaccctaaatgaaccatatggctacagcgtgaatggctacagtggtggaaattttgcaccaggtagatgttctaactacgttggaaaatgccctgctggtgattcttccaccgagccctacattgttaaccaccacttaatacttgctcatggagcagcagtcaattgctacaagaacaaataccaggctcatcagaaaggacaaattggagtcaccatagtgactttcttctttgaaccaaaatctaatagtgatgctgatcgcaaggcagcaaggcgagctctggactttatgtttggctggtttgctaatcccattacatttggtgactatcctgagagtatgagatctttagttggttctagactccccacattcaccaaagctcaatctgaaagtctcaaaggttcatatgattttcttggtataaattattacacctcaaatttcgtggaatatgctccaccaaccaccactaacaagacctatttcactgatatgctagccaaactttcttcgaccaggaatggtgtacccattggcacaccgactcctctgagctggctctttatctatccggagggaatttataagctcatgacatacataagggacaactacaataatccaccagtgtacattaccgaaaatggcgttgcggaatcaaagaatgactcacttgcaatcaatgaagcccgaaaggatggtattcgaattagataccatgatggccatctcaaatccctgcttcatgcgatcaaagatagagttaatgtgaagggctactatatatggtcattttcagatagctttgaatgggatgctggttacacagctcgatttggcatcatatatgtggattacaagaacaatttgagtagataccctaagtcctctgcgttttggctgaaaaaattccttctcaagtgatctaaatctattgttcctttggcatgcatgcccagtttttcttcttgtttgtttcctggatatcacagacatgcagtgtgtatcacttgctcttcgattcggatcaatgtaatcaagtcatcgttgatatcaaataaataatggcatgccagagaatggaataaattatcttttcaacaaaaaaaaaaaaaaactccatcggcccctattatatatttaataatta

SEQ ID NO: 734 - DNA, 1887 bp, Glycine max
tcgataccaaaagcagcaatgaaagcaataagtccctccttcctctgccttataattcttgtgacccttttggctggtagcattgaaagtgcaccagcaaacgtgaagccaagccattatgctgcacccttcaataggagtgtttttccttctggttttctatttggaataggctctgcagcttaccagatagaaggagcagcagctatagatggcagaggaccaagtatatgggacacctatactaaacagcaaccagggaagatttgggatcatagtgatggaagtctagcaattgatttttatcaccggtacaagagcgacataaagatggtgaaagaagttgggttggattcatacagattttccatctcatggtccagaatattccccaagggcaagggagcagttaacaccttgggggtcaagttctacaacgatctcattaatgagattatagcaaatggcttaaagccatttgtcacgctgtttcattgggacctcccacaagctcttgaagatgaatatgggggatttctcaaacctgaaatagtggaggacttccgtaactatgctgacttttgcttcaagacatttggtgatcgggtgaagcactgggtaaccctaaatgaaccatatggctacagcgtgaatggctacagtggtggaaattttgcaccaggtagatgttctaactacgttggaaaatgccctgctggtgattcttccaccgagccctacattgttaaccaccacttaatacttgctcatggagcagcagtcaattgctacaagaacaaataccaggctcatcagaaaggacaaattggagtcaccatagtgactttcttctttgaaccaaaatctaatagtgatgctgatcgcaaggcagcaaggcgagctctggactttatgtttggctggtttgctaatcccattacatttggtgactatcctgagagtatgagatctttagttggttctagactccccacattcaccaaagctcaatctgaaagtctcaaaggttcatatgattttcttggtataaattattacacctcaaatttcgtggaatatgctccaccaaccaccactaacaagacctatttcactgatatgctagccaaactttcttcgaccaggaatggtgtacccattggcacaccgactcctctgagctggctctttatctatccggagggaatttataagctcatgacatacataagggacaactacaataatccaccagtgtacattaccgaaaatggcgttgcggaatcaaagaatgactcacttgcaatcaatgaagcccgaaaggatggtattcgaattagataccatgatggccatctcaaatccctgcttcatgcgatcaagtaaaagggtttctctctggtttaatagaaaattaatttaagcataattaaatatataatatgttgatgatttttggttattccttctttatcttgcagagatagagttaatgtgaagggctactatatatggtcattttcagatagctttgaatgggatgctggttacacagctcgatttggcatcatatatgtggattacaagaacaatttgagtagataccctaagtcctctgcgttttggctgaaaaaattccttctcaagtgatctaaatctattgttcctttggcatgcatgcccagtttttcttcttgtttgtttcctggatatcacagacatgcagtgtgtatcacttgctcttcgattcggatcaatgtaatcaagtcatcgttgatatcaaataaataatggcatgccagagaatggaataaaaaaaaaaaaaaaaaaaaaaaaaaaaaaaaaaaaaaaaaaaaaaaaaaaaaaaaaaaaaaaaaaaaaaaaaaa

SEQ ID NO: 735 - DNA, 1496 bp, Glycine max
  misc_feature (118)..(146): n is a, c, g, or t
  misc_feature (153)..(217): n is a, c, g, or t
ccccttcacccaactttctcttgccatagtgacctatgtttcaaatttgaatttaaattagtgtcccaaaatagtgaatacagtgtatccccgccggaataatgctaattgctatgannnnnnnnnnnnnnnnnnnnnnnnnnnnncaagcannnnnnnnnnnnnnnnnnnnnnnnnnnnnnnnnnnnnnnnnnnnnnnnnnnnnnnnnnnnnnnnnggtccacagaataaatgtgaagcaacaatcaaccaaccatgcagataaggctgagagataagccacattttatgctcacacactcactccacactccatccatcacaaaactttcccccacactaaaaacaaatttatatatatacatccctttcccacactttttccaccctcaaacacgtaactactatttcgaactccgccatggctgccaccaccgccaccgccacgtcatacttttttggcacccgcctcaacaacccgacaaccttaaacaacggaagattccacgcgctcctcaacttcggcaaaaagaaggcggcggcgccgccaccgaagaaaaaggaagtgaaagtgaaaccctccggcgaccggctggtgtggtttcctaatgcggagccgccggagtggctcgacggaagcatgatcggcgaccgcgggttcgacccgttcggtttcgcgaagcccgcggagtacctgcagttcgacctggactcgctggaccagaacctcgcgaagaacgtcgccggcgatgtgatcggaaccagggtggaggtcgccgacgttaaaccaacgccgtttcagccctactcggaggttttcgggattcagaggttccgcgagtgcgaactcattcatggaaggtgggcaatgctgggtgctctcggtgctttggtcgttgaggctctcaccggagtcgcgtggcaagacgccggaaaggtagagctggtggaaggatcatcttacctggggcttcctcttccattttcattgaccacactgatctggattgaggtgatagtgatagggtacatagaatttcaaagaaatgcagaacttgacccagagaaaaggttgtacccaggtggcaggttctttgatcctctgggtttggccaacgaccctgaagaaaaggccagacttcaacttgctgagatcaagcattctcgcttagccatggtggtcttcctcatctttgcaattcaagctgctgtaacaggaaaaggccctatcagttttcttgctaccttcaacaagtgacatcatatcatataatatataactttataaatgaaaacttcccaccgtattctcattctcctctattaagttactcacctcctcatctaattttattaattcttttctgtacacccaaaagatgaaaactgctacttataattatgtatgtatgtttgtactctgttgtatgcttctgtatgatattcagtattggtactttgatgaaacctatgcttcttaaaaataactttggaat

SEQ ID NO: 736 - DNA, 1355 bp, Glycine max
gattttgtaaaaaatggtgtttttccttgaggtccacagaataaatgtgaagcaacaatcaaccaaccattcaggcacaaccatgcagataaggctgagagataagccacattttatgctcacacactccatccatcacaaaattaactcacccccacactgaaacacaaatacataaacacacttacatatatatacatccctttcccacactttttccacccacaaacacgtaactactattccaaactccgccatggccactgccaccgccgccgccgccacgtcatactttttcggcacccgtctaaacaacgttaacacgacaaccttaaacaacggaagattccacgcgctcttgaacttcggcaaaaagaagacggcgccgcagccgccgccgaagaaaaaggaagtgaaagtgaaaccctccggagaccggctggtgtggttcccgaatgcggagccgccggagtggctcgatggaagcatgatcggcgaccgcgggttcgacccgttcgggttcgcgaagcccgcggagtacctgcagttcgacctggactcgctggaccagaacctcgcgaagaacatcgccggcgatgtgatcggaaccagggtggaggtcgccgaggttaagccgacgccgtttcagccctactcggaggttttcgggattcagaggttccgtgagtgcgaactcattcatggaaggtgggcaatgctgggttctctcggtgctttggccgttgaggctctcacgggagtcgcatggcaagacgccggaaaggtagagctagtggaaggatcatcttacctgggacttcctcttccattttcattgaccacactgatctggattgaggtgatagtgatagggtacatagagtttcaaagaaatgcagaacttgacccagagaaaaggttgtacccaggtggcaggttctttgatcctctgggtttggccaacgaccctgaagaaaaagccagacttcaacttgctgagatcaagcattctcgcttagccatggtggtcttcctcatctttgcaattcaagctgctgtgacaggaaaaggcccaatcagttttcttgctaccttcaacaagtgacatcatataacaatataatataactttataaatgaaaactttcaaccttgttctcattctcctcggttaagttatccacatcctcatctaattttattaattcttttctgtacacccaaaagatgatgaaaactgctacgtataattatgtatgtatgtttgtactctgttgtatgcttctgtatgatattcagaattgtttctactttggtgaaacctatgcttattaaaaataactttggaataaaaa

SEQ ID NO: 737 - DNA, 875 bp, Glycine max
tcagctacgtaggccccccccccacatctcgtatataaactccataacccaaatcacaaaaccctagagccggcttctccctctgcgcaggaattgggaacattcgacaggtagagtttcttcaatggctcctaaagttgataagaagaacgacccaaaggcacaggccttgaagactgctaaggcagttaagtctggtgctacctttaagaagaaggcaaagaagatccgaacttctgtcactttccacagaccgaggacattgaagaaggataggaaccccaagtaccctcgcattagcgcgcctccaagaaataagcttgatcattatcagatcctgaaataccctctgaccactgaatccgccatgaagaagattgaggacaacaacactttggttttcattgtcgacctgcgtgccgacaagaagaagatcaaggatgccgtgaagaaaatgtatgacatccaggccaagaaagttaacaccttgatcaggcctgatggaaccaagaaggcttatgtccggttgacccctgattacgatgcattggatgtggcaaacaagattgggattatctaaggtagtacctaggcagttctatggttattcttggcggaaactttttaaaaaaatgataggttctatattttgtgttttgttattttgtatgttttggttccgttgacactaagcagacctcgtgtttcaattttgactagagagttgtttaaattgatgattggaatgatcatgttaaaattttctaattaaaaattatgctacacggaatgtgaggttgatgagtgtccccaaaaaaaaaaaaaaaaaaaaaaaaaaaaaaaaaaaaaaaaaaaaaaaaaaaaaagggcggccg

SEQ ID NO: 738 - DNA, 779 bp, Glycine max
  misc_feature (666)..(666): n is a, c, g, or t
  misc_feature (668)..(668): n is a, c, g, or t
  misc_feature (671)..(671): n is a, c, g, or t
  misc_feature (673)..(673): n is a, c, g, or t
  misc_feature (677)..(677): n is a, c, g, or t
  misc_feature (682)..(682): n is a, c, g, or t
  misc_feature (684)..(684): n is a, c, g, or t
  misc_feature (691)..(691): n is a, c, g, or t
  misc_feature (693)..(693): n is a, c, g, or t
  misc_feature (697)..(697): n is a, c, g, or t
  misc_feature (699)..(699): n is a, c, g, or t
  misc_feature (702)..(703): n is a, c, g, or t
  misc_feature (706)..(706): n is a, c, g, or t
  misc_feature (708)..(709): n is a, c, g, or t
  misc_feature (712)..(712): n is a, c, g, or t
  misc_feature (730)..(731): n is a, c, g, or t
  misc_feature (752)..(752): n is a, c, g, or t
  misc_feature (754)..(754): n is a, c, g, or t
  misc_feature (757)..(757): n is a, c, g, or t
  misc_feature (765)..(765): n is a, c, g, or t
  misc_feature (768)..(771): n is a, c, g, or t
  misc_feature (774)..(774): n is a, c, g, or t
actagttctagatcgcgatctagagcaaccaaaccgttacccaatcagagaaagaaagataaaattctcaaaatggcagccagttcgatccccatccgagtcgccggaatccaaccgtgcgccacctccggccaccgcaggaccgatcccgatcgccggagagcctcctccaccagctggtggaccccgctgttcggctggtcctccgaaccggactacattgactcaaacaacagagcatcgagtcttcaacggaccaagccggaaccggttacggcggcgacggagtcgaaagcgccgagaccgcgcttcgccggttgcttcacggaggagaaggcgaagcagctccggatgatgaccagcaagtcttttcacgacaccatgtatcactccgcgatcgcttctcgactggcctcagacttcaaggctcgctccgatccgtaacacttgaacagtttactaattcttctttggtgtattttgcggattgtttgtagcctaatttttagggtttcaaatgtaaccgttgacgtataatggattagaattttagaatttaggttatcaacatggtgtatataagaaggatttaagagtaaaaatataaatataattgacgattgttgtttggaattcataaaatatgttgtattttttgttgtagtnanatnantaanttttnanatataangntttntnccnnggntnnttnttttacgggcccgggggnnccctttttcttatgggttatntntgngctaattnatnnnnttntggaa

SEQ ID NO: 739 - DNA, 1970 bp, Glycine max
  misc_feature (48)..(49): n is a, c, g, or t
ggcaaataatgaaataacttttgtggtttggaccgcttgacgctctgnnatgacgtttgacgaaaagcaaaatttagaaatattaatagccaaccatctcccctccggcggcggccgggggttctagcaatggcaatggcgtctacactacctgctggggacgaagaaacgccacttgtgcccgatgataattcggccatcgaagctcgcaagagccaccactccacggatattcacatcctgagcttggcctttctcttggtctttctcgccttcggtgccgctcagaatttgcagagcactctcaacactgaggatgacttgggtaccaccacactcgggatcttgtatttgtctttcacattcttctccgtggttgcttctttggtggtgcgagttctcggctccaagaacgctttgcttattgggactactggatatgtgctttatgtcgctgccaacttgaaaccaaattggtatacattggttcctgcttctgtgtatcttgggttttgtgcttccataatatgggttggagagggaacatatctcacttctgctgcacgcagccattctacagataacaacttgcatgaaggtgcagtaattggtgactttaatggggaattctgggctgtgtatgcactccaccagtttattggaaatcttattacatttgctctactgagtgatgaatcaacaggagggaagtaccaagggcacaactttattgtttattgtattccttttcattatgacctttggtgcaatactaatgtgcttcttgcgcaaacggggtgctaatagcaagggacaacaagagctttcaggtgcagatgctggcgcatgtgcatccttgaagtctctatccaaatcacttgccagtgcgttgtctgatgtaaagatgttgttgatcataccccttattgcatattcaggtctacaacaagcatttgtgtgggctgaatttaccaagtatgttgtaactcctgcaattggtatttctggtgtgggtagttcaatggcagcatacggggcttttgatggaatattttctctgcttgctggtcgtctcacctctggtctcacatctattacaacaatagtttctgctggactttttgctcaggcagtcgtattagtcttacttctgctaaatttcagcataagtagtggattgcttggtactgtttacatactcttcttggctggtttattgggcatcggtgatggagttttaatgacacaacttaatgcattgattggaatactatttaagcatgacacggaaggggcttttgctcagctaaaaatatggcaatgcgctacaattgctatcgtgttctttttcgccccgctcgtctcgttcaaagccgtgcttgtgattatgcttgctctcctttgcttctcattctgcattttcctattgcttgctctgaaggtcgggaagacatcatcaccctccaccagtcagcgaatttaaaactgcttaaactgtagattttttgtatacaatctcagtctgtctttctcgcgtgtagcacgtccactctggactatgtctttatttttgtggtgaaatttcggtcagttgaatgagcttgtacaaattgtgacaaatcagtgtgtttggtaacacatttgttaccgctctggttggacgtggttccgcgaagcaattaatagttgcttttgcattgttttttttacgtgaatttctcataaacatgaattcccaatggccaatactaaagcaaatacgcattataagttataagctcatttgtcacgtggctatatatagttattcactgaagaatattcctagaaatatgtcatatgagccaaattcagacacatttttgtaggttctaaaatctgtttcggatcaatatatgtaacctggagaggatgtctcgggtatgatgtgaaaaatccttttgacctttgttaacaaaaaaaaaaaagga

SEQ ID NO: 740 - DNA, 1236 bp, Glycine max
aattcggcaccagataaaattttgaccataattaatatttaaattttgcttaatgtataatttttataatcaccgtcgcgctcagtgtgtgtatataaaaggacggctgcgagaagacgacaggattgtattgggagagaggatgggtgcagaagcaaatggcggcgagaagcaattgaaatttctgatctacggtcgcagcggttggattggtggtctactgggtaagctctgcgaagagcgcgggatccaatatgagtacggcaccggcagattggagaaccgctcgtcgttggaggcggacatagcggctgtgaagcccagccacgtgttcaacgccgcgggtgtcacgggtagacccaatgtggactggtgcgaatctcacaaagttgaaaccatccgaaccaacgtcgtcggcactctcaccctcgccgacgtctgccatcataaaggcctcatcctcatcaactacgccaccggctgcatcttcgagtacgattcttcccacactctcggatccggcatcgccttcaaggaacacgacactcccaatttcaccggatccttctactccaagaccaaagccatggtggaggatctggttgggaactacgagaacgtgtgcacgttgcgtgtgaggatgccgatttcgtcggatttgtcgaacccgcggaatttcatcactaagatcactcgatacgacaaggttgtcgacattcccaactccatgaccatattggacgagcttctcccaatctcgctggagatggccaagcggaacctcactgggatctggaatttcaccaaccctggagtcgtaagtcacaacgagattttacagatgtacaaggaatacgtggatccgaactttacatggaagaacttcactctggaggagcaggctaaggtgattgttgcccctagaagcaacaacgagcttgacgcctctaagttgaagaatgagtttcctcaacttttgtccatcaaagactccctcgttaagtatgtattccagccaaatcagaaaaaggcataacataacttggacatgttatgttagtttaccgttttaatttacatcttcttctgctgaccatttcagattttccttcgtgtgttttgttgcatttaattttaatgttatatttgtattttttattatgatatgaataaactagttgttacctacttaattttaagtaaaaaactcttgcatcatctttttctcttgttccc

SEQ ID NO: 741 - DNA, 691 bp, Glycine max
cgcgtccgtacggctgcgagaagacgacagaaggggatggtcttatgtggggtcacataggtagggcaggagagcttacattgccgatttcgtttcatttgtgaaaaagaggaacctgagagagagaatcagaggaagaagatgatctataggaagtggagtctccttaccggcccggtcgccattctcggcggcgtagtcgtcgccatcgccgccgcaaacgtcatcttcgtcaagaatgatcctttcctcaaaccagaggagaggaagtatgaaaatgaacctgctaccaagtaggagaaaagagacaacagaagtttgcgttttgatgtcttttaaaccctgatttatgagctctgtatactgttttgcaagacatgctctgggtagttaataagattgagattctgaatggagtctggactctggagcacgggcccttagtttagaactaaccttccaatgttctagaaaactggttcatatttcagagatccttatttttctcttctgtacaatgtcaactgcaaatgtttaatatggtttctaatcttccttttctttcttttatccctatcaatttgctgttaatgcttgcctttttggattattatggcaaaatttacgccttgttgtgcttaatgcttggattgtttcatagagatggcttataaaatttaaatgttagact

SEQ ID NO: 742 - DNA, 1943 bp, Glycine max
  misc_feature (115)..(115): n is a, c, g, or t
  misc_feature (126)..(126): n is a, c, g, or t
  misc_feature (1899)..(1899): n is a, c, g, or t
  misc_feature (1943)..(1943): n is a, c, g, or t
ttttttttttttttttttccataaccaatgttaacaaattgataagttttaattagcttaagttcagttagctacaatatatttttgctttgatacccatccttgttactaacanaaaaatgtganacacttgactacaacatattcaaatggtgataccctgtgaggcaaatgagggagatgaaagtatttaagagatgaaaaagtgaatagggcaaacaaagaagtttggttaagtaaaacctaaaacactagtaattccctaaacacaacttaccccccatgtacttgatattaatgaactctcgataattatccaactttcagctttgtcagccattacatatattttctcaatggaagcagtacagtaccaagatccatgcacccctccatagtggtggactcagagacagaagggtataccattatttctacctttcacagaaagggcttacagaagttagtggatagtttgaacctttaaggtccacctgaagtcaaaggctctctttcttcagaccaacataaacaaccgtgtgcatggcacagcaataaagtgaatatcactgttcactgaggccttggaccaaacgtcctccaagacataaaaggcataaggttttcaggaaacttgacctatagatgacattatgaatgttactgaagggaaccaatacaagctttaatctcttccacattttaaatatgaaatgctacagtcttggcttaggacccttccttctaggaatctctaatgcatcataatgaccaaagccatggtagagaactctaattgggttttctttgccgtactcttgaccatactcagcaattgatatcaaaccaccagcatctttatcatacatgtatactgtgataggcatctgcaaaacatgtgatgcaatgaacaattcgggttcacctccccacacatgaggcttccttatttgtgaaacatatgtatcaaaatcaccttcaacaaaccattcggtctcttcctttcttttgataaactcatcagcaactctggctcgtaaatcatctgccagctctctctgaatgctttcattaggagggggctttccagacctcaaacaggccccacgagcaacagagcggaacaagcatcttccatcccctggtattccaattacagaatagttagtataaactttcttcccatgcaagactttaacatttgactcatactcgttgcagtcatctttcctattttcattttcagaatgtgactcagcatgagcaggttcagaacttaaattacatacaagtaatccaaaaattaagccaactgaagcacatccccgcggccaacttactgatcccaaattacacttaactttgcgcatcatattttgtttaggtaccaaaagcctcatatttatagtttggcatgccaatgaaatttcatgatacctcttccgaggtactacagaactaaagaatcgaggattgcccctttgcttggagcagcatgatccaaggaaacctcctctaattgtttggcccataacagtggagcaagacaattttgtgcaaacagaaagaccaacatgacttatctctgacttcccaggagacaaactggaagaaattgaagtcgatattccttgggaccaaaggccatgaatgttactgctcatcagcagcggagtacgacctttcaggacaacagcatttattgaggactgactagtagaaaagcaaatactcatgtttacattgcctgttgaaggaggcgaaaatgaagagtgggaaaatgggtttggggctctaaagggtattgttgatgtgaaaagcttcaatctggaattgaagaaaagaataataataatagttggaatatgaatgggggaagcaagattttcaaattttttncgattagatgttctaggtaaatgggctcgtgcgaattctgcagn

SEQ ID NO: 743 - DNA, 1653 bp, Glycine max
  misc_feature (20)..(20): n is a, c, g, or t
  misc_feature (61)..(61): n is a, c, g, or t
  misc_feature (108)..(108): n is a, c, g, or t
  misc_feature (853)..(853): n is a, c, g, or t
  misc_feature (878)..(880): n is a, c, g, or t
  misc_feature (888)..(889): n is a, c, g, or t
aaatagaaatctacagtctngctaagacccttcttttaggggatcttaatgcatcatatgnccaaagccatggtagagactctattgggtttttcttgccgtctctgncccttcctcagccattgaattcaaccaccagcattttttatcatacagtatactgtgatagcatctgcaaaccatgtgatgcaatgacaattcgggttcaactccccacacccatgagcttcttatttgtgaaacatatgtatcaaaatcaccttcaacaaaccattcggtctcttcctttcttttgataaactcatcagcaactctggctcgtaaatcatctgccagctctctctgaatgctttcattaggagggggctttccagacctcaaacaggccccacgagcaacagagcggaacaagcatcttccatcccctggtattccaattacagaatagttagtataaactttcttcccatgcaagactttaacatttgactcatactcgttgcagtcatctttcctattttcattttcagaatgtgactcagcatgagcaggttcagaacttaaattacatacaagtaatccaaaaattaagccaactgaagcacatccccgcggccaacttactgatcccaaattacacttaactttgcgcatcatattttgtttaggtaccaaaagcctcatatttatagtttggcatgccaatgaaatttcatgatacctcttccgaggtactacagaactaaagaatcgaggattgcccctttgcttggagcagcatgatccaaggaaacctcctctaattgtttggcccataacagtggagcaagacaattttgtgcaaacagaaagnaccaaatgacttatctctgacttcnnnggagacannctggaagaaattgaagtcgatattccttgggaccaaaggccatgaatgttactgctcatcagcagcggagtacgacctttcaggacagcagcatttattgaggactgactagtagaaaagcaaatactcatgtttacattgcctgttgaaggaggcgaaaatgaagagtgggaaaatgggtttggggctctaagagtttactcataatttgtgattaagcttccattgcagatttcgtttcatttgtgaaaagacgaacctgaaagagagagaatcagagcaagaagaagaagatgatctatcggaagtggagtctccttaccggcccggtcaccatcctcggcggcgtagtcgtcgccatcgccgccgccaacgttatcttcgtcaagaatgatccattcctccaaccagaggagaggaactatgaaaatcagcctgctaccaagtaggagaaaagagacaacagaagtttgcgttttgatgtcatttaaaccctgatttatgagctctgtatactgttttgcaagatacgctctcgctagttaataagattgagtttctgaatgaagtctggactctggagcatgggccctcagtttagaactaaccttccaatgttctagaaaactggttcatacttcagagatccttacttgtctcttttgtacaatgtcaactgcaaatgcttaatgtggtttctaatcttccatttctttcgtttatccctatatataaaaaaaaaaaactcgagactagttcctcgt

SEQ ID NO: 744 - DNA, 2185 bp, Glycine max
tgagaaatcattccatttccggcttatatatatacacataaatgcagcttcttttatttttaatattagacatcactaccaaagatctttctttcagcttcttgttctacaatgaaaagcctctgccttgggccgtttcttgctgctagtgccccagttggtagaagagcctatggaggccacttaagcagaaagtgctttcaaaagcaacttcacttccactcacgttgtgttgctttctcttcattcatatgttctgcaactatatcagtgatgccagaattagaagagaagcaagtgtttgatggagagaaggctaatttgctagttaaagatctcagaaagagctttgattcaggcatgactaagagctatggatggagggtttcccagttggaagccatagctaagatgttagaagagaaagagaaggaaattactgaagctctatataaggaccttggaaaacctcgacttgaagcatttataaccgagatttcccaggctaaatcctcatgtagtgaagcacttaaagagctgaaagaatggatgaagcctgagaaggtgaatacttcaatcacaacatatccatcatcagcagagattgtgccagaaccactgggggttgtgttggtcatctcaacatggaactttcctttcttgttatcaatggatccagtcattggagccatttccgcaggcaatgctgtggtcctgaaaccatcagaaatttctccagcaacatcatcactgcttgcaaatttgatcgaacaatatctagacaactctaccataagagttgttgaaggggctattcccgaaacatctgcactcctggatcagaagtgggataagatactttatacaggtagtgctagagtaggtcgcattgtcatggctgctgctgcaaagcatcttactccagtgattctggaacttggaggaaagtgcccagctgttgttgaatcagatgtcaacttacaagttactgcaaggaggataatagctggcaagtgggcatgcaatagtggacaagcatgcatttctgttgattatatcatcacaagaaaagagtttgccccaaagctggtagatgccttaaaagaagaattggaacaattttttggtaaagatcctatggagtcaaaagacatgtcaagaattgtgtctccaaaccagtttgcgcggcttgtgaatctcttggatgaggataaggtatctgacaaaattgttttgggaggtcagagggatgagaagaaattaaaaattgccccaactatcatattgggtgttcctgaagatgctatgataatgcaagaggagatatttgggccaataatgccaatcgtcactgtagacaatatagaagattgctacagtataataaaatcaaagccaaaacctcttgctgcatatctcttcacaaacaatgagcagctgaagaaggattatgtggataagatatcttctggagggatgctcatcaatgacgccgtcatccatgttgcaactcgtgggttgccttttggaggagttgaagagagtggaatgggttgttaccatggaaaattctcttttgatagtttcagccacaggaagtcagttctctatagaagttttgatgcagattctaccattaggtaccctccgtatacacctcagaaggaaaaattattgaaggcccttattagtggcaatattgttcaaattattctttctcttttggggtggtcttaaggatgataaggtccctttaaaaaaaaaaaacgttcatgaattagaagtactgtactaaaacaatgtgcaagggcagtgactcgtggcttcccactttggttgaagtggcaaaagataattacaattttcccctcgagttttcaatctcatgaagccaattcactatagaagttttgatgcagattctaccattaggtaccctccgtatacacctcagaaggaaaaattattgaaggcccttattagtggcaatattggtcaaattattctttctcttttggggtggtcttaaggatgataaggtccctttaaaaaaaaaaaacgttcatgaattagaagtactgtactaaaacaatgtgcaagggcagtgactcgtggcttcccactttgggtgaaggggcaaaaaataattacaattttcccctcgagtttcaatctcatgaatcct

SEQ ID NO: 745 - DNA, 2735 bp, Glycine max
cttctaccagtcttcctttctatttatttccatctcagtcctttctctcttcacactccactctcttcttctattctattcttttctctctaacaacaaatttaggaacaaaccggggatcttatcaagggcgtttttgtaattttaccctccatgctcacttttactcactcgaaccccaccaacgacactcacttcgtcgccggcgccgccaggttcttctccatggccgcggcggcggttactccggcggtgctcttcacggccctcgccggccttgctgtcgtcgccctcgtcttctgcggtgccagtaggtaaagaaaacctaagaactctttctcgaatgaacgaattagagagagcatcgtcgaaatctcgcaatcgcaaaaaccctagctagagagagagaggatactgttttcgattccgattttgtcacactaaaaaggagaaaacaaaaacaaaaccaaaaaaaagtgtacatagaagggagttatagatgaatccccttagacgaagtcacaattcgcaatcgtcgtcttcgaattcctctccttcgtcgtcgtcgtcgtcttcctcctcgtcgtggatccatttgcgatcggttctattcggtgtcacttcttcctcaccagcttcttgttcgtcctctgatcggggtcgtcttaaatcaccatggtcacgcaggaaaagaaaacatgtcctaacacctcagcaagggaaaagcttgtttacccaagatgggagaatacgggatggtgggaattaagttcttgaaaagagttcgcagtggaggtgttgatcctagtatcagagctgaagtttggccattcctatttggcggctatgacttggacagtacaaaagaagaaagagatgctataagaactcaaaatagaaaggagtatgagaaactccgcagacaatgccgccaactgctaaagcacagcaatgggaactttaagttaaatgaaataggtgaaatcagctatgaaggagatagtgcaagttttattcaagattatggttctcctagttctgaagatgcaacgagtgccagagaatctctttctagtgaggaacgatgcccagatgctgaatattcagatgatccatctagtgccctgttggaaggagatgatgctccaaatatcagcaatgctgatgcctctgcactggatactgattccactgattcagactcctcagaaggtcctgagataattcagacatttccttctgatgatggtcaggaagagaacagttccaagacaactcccaaggaaaattcttctccctcaccgatgaaagtcccatcaaaacaatggacaaatgaagattttgccacatggcaacggatcatccgacttgatgctgtacgtgcgaacgcagaatggatgccatactccccttctcaagcaattgtaccagacagtagggcatatcgttctgctgaggctgttgggttgaaggattatagtcacctagatgccagcagaatctttcatgctgctcgactagttgctattctcgaagcatatgctttgtacgaccctgaaattggttactgccagggtatgagtgatctgctatctcctatagttagtgttatacccgaagatcatgaggctttctggtgttttgttggattcatgaaaaaggctcggcaaaatttccaggcttgatgaggtgggtattaggaggcaacttgatatagttgcaaagattatcaagttcaaggatggccatctgtttaggcatctgcagaagctccaggctgaggattgcttttttgtgtacaggatggtggtggtattgtttagaagggagttgacatttgaacagactctctgcctgtgggaagtaatgtgggcagatcaagcagcaatcagagctggtattgggaaatctgcatggagcagaattaggcagcgagctccaccgacagatgatttattgctttacgcaatagccgcttcagttttacagaggaggaaactaattatcgagaagtatagcagcatggacgagatcctcaaggaatgcaatggcatggcaggacaccttgatgtttggaagctgctggatgatgcacataacttggtggtcacccttcatgacaaaatgaaaatagagacatcattccgatgacctgtagttgatacttttacaaactattagtttataatattggccaaaagatctttgctttcaagctgccagatttctcctctgcatcaaaaaattctgcaaatgtcgagtatatattgcaatgaagcctctgcagctgcatgctgaaaattgccactgcttatttacgagactctgatttcgacaattttggctcatgtgggtattgaagatggctagatttagatggcatggctgcttgctgaattttgccactgcttaatgcttatttacgaggcttagtttcgactatgttgccttaatttggggcattgaagctggttagatttagatggcatcttcttttttttacctctttatttttcacgctggctccatccttttcttttcttttcatttctttttcaattctgatttgggacacatctcggagcacctttgcgaaaagcaggagtggtaggtgcatgtaaccgtttgatgaagaggctgagatattgtcgacaattatgatgttgtcctttttgactgaaggctcaactcatgagtccttttgactcttttagctgctgaccgagttgcatatc

SEQ ID NO: 746 - DNA, 1602 bp, Glycine max
  misc_feature (1564)..(1564): n is a, c, g, or t
tcagctacgtaggccccccccccgcattctcgcatctgcgactgagacagacgcacgcacgacaaagcctaactttcactttcacacgtcaaagaaacaaagccattatcattaagattctcgttcggctcgggatggctgcccgctgaaccctcggaaacacgcattgcggcggtcatgagagggagctgctggtggaaccgtcggacagagcagcgcttccgcctactcgcgatctccaccgttaaatcactcaagatcaagcttctcctctgttgctgcgtcgccttcacgcttctcgcgttttccacaagcgcttcttccttcgtcctatggatcaacaaccaaacgccgcctccacctcctcgcttccccgattccaggaaagggtattctatagtaatgaacacatggaagagatatgatcttctaaagcagtccatcaagcattattcatcgtgtcctcgacttgaatcagtacatatcgtgtggagtgaacctgatcctccgtcagataatcttttaaaatttctgcaccacgttgtaaagtccaagtctaaagatggaagatatgtgaaattgaggtttgatatcaacaaggaagacagtttgaacaatagatttaaagaaattaaggatttggagacagatgctgtcttttctattgatgatgatgtcatatttccttgctctacggtggaatttgcatttgatgtttggcaaagtgcacctgatacaatggttggatttgtacctcgtgtccattgggtggattcaatggaaggtaatgacaacaaatttatatatggcggatggtggtctgtgtggtggacgggtacatatagcatggtgctttccaaggcagcattctttcacaaaaagtatttcaatatctacacaaatgaaatgccatcatcaattagagaatatgtaaccaagaacaggaattgtgaagatattgcaatgtctttccttgttgcaaatgctactggtgcaccccccatatgggttaaaggtaaaatattcgagattggatcgactggaatcagtagtttgggaggtcacagtgaaagaagaacagaatgcgtcaacagatttgctgccgtgtatgggcggatgcccttggtatctacttcagttaaggctgttgatagccgcaatatctggttttggtgacgctggaattttgattttctttgcatttctagtttctagaaattccactaccgtccttttagtagctagttgagttactcaattcacgttagtcacagctgtacaatatattggatcttatacacaattcatgcgttttgtcgctaattgatcaaactccttgggttgatttcttgtattattcatatgtaatacaaggcagcatcctgtggtgcttttttttttcctctcaaaatattaagaatttgattgtagaatattaaagggggcattacacccttagtgatgaagctctatctgtgatacagttttcatttatattattaattattattattcaaaaaaagaaaaaaaaagaaaagaggtgcgtgccgcttctagaggatcncaaggcttacggtacgcgggtgcagtgcgtacgtcata

SEQ ID NO: 747 - DNA, 1614 bp, Glycine max
  misc_feature (19)..(19): n is a, c, g, or t
tcgagtcagctacgtaggncccccccccgaatggaaagaaaaaaaaaaaaacacgaatccattctggtttctgtcaaatatgatctgcgactgagacagagacgcacgacgacaaaggcgaacaatcagtacgctaaagctataacgtttcaactttcactttcacacgtcaaagaaagatagccattattaagattttaagcgattctcgttcggctcgggatggctggccgctgaaccggaccggttcggcttggagagatcttgttgggctcggaaacacgcatttgcggcggtgatgagagggagctgctgctgctggaaccgtcggacagagcagcggttccgcctcctcgcgatctccaccgttaaatcactcaagatcaagcttctcctcttttgctgcgtcgccttcacgcttctcgccttttccaccagcgcttcttccttcgtcctatggatcaacaaccaaacgccgccgcctccgccacctcgcttccccgattccgggaaagggtattctatagtaatgaacacatggaagagatatgatcttctaaagcagtccatcaagcattattcatcatgtcctcgacttgaatcagtacatattgtgtggagtgaacctgatcctccatcggatattcttttaaaatttctgcaccacgttgtaaagtccaagtctaaagatggaagatatgtgaaattgaggtttgatatcaacaaggaagacagtttgaacaatagatttaaagaaattaaggatttggagacagatgctgtcttttctattgatgatgatgttatatttccttgctctacggtggaatttgcatttgatgtttggcaaagtgcacctgatacaatggttggatttgtacctcgtgtccattgggtggattcattggaaggtaatgacagcaaatttatatatggcggatggtggtctgtgtggtggacgggtacatatagcatggtgctttccaaggcagcattctttcacaaaaagtatttcaatatctacacaaatgagatgccatcatcaattagagaatatgtaaccaagaacaggaattgtgaagatattgcaatgtctttccttgttgcaaatgctaccggtgcaccccccatatgggttaaaggtaaaatattagagattggatcgactggaatcagtagtttgggaggtcacagtgaaagaagaacagaatgcgtcaacagatttgttgccgcgtatgggcggatgcccttggtatctacttcagttaaggctgttgatagccgcaatatctggttttggtgacgctggaattttgattttccttacatttctagaaattctactgccgtccttttattagctagttgagttactcaattcatgttagtcacagttgtataatatattggatcttatactccattcatgcgttttgccgctaatcgatcaaattccttaggttgatttcttgtattagatatgtaatgcaaggcagcatcgtgtggtgctgtttccccctcaaaatattaagaatttcattgtagaatattattaaagggttattacaccctaagagatgaagctctacctgtgatatagttattatttaaatt

SEQ ID NO: 748 - DNA, 702 bp, Glycine max
aacctttttaaaacccacattaaaccctgctttctctccctctccctctctgtttctgttccaattcacagagaacaatgcaaatttctcttagcaatttagccttcaagacccctcaactcttcccaatacaccaccccattttccctccaaagccaccactgaaccaccaagtttcaacgcagagccatgtcaacaatgtcctgaaaggttcgtcggggtatttgtccgaaatcagcaaagtgattgatcacgaagaacagtaccgggtagcccggtcgcaggttagccgtaaagttttggacttggaaggttattccatagagggtctttcagttggaggccaagagacatgcatcataatccctgagttcaagtgttcttttgatattgggaggtgccctagtagggctattcaacaaaacttcctttttattactcatgctcatcttgatcacattggagggctgccaatgtatgtagctagccgtggtttgttcaatttgaaacctccaactgtgtttgtgcctccttgcatcaaagaggatgtcgagaagctgcttgatattcacagaacaatgggccaagttgaattgaatgctgaaggtggtcgctttggatgtgggggagacgtatgagatacggaataacctggttgtccgaccattcagaacacaacatgttatacccagccagggttat

SEQ ID NO: 749 - DNA, 1599 bp, Glycine max
tcagctacgtaggcccccccccccctgttattccctcacctcatcacatctgaatatctcacgccgaagaccgtgcgttgaaatcttgcaaggacgagatccaagcatcgttgttttccttcccagaatttacgctcttcttactatcatcaagatacaaaatggaatatcgacggaccagtggtaggcaggaaaccggtggccgtgacagaagacaatctaaaagggaacaggcatatcaggactctcttattgaggatttgtcacaggattttcgtttgccaatcaaccacaggccaacagaaaatgttgatctggacaacgtagagcaagcatctttggacacacagataacatcatctaatattggctttaagctcctccaaaagatgggatggaaaggaaagggtcttgggaaggatgaacaaggaatcattgagccaataaaatctggaattagagatccaaggctggggattggtaagcaagaagaagatgatttctttactgcagaagaaaatatccagcgaaaaaaacttgatgttgagttggaggagacagaggaacatgtgaagaaacgggaggtatgatttataactccttagtagttgctcttagtgcaaaaaccacatagtagtattgaggttgatgtttatattttctcaaacctgcacctcatagcagaaggcagcatatagcatatatgcatgtcttttgaccggattggtatgtcatatggaatcatcaactttggaaggtcttgagaatttcctgcagtttttattacctggtggcttcttctgcctgcttcgtgcacattatgaaaattcaggtgttagctgaacgtgagcaaaaaattcaaactgaagtgcaagaaatccgaaaggtgttctattgtgatctctgcaacaagcaatacaaattggcaatggaatttgaagcacacttgagctcttatgatcacaatcacagaaagcgtttcaaacaaatgaaggaaatgcatggtagtagtagtcgggacgataggcaaaagcgagaacagcagcgtcaagaaagagaaatggcaaagtttgctcaaattgctgatgctcaaaagcagcaacggcttcaactgcaacaagagtctggatcagcaacagttccatcggaatctaaaactgctactgcacttacggatcaggagcagcgaaatactttgaagtttgggttttcttctaaaggcagtggttccaagattacatttggtgccaagaagcaaaatgttgcaaagaagcaaaatgttccgatctcctctatatttagtaacgatagcgatgaagactaatgatggaacattactcgtgaagtgacatatcagcgtgatgatgaatctcctgtgtggtttggtgtggtttggtttgtattagctgttttatttgataattgttgccatcctcggttcaagaggaagaaaacatttgggattatatgatagtttggagtttggtagaccaaaaatgttacctgcttatctgtgaggtaatgttatgtttgtaaggattttatgtttacgagagtagcatggttatgttagttttcatagttcaattattgatgggt

SEQ ID NO: 750 - DNA, 1441 bp, Glycine max
cagctacgtaggccccccccccctgatcactgtacttttcttttccagggaaaacaaaaatctcactggaactgctcggtatgcaagtgttaatactcatttgggagttgaacaaagcagaagagatgatctagaatctctcggatatttgctcatgtattttttgagaggaagtctcccatggcaaggcttgagagctggcactaaaaagcaaaaatatgacaagataagtgagaagaagatgcttactccaatagaggtcttatgcaagtcatatccattggagtttacatcatacttccactactgccgaacgttgcggtttgaagataagcctgattattcttatcttaagagactatttcgggacctattcatccgagaaggttatcagtttgattatgtatttgattggactatgctgaagtatcctcaaattggatccagttctagagcccgaccaagtgggaaaccagtcataaaccccggacaatcaggagacagaatagaacggccttcagggggtttctcaggtgctgttgaggcatttgcaaggaggaatggctctggacttgttctgcaaagtgagcattctaggcataggtcttcagatgatgtgccatcttccaaagacgtgcaagctgattctgagaggcctcgcagctcttctcgtaatggcagttcttcaaaaaagcctgtcttgtcaagcagccggccaagctcttctggtgagccaagtgaaagccgtactagccgactggtcttaagcagtggccgactatcaacaactcagagacttcaacctggttttgaatccaaaacatctttatctcgggcttcggcaacaagaggtggtcgtgatgatacactcaggagctttgaactcctgtcacttggttcaggaaaaaggaaatgaagaactgtgtggtcagcagatttcttgtgtcaagggtcttagttctgccctgatactttcctttgagatgtctacacatgttgattactctgtatatttctatccaatgttgggtccttcaaggctaaaaagctcattgaaacttcttgatgaagatttggcagactcttcttatacttcttctgatgttcttccatgattatttcagcagggactcattcatgaagagatactatgttacttaaggaatttgttaatatatggctacttgtaataaatacattctttatttttctgtcgaaggaaaggagaagcatctgcaaaaatgcttttggatgttttgcacccttctatgcatattttatacccgtctattttgttccaatgtacatttgagggaatggaaatgtcaattgttggctccgattatggataagagaatggaaaggcatcatatttgaattcaaaaaaaaaaaaaaaaaaaaaaaaaaaaaaaaaaaaaaaaaaaaaaaaaaaaaaaaaaaa

SEQ ID NO: 751 - DNA, 2508 bp, Glycine max
gtacgcccgcggtcctggtccggaattcccccgtcgtccccgcgtccgctctatctctcattctcatctcactttcttttctttttcttttcttttcccgaatctgaatttttccctacaaaatccactcactgtcctcaaagacagatccgaaagtggatgccaaatctatcacccctcgtcgcccgagattatcgtacccattagattcttcttccctcttccttctacactttcccaaattttcacactattcgcggctatagagcacaatttagtttatctactcactgttactgcgatttttgtcctacccttttcactattttagctatttctccgatgaagaggaaaagtggtttctttgagtgaccccagaatcgcgattgtgcttcgattcgccgagcaatgggtgttttgtagattctagtttttgatcttattttcgctgatcaaaagttttcttttttgttggtttttgaagtattgggggttagtatagcctgaattttttagttgttaaatacaccttcggatctctgtgttagtggtaaatctcggtggatctgagattgtgctgtaaataaagatgaatcgtttatgagatactcggataaggcaaaaaaaaattttaaaaaaaaaattgaggtgtgtagttgagtgcttccctcgcgtccgtaggatcaagagattgggcttgtatcatggatcatgttattggtggaaaattcaagcttgggaggaagattgggagtggatcgtttggagagctttacttaggtgttaatgtgcaaagtggggaggaagtggctgtcaagctggaatctgtgaaaaccaagcacccacagcttcactatgagtctaaactgtatatgcttcttcaagggggaactggtataccccatctaaaatggttcggagttgagggtgactacaatgtcatggttattgacctccttgggccaagtcttgaagacttgtttaactattgcaatagaaaatcccccccccccccagttctgatgctggcagatcagctaataaacagagttgaatacatgcactcccggggttttctgcatcgcgatataaagcctgacaactttttaatgggcttaggccgcaaggcaaatcaggtatacataattgattatggcctggcaaaaaagtatcgggatcttcaaactcacaagcatattccatacagggaaaacaaaaatctcactggaactgctcggtatgcaagtgttaatactcatctgggagttgaacaaagcagaagagatgatctagaatctctcggatatgtgctcatgtattttttgagaggaagtctcccatggcaaggcttgagagctggcaccaaaaagcaaaaatatgacaagataagtgagaagaagatgcttactccaatagaggtcttatgcaagtcatatccattggaattcacatcatacttccactactgccgatcattgcggtttgaagataagcctgattattcttatcttaagagactctttcgggacctatttatccgagaaggttatcagtttgattatgtatttgattggactatgctgaagtatcctcaaattggatccagttctagagcccgaccaagtgggaaaccagtcataaacccaggacaatcaggggagagaatagaacggccttcaggtgcagttgaggcatttgcaaggaggaatggctctggacttgttctacatagtgagctttctaggcataagtcttcagatgatgtgccatcttccaaagacgtgcaagctaattctgagaggcctcgcagctcttctcgtaatggcagttcttcaaaaaagcctgtcttgtctagcagccggccaagctcttctggtgagcctagtgaaagccgttctagccgactggtcttaagcagtggccgactatcaacaactcagagacttcaacctggttttgaatccaaaacatctttatcacgggcttcagcaacaagaggtggtcgtgatgatacactcaggagctttgaactcctgtcacttggttcaggaaaaaggaaatgaagaactgtgtggtcagcagatttcttgtttcaagggtcttagttctgccctgatacctttcctttgagatgtctacacatgttgattacatttgtatatttccatccaatgttgggtcctttcaaggctaaaaagctcattgaaacttgttcctgaagatttgacagactcttctatacctcttcagatgttcttccatgattatttcagcatggacccattcatgaagagatactatgttacttaaggaatttgttaatatatggctacttgtaataaatacatcctctatttttctgttgaaggaaaggaaaagaatctgcaaaaatgcttttggatgttttgcaccctttctaggccggcctccgaccccccccgtctatttggttccaatgtacatttgagggaatgaaattgtcaattgttggctctggttatggatagg

SEQ ID NO: 752 - DNA, 1071 bp, Glycine max
ttcggctgcgagaagacgaccgacgacgatggtgattatgtctgccttgttcagcttcatattcccaccaccatcttctctggtggtttcggggatgtcagtgataagccttgtgtcactggctaatgctggcttctcagagattagagggaagcatttgaactattcaaagttttggaatgctaatccctctgcagaaaagcaggtcaagttgtctagcaaagctggcatgcttttgctgtacactcctgcttttcttgctggccttgcatccttctggatctttcctcatcaaggcctcagatccaccctccttcagtctgcagttaccctgcatttcttcaagagggtctttgaggttgtgtttattcacaaatatagtggtgccatgcttcttgattctgcaatccccatcactctgagttatttcctatcaactgcaactatgatctatgctcaacacttaacacaagggcttccagaaccaccaatcgatctgttgtatcctggcattgttttgtttgtggtgggcatcattggcaacttctaccaccactaccttctatccaacttaaggggaaagggtgaaaaggagtacaagattccaaagggtggcatgtttgagcttgtcatatgtccccactacctgtttgagattattgagttttatgggttctccttcatttcgcagacgctatatgcattctctttcaccgtaggcactactttatacttgctaggtaggagttattcaactaggaaatggtatctttctaagtttgaagatttccctgagcatgttaaggctatcatcccatttgtcttctagaaatgttggaaggaataactaattttactttcatttctcagacgctatatgcattatctttcactgtaggcgctactttgtacttgctatgtaggagtgattcgactaggaaatggtatctttctaggtttgaagatttccctaaggatgtaaaggctatcatcccatttgtcttctaaatgttagaatggaacaactaattcttcttgagttatacatgtgctagattgtgttttttggcc

SEQ ID NO: 753 - DNA, 1870 bp, Glycine max
tcagctacgtaggcccccccccccaatttaaaattatttacatattacacacatcgattctcacaaacatataattcatccctcatttctcttttcgttctctccaatttcccgaaaccctaatttcctcaatcctggttttggaattcgacaatggagcagaagaggagcagcaagatgtacaacctgttcgtgaagcacttggacgggaaaaccctaaccctcctattcccctctccgatcctctacgcgagttccatcaaggatcgcctcttccaactcactggaatccccgcccaccaccagcgcctcgtcaccggctgtcgccacctcaacgatgacaaatccgctatccagtgctccccgggggacggcaacatgtttccctccgtgcgcctcctcctgcgcctcaagggcggcaagggaggctttggctcgcttctccgtggcgccgccaccaaggccggccagaagaagaccaacaatttcgacgcgtgccgcgacatgagtggccggaggctgaggcacgtcaacgccgagaagaggttggaggaatggaaggccggagaagaggagaggaagctcgagaaggtggccgaggagtttctcaagaagcagatgaagaagggcaagggaaagggtaagggtgaaggtgacggtgaggcccacaagtatgtcgcaaaatatagggaggaatctgaacgttgtgttgccgaggttgccttgtctgttaaagaggctctcactgccaagcgcaagagcccttcacaaccccaccatgatgctaagaagttgaaaatatggatggggaagaggaaattgaatgaaagtgatagtgattatagtgatgattctgatgaagagggggagatggagaaatcggaattgttgaatggcccgaatgagttgggctcaaataaggctgagggcagtttgggttcggtaaatgggggcggaggctcttctggtgctggctcgtgtgaaagtgggtctgaagaagagaaggaaactgctgtggatggaaatgtggtatctgttgggatgctgagtggtgaaattattcacgccacagctgaacctgtgataatcaatgaggctactgaaatgccaaaggggtcggtggttgctgaagataatcaggattgtcatggaggtgtgtctgacaagtttgatggtactgtgaatcaggccttgaatgttatgggctctgaaaccgtggctagtgctggtgaatctaatgatatggaaattgatggatctcttgagcataaagcaactgtcaatgaaggaagttcaccaagcactagtgttcctgtgttggaggagcccctgaattttgatgcctttaattcagctgccgaacttgaggttcttggcttggaaaggttgaagtctgaactgcagtcacgtgggttaaaatgtggaggtactttgatggagcgtgctgccaggctttttctcttaaaatcaactcccctggatgaacttccaaagaagctgattgcgaagaagtaaggagatttttgagaaggcagttatttctctgtacagtatttcttaactgtttgcaccttgtacttgggtgtcagttgtatcctctgatgacttgtggaactctgactgatgcatgccttttctgttcgttttagtgttcatattgggctgtattttgatgtaataaataccgttaccagcagccaaaggaagctgaacactgtataacccaagaattatgcattataaacaattccaacttttctttttggtattgtattatgagataatgacgagtatcatcaatggccggatattattgttcctaatttatccaactatttattattattaaaagaaaaaaaaaaaaaaaaaa

SEQ ID NO: 754 - DNA, 1691 bp, Glycine max
ggctcgaggtccgttttgagataggaatgaggaacataaacgaaaatcagaggaatgagtgagactgggaaccccgttttgtttcactttcctcatccccaaccccaaccccttataacactcaaaaacacgcacgcagacttagactcactcctttccatttccaacgcaatggacccatggctcgacgatcttaccgacgaccttcagagtcttagcttcgcctccaccgccaccgcggacatcaagcggagcaccagcttcggctccgaaaccaccaccctaacggcctcctcctccgcccacctccccgccaacagcaagccccacgcgccctcctccgacccccgctgggccgccatccaccggatccgatcggactcccccagccgccgcatcctcccctccgacctcctcttctcccgccgccttggctccggcgacatcagctccgtctacctcgccgaactcaacgacggctccctctccgtcatgttcgccgccaaggtcatggacaagaaggagctcgccagccgcagcaaggagggaagagccaagaccgagcgggaaatcctcgaatccctcgaccaccccttcctccccaccctctacgccaccatcgacgccgccaaatggctctgcctcctcaccgagttctgccccggcggcgacctccacgtcctccgccaacgccagccccacaaacgcttccccgaacccgccgtcaggttctacgcgtcagaggtgctagtggcacttggatacctccacatgatggggatagtgtaccgtgatctgaagccggagaacgtgttagttcgatcagacggccacatcatgctcactgattttgacctctcgttaaaatgtgatgattccacatcaacgccccagatcatcttggatcagaaaaacaccccacacaaggacccccgcgtggatccctcgcagtctcagttcacctcgtcttcctgcatactacccagctgtatagtccccgccggggcgtgtttccacccaaaacgcaagcgcaagaagaagcaggcccaccacaatgggcctgagtttgtggccgagcccattgatgttcgctccatgtccttcgttgggacccacgagtacctggctccggaaatcgtgtccggggagggccacggtagtgccgtggactggtggactttgggcatattcatatttgaattgttctatggtgtcacgccctttaggggaatggacaacgagctaaccctagcaaacattgtggctcgagccttggagttccctaaggaaccctccgtgccacccacggcaaaggacctcatctctcagctattggttaaggacccttcgaggaggctaggctcaacaatgggtgcttcctctatcaagcaccacccctttttccaaggtgttaattgggcattgctaaggtgtactcctccaccctttgtgcccccacattatattaaagaagctgtatcatctcatcatgaaattgaaacttgtccgcagactcccattgattattattgatggtcatagggaggagattcatgatgtacagttaataagatagttccaccagatttaatcaaaatcttctcctccgtttaatttttcaccaactttttttagcaaaagtgtaattgtcaaccgactatgatactaataattaagattgatgataaaaa

SEQ ID NO: 755 - DNA, 1230 bp, Glycine max
  misc_feature (1157)..(1158): n is a, c, g, or t
  misc_feature (1171)..(1173): n is a, c, g, or t
cctggctgtgaataataacagaaataaggaaattatgttagctgcgagaagacgaccgatgggggaggaaatgatttctaaaactagttcttatggttgtacaactgctctttatttgaatctctcttgccttgaagaagccaagcctatgattggcgtgactcaggctgtccagttcctaatccagcttcttcaatctgactctgatgttcaatgcaagcaagattctctccatgctctctataatctttctactgtgccctccaatattccatgcctcctttcatttggcatcattagtggcttacaatcccttcttgtaggcgagggggattgcatttggacagaaaaatgcgtagctgttttgataaatttagctacttctcaagttggaagggaggaaattgtatctactcctggactcattggtgcattggcttcgatattggacaccggtgagctcatagaacaggagcaagctgtctcttgtctcctaattttgtgcaatagaagtgaggaatgcagtgagatggtcctgcaggaaggggttataccagcattggtttcaatatcagtgaatggaactccaagaggtcaagaaaaagctcagaaactcttgatgttgttccgagagcagcgacgagacccttcaccagttaagacacatcagtgctcacctgaagctagtgatttgtctatgccgcctgctgaaatgaaaccgctatgcaagtccatttcaagaagaaagtctgggagagcttttagctttttctggaaaaacaagagctattctgtataccagtgttaagttccactggttgttgtaaatctgtgttagcatgtttacttttgtggccctgtttttatcctcctatccttcctcttcccgtggggtgctgcttatttttggttcaaagcgaagaagagatgtacaggcctttgtaatttatggattttgttttcttctttcgctttcctctttgtaatgtcaattttccatgtggtgttgtttttttttttttttttttccggttcatgttcgagggtgtttatatttcactcggggcttcaattcttagacttacaattttgaacgttaactgtgaactagtaactatcttaaggtgtttcatggtgaacccactatagagtgttcnncaatagtacgtcnnngtaaagagtgcaagttctgttagaacctcagcgtatgtcgccgtagccattaggcca

SEQ ID NO: 756 - DNA, 846 bp, Glycine max
ctccttatcttaaacaccagtccctgaaggtccctcgaaacgtgctctctcgccaacgtccattctgtgcagtggagctcgcatagtgaggtcgcccctgccgtgacctgtctgccatctcgaagaagtgttatctgctgtgcgccttaggtcatcgtaccggaaaatgagtgacatgttaacaacatttacgaagaagaaagaggtggataccatcatcagagacacctttgataaagtcgtggtcctccgctttggtcgtgcctctgaccttgtctgtctccagcaagatcacattctttctaaagcagcaagggatgtgtccaagtttgccactgtggcactggttgatgttgactctgaggagattcaagtctatctcaagtattttgacatcactttgataccatctacagtgttctttttcaatgctcatcacatgaaaatggattatgggactgctgatcatactaaatggattggtgctttttacgcaaagcaagacttcgtagatgttgtagaggcaatatttagaggagcgatgaagggaaagcttattgtgaattgtcctctcccgccagaaagtataccaaaatttcagatactatacaaggatgtctgaaaattgaactcaaccctttactgcttttttttttctttttcatagggatagtttgtaaatacaccaatggtcactgttctgttttcttgtctttctcctttttgcttagcatgcactgacccgtaagcttgtgtctattgaattttttctcactgttgattcatgaaataaaagtcggttggttctctcccaaaaaaaaaaaaaaaaaaaaaaaaaaaggaaag

SEQ ID NO: 757 - DNA, 3414 bp, Glycine max
atcacaacacatggaagtgactctgatgagcttgcaggatcaccactgtgcatgatcaccaagtggaagttgttcgttcttccgtttttggcagacaaattgagaaaaagaatacaatttcagctcttcttttggtctctgaaacgtttttttccccttcatgggtgaacacgcaattcctcaatgttttcagcatctaatggcgaaaaaattgctctttttgttgacccttttggaaattctcctttgtgggcaatccaagtttatggtgtacaacacttcccaaggcatagtccctgggaagctcaatgttcatctggtagctcacacccacgatgatgttggttggttgaagaccgttgatcagtactatgttggttccaacaattcaattcagggggcttgtgtgcaaaatgtcttggactccatggtgcatgctcttctggctgacaagaacagaaaatttatctatgttgagatggcctttttcaagcgatggtggagagatcaaagtgaagctgttcaggatgtagttaagaaactcgttagttcgggtcaactagagttcataaatggtgccatggctatgcatgatgagggcagtaacacattacatagacatgattgatcagactgcacttggacatcaatttctaaaagaggaatttggtgtgactcccagaattggttggcaaattgatcctttcggacattctgctgtgcaggcttacctgttgggagctgaagttggctttgactcatttttctttggtcggatagattaccaagatagggctaagcgcaaaaaggagaagagtcttgaggttatctggcagggtagcaagagccttggcccctctgcccagatctttgctggagcattcccagaaaattatgagccaccttcaggattttactttgaagttaatgatgcctcaccaatagttcaagataacatgcaattgtttgattacaatgtccaagatcgagtgaatgactttgttgctgctgcattattacaggcaaacataactcgaacaaatcacataatgtggacaatgggggccggttccaagtttcaatatgcacatacatggttccgacagctggacaagcttattcattatgtaaacatggatggacgtgtcaatgctctgtactctacaccatccatatatactgatgcaaaatatgctacaaatgagtcctggccaatcaagactgatgatttttttccttatgcagatcgagcaaatggttactggacaggatactttaccagtaggccagctatcaaacgctatgtcagattaatgagtggctattatttggctgcaagacaactagaattttttagggggagagtgaattcagggccaaatacagactcattagctgatgctttagcaattgcgcaacaccatgatgcagtcactggcacagaaaagcagcatgtggccaatgattattctaagcgattgtcaataggctacaaggaggcagaggaattggtttcatcatcgctggcttgcttggttgagtcaccgttgcttactagatgtcaaaatccagttacaaagtttcaacaatgtccacttttgaacataagttactgtcctgcatcagaagttgatctggttcaaggaaagaatttggttattgtagtttacaactctctaggttggaggaggaatgaagtgattcggattccggttattgaggccaatgttagagttcatgactctaatggtatagaaatagaatctcaacttcttcctcaggctgagaaatatgtagacttaagaaattactacgtgaaggcatatctaggacaaactccacccaaggcacctaagtactggcttgcatttacagtttctgtaccgccacttggttttagcacatacactgtctcaactgccaaaaggacagggtccacaagatcatcagtagatatatataagagtagtgaaaagtctaaatttgatgttggtcaaggaaatttgaagcttacattttctatggatcaagagaagtgtaccaattatgttaatataagaaacctggtcgaggaacaggttgaactaagttacctatactattctggatacaatggaactaatcaaaaagatccacagaattctggggcctatatcttccgtccaaatggcacacatcccataaaccatgaaaaaaaggttccattgactgttttgcatggacctgtgctagatgaagtgcaccaacaaatcaatccatggatatatcagattaccagactatacaaaggaaaggagcatgttgaagtggagtttattgttggccctataccaattgaagatggaattggcaaagaagttgccactcggatttcaactactatggaaaccaacaacatgttttacacggattctaatggacgtgattttatcaaaaggatacgagactacagaacagactgggacctagaagtgaaccaacctgctgctggaaattattaccctattaatcttgggatatacacagaggataataaaacagaattctcagttttggtggatagagctattggaggatccagcttacaagatggacaaatagagctgatggttcacaggagattactacttgatgattcaagaggtgttgatgaggctctaaatgaaacagattgtgtcggtgatgattgcaggggtctaactgtccaaggtaaattttactacagaatagaccccttgggtgagggcgctaagtggcgtcgtacttttggccaggaaatatattctccacttctgttagcctttgctgaaaaggatgataaagatgactggatgaattcccgtgtattaacattttcaggaattgattcttcttatgcattacctgataatattgctattataacattacaggaacttgatgatgggacagttctgcttcggttagcacatctatatgagattgaagaagacaaagatctctctgtaattgcaactgtggagctgaaaaagctcttgcctgggaggaagatcaaggaggtgaaggagatgagtttatctgccaatcaagaaaggacagagatggagaagaaaagacttgcttggaaagtagaaggctcttctggaagtaagcaagtttcaaggggagggccagttgatccaaaagagctaaacgtggagcttgctcctatggaaattcgcacttttatccttgactttgatgatgtgtctaaccaactttttgatgcattgtagaacaaaatcatttcttctagtccttgcttctgaacaagcatattggtatatgacaagttcagctatatgataacctctcataaattacgtttcaaatagtagaatgttttgcttaatattatatcttaccttcccccatatcaaaaaaaaaaaaaaaaaa

SEQ ID NO: 758 - DNA, 699 bp, Glycine max
cctcgtgccgattttgatgatgtacacattattgaatactttgggaagtatggcgatccagagaattctttagttttgttttaccatttgtttttacaacatttttggagacagaatgactatgtccagtctgatcaacaagctttttattatttggagaaagctgtggaccagttgcatccaggtgctctttaccttttgggtgctgtatatttgacaggcgactgtgtcaagaaagatattgcttctgcattgtggtgtttccacagagcatcggaaaagggccatgctggggctgctatagcatatggatctcttcttcttaaaggtgttgaggttccagaatcggtaataaagttcagtttgacgagaggtgctgcagctcatagacgggggaggaataagggagctcttgcaattgatccagtagagatggcaagagaaaagtttcagatagcggcaaaagcagggtgtgagcttggattcaaatggcttgcaaggttagaggaggaagagaaacgggcactcacggaggaacattgagatgaaattgagaagtgtagtgtgctttttttctctctcttttttttttttttgtagcagaatgcgatctgaattatatgatttagcttgtctgaattgttgattttaatcattggtgaaaaacaataaataaaggtgtggatgtttgtcattgta

SEQ ID NO: 759 - DNA, 1824 bp, Glycine max
tgtacggctgcgagaagacgacagaaggggattgcatttcactgaaacgagaaaagcgtgtcgaatggatttcacggagaaggatctattcggcgaagattccgacaacgacaacgggtcccactcctccggttcctcttcttcttcctccgccgcttcctcttcctcatcatcctccgcctcctcttccgcctcttcctccaaagccagcgacgccgccgccgactcctcctccgccagcggcagcgcaagcagcggcgccgaaaacgacgacgagaatggcgacgtcgtagatagcaccaaagtccgcgcccatcaccatcacgactacgaagacaaagatctgtttggctccgataatgaagattactgtaaaaccctcgctagaagtccttaccccattcctgtattgcctgccatccgcaatgtgcataatcagggtagaggggggtttggccgtggtcgttggcaaaatgatagaggagctggccttcttcctcgtcccggaccttatcctcagaggcagaattttgggtatggaaataggtttcaggatggccgccatgacgagcgatttgtctctgagttgaagctttcaaaaagtgaagaaactctatcacgaaagtgcattgcttttcaggagccttgtgaagttgcctgctatagtcgtgccgaaggcggagaagtatacttcgacgatcgtagcttgagactttttaagcgccatatcactgaggatgttggagctgatttgaatgaaggttatgatacatacattcccaaaaaagacttaggctcacagggatttggtgatcttcttgcttgcattagagacaaaaatatcccgcttcaaaacattcattttgtgacattccgtaacaatcttaacaagatactggcaacagcttatatccgtcacgagccttgggaaatgggagtgcacaaaaggaatggtgttgtctatcttgatgtgcacaaattatcagaaaaacctcaaagtgatttggatcgcaggagatgttatgtaggatattgttttgagagccttgcaactgaagatcctaatagagcagatggagaggggatacatcatgttgatgccaatgttgaattttgtgctgtgattaagacaaaattaggagctcaccgcatcttaatgggtgctgagatggattgctgtgattcgactaatgagggaaagagattttatgtggagttaaagacaagttgtgagttaaattatcacaccgaggaaagattcgagagggagaaactgttgaagttttggattcagtcattcctggctggtgttccatatattgtcataggatttagggatgatgcaggtcgtcttgttcggacagaaagacttagaaccaaagatataacacagagagtgaaaatgaagaactactggcagggaggagtctgcttggcgtttgctgacgaggtattatgctggctgtatggaacagtcaaagaaggtgaagattatattttgcagtttgctccacctttcaaccgattggagcttctgcaatcccagtcttgcccagatgtaatcactagtcatctggagctgttgtgaaaatttagagaacttaacagttattatttaaacaactcaatatacgaagtaaggggaatcaactctggattttcccccgctgctttgatcagttcactaatttgtagtatagggggcaccctctgtgagtgctgagaattgcattcgcatctttatagaaatttgtggaaatattatggccttgcttagttggaatatagtagttcttcattccaaaaaaaaaaaaaaaaaggagg

SEQ ID NO: 760 - DNA, 1185 bp, Glycine max
aactatttcgaacactctttcccttactcactccaagcctcacattctctaaaaaataataataataataatagtaataacatcatcgtatcatggcagcagccactctctccgttcgtcccgaccgtctctcgcccggtgcggcgtttcccagaccgccggttcagcctccgctgcgaaaaccaatcgcggcgcccgagccgtggcgcgccgtgccgccacgtatacgcatcaggacggtggcgccggtccaggcgagctcgcgcgccgatgactccgcgccgttcgagatgtcggtggagaacgcgctgaagctgctgggcgtgtcggagggcgcttccttcgacgacatactccgcgccaaaaacgcaatcgttgccaattgcaacgatgaccaagatgccattgcgcaggttgaagctgcatacgacatgttgcttatgcagagcctaactcagcgtcgggcagggaaagtagtgaacagtagtgttcgttatgctgatgtcaaacgtgttaagtccccagctgggggatcaatgcctcaatggttgaagaattcacctgtatctattgagtcaccttccactagtgatttgggtttacaagctggagtgtatggtgcattgatgggtttaacttatcttaatggggcttctgcacccgccgcaggttatgctggggctgatgttcctggactcctcttggctggtagctttggagcttccctgtacttcatgaccaaaaagaatgttaagttagggaaggccactgtcataaccataggagggctcgtagctggtgccgttgtagggtcagctgtagagaactggttgcaggtagatatagtcccattcctgggcatacactcccctgctgctgttgttagtgaaatcattattatatctcaattcttggtttctctgtacctaaggtaaacaggaaaacatggggatcttacattaaattgtgaaacttgtaattattcatttgcatgcagcatgacctaaggtagtcagggaaggctgctgttataacttataaccataggactcgtagctggccccctgtggttgtgtcagctggagagaactgttataccatttctgggcatacactctcctgcttctgttgttagtgaaatcataattctctctcataagttggttttctctgtaaaaaaaaaaa

SEQ ID NO: 761 - DNA, 1887 bp, Glycine max
gcaacaaatcaatctttatgtgatacaagcacctctctctcccctctcttttcctcaaaccaataaagccaatcaccccccacaccacacttcactctctcttcccaaaacaaaacaaaaaatggctgaaactctaaacctcccattgctactctcagtctgcatcatcttcacaaccctctctcttacaacctctcgcacgatcacaaccccatcacacaccaatgttctcgatgtctcttcttctctccaccaagcccaccaaatcctctccttcaacccacaacttctagaagagcaatcttcagaaacagaaactcccacttcaccatcttcttcttcttcttcattctctctccaactccacccaagagaaaccctcctcaacgagcaacaccccaactacaaaaccctagttctctcccgactcgcccgcgacacagcccgagttaactctctcaacaccaaactccagcttgccctctccagcctcaaccggtcggatctttacccgaccgaaacggaactgctccgacccgaagacctctcgacgccggtctcctccggcaccgcccagggcagcggcgagtacttctcacgcgtcggcgtggggcaaccctcgaagcccttctacatggtcctcgacaccggctccgacgtcaactggctccaatgcaaaccctgctccgattgctaccaacaatccgacccgattttcgacccgacagcgtcctcctcatacaaccccttaacctgcgacgcacaacagtgtcaggacctcgaaatgtccgcttgcagaaacggtaaatgcctctaccaagtctcatacggtgatggctcattcactgtaggagaatacgtcaccgaaactgtgtcgttcggagccgggtcggttaatagggtcgcaatcggttgcgggcatgataatgagggtttattcgttgggtccgctgggcttcttgggcttggtggtgggcctttgtcattaacttcacaaatcaaagcgacgtcgttttcgtactgtttagtggatcgcgactcgggaaaatcgtccacgctcgagttcaactcacctcgacccggtgactcggtcgttgcaccgttgttgaagaatcagaaggtgaacactttctactacgtggagctcaccggagttagcgtcggcggggaaatcgtgaccgttccgccggagacttttgccgttgatcaatccggcgccggaggtgtgattgtggattctggaaccgcgataactcggttgcggactcaggcctacaactcggtgcgcgacgctttcaagaggaagacttcgaacctgcgtcccgcggagggggttgcgcttttcgacacgtgctacgacctgtcgtctctgcagagcgtgcgggtgccgacggtgtcgtttcacttcagcggcgacagggcgtgggcgctgccggcgaagaattacttgattccggtggacggtgccgggacttactgcttcgcgttcgcgccgacgacgtcgtctatgtcgattattgggaacgtgcagcagcaggggacacgtgtcagcttcgatctagcaaactctttggtgggattctcgcccaacaagtgctagattagatagatcttgtaatttacatatttaaccctgttgttgttattaataatttatggtgatatatagcggtaggtttctattattaaaagcctaatgggacccactcaattaagtttgagaaggttttgcttttgcccttggaccttggattgtgtgggatcgtatgcaattgaattgaatactctctcgatggcttcgaaatttgatcaagatgaggccatttaggttttaagaataaaataataaagagaatactgctttctagtaaaaaaaaaaaaaaaaaa

SEQ ID NO: 762 - DNA, 1769 bp, Glycine max
  misc_feature (1769)..(1769): n is a, c, g, or t
tcagctacgtaggcccccccccccacaacattacttctttagtatcatgggagaaaacctcaccacaagggtcagaagaatgatgcttgccgctattttgaggaatgaagttggatggttcgatgaggaggagcacaactcaagccttgttgcagctcgccttgccacagatgcagctgatgtcaagtctgccattgctgagagaatatcagtgattctacagaacatgacatctctccttacttctttcatagttgctttcatagtggaatggagggtttccttgctcatcttggcaaccttccctctccttgttctagccaattttgctcagcaactatcactaaaagggtttgctggagacacagccaaggctcatgcaaagacaagtatgatagcaggagagggagtgagcaacatcagaacagttgcagcattcaatgctcagaacaagatgttatcagtgttctgccacgagcttcgtgtgcctcagagccagagcctgcgccggagccagacatccggcttcttgtttggcctctctcagcttgccctctatgcttccgaggctctcattctatggtatggtgcacatttggtcagcaaaggtgtttcaaccttctccaaagtcatcaaggtgtttgtggtcttagtgatcacagcaaattcggtggccgaaaccgtgagccttgcaccggagattatccgtggtggcgaagctgttggttcagtgttctcaatccttgatcgctcaaccagaattgaccctgatgatcctgatgctgatccagttgaatcgcttcgcggggagattgagctcagacatgttgattttgcgtacccttctaggcctgatgtgatggtgttcaaggatttgaaccttaggatccgtgcaggccagagtcaagcccttgtgggggcaagtggttcggggaagagttctgttattgcattgattgagagattctatgaccctattgctggaaaagtgatggttgatggaaaggacattaggaagttgaacttgaagtctttgaggctcaagatcgggttggtgcagcaagagccagcactttttgcagcaagcatttttgagaacattgcatatgggaaagaaggtgcaactgaggctgaggtgattgaggccgcacgtgctgccaacgtgcacgggtttgtgagtggtttgcccgagggttacaagacaccggttggcgagagaggtgtacaactctctggagggcaaaagcaaaggattgctattgcaagagctgtgcttaaggaccccacaattcttctactagatgaggccacaagtgcactagatgctgagtctgagtgtgtgctacaagaggccttggagaggctaatgaggggtcgcaccacggtgctcgtggctcatcgtttgtcaacaattagaggggttgattgcattggagtggttcaagatgggcgcattgtagagcaagggagccattctgaacttgtcagcaggcctgagggggcatattctagactcttgcagcttccccctcctccctttggggggggattattgttttttttttatttatttatttgatgaatatgaccttgtgggggtgataaattatgtttgggtcctattaacctcatgctttggtttagatgtagatatgtgggatatgaggtttgtatcttgaggacaaagtgatctatttccaatggggtatcaattattatatttaatcacaaaaaaaaaaaaaaaaaactcgaactagttctcaaaaaan

SEQ ID NO: 763 - DNA, 744 bp, Glycine max
  misc_feature (63)..(63): n is a, c, g, or t
tcagctacgtaggccccccccccctcttcctcttcctctttcttcttcacccactccacccanaaatccaaacacgcccttagcagaatggaccctaatccccgcactatccgcagcctagtctcgaagctcagctccgtctccgaagccgcccgcatcgacgccctctcccagctccgcctcatgtcaaaacaatcccccgaaacgcgccccatcatcgcccaagcaggcgcaatcccctacatcgcagaaaccctctattcctcttctcacccctcccaagaagacgccgctgccacactcctcaacctctccatcaccctaaaggagcccctcatgtccacacgtggcgtcctcgacgccatcgcccacgtcatctctcaccaccacaccacctcctctccccctgcggttcagtccgccgccgccaccatccacagcctcctctcctcggtcgactcctaccgccccgttgtcggctccaagcgcgagattgtctactccctcatcgacatcctccgctgccacctctcgtcacctccccgcactatcaaggattcgttaaaggcgttattcgccatcgcgcttcatccgattaacagatctacgatgattaaccttggtgcggttcccgcgcttttttcgctggtgttgaaggacggtagggttgggattgtggaggaccccacggcggtgatcgcgcaggtcgcgggatgcgaggacgccgtggatgcctttcgcagg

SEQ ID NO: 764 - DNA, 901 bp, Glycine max
agaagctgtttgggccgtgcgaatgggagaggtttgatttgcttgttttgccgccgagttttccttacgggggaatggagaatcccaggatggtgttcttgacgcccactgttattaagggggatgccaccggtgcacaggttgtggctcacgagcttgctcacagttggactgggaatttgatcactaacaagaccaatgaacatttctggttgaatgagggattcactacttatgcggagaggaggattgtggaggctgtccaaggagaacaaagagccgcgttgaatattggaatcggttggaggggtttgaatgaggacgttgagaggttcaaggacaacttggagtttacaaagctcaaaaataatcaggaaggaattgaccctgataatgtctattctcaggttccctatgagaaaggttttcagttcttatggcgcattgagcgacaggttgggagacctgcatttgatgagtttctgaagaaatatattgctaccttcaagttcaaatccattgataccgaaacattccttgacttccttaaagccaacatccctggcatagagaaccagattgacctattgctgtggactgaaggtaccggcattcctcctgatgcttatgaacctgaatccactgcttataaaacgattgtatcactggcaaatgagttcacaaatgggaggatgccaagggaggatgaagttgctggttggcaaggtcaggagtgggagctctacttggacaacttgccaaaatccattgaagcttctcaggtcatagacttggattcacgctacaagctatctgagtcaaaagattacgaggtaaaggtgtcatttctccaaagggctatttcatgtggatgcaaaacttactataatgaggtagagaa

SEQ ID NO: 765 - DNA, 1376 bp, Glycine max
gtttgttttgtgctttagataaaagttctgccaaatcaagaggggttttaagatcatagtgtgtgttttgcaacaatggctaagttctttgctgctatgatcttggcactctttgccatttccatacttcaaacagtggttagtcttagtcttcaatgtcggaaaatcagacacatttacacacaccacaatgtttttgtttttggtgccactaatgcatggttgaaatttgaagggttcttagttcttacatttgaaaggcttgatttttcaggtaatggctgctaatgaacaaggaggccacttgtatgacaacaaggtatatatatccttacctattcttcactctcttgtctctctttctttgtggggtgtgaagaataaaaaatggggtcttggggttttgatttctaagggttgaactagtgctgatttatgctgctttactgtgtttttcttcttcagagcaaatatggaagtggaagtgtcaagagttaccgtaagtaaagttcttgtcttcatcttctcattttatggtacatctagcaatgtagaacattatgatatttctccaaaatggaagaaggaaattttttaagacccttcccaaaagctcgcagagcagatctagcattgttattttgtttttttttttttagttaagacaaattatactcccattatttgtactactcttgtcaaagttctaaactaacgaacactatttgtactcatttttttataaccgtgacccccgtacactcgtcctcacagtcaattttagtttgactgtggtcaattttcccccccgtaaaagctgcttcttttggagtgttttgactgatgtgtgaaaagaggcgagtcaaatggctattgattattgtattgaccataatgcttgttttgtttattatcaatggtcatggtgcgtctcttattctctttttggaatctgatatgaccagaatgcccatcacaatgctcgaggagatgtagccagacccaataccacaagccctgcatgtttttctgtcagaagtgctgcaggacatgcctgtgtgtgcccccggggtattatggtaataaagctgtgtgcccttgctacaacaactggaagaccaaggaaggaggacccaagtgcccttgagcttcaacttgttcaacttcaattgtcgctttcctacatttttattgcttccttccttgtgccaatttaatgcactagctaccaaatgctactagtcccttttggtggcattctatgatattatgtttttatgtattttggtgtatcactccttgggccttgtttgcctttaatgagagtggcttattaatatcaatatatcacctaccaaacttattgctagcatata

SEQ ID NO: 766 - DNA, 786 bp, Glycine max
  misc_feature (749)..(750): n is a, c, g, or t
  misc_feature (752)..(766): n is a, c, g, or t
  misc_feature (772)..(775): n is a, c, g, or t
  misc_feature (785)..(785): n is a, c, g, or t
aatgtttctaaaaataccccacacatcaattgctttgatcccagcatctcctcaaaactcaagcattgcatccctcttgatttgtagtttgttttgtgctttagataaaagttctgccaaatcaagaggggttttaagatcatagtgtgtgttttgcaacaatggctaagttctttgctgctatgatcttggcactctttgccatttccatacttcaaacagtggtaatggctgctaatgaacaaggaggccacttgtatgacaacaagagcaaatatggaagtggaagtgtcaagagttaccaatgcccatcacaatgctcgaggagatgtagccagacccaataccacaagccctgcatgtttttctgtcagaagtgctgcaggaaatgcctgtgtgtgcccccggggtattatggtaataaagctgtgtgcccttgctacaacaactggaagaccaaggaaggaggacccaagtgcccttgagcttcaacttgttcaacttcaattgtcgctttcctacatttttattgcttccttccttgtgccaatttaatgcactagctaccaaatgctactagtcccttttggtggcactctatgatattatgtttttatgtattttggtgtatcactccttgggccttgtttgcctttaatgagagtggcttattaatatcaatatatcacctaccaaacttattgctagcataaaaaaaaaaaaaaatgccttggctaaaaaaaaaaaannannnnnnnnnnnnnnncccccnnnnaaaaaaaaant

SEQ ID NO: 767 - DNA, 852 bp, Glycine max
aatccccacccttcaatgtttctataaataccccacacatcaattgcttcgcatcccagcatctcctcaaacacaaacatccctcttgatttgaaggttgttttgtgcttatagataaaagttctgccaaatcaagaggggttttcagatcatagtgtgtgtgtgtgtgtgttaaacaatggctaagttctttgctgctatgatcttggcactcattgccatttccatgcttcaaacagtggttatggctgctaatgagcaaggaggccacttgtatgacaacaagagcaaatatggaagtgggagtgtcaagagataccaatgcccatcacaatgctcgaggagatgtagccagacccaataccacaagccctgcatgtttttctgtcagaagtgctgcaggaaatgcctgtgtgtgcccccggggtattatggtaataaagctgtgtgcccttgctacaacaactggaagaccaaggaaggaggacccaagtgcccttgaacttcaacttcatcaaattgttgcttttcactatatttttatcatctcccttgggccaatttaatgcactagcttactttccctactattttacccgtcctaaccaaatgctccccttttggtggcactctacgatatatgtttttatgtattttggtgtatcctccttaggccttgtttgcctttaatgagagtggttattaatatcaatatatcaactataaaacttattgctagcaaaaaaaaaaaaaaaaaaaaaaaaaaaaaaaaaaaaaaaaaaaaaaaaaaaaaaaaaaaaaaaaaaaaaaaaaggaaaaaaaaaaaaaaaaagggggccctaaacccccact

SEQ ID NO: 768 - DNA, 2157 bp, Glycine max
  misc_feature (2148)..(2153): n is a, c, g, or t
ttcccacgcgtacgtacggctgcgagaagacggcagttggggagacaagacaaagaccatgagatgatagtcgtaggaaccacggtgagaagagaagaagaattattattacacacaaaacaaacgcagttgatgttgctgctctagactgttctgcgactctttacgcaactatattttcgtttttgccgagatagggttttcggttttcttcactgctctctcaccaggggcgagttgtgaatggaagcacaaggcataaagtataaagcataaagcatagttagttgagtcaatggaaggtgttgatcaaagaaatagttctgcatttggtgttccagttccaagaccaccaaaccagaaatctcgtatgccaccatctcaccctagtatcaatgtttcaccttcagcaactccttattcccaataccctcagcgattgcgttctccgggttcctcccattcgaggtctttgtctcaacctcccattttctcgttggattcattgcccccattgagtccttcccctgctgctgttacctccatgtttgactcaatctcaacaactgatatgtctgtggaggaaagtaatgtttcctctcaggtgcccctcaatagagggcatgcccttcttcctcctaggaagggacacaggcgctctagtagtgattcccctttgggaatctctggttttatgcagtcttctccagttccctccggaggagagagctcggggttcgagaagccgattcagttggtcttgaaggcgtcctttagggacagcctggatgggggccatgctaatgagcctgttaatgggaggaaggaggaggctgcggatgatttgttcagggaatacatgaatttggacaactttgataatctgaactttcctggcatggaagataaggacttggatagcaggaccagtggttccaagacagttgagagcagcgataatgaagttgagagtcatgtcaatgggaaggcgagtggggctcagggggcaagttcaagctgctcggaggaaaggagggaaggagtcaagaggagttcaaatggggaggttgcaccgggttcccggcatcggaggagtttttcgttggatagttccatagggaactttaacattgaagatggattgcctaagcttcctccttcgaaaaatcaaatgggtcagcactcacctagcaattcgatggacggcaaaatgtcagaaacctccacggagtttggaaatggcgaatttagtgcagaggaggtaaagaaaataatggaaagtgataaactagctgaaattgcttcgactgatcccaaacgtgcaaaaaggattttggctaatcgtcaatcagctgctcgttcaaaggagaggaagatgcgatacattgctgaattggaacacaaagtgcaaactcttcagacagaaacaaccacattgtctactcagtttaccaaattacagagggataactctgaccttaaaagtgagaacaacgagtgcaaattaaggcttcaagccatggaacaacagtctctattgaaagatgctctgaacgagactttggatgctgaagtccggcgtttgaggcgtgctgttgcagaacttggcggtgaatccctcacaagttgcatggctcgacagcttgctattaaccaacaaatgttcgagttacagcatcagcagcccagccaacagagacattttctactgcaaaatcaccatactcaggaagagatagagtctcgatcacagcagattcaaggcaatgaattgcatccccaggcacagattcagtcacagcagattcaacgcaatgaattgcatccccagccttaaattgcagagaaatatgttgcctattaatggtgccaaatagtggaagcaaaatacttttggacgtggagctggtgaggtataagtataatctcaatcgtacataagcagtgatctagcattagtttgcttgaagtttcataagatcggttcatcatctttatttaatttattattttgactgttttacctgcatacaaactcggactatcctattcatgtagtaaaccttattgtcatgaatacaacccacctttctctattgagaggggtcatgttgttgcataaaaaaaaaaaaaaaacaaaaaaaaaannnnnnaaaa

SEQ ID NO: 769 - DNA, 1605 bp, Glycine max
cacatggtttaaccctaccccaaaaacaacaaacaaatagttacatcaattgggattgtgaaatgttacgtacccagttgtttgtgtaaaacaaagtgaggaaagagaccattgtttgccagttcaactaagtacgctgtttttttattttccccacaaaaccatatagccatcggtcgtagatcccacgaaccccatcatcacaccactctctgcagttttcgcaaccaaaccttcttttttgtttttattcctctgcttattggattcaacgaagttgttgtgattaaggagaacataactttttgaatcacacagagagagagagagaagagacccagtactttctgcatccaaaccaatcactactgcggataactggtaagttcataaaggggagattcttcagtgatcatctatctgatttggtccagctaaggaatcattcagaagccaagttgattaagtactagagagatcatattttggagtagtaaaagttaatcataagcatgggatctttcaagggtcatgctttgccagggactttgtttcttctagttggggtgtggcacgtatggggctctgtggtgagatatgttcgcaatccaatggcgtttcaagtcagagtttggaatcctgtgccagggtttgatgggaggctgaagcacctggagctatatgttattgcaattggtgctttcgttgacatgtgcatcgagcttttgtattcaccacacctcaagatttttgttggtggagtccttaaccccgctcacatgaatgactttgagcactctggaatgcttcttatgtttttcatctttggtgttgttgccctactttcccaaaagaccagatttcttcccttgccagaaggtgctctttgtttgcttgctgcctcagcattcactgcagagtaccttcttttctacttccattcaacaacacacaagggccttgagggctattaccacaccctccttgtcttcctggttggactgtgcattttatcttcaattgctggagcccttttgccaacaagctttccagtggatttatgcaatggcattgctatagcactgcaaggtttatggttctatcagacagcctttgttctctatggccctatgatgccaagtggttgtaagcttagggaaaacagtgtcacatgtcattctattgatagtgaggttcggggcgaattgcttgctaattttcagctctttgttgcggttcttgtggtccttgtgggaactgtggcatcatatggctttgctgcttcaagatatgggagttctgaagtcaggaacttgcatgcaattcagactgaattagatcaagactaaagttgcgttgctattttttctggtggtagttgaaatgtgttggcagcatagagtttcttatagaacatgtttgttgtatattgaagtgcaaaggatcatgcatgcatgatcactgaaaattgaaaattaacaccccctcctccctcaaaaggaattatacatttttgacttttaggaatcggatgtcaaaggagcaacagaggagaatcattaaaatatgattacaaaatgtggcaggggagttcacttggatcat

SEQ ID NO: 770 - DNA, 2269 bp, Glycine max
ccacgcgtccgcaacgatatcagtcttccattcatcaacaaccactctctctcccctctctgcagcaaaaccaattctccggcgacatctccggtcaggttccggcagcctctccggcgactcggcatggcaactcaatgaatgcggaatcaccgccggggctcctcatgtcggtttcctgcctctccgactacgacctcctctgcggcgaggactcctccggaatcctctccggagagtcgccggagtgctccttctccgacatcgactcctcacctcctccgccgtcgccgacgacagaggattgttattcgatcgcgagcttcatcgagcacgagcgcaacttcgttccgggattcgagtacctgtcgcggttccaatctcgctccctggacgccaacgccagagaagaatcagttggatggattctcaaggtacacgcgtactatggctttcagcctttgacggcgtacctcgccgtcaactatatggatcggtttttggattctcgccggttgccggaaacaaatgggtggcctctgcaacttgtatctgttgcatgcttgtctttggcagcaaagatggaagaacctcttgttccatctctcttggaccttcagatagaaggtgccaagtacatatttgagccgagaacaattcgtaggatggagctacttgttctcggtgtcttagattggaggctaagatcagtaacaccactttgcttcctcgctttctttgcgtgcaaagtagattcaactggaacttttatccggttccttatttccagggcaacagaaatcatcgtatctaatatccaagaggctagctttcttgcttactggccttcatgcattgctgctgcagccatactcactgcagctaatgaaattcctaattggtctgtggttaagcccgaaaatgctgagtcatggtgcgagggactaagaaaagaaaaagtaatagggtgctaccagttgatgcaagagcttgtgattaacaataaccaacggaaactccctactaaagtgttgccgcagctgcgagtaacaactcggacccgaatgaggtcaagtactgtatcatcattctcatcatcctcttcaacctccttctccttgtcttgtaagaggaggaaattaaataaccgtttgtgggtagatgacaaaggaaactccgagtgaagagaaaacgaacaacaataataaaagaagggaagaaaaagagagggaataaggtgggccaagttgtctagaaacctcaacattttttagagggtttttgcaattaaaaaatgacttgagtgagggtgtagattataatagtatatatatgatatatctctatcgtatatactaagagagtttgatgggtttggagtaatttttatttttatgttggtgacttattaatattgagtttgcagaattcacctagggaagagggattttgcgacatgttaccgtgggagaggaaatgagagaagaaagaagtgaaacactgaaacaggggtagaagaatttaatgtgatttgttcttgtaacctgtgagtgtggaagaaagaagtgagttgcgggctggaattcaaagtttgcattaattattggtgaaggagatgaaagatggtgggggcaacgctgtagagattgagaagaagaaaaagtagagagaaggtatgaaaaactctggtgattattgaaagttgaaacttagaagtttgaagtgttcaatgttcatatcatggtattcataagtcaagcaaagcttcatttcttggccagcatcactgcttcttcatcatccacgttactactactttgatgggaccctcaacagtaaagaacaattgaagggcaataagttgaagtttggctacaaatcgtggactttttttgttgggtattggcacgtgtgcagtcggttctggtgcgtgccaatgaagtgtgtacgtgtgatttttctttttcttggtttttctttgcgggagctgtttatatattttttcctatttttggccatgagttttggcctaactatacaggactccaatggctggtgtccgcgcgtgtgatggaaacacgtgtatatataggttttaatttaaaaaccttgaatttttttatttgttttcaagagaggagaaccctctttcacataggggtaaaaggtctttggggcctttttcctgtgtgctgtgtattggattgattaatatataatgacaactattaatttcttacatttctttcaaaaaaaggacgaccacagg

SEQ ID NO: 771 - DNA, 808 bp, Glycine max
ggcccgcggcgagttgtcggcggatggcggccgagggggagctgaagtgcaacaagtgagcaacggagaaggccaaagcccgttactcttcttcttcagttgacttaatccgtctctagggcatacgtcagcgcgtgtgcttaatcgagagttgacgaagaagatggagaataacccgaaggagcaagcggagcagcaaagggtcaatttcaacggagaccctcacattcacgacaatggcaacgtattccaccacttccaacccacacccgccgtcgattctggttacgctcttaaccattccatggctcgccctctccgcaaacgcccctggcatcactccaacaacggaacttctccagatcaagtggacgtttcgtgtaaagtttatgttgcacctgttccaagaacggccacggaggatgagattcgccctgtattcgaagaacatggaactattgttgagattgttcttttaaaacataagaaaactgggacacggcaaggaagttgttttgtaaaatatgcaacatttgatgaagctgatagggctattaaggttttaaacaataaatatacatttgctggggaatcatatcctgttgttgtcaaatttgctgatcgagaacttgaacgccttggggttcgagggttatgccgtaacatggaaaagaaagatcctttagaagaggtggccgataaagtttttgtcagttccatcaacaaagaagctacgaacaaggatattgaagagatattgtccccttatgggcatgttgaagatatcttctttaaaagcactcatgga

SEQ ID NO: 772 - DNA, 3184 bp, Glycine max
tatatttccaggtcacaaaatgcagagattgaaaaaattgttcaaaccataataaaaaaattgggttccaaattttcaagtcttccgaaagataatctagttgggatggaatctcgtgttgaagaattagtaaagtgtttgcgtttggggtctgttaatgatgttcgagttgttggaattagtggcatgagtggaataggaaagactgagcttgctcgtgctttgtatgaaagaatctctgatcaatttgatgttcattgtcttgttgatgatgtaagcaaaatttatcaagattctggtagattaggtgtacaaaaacagttactttctcagtgtctaaatgaaaaaaatctagagatttatgatgtttcccaaggaacatgtttggcatggaagaggctacaaaatgcaaaggcacttgtagtttttgatgaagttgttaatgaaagacaactacagatgtttacagggaacagagactctctattacgcgaatgcctaggtggagggagcagaatcatcataatatctagggatgaacatatattgaggacacatggggtagatgatgtttaccaagtcccattgttggatagagaagaagctgttcagttgttttgcaaaaatgctttcaaagataattttattatgagtggttatgcagagtttgcagatgttatactgtcacaagctcaaggcaatcccttagcaattaaggcggtgggctcatctttgtttggcttaaatgccccgcagtgggagaagtgcagtggctaagctaagagaacaaaaaagtagagatattatggatgtgctgcgaattagttttgatgagttggatgacacaaacaaggaaatatttctagatattgcttgcttcttcaataatttttatgtgaaatctgtaatggaaattctagattttcgtggattttaccccgaacatggcctacaagttctccaagacagatcactcataatcaatgaatatgggatcattggaatgcatggcttgttgatagatttgggcaggtgcattgttcgagaaaaatcacctaaagagccaagcaattggagcagattgtggaagtaccaagatctctataaaatcatgtcaaataatatggcagcagagaaacttgaagccatcgctgttgattatgaatcagatgatgaggggtttcatgaaataagggtcgatgctttatcgaaaatgagtcaccttaagttgctcaaactttggggtgtgacttcttctggaagcctcaatcatctttctgatgaattaggatatattacttgggataaatatcctttcgtatgtttgcctaaaagttttcagccaaacaaactagttgagttgtgcctggaatacagcaacatcaaacatctatggaaagatagaaagcctccacacaatctgcgacgttggccccccccccattccaaaaatctaatcgagttgccagatttaggggaggctctaaatcttgagtggctagatctgaaaggatgcataaaactcaagaagattaatccatccatcggtcttctaagaaagctggcttatttgaatttgaaagactgcacaagtcttgttgagttaccacatttcaaagaggacctaaatcttcaacatctaactcttgaaggatgtacacatctcaagcatatcaatccatccgtcggtcttctaagaaagcttgaatatttgattttggaagactgtaaaagtctagtaagcttacccaacagcatattgtgcctcaattcacttaaatatttgagtctatatggctgttcaggactgtataatagcgggttattaaaagaacctagggatgcagagcttttgaagcagctgtgtataggtgaagcttctactgattccaaatcaatatcctccatagtgaaaaggtggtttatgtggtctccacgtttgtggtattccagagcacataacgactcagttggttgtctgttgccttccgcgccaactatcccaccatctatgattcaacttgatctaagttactgcaatttagttcaaatccccgatgctattggaaatttacattgcttagaaatcctaaatttagaaggaaacagttttgcagcactgcctgacctcaaggggctttccaaactgcgttatttaaaattagaccattgcaagcacttgaaagattttcctaagctccctgcacgaactgatttgtcatacactttcctcttaccaatactgggaagagcagtagaacttccagtttggggatttagtgtgcctaaagcaccaaatgtagaacttccaagagcattgggattaagtatgttcaattgcccagaattagttgagagggaaggctgcagtagcatggttttatcatggatgatacaaattgttcaggcgcactaccaaagcaattttgcgtggtggcctataggaatgcctggattttccaatccatacatttgtagtgttattccaggaagtgaaatagaagggtggttcaccactcagcatgtgagcaaggacaacttaataaccatagacccacctccccttatgcagcatgacaaatgcattggcgttgcttattgtgtagtattcgcagctcattcaacagatttggagatggttcctccagaaacagaacgaggttatcctgttatgggcatcgtttggattccggtggatgttcatgaagatgtagtcacagacaaatcagatcacctgtgcttattctattcgcctacgtatataggaattggagactggaaattaaaagtgaaaataatggacaggaaaggttttcctgtggaggtgaagaaatacgggtatcgtagggtacatgaagaggatctagatctagaaccatcactcaacacagcaggaatccggaagaggaaaaggggaactgatgaataaaatgattgttttggttgttagagaataatacaatttttttatcctttttatgtaactttaacgaagccagtgaattagtatgcttttactataacattgtcgaagacggattagacctctgaatcaggtttgattggttagatttgttaaagttttgtctaaactgtaattagactttggcctatcaccttgtctaggcaaattgtttttgcttaaaattatatatgaatttaaaattgattcaaaaaaaaaacc

SEQ ID NO: 773 - DNA, 1056 bp, Glycine max
acatcaacaagccacggggttttggaaagttttctcttctctcttcaacatcgggcttacgctacgataaaaagaaccacaaggccgcgtttggcgtcacacaacaacgatgggtcaggcatttcgtcgagcatctggaagaatccgagcagcgtccgaagctgacacgtcatccttctccaagcccaagaacgccgtcgatcgccgacctccgcccaatgctgccgccgacaaagcggcgcagatcccgaaagccgctgaacatgacgtacttcacgccaatgatagtcctagagttaatacggacaacattctggaagaaagagatcccaaatttgatgctatgcttggtcaaatgattggtagaattacatcaaaacctgagatgggtgaggccttcgtggttgataagtataataggccgatgcccaaattgcgaaacacaaaaccagattctggccgttatgatgaaaggccagttcctgctggcactttgaatgtagcacagttgcggccatgtcatccttttgcatgaaggaaaagctgatgattacaatgggcgtatggatgctcaccagattgctgaaaaattccgggtcgatgtggttcagattcagaggatcttgcaattcttatcgcaacctcctgaaggtagcagtaaagacaagaacaaagcaccaagataaatagctacactggcattgctaactggttcttgtctgataaaaggctgttctaaatggatttaaagtgtggaatttcgcccattgaaaatgtagttcaacagaaaggagaatgccaaatactaaaggtcttcattgacttgtaatgaactatattagcaagtgcttgtgcaacccaaatacttagttttaaggaaatcgtgatatcgacaattgaatttgtacttgtgacggaaaccctggagaaagtgagtttcaataagggttttgaaaccctactacagctgagtttttgttcttttttaagtgcttcacagcagttaataaaacatgagcgaattgagttttggccttgcaaaaaaaaaaaaaaaaa

SEQ ID NO: 774 - DNA, 1826 bp, Glycine max
  misc_feature (10)..(10): n is a, c, g, or t
  misc_feature (15)..(16): n is a, c, g, or t
  misc_feature (31)..(31): n is a, c, g, or t
  misc_feature (33)..(39): n is a, c, g, or t
  misc_feature (42)..(43): n is a, c, g, or t
  misc_feature (45)..(46): n is a, c, g, or t
  misc_feature (51)..(53): n is a, c, g, or t
  misc_feature (58)..(61): n is a, c, g, or t
  misc_feature (73)..(73): n is a, c, g, or t
  misc_feature (75)..(80): n is a, c, g, or t
  misc_feature (97)..(97): n is a, c, g, or t
  misc_feature (100)..(103): n is a, c, g, or t
  misc_feature (106)..(109): n is a, c, g, or t
  misc_feature (112)..(113): n is a, c, g, or t
  misc_feature (118)..(121): n is a, c, g, or t
  misc_feature (125)..(125): n is a, c, g, or t
  misc_feature (133)..(133): n is a, c, g, or t
  misc_feature (136)..(141): n is a, c, g, or t
  misc_feature (148)..(152): n is a, c, g, or t
  misc_feature (156)..(158): n is a, c, g, or t
  misc_feature (171)..(172): n is a, c, g, or t
  misc_feature (175)..(175): n is a, c, g, or t
  misc_feature (190)..(192): n is a, c, g, or t
  misc_feature (196)..(198): n is a, c, g, or t
  misc_feature (214)..(218): n is a, c, g, or t
  misc_feature (224)..(224): n is a, c, g, or t
  misc_feature (226)..(228): n is a, c, g, or t
  misc_feature (230)..(232): n is a, c, g, or t
  misc_feature (247)..(248): n is a, c, g, or t
  misc_feature (252)..(252): n is a, c, g, or t
  misc_feature (254)..(255): n is a, c, g, or t
  misc_feature (263)..(264): n is a, c, g, or t
  misc_feature (269)..(273): n is a, c, g, or t
  misc_feature (275)..(277): n is a, c, g, or t
  misc_feature (283)..(285): n is a, c, g, or t
  misc_feature (288)..(288): n is a, c, g, or t
  misc_feature (291)..(293): n is a, c, g, or t
  misc_feature (297)..(297): n is a, c, g, or t
  misc_feature (300)..(301): n is a, c, g, or t
  misc_feature (308)..(310): n is a, c, g, or t
  misc_feature (313)..(317): n is a, c, g, or t
  misc_feature (322)..(324): n is a, c, g, or t
  misc_feature (331)..(331): n is a, c, g, or t
  misc_feature (333)..(335): n is a, c, g, or t
  misc_feature (340)..(340): n is a, c, g, or t
  misc_feature (346)..(346): n is a, c, g, or t
  misc_feature (348)..(348): n is a, c, g, or t
  misc_feature (352)..(353): n is a, c, g, or t
  misc_feature (356)..(358): n is a, c, g, or t
  misc_feature (360)..(360): n is a, c, g, or t
  misc_feature (362)..(365): n is a, c, g, or t
  misc_feature (373)..(373): n is a, c, g, or t
  misc_feature (376)..(379): n is a, c, g, or t
  misc_feature (382)..(383): n is a, c, g, or t
  misc_feature (386)..(389): n is a, c, g, or t
  misc_feature (392)..(402): n is a, c, g, or t
  misc_feature (404)..(404): n is a, c, g, or t
  misc_feature (406)..(410): n is a, c, g, or t
  misc_feature (413)..(432): n is a, c, g, or t
aaaaaaaaanaaaannaaaaaaaaaaaaaanannnnnnnaannannaaaannnaaaannnnaaaaaaaaaaanannnnnnaaaaaaaaaaaaaaaanaannnnaannnnaannaaaannnnaaanaaaaaaanaannnnnnaaaaaannnnnaaannnaaaaaaaaaaaannaanaaaaaaaaaaaaaannnaaannnaaaaaaaaaaaaaaannnnnaaaaanannnannnaaaaaaaaaaaaaannaaanannaaaaaaannaaaannnnnannnaaaaannnaanaannnaaanaannaaaaaannnaannnnnaaaannnaaaaaanannnaaaanaaaaananaaannaannnanannnnaaaaaaanaannnnaannaannnnaannnnnnnnnnnanannnnnaannnnnnnnnnnnnnnnnnnnatatagtagagtcagctacgtaggccccccccggagaaactaatctccataaaataatctgagtgaccctcctcactttgtggccatggcttcactcacgtgcctccgcccaacccaccctcatcttcatcgcggttcagtgcttctcgccatttcgaaccgctgcttcaaccattcctccttgctgaactggattctctccgtaaaccctcctcgaaccgctcctccacgcgcaatggccaagccctgttcctcacctgcccaagacctagtcgcttctcctggcgattttgaatttgtgctgcctctgaaaattgtggagtatccggatccgagattgagggccaggaataagcgcatagttgccttcgatgatagtctgaagaagcttgtccacgaaatgtttgatgtaatgtacaaaactgatggtattggtctctcagcaccccaattaggaattaatgttcaacttatggtgttcaatccagtaggtgagcatggtgaaggagaggaaattgttcttgtaaacccaagagttagccaatactcaaagaaactgacactatttaatgaaggttgcctatctttccctggaatcaatgctgatgtaaagcgaccagaatctgtgaagattgatgcacgtgatatcaatggaacaaggttttcagtcaacttgtctgaccttcctgcacgaatattccagcatgaatttgaccatctacaaggaattcttttctttgagagaatgactgaagaagttcttgatagtatttgtggacagttacaggccctagaaacaaagtatgagggaatgactggactcccaagccctgaaaagatagaaaaccgcaggaggagaaaggtcgctgttggttttgggaaacgatgatcttcaaggtcaatattaggcataatactgaatgcacacttaccagacatttctagtttgaacttcataaaatgatgaagcatagattacaggttcaattgtttatgaatggtcattggaagacatctctattgtatcaatgctattgtcagttgttcatgttgccctgaagggaacaactgtcttgaagggctatttcctacgtatttatttatttattgctttctattgttttaattctagttctaaacatttagctctagttgtaggcatttactatgtattattttaggatttattacttgaaaacagctcatagaatggaggaaaacctttctttatatggctctcccaatatcccgaaagcaataattgtttgtaatataaggggaaattacactgtaataacttgacaagtcttgaatgattctcatttgaatcttgatctcataaacttgaatgaaagttcacaaatgttgcacttgaaaaaaaaaaaaaaaaaaaa

SEQ ID NO: 775 - DNA, 1589 bp, Glycine max
aatgagtgatcttatccacctttagttcagttactacttacgaaaccatcttctcttctcttctcttaaacccttcaaaaccccacgacgatgatgactactgctcccactacctctactttcttcttcctcctctcttctctcaatccccacccacctcgctccttcttcagacacaaaccactctttaacaacccctcccttctcctgcgccctcctttgaggtctcctcgacacttaacccgcgccgacgatgacgacggcgacggcggcggccccgaccactacgagatggacgaggacgaaatggaggagctcgacaacaagaaggactttgacatcgagtacgaccccctcgtccccgccgccgccgccgccgccgccgcctccgccgctgatgacaacatcgccttcgtcgagagcaagagcttcgtgtccacgcagggctgggactccgacacagtcctcgactacaaaatcaacgaggacgagttccacaagatctgcctggtcgattgcgacttcttcattcgcaagccccccgaccccgacaacgatgtctacgatttcagagagatgtatgttactcctccggatacagatgtttattcagttcccaaggttctcgctccaatgccgcagaagtacattagatgtgcgcagagtgattatggaagctacaatgtgacagagccacctattgatgcgccgcgagatcctctgtataaaactgagagggagatcctcaaggtgtacttgacaaaacactacaaaaatcgaaggaagggtgattctgagtttgtgcttgattttgaagagatttatgttattgattccaaatccaagtcaattaccagagccaaagttttggtaacagctcctggagggagaacaagagatagaaggagtgacttgcttgttatatctgatcgtgggagctccttcaaaataatacatgcgagtgaaaaagaggatccaacgactgtcatagaaaagcaagagtgggagaatagcagagaagaaatggagagacatcttagaaagctaagagacttcagcatttcaaattggttttgagtgataagaaggtattcctttccaagaatgcctcatgggtataaacagcatggtacagaggtcgaacttgggcacgaacatacgggcaattggacttaatctttcacttttgaaattgtgtgctagctgcttgatcgtttgtatattttgttgtaacttgttgaagatgcggctgttggaattcaatatctatgagagtgatctgccgatatgctgttatgacctacactacagttgaatgttctctggatgtataccttggttttttctccaaactctgatcaaacctactgatttaagaatgagaatatatttgtttttctccaaaaaaaaaaaaaaaaaaaaaaaaaaaaaaaaaaaaaaaaaaaaaaaaaaaagaaaaaaaaaaagggaggaaaaaagaaaaggaaaaaagggaaggaaagggttggggaaatagaatagaagatttttaaattgggaatgttaatagatttattaatggggatattaaaagaaataacgttggaaaa

SEQ ID NO: 776 - DNA, 660 bp, Glycine max
cttactctagccatattcttcgccacctttctttctccaccttccatctccattcccctcccctaacttcccttcttatcattacaccactctctctctctctctcttcatcgcttacctttttcgtatacataagcattccctctcgttaatttcattagcatatcacacaaatcccactcttactcctttgccacgtacgccaccgctgatcaattcaggcgatggcgccgcgtctctggtcctgcttccgcagcagcagtagcaagggcagcaccaccggcggcggtgtctccgacgcctccgcctcgcggcgcgtggtgactgcggacctgacatcggaggagcagaagcgcgggggcccggtggtggtggagatgttctcgtcgcaggggtgcgcgacttcaccggcggcggagctggtgctgtcgcggctggggagaggggatttcgagctggaggcgccggtggtggtgctggctttccacgttgactactgggactatatgggatggaaggatccgttcggggccagccagtggacggttcggcagaaggcctatgttgaggcccttgggcttgacaccattttcacgccacaggttgtggttcagggaaaggcccagtgtgttggaaatgacgagaacgcccttgtttctg

SEQ ID NO: 777 - DNA, 954 bp, Glycine max
aaaataacaatcatcatcccatctccccaacggataaagagagaagaagagagtcccttcacttacacatagagaaaaaaatggcagcatcagtttcatgctcatggctaactcttccgtcccaaatgaggaaactttccctcacatcctcttcttcttctctttccatctccaattctgcttctctcagtttctccagaaacctctcacaccctctcttctcacaaggtaactgcttgtcgctgagcacagtgcagaggcgcgcgtctgtggtctgcgaggctgcgccgaaaaaggtggattcggctgtgaagagagcgcgccaagccgagaagcgccgcgtgtacaacaaagctcggaaatcggagattaaaacacgcaccaagaaggttttggaggctctggaagtgcttaagaagaaacaagatgcgcaggccgaagaaatcctctccattgagaagttgatcggagaggcatactcgataattgacaaagctgtgagagtaggcacactgcacaggaacactggagctaatcgcaagtctcggcttgctcgaagaaagaaggcagtggagatccatcatggctggtataccccaactcctgaagccagtgtctgaaactatccacgtgctagtttacattgagtaaaatgaagtgccagtgaagactatctgcagattttttccacctctgttcaaacattgtatgtagtcttctttggtgttggttcaaattggtttacagttccagacttcatgtgtactatcatcatgtagagccattgattttaacagcatcttcgtaattagcctttattgtactttttaccatattgttgtataatgcaatgcctccttaaacataaaaaaaaaaaaaatggggtgataatttgattgctattctaatcttgctcatgatagcaggtgtatgtgattgtcacacttatattgc

SEQ ID NO: 778 - DNA, 1875 bp, Glycine max
gttgcgttcttattaggcgagaagaaaggaataaagaggaaggaaggtgtgacactactgtcatactgcactgcttataacttttttctctttctctcaattcaattgccttctcccctgcgaatctcttctccacgtatcggagaacatggggaacaagatgaatgcgatcgcgttgtgcttgttagtgtcgaccctgttggtttctgcggtgtattgtgcaccgaatgctgggctccgtaggattgggctgaagaagattaaattggaccctaaaaacaggcttgctgctcgagttgggtccaaggatgttgattctttccgggcttctattagaaagtttcatctccaaaacaactttggtggcactgaggaaaccgatattgtcgcgttaaagaattacttggatgcacagtactacggtgaaatagctattggaacttctcctcaaaagttcgctgtcattttcgacactggcagctctaatttgtgggttccatcatctaaatgcaccttctcggttgcatgctactttcatgctaagtataagtctagcaaatcaagtactttcaagaaaaatgggactgctgcggcaattcaatatggtaccggagcaatttctggtttctttagctacgacagtgtcagagttggtgaaatagttgtaaagaaccaggaatttattgaagcaactagggagcctggtgttacatttttggcggccaagtttgatggtatactgggacttggatttcaagagatatcagttggaaatgctgctccagtgtggtacaacatggttgaccaaggtcttcttaaggaaccagtattttcattttggttcaaccgcaatccagaggaagaggaagggggtgagattgttttcggtggtgttgatcctgctcactataagggaaagcacacttatgtgcctgtgaccagaaaaggatattggcagtttgatatgggagatgtacttattggcggtaaacccactggatattgtgctaatggctgttcagccattgcagactcagggacttctttgttggcaggtccaacgactgtcataactatgataaaccatgcaattggagcatctggagttatgagccaagaatgcaagaccattgttgcagagtatggacaaacaatattggatttgcttttggctgaaacacaaccgaagaagatctgttcccgaattggattgtgcgcatttgatgggactcatggtgttgatgtggggatcaagagcgttgtagatgagaatgaaagaaaatcattgggtggtcatcatggtgctgcttgtcctgcatgtgagatggcggttgtttggatgcagaaccagctgagccgaaatcagacacaagatcagatactaagttacatcaaccagctttgcgataaaatgcctagcccgatgggagaatcagctgttgactgtgggaatatctcttcattacctgtagtgtcctttactattggtggaagaactttcgaccttagcccagaggagtacgtactcaaggtgggtgaaggtcctgtggctcagtgtattagtggctttactgctatagatattccacctccacgtggccctctctggatccttggtgatgtcttcatggggcgttatcacacagtgtttgattttggtaaactcagagtgggatttgctgatgctgcatagagtgttagcgtttctcagactatggcgatccaattgctattattagtttatataaccgttgcagtcaaaatggacctaaagttctggcttgtacaggtttatattattaatgttaatactttgggtgttccataatactaaaagaaaaacagatccaaaaaaaaaaaaaaaaaaaaaaaaaa

SEQ ID NO: 779 - DNA, 1235 bp, Glycine max
  misc_feature (1126)..(1126): n is a, c, g, or t
  misc_feature (1130)..(1130): n is a, c, g, or t
  misc_feature (1133)..(1133): n is a, c, g, or t
  misc_feature (1147)..(1147): n is a, c, g, or t
  misc_feature (1167)..(1167): n is a, c, g, or t
  misc_feature (1181)..(1181): n is a, c, g, or t
  misc_feature (1199)..(1199): n is a, c, g, or t
  misc_feature (1214)..(1214): n is a, c, g, or t
  misc_feature (1226)..(1226): n is a, c, g, or t
ccacgcgtccgcttttttgcttgaaaggactctatatccatccatcggattgcaacttcatcccatccagaacagaacagaacagaagtactttggctcttttcagtctctctctactctacacaacactacacgcactttgtacctttctttttctttgcttgctattgctattctgcactgtgtctttactcttgttcttgttgctgcagctggtggttgcattgaatcggaggggtaagtgggaagacgtgtcttgttttgtagctttcccttccctctctcttttccccgccgcatgtgccggattagacgcgaactgcttccataattcacctcctccaatcaaccatcacaagatttcccactgattggatggaagaagcatgtgaatttcgaagttgggctgaattgattcctgatgccctgggggtaatcttcaccaatctttctcttcaggagagggtaacagtgatccccagggtgtgcaaatcatgggctaatgcagtaactggaccttactgctggcaagagatagacatcaaggattggagcaaccgatgccagcccgaccaactcgatcggctgctcgagatgcttatcacaagaagttctggatccctccgcaaactcagtgtttctggcctccaaactgagagcatcttcactttcattgctgaaaatgcctgttctctccatacattgcgactgccaaggagcagtatgaatgattccattgtggaacagattgctgggaggctttctatgatttctttcttggatgtgagctactgtattaaaatcggtccctatgcacttgagatgattggcaagaactgcaaactgctagaagggttgtgtcgaaacatgcacccgttggatactgcaagcaagccgtttcaagatgatgaagcatatgcaattgcctccacaatgcctaagctcaagcatcttgaaatggcttatcatcttatcagcacttcgggtgtccttcaaatacttgcaaactgccctaagcttgaatttttggatcaaagggggtgttggggtgtgtcactgaccacatgttttaaagcaggaattcccaaactgaaggtttggggccttgggtctgacactatgagantgangcnggatgattctcagngtggccgatcaacagagtanttgcctgggacttntggctgtggcatgggaanatactagtgagatantgatagttacgntggaagggg

SEQ ID NO: 780 - DNA, 2631 bp, Glycine max
gcaactgccaagagccgtacatttgctttttctctcatctccatatcactaagcatataaacaacgagagaaccctccatatactcatacatagtggatatatcagcggctcgggaagagacagaacaacagatgaagcattttgccttggtgtttcttttggccattttggtccctcaggagtgtttccatgtcagtgtggaagcaagggatgattttgtcagaactagaggcatccacttcatgctgaatggatacccttactatgcaaatggcttcaatgcctactggttaatgtacacagcttctgacccatctcagagattcaaggtttcaaatgcctttagagaagcagcaagtcacggccttactgttgctagaacttgggccttcagtgatggtggctatagaccactacaatattcccctggcttctataatgaacaaatgttcacggggttagatttcgttgtatctgaggccaggaagtacgggattaagctcatactgagcttggtgaacaactatgaaaattttggaggcaagaagcagtatgtgaactgggctaggagtcacggccagtaccttacttcagatgatgatttctttaggagccctgttgttaagggttattacatgaaccatgtgaggactgttctcaacagatataacagatttactggcatgcattacaaagatgacccaacaatcatggcctgggagcttatgaatgaacctaggtgcacatcggatccttcagggagaactattcaggcgtggatcacggaaatggcttcgtttgtgaagtccatagacaggaaccacttattggaggctggactagaagggttttacggacaatcaacaccacaaagaaaaacaatgaatcccggtttcaacatagggacagacttcatcgcaaataaccgaatcccggccattgattttgcaacagtccactgctaccccgaccaatgggtatcgagctcaaatattcagtaccagctttcattcttgaacaactggttgagtgcccacttcatagacgcgcaataccatataaagaaaccaatactggtggcagaatttgggaaatcatttaagggttcgagttcctacgagagggatgaggtgttcaattcagtgtattacaaaatatacgcttctgcaaagagaggaggtgcagcgagtggagcactgttctggcagcttctaacggagggcatggagtctttccaagacggttacggaatcattcttgggcagagttcctctacggccaatctcattgctcgccagtcccgcaagctgtacctgattcggaagatcttcgcaagggtcgcgaacatgcggcgatggcaaagggccagagccagaggattttctggctccggaggtggaaacggaggcagatacattgacaactgagaacatgtttggtttgcagtttcaggattttatctgttaaatttacattgaagcgcgcgtcacagtatttttaactgaaaagcttgtttgtgttgggaagacagacatctttcatatacgagtttctctaccgagtgtttggaaggcgatggaggagggcccaccggaaccaacggaataccttggagatgaatcataatgttttcttataactacgttgacatatgttttcattgtttcagcttctctctcttttttttgtttatacagagcaaagcagctggtaagtttttccatggcgtctacttgtaggttactcaacctcactttagtttttaactttggaaagaatgttatttgtgtttagtacttgatatctgtagaaaaagaatgcaaaacaaagcgcaaatgtaagtttgaatcaaaataagttataaactcaagtttatactaacatgatttatgtttagatttttttcttcttcctcaatttatgtttgataaaatgaaattgtaatatagcctaatcgcaaatttgaatgttatgtgccagaaagaattagaccgaacaatattgaagtcaaacataacaatagccatttttttaatggaaggggcacagtccccaagagatcaattaaaaatcgcacggaaacacaatggaacatacatcaactaagctgaggcatttgttaaaattaattttaacaaatgaatgttagtaaaattaattttaaatgaagttaattttgtaaaattgattttggttcaaattaattttaatgtgatgtgatttatgtttgaatattttattataaaatcaagttaaaaataagatttgatataaaattttgaatccaaagcagaaattagtcaaagttgtttctatcccgaatcaatattagatctataataaattttaaattcttctccaacataaaatcaattctctaacatcaaacccaacactcattaaattaagatagcgctagaaataaattgaggaacaacctcaaagatcattaactgtccatctagagataagcatagttagccaggtcatctgctacttgattcccttctataagggtaagctgccccggaacaatgccacttgagaatcccgattcccacccataaaactgattcaagaattctactcaaagctatctttacaccaaggcataattgcccacggctcag

SEQ ID NO: 781 - DNA, 1108 bp, Glycine max
cggacgcgcgcagctcagagtgcccaccgagcaactaccatggctaccgctccttcgcttctacactcatctgggtcctcttttttctctcaatttcgtgcctttcaattctcttcttcttcgctgtttcctcatggaaacaggcatgggaatgccgtggtctctgtgaaggcctctgcttctggggttgtgttggtggagaagtctgaggcagagaaggccaataggctcaaaacagcttacactgagaaaattattcccttgctcatggaagagttctcttacaccaacaaacaccaggtgcctaaaattgagaagattgtggtgaactgtggtattggagatgctgcgcaaaatgcaaagggtttggacgcggcaataagtgatctagcactgatcacagggcagagacctattaagactcgggccagggcttctcttgccacttttaagatcagggaaggtcaaccgcttgggattgctgtgacactaagaggaaatatgatgtattcattcctagaccgagttatcaacctgggacttcctaggacaagagatttccaaggtgtgaaccccaacagctttgatgggcatgggaactacagcattggcattaaggaccagggtgtgttcccagagatcagagccgatgttgttggtaagcctcggggaatggatatctgcatcgtgacgacggctaataccgaccaagaagcacagaaattgttagctcttatgggtatgcccttcagagagggaagtggtcctgccacgacaattcggaaaaagaagcttaagtctcatcattttgatgcaaaatcaaagggaagaggaaggaggtgacatagttttgatgcaaaatcataggataaaaggaagtaaggttggaaccagaagagactgtgttgtattcctggtttcattcagatgtaatattatttttgattctttatgtaagaggcttggacatgccatcaactatgtcgctatgaggttataatgtggtcttgcagatcttgcttgctaattgatttccatttatttcctgtttaaaaaaaaaaaaaaaaaaaaaaaaaaaaaaaaaaaattgtaaaagacgggccagtat

SEQ ID NO: 782 - DNA, 1415 bp, Glycine max
  misc_feature (1349)..(1349): n is a, c, g, or t
ccagcgtccgcggacgcgtgggctcgatttcttcctttccctctttgcaaacacaattctccgattcagttcataatttcgatcgcaaagcaaatgatcccacaacaagaacccgatttcaatctcaatcacctcaaattatattacggaaagctgtttccgtttgctgatttagttagatgggtgtcgtatggcaacgatggaaagcaccctggttgtgatcaatcctacattgggcgaagagagttttccttcactctggagaatgatatatatctgcgtttccaatctttccacaatgcacttgagctcgaaaactccatcaaagaaaagacccctgttaagatagatattggacctgtctacactgttgatcctgcaaaaaggaatgcctatgcacagagtggcgataataatgtctttgccccagttgagagggagttgatttttgatatagatatgtcagattatgatgatgttagatactgctgttcgggtgccgatgtttgtttggtttgctggccggtgatgactatagcgatcaaagtgattgatactgccttaagagatgactttggtttcaagcacattctctgggtatacagtggtcgcagaggtgttcattgttgggtctgtgatggaaaggcgagaaggttgacaaatgagcaaagaggagctattgctgactattttcgtgtctacaagggcaatgaaaacagtcacaagaaggtttctttgatgggtgctgctcttcatcctttcttggcgacgtcatacactaatgttctcaaggactattttgagaaaaatctgcttactggtcaaaatttacttgctatcgaggagagatatgagaagatccttggcatgattcctgatgaatccattgcttctgaacttaggggaagatggcaagatagtaggcggtcttctagtgcaaaagaagacatcaatgttgttcgttgggaacagtgcaaacagttgctgcaatctggaaaacataaggcacaagggctgcgtcggtgcattgaagagattgtgttctgctttacctatcccaggctagatatggaggtttctaaacacatgaatcatttgcttaaagcaccattctgtgtacatcctaaaacaggccgagtttgtgtccccattgatccaaaacggtgtgaggagtttgatcctactacagtacccaccctttcacaggtaaattcattctgcaatgatagttttctgatatgcattccagggagagaaaaactttccaaaacggtgcttagttcaatgggtatgtttgtatttactactttcggatctggaacttgcataaagacacatgcctccttctncacacattgtcatgtgtgaaaaggaaacacataaagatgctgctttctgagaatttctgaacatgt

SEQ ID NO: 783 - DNA, 771 bp, Glycine max
gtacctcttgatcatgctcctctgtctcactgcacattttggcagtctattatctcttatggtcattaattcaccacaacaccgttatctctctctctctctctctccttcaacccttccactcatctttatcctttccacaaactcatatttatcccttaaatacattcaccatcaacactcttaccttcaaagttgttattgcaacacaaaagtggaaagaatgagagacacaaaactacctgaagtagtattcttgctactcttcaccttaattcttgcatctaaatttacgcaaggaattagaacagaagaatcggtatctcaatcccctcaaccccaaagagaaccaagtttggaggatggcaatgaggcatggaaaatgaggaattctaggagactaatgattggatccactgcaccaacttgtacgtacaatgaatgtagaggttgtaagtataaatgcagagctgagcaagtgcctgtagagggaaatgacccaattaatagcccataccactacagatgtgtttgtcatagatgatatatgatagtccataatgaattctatagcataatgtaacttttgagttctagtagacatgagtttatctcctgtaagtcactgccaagagaacttcaattccttattctagctagcagttgtgagtgcctgtgctaaaaggtgcaaaaattttgcatttgctatgttgtcattcaattaataataagaagaagcctatttgctgtgttccaaaaaaaaaaaaaaaa

SEQ ID NO: 784 - DNA, 903 bp, Glycine max
cccacgcgtccgcccacgcgtccggggagatgaagaagagggtggtgacgataccgatcggtgacgtggatggatctaagagcaaaggagagaattatccaccgtctgattcatgggcctggaggaagtacggccaaaagcccatcaaaggctccccttacccaaggggatactaccgatgcagcagttcaaaggggtgtcccgcaaggaagcaagttgagcgaagccgtgtggcccccacaaagctcatagtcacctacgcttatgaacacaaccactcccttccttttccaaaatcaaattcttccgccgcttccgccgccgtaagcgacggcgcagccgtctcgccgatagagtccgccgccaggtttccgccggaggaggagatgacggtgttcgcgacagactccgacctcgaactcgccggcgacgcggcggttcttctcagccaccaccaccaccacttcggctggttcgatgacgtagcgtccaccggcgtcctagagagcccgatctgcggcgaggtagatgacgtggcggtgccgatgagagaagaggacgagtcgctcttcgccgatctcggcgagttgccggagtgctcggcagttttccggcggaggaatattccggcgaccagcgcgatccggtgcggcggcatcacaggataacgcgggtggaccctttttctgtagtcccgcgttgttgcgtagtggttatattatattagccgcctgaaaatcgtgggctattaaaaaaagttggaaaagtaaagaaataattaattaaataaattaatttacaattcatggatttctttttctttttcttgcgttgtacatttgaataaacaattgattacagcaagctaccttcttttgcagaataaatcagaaattgtttttt

SEQ ID NO: 785 - DNA, 702 bp, Glycine max
  misc_feature (20)..(21): n is a, c, g, or t
tcgagtcagctacgtaggcnncccccccccacttgcaccgtgaagggactctctctctctcttcaccttcatttcttcactgtggttggttcatctatggcaggagcaaaagggttcgttgaagcagataatgcagaggccataattaccagaattgaacacaaatcgcgaaagatcgaaactttgctcaaacagtataagcccgtggaagcccttaaaactgcccttgaaggcacatttgccatcattggggatgagcgttgcaagtcggcacactggcttgtggtgcacagagctataatggctataaaagatgtggatgggatgctttcttccttggatcctgagtactatgatatcctaatgaagtacttgtatagaggcttagctaccggagatcgcccgacctgtgaccaatgtcttctgattcatgaaaaattgacagagaaagcaggactaggttgcatcctacgtttcctcacagatattgtaaatacagtttgatttctggacttcctttttatttggaattctttgttcttttcccttttggtgttttgatttttctcgtgtttgcaagactgcagcaatcaaggcagtgaaatatcagggaaaatatatcaattttggattcatttctcctgttttgttattttgaaattgtttacagttcaaaataacatttttttttaacttttcaag

SEQ ID NO: 786 - DNA, 2168 bp, Glycine max
cgagactagttctctctctctctctctctctctctctctctctctctctaagatttgctaactctctctctctctcgcatgatttctttctctgcgttgccatgacggaaccaacggagccatgcacgtcatcttccttggcaagggacccaaccaccgtgatccacccaaggcgcgagcccttcgagcacggcctcttgccgatcccgcgcctcatcttctccgacccggcgcaaaccctaattccgttgaagcagaagcttctcgagtcttcctccaaccagcgagtcgactcagcggcaatctccgagtcacttcagatctccattgagcaagccaggctcgtcctcgatactcttgcctcggttctgcactccgacgccgaacctctcgtcgccgccaagctcggagaaatcgattccgtcggcgtcgacgtccatgatctggttttgttcctctacattcaatcctacaagaggctcctcccgcgcacgcacaaggactccgccgccgtcgccgatgtctggccttccacctccgccttcgacggctacttgtccgcactctcgccgcttcagcttgtgcgcagcaacagccgaaggggtatgccatcgcaggttgatgaagaggcgcatcagctgtcgtatctgcaaaaacatttagctaacattgtatctcttgtagcacagcctgtggagggagaaggcgaagaatctctggttttaaccatggatagatttgagcaccttgggtttctaattcagtttggtgataagggatctgaaggaaattcttttagtcaatcttctcccttttttgcaaactcagaccctgatatgcctgctgttcctgttcctgctgctcaagttcatgattggcttctacagaatatagctgctgctttggaatatatttctgaacgaacttcttctaaggagaatggcccagctagtgcctctgatcaggatgttgctatgactgatgcatgcactacctcagttaacaaggtctcaacaagtactagaagtgcaagtttcattgaagggatctccaaatcgtcatatgtgaagcatgcatctgacattaaaggttcctctgttaaggttctaaattgccatgagtctgccatatacatcttagcacctttgagatatgcaactgtctatggatgttcagatgcaacagtagttattggagcagttggcaaggctgtgagagtagaacactgcgaacgagttcatgtaatcgtagccgcaaagcgtatttgtattgctaattgtcgtgaatgtgttttctttttgggagtgaaccagcaacctcttattcttggtgataaccataaactgcaggtggctccctataatacattttactcccaattggaagagcatatgaatgaagttggaattgtgcccacagttaaccgatgggatgagcctctagcattgggcatggttgatccccatgattcattatctcatccagcaggtgtctctgatgttcaagctgagtctgctacacgggtggaccctgatcagttcactgattttgtgattccaaattggtttggagcagagtccacaggggctacaaaaggcaacccattcacgttaccagatgcctatatggtatctcagcataaaaatcaaaaaaatttaggggagataaggcacctcttgcgagaagcacctttagaagaaagtcgcaaacgagaattgtcatctgcacttcatgtctacttcaaggactggttatatgcttcaggaaacattcgtcagctttattgtttacaaggcgattgatctttgtcagacaatggaatggcacagttaatggtataggaacgaggtttctggtttcctttttgtacttcctcttcaattcctcttgccaattctattggcggcataggtagctgagatcaaatgaggtgaattagagtaaaacctatttatgccgtgacatcagcggtgcacagaatcaaatgaaaaatacagttgctaatctgattgtaatatttttttgtttgtgaaaataattactgtaatattttgttagcctaaattaatggcttttgtgaaaaattccagcggccaatatctagcgtagtgtactctatatctcccaacttcgagtttttccatttaattaaacttcccgggaaaaaa

SEQ ID NO: 787 - DNA, 2334 bp, Glycine max
ccacgcgtccgatcaaagatctgcaactctctctctctctctcaaagatctgcaactctctctcatgatttttccctcggcgttgccatgacggaaccgacagagccatccacgtcatcttcattggcgagggacccaaccaccgtggttcacccaaggcgcgagcccttcgagcacggcctcttgccaatcccgcgcctcatcttctccgacccggcgcaaaccctaatctcgttgaagcagaagcttctcgagttatcctctaaccagcgagtcgactcggcggcaatctccgagtcactgcagatccccattgagcacgccaggctcgtccttgataccctcgcctcgattctgcactccgactccgaacctctcgtcgtcgccaagctcgtcgaaatcgattccgtcggcgtcgacgtccatgatttggttttgttcctctacattcaatcctacaagaggctcctcccgcgcacgcataaggactccgccgccgtcaccgacgtctggccttccacctccgccttcgatggctacttgtccgctctctcgccgcttcagctcgtacgcagcaacagtcggcggtttatgccgtcccaggctgatgaagaggcgcatcagttgtcgtatctgcaaaagcacttggctaacattgtgtctcttctagcagagcctgtggagggagaaggcgatgagtccctggttttaaccatggatagatttgagcatcttgggttcctaattcagtttggtgataagggatcagaaggaaattcgtttagtcaatgttctcctttttttgcaaactcagaccctgacatgcctgctgttcctgttcctgccgcacaagttcatgattggcttctgcaaaatgtagcggctgctttggaatatatttctgaacggacttcttcaaaggaaaatggcccagctagtgcctctgatcaggatgttgccatgactgacgcaagcactgtctcagttaaggtctcaacaggtactagaggggcaagtttcattgaagggatctctaaatcgtcatatgcgaagcatgcatctgacattaaaggttcctctgttaaggttctaaattgccacgaatctgccatctacatcttagcaccattgagatatgccactgtctatggatgctcagatgcaacaatagttctaggagcagttggcaaggctgtgagagtagaacactgtgaacgagttcatgtaattgtagcagcaaaacgtatttgtattgctaattgccgtgaatgtgttttctttttgggggtgaatcagcaaccacttattgttggtgataaccataagctgcaggtggctccctataatacattttatgcccaattggaggagcatatgaatgaagttggaattgtgcccacagtgaaccgatggaatgaacctctagcattaggcatggttgatccccatgattcattatctcatccagctggtgtctctgatgttcaagctgagtctgctacactggtggaccctgatcagttcactaattttgtgattccaagctggcttgtagaagagtccactgggtctacaaaagacaatccattcacgttaccagatgcgtatatggcatctcagcataaaaatcacaaaaatttagaggagataaggcaactcttacgagaagcatctttagaagaaagtcgcaaacgagaattgtcatctgcgctccatgtctacttcaaggactggttatatgcttcgggaaacattcgtcagctttactgtctacaaggtgattgatctttgtcaggcaatgcaatggctcagtgaatgatggtacaggaacgaggtttctggcttcctttttgaacttcctcttcaattcctctcgacaattctattggccgcataggtagctgagatcattatcagatgacgtgaattagagtgcccacatatttatgccgtgacatcaccggtgcacagaatccaatgaaaaatacagttgctaatctgattgtaatatttttttgtgaaaataattactgtaatgtagtagtattttgttagcctaaattaatggtctttgtgaaaaattccagctgccagcatctggtgtactgcttttcatgtcttccaacttcgagttgttccatttaattaaacttcccgagtgtctgttgggtcctctcgctttgcgaatttaccttgtagcattctgaatgagaagtaatgagcgagaatgggttggagattgctctaggactataaatgatctaacttcggttcaatgtaaataactaatctctgtatttctgaactttatacgcagtaaatttttgcccgtag

SEQ ID NO: 788 - DNA, 751 bp, Glycine max
gaaccagaaaagatggtatagtgaatacagtgggcaacgcagagacacagacacagacgtctctttaaattactaactaaggtgacgtgcgccagcacttgtcttttcgacacgctattctggccgttcgaattcgcttcttctttctgttatttttttccccttctcctcatctcctcaccatatataaagcaaaaccttggacttgtcatatactatcgtgtacgcttcctattcctttcgttgtgaaatatcgtttctctctcaaaggtaacaatgtcggaagctaagacccaaattgaatccataaggaagtgggtcgtcgagcacaagctccgtactgttgggtgtctatggctcagtggtattacgggttcgatcgcttacaattggtctcgacccaacatgaaaactagtgttaagatcattcacgcaaggttgcatgcacaggctcttacactgggagcattagccggagctgcactagtagaatattatgatcgtaagacaggagcaaaggcttcgtaaggaattttgacaataagtagaacgcaaccaaagtaccttgaattgtttataccgagggatcctagtacactacctgatatgattatagctaaatttgcaattggacttgtactgtactctattcattcttaaaataaaatactaagaaatgttaacatgcctgtggcagagtgaatatatttttttccttgttggaatggattaccaaaaaaaaaaaaaaaag

SEQ ID NO: 789 - DNA, 824 bp, Glycine max
ccacgcgtccgcacaaccaaattggcccatctggcttgcaatatatatttaattaaccaccagcgcatggtattatataaatgcccatcattttgtgctgaacacctaaaacactttaaaagggagggtgcacgttggcatcatcaagctataaaagaaaagaaaagaaaaaaagaaggttggagttagatacacacacatcacaaaaagaaaaaaaaaaaaaagaagctacattgcttcttgttggagacatcaaacatggcaactggtgccaccccagatggattattctggtcagtgtatgaagggtgcatatcctgctacgataactgcgtcgagcgacgaccctaccaccgtaactgtggctgtgcactccataacaagtcacttattaattgcacgcacaagcttccaaggtgtaacaatgtgtcataccctatgaggagggcatggagtgaaggaagcttggtcttggcagcttcttcttcttctccttctcaagttgcaactgggggaaggccacaaccaagtttggcaaacgttgaggaggaaaataagaattgctttagttaaggtttgacaataattaatatgtttgataaaactctgttttgctcttcttttcgttttattagtctgaatccggtttagccgtttaggtctttttcttttcctttctttctctttttgaattaataagttgatttgtagaaaggttgtcgactgtttgtaacatgctattgtggttcatggactatggtcgtttcttagcttccgtatatgataatacaaccctatttattgtaaatttgtaattatgctct

SEQ ID NO: 790 - DNA, 1965 bp, Glycine max
tcagctacgtaggccccccccccgaaccggaaaaaaaacttgacggattgcaaacatcaccttacaagacacgttcctgttatcgtattcacatgacaaataagaaatataatgctgaataattattattatatatatatatatatatatatatatattatatatacctacaatgtctccctacgaaaagataccaatagctcaacgccgcacctgttctccctccaaaagaattaagatacatgtgaaatttggcaggtaatggatatgttgttgttattatgtgttctcttggttgcattgccaaacctggctgtagtagagagtcgcagggctcctgttctggactactttgagtattgtgctatgagctgcagagcttacagtgcctcattggaagaatttggaggggttggtgatggaacaactttgaacacaaaagcttttcaggcagccatagatcatctgagtcagtatgcatcaagtggtggttctcaactttatgttcccccaggaaaatggttaactggcagtttcaatctcaccagccatttcactttattcctacacaaggatgctgtgattcttgcctctcaggatgagaatgactggccggtgattgatcccttgccatcttatggtagagggagggacacacaaggtggaaggtttagcagcctaatttttggaaccaacctcactgatgtaatcataactggggacaatggcacaatagatggacaaggtgatctgtggtggcaaaaattccgcaagggggagctcaagtatacccggccttacctgattgaaatcatgtactcagataatgttcaaatatccaatctcactttggttaattctccatcgtggaatgtacatcctatatacagcagcaaccttgttgttcaaggaatcacaattcttgctcctgtgacatccccaaatacagatggaatcaaccctgactcttgcacaaacacgcgaattgaggactgttacattgtctctggggatgactgtgtggctgtgaagagcggttgggatgagtatggtatagcttatggaatgccaacaaagcagcttgtaattagaagactcacttgtatttctccattcagtgctgtgattgctttagggagtgagatgtctggtgggattcaggacgtcagagctgaggacattgtagccatcaattcagaatcaggggtcagaatcaaaactgctgtaggaagagggggttatgtcaaggacatatttgttagaagaatgaccatgaaaaccatgaaatgggcattttggatgacaggaaattatgggtctcatgctgatgacaactatgatcctaatgcacttcctgtgattcagaacattaattatcgtgatatggttgctgagaatgtcactatggcagcaaggttggagggtatatctggtgaccctttcactggaatctgcatatccaatgtaaccattcaactggcaaagaaggctaagaaagttccatggacttgcactgatattgctggaatttcaagtgatgtgactcctgctccttgtggtctgttgccagaccagggagaagagaagattggggcatgtaccttcccagaagaaagtttgcccatcgaagatatcaaggttcaaacgtgcacttacagaaggaatttatgaatgtaaaaggaatgaccaagtttaagggaacaatccaaagcaatgtaatacttcaaaaattgtatttaaaaatattgtgttcttataaagactctgaacaaggcaatgacaacaatgatacagaaatgagtcaataataaatacacattttagtcgtctactagttctagatcgcgatttttgcacggaccttgcaaaacataaataggtagaagtaacgagcacacagttttttgattgctattgctgcattcaaaaggaagatagtttcattatgcagactcattattgatc

SEQ ID NO: 791 - DNA, 1559 bp, Glycine max
  misc_feature (1516)..(1516): n is a, c, g, or t
  misc_feature (1521)..(1521): n is a, c, g, or t
  misc_feature (1527)..(1527): n is a, c, g, or t
ttttttttttttttttttcttaaaacggtagcaatattatcctcttcattcagaaaccagtcttttgccagcgtcgatgatagaagctcacacaaaaccaccccaaagctataaacatcattttttacgctaagttggccttttgtcaaatactctgggtccatataaccacttgaccctgccctatcaccagtaacatgggtcgcatgcaccggaactccatctggaagtttctgcgacaaaagaaggttaccaacttttgcacaaaagttcgcatctaggaaaatattactggacttcacattgcggtggatgatgccataattgtgaagatggttcaatgcatttgcaatatcaaatgctatatccaatcgtttaagccaaggtagtgtaatcttttcgtccttttcactatgaagatgagcagcaagattgccattggataggtattctgtcactagcagagattcctcatgatgagaagcacacccgtaaattgacacaatatttttgtgaggcaagtaatttaggataatagtttcattgataaactgttgtaataagtagcgctggtctccgttaaagcgctgaattgtaatctcacgtccatcctcaagttttcctataacaatgtagataatcagaagaaactgttcaatgcaaaaacatgaggtatatgtagtccttttagtgattatgttaatcaaaattatagatttacttaggtatttaatgccaaatttgaatttcaatcttgattgtgtgaattactaaggaaaaattctaattttaattaaataacaatgctcaaaacacttaatatgaaaggctcttagtcacataaaaggctacagcatagtctaaccgtgatattgagtgataaggcctgtctttccacctctctttccaatgaaatgaaatcgatcaaaattatttgtggcttttctaagttccttgtagggaaagattcgccacttcaacttactgtgcttttccttttgcattgtgtctgaagatgtgctagtgaaacagcacacaaagatatcacgcctcaatctcatgaggtaattaccaatgttgcaggatcgttgggatgctggatgtaagtgaggtaaaatgtggctgatcagaattgcaaatttctctgcagactaaattctataacgtttaattccttgtgtagagcaaacaatccctcgaaagacaaggtgtccccaacaatttttggacgatgaattacccctttgaaggaatactctgccaatgccagaggtagtgatccaagtgtactgactcagaaagtctcaacttggagactgataagcaatctagaaaatgaaattaaccgaggtaacgtccttcttgattaagtgctgttctatgaatggggggggggcctacggggccgactcgagcgggggtgaatgagttttaatttgctgttgaacgcgtataagtgtaaaaaatagcattaaaaaggaaagaacgaagaaatagcagtgtaacaaggagaganaaagnaagaanaaaggaagctgcggaacgcacgaggatttcat

SEQ ID NO: 792 - DNA, 1011 bp, Glycine max
acaactagaaaaacaaaaccaaaagggaaccataggatagaagccagttaccgctgtagcaatggcatggtcactcacactgccaccgccttcttccctttcttcttcttcttctccttcttttcccaccttccaccaccaccaccactctctctttttcaatggagtagtagcgttcaccaggctccgccatcgccgaaactcgaacaccctttcccatgttccctctgtggggaaggaagacactgaccttcgtgtctcttctcttcaggaacagcaactaggcgaagatgacgacggcgatgatgaaccaactcctcaggacattgaatacgttgcccaaatcaaaagggttttggagcttctcaggaaaaaccgggacatgcttttcggcgaggtcaaattaaccataatgattgaagaccctagagaagttgagagaagaagattacttggtattgaagatttagatggcccaacaagagaagatctagttgatgccttggatgaaatcaatgaaggaaaaattcccaaggatagagcttctctccagatgcttgctgaggaattggcttcatggcctaatctagaggatgccgtgcctaagaaaaagcccagcaaatctctctatgcaaaagccactgacactggaattgatccagaattgcctgcaaagaaactgaacattgattgggattctgctgctgaaattgaagagacaaatgcagatgatgagacagaagtgccttcagtggtgggctatggagcactatacttggtttcggctttccctattattataggtatttcagttgttctgattttgttttacaattccctccagtaggaaattgcattccactcaaattcagtgtataatgttacactatattgaaatgagttagtatatcgcaatgttcacctaacatcatcacaagtttattattagtctaattacgttacaaaattcatctttttgaggaaagatgtccatgaaaaaaaaaaaaaaaa

SEQ ID NO: 793 - DNA, 1136 bp, Glycine max
ggatacccaactttccgtgccacaccttccatcaagagtactgaaaccatatcgagtctgctacctaggccccccccccagagaagcttgcaatggccaaagactacggagaagttgagttgtttggtgtggggggaagcccttttgccagaagggtgcagattgccctggaactgaagggagtccaatacacttactttgaagaagatcttaggaacaagagtgatcttcttatcaaatacaaccctattcacaagaaggtacctgtgcttgtccacaatggaagaccattggctgagtcccttgtgatccttgaatacattgatgagacatgggagaaccaccaccccatcttgcctcaacaaccttatgatagagccttggctcgattctggtcaaggttcattgatgacaaatgcatgcctgcaatatcaaaggcagcatttactgcagacaaggaggaacgtgacaagggcactgaggaatcactcgagtctcttcaaattcttgagaatgtactcaaacacaagttctttggaggtgagactactataggcatagtggacatagccgctggcttcatagctttctggctccctgcgattgaagaggctgtggggttgaaattgctgaccaatgagaagtttccaaaactctacaaatggggtgaagactacaccaaccaccctgttgtgaaaaagaatcttccccaaagagatagggttgtggggttcttcaaagctcgatatgcatccatcactgcttccaaatagaccaattgtgggtgtgatagagactcatgattttgggaaattgttgtgtaataaatcttgtaaggagtaggtggtttcttaagggagggtctacatgatggaatttcgagtaaaattgtagtgtttgtgcactttgtgttcaatttggtatttaagtaattatgttctaatatatataaaattctctctgaatataattgttaaaagaaaaagcatcttcttcatgctttggtataagttatcatgcgaatgttaagattggaagatttatcggggatgtctggtttggttgttttctgttttcattttcattggaaatagaagatggtgatgaaaatgtgtttggctaaaaaaaaaaaaaaa

SEQ ID NO: 794 - DNA, 702 bp, Glycine max
atgaaatttcatttatgaaccctagcctagcttgcttcagcttcttactttttcgcgctcgctctgttgtgaatagagattcatcacttccactcggcccattctccgctttcttcaaatcgtaaacttttttgggattgaagaccgaatcgttagaaattttcagggtacaatggcttccaacatctcgcccgctgcctttgataaagaacagatatttggaatggctgaaaaggagatggaatatagggttgaattattcaacaagatgacccagacctgtttcaagaagtgtgttgacaataggtacaaggagtctgagctaaatatgggtgaaaatagttgcattgaccgctgtgtttcaaaatactggcatgtgactaatctagttggtcagctgcttggttctgggaggcctccaatgtaatccaagtgtattgtatttgcttttgcggttagcaatctgtgagctatgtctacgatattattagttgttgcttcactggcttcctttcttcccaaggaagcataaattttaatactttgcgaggtctttatttttgtggtcaatctgctttgtttagaaagggattgatgagtttttttttgtctaaccctcaggtttatcaggagaaaatatcctaataaatttggagtttgaccgaaaagtaagaaaaatttaatcaataattatttttggga

SEQ ID NO: 795 - DNA, 3610 bp, Glycine max
cagccctgtgttgccactgctagtggttcctttgatcttcctgtggcaaatgcaagggatgagaacagtagcagttctagtccatctcacaactgtcaatcttattccagtgatcatgtgaaagctgggggtctctcaggaaaggaggatgccaggagctctactgcaatgagtgtgaataaggtatcgggaggctcttcacggcaccgaaaatctatgaagggatttccgggttcaactccatctagaaggcaaagggaaactgggtcgaggcagaattcctcacacaaaaatttaatttctgagaaaatatctcaatctggattaagggaaaaagcaaatgatggaactactcttgaggggcatactccgaagctgattgttaagatccaaaaccgaagtcgaagtcctgcacaaagtgccactgcaggttcttctgatgatcctgcaatcatgaacagtcgagcttcatctcctgttctttcagagaagcacgatcagtttgaccgctgctcaaaggaaaagagtgatttttatcgagctaatattggtgcagacatttatacagaatcgtggcagagtaacgatttcaaagatgtattgactggttctgatgagggtgatggatcaccagaagccattactgatgaacagtgtaggactggtgaggattgtaagaaagtattagatgtatcaaaggcagcttcatcatcatctgggaatgaaagtagagccaggaatttgcaggatgcttcttacagctccatcaatgctcttattgaaggtgttaagtacactgaagctgatgatgttggaatgaatcttcttgctaatgtggctgctggagagatctcaaaatctgaattgggaatgccagttggatcccctgaaaaagacaccactactattgaacagtcatatgcaggtgatgctgcagtagtcaagtcctctgaagagtatcttgttcaggataagtgctacactaatgttgaacattcgaagcaggattctagacctggtgatttaggggcagatgatgatattcttgcatctgaagggaaagctacaggagaacacaatacatctagtatggatttatgggttactgaaactagtttagaaagcgaaggagaattaattgaaaaatcatctggtacatcatctgctggcattcctgaaagcaccattcaagaagtccgagatagtgactctagcaaactggtaaaggaaaagaaggttgttgtgagagtggatgcagttggtaatgttgatgttaaggtcaatgttgttgcaagcgaaagtgaaacagaggcaattgaaaatttttcgtgcacctgtgaagtagttgatgtcaagtgtgataaccgtgcttctgaaggactaagcggtgacaaagagacagctggcaagtctcctgccattcgcatgtcgtctgactatgtaatagcaacagatgagaatgcaccccaatcatctggtgacattgttgataaggttcttgaacacgtaaatgaaagggaatctgaaaaaaatgatgatatggctgctcaggatcatgctaagcagtctttgaagcaaaaaaatgagtctgaaaatgatgctattatggtgcccgagaacagaggtttatgttcaggtgcgactggtcttgatgctgaatacgtggaagagaattcaggtacaaaagaggtttgtgaccaagttgcaggagcaggacagatagtgcacacagatttacctagctttccttcacgagaaatggatcagtgttcaggtcataaggattcaaaattgactgccatggaatcagaggaagcagaggaatgcacctctaccactggagatacctcttctgcgtctgttgctggtgtctcagaagtggacacaaaagttgaatttgatttaaatgaagggttcaatgcagatgatgggaaatgtagtgagatgcctgggtctacacctgctgcaagattggtcagtcctgttccattttctgcttcatccatgtcttttggtattctctcgatcacagtagctgctgctgcaaagagcccctttgtggcacctgaagatttattgaaaagtaaaaaggagcttggttggaagggatctgctgctactagtgcatttcggccagctgagcccaggaaagttatggaaattcctcttgatatgtcaactacccctattcctaatgatgaagctagaaagcagagccgggcaccattggattttgacttgaatgtttctgatgaagtaatacttgatgatgtttcttcccaaaattgtgctcgtcagactgattgtggaactcattcagacaatgggcatgatccaaataaatcaatggcctcacatgttagttgttctggaggtttaggtcttgacttgaacttagtggatggagcttctgatgtgggtaactgcaccttaagtagtagtcataaaatggatgtaccacttatgcaggtgaaatcagcagccagtggtcctccaaatggagagatgagtttccgcagggatttcgatctgaatgatggacctgtagttgatgaagtcacctctgaacctttgatgtccacacaacccgctaggaatagtgtaccatctcaaccacccatttctggacttaggatgagtaatgcagaagaagtaggcaacttctcttcatggtttccttccactgcgaacacctattcagcggtaacaatatcttcaattatgtctgatagaggtgataggtccttttcaattgttgcccctaatgggccacaaaggatgttgggtcctgcaactggtagcaatccatttggacctgatatttataagggggcagttttgtcttcttctcctgcagtgccatatcaatctgcaccatttcagtatcctgtcttccctttcaattccagctttcctcttccatcagcatcattttctggtggatcaactccttatgtagatacaacttcaggagggaggctttgcttccctgtagtaaattcacagcttataggttctgttggtaatgtttcagcccattaccccaggccttacgttgttagtttcccagatggtagcaatagtagtggtgctgagaacagtaggaaaagggcaaggcagggtttagatcttaatgctggacctggttcagacttagaggggagagatgagagctcacctcttgtaccacggcaactttctgttgctagttcacaggcccaacttgaagagcaagcaaggatgtttcacttaagcagtgatgttcttaaaaggaaggaacccgatggggggtgggatggctacaagcaatcatcatggcagtaccataatttgtaatcttagaatctaatgacccacagatgcctgtaagtttttagttttgtaaattcaactgttgtttgtaacatgtaggtgcccgagaggaggatatttcaaaatatatactgtattgtgctgatgtaatacagaggaggggggagaattttttcataaagcaatttttttattttataaaaaaaaaaaaaaaaaaaaaaaaaaaaaaaaaaaaaaaaaaaaaaaaaaaaaaaaaaaaaaaaaaaaaaaaaaaaaaaaaaaaaaaaaaaaaaaaaaa

SEQ ID NO: 796 - DNA, 1325 bp, Glycine max
tttcttctcagaactgtgctcgtcagactgattgtgtaactcgttcagatgatgggcatgatccaaataaatcaatggcctcacatgttcgttgttcaggaggactaggtcttgacttgaacctagtggatggagcttctgacgtgggcaattgcaccttaagcagtagtcataaaatggatgtaccacttacgcagtttaaatcagccgccagtggtcctccaaatggaaagatgagtgtccttagggattttgatctgaatgatggacctatagttgatgaactcaccactgaacatttgatgtccacacgatctgccaggaatagtgtaccatctcaacctcctatttctggacttaggatgagtaatgcagaagtaggcaacgtctcttcatggtttccttccactgggaacacctattcagccgtaacaatatcttcaattatgtctgatagaggtgataagccattttcaattgttgcccctaatgtgtcagaaagggtgttgggtcctgcaactggcagcaacccatttggacctgatatttatacgggggcagttttgtcatcttctcccgcagtgccatatcaatctgcaccatttcagtatcctgtcttccctttcaattccagctttcctcttccatcagcatcattttctggtggatcaactccttatgtagatacaacttcaggagggaggctttgcttccctgtagtaaattcacagcttataggttctgttggtaatgtttcagtccattaccccaggccttacgttgttagtctcccagatggtagcaatagtagcagtgctgagaactgtaggagaaggacaaggcagggtttagatcttaatgctggacctggttcaaacttagaggggagagatgatagctcacctcttgtaccacggcaactttctgttgctagttcgcaggcccaacttgaagagcaagcacggatctttcacttaagcagtgatgttcttaaaaggaaggaacctgatgggggatgggatggctacaagcaaacatcatggcagtaccataatttgtaatcttagaatctaatgatgacacacagatgcttgtaagtttttagttttgtaaattcaactgttgtttgtaacatgtaggcacctgaggggaggatatttcaaaatatatcctgtattgtgctgatgtaatacagaggaggggggagaattttttcgttaagcaatttttatttttaatgatataggaataagtgctattgcagttgccctgtgagttttctttcccgtctctatgagaaatcctgtatctttgagtgcatttaa

SEQ ID NO: 797 - DNA, 2700 bp, Glycine max
ccgaccaaacacagtgttgattcccaaatccccattagttttcaaaataaagactttgcgtggcacccacaagaaggccacacagtcaccaccaccaccacccatttctcccggtgcgcgactcactttatttttattcatccttccttcctaacagatccgatccccgatggcggcggcgtcgcggcggctccgggacctgcagtcctcggcggggaacaagatctgcgtggactgctcccagaagaaccctcagtgggcctccgtctcctacggcgtcttcatgtgccttgagtgctccggcaagcaccgcggcctcggcgtccacatctccttcgtccgatccgtcaccatggactcctggtcagacatccagatcaagaaaatggaagccggcggcaacgacaaactcaacgccttcctcgcccagtactccatccccaaagaaactgacatcgtcacgaaatataacaccaacgccgcttctgtgtaccgcaaccggatccaggccatcgctgagggacgtccctggcgcgatccgccggtggtgaaggaaaacctctccgccggaaaggggaaaccgccgctgacacaaacgcggaggaacaacgattctggatgggatgattggggtaacgaggggagtcctcggagcaagagcatgtcgaccggggattttacgactctgaatggagccggcggagcgccggcgaggtccaggtccacggaggatatctacacgcggtcgcccctggaggcgtcagccgcgaacaaggagggattcttcgcgcggaaaatggcggagaacgagtcgcggccggaggggctgccgccctcgcagggagggaagtatgtagggtttggatccagcccgacgccgccgccacagcggcggaatgatgcccaaaacgattacttctctgtcgtttcgcaggggattgggaagttgtcttttgttgctgcctctgcggctaatgttgttcaggttggcacgaaggagttcacttccaaggtcaaggaaggtggttacgatcataaggtgaatgaaactgtcaatgttgtcactcagaagacatcagagattggacagaggacttggggcataatgaaaggagtcatggctatggcttcccagaagattgaggagtacactaaggatgatccaaactggaagaatgataactggcaacgaaatgagaatgatacaaatggttattatcaggattttaatcaagagaaaaaaggatggaattcttctactggaagagaacaatcttcatcaggggaatataaaactcaaagctctagctcttgggatgattgggaccacaaagatagcaggaaggaagaaccagctaaaggatcaactcattcatcaggtgggcagtttagtacctacaactcaagctcttgggatgattgggaacacaaagattctaggaaggaagaacctgctaaaggatcagctccccataataatgatgattgggctggctgggataatgccaaagatgatggattcgataatatttatgaaggtgctaataagaaaggtgttggtcataaggggaaatctgatggcacttggacagaggaaggctttctctaagatttcaaggtcataatttgaaacaaattattacttgttatacttcttggaccccaggggtgattggacttcattaccagtttcgtgatttgttcctcaagtgacaaaaaaatactgtagtttacgcactgatggcatgcaggccaagcaggggcgccaccaaccaaacatgatactcgattttcagctataacttttaatcccattgttcctttttaaacccagacccattcttctcctttccatcgtttcttcaatattcccttctcttttgtaatttttgggaatgttcgttggagagatagtatccaaaaatgggctaatctcccaaatatcaattcttaagagcattattgcctgcgtagtgcgatgaaacattaatggcagggaaatttcagaaatgtagcctcttaatttgactgcttataattttatgagtgcccttccctcgcctgtttctcataatttaacgttgttatttgtcagagaattttaatgaatggcgtcaatttccatgactaacttaacgttacactcttctgtttttggttattacgctccaatctgtttgttcagtaccaggaacacaagtagcggctccagcacgatgctaatataggacgaagaaacacgaacagacagcagctccaataagaagatgagcagcagtggcgcaagagaagaacgttggcacgaggaggggtaaaactttctgcactttcactattgctttagacattttttattggatttcggaaagtggaatccaatggaaagtgcagaagcaagatgtttcgcttgagcccaccattttcttccaaatattttcacgccatgttcaacttaccaaactagtaatgaacttccaacatttcctcggtctttgactctcctttctgggtcccaaccaaagcaataatgatgcccccagcctcaaaattttcatgcacacgagaatttaaatgcaactgtttaagacttcaacttgatatcattaagttagaacaatctcctcccagctgttctgctcgctcaacagtgatgtattaaacccttaagacaggtttatcacaaaaccaaaaaaaacaaag

SEQ ID NO: 798 - DNA, 1332 bp, Glycine max
gcttgagattctttttgtagaggatttttttctttccgtaagtgtcaatgcattgttatgcttctggtctttctttcttcagctacggaggcccccccccccccccccacatgttccatagttcttgctctgggtgggtaaagatggaaggtgctagtagagtcttatgcttgtttctggcggcatttttgtggtttaatgctcaacatgcttttgtaagttgtgctttgacatttgagttgcaaagcaaaattgctaaagccaaccaagagggaccttacctaggtttaatcataccaaattcttttgaactagaccctcttcttcagaatcctggctacacagctagtgacaccatcatagacttcgctggaaggagatttcgctttggagccattggtgacaagcctgttatactggtcatgacaggattgagcgtgataaatgcagctataacgactcagcttctgttgagtttattcacggtagaaggagtggtgcattacggcattgctggaaatgcaaacccgtccttgcatattggagatgtagctattccccaatactgggctcatctagcactatggagctggcagaggtatgggctagggcctgatgacacattacccttggaagacaatggagactacaccagggaattagggcacttaaattttgcaaatttcacctcaaacgtaactgctgatagtccatttgataaccaactcaacaatatatggtaccaaccagaggagatttttcccattgatggcgttccggaagtaaggcagcatgtcttctgggttccggttgattccaagtactaccacattgccaaaaagttgaaggacttggagctagagtcgtgcataaactcgaccacatgcttaacaacgacaccgaaggtggagcttgtgaatagaggtattagccaaagcatctacctagacaatgcagcatacaggtctttcatctacaacaaatttgaagtgagcccagtggacatggaaagtgcatcggtggctcttatatgccatcaacaaagggtacccttcattgctattagggctctctccgacttggccggtggcggctccgccgagtccaatgaggccgataccttcttatcaatcgctgccaccaattctgtcactgtggtcattgagttcgtgaagctcttgtcactccactctaagtggtggtccatgtaatattccgtgtatggtgcacatgtagacaacttcatcgtacgttgtttcagagtaataagaatctgtgcattgatctatataaatggcgacaacaacttttccctgaccataaaaaaaaaaa

SEQ ID NO: 799 - DNA, 1065 bp, Glycine max
  misc_feature (1049)..(1049): n is a, c, g, or t
agggcgcggtcatttctatgggcagcgggttattaaccgggtcgcaaatccgacctgcgaaaagccgaacagcactctaagaagaacggcgcagcaactcgatcatcgatcttccccggtgatcttcaacgatccggcgaaaacacgattctcaccactcgcaaactcggacagggcacagaagatcgtgaaatcgtacgatcttacgagtcagatcgcggttttgagtaccatgaggtgaaagctttgttttttgaattgtgaggaagattgaccaaataaacagaggcaaaaatgaagatggtaactgctttcaacggcaacatgaagaaagctgctgctggacttagacgcattaatcttgatggtcttcgatggagggtttttgacgcaaagggccaggttcttgggaggttagcatctcaaatagctactgtagttcaaggaaaggataaaccaacttacacacctaatcgtgatgatggggatatgtgcattgttcttaatgcaaaagatatttgtgtgactgggagaaaacttacagacaaggtctactactggcatacagggtatattggccacctcaagcaaaggactctaaaggatcaaatggccaaagaccctactgaagtcattcgcaaagctgttctgcgtatgctccctagaaacaaactacgtgatgacagggatcgaaaattaaggatctttcctggcagtgagcacccgtttgttgatcgcccacttgaaccttatgtgatgcctcctagaagtgtacgagaaatgaggccgcgagcaaggcgtgccatgattcgagcacagaagaaggctgagcagcaacaacagaaggctgatggaatgaagaagggcaaaaatggagaagcccaggaagaaagtgcatgaagatgcaattttgctcaagaaagatgacactgaccattggttatcgttgaaatttgaagccatgttagcaatcctacaatgccctattgaattgtgtttgaaatttttttattttacaagtcttttagtaagagcatagcttaagagcntgattgatttacatta

SEQ ID NO: 800 - DNA, 829 bp, Glycine max
  misc_feature (4)..(4): n is a, c, g, or t
ggcncgaggtggtggcggcagtggtggtggcatgagatcaaggttccctggtgggatgtttggtgatgatatgtttgcatcttttggggaaggaggaggaatacatatgagtcaaggtgcacctcggaaagctgctcccattgagaacaaattgccctgcactcttgaggagatatataaagggactacaaagaagatgaagatctctagagaaattgcagatgccagtggaaaaaccatgccagtagaggaaatcttgaccattaatgtcaagcctggctggaagaaaggaacaaagatcacattccccgagaagggaaatgaacagccaaacgtgacacctgcagaccttgttttcattatagatgagaaaccgcacagtgtcttcgcccgcgatggaaacgaccttgttgtaacccagaagatttctcttgcagaggcattaactggttacacagtgcacctcactaccctagatggtagaaacctaaccataccaatcaacaatgttattcatcccaattatgaagaggttgttccaagagaaggaatgccacttccaaaagatccatcaaagaaggggaacttgaggataaagtttaacatcaagttcccaactaggctcactgatgagcaaaaagcaggaatcaggaaactcttcaacaatgcctaagcttgagatagtatagtatttgtcagatttccctctgggaattactttttaaattatgaagatgtaagatataccattaaactttggatgtttccatatggattgtaaacttagcgaaaaaattttgatttgattcttttgtgttgtttatcagtt

SEQ ID NO: 801 - DNA, 1462 bp, Glycine max
atatctatacaatgaaattaattggaatccctaaccagttcattagaagaccgagaacgatatcgcttttgtcaaacttggtgtgttaatggagtatttgatacttgagtccctaatttaatttgctagggaaagctacggttggaccaaaatcaaccagtacctacttgaaaccgagtgaaaaaacctactactcccactcccagtgactgagtgaaaaaccacaacctagaaagaaatgaagaaaatacagcactctgaacaaaaagcaacggaaccaaccaaaaaggattcaaagggcaacaaacaagaaggcacagactcagagtcagagcaataccaaaacgaagaaaatcaactccacacgctttcggaaccatcaccatccttctctctccgttcccgcaaatccccttcgccaccactccactccctctctgactcccccatctccgatgcccacctctcccctgcgccgcagaagccgccgcccgattcctcgccggactcctcgatctccgacggccacttcacgatcggtgaacagcgcctctccccggcgccgccgaccgtggtgacggctcatcggttgaaggtggagcccgcggtgttgaccagggtcgatcccggcgccgaagagggtttcgtgaaagacgtcgaacaagccaccggcagcgccggtagtcgacgcctcagaccggatatgaccggtttgttgaggtcgaaaaaaatcgccacgtggagcaagctcttgctgggtcttcgagtaaccgcttttgttttctgcttggcgtctttctcggtgttggccactgataagaaacagggctgggctatcgactctttctatttatacaaggaattcaggtatagtttgtcagtgaatgttattgggtttgtgcattccgcgttgcagatatgtgatcttgggcggtactttgcaacgggaaagcacttggtggagcaccagctaaggggttatttcactttcgcgctggatcagatcttgacataccttctaatgtcagcatcatcatcagctgccactagagcttatgattgggtttccaattggggtgaggacaagttcccctacatggcaaatgcatctgtggctttgtccttggttgcttttgtggcctttgccttagcctctcttgtctctggttctattgttgtaaggttcacataatttatacaagtactatgtgtgaggtgtgcaaactcttatctgagatactggattaagctttatcctttctcgattgaaaatcgtcccatattttcagaaggcagactgactcactttgtacagaagggaaactcactttatttctctgtcaactttaatttgtatagatgcaggtggatttacagcttgctgaactggcttgtatatgaacttttgcattattgagatggtattaagcttacttttttatcaaaaaaaaaaaaaaaaaag

SEQ ID NO: 802 - DNA, 1533 bp, Glycine max
acagacttaagtttttcgtactctgtttcttccaatgacatatttggagcagttctcttgcaatctccattcctgctacgtagcccccccccagagatattttgcttgtatctttacccgggaaacagcccggatagaaaggtttttaaaaaggatgtggtgtttgtagtagatataagcgcaagtatgaagggaactcctcttgataacacaaagaattccctactgacatcactctctcaactaaatgcacaagatacatttaacattatagctttcaatggggcggtctacttattttcatcatcaatggaaagagctacagaggaagcaattttaaatgctaccacgtgggttgacaccaattttattgctaatggtgacactaatatcatgcttcccttaacacaggcaatgaagctacttgagaaatcaactgattcggttcctcttatttttctcgttaccgatggggctgttgaggatgagagagatatatgcaattttgtgaaaagctatgtctcaagtgggcaatcgtttcgaacacctcgcatatatacttttggcataggtttatattgtaatcactacttcctgcaaatgctagcacaaattgggaggggccactatgattctgctcatgatttagattcaattgactttagaatgcaaaggctattcagttcagcttcatcagttatggtagctgatataacaatcaaaagtttagaaggtcttgattcacttgagttattcccaactcatatacaagacatatcatttgaaagtcccttgatcttatcaggaagatacagtggaacttttcctgaattagttaaagtcactggtactttggcagatatgactaacttcgtagtagaccttaaagtgaaaagagaaaaggatatgcagctcagtaatgtcctttcaaagagacatatagatcaggtcactgctcaagcctggttgttaaaaagtaaagagctggaggagaaggtcactaaaatgagcattcaaaataaagtcccgtcagagtatacctgcatgaacattgttcttgtacagagtgatgaagggaagaaggcacctgaacaatttctgttgcaaaaggcgtacaacaaacttagcttccagaagttggaactcaacaaccagaacttattccttggagggttgaatcttgcatttggtaacttaaaagcagcttatgagaacttgcccccagctataaaagaagcaaaaccatctgaaggactactgggcaaggctgcttccaattgatgtggtcgagtggctgaaacctgttgaggcatgtgtctgatgcacacctgcacttttgtgaatgaccagtgcgccatcgtttgcgctcagatatgtgcagccgtggcctgttttgagttaatcaaaagctgtgttgagctctgtgactgtgattgcatgcagtgaaataaagttgtatgtttgagttaaccatagaagaactgtatgatgatacaaattgttggcaatgtatatattaaagtataagctctt

SEQ ID NO: 803 - DNA, 1941 bp, Glycine max
gctttcttctcttccttccccgcgtcccattccctgcacaaacagctgggcttcattattaaatcttcctcaaccagcaacttcaacttcctcgttccccacttcattaccctcgtaactcgtaacggcttcataccggacctttccttttctgtttttctctcaacttcaaagttagaatcttttgttcactcactgagccatggatggcgccgagttcgacgccgcgtttgggttcccatctgagtttccctacgagtttgactcggtcgggactgaaccggttgattccggttcgaccgggactgagagtagcgacgatgaggacttcttcgccggcttgactcgccggctgagtcacacctcgctcaatgaaacaaggaaggaacaacacttcactgttcccatcggcaacagtggccaagctgagagtcagaagatgatggctcgtggtttggccgggtcacctcagtctatactgagtgggatcggaagctggtcgggtcggcggcgccgctcccccccccgaagccccaacgggtcttctcgcgttccgtcgccgacgacgacgccgtttaaatccacaaacgacgcttgggatgttctgtacgcagctgcaggggaagttgcgaggttgaagatgaacgatttagtttcttcgaagtttgatttccagaaccgtggagtgctgggtggttttcctccacctgttgcggcggagaatgtattttttccaaaccagggtgtttctcaggttcgataccagcaagtgagaccagagcagatgctgaagcagcagtgtggttcggtttggggcaggcaagagaaggctggttgggtatctcagcagcaccaccagccacaggttcagaacagggttcgtgatttgcgtgagtttgggtacgactatgaagctgtgaaatgcacgcgcgctttgcctcgtcctgcatggcaccctcttcaagtgaagaaccagaatacccaacacgtgcctcatttcggatccgggtcacgacccgggttacaagctggatccggtgctaccaaaaggggttgcgctggaacaggggttttcttgcctcgtcaatatggggcccctccggattctcgcaagaaaacatgctgtgccgcacctgttttggtcccagctaaggttattcatgctctgaacctcaacattgatgaactaaatgccgctggccaaccacgcttctcaagtgcttttggcgtggactatgatgctctgctggcgaggaggaatgctcttctactgcagcagaagttaagcatgcggcgagaagaggcagcaaattatgaagctcttcgcctgccgcaggaatggacgtactgactccttcgataatagttcgttcaaacaagattcaattaaaccttggtggagaaagaaagctagtgaaattagtaggattgtgatagggaagttggtttttttagtttttttttataatataaagatgagattcaagaatgtgtttgggtagtttagtggcaataaatcatccggtttttgtgagagatgcagcttttgggatctgttagttgaagaaacagtgaaagatagtagtttaggggaagctttttttttttttttttacttttatgaagaatatatttataatttgtaataagtggggttcgttttcttccatgctaatgttaaattaatgttgatggaagaagggtaaagaagggcttattgtgttggaagagggttcagagtctagctggcaaaagaaggagggtgaagggcttattcgatgaagattgctcataactctttgtaaaaaagctcttgctcgtaatagaacagtatgtaataagtaagttatactaaatgtagtaaatgcaagtcttgtgtaattcctcaaaaaaaaaaaaaaaaaaaaaaaaaaaaaaaaaaaactcgagactagttctctc

SEQ ID NO: 804 - DNA, 566 bp, Glycine max
ttgtggttagagagagagaaaagagagttttgaggagggagggaataaaacaaaagagggtaagcttagtgtgggcgtttagtgggtacccttgttgccttcataggaagtgagaaactaggctagtgagtcccattggaattttttttttgtggctgaagaaggtgaaaagggggcaagtttcactcttgaagggttttgaggggtgtcaacttgtgtttggagactccgaggttgagtttgaaggtgcattctttgaagggtgtttttgttatgggttctagttgtggttgtggtgtaactcttgttcttgttttctgcttatggggtgtgttgatctccctctcttctgctgctaggctcagtgcttcaaggcagaagcttgaggttgctaagcatttgaatcgcctgaacaagcctcctgttaagaccattcagagtccagatggggatacaatagactgtgtacctgtttcgaagcagcctgcatttgaccatcctttcctcaaagatcacaagattcagacaagacctactttccaccctgatgggctttttgaagagaa

SEQ ID NO: 805 - DNA, 1887 bp, Glycine max
  misc_feature (1869)..(1869): n is a, c, g, or t
  misc_feature (1884)..(1885): n is a, c, g, or t
ggctcgagttgttgccctcatatgttgtgagaaacaaggctcgtcggctgcggaagacgacagaagggggtggctgaagaaggtgaaaagggggcaagtttcactcttgaagggttttgaggggtgtcaacttgtgtttggagactccgaggttgagtttgaaggtgcattctttgaagggtgtttttgttatgggttctagttgtggttgtggtgtaactcttgttcttgttttctgcttatggggtgtgttgatctccctctcttctgctgctaggctcagtgcttcaaggcagaagcttgaggttactaagcatttgaatcgcctgaacaagcctcctgttaagaccattcagagtccagatggggatacaatagactgtgtacctgtttcgaagcagcctgcatttgaccatcctttcctcaaagatcacaagattcagacaagacctactttccaccctgatgggctttttgaagagaacaagttatctgaaaagcctaaagcaaaagcacatacccccatcactcagctgtggcatacaaatggtagatgccctgaggacacaatacctgtcaggagaaccaaggaggaggatgttctgagagcaagttcagtgaaacggtatggtaggaagaagcacagagcaatccctaagcctaggtctgcagaacctgatctaattaaccaaagtggtcatcagcatgcaatagcatatgttgaaggagacaagtattatggagcaaaagccactataaatgtgtgggaacccaagattcagcagactaatgagttcagcttgtctcagctttggatattaggaggctcatttggtcaagatcttaacagcatcgaagctggctggcaggttagcccggatttatacggtgataacaacacacggctattcacctactggacgagtgatgcatatcaagctactggctgctacaatcttctttgctcgggatttattcaggtcaacagtgaaatagcaatgggtgcaaccatttccccagtttctggataccgaaactctcagttcgatatcagtatccttatctggaaggatccaaaagagggacactggtggatgcaatttgggaatgactatgtattggggtattggccttctttcctgttctcatatttggctgacagtgcttccatgattgagtggggaggtgaagttgttaactctgagcctgatggtcagcacacatcaactcaaatgggaagtggtcatttccctgaagagggttttggcaaagcaagctacttcaggaacattcaagtggttgatagctccaataatctcaaggctcccaaaggcattggcaccttcactgagcaatcaaattgttatgatgtccaaacaggcagtaatggggattggggccattacttttactatggaggccctggtaaaaatcccaattgtcaatgagtaatgatgagaggtgaaagataaaaaagtaaaaaaaaaattgcggcctctcttgtatcattcaatgcttgtgttaaagtccttcctttcttctccttccatcttgtatacccttacccttttctgtagtggaaagttttgactgttttttttttcttctaatattgaaagattcttcatgtaagctagtggagaagtgtggccaagtttctcaaaagcctaaagaaacaggcctgcctttataacatcatctttgtattttatttctttgtccactcctcctccctctataggagtgtttgtcaatggcaatggtgcttactcccagaatgagtcgcttaatgtagttccataattttaaatgattatatggtacctatgggccatgctttgaacgaaaaaaaaaaaaaaaaaaaaaaanaaaaaaaaaaaaaannag

SEQ ID NO: 806 - DNA, 1551 bp, Glycine max
ggcaagttggggtccttatgtgatactttaggtaatattgagatctatagaatttttatggaaatgcctcggagccacacacgcccccccccgcttggctgttatacttggtatcatgtctgtagcaattcttttagctgaggcaactcttctgcctagcattgatctatcgcttttttccattcttataaaatcggttggaacacaggaggtccttgtgcaggtgtttgcttttgttcctctcatgtacatgtgcatctgcacatactattcattgttcaaaattggaatgttgatgttttactcactgacacccagacagactagctcagttaacttgcttatgatatgctcgatggttgctcgttatgctcctcctgtctcatacaactttctcaatctcattcgccttggcaagaataaaacaactatatttgaacagcgaatggggaacattgacaatgctgttcctttctttggggatgaatttaacaaaatctatccacttattatggttatatacaccattttagttgcaagcaacttctttgataaagtatttgattttctgggaagttggaagagatatattttcaaaactgaagctgaagatatggatggttttgatccatctggattaattattttacaaaaagagcggtcttggcttgagcaaggatgcaaagtaggggagcaagttgttccacttgcaagaaatttcaataacattgatattgaatccaccatctttgttctggagaggaatggtgctgaaatgaagccaacttccaatttaattactgatgaaataaatggccgtctgtccaaaacttcgaaggaagacacaagcagaagcagggaagccatcaccaagaagtatgctgtcgttagagagcagggtcggccagcatctaagttgaagtcagaagagaaaaacgcagcctcggctgattccttgcgcgaagacgacagaagggaatactaattcttgcaattcatctggaggatcatcttcaggtttgacttcgacgtggcaatcgatgaagactggctttcagagtttcaaggtgaacataggggccaaaaagtttttacctctacggcaaatacaggaaaataccggctctagtcattcctcgtctgagtcccttgatgacatatttcaaaaactcaaacggccaactttaaaccaatctatatacaatgacgacgattagtatggaggccaatacttttggttcttcttgttgatgtatccataatttggaaaggacttgcaattgtaaaagcgttctaggattgggaatgcaggtccatattatcatgtacagtaatgagaaaatttaaatgctgtacttagaaaatgacaatcatacttaaatcccccaaggcaaaccaaagagggaaagatagtgtgctatacggaaactcctatacgtttgcaaatcaatctcacacaaaatcttgatgtaccagtggacggtgtcaccgacgtttaaaactcctatacttggatcaaattgcattagttttatgcgatgtctttgaaaa

SEQ ID NO: 807 - DNA, 1416 bp, Glycine max
tcagctacgtaggccccccccccaggcgtcattttcggttgccatattacggctgcagataagacgcgcacggggcatatccaaaggaacaaaaatattattaagatgatcaacattattggagcacttgttctactctttgcatttctcttcctcagttgtgtgtatgcacaagacacaacaacccttgtgcctgcaatcataacttttggtgattctgctgtggatgtagggaacaatgactatcttcccacccttttcaaggctgattaccctccttatgggagggactttgttaaccaccaacctactgggaggttttgcaatggcaaattagctactgatttcactgctgacacattgggtttcaagacctatgctccagcatatcttagcccacatgcatcagggaaaaacctccttattggagcaaactttgcttcagctgcatctggttatgatgaaaatgctgctactttgaatcacgcgattccgttgtcccaacagttgagttatttcaaggaataccaaggcaagctggccaaggtagctggcagtaaaaaagcagcctcaatcatcaaggatgcgttgtatgtgctcagtgctggaagcagtgactttgtgcaaaattattatgtcaatccttggatcaacaaagtctacactcctgatcagtattcgtcctacttaattggttcattctcaagttttgttaaggacttgtatggattgggaggcaggagacttggagtgacttcactcccaccattgggttgcctacctgctgcaaggactatatttggtttccatgagaatggttgtgtctcaagaatcaacactgatgctcaaggatttaacaagaagctcaactcagctgcaacgagtcttcaaaagcaacttcctggtcttaagattgcggttttcgacatttacaagcctctctatgaccttgttcaatccccttcaaaatctggttttgtggaggcaaacagaggatgctgtggtaccgggactgtagagacaacatccttgttgtgtaatccaaaatcaccaggaacttgttctaatgccacacagtatgtgttttgggacagtgtccatccttcacaagctgctaaccaagttctagctgatgcattaattctacaaggcatatctcttgtcacataaagactcgtcattatttatgttgttagaaattattattgtgtacaagtacaactacacatcgtgaaagtgattcaaaagtttgctgtttttctttagtttggaaaaaaaaaactgtgctctatgtattttagatcttgagaaatttcagataaactcgtttgtaaaccattttataataatagagaaatgtttgcttattatcatcaaaaaaaaaaaaaaaaaataactcagactagtctcgcgctc

SEQ ID NO: 808 - DNA, 1809 bp, Glycine max
tcgagtcaccagtttaatgctttcaccaactaagtactacagagtactagaaacaaaacaaaacaaatcaagtgctcttataactttagagtccttttaccttggttctgatccagtcatatatcccccacgttcgttcgttcattcttcggtttctccgaatctgatttctgatttgggaaaatgctcctgggattctcaacgttagcgttgttggtgtgtttctcatgttgttggttattagtgttgggcgagggtgaaacggcgtcgtgctcgaacatagtggcgttggggcaccgcaccgacaacatatccataacggagtttgggggcgtgggtgatggacgcaccctcaacaccaaggccttcagagaggccatatatagggttcagcacttgccacgagaaggaggcacgctcctttatgtgcctcccggggtgtacttaacggagccctttaacctcaccagccacatgacgctgtatctcgctgccggtgccgttatcatggccacccaggattcattgaattggcctttgattgcacccttgccatcttatggaagaggaagggaacggcctggaggaaggtatatgagttttatccatggtgatggagttcaggatgtggtaatcacaggtgaaaatgggacaatagatgggcaaggagatgcgtggtggaataagtggaggcagggaactcttcagtttaccagaccaaacctagttgaatttgtgaattctagagatattattatttcaaatgtaatctttaagaattctcccttttggaacatacacccggtttacagcagcaacgttgttgttcgatatgtcacgattttggctcctcgtgactctccaaatactgatggcattgatccggattcaagttcaaatgtgtgcatagaggattcatacatatctactggagatgatcttgtggctgtgaagagtggatgggatgaatatgggattgcttatggccgtcctagctctgacatcacgatccggcgcataactggatcgtctccatttgctgggattgctataggcagtgaaacctctggtggggtggagaatgtacttgctgagcacatcaacctttacaacatgggaattggtatccacattaagaccaacactggcaggggtggatttataaagaatataaccatgtctcatgtgtatatggaggaagcaaggaagggaataaggatctcaggtgatgttggggaccaccctgatgacaaatttgatgccaatgctctcccacttgtgaagggtgtcacaattaagaatgtttggggtatgaaggttttgcaggctggtttgatacaagggttgagaaattcacctttcactgatatttgcctatatgatatcaaccttcatggagtgacaagacctagaactccaccttggaagtgttctgatgtgtctggatttgctcatcaagttagcccttggccatgttctgagcttagcagcaaccagcagggatcatgtgccaattactcctgagattatgagaatatatttccacttttcaagcattgacaggggcaaccaagggcttctttagttgatttatcataatgtaaggcaatgaattactatgaaatgcaaaatgaagacttgttggttttaaaaaaagaaaaaaaaaaaaaaaaaagaaataattttgaattactgaatgtaattgagatgtatgtctaaattagtttcagtcatagattttacattaacacgtgtcccaatgaaaataatgaattttgggtttaaataaatatgccctaaatttattct

SEQ ID NO: 809 - DNA, 896 bp, Glycine max
attcacatccccattcccatccgcatcctgctctcaacataaaacaacactctggctctccctccaccgccccaggccatggcggccggagcctctgctccgccccccgccccgcaggcgccgaggccaaagcggcctcggcctccgtcggggcgcaccaacctagcctcctgcgtggtggccaccatcttcctaatcttcatcatcatcgttatcctcattgtatactacaccgtcttcaaaccccaggaccccaaaatcgccgtcaacgccgtccagctcccctccttctccgtcgctaacggcaccgtcaacttcactttctcccagtacgcctccgttagaaaccctaaccgtgccgcgttcacccactacgacagctccctccagctcatctactccggcagccaggtcggcttcatgttcatccccgccggcgagatcgacgctggcaggacgcagtacatggcagccaccttctccgtccagtccttccccctctcggtgccgcccaggatgggccccacattggccaacggcgacggagtgggcttcaactatgggcttagggttgagcccactatggaaatcgagtccaagttggagatggcggggcgtgtcaaagtgttgcacttcttcacccatcacgtttatgccaaagccggttgcagggttgccattgccgtaactgatggatctgtcttaggttttcactgctaattcttcttcttcttttttttttgtaactctagactttttaatagtaaaaaagtaaaactgtaattgttacttgttagtcatgttaagtaaccaaacccaaggcgtcacgattaaaattgtaaagatgattttcaattttccttctcgaatgcaaagtttcgccattttgtttgtcg

SEQ ID NO: 810 - DNA, 833 bp, Glycine max
acgtagcagatatgttgttgtaagcacatcaatagcacactatttccacaagctgttattgttatctatcacaagaacaagcagcattagcaaccaagcaagagaatggcgacgacagcagccttgtgcggcactatgatgagcagctccttcctgaggagaaaagcagtggtcacaagcctgaaggcattccccaatgctaacgcagtgtttggtgtaaagggtggacgtggaggtggtgtgactgccatggctagcttcaaggtgaagctgataaccccagagggagagaaagaatttgaatgcccagatgatgtatacattcttgaccaggcagaggaggaagggcttgagcttccctactcatgcagggctggttcttgctctgtgtgtgctggcaaagttgtatctggcaaagttgacaattcagatgccaccttccttgaggatgaacaattagaagcaggatttactctcacctgtgttgcttaccccacctcagacgttgtcattgaaacccacaaggaggaagacctctctgctgcttaactttcttcctttctcaccaacatattatgcattcatgagcattcattacttccacctgtagtagcaactgaacttcattgttgtattgtaactctataataatctttccttactggttttgcacacaatggttcaataacaactctcattttccttgatactaaaaaaaaaaaaaaaaaaaaaaatcataaaaaattgcatcttacctgcgttcttatggggcttcttatttgcgttcttaacatgttatagaagataatgttaatgctaggagacaaattgta

SEQ ID NO: 811 - DNA, 918 bp, Glycine max
aagataatggcacgtggcagatagggttgcatgtcgctgctcactcattataatgaagcatgcaagctcctcgttgttatctatttatctatctatcaaccagaagaagaagaagaagaagaagcaagagagagagaggagagaatatggcgaccacaggcgctttgtgtggcactatgttgaacacctccttcctgaagaggcaggcatcagtgaacatgacaagcttcaaggctaacgctgctgtctttggtgtaaaaggaggacgaggaggtcgtgtgagggccatggcaacttacaaggtgaagctgataactccagagggagagcaagaatttgaatgcccagatgatatatacattcttgatcaggcagaggaaaatggcattgatcttccctactcatgcagggctggttcttgctctgcatgtgctgccaaagttgtgagtggcaaactggaccagtcagatggtagcttccttgatgacgaccaaattgatgcaggatttgttctcacctgcgttgcttaccccacctcagatattgtcattgagactcacagggaggaagagctcactgcttaaataagaactttcatctttactttaaatgacaacatatgtttgttgcatttttgctttgtaaaatctattgaactaaataatttttgtcagtgagtctaaagcttgagctttagtagtcttatccttggactgtctctgacactttcttcctccccccccccccaccccatcatgtctgttgcgtttaattttgtgtacgttgtgctattttctcaggatatataatatatatgcttgtttatcatgagcaaaaaaaaaaaaaaaaaaaaaaaaaaaaaaaaaaaaaaaaaaaaaaaaaaaaaaaaaaaaaaaaaaaaaaaaaaaaaaaaaaaaa

SEQ ID NO: 812 - DNA, 967 bp, Glycine max
  misc_feature (13)..(14): n is a, c, g, or t
  misc_feature (25)..(29): n is a, c, g, or t
  misc_feature (31)..(34): n is a, c, g, or t
  misc_feature (39)..(41): n is a, c, g, or t
  misc_feature (106)..(106): n is a, c, g, or t
  misc_feature (112)..(114): n is a, c, g, or t
  misc_feature (118)..(120): n is a, c, g, or t
  misc_feature (128)..(130): n is a, c, g, or t
  misc_feature (961)..(962): n is a, c, g, or t
ctatgacttgttnntgtgataaagnnnnntnnnnacttnnnggtttggttataaaagttattcgcatgtcataagagcagagcattatcaaggaaaataatccttnaaactnnncttnnnaagtaaannnatgtgtatattttagtggaagccaggtgaaccttcacattggcttatatattttatttcgcctccgccgctccaggacaggtggtctatgtgtatggctttatgctgctagtctttgtgattcttatcatcgttaccatttgtgtgacaattgtggggacatactttttgttaaatgctgagaactaccactggcaatggacttctttcttttcagctgcctcaacagctgtttatgtttatttgtactcaatatactacttctatgtgaagacgaagatgtcaggcttcttccagaccagcttttattttggatacactttgatgttttctcttggactaggaattctatgtggagctgtgggttttcttggttcaaatttgttcgtgaggaggatctacagaaatatcaagtgcgattaaggttttgagtcagacctgagcacttccataggtttgttgctgaagacaataaatttttggaggaagcctctggtcatgtgtggggaaacctaacaatgtttacaggtgaatccacagggttttgagaatgaggatgtattatttttctatattggggaagccctgagattttttttccccggctgtaattgattgtctttataattttagataagtagtacaatattcaactcttgtgattaccgtttcatccccttataaaataggggtccattgaagaactggtgcccaattcccaattccccaacatgggtttcaactatcaatataagtaaagagggggatcaagtctcggaaatgaattttgtatgaagatctgaatatcattcttatctgcttcctttacacnngtttt

SEQ ID NO: 813 - DNA, 1359 bp, Glycine max
tattttctcattcgtcgtcgacatcgtaaattaccattatagtccgttcgtgcttcctctgttcttcttcttggcgcggggttgttctgttctctttctctctctctcttgcatcactgccatgttcttcgaatcccgatccctcctcttcccgctccttttctctctcttccttgcttccgccttcgcttcagactcagatcacaagtatcaacacgatgaaccagttaacctttgggtgaacaaagttggtccttataacaatccacaagaaacatacaactattacagcctcccattttgtcatccatctagtagtgctagtgctgcacacaaatggggtggtcttggtgaggtcctgggtggcaatgagctcatcgatagccaacttgaaattaagttccaaagaaatgtggataagactgtcttttgccagatagatctcgatgaagcaaaggtgaaacagttcaaggatgcaatagagaataattactggtttgaattcttcatggatgatctacctttgtggggatatgttggtgagttacatcctgataagaacagtgataatggcaagcatgtcatttacacacacaaaaacattattgttaaatacaacaatgatcagattattcatgttaatctcactcaggatatcccaaagcctttggaagtaggaaaacatttggacatgacatattctgtcaaatgggattctaccaatgtcactttcgggcgtcgctttgatgtctacctggaccatcctttctttgagcatcagattcattggttctccatttttaactctttcatgatggtcatcttccttactggtttggtgtcaatgatattgatgcgaactctgagaaatgactatgcaaagtatgctcgggaagatgatgatttggaaagtctggagagagatgttagtgaagaatctggctggaaacttgtgcatggtgatgtttttcggcctcctcgcaacttagttattctttcagctgttgttggcactggtgctcaacttgcgttgctggttcttcttgtcgtcttgttggctattgttgggatgttgtatgttgggcgaggagccattgtcactactttcattgtgtgttatgctctcacatctttcattcctggttatgtggagtggggggatgtactcacgaaatgggggtaagtatcttctttaattttctgtatattcgctccaagtatgtttgggtggctttgtctcagtcttctctttttggttttgaatgattatgcaactaatttttatgtttgttaggtaaacactggattaaatccatgatccttacagcttctctgttcccattcatgtgctttggaatt

SEQ ID NO: 814 - DNA, 1090 bp, Glycine max
tacgacggctgcgagaagacgacagaaggaggaggcaagaagttgtattttggcatccccgtggcttcaagaagagaatctcaatggaggcccaggagctgaagcgcgtgttccagatgttcgaccgcaacggcgacgggagaataacgaagaaggagctgaacgactcgctggagaacctgggcatcttcatctctgacaaggacctgagccaaatgatccagaggatcgacgtcaacggcgacggttgcgtggacatggacgagtttggggagctgtatcagaccataatggacgagcgcgacaatgaggaggacatgagggaggccttcaacgtcttcgaccagaacgccgacggcttcatcaccgtcgacgagttgaggaccgtcttgtcctccctcggcttgaagcaaggaagaaccgtccaagactgcaaggccatgatctccaaggtcgatgttgatggagatggcatggtcgattacaaggagttcaagcaaatgatgaaagggggtggattcactgctctcacttaatttctttcaatcatctattccccatatatctttcttgtacatataacttactttcaatcaggatcaccaggattattgtgattgtcatggtttcggaccatggatggtgtggtataggattagatcaattcatctcatctcgtcctaggtatgtgtacgtgtgtgtgtgcttgtgttttccaatgtgttagtcgttggtttttgggagttagcaaacctggctccataagtgagatgagcgcctcttgccctggtaatgctacaactttattatgtctttggttttttgggggaggaagacccttgaaatcgggagactactgctactgtcacaagatctgtttgtgttttcttcttgttcaagttttgagtcgagaaaggttgattctattttcactctgttggatgattttgtactccctttcttttcttttcttttttattttattttatttcagctgtggtggcacgtttatttgcaagaaattcatggacatatgactcgaattaattaaattattatggcagttttatcgccaaaaaaaaaaaaaaaa

SEQ ID NO: 815 - DNA, 1037 bp, Glycine max
acgagggagcaacaaacaaagcataaaacaacctgaattcaactcacttcaatttctttaccttatatatatctatccaattaaccactcttatatttagaatccaaaaatctctcgtcgtccaagaaagaagcaccacaaattaattctcgtttcccattcccatccccatgccaactattttgcataggattttccttctttacaacctcgtacactcattcctcctctgtctggtccccaagaaggtgcgtcccttcctccccccttcttggttccaaaccaaaaccatcactgcaccttcttcttcttcttcttcttcttccagtgcccgcatcatcaagagaacaacaatggaccccaacgagctgaagcgcgtgttccagatgttcgaccgcaacggcgacggaagaataacgaagaaggagctgaacgactcgctggagaatcttggcatcttcattcctgacaaggagctcggccaaatgatcgagaggattgacgtcaacggcgatggctgcgtcgacatcgacgagttcggggagctctaccagaccatcatggacgagcgcgacgaggaggaggacatgagggaggccttcaacgtcttcgaccagaacgccgacggcttcatcaccgtcgacgagttgaggaccgtcctgtcctccctcggcttgaagcagggcagaaccgtccaagactgcaagaacatgatatccaaggttgatgttgatggagacggcatggtcgatttcaaggagttcaagcaaatgatgaaagggggtggcttcagtgctctcacttaaattcatttctttcacatccattcaatctatctattcccatacatctttgctttgttttgttcttgtatataagtttcaggagaaataattacatgattcgatcaacaaaaaaaaaaaaaattctcttactaatctccacgtcacacacatgtagtggtttccgaccatggacggtatatgatttagatcaatcccatatgatctcgtcgtcgtaggtatgcaaagtaatgg

SEQ ID NO: 816 - DNA, 1031 bp, Glycine max
ccgggcagctacgtaggccccccccccaaaatgatcggcctgacaggagtacttctgagaaagactttgtaaaggaggtacacagtagtaagactaggatagatgaaaaaggtaacgagaatcaaataagaaaggatgaaaggaaccagaaaagggacaaaacagattatggcagtgcggcaaaagaaagagtgaaacagcacagtttaaggcacggggagaaggcaaaggaatcagactcaaggaaaagatcctctcatgttgatgtcaaggatgataaaaaggaagcagaaaaatcccatagaggtagtgccactgacgatactagccggaaaagggagcatgcaaaggataagggggaacataaatcaaggcaaaaagatgcaagtaataatgacaggcatagaagaaggcgttcatcttcagtaagcagtagaggtagaaccaagaaggattgtattaatcatgctggtgattcaagtggtgaaggatcagatggctcaaaaaggaagctgcattcaagaaagcgtgacttatcaccgtctccagtcagatctaaaagaagacaacttttgcggtctcctcatagcaagcgttctcagcgcaggcattctccctatacttctcttgattcttccaggggaaggaggtcaagatccagatcacctgttcggcggcagagatgaatggatggggacagagatggttgactttgcatctacggtgttcattcaagagaacataaatttggaggcgtagggcgaagcttgtgatgtttggtcttcaagggaatgttgattaaaaattaaatagatagtggtgacttttcccatttttgtgggttcaatataatgatactgttattttcctggtttgctactgttctttagggagtagtataaaactgggcagggttgaacatgtgctgtaatatgttttgatgtaaaaaaggaaactgaaaaatcgatagcttctttcattcgaaatccagtatgtacttatatcccatcaatatcataattcgtaatgac

SEQ ID NO: 817 - DNA, 2365 bp, Glycine max
  misc_feature (365)..(365): n is a, c, g, or t
  misc_feature (1028)..(1028): n is a, c, g, or t
aaaggaatcagaaaagggacaaaacagattatggcagtgaagcaaaagaaagagtgaaacagcacagtttaaggcacggggagaaggcaaaggaatcagactcaaggaaaagatcctctcatgttgatgtcaaggatgataaaaaggaagcagaaaatcccatagaggtagtgccactgacgatactagccggaaaagggagcatgcaaaggataagggggaacataaatcaaggcaaaaagatgcaagtaataatgacaggcatagaagaaggcgttcatcttcagtaagcagtagaggtagaaccaagaaggattgtattaatcatgctggtgattcaagtggtgaaggatcagatggctcanaacccgcgccccattcaagaaagcgtgacttatcaccgtctccagtcagatctaaaagaaggtattatttattaagagatccttacattgttcaggtttggaatattgaagtttgggtgtttcagaacatcttgcaatatctttcttcctgttcatatatatatatatatatatatatatatatgtatgtatatcagtatgtgtgtgcacgggggtgtgtgtaaaatacatttaccatcttagtaattctgacatggttaatgtttttctggttattaatagaatcttggtgggttgcaatacaaatagtttttcttagcttatatgtgtaaagttgaatcttaaatgatgatactagtcatactaccagcttttctataatttcctttaacgatttcagctctaggtctatcttctcacgactttaggtgggaggcttaattgctaccctcaatcttgtcactgaagctctttcttgctatctcagaaggccagaaagttctatatttatttctgcattatttttggactttggccgtctaacatttttatgtattttttattcacttgtttggttgataagattttttggtcttattgtataccaatattttttgcaatattatgatagttatctaaatgtgtgtttgactgtttgtgtangttgtaggtattttttctgatacatttttatgtatgatcagttttatctttgctgggcaagcttccattatttacaagatttcgtctgccttggttcaacttatgagattactgttactaaagttgcctgcaagtttgaaaatagaactactgatattctagttttttgtacggtatggtagttgacttatgttttaaccttgttcctgtgagaaaacatatttagcctatgacttttggcagtttgaggattctgaagctgataccatgccacagattcaatcatttgggtctttttttgttgaagttaaattgtcttattgcgtgttatattgattgtttttcataatgttcaagtttgtagtaataatcacattttcatgcatctttggtctactctgatctatcaattatccatctgcaatataatataagacacaatagaagagcaagaaactatagattttgtgcaaaaaattgttgcacgtgtttatccataattgtaaggatatctgtaccctgaatctaagatatgtaggtacatttgtagtttctggtaaacgtttgtttgattctgatcatactcattaggaacagataggacttattgtaataggcttcttccaatggagtgttgacactgtaccaggttgagttgtatttataaacttttgtatactttaaactcaccaagtcagtacggtggtttcatttttagacaacttttgcggtctcctcatagcaagcgttctcagcgcaggcattctccctatacttctcttgattcttccaggtttgttgccatagagtttttcaagattaagatttatgtttttcagacaaacttccatcatcatataagattaaagtcgcacaggtgaatttgtcaggcttcatatttatgttacaatggtgccttcttttttactggaacccttttatgcaggggaaggaggtcaagatccagatcacctgttcggcggcagagatgaatggatggggacagagatggttgactttgcatctacggtgttcattcaagagaacataaatttggaggcgtagggcgaagcttgtgatgtttggtcttcaagggaatgttgattaaaaattaaatagatagtggtgacttttcccatttttgtgggttcaatataatgatactgttattttcctggtttgctactgttctttagggagtagtataaaactgggcagggttgaacatgtgctgtaatatgttttgatgtaaaaaaggaaactgaaaaatcgatagcttctttcattcgaaatccagtatgtacttatatcccatcaatatcataattcgtaatgcc

SEQ ID NO: 818 - DNA, 916 bp, Glycine max
  misc_feature (880)..(880): n is a, c, g, or t
  misc_feature (912)..(912): n is a, c, g, or t
aaaaaatattgacaagactgtgtacttgcgcgtccttacccttttttctgtctttgcttctcttttcaaggctaattcgtggcctcgtcttctctttttctgtatcgtttttactttcaaccacttccaattttctttttcgtcagatcttaataccatcatggaggatgctgctgcttctgctgctactgctaatgtattggaagccaaagatggtactatttctgttgcttcagcatttcctggtcatcaagaagctgtacaggatagagaccacaagttcttaacaaaagcagttgaagaagcatacaagggggttgaatgtggtgatggaggcccatttggagcagttgttgttctaaatgatgaagtagttgtaagctgtcataacatggttttacgaaacactgatcccactgcccatgctgaggttactgctataagagaggcttgtcaaaagctgaatcaaattgaacttgctgactgtgaaatctatgcttcttgcgagccttgtccaatgtgctttggtgcaattcatctttcaagaattaagagactggtttacggagctaaagcagaagctgcaatagcaattggatttgatgatttcattgccgatgcactgaggggcactggtttttatcagaaggctcagttagagatcaaaaaggctgatggtagcggtgctgttattgcagaacaagtatttgagaagacaaaatccaagtttactctgtactgatttgcttcaattgcctaattaaaagcgaacccaagatacaattgttcaggaaattttcaatttcttactacaactacattcataaattcaagaaatataaagtttacatgctcaaaaaaaaaaaaaaaattgtaaaanaaaaaaaaaaaaaaaaaaaaaaaaaaaaaaanaaaa

SEQ ID NO: 819 - DNA, 912 bp, Glycine max
  misc_feature (6)..(11): n is a, c, g, or t
  misc_feature (16)..(18): n is a, c, g, or t
  misc_feature (25)..(25): n is a, c, g, or t
  misc_feature (100)..(100): n is a, c, g, or t
attcgnnnnnntcctnnnccttttngtagttatccaccatagaatccgttttccttattgaacatgttcttctgtagattaccttatttgtgttattttntcttgttaattttgaaggcaaattcgcggcctcgagtcttttctttttccgtatcgtttttactttccaccacttccattttccgtcatcatggaggatgctgctgcttctgctaatgctgcagaggatagagaaaacaagttcctaactatggcaattgaagaagcatataaggcggttgaaagtggccatggtcgcccatttggtgcagttattgttcgaaacgatgaaatactttcaagctgtcataacatggttgtaagaaatgctgatcccactgcccatgctgagattactgctataagagaggcttgtcgaaagctgaatcaagttgaacttgctgactctgaaatctatgcttcttgcgagccttgtccaatgtgccttagtgcaattcatttttccaaaattaagaaactggtttatggagctaaagcagaagctgcggtagcaattgggtttgagagtatcattgctgatgcactgaaggacactggtttttatgagaaactcaacttagaggtaaaaaaggctgaaggtagtgttgctgtaatggcagaacaagtattcgagaagaccaaagacaagtttattattccctgattagttagctttaatcatcttattaaatgtgagcgcaagttacaattgttcaggaaaacttttgattcttggacaaaaataattttttgtcagactttattttggattagtcaggtctcattttcctgataatccggaggattagacaaaaaagaaataattcaagaaatataaaatttgcacgttcatgtttttgttcaaaaaaaaaa

SEQ ID NO: 820 - DNA, 1409 bp, Glycine max
  misc_feature (1108)..(1109): n is a, c, g, or t
  misc_feature (1111)..(1112): n is a, c, g, or t
  misc_feature (1114)..(1123): n is a, c, g, or t
  misc_feature (1125)..(1127): n is a, c, g, or t
  misc_feature (1130)..(1133): n is a, c, g, or t
  misc_feature (1135)..(1138): n is a, c, g, or t
  misc_feature (1140)..(1145): n is a, c, g, or t
  misc_feature (1147)..(1147): n is a, c, g, or t
  misc_feature (1150)..(1153): n is a, c, g, or t
  misc_feature (1155)..(1179): n is a, c, g, or t
  misc_feature (1183)..(1183): n is a, c, g, or t
  misc_feature (1185)..(1185): n is a, c, g, or t
  misc_feature (1187)..(1187): n is a, c, g, or t
  misc_feature (1199)..(1199): n is a, c, g, or t
  misc_feature (1201)..(1201): n is a, c, g, or t
  misc_feature (1204)..(1206): n is a, c, g, or t
  misc_feature (1211)..(1211): n is a, c, g, or t
  misc_feature (1217)..(1218): n is a, c, g, or t
  misc_feature (1223)..(1223): n is a, c, g, or t
  misc_feature (1234)..(1234): n is a, c, g, or t
  misc_feature (1239)..(1241): n is a, c, g, or t
  misc_feature (1248)..(1248): n is a, c, g, or t
  misc_feature (1255)..(1255): n is a, c, g, or t
  misc_feature (1257)..(1257): n is a, c, g, or t
  misc_feature (1264)..(1264): n is a, c, g, or t
  misc_feature (1268)..(1268): n is a, c, g, or t
  misc_feature (1272)..(1272): n is a, c, g, or t
  misc_feature (1275)..(1275): n is a, c, g, or t
  misc_feature (1277)..(1277): n is a, c, g, or t
  misc_feature (1286)..(1287): n is a, c, g, or t
  misc_feature (1290)..(1290): n is a, c, g, or t
  misc_feature (1295)..(1296): n is a, c, g, or t
  misc_feature (1298)..(1299): n is a, c, g, or t
  misc_feature (1304)..(1305): n is a, c, g, or t
  misc_feature (1307)..(1307): n is a, c, g, or t
  misc_feature (1309)..(1309): n is a, c, g, or t
  misc_feature (1315)..(1315): n is a, c, g, or t
  misc_feature (1318)..(1319): n is a, c, g, or t
  misc_feature (1324)..(1325): n is a, c, g, or t
  misc_feature (1327)..(1327): n is a, c, g, or t
  misc_feature (1329)..(1330): n is a, c, g, or t
  misc_feature (1332)..(1332): n is a, c, g, or t
  misc_feature (1335)..(1335): n is a, c, g, or t
  misc_feature (1337)..(1337): n is a, c, g, or t
  misc_feature (1341)..(1342): n is a, c, g, or t
  misc_feature (1344)..(1345): n is a, c, g, or t
  misc_feature (1349)..(1349): n is a, c, g, or t
  misc_feature (1352)..(1354): n is a, c, g, or t
  misc_feature (1358)..(1359): n is a, c, g, or t
  misc_feature (1361)..(1361): n is a, c, g, or t
  misc_feature (1364)..(1365): n is a, c, g, or t
  misc_feature (1368)..(1368): n is a, c, g, or t
  misc_feature (1371)..(1371): n is a, c, g, or t
  misc_feature (1373)..(1373): n is a, c, g, or t
  misc_feature (1381)..(1381): n is a, c, g, or t
  misc_feature (1383)..(1383): n is a, c, g, or t
  misc_feature (1385)..(1385): n is a, c, g, or t
  misc_feature (1396)..(1396): n is a, c, g, or t
  misc_feature (1398)..(1400): n is a, c, g, or t
  misc_feature (1402)..(1402): n is a, c, g, or t
gagaagcctgcacgactacctttcttatttggaacatttccttatctatattcacctccatcttaaaacagttcccctagaaacttcgatctgaagatgggtggcattgcatttggacgctttgatgattctttcagtttaacctcaatcaaggcctatattgctgagttccattcaaccttgctctttgtttttgccggtgttggttcagccatagcctatggtaagttgacatcagatgcagcacttgatcctgctgggttactggcagttgctatttgccacggttttgcactctttgttgcagtttctgtcggtgccaacatctctggtggccatgtcaaccctgctgtgacttttggattggctcttggtggccacatcaccatcctcactggcttcttctactggattgcacagcttcttggctccatcgtggcatgttttcttctcaactatgtcacaggaggcttgccaactccaatccacagtgtggcttcaggggttggagcagttgaaggagttgtgaccgagatcatcatcacatttggtttggtgtacacagtgtacgccacagcagcagatcctaagaagggctcattgggaatcattgcaccaattgccattggtttcattgttggtgccaacatcttggcagcagggccattctccggcggctcgatgaacccagcacgctccttcgggcctgcagttgttagtggtgacttccatgacaactggatctactgggttggacctctcattggtggtggtttggctggccttatctatggcaatgtcttcattcgctctgaccatgcacctctttccagtgaattttgatttggttcaagtcatggcatgtgtaattcatgtttcttgatgataaaaggaggaaaaagcagttcttgtttttctttctttttctatctatctccttttttttcttcttcttttaatttatttgtaaagtgtgctactactgtttaatttggtgagaattcaagaggatggtggtgggcacaagtgctttattatctcggcacctgcgcctcctgcgcgttccctttaaaaaaaaaaaaaaaaaaaaaaaaaaaaaaaaaaaaannannannnnnnnnnncnnnaannnncnnnntnnnnnncncgnnnncnnnnnnnnnnnnnnnnnnnnnnnnngaantncnggccccgggggnanccnnnttttnaaaccnnccccncccgggggggnccccnnnttttttnccctttnanggggggnaaanccanccngncggaaaccnnggncaaanntnntcccnngngnaaaacngtnnccctnnananncnccnanaatnncnncccngannnttanngntannccnggngnggccaaangngncccccccattngnnncnccccccc

SEQ ID NO: 821 - DNA, 958 bp, Glycine max
ctgagttccattcagccttgctctttgtttttgccggtgttggttcagccatagcctatggtaagttgacatcagatgcagcgcttgatcgctgctgggttactggcaggtgctgtttgccaggggtttgcactctgtggggcgagtgtctgttggtgccaacatctctggtggccgtgtcaaccctgctgtgactttgggattggctcttggtggccacatcaccatcctcactggcttcttctactggattgcacagcttcttggctccatcgtggcatgttttcttctcaactatgtcacaggaggcttgccaactccaatccacagtgtggcttctggggttggagctgttgaaggagttgtgaccgagatcatcatcacatttggtttggtgtacacagtgtatgccacagcagcagaccctaagaagggatcattgggaaccattgcaccaattgccattggtttcattgttggtgccaacatcttggcagcagggccattctctggcggctcgatgaacccggcacgctcctttgggcctgcagttgttagtggtgacttccatgacaactggatctactgggttggacctcttattggtggtggtttggctggccttatctacggcaatgtcttcattcgctctgaccatgcacctctttccagtgaattttgatctgattcaagtcatggcctttgtaattcatgtttctttttctatctctcttttttttttttctctccattctatgcttttttttttcttctcttaatttatttgtaaagtgtgctactactgtttaatttggtgagaattcaagaggttggtggtgtgcagaagtgctttatatataattatctggggtttacttaaaagccgctccttttaattttggatgccgtgcatgaggactattgtaccactggcatttatcattatggagaagttcac

SEQ ID NO: 822 - DNA, 1210 bp, Glycine max
gtattacctttcttatttggaacatttccttatctatcttcacctccatcttttaacagttcccctcgaaacttctgaagatgggtggcattgcattcggacgcttggatgattctttcagtttaacctcaatcaaggcctatattgctgagttccattcaaccttgctctttgtttttgccggtgttggttcagccatagcctatggtaagttgacatcagatgcagcacttgatcctgctgggttactggcagttgctatttgccacggttttgcactctttgttgcagtttctgttggtgccaacatctctggtggccatgtcaaccctgctgtgacttttggattggctcttggtggccacatcaccatcctcactggcttcttctactggattgcacagcttcttggctccatcgtggcatgttttcttctcaactatgtcacaggaggcttgccaactccaatccacagtgtggcttctggggttggagctgttgaaggagttgtgaccgagatcatcatcacatttggtttggtgtacacagtgtatgccacagcagcagaccctaagaagggatcattgggaaccattgcaccaattgccattggtttcattgttggtgccaacatcttggcagcagggccattctctggcggctcgatgaacccggcacgctcctttgggcctgcagttgttagtggtgacttccatgacaactggatctactgggttggacctcttattggtggtggtttggctggccttatctacggcaatgtcttcattcgctctgaccatgcacctctttccagtgaattttgatctgattcaagtcatggcctttgtaattcatgtttcttgataataaaaggaggaaaagcagttcttgcttttctttctttttctatctctcttttttttctctctctccattctatgctttttttttcttctcttaatttatttgtaaagtgtgctactactgtttaatttggtgagaattcaagaggttggtggtgtgcagaagtgctttatatataattatctggggtttacttttttggctttccttttaattttggatcccgtgcatgaggactattgtaccactggcatttatcattatggagaagttcacacttcctaacctaaaaaaaaaaaaaaaaaaaaaaaaaaaaaaaaaaaaaaaaaaaaaaaaaaaaatt

SEQ ID NO: 823 - DNA, 809 bp, Glycine max
tcgatcagctacgtaggcccccccccccattcattccaaccattctccaccattcacaatctaagcatcccaaaactaactattgtgctagctacttagttgtgtaagatggcttccaagggaaatgttgcatccacttatgttgcactactcatgtgtctctatttgctttcattcaccatggtgagctctcaaatctcaaccccaccaccaatgccttctcaaaacggtacatgtcctataaatgtacttcgattgggtgtgtgtgccaatgtgttgaacctggtcaatgttacactaggatcaccaccaaccctcccctgttgcaccctcattcagggtttggctgatgttgatgttggtgtttgcctttgcactgccctcagagctaaccttcttggcatcaacttaaacttgccaatttccttgacattgcttctcaatacctgcagagggaacatccctaatatccagtgttcttaaatttatcttctctagtggaatatacatgtggtctatgaaaaaataaactcatcgcctccatccacaattccacatgttgtctctctcatatttcgtatctttttatggtgtttttttttctttcagttcttgttgtactccatgtatttcccctttttagcgctttccatcctaataataatttctcactccttcgacattgttctactatcggacgaaggattactcattagcctctttcattgcattgcatgtgtaagttgttatacaaataaagttatatgattcctaaaaaaaaaaaaaaaaaagaaaaaaaaaaaaaaaaa

SEQ ID NO: 824 - DNA, 769 bp, Glycine max
ttttcaaaaacgctgtgttgtgttcttgaactggttaagggcagctcctccaatctccattggcgagaatcgactcactcccactctctgtatccagacgcaacgcaatggattgggcttttgtgcataaaacctgggataagtgggcttctacaaacattggttattctggtcatccgttaaaagctgctttgctaattaattatgacccgactggaccatctcgattgttatctaccattgctgaacaagaagggataagagctaatcccattgaattgagtcactttgtggacttcatcaaacaaaataaactccagtccgagctcttcattattgggtccaatcagtacttggtcacgtcaattcatgagaactggtttagtgcaaggtgtataaacacatcgaagcctgccggtgaaggtgcaattgttatacaaacagcagcttatatcttggttgctcttttcacaggtacgaaggttccattggtccagcatctcgggctatggcagctgctgatcagttaacttggcaattagggcgaaaaaatctttaaattaatgctacttcagatctgtaccatgcacttaccaaagggctaatttttctgttttactccgattttgtttagatggttgcagccaagtatcttggtgatagagccattacagaaccgcattggttacagtatatgagagggaggtcctcccattatgtatgatatacgctttgaaatagatgagttgatacatctgctttccggctt

SEQ ID NO: 825 - DNA, 2095 bp, Glycine max
tcagctacgtaggcccccccccccccccggttaatacatgcacatgcattaatttaattttcgtagagtactagtaactagtaagtattaacttaaaattaaatgaaaataaacagagttgaattgaaaatcaagaaacggaagaatgatgaaatggatctgtggtttggttgcgatgtggtgtgaatcactgtccaatcccgttcgcgtgacccggccagccctataaactatatatcgtgaatcggattcagagagactgagagaaacgatgagggcagtgagtgcgttaatggtggctcggatgttgacgcgggaccactctctccctgtcctttgcagcgaaagcatacccttccgatcggtctggtggttcgtctatgccggcatctcatgtttcctcgtcctcttcgccggcatcatgtccggtctcaccctcggactcatgtctctgggtctcgtcgacctcgagattctcgagcggagtggttctcctgttgagaaaatgcaagctgcggtcatacttcctgtggttaaaaaacaacaccagcttcttgtcactctgcttctatgtaatgctgttgccatggaggctttgccgttatacctagataaactattcaatcagtttgttgctatcattctctctgtaactttcgttctatttttcggggaggttattccacaagcaatttgtagtagatatggtcttgctgtaggtgccaactttgcatggctagtgcggattttaatgattatctgttacccagtttcttatccagttggaaaggttctggatcacctattggggcataatgaggctttatttaggcgagctcagttaaaagcccttgtctccattcacagccaggaggctgggaaaggtggtgagcttacacatgatgaaacaacaattatcagtggagcactcgatttaactgagaagactgcagaggaggctatgactcctattgaatcgacattttctttggatgttaattcaaagttggattgggaagcaatgggaaaagttcttgctcgcgggcacagccgagttcctgtctattctggaaatccaaggaatattattgggcttctactggtcaaaagtcttcttactgtacgaccagaaacagagacacctgtcagtgctgtatccatccggagaattccacgggttccatcagatatgcctctctatgatatactaaatgagttccaaaagggaagtagtcatatggctgctgttgttaaggctaggggaaaaggcaaagaaactccacaaatcattgatgaagagaaaaatgaagaaaacaaaagcattggtggggattcacagttgaccactccgttgctacagaagcaggatgcaaaatcaggaagtgttgttgttgacatagtcaagccttcaaagccttccagcattaataagctgtctgttttgcaacgtagtgatagcacaacaaatggtccctcttcagaaaatattgaagatggtgaagtgattggtattatcactttagaagatgtatttgaagaacttctgcaagaagaaattgttgatgagacagatgaatatgtggatgttcataagagaatacgtgttgctgcagctgcagctgcttcctcagtggcccgagctccatcatcgcgaaggttgactagccagaagggagcaggaatccaaagtaagccagggcaagctccaaagaaatctgcagaggaaaatggattgaactctacaaagcaataaggaaatgcatattagcctgtcgggataatgaacctttaatactgaggggctgtttatgtgtcagcaatatgatgaaaaagaagtcaaggagagttttttagtcatttgatctttatgatgtatcaaattaataactttccttttaggaagggcataaacggatgtattcctatttatataggttattaagccggtgccatgctgcaattttatgttagatccaaaatgtcttttgtttttaccgaaagaaaagtgtgtttgttagtttcttttacccatttctctcaataatctatcatttccaaaaaaaaaaaaaaaaaaaagagaaaaaaaaaaaaaaaa

SEQ ID NO: 826 - DNA, 865 bp, Glycine max
acctaacagcgtgagtcacagtcgtatgttatccacaaaaccaacagcaacacaaatcgtaattgatggctgtgcaagctttctatcacttagggtcaccgctgacgtcacagtcacactttccatcaccccctctccgactcacactcactgcttccgcgcccttcaagccccgacccctcgcttccatcggaatctcgccgctcccggagaggcgccggatgccggtggccggcgccgtggaggaaagccaagagagttccgaaccggaagcggaagcggatttggcatcggaactgaagaaggcgatggcggagaggaaagagaaagaagaggagaacatgttgagcggagtggcgcgtgagatcgacgagattgaatggcccgcgttcgggaaagtattgggtaccaccggcgttgtcctcagcgttatttttggttccagcgtcgttttgctcagcgtcaatgccgttttggccgagatttctgatcgggtttttgctggcaaagggatccaggatttcttcacctgaacctcgtgcaatttttgtgactaacctttcaattgctacaattttactcattatgttcccaaactgctttcaccaaaagcagctcctgctccttttctacgcattcatagaaatttttatttgcttgtctgtaacctataatgctagagttttgatcttattgcattatttttcaccaacaacaatgtaactagcttatgttaaaccccttgctgtaagaaatgttcacattatttacgttcctgcactgtatttatctttgaaaaaatatatctgtcgtgaataaaaaaaaaatacattgcttttttccattcacaaaaaaaaaaaaaaaa

SEQ ID NO: 827 - DNA, 1483 bp, Glycine max
  misc_feature (1481)..(1482): n is a, c, g, or t
tgtgataggagaattgaagaagggtttgaatccaccatcactgacaaatctggtatttgtgacgccttacatgaccacagctgtcaaaacaggcattgtcgttggcattatatcgcttgcggaaggaatagcagtgggaagaagctttgcaatgtataaaaattacaacattgatggcaacaaagagatgatagctattgggaccatgaacgtagttggttctttcacctcttgctacctcacaactggaccattttcgcgttcagctgtgaactataacgctggatgcaagacagcagcttccaacattataatgtcacttgcagtaatgttgacattgttattcctgacacccttgttccattacactcccctggtggtgctatcagctattatcgtatctgcaatgcttggactcatagattatgaagcagccatccatctatttaaggttgacaaatttgactttgtggtgtgcatgagtgcatacattggcgtggtctttggcagtgttgaaattggcttagtcatagctattgtaatatctgtacttcgggtacttctatttattgcaaggccaaggacattcgttttgggcaacattccaaattctgtgatataccgaaatgttgagcactatcaaaatgcaaaacatgttcctggaatgctaattctagagattgatgcaccaatttactttgccaatgccagctatttaagagaaaggatcacaaggtggattgatgaagaagaagaaagaattaaagctacaggggagactagtttgcagtatgttataattgatatgagtgctgttggaaacattgatacaagtggaataagtatgcttgaagaggtgaagaagattacagagagaagagagctacagcttgttttggtcaatcctgtaagtgaagtgatgaagaaactgaacaaatcgaagttccaaaatcatttagggaagaaatggatctatctgactgttgaagaggccgttggagcatgcaacttcaatctacgtgcaagcaaaacgaacccaaagaaagatgaaacagagggttggaacaatgtgtgactgagtcatatgccaaagagtattctaaataactcaaaaagcttattcgttttcgtcttagtaatgttaccactacaatgtgtggcatgagaatttctgaatcacgccgaagaagttttaaaggcataggaaaatgaaagatgcaagggtcttctaatttctcaactctgcatccttagttagaagaaaatctcctatgtataggctgttgaaataatctttacgtatcatgcttgataatatattcaagagaaatgctagcaacacactctcagacacactcttttgaacacatgtaaagaggtaaagaagtgtgttgctagcactcctccatattcaattgtaaagtaattgccatgagaatttaaaaatcctttggaaacgtccaaaaaaaaaaaaaaaaaanna

SEQ ID NO: 828 - DNA, 1630 bp, Glycine max
tcttattcacatcattaacacgtttcctttttatctctatctttcttcacatcttaaccttgttcttaccagatggctgcctcagttaaactcttatttttgtcctttctctcgttgttcatctctttctccatagctcaaacctctttcagaccaaaggcacttgttcttcctgtaaccaaagatgtttctgcctcagttcctcagtatgtcacacaaatcaaacaaagaaccccacttgtggcagtgaaactaactgttgatcttggtggtggctacttgtgggtgaattgtgaaaagggctatgtctcatccacctctagaccagcccgttgtggctctgctcagtgctcgcttttcgggttatatggttgcagtactgaggacaaaatttgtggccgttctccaagcaacactgtgactggtgtctccacatatggtgacattcatgcagatgttgttgctgtcaattccactgatggaaacaatcctactaaggtggtttctgtgcctaaattcctcttcatatgtggatcaaatgttgtccaaaaaggccttgctagtggtgtcacaggtatggctggtcttggcagaactaaagtttctcttccttctcaatttgcctcagctttcagctttcatagaaaatttgccatttgcttgagttcttctactatgacaaatggtgtaatgttctttggtgatggcccttacaattttggttatttgaactcggatctctccaaggttctaactttcacccctctcatttcaaaccctgttagcactgctccaagttatttccaaggggagccctcagtggaatactttattggggtgaaatctattaaagtctcagacaaaaatgtagcattgaacacaaccctgttgtctatcgatagaaatggcattggagggactaagattagtactgttaatccatatactgtcatggagaccacaatttacaaagctgtgtctgaggtctttgtaaaagaggtgggagcccctacagttgcacctgtggctccatttgggacttgctttgcaaccaaagacattgggtctacaagaatgggtccagctgttcctggcatagatctagtgttgcagaatgatgtggtgtggaccatcattggtgccaattcaatggtgtatgttaatgatgtaatttgcttgggttttgtggatgctggatcaagcccaagcgtggcccaagttggatttgtggcgggtggttctcatccaaggacttcaatcacaattggagcacatcaattggagaacaacttgctacaatttgatttggcaacctcaaggcttggcttccgctctatctttttcgatcacagcaactgtgccaactttaactttacctcttctgcttagaatttgatattattctactatattcaaaacttgtatcttaattaagaccaatgtgtgtagacgaggagatgaataagtgaggttatatttatgcataacctccatagtcttgttcccttttgtctacaaaataaagagcacatggaggacgtattcatcttacatcttgaattactccattatacgacatggttaccattgttataaaatgtgatgtgtgatacacgatgctcgttttctt

SEQ ID NO: 829 - DNA, 918 bp, Glycine max
cccggcgtcgacccacgcgtccgtacggctgcgagaagacgacagaagggggcaccaaatttcgtgtttgaaactctcgtgtgtgtcgtttttgttcttgcagttaagagagtacaaattccatggcttctaaaatcgaaagcgagaattcaaccgatacttctccatcatcgccaaagaacatatacaaaggtccagatgatgggcagcagcggtttttgcttgaattggagtttgttcagtgccttgccaatcctacctacatccactatttggctcagaatcgatactttgaggatgaagcattcattggatacttaaagtatcttcaatattggcaacgccctgaatatattaaatttattatgtatcctcattgcctctattttcttgagctgcttcagaatgcaaattttcgcaacgcaatggcacatccaaccaataaggaactggcacacagacagcaattctacttctggaagaactataggaacaatcggctaaaacacattttaccaagatcacttcctgaacctgccacacctgcagctcctgctcctgcttcaactccatctcaggcacctgtgtctgcactaccaccagtacctgcaacaagtgttgctgtgacagcagcaccttctcaagctccttccccaatgccatatgttatgccccctggctctggtcttgcaaaaaatgacatgaggaatcctacagttgataatagaaggaagagaaagtgagtgtataatacaacatgtaaattgattataaaaacaatgcaatgtggctggatcaggcaatcagtttattttttccttcttagttgaaaaattgaagtggtgataatgatagaaccaaacttttatgtaaaaaaaaaaaaaaaaaaaaaaaaaaaaaagcggccgctctagagga

SEQ ID NO: 830 - DNA, 1404 bp, Glycine max
atgacgtcttcaatggtggaaggtggacgcgacgaggggaaacacgagccgtcggatttgatctcgggtaccttcgttcgcccccccccaaacctttcacttcccagtgaaactgaaacattcttgagcgcagcaatttccctcaaggacaaggtggtggaggagacttggaaccggagagatcaagtggttgatccgacggtgtacacgggactgttgggcaccgcctttacttgcttgcggtcctaccaggttaccggttgccggaacgacttaatattatccagcgaaatcattgacacgtgtgtcaccgctgcacgtgcctccctcaggcacgtgacttttttgtgtggtagaggaggcgtttatgcgcttggtgctgtcgttgccaattacatgggggaccttcaaaagcgtgacctgtttttgggtctattcattgaggtggcaaaagagagagccctaccagttggaccagaggaaggtggttttggaatgtcatatgatcttctgtatggacgagctggattcttatggggtgcattgttcgtgaacaagcacctaggagaagatgcagtgcccaaagacattttgatgcttattattgatgcggtgttggctggtggtagagcaggagcatctgatattaaagactgcccattgatgtatagatggcatggaacaaggtacttgggtgcagcaaatggccttgctggtatccttcatgtgctgctacattttccacttcctagtgaggatgctgaggatgtcaagggaactttgtggtacctcatgagtaagcgtttccctcacagtggaaactacccctccagtgaagggaatccgagggataagttagtgcaatggggtcatggtgcaactggcatggccatcacattgtctaaagcagcacaggtatttccaaatgacagagaactacgagatgctgcaatagaagcaggtgaagttgtatggaagagtggattggtgaaaaaggtgggacttgcagatggggtatctggaaatgcctatgccttcctttccctttacagactcactaaagagggtatatacgaagagagagcaaaatcattcgcttccttcttgtatgataatgcaaaatctctggctgctgccaatggctattcccttttccaaggacttgctgggacagcatgcctctggtttgatctgcttgcacccgacaactttaggttcccaggttatgaattatagatggttaaagtagagatggtacttaaaaaaaaagcagaaggaccgtggcatggatggaaaatgttaggtagaaccccaatcataagtgatatgatctgatgaaaagaaaaaaaaaaaagaataggtgtttaaagattatatgttatatagatcctatatatcctccct

SEQ ID NO: 831 - DNA, 2340 bp, Glycine max
acggtctctccatacaccgccaccacatagaaccactgatcgacacgtttgcgccctacaacactccacttttttttttttctttttcttttcatttgagagttttagtgagacaatgacgtcttcagtggtggaaggtggacgcgacgaggggaaacacgagccgtcggatttgatcacggaaaccatgaatctgacggctccaaacctttcacttcccagtgaaactgaaacattcttgagcgcagcaatttccctcaaggacaaggtggtggaggagacttggaaccggagagatcaagtggttgatccgacggtgtacacgggactgttgggcaccgcctttacttgcttgcggtcctaccaggttaccggttgccggaacgacttaatattatccagcgaaatcattgacacgtgtgtcaccgctgcacgtgcctccctcaggcacgtgacttttttgtgtggtagaggaggcgtttatgcgcttggtgctgtcgttgccaattacatgggggaccttcaaaagcgtgacctgtttttgggtctattcattgaggtaatatagatattttggctctgttttcttaatgaatgaaccatgtggccacattttggctccctagcataatctgctgactctatatgttgtcagattttcagtaagcaagtaattaattttgcattgaacaaaattgaagaatttccttctgcttcagtagtctctgtcttatcatttatctttttgaaatttagttttttatgtattctaaatctaaaatatatttttgtatgactttttaagacaatttattgtacaaactaacaaactttgattggataactttcagctacgtaggccccccccccacatattattttctgtggtttgtattttttgttctatctattttgtttcctcttgtgtgagcacatgtttgaaaatcaaatcaaaggcattcacttgaaccgttgttttcttttgacaaatttgtctgcacacttcattgggctcgcttaaagtgattcgtggttcatacttgttcacataaaaaagctacaagagaaagacgagcgctttcatatttgttgtaatcttaaaatcagacaaatggatgttgaagtagtagggcctatagtaggattttttcaaacttagttttctttcatctaccaaaatcttcgcattcacatttcacacactgtctggcatcccctaacaatattcattcatttattcattaccatttatgatgggattaatgcttaggtggcaaaagagagagccctaccagttggaccagaggaaggtggttttggaatgtcatatgatcttctgtatggacgagctggattcttatggggtgcattgttcgtgaacaagcacctaggagaagatgcagtgcccaaagacattttgatgcttattattgatgcggtgttggctggtggtagagcaggagcatctgatattaaagactgcccattgatgtatagatggcatggaacaaggtacttgggtgcagcaaatggccttgctggtatccttcatgtgctgctacattttccacttccaagtgaggatgctgaggatgtcaagggaactttgtggtacctcatgagtaagcgtttccctcacagtggaaactatccctccagtgaaggtaatccaagggataagttagtgcaatggggtcatggggcgactggcatggccatcacgttgtccaaagcagcagaggtatttcctaatgacagagaactaagagatgctgcaatagaagcaggtgaagttgtatggaagagtggattggtgaagaaggtgggacttgcagatggggtatctggaaatgcctatgccttcctttccctctacagactcactaaagagggtatatacgaagagagagcaaaatcattcgcttccttcttgtatgataatgcaaaatctctggctgctgccaatggctattcacttttccaaggacttgctgggacagcatgcctctggtttgatctgcttgcacccgacaactctaggttcccaggttatgaattatagatggttaaagtagagatggtacttattctacaagcagaaggaacgtggcatggatggaaaatgttaggtagaacaccaatcataagtgatatgatctgatgaaaagaagaaaaaaaaaaagaataggtgtttaaagattatatgttatatagatcctatatatcatcactagacttgactatagcaaacaagccacgaggttctgctgctgttaatagtttatatgatattgtgtttgacactttgactgccttaaagacagcctaatctttgatcag

SEQ ID NO: 832 - DNA, 1268 bp, Glycine max
ccataataaatagcatcatcgtgctggtgcctcctctctctatattcattcttctgcttcttgtaatttgttgccaacaacaaacacttcacttctgtttttttttttttttttttcatttgagagttttagagggacaatgacgtcttcagtggttgaaggtggacgcgacgaggggaaacacgaaccctcggatttcatcacggaaaccatgaatctgccgtctccaaacctttcacttcttcccagtgaaactgaaacattcttgagcgcagcaatttccctcaaggacaaggtggtggaggagacttggaaccggagagatcaagtggttgatccgacggtgtacacgggtctgttgggcaccgccttcacttgcttgcggtcgtaccaggttaccggttgccggaacgacttgatattatgcagcgatatcattgacacgtgtgtcaccgctgcaccggcctccctcagccggcaccggacttttttgtgtggtagaggaggcgtttatgcgcttggtgctgtttcggctcgagacatgggggaccttcaaaggcgtgacctgtttttgggtctattcattgaggtggcaaaagagagagccctaccagttggaccagaggaaggtggttttggaatgtcatatgatcttctgtatggacgagctggattcttatggggtgcattgttcgtgaacaagcacctaggagaagatgcagtgcccaaagacattttgatgcttattattgatgcggtgttggctggtggtagagcaggagcatctgatattaaagactgcccattgatgtatagatggcatggaacaaggtacttgggtgcagcaaatggccttgctggtatccttcatgtgctgctacattttccacttccaagtgaggatgctgaggatgtcaagggaactttgtggtacctcatgagtaagcgtttccctcacagtggaaactatccctccagtgaaggtaatccaagggataagttagtgcaatggggtcatggggcgactggcatggccatcacgttgtccaaagcagcagaggtaaattactttccaaaatactctaatcattccatgttcttcataatgcatgtgtcttaaaagctttaaaatagaaacgccaaacttagatgcaaatgcagttttcttccaattaaaattgaagttttactattaaccttaaatgcaaactaaggtgaagctacaattcatattagaaaataacaccaaatacacatgaataaattac

SEQ ID NO: 833 - DNA, 1638 bp, Glycine max
  misc_feature (1584)..(1585): n is a, c, g, or t
tcgagtcagctacgtaggcccccccccatacttcaaaatccaaatctagcgattaattatagtttaggcagcaaattatggattcccatgatgaggagcatgctgccaaactacttagagctcaaacccacatatggaatcacatatttagcttcataaactccatgtcccttaaatgtgtggttgacttaggcataccagatatcatacacaactatggccaacccatgccactctcaaacctcattgcttcactaccaatccacccatccaaaacttgcttcgtccatcgcttgatgcgaatcatgatccattctggcttcttctctcaacaaaagcatgacttggagaatgagctagaagccaagtatgtgctaaccgatgcatctgtactattgcttaagaaccatccgatgagtgtgacacctttcttgcatgccatgcttgatccagttttgacaaatccatggaatcaattttctacttggttcaaaaatggtgaccctacaccatttgaaacggcacatgggatgatgctttgggattacgctggcgctgatccgaaacttaataacttgttcaatgatgccatggcaagtgatgctcgatttgtcactagtttggtgattgagaaatgtaagggaatgttcatgggattggagtcattggttgatgttgggggaggcacagggaccatggcaaaagccattgctaaatcattccctcgggtggaatgcattgtgtttgatctaccacatgttgtttctggcttgaaaggaagtgaaaaccttaaatatgttgcaggggacatgtttgaggcaattcctccagctgatgccattctgttaaagtggatattgcatgactggaatgataaggagtgtgtggacatattgaagaaatgcaaagaggcgataacgaggaaaggcaaagaagggaaggtgatcatcatagacatggtggtggagaatgagaagagagatgatgaatcagttgaaacacagctcttctttgatatgctgatgatggtgttggtcactggaaaagagagaagcaagaaagaatgggctaagttgatttcctctgctggttataacaactacaagataactccagtcttgggcttaaggtctctcattgagatctatccatagtaagttaatgagatgtgccagcactctatcattcatatatgtaagggctataatttttctgtttcgattcatgagtgaatgttggataagtaacaatagcaatagactgaactctcttcatcatagttgtgttgttggaacagtactgtcaagaaaggaaaaaaaaaaaatctgaggataagtatagtttgcgtggtatatatagcaggtgaagaagaaaaggaacacgtggttaaagagcacagtgagagtttagcaattactctttttttggtaactgaatttgccttgtattagatttgtgaagaactaagtttgtgagagttgtattaaataaaataagattaattgaaatttatttgtaattgaagtcaagacacatatatatttttttgcttgcattcgaaatcaaagaaagcaagttcatccnnaaaaaaaaaaaaaaaaaaaaaaaaaaaaaaaaaaaaaaaaaaaaaaaaaaaaa

SEQ ID NO: 834 - DNA, 1315 bp, Glycine max
ttttttttttttttttttggttaaattttcttatattgtaaaaaaattatagataaaagtggtcacaattattgtcacccctactggagaaagaagattctaaatcaattatttggagcgttctacatagtggccaaaatcatgatcaccaactattttttaaaacctagctacagaggataaagtcgttgcttaaacatcatctcgcctataaatagacccaaataatttgaggttccatacttcaaaatccaaatctagcgattaattatagtttaggcagcaaattatggaatcccatgatgaggagcatgctgccaaactacttagagctcaaacccacatatggaatcacatatttagcttcataaactccatgtcccttaaatgtgtggttgacttaggcataccagatatcatacacaactatggccaacccatgccactctcaaacctcattgcttcactaccaatccacccatccaaaacttgcttcgtccattgcttgatgcgaatcatgatccattctggcttcttctctcaacaaaaccatgacttggagaatgagctagaagccaagtatgtgctaaccgatgcatctgtactattgcttaagaaccatccgctgagtgtgacacctttcttgcatgccatgcttgatccagttttgacaaatccatggaatcaattttctacttggttcaaaaatggtgaccctacaccatttgaaacggcacatgggaagatgttttgggattatgctggcgctgatccgaaacttaatcacttgttcaatgatgccatggcaagtgatgctcgatttgtcactagtttggtgattgagaaatgtaagggagtgttcatgggattggagtcattggttgatgttgggggaggcacagggaccatggcaaaagccattgcttaatcattccctcgggtggaatgcattgtgtttgatctaccacatgttgtttctggcttgaaaggaagtgagaaccttaaatatgttgcaggggacatgtttgaagcaattcctccagctgatgccattctgttaaaggtaaatcactattcacattcagaatacaattttacattcataccattaacacccagtttttatacttgagtgatgtcaaattttaaagaattaaagcaaataattgatcgattggaaaaaaaaatgaacgattttatcatcattgatcacttgaaataacttcaaatttttatggggggggggggccctcggagctgaacccggcactagctagtagtccaactacatatctgccactgtcataccaaatca

SEQ ID NO: 835 - DNA, 1609 bp, Glycine max
tgtctggaaggcggttatcatgttttagacgaatctccgcttcgcagcccccccccccgcccaactgcgaaacagctgtggaagtccagtattggagttcttgaactgggtatattgagtgctcatggtttgatgccgatgaaaacaaaagatggtaaggggacaactgatgcttattgtgtagcgaaatatgggcagaagtgggtgcggacaaggacaatcattgacagctttgcaccccggtggaatgagcagtatacttgggaggtttttgatccttgcactgtcattacaattggtgtatttgataactgtcatttgcatggtggtgataagcctggaggctcaaaagattccaaaattgggaaggtaagaattcgtctttccacccttgagactgatcgtgtttatacacattcctatccacttctagttcttaatccaaatggggtgaagaaaatgggtgaaatccacttggctgtaaggtttacatgttcttctttgcttaatatgatgcacatgtattcactacctttgttgcctaatgatgcattattattcacccactaactgttaccgctgcgagaagacgacagaagggagctactcagattgtttcgatgagactgagtcgtgctgagccacccttgagaaaggagatagtggaatatatgctggatgtgggttcccacatgtggagtatgagaagaagcaaggccaactttttcaggattatgggggttttgggtggattaattgctgtaggaaaatggtttgaccagatttgcaactggaaaaatccaatcacgacggtgctgatccatatcctgttcataatattggtcatgtaccctgagcttatcttacccacaatcttcctttacctctttttgattggagtttggtactacagatggagaccaaggcacccccctcacatggacactcgcctctctcatgcggattctgcgcaccctgatgaactagatgaagagttcgacacattcccaaccaccagggcttcggacattgtgaggatgcgatatgaccgacttagaagcattgctgggaggatacagactgtggttggtgatttggccactcaaggggagaggctgcagtctttgctcagctggagagatccaagagccactgccctctttgtgattttctgtctggttgctgcaattgtactgtatgtcaccccattccaaattgtggcccttttcactggaatttatgtgttgagacacccgaggttccgccacaagcttccttcagtgcctctgaatttcttccggaggctgcctgcaagaactgattgcatgctctgagtcatggatagtgcacaaactactgagggagcagcttgctttgctttcattgttcagcaccagattttgtggatttgcatttcattatgtcataggattttctgttttgaacttcatggttaaatttgtaattttgtaggctgagttgaaattaacttatgtttaatcgatttcatgtttaattagatgtagtaaagtttctcaatgggagtttgaactttaccccctcaaatggctattgattttgagcttaagtgattactgatttctgttcc

SEQ ID NO: 836 - DNA, 1275 bp, Glycine max
ttttttttttttttttttttttttttttttttttttttttttttttttttttttttgtttgctttttctgctgctagctaagagtgaggcatatatattaatataatcctataaagtttttgaacttcaaagcaatcgaaacagagtcacgaaagccaaaacagcacgaatacagacacttcacacacatccacgataatcagtaaggcaggtatcatatcaccctgtattaatttgccttctttttcttcacacatgctaacagctcaagtttctgaactacagggccatcgaaacacagacacttcaaacaccaacaataattatttaaactttaaagacacagacaatttttactgagactgcccaaacacggtaaatcctgcatttacatcagtgtaccctccatctatcacaagattgtgaccactaacatacttggactcatcacctgccaagtaaagagcagcttcggccacatcgttaggcacaagatgagcaccttttaggtttgaatatatctcacgaattttgtcttcatcaatattgaaatatttcttacttaatggtgtgacaacaagataaggagacaaacaatttaccctaataccatgttgtccaagctccaccgcagtgttttttgtcagcccaattagtgcgtgctttgaacttgtgtaggcatgtgtagcacctccacctatgcatccagcaacactagctgtgttgattatgcatccctttttagcaggaatcatgacccttgcagcatgctttgttcccagaaaaggaccaaccaagttaacacctatcactctctcaaaatcagacttgctgttgtcaactatgcttgttttgatctcatcaattatgccagcattattaaacatgatatcgagtttgccatacttggaaaccgctgtgttcacacagttttcaacgtcgttttcgtttgtgacatcgcaatggacataggaagcggattctaactctttggcaacagagagacccaagtcgtcttgaatatcagctatgactacatgtgctccatgcttagagaagagtcttgcagtggctgcacctagaccactcgcaccaccagtgataatcgccaccttcccctcaagccttctaaatggagctgaaaccgaagaaacactagccatgattgagtttttcaagatatatgtagacaaggaaataaagatatgttttagagtgcttaattaattgcttatgtggtcgtgaaggatgtggggggggggcctacgtagctga

SEQ ID NO: 837 - DNA, 1908 bp, Glycine max
gcgtacgcccacgcgtccgtacggctgcgagaagacgacagaaggggaacatgaacattagcagaaaataaataagacccacttgttagattggttacactagcagcacgcagggttctgttctgctttgcattctccgccatcatcatgcaagcgcttcactctcccaccctccgcgcttctcccttggaccctcttcgtggccccaacaatgccgccgccaaccgccgctcctccagcgccaagcgcgtgttcttcgtctccgccacggtggcgccgaaggtgtccgccccgcagcgacagaaggaccccaagaagcgcgttgtgatcaccggaatgggcctcgcgtcggtgttcggtaacgacgtggagggttactacgagaagctcctcgccggcgagagcggcatcaccgccatcgaccgcttcgacgcctccaagttccccacgcgtttcggcggccagatccgcggcttctctgccgagggctacatcgacggcaagaacgaccgccgcctcgacgactgcctccgctactgcattgtcgccggcaaaaaggccctcgaaaacgccgaccttgcccccgacaaccactccaagattgataaggagcgtgctggtgttcttgtaggctctggaatgggaggcttaacggtgttttctgacggtgttcaggctctgattgagaaggggcacaggaagataacgccgtttttcattccttatgcaattactaacatgggttcggctttgcttgggatagaccttggattcatgggtcccaactactctatatccacggcttgtgctacttccaattattgcttttatgctgcggcgaaccatattcggagaggggaggctgatttgatgatagccggtgggactgaggctgccattattcctattgggttagggggttttgttgcttgcagagcgctttctcagaggaacgacgaccctaaaaccgcttccaggccatgggataaggaacgtgatggctttgttatgggtgaaggtgctggagttttggtaatggagagcttggagcatgctatgaagcgaggcgcacctattattgctgaatatttgggaggagctgttaactgtgatgcttatcacatgactgatccaaggtctgatggacttggtgtgtctacatgcattcagagcagccttgaagatgccggtgtgtcaccagaggaggtcaactacataaatgcacatgcaacttccactcttgctggagacttggcagaaattaatgctattaaaaaggttttcaaggacacttctggcatcaaaattaatgccaccaagtctatgatagggcactgccttggtgcagctgggggtttagaagccattgccacagtgaaagccataacaacaggatggctgcatccaacaatcaatcaatttaacccagaacctgcagttgattttgatacagtggcaaatgtcaagcagcagcatgaaatcaacgttgccatttcaaattcatttggattcggtggacacaactctgtggtggcattttctgctttcaagccttgattgcccagcttagcttgtctgcactttatgtagaacacgggtttaagttaattgaaattttgttccctctacatcattgaggttatttactctagctgagtccatcatcatatataaaaagctgtaggcatgtagttgttcattttgtgcctaattgtgacttgacaattagctataagactattttgtagtagaacattttgaatatagctcgaagattttattagtttggaggtatacagcagcggatagaatgtcaaagagcttatattcttaagcattcttccttattgttaagtattatttgagtctcacggcttctggattcaaaaaaaaaaaaaaaggggggcc

SEQ ID NO: 838 - DNA, 1120 bp, Glycine max
aaaaattgtatctattgctgacttaataagatatagaagaaaaagagataagttagtggatcgctcttctgctgcacggatacctacaacgtggggaccattcacagcttactgttacagatcacttttagatgggattgagcatattgccatggttaagggtgacattggagacggacaagatgttcttgtgagagtacactcagagtgtctgacaggagacatatttggatctgccagatgtgactgtggaaatcagcttgcacttgcgatgcaacagattgaggctgctggtaggggtgtgctggtatatctccgtggacacgaaggaaggggcattggattgggtcacaagcttcgtgcttataacctacaggacgatggacgagatactgttgaagccaatgaggaattgggattgccagttgactccagggagtatggcattggtgcacagatgttgagggacttgggtgtacgatctatgaagctgatgacaaacaatccggcaaaatatattgggctcaaaggttatggtttgacagtttcgggtaggatcccattgttaactcttatcacttcggagaacaagagatatttagagaccaaacgtgtgaaaatgggtcacatatatggcacggaatttaacggccgattgagcactcatgacagtggtaatggtaatgccaccaggattgaggactctaatgctgttactggcttataaacatcctttttttaactagataacatggaagaactagatttccatggtgcagatgaatacataaagttataaagttatagaaaccatttttcttattcatttgtctgataaacttcagctctactaaactataggctctaccgaacaccattcatcttgattattgaaacatagtgccatgacaagggcattgctatttcagggttattttttctttggtgccttttagaggttcatcatttctagactctggaaatcattagccgatttaaacctagtttcttcattcttttttatccaattacccatgcatcacagttgcctcaataatgcatgataccaaagttatatgattcgcagctccccaatttataataaataaattccttttgt

SEQ ID NO: 839 - DNA, 1596 bp, Glycine max
aattcggctcgagacggctgcgagaagacgacagaagggggaacaacaagtcttacattaggtggaggatatttggaaacagctagcaactatggctctcatgcagcttactagctctcctgttgccttattgctccgtttcatagtaatatttgctctatgttacagaacaatggctttggtgaagttgccaccaaacgcttcatcagttccggcagttttagcgtttggagattcgatcgtggactcaggcaacaacaacaacataaaaacactgattaagtgcaacttcccaccttatggaaaagattttcagggaggaaacccaactggtcgattttgcaatggaaaaattccttctgacctaatagttgaacaattgggtattaaggagtatttgcctgcatatttggatccgaatctcaaatctagcgatcttgttaccggcgtcggctttgcctccggtgcttcaggatacgatcctttgacacccaaaataacgtcagttatatcattatctactcaactagacatgttcagggaatacataggaaagctgaaaggcattgttggagagagcagaacaaactacatcctatccaatagtctttatcttgtggtggcaggcagtgacgacattgccaacacctattttgttgctcacgccagaatattacagtatgacattccttcttacaccgaccttatggtcaactcagcctctaattttgtaaaggaactgtataatctgggagctcgtagagttgcagtactgggtgcaccaccgattggatgcgtgccatcacagagaactctggctggagggctaacaagaaagtgctcagaaaagtacaattacgcagccaggttgttcaattccaaactttcaaaggaacttgattccctcggtcacaacttgtccgataccaggatagtttacattgatgtttacacccctctgctcgatatcattgaaaactaccaaaaatatggctataaagttatggacagaggttgctgtggcacaggcaaactagaggttgcagtgttatgcaaccctttggatgccacttgttccaatgcttcggaatatgtcttttgggatagttatcatccaacagaaggagtttacagaaagctcgtaaattatgttcttgaaaagtacatagatcgattgttttgagctcgattaagtttgcctacgggaagtaatatcaattattagttatgttgatgtcaacgaagacaatgagtattttgatttgtcgagttttggtgtgattgttcggtactttttgtagatttcaatgttcacaggcatcgatccatctcacagacgttccacatttttcctgtgtgaaatatttacctttaaagtggatgtatgttgttgtattcaggtgtttaaatatgatttttgatgattttactggttggaaatagctatttccttgttagttggagttaccaagtaaaaatgttattttgttgtttttggagcttgttattttgtgtctgccataatattcctctataaaatgtttcattatgttattttattaccagaataaaaaccccccactattgttttttttt

SEQ ID NO: 840 - DNA, 1467 bp, Glycine max
tctcgcgccgcgtccggcgaggtacggctgcgagaagacgacagaagggggaagaacaagtcttgcattgggtggagcatacttagaaacagcaactatgtctctcatgcagcttactagctcccctgttggctcactggtccgtttcattgtaatatttgctttatggtacagaaccatggctttggccaagttgccaccaaacgcttcatcagttccagcagttttagcgtttggagattccatcgtggacccaggcaacaacaacaacataaaaacattgatcaagtgcaacttcccaccttatggaaaggattttcagggaggaaacccaacgggtcgattttgcaatggaaaaattccttctgacttaatagctgaacaattgggtattaaggagtatttgcctgcatatttggatccgaatctcaaatctagtgatcttgttaccggcgtctgctttgcctccggtgcttcaggatacgatcctttgacacccaaaataacgtcagttctatcgttatctactcaactagacatgttcagggaatacataggaaagctgaaaggcattgttggagagagcagaacaaactacatcctatccaatagtctttatcttgtggtggcaggtagtgacgacattgccaacacctattttgttgctcacgccagaatattacagtatgacattccttcttacaccgaccttatggtcaactcagcctctaattttgtaaaggaactgtataatctgggagctcgtagagttgcagtactgggtgcaccaccgattggatgcgtgccatcacagagaactctggctggagggctaacaagaaagtgctcagaaaagtacaattacgcagccaggttgttcaattccaaactttcaaaggaacttgattccctcggtcacaacttgtcagataccaggatagtttacattgatgtttactcccctctgctcgatatcattgataactaccaaaaatatggctataaagttatggacagaggttgctgtggcacaggcaaactagaggttgcagtgttatgcaaccctttggatgacacttgttccaatgcttcggaatatgtcttttgggatagttatcatccaacagaaggagtgtacagaaagatcgtaaatcatgttcttgaaaagtacatggatcgattgttttgagctcgattaagtttgcccacaggaagtaattaatatgaattggttatgttgatgtcaactaagacaatgagtattttgatttgtcgagtttatgtgattgttgggtactttttgtagatttaatattcatagcaggcatcgatccatctcagggacgtttcagatttttcctctgtgaaatgttttacttttagggttgatgtgtatgttgttctattctcatatacctttctccttgtatgtcacacgtttaattgacaccatttcaaatttcctcc

SEQ ID NO: 841 - DNA, 1964 bp, Glycine max
  misc_feature (1956)..(1956): n is a, c, g, or t
tcgatcagctacgtaggccccccccccccgaataatagtataaagtattgcccttgtcccggtctctccgtcgctttttctctatcttcatcacacacacttcaatctttttcgcttttgtctttctttgtcctttgattgctgccattaattaattaattaatattctccctccctcttcacatcaagaagttagaagaagtccatgcggtgtcagcttgtgaagaagaaatgtgagaaggatcttggtttacacctgacctgacagttctagtagtagagtgcaacagctacaatctaatctaatggggtccgagcaaaatcgatttcctcagcacgaaagacgaaagagatggggaggatgttggggtgcattttcttgtttaggttcacagaagggtgggaagcgcattgtacctgcatctcgcattcctgacagtaatgggccagcctctcaaccaaatggacctcaagtggttgggttgaccaatcaagccacgggactagctccttctctcttagctccaccttcttcaccagcatccttcacacattctgcccttccttccactgcacaatcacctagttgtttcttatccttgtctgctaactcacctggtggtccttcatctacaatgtttgccactggaccatatgctcatgaaacacagctggtgtctcctccagtcttttcaaatttcactactgaaccatctactgctcctctcactcctcctcctgagttggctcatttaacaactccctcttcccctgatgtaccttttgctcattttctttcatcttcagtggatctcaaaaacaatggcaagggtaactacatcactgcaaatgatcttcaagctacatattcactctaccctggaagtcctgccagtagccttatatctccaatatcaaggaactcgggtgactgtttatcatcttcttttcctgaacgagagttccatccacaatgggattcatcactatctcccgagaatggaaaatatcagagaactgggtctgggagggtgtctgggcatgacacaagtggtgtcactatggcatcacaagatacaaatttcttttgccctgctacctatgcacaattttatttggaccaaaatcctccatttcctcataatggtgggagattaagtgtttcaaaagactcagatgttcaatctaatggcggaaatggacatcagagtaggcatgctagaagtcctaagcaagatgtggaagaaatagaagcttaccgagcatcctttggtttcagtgcagatgagattataactaccagtcaatatgtggaaatttctgatgtaatggaggagtcatttaccatgttgccatttgcttctaacaagtcaacaatggaagaaagcatagagccttcatttatgaaaggattcaaagctcaggatacgcaggtggcattgcagagtcagagaagtcttagatcagatccaggtccagtaggcaaggaaaaagacaatcaggcccctatatgtccaggatatgaagatcatatatcacaagggcattgtagcaacagctctggattaagtacaccagagaaccgtactctcgaagatgatgaggatatattctcaaaaatggaatcttccagaatctgcaggaaatatcagatggggttatcgtgctctgatgctgaggttgactacaggagaggaagaagcttccgagaagaaaagggaatgtgatttataactagaattaatcagttgagaacagattgtctgttatctgtgtattaatttgtagcttttttaaaaaaaaaaaaaaaaaaaagaaaaagaaactctttacttggggttgtctaatatatggaaatggaatgacctaacttagatctaaccgattctgtctcgtgtttgaccagatctttctggaaaaaaaaaaaaaaaaaaaaaaaaaaaaaaagcggccgcnctagagga

SEQ ID NO: 842 - DNA, 1895 bp, Glycine max
ctatcttcatcacacacttgaatctttttcgcttttgtctttctttgtcctttgattgctgccataaattaattaattaatattgtccctccctctctcctcacatcaagaagaagttagaagtccatgccgtgtcagcttgtgaagaagaaatgtgagaaggatctgggtttacacctgacctgactgttctggcagtggagtgcaacagctactatctaatctaatggggtccgagcaaaatcgatttcctctgcacgaaaggcgaaagagatggggaggatgttggggtgcattttcttgttttaattcacagaaaggtgggaagcgcattgtacctgcatctcgcattcctgacagtagtgggccagcctctcagccaaatggacctcaagtgattgggttgaccaatcaagccacaggactagctccttctctcttagccccaccttcttcaccagcatccttcacacattctgcccttccttccactgcacaatcacctagttgtttcttatccttatctgctaactcacctggtggtccttcatctacaatgtatgccacaggaccatatgctcatgaaatgcagctggtgtctcctccagtcttttcaaatttcactactgaaccatctactgcacctctcactcctccacctgagttggctcatttaacgactccctcttccccagatgtaccttttgctcattttctctcatcttcagtggatctcacaaacagtgacaagggtaactacatcactgcaaatgatcttcaagctacatattcactctaccctggaagtcctgccagtagccttatatctccaatatcaaggaactcgggtgactgtttatcatcttcttttcctgaacgagagttccgtccacagtgggattcatcactatctcccgagaatggaaagtatcagagaactgggtctgggagggtgtcagggcatgacacaaatggtgtcactatggcatcacaagatacaaatttcttttgccctgctacctatgcacaattctatttggaccaaaatcctccatttcctcataatggtgggagattaagtgtttcaaaagattcagatgttcaatctaatggcggaaatggacatcagagtaggcatgctagaagtcctaagcaagatgtggaagaaatagaagcttaccgagcatcctttggtttcagcgcagatgagattatatctaccagtcaatatgtggaaatttctgatgtaatggaggactcatttaccatgatgccatttgcttctgacaagtcaacaatggaagaaagcatagagccttcattaatgaaaggattcaaagctcaggagacgcaggtggcattgcagagtctgagaagtcttagatcagatccaggtccagtaggcaaggaagcacacaatcaggcccctatatgtccaggatgtgaagatcatacatcacaagggcattgtagcaacaactctggattaagtacaccagagaaacgtactctcgtagatgatgaggatatattctcaaaaatggaatcttccagaatctgcaggaaatatcagatggggttatcatgctctgatgctgaggttgactataggagaggaagaagcttacgagaaggaaagggaatgtgatttatgacactaagaattaatcagttgagaacagattgtatgttatctgtgtattaatttgtagctttgtttaaaaaaaagaaaagaaaaagaaactctttacttggggttgtctaatagatggaatgacctaacttagatctaaccgatggtgtttgaccagatcttactgatcaatgattgtagtctcgttcttcaagcgagttcagattaatgtttgaagtgaatgaagtttgattttaaacaa

SEQ ID NO: 843 - DNA, 1701 bp, Glycine max
tcagctacgtaggccccccccccaactctcttgctcgttctgtcttatccaaaatgttgccacttgtgtacatactcatagctcttcctgcagtagtgttgctattgatcctcttcaaagccaacaaaaacaacccgccacgtccaccaggtccaagaggccttcccataatcggcaaccttcaccaactcgacgcttcgaagctcaatctccaactagggcagctctcaaagacctacggtccccttttctccctccgaatcggcttcaagccagccctcgtcgtttcctctccaaaactcgccaaagaagtcctcaaagaccacgatctggacgtgtgcacaagacctccctctctcggccctctaaaattaacctacaatgcccttgagcttatcttctctccctacaacgaccactggagagaaatcagaaaaatctgcgttgtccatttcttcagctccaagagaatctccgctttctcccatgtcagaaaatccgaggccaagcgaatgctgcagatcgtatcatcccacgttgattcttccaaaacaaccaacttgaccgaggttttgatggcggtatcaagcgctataatatgcaggcttgcctttgggaggaagtatgatgacgacggcgccgaaaaaagcaggttccatgggctgcttaatgactcgcaagctatgttgctctctttttttgtttcggattacattccgttcttggggtggattgataaactcaccgggatggttactcgtctcgaaaagactttcgaggcgttggatgggttcttgcaggaagtgcttgacgagcaccttgatcctaatagggtgaaagtgaaacagaacgaagagaaggatcttgttgatctgttgcttgagctgaagaagcagggtcgcttgtcaatcgacctcaccgatgatcaaatcaaagctatcatcttggacatactcatagctggaactgatacaactgccgctacgtccgtgtgggtgatgaccggattgataaagaacccaagagcaatgggcaaagcccaagaagaaattagaaacctgtctggcaacaaagagttaatagaggaagaggatgttcaaaagcttgtgtatctgaaggcagtgataaaagagacactaagggtttatgcaccaacgccactggttccaagagaagccattagaagtttcacaatagaagggtacgaaatacaacccaagacaatagtgtatgtgaatggttggtcaattcagagggaccctgaggcttggaaagacccagaagagttttacccagagaggtttttgaacaatgagatagattttaaggggcaagattttgagttcattccgttcggtgcagggcgcagaatttgcccaggaatatcactgggaattgccacagtggaactcataactgcaaaccttcttaattcattccattgggaaatgcctcaagggatgaaacctgaacacatagacactgaggggctgccaggacttgctcgccacaagaagaatcatctttgccttgttgccaaaaaacgtatgtgaatgaaataactaacaaagggcctctaatgtaataaagccattttagcttgggctttgattttgagtatgcaaaatggatcaccatgttgcagttatatgcctttcaaaaataaaataatttaaaattacaaatgttttttttggttcc

SEQ ID NO: 844 - DNA, 836 bp, Glycine max
aaccctttgttgttttcaaagaaaaatcgcgggtcttggtttttaaccaaagttttcaatgggaaggaatacaaggggtaaaaggccccccccaaagccctcaaaaaaagggcaagctcgcttcccccaaatttttttgggcgggcctttttgccatggaaagtggaaaggaaaagggaatccataattttgaaaaaagggaacccgagcttggaaggatcaaatttggagattctgctgaagcttttcagggtgttggagaattactttttaggctaagagaagctgaacacgcagcagcttctgcagaggagaactttgcaaatttgcaccaagatattgaaaatttgaagatgcaaattgcaaagatgaaaggaaaacccaagactgagattaataccatgaggcagttctttacagagagcaaattacctgagtctgcactacaaccactgtatagagaggaggattctgatgtggcacacaatgcaacttcctcctatacatatgacgatcaggcatggagagcagaatttggagcaatatatcaggagcattactaattgactgttggtattattagcatttgataaatttccttttggatcaaactccaaacaattttgtctggcatatcctacttgggtcaaaggggcatcccttaatgccattattctttttgtgtatttctagaaattcattatattttttccgttgctgtgataatccaacacttgttatggaactgcaaccttttcctgctgtatgatgatataatagataaattcattgttgtacaaaaaaaaaaaaaaaaaaagaaaaaaaaaaaaaaaaaa

SEQ ID NO: 845 - DNA, 969 bp, Glycine max
tcagctacgtaggccccccccccagtattatgaagtcaatgattttggaaacataatactacaataatatatagggatcaaccacgattccataaagaagctcaaggtggagctaaaattaagagcaccggaaaaaaaggatcaattcatctgataaaaaaaatgaagttgcgaatggcgagaggggaagtttatctaagggtctcagcaatactggttttggtattaacagcatgtttggttgctttagatactcaaaccaaggttgtgttcttatctattgagaagaaggctacatgcagagacttgaacgctctcaagatcttggtgtatgttacatctgcgtctgctggttataatctgcttctattgtgcaaacactccatttggtctagaaaaaacttcaaagggtcttatctatgcatggcttggatttgtttcttgttggatcagatcgccgtgtacatgacatttgctgcaaacactgcagcaatgggagccgcgatgctagcaataactggatcagatgcctttcagtggctaaaggtatgtgacaaattcacaagattctgcgtccaaataggaggggctttgttatgcggctatgcagcgtccatcataatggctctaatatccactatctcagcctaccaagtgttcaggatgtactcgccaaagtggttcttgcgtttgaagaacatgtgatcattatctatcttttcagcaaggagcaaaaatatgaagaaaagctcgtcaaagggtagtatagttttgcctttgttctcaactgctattaggctgatgtattattttccttctcttttttacttgtgtgtttccccccgcctaaagtacttactctttgtccagtgaaagaaattaagcaaaaaagaaataacaaaaatagaatgaaaaaaaaattgtattatttttatcaataaaaatagaagaagaatcttagtaaaaaaa

SEQ ID NO: 846 - DNA, 1188 bp, Glycine max
gtgggctgagttcagcagagatttaggcagcccgaaccgacgatgttgtttttaactgacagcagcacaaagcgaacactaacactaacgtgaaacgcgttgcgttgtcggaaaatcaccctcacctgatcactgtggaagtctctaggtgatggccggttcagaacctgttagggcagagggagagactatggctgtggatgctgccccaaggaagccccggattctacttgctgcgagtgggagtgttgctgctgtcaaatttgcaaatctttgtcactgtttctctgaatgggcagatgtaagagcagtttccacaagtgcatctttgcatttcattgatagagcagcaatgcccaaggatgtaattctatacacggatgacaatgaatggtctagttggaagaaattaggtgatagcgtgcttcacattgagcttcgcaaatgggctgatatcatggtcatcgctccattatcagcaaacacccttggcaagattgctggagggttgtgtgacaatctactgacatgcatcgttcgagcctgggactacagcaagccattctttgttgcaccagccatgaacacttttatgtggaacaatcctttcacagagcggcatctcatctccattgatgagcttggcatttctctcatcccgcctgttacaaagaggttagcttgtggggattatggcaatggtgccatggctgaaccctctaccatttactcaactgtaaggctcttctatgagtcaaaggctcagcaaggtagagctgtggtaaccttaaggtgaatgaaggggtagtcctacgcccccattcatggtagtcaatagcactctatagcaggataacggagcgcagcagccctgagttactatggaagtcgaaatcgctgagcgattttcaataaccgctgtagcggctgcaatagtggtctaaatacagcttttcgggtgctacagcgcactgccataatattagacttcaaattctatatttactccagaaacatcattgtttgggtaaaaatttacaaaaaagttacccctgttttgaccctttattcctttacacattacaagattatattttatcctatgttttgttctttctttctttatactttccactcaattcacattttgtcaattttattttatctaatttgttatgttctttttct

SEQ ID NO: 847 - DNA, 846 bp, Glycine max
  misc_feature (23)..(23): n is a, c, g, or t
  misc_feature (25)..(25): n is a, c, g, or t
  misc_feature (27)..(30): n is a, c, g, or t
  misc_feature (32)..(35): n is a, c, g, or t
  misc_feature (53)..(53): n is a, c, g, or t
tgatgacatagtggtcagaaggncntnnnngnnnnatggaagattgatatggntgccaaggtgaatggagctgtagaaacatgttttgggtcattccatagatatgcacagtacatgaatttctcgcaccccttgattaaagcaaagtttaatccaaaggcttgtgcatgggcttatggaatgaatttctttgatttggatgcttggagaagggaaaaatgcacagaagaatatcattactggcagaatctgaatgagaaccggacattatggaaattagggacattgccaccaggtctaatcacatactacgcaacaacaaagccactggacaagtcatggcatgttctgggacttggctataacccaagcatcagcatggatgagattaacaatgcagcagttgtgcacttcaatggcaatatgaaaccatggctcgacattgcaatgactcagttcaagccactttggacaaagtatgttgactatgaattagatttcgttcaggcctgcaattttggtatctaaatggtcaagtttcttgtcacttggtgatgctgtgtcaggtgccgctgcagtttatttgctgtttagttttgatacataatgcttatacgtttaacagagttccctgctggtgcaagaaaaaatcctgcttctttcaattgtaaaatactatagtatagttattctctcatgtcttcctcttatttattcataacgtttaggcaataatgttatttaaagatgtggtttaatgctgaacaatattactgaattaagtcttgtgcctttcactttggctttagctgtttatttatgtttcattaagaactttcgcatcgt

SEQ ID NO: 848 - DNA, 2148 bp, Glycine max
tcagctacgtaggccccccccccggtcgtctctctttgcgaagaagagtgaaagagaaaatccgagactctgattttgagagtcgagtgagtgagtgctgcttcctctgaatcaaatcattcatcactctctctggttctgagtttctgacaccaaaatggtgaatcctcgaattccacgttcaaggatcccaactttcacacctttcacttctgctatctccatcgccctctgcattttctttgttctctctcttctcttcacttcccattctgattcatcccatcaataccaccacacaggttctgatggtggtgttgcacatggatttgagtcaataaggagatccattctagctctgaaaacagatcctctcaagcctcggttggaccagattcgtaagcaagccgatgatcatcgctctttggctcttgtttattcttcctatgcacgcaagctcaagcttgagagctcaaagcttgttaggatttttgcggagctatcgcgcaacttctcagatctaatgaacaaaccacaatacaggacccttttcagcaatgatgcatcccctgctgatgaatcagcgcttcgccaattggagaaggaagtgaaggagcgcattaagaccacacgccaggtgattggtgacgcaaaggagtcctttgataaccagctcaagattcagaagttgaaggatacaatcttcgccgtgaatgagcagttaaccaaggcaaagaagcagggtgctttctccagcctcattgctgccaagtcgattccaaagagcttgcattgtctctcgatgaggttgatggaagagaggattgcccatcctgagaagtattcaactgaggggaagccaacccctccagaagttgaagatcctaacctgtaccactatgccttgttctctgataatgttgttgcagcatctgttgtggtcaattcagcaacaaagaatgcaaaggagccttggaagcatgtgtttcatgttgtgaccgataagatgaaccttggagcaatgcaagtgatgtttaagttgaaggattataatggtgcacacattgaggttaaggcagtggaggattacaagttcctgaattcatcttatgtgccagtcctaaaacaattggagtctgctaaccttcagagattttactttgagaacaagcttgagaatgcaacaaaggacacaactaatatgaagtttaggaaccccaaatatttgtcaatattgaaccatttgaggttctacttgccagaaatgtatccaaagctgcataaaattttgtttttggatgatgacatagtggttcagaaggacctcactgggttatggaagattgatatggatggcaaggtgaatggagcagtagaaacatgttttgggtcattccatagatatgcacagtacatgaatttctctcaccccttgattaaagcaaagtttaatccaaaggcttgtgcatgggcttatggaatgaatttctttgatttggatgcttggagaagggaaaaatgcacagaagaatatcattactggcagaatctgaatgagaatcggacattatggaaattagggacattgccaccgggtttaatcacatactacgcaacaacaaagccactggataagtcatggcatgttctgggacttggctataacccaagcatcagcatggatgagattaacaatgcagcagtggtgcacttcaatggcaacatgaaaccatggcttgacattgcaatggctcagttcaagccactttggacaaagtatgttgactatgaattagatttcgttcaggcctgcaattttggtatctaaatggtcaagtttcttctcacatggtgatgctgtgttaggtgccacagcagtttatttgctgtttagttttgatacataatgcttatacgtttaacagagttcctagctggtgcaggaaaaaatcttgcttctttcaattgtaaaataatactttagtacagctattctcgtatgtcttcctcttatttattcataacgtttagacaataatgttatcttaaagacgtggttgatcctgaacaatattactgaattaagtattgtacctttcactttgaaaaaaaaaaaaaaaaaaaaaaaaactcaagactagttctctc

SEQ ID NO: 849 - DNA, 2024 bp, Glycine max
  misc_feature (2009)..(2009): n is a, c, g, or t
aattcggctcgagacaaaattagtgaagaaaggttgaagcatgctttggatgctgaatcaaaaataatccagttgaagactactatgcaaaggcttgaagagaaattctcagagttggactctggggccctcggtctgcggcaacagtctctgctaaacgcatcttcaaaaacaatgtcagagcacctttctacccacatatctgagaagttggaaaatggtcaccatgtgctggaagatcagaacaatgctgaagcacagagtgtcacacctgtgaagaagtttggtacagaatctgatggcaaattaaggagatccttcattgaacgtcaacatgagaatgttgatgcacttgtcaactgtgttatgaaaaatattggtttccatcatggaaagcctgttgctgcatttaccatttacaaatgtcttctccactggaaatcatttgaggctgaaagaacaagtgtatttgatcgtcttatccagatgattggttctgcaattgagaatcaagatgacaatgatcttatggcctattggctgtcaaatttgtctgcactattgtttttgctccagcaaagtctaaaatctggtggtgcagctgatgcaactcctgtaaagaaaccgccaaatccgacatccctctttggaagaatgactatgggttttcgttcatccccttcttctgccaaccttcctaccccaccattggacattgtacgcaaagtagaagctaaatatcctgctttgcttttcaagcaacagctcacagcctatgtggagaaaatatacggtatccttcgggacaacttgaagaaagaattggcatcaatgctttcgttatgtatacaggcaccaagaacatccaagggagtgctacgatctggccgatcctttggtaaagattctcccatgggtcactggcagagtattatagaatccctgaacactctcctctgtactctgaaagagaactttgtacctccagtccttatccaaaagatcttcactcaaacattctcatatatttaatgttcaactcttcaatagtcttcttctgcgtcgtgattgttgcacattcagcaatggggaatatgtgaaagctggtttagcagaattggagttgtggtgctgccaagcaaaggaggagtatgcaggttcatcttgggatgagcttaagcatataagacaagctgttggattcttggttattcatcagaagtataggatttcctatgatgaaatcattaatgatttatgcccaatcatgagtgtccagcagctatacagaatatgtacactttactgggatgctaactacaatactcgaagtgtatctccagatgtcctttcaagcatgagagtacttatggctgaggactctaataatgctcagagtgattctttcttgttggatgacagttccagcatccccttctcagtagatgacttctctacatcactgcaagagaaggatttctccgacatgaaaccagcggatgagctgcttgagaatcccgccttccgatttttaaatgagtaggcaagggaagcttagtgtatgtgtttatcatagtcatatagggaagcaacaaaatcagttgttggtccttgtcaatggttgtaaatccatttttatttttattctttttctttctacttattatttttgtttttggtttaccaccctacatcttgtttgtcttatccctgcatagtcatcgcctgatgtaaaattattttttcattctttagttggcattcaattgtaaagtattcattttaaagaggggcagggatatttttaggattagtgagcttgcgttgtatgtccatttttgttgtcctggtcaatctggtaacaaaaccgttagaaagtgaagctgagctgcttataattttgattgggggttccaagctcactttccactcattttttttacaatgtaaagggtcaagaatgaacattgatatgtaatgaataggtttttcataaaatcgagtccccnaaaaaaaaaaaaaaa

SEQ ID NO: 850 - DNA, 1484 bp, Glycine max
cgattgggtaccgggccccccctcgagtcagctacgtaccccccccccccctgtctgatggaaggattgatcaatggggcaggttgcagtgtgtgtaccatggttggtgtttcaatggcaaaggagaatgccagctcattcctcaggcactccctgatggccctccggtacatacgtccaaaaaagcatgtgtagctgcttacccaagtactgtgcagaatgatatcttgtggttctggccaaatactgatcctcaatacaaagatattattacaagaaaaagacccccattcataccagaaatagatgatccatcgtatactaaatcaatgggaaacagagacattccttatgggtatgaagtactgatagaaaatcttatggatcctgcacatgttccatatgcacactatggactaatgcgtactccgcaaccaaaagtgaaagctgatagagaagggggcaggccacttgacatgtctattgaaaagttagatatcaatggcttttcagcaaatcaggcttggggcaaaagcaaatttatgccaccatgcattttttatgcatatactccagatcaacctgcctcatctggtgaaactaagaaatcatcagctaagaagaaaatgtgtttaatctttgtttgcgttccggttagtcctggtaaaagcagattgatatggtgcttcccaagaaactttggattgtggatgcacaagaaattgtaccacgatggatatttcatgtgggacaaaacctgattctggattcagatttatatctcctccatgttgaggaacataaactaaaggatattggtccaaacaattggcacaaagcctgttttgtgccaacaaagtcagacgcccttgttattggttatagaacgtggctaaggaagtatgcaggtggtcaggttgattggagaggaaaatatagtggagctcttcctccaacacctccgagagaacagcttttggacaggtactggtcccatgtggtgaattgcaagagttgcaattctgcttataagagcctcaatgcggttgaagtaatgctgcagatcatatctgttgcttcaattgggattgttgccgtcatgaagcatggtacaatgtcagtggcaaaaagaaattcaatggttgccttagcagtgctatcatttgcactgtcacggtggttagctcacttcatatacaaaaacttccgttatcatgactatgagcatgccttccgctgaaatgtgttttccatatttcttcatgtctaaaaatatgtgtatagactatagtgaaggtccactagaatgaagtcactggcacttcatttgactttttaaattttaaaagttaattcctctatgacaagtattcgcaacctcttcatacagaggacaaataagttgatatcaatctcatgtaaatctaatttacattgtccaaaaaaaaaaaaaaaaaagaagaaaaaaaaaaaaaaaaaaaaaa

SEQ ID NO: 851 - DNA, 2336 bp, Glycine max
gtgagacacaacacaagtcatagtccattggtaatggtatggttagttagttagtgagtggaaaatgaagtttggtttggagtttggacacactgtgttttttgtttggtggaagcttcataacttgtgccagctaaccccattaaattattcttttgctgatcagctacgtaggccccccccccgtgcttttccttccttctcaattattttatgaactctaactcttaactctgtctgcttcattccactttggccctcactggaaaaggagtagtagtggtacttaaatgccattaaaagttaagtgatcttttgaagtatgatacaggtggtgtgggtgtgatctatctatctacaacccctggactttttatcactcttgttttcttgctttgtcttttgatgattgggggttatcatttaggacttaggagtttgcacaaagtacaaaaagcagataaatgatgccccttactgcggaaagggcatgcctgtgtatctttgggggttatatagggtttttggctgagcagcaatttgttgttgttgtaatcaatttttgaagaaaagatggggaagacagcagcttccaatcctgctttgcaagtgtctgtttcatttggtagatttgagaatgattccttgtcttgggagaaatggtctgctttctccccaaataagtacttggaagaagttgagaagtgtgccactcctggatcagttgctcagaagaaagcttactttgaagctcattacaagaacattgcggctcggaaagccgaattgctggcacaagcgaaacagatggagaaagattctcctagatcacaacgtcaaaatggtgaagatctgagttgtaacacttgtgggactgatgcagaatgtgatatgtcctctactcagggttctagtgaaggggttaagcaagaaaccaattcaattggtgagattgttaggactgatgtgagtaatttaatggaggatgttgcagtttcaatagattatcaaggttcatcagttgagggagagaaagagaatgaagaactggaaagcagattaggtagttcccagatagataaacatgaagaagttgtctgcgttgaacaaggaggaagtaaagaagaaagtcctaacactgaagctgaagatgtgaaggaaatttcacacaatgtgaacaatgagcctgcaaagacttcagaaaatgaagcaaaatatgtgacattggatcatccaaaggtatctaagaaggttacccctgtgaacagagaaagcaatgcaacaaaggcgaagaagaaatcgatgctatctacttctaagcctaaggcatcccaattttccacccctagaagttcaaagcctacatcaactcccaccaagacattggcatctgcctcttcaactaaaaggggaatttctccatccatatctgggaggaaaattaattccacttcagagaacagaaaagttccaaataaatctttgcacatgtcccttagcttggctccaagccaacctgatcctgcttcgcatactacaatgaggaaatctttgattatggagaaaatgggggataaggacatagtcaaacgagcattcaagactttccagaacaatttcaatcagccaaaaacttctggtgaaaacaaatctttggtaaaagaaaaggttccttcaaaggtgacagagtcaaggaatccaacatctataaccttgagaaaggaagatggacagtcacctaaggttgacagtatggatagaagaagtgtgaatgctgttcgaactgctttcggcctaaaaggtgacgttaaagcagagaaaggaaaagagtttccgagaaaaatagatgaaaaatttaattcaaaagaggtagaaagaacgcatcttcaactgaaatcaaagggggaaaagataaaacatatttccaaagccacacacttgccagcttttcactggggtcagaaagcatcaaaaagtcatccagaaaagggggatgttaagattgagaaatggaggtagcctaaaatcaagagatgggattgaatacatcagtgggcgtctaagatctatatgttcagaggaaatgcttatggctacaactcaagtcacactatggtgatattttagtttagactctagtctgcaacaggggaaaaattatctagttatataagactataggagcatatgaacaatgtgaggaggaggaggaaggactaaagcttcagttattcataataaatttcttgtgagaaataatattgtataactataatgtctaatatgagaaatgtatgcatttctaataattaattgcatcatttacattctatgag

SEQ ID NO: 852 - DNA, 1428 bp, Glycine max
tgtacatatttgctatctttatgcattgtttttggatgatgatgttaggctacatcctggatcaatcggagcactcactcgtgagatggaaaagacccctgagatatttattcaaactggataccctctcgatctgccatctggaagcctgggaagttactgcatctatgaataccatatgccttgttcaatgggctttgctactggtggaaaaacattctttctatggggagggtgcatgatgatgcatgctgatgactttaggcaagatcgttatggtgtagtctccggacttaaagatggtggatattcggatgatatgactcttgcagccatatccggtgctcacaaaaggctcattacctctcctcctgttgctgtctttcctcacccccttgccagtgatcttaattttggaagatattggaattacttgaggaaacaaacatttgttttggagtcatatttaacaaatgttaactgggtgatgaaccgtgcattgtttactacccactgctatttgtcatggggatttgtggcaccatattttatggcgatgatccatgttgctgcagcagtaagattttactataaaggattctcacctgaagaaatggcctatacttctggtggtgagaacaatacttttcctttctagggttatcattggtggccttcctagccatatgcactcttgttgagcttctttcaatgtggaacttgacacggatagaagtccaactgtgcaacatgttatctcccgaggcaccacaactctttctcgcttcttataattggtgtcttgtgttcatcgcaatgctggtggataactttctttatcctgtgtctgcattccgctctcatttttctcaatctatcaattggtctggtattcggtactatttgaaagatgggaaaattagtaagattgaaagaactccaagaagcaaggatatgggtccagttttcacagatttgggaggaaaacatttgtacggaaagaaagggttgcctacaagagggtcattcctcagttctttgtccagaagtttggcacaatggcatcaacccaagaaatttgataactaggaacaagctccatcaaattctgtctcttctctctatctctttgcctcactcgggaagcatgggtgttggtagatcaaattgatcttttaattgttgtttggtgccattcatgattgattgttttagagtgtggtaggaattctagttccattttttcattgcccattcatcaatccatatgattttttagcccaagccttttcccttagggttaattttgtaattgtaacagttcagtgatttaatttatgtaattcagtgatcaagaatcgcagaattatacaggtagcgattcacattatttccaaaaaaaaaaaaaaaaaaaaaaaaaaaaaaaaa

SEQ ID NO: 853 - DNA, 1052 bp, Glycine max
gacctataaaacacaagtccttccctcttgatctagcggggaggatcatatctaccattcactactttgattccctgagatttctgcaatctacaaaaattcactatgggagtcacaacctttacacaggaatactcctcctctgttgccccatcacgcatgttcaaggccttgattgtagactccagaaatttgcttccaaagctcttacctcagtttgtaaaagatgtgaatgtgatccaaggtgatggtgaagctggaagcattgaacaagttaacttcaatgaagctagccccttcaaatatctgaaacacaggattgatgtgcttgacaaggacaacttggtttgcaaatacactatgattgaaggggatccattgggcgacaagcttgattctataggttatgaggtgaagtttgaggctactagtgatggaggttgcctatgcaaaatgacaagcaattacaataccattggagagattgatgttaaagaggaagaggtaaaggaaggaagggaaagcggtattgcagtttacagagttgtggagtcatacctgctcgagaacccacaagtgtatgcttaatcacttgcttatttattgtgtcatgtatcatacgatataaaaacatattcaattttttaataacggtgtgcaaccaaatatagggttgtttagaatggttgcaaagacttgaattccttaataagtccttattgtatgaacagccaaaaatggctagtggtttgccaaaaatatttgtactttggtagtaaaaaagagttgaagagtgttttgttttacctttacatggattccaatgtacttaaacaaagaagcaacaattcatttctattgagtaaacgtgtgtttggatggttgtaaacagaaaaacaaacgcaggccaagactttgagtcacaataatacgagccaataatactctaatgatattaacatgttggacgtacatgaggtaggttccaagagtttccatttataaatgaggtaaggtcatgattaagataattttcttctgcttcacagggg

SEQ ID NO: 854 - DNA, 518 bp, Glycine max
agccttccgaccggttgcaaaaaaacgttcgaagggggagtcaacaacaacctaggtcacaaccgaggcagtcttttattttatagtataattcattctgtcatatatctgtgtagcaatggtggtctttctttgcaaggaagaatatggtgtgctcttgggcaatgactgggctgcaactcatgaatttggccacaacttttgtatctcaaatgaaggtgacgatgacgatgatgataatggcgtcattgatgtggccccagcggcatagaagaatttcgcaaaacatgcataaatgaggaggatgaggagggatatagtagtagtcagtgtaagcttcattctgtggtcttgcttagtaattacattacatttgtgtttactcttggaataggttctagtgttatgcttaattacggtcactataaatttgagacataatacatgttttattagtaattaaaaaaaaaaaaaaaaaaaaaaagttgtgatgaagaagaagagactttttgtcaggt

SEQ ID NO: 855 - DNA, 719 bp, Glycine max
gccagccccagtctttgcgaccgggttggccaccagcactaacaacacaagctaggccacaaccgaggcagtcttttattttatatagtataattcattctgtcatatatatctgtgtgtgtaacaatggtggtctttatttgcaaggaagaatatggtgttcccttgagcaatggctgggctgcaacacatgaatttggccacaagttttgcatctcaaatgaaggtgatgatgacgatgatgataatggcgtcatcgatgtggccccagctgcatagaagaatttggcagaaaaacatgcatagatgaggaggagggatatagtagctagcttagtagtcactgtaagcttcattctgtcgtcttgcttagttacatttgtgtttactcttggaatatataggttatagtgttatgcttgtgtgacataatagaatttatattagtaattatggcttagttcctctctctcggacccaataattttcttgtcgatcgtctttgacaatctattatctgatcatagtttttgtatatatagtgttgatggcaattggcaatgtacttgtaatgaggtgcaagcaaatttgatatatttggcataaactaattataaatggtttcctttaatcaaaaaaaaaaaaaaaaaaaaaaaaaaaaaaaaaaaaaaaaaaaaaaaaaaaaaaaaaaaaaaaaaaaaaaaaaaaaaaaaaaaaaa

SEQ ID NO: 856 - DNA, 1475 bp, Glycine max
ttttgatggtcttgattttggtatgactcctgcgggctccccaatatctggaactgcatatcatgaaggcctgatgtctcccagttatttgttgagccccaatttacgggtggctccaactactgatgcacagttttcaccttatgttggtgggatggcattttctcctacttcatctcctggttacaggccatcatccccaggctatagtccctcatcacccgggtacagccccacttcacctgggtacagccccacttcacccgggtacagccccacctctccgacttatagtcctagctctccgggatatagtcctacaagtccagcttattcgcccaccagtccatcctactctcccacatcaccgagctacagccccacatcacccagctacagtcccacatcacccagctacagccctacctctcccagctatagcccaacttcaccagcttacagccccacttcacctgcttacagccctacttcaccagcatatagccccacatctccttcctatagtccgacttcaccttcttatagtccaacttcaccttcctacagccctacatcaccctcttacagtccgacgtctccatcatatagtcctacatcacctgcttacagccccacatcacctggatacagcccaacctcgccatcgtatagccctacctcaccatcatatagccctacgtcccctagttacaatccgcagtcagcaaagtatagtccttcgttagcatattctccaagcagtccgagattgtctccatcaagtccatatagtcccacatcaccaaattatagtccgacatcaccatcatattcaccaacatctccatcttattctccatcaagcccaacatacagtttcagcagcccatataattctggtgtgagcccagactatagccccagttcgccccaatttagtcccagtacgggttactcaccaagtcaacctggttactcgccatcgtcgaccagccagtacactccacaaactagtgacaaggatgatagaggcactcgctgagcttgttgaaaggtacctacctaagccgggtgaaaatgttcaggacaacttgaggctggacagaggacttaagttatgctgggatcaggcattgaactgttcgagggctattagtttgtattgtattaatcatctgtatcatttaagtctctgttgacaatgtcttcggaacagtttgtcgaagtatgaattcaaattctgccttgtagctgaacattttttgaggcatatgttgtgattggtcatcctcttaaatacatttattcaacatgtaaagttttgaggatgatatttatcactataaaatatttacttgtaacatgttatatcggtacgaatgttgaacataaacgatattcggacctacttatagataatgggtatattctggtttatcttaaatttgttctttaaatatattttttgtttatat

SEQ ID NO: 857 - DNA, 2553 bp, Glycine max
caacactttccactatgctggtgtcagtgcaaagaatgttactcttggtgttcctaggttaagggaaatcattaatgtggcaaagagaattaaaacgccttctctgtctgtgtacttgagatcagatgttggtaagactaaagagagagccaagagtgtgcagtgtgctttagaatataccactctcaggagtgtgactcaagctacagaggtgtggtatgatccagatccgatgagtacaataattgaagaggacgctgattttgtgaagtcctactatgaaatgcctgatgaagaagttgctcttgaaaaaatttcaccttggttggcttcgcatagagctgaatcgtgaaatgatggtggataaggaagttgagtatggctgacattgcagagaagattaaccttgaatttgaggatgatttgacttgtatatttaatgatgacaatgctgaaaaacttattcttcgtatccgtattatgaatgatgaagcacccaagggtgagattcaggatgagtctgctgaagatgatgttttcttaaagaaaatagaaagcaacatgctgactgaaatgaccttacgaggtatcccagacatcaataaggttttcataaaaaatactaaagttcagaagtttgatgagaatcaaggttttaagcctaatgaggaatggatgcttgataccgaaggtgtcaaccttctagctgtgatgtgccatgaagatgttgacgtgaccaggaccacgagcaaccacttgattgaagtcattgaagttcttggtatcgaggcagttcggcgagctcttctggatgaattgcgtgttgtcatttcttttgatggttcttatgtcaattacagacatttggctattctttgtgataccatgacttatcgagggcatttgatggcaattacacgtcatggtatcaaccgaaatgatactgggccaatgatgagatgctcatttgaagaaacagttgatattctgcttgatgccgcagtatatgctgagactgattacttgaggggagtcactgaaaacataatgttaggtcaacttgcccccattggcactggcgaatgtgccttgtatcttaatgatgaaatgctgaaaaatgccattgagctccaattgcctagttatatggatggtcttgattttggtatgactcctgcccgttccccaatatctggaactccatatcatgaaggcttgatgtctcccagttatttgttgagcccaaatttacggctctctccaactagcgatgcacagttttcaccttatgttggtgggatggcattttctcctacttcatctcctggttacagcccatcatccccaggctatagtccctcatcacccgggtacagtcccacttcacccggatacagccccacgtcacccgggtacagtcccacgtcacctgggtacagtcccacctctccgacttatagtcctagctctccgggatatagtcctacaagtccagcttattcgcctaccagtccatcctactctcccacatcacccagctacagtcctacatcacccagctacagccctacatcacccagctacagccccacctctcccagctacagccccacttcaccagcttacagccccacttcaccagcttacagccccacatctccttcctatagtccgacttctccttcttatagtccaacttcaccttcctacagccctacatcaccctcttacagtccaacatctccatcatatagtcctacatcacctgcttacagccccacatcgcctggatacagcccaacctcaccctcatatagcccaacctcgccatcgtatagccctacttcccctagttacaatccacagtcagcaaagtatagtccttcgttagcatattctccaagcagtccgagattgtctccatcaagtccatatagtcccacatcaccgaactatagcccaacgtcgccatcatattccccaacatctccatcttattctccatcaagcccaacatacagtcccagcagcccttataattctggtgtgagcccagactatagcccaagttcgccccaatttagtcccagtacgggttactcaccaagtcaacctggttactcaccatcttcaaccagccagtacactccacaaactagtgacaaggatgatggaggcactcgctgaggacaacttgaggctggacagaggacttatgctatgctgggatcagacattgagctgttcgagggctattagtttgcattgtattaatcatctgtatcatttgagtctctgttgacaatgtcttcggaacagtttgtcgaagtatgaattcaaattctgctttgtacttgaaccttttttgaggcatgtgttgtgattggtcatcctcttaaatacatttattcaacatgtgcatgtaaagttttgaggatgatattgatcactataaaaatatacatttgtaatatgttacatcggttcgaatgttgaacataaacgatatccggacctacttataaaaaaaaaaagaaaaaaaaaaaaaaaaaa

SEQ ID NO: 858 - DNA, 1790 bp, Glycine max
  misc_feature (1)..(1): n is a, c, g, or t
  misc_feature (3)..(3): n is a, c, g, or t
nangggagaatcccatgcccaagtggaggtgtagggttatgtggatcacgcgcttgtgcgccagatgtattctcttctcctttggctatcagtggataaaacggaaaggaaaacctgcaccaagggaaatcgccccagccatgggccccccccccgtttcttatattgagcctatcttctatttctatgaattatttcctaccattgtggcagctgagtctcatgactccataccttttgttggcaccattattagagcaatgcaggtcatatatgttaacagattcttaccatcatcaaggaagcaggctgttagggaaataaagaaatctgctttcaaggaactgaataacagagaagggcctcttgtgataaatttcctcgagtactattatttcccgagggaacaacaactaatggcaggaaccttatctccttccaacttggtgcatttatccctggatacccaatccagcctgtaattatacgctatcctcatgtacactttgaccaatcctggggtaatgtttctttgggaaagcttatgttcagaatgttcactcaatttcacaacttttttgaggtagaatatcttcctgtcatttatcccctggatgataaggaaactgctgtacattttcgggagaggactagccgtgctatcgcaactgcactaaatgctgtccagacaggacattcttatggagacataatgcttcatatgaaagcacaagaagcaaaacaggagaacccctcaagttttatggttgaaatgaccaaggtggaatcattatttcatatcagcagcacggaagctgtggactttctggataaattcttggccatgaatcctgatcccagtggtcgtgttcaatatcatgacttcttgagggttttaagacttaaggcttgcccactatctgcaaagatattttcattcattgatgtggagaagagtgggacaattacgttcagacagttcttgtatggatctgcccatgtcatgtcccaacctgggttccatcaagcctgtgaagaagcctttgctggctgtggcggtgcagtaaaggcctatgttgttgaacaagagttacgagatttcatccaacctgctatcctcaactggagtgaggatgaggtccatgagctttttatggtatttgacaatgataatgatggaagaattgacaagaatgactttctttcatgccttagaagaactcctcttctcatagcattttttacacctcagccgcagcaaaaggaatttgaaggtaatggagtgatagaaatagtgtgatgggtggatttcgcatttgataaaatactctggctttttaggtcttttgtgtactagaaagaaaagaaatgggtagggatacctggggaatacatacagtataggatgcagtggcctcatttttttttttccttttctttttttcattttttttcccttgctttgattaatttctcgtaactatttggtcaagatctgtgccatccatcctgcttcattttatatttttagctaggtcagttttgcatagttggatgtcagttacctgggcggtgttcaccccgatccaacagcttgagttttggttcagggaccatgctgacatttagggtcaatgtggttcatgtaaagtttgaaccaacgtgtcaatttgtaacaaacattataactgtattttttcaaagatgtgaacacgaagaaagtaatgtaatttatttggattttttagtaaaaaaaaaaaaaaaaaaaaaagaaaaaaaaaaaaaaaaaa

SEQ ID NO: 859 - DNA, 2263 bp, Glycine max
aattcggcaccagtaaatttcagcaggaacccaccaacattctcaaccctcccgttcttctttctctcctctcgatctctcaagaaccagagagatcatagttagttcacttcaaatagagaaaagaaagtaaagattaatataacatgcacaacatgagcactctcgttttctttatccttctttcaacgctactaagtgtttgttacggtggtcgcgacttagtagataaaaacccgttcaccgagcaggcttacgtggcacgctactgggacaaacatgttggcaacaacttgccaaagccatcgtttcttctctccaaagcctctccaatgagcgcttccgacacggcgtcgttcgcgaacctcgccgccaccaactccctctccacgcggctgccggagttctgctccgcggcgcacctcctctgcttcccggaggtccggcccagcctcgagaaacacaccggagactccgatttccagacctacaacgacggccagaacttcaccaactacggcaccgacttcgccggcggcctcgacaccttcaagaactactccaacgacctcttcagcactccggtgaacgacttccgccgctacagccgcggcgccgccggccacgaggaaagattttccgcctacgccggcgacaccaacgtcgccgaccagagcttcagcacctacggcaccaacgccgccggcggctccggcgagttcaaaaactactcccgcaactccaacgtccccgacctacgcttcaccacctactccgacagcaccggcgggagaacgcaatcgttctccagctacagcgaagacggcaacgccggcggccagaccttccaatcctacggaaagaactccgccggcgcggcgaacgacttcgccgcctacggcacagactccaacgtcgcctcttcagatttcacgaactacggaaagggaggtgcgggccccaacgacacgttcacgaattacggcgttaacatgaacaaccctacggagacgtttcagagctacgcagacggaaccgttggtggaacgcagagtttttccaactacagagaccaagctaacgtaggtgctgactcgttccaatcctacgctaagaacacgttagggtccgaagcggattttaaaaactacgggaattcgttcaaccctggttcggacactttcaaaggctacgctaaaggcgcagaagataacaaggttggcttcacaacctacagcgctaacacaaacgctacctttaaagattacgccaaacacggcgtttcctttgctagttacaacgtctcttcggaatctaaaacagtcagtagcagtgtggtaaaaaggtgggttgaaccgggtaagttttttcgcgagaccatgcttaaggaaggcactgttatgcccatgcccgatataagggataagatgccgaaaaggtcgtttttgccccgcgctattttaaccaaattgcccttctcgtctgcgaaggttgacgagttgaagcgtgtgtttaaggtgtctgagaactcatcaatggacaaaatgatcatggactcgttgggagagtgcgagagggcacccagcgtgggtgagaccaaacgctgtgtggcttccgtggaggacatgattgacttttcaacctccgttttgggccggaatgtggcagtttggaccacagagaatgtaaaagggtccaataagaatgtgatggtgggtcgggttaaagggatgaatggtgggaaggtgacaaaatcggtgtcgtgccaccagagcttgttcccttatttgctttactactgccactccgttcctaaggttcgggtctacgaagcggatcttttggaccccgaatctaaggccaagattaaccacggtgttgctatctgccacttggacacaactgcgtggagccccacccacggtgcattcttggcactcgggtcgggtccgggtaggattgaagtgtgtcactggatcttcgagaatgacttgacatggactattgctgactgatttaggaaattggagttggtttgcgactccggtggctaatggaaattgaaagcaggctcaacccagtgtcaatgggtttttcatttaagtcacttttttttttttttagaaataaatgttttcgacttttggaagtctttatttaataattactgataatgagcctgtgtttgaaagtgtgaattatgtatttatatggctttcccatttagtggaagcgaatgaatgaatgcatcttgccatatgtt

SEQ ID NO: 860 - DNA, 1127 bp, Glycine max
gaatttgccaaagctctacgcaagttgaaaggctttacaagggctggtttggtagctgagttagatctagaagatgttgaactcaccgacgtgggccccccccccacactagccgacggggtgcgcttgtccaattgggtgattcaagatggcagcccatcacttcatggaatcgttcacgagaggctccttgctatgtatatttgtgccggtcatggaattgaggctgagaggcagttgtgggagatgaagcttgtgggtaaggaggctgatggagatctctatgacattgtccttgccatttgtgcatcacaaaaggagtccaatgccacggcaaggctgctgacccggttggaggttgcgagctcaccacagaagaagaaaagtctgtcgtggttgttaagaggctacatcaaaggcggccattttaacgaggcggcagagactatcatgaaaatgcttgaattgggattctatccagagtacttggacagggcagctgtattacaaggtttgaggaaaagaatccagcaatatggcaatctagatacttatgtcaggctctgtaagtccctctctgatgcaaatttgattggaccttgtcttgtacatttgtatataaggaaatataagctttgggttgtgaaaatgctctaaggcctatgtatggattgatagaaaggaacaaaatagtatgaaatgaaaggggatgatacatggttccattgtttggattgcttaaaataggatgaaatggaatggaacattaaggaatatacattccattccattaaacacccctttttcttcccttcaatttggtgagtataggatggaaccatctattcatttcactctattatgttccatcgcattccacaatccaataccattagatagaaaacgaaccggtactgtgccacgtttacaacctttggttttggaggcatatttgtatatcgagcactgattttcttggtgcttgcttacgtatataattttgtatagttttaatgttaaatggaccaatactagtagaagagcaatgttgtaatgaatatgatgattagtatcttctcccgaatgagttactcgtgcatcaggtggatggtgtcatgatatttgag

SEQ ID NO: 861 - DNA, 1822 bp, Glycine max
aaaggcctcatgccttgtctcctatttttttttttttttgtaaatcaaaaagttctcagctacgtaggcccccccccctttaataatttggaaaaaaggtaaaaggttagcgtctgaaagttggtctcttttggttaggtaggttcacgggtaggcatttttatttgcacgtttctctggtgagggcaagatcacagaattggtgtgagagagatgggttcgtccgtgaagctttcaaggagggccttggaaactgagatgcccgttatggttcagatgcaggaattgcaacgaggagctaagaatgccttgtctttggcccagggggtggtttactggcagcctcccaagcaagcgttggaaaaagtgaaagaacttgtatctgagcctttaattagtcgttatggtaacgatgaaggtattcctgaactcagagcagcattagtcaaaaagttgcgtgatgaaaataatttgcacaaatcttcagtaatggttacatcaggtgccaatcaggcatttgtgaatctagttcttactctctgtgatccgggtgattctgtggttatgtttgctccttactacttcaatgcgtacatgtccttccagatgactggcattaccaatattctagttggtcctggtagctcagacacactccatcctgatgcagattggttggaaagaatattatcagaaaataaaccggctccaaagcttgttactgttgtaaatccaggcaatccatctggaacttacattccagagccccttctaaagaggatttcagatctctgcaagaatgctggctcttggcttgttgttgataatacatacgagtattttatgtatgatggcctgaaacactcttgtgttgagggaaatcatattgttaatgttttctcattctcaaaagcatatggaatgatgggatggcgggttggatatatagcgtacccctctgaagtaaaagacttcgctgaacaacttctcaaagttcaagacaacattcccatctgtgcttcaatattatcacagtatcttgccctgtattcattggaagtggggcctcaatgggttttagaccaggtaaaaactcttgaaaagaacagagaaattgttttagaagctctctcccctcttggagagggttctgtgaaaggaggagaaggtgctatatacctgtgggcaaagctcccagacttagacgctcacgatgattttgatgttgttcgctggctagctaacaagcatggggttgcagtaatcccaggaaaagcatgtggttgtcccagcaatcttagaatttcatttggaggcttgacggagaatgactgcagagctgccgcagaaagactgaagaaaggcttagaagaattggttagagacggactgcgggagtaactgaaactaatcatagaacatccccttcccaagccaagcctccaaaaaactatagatatcaatagaaagaaatttcacttgccaatgtagcaagtttgcaacttttgcatttgaataaatggaggattttactttctatccggttaaagttgtgggatatcaatagaaagaaatttcacttgccaatgtagcaagtttgcaacttttgcatttgaataaatggaggatttactttttagaaaagtactttctatccggttaaagttgtgggatatcaatagaaagaaactttcacttgcccatgtagccagtttgcaacttttgcatttgaataaatggaggatttactttctatccggttaaagttgtgggatagccaaattttattattttaattttgataaatttccaaatattggct

SEQ ID NO: 862 - DNA, 1137 bp, Glycine max
tgattctctcacactgtcttgtgttgtgttgtgtcatggcattaactgccactacttcaatcaacataagtcaccatagcactttgatttttcctccgaaacaacacaagcagcaccttagaatccacaggtttcgatgcagtggaactaatccgaacaaagagtcggaatcacagaacaatgcaattctcaagcttgcatggtatagttccgagcttcttggcattgcagcgtccgttttccgttcaccatctaatgaggaagttcctcctcagaggcttcttcagaccattgatcgtgctgcggttgtggacactatcaaacaagactttgaaagatcctattttgtcacaggagatctgacattaaatgcttatgaagaggattgtgaatttgcagacccagcaggctcatttaaagggcttcagcgattcaaaaggaactgcactaattttggatcccttctggagaagtcaaacatgaagctgatgcaagtgggaagattttgaagacaaaggaattggacattggcgattcaactgtatcttgtcctttccttggaggcccattctttctgcaactggatacacagaatactattttgatgcacgatcgggaaaagtatgcaggtgacaacaaatgtcaattgtgaaggcacatgtttctacctttcagtgatcattttggcaatgatctaaatataaatatctatgaaaaaatttcaggcatgtggagcactggaatgttcccaaaaaggcattgttcaagcaaattctaaggcctagtcgtggatttggcttaaaagattatgtgaataggtggttgaaagcagtgcagatgaagctttaaattacaatagttctgtgatggtgtcaacaatatatatagctttgaaatattggatgcttgatgtaagcttatgaagatctcgtgctgcaaattacatggacgaaggatcaattaggatattccttatatattttggatcaataagagtaaaaaaacataacaaatattttttatttttgtttctgcaaacataacttacaacattttttatttttgtatttttgtccgtgcataaaacaatagtcaaatagtcaatacaaatacttagtgacaaaaaaaaaaaaaaaa

SEQ ID NO: 863 - DNA, 1447 bp, Glycine max
gccccgtgtcctgtgtcccaccctgcatctcagcagacccactctgggtcactacaatgccattgttaacttcctctttgtttcacatggttcctctcttctctcttcttttactctcactcatgattcgttatggtacttctcagggtccaccttcacctggctactaccctagttccaaaactaatcctgttagctttgatgagggatttagaaacctttggggacctcaccatcagaaactagaccaagactcgttaacaatctggcttgactcctactcagggagtggattcaagtcacttcactcttatcggtctggatactttggtgctgcgattaagcttcaacctggctacactgcaggagtcataacatctttatacctttcaaacaaccaagactacccaggacaccatgatgaaatagacattgagttccttggtaccacgccggataagccatatgtcttgcagacaaacgtatacgtcagaggaagtggagatgggaatattatagggagagagatgaggattcacctttggttcgacccaacacaagattttcacaactatgctattctgtgggaacccagtgagatcatatttttagtggatgatgtcccaataaggagctatcctaggaagagtgatgccacgttcccctcaagagaaatgtatgtgtacggatcaatatgggatgcatcttcatgggctacagagggaggaaaatacaaagctgattataattaccaacccttctttggtagatacaaaaacttcaaaatacaaggttgtaccactgaagcttcaacctcatgccagccaccatctccctcaccaccaggctatggcagcctaagccctcagcaactttctgcaatgcaatgggtccaaaacaactacttggtctatgactattgccatgatcctggaagagaccatacacttactccagaatgctaaggttttaagctatatttggattgaaattgggaaagtatatttttataaaattctatacacaattgcaaatacagaatgaaaaaggaataatttgttgctttgcaaataaaattacttttgagctttcccaattgaaatccaagcatgcacttaattagtttggttcaagagttggtgtgtttcaaagttatttgttatttttcacatattaccaaaacagtttattaagggggtggattttgtgatggtttgctaatgctaagtgtaattgcaacaacagtgagcgtccaagttcccctcaaaaaagattgaaatgttttcgttgtttatgtaattgtgttggtttgtttgtaccccacaaaagattgggatgcttttgttgtttgtgtaattgtgattgcactattactttagtccttttcctgttgaaataaatcaatctatttggatttaaaaaaaaaaaaaaaaaaaaaaaaaaaaaa

SEQ ID NO: 864 - DNA, 1454 bp, Glycine max
agatgctggcaacccctcgagatatttctaaatcaattatttcctttatcttgtttatgtactctgactctgtgagagagtgtttgtactttgtagtagcaagcgagcatggctccgaagaaggttcttctcctttgcggggacttcatggaagactatgaagccatggttccatttcaggcattgcaagccttcggtctcgccgtcgacgccgtctgtcccggaaagaaatccggcgatgtctgccgcaccgctgtccatgtacttgccggcgcccagacttatagtgagacggttggtcacaatttttcactcaatgcaacgtttgatgaagttgatgctgcaagctatgatgggttgtgggtgccaggtgggagggctccagagtatcttgctcatgttcctggtgttgtggaactggtgaccaagtttgtcagtttgggaaaacaaattgctagcatttgtcatggacagttgattctggctgctgctggagtggttaaaggccgcacgtgcacggcttttcctcctgttaaacccgtgctagttgctgctggtgctcattgggttgaacctgacactgaggcagcaacagtggtagatggtgatctcattactgcagctacttatgaggggcacccggagctcattcgccatttcgtgaaggcattaggaggaaaaataagtggttttgataagaaaatcctctttatttgtggggattacatggaagattatgaggtcaaggttccttttcagtcccttcaggctttaggatgccatgttgatgctgtttgcccctcaaagaaggccggtgacacttgcccaaccgctgttcacgattttgaaggggatcaaacttacagtgagaaaccaggacatacttttgctttaacagctacctttgatgatgtggatccctcaggttatgacgctcttgtcatccctggaggtcgagcacctgagtatttggcattgaacgagtcagtcattgccttggtgaagtatttctttgaaaacaagaagccagtggcatctatctgtcatggccaacagattttatctgctgctggtgttctcaagggaaggaaatgtactgcttatccggctgtgaagcttaatgtggttctgtcaggagcaacatggcttgagcctgaccctataagccgatgcttcactgatggaaatctagttactggagctgcatggccagggcaccctgagttcattgctcagttgatagcactacttggtattcaagtatctttctagatgcactttgtgatgtaattaattatcaatgaataaagcttggcagtctccatatgcattttgtatcaaatattatatgtatgttaatgtattttacagtcctgtatttgaaggaccaataaaaaaaaaaaaaaaagtctcggtctagtgctccctaggttagggtgcatgtgcatgtcata

SEQ ID NO: 865 - DNA, 2049 bp, Glycine max
tcccgggtcgacccacgcgtccgcggacgcgtggggagaaaatggcattgttgtgtggcggcacgccatggtcgaaggttactatttcacccattttccaccactcccacacccctcgcaccttcttcttccaacgacgccgtttctcagtctctgctgctttctccgaacaacaaccaccgccacccgttcgcgttcgtttcgctccttctcccaccggaaacctccacgtcggcggtgcccgaacggccctcttcaactacttgttcgcaaggtccaaaggtgggaaatttgtgctgagaattgaggacactgacttggagaggtccacaagggagtctgaggaggccatgctcaaagatctttcttggcttggacttgattgggatgaagggcctggtgttggaggggattatggtccttataggcagtctgataggaattctttatacaagcaatttgcggataacctacaccaatccggtcatgtttatcgctgcttctgttctaatgaggaactagagaaaatgaaggaggatgctaaactaaagcgactgcctccagtgtacacaggtaaatgggccagtgcaacaaatgaggaagtagaagaagagctagcaaaaggaactccttacacttaccggttccgagtccctaatggaagtttaaaaattcatgatcaaatacgaggcgaagttagttggaacttggatacgcttggagattttgtgataatgaggagtaatggtcagcctgtttataacttctgtgtaacggtggatgatgctaccatggcaatttcccatgttatcagggcagaagagcatttaccaaacactctaaggcaggcattgatatataaggcactaggatttcccatgccttattttgcacatgtttctttgattttagctcctgataggagtaaattatcaaaacgacatggggcaacatcagttggtcagttccgggagatgggatacctaccggaagcaatggtgaattacctagcattattaggttggggcgatgggactgaaaatgagttttttacacttgatcaacttgttgaaaaattcactatcgaacgtgttaacaaaagtggtgctatttttgactcaacgaaattaaggtggatgaatggtcagcatttaagagcacgtccgtcagaggagttgaccaaacttattggagagtactggaagacatctggcttactcacagtatcagatgggccctttattgatgaagcagttcacctacttaaggatgggattgacttgataaatgatcccgcccggccccccgcgcgcccgctttcttatcctgtgcattctactttacagagcgatgaagcagaatctgtcttgctagataatctttctgaatttgctgctagcctcttggctgcctatgatagtggtgatctggtagcagcacttgaagaaggccataccggctggcaaaagtgggtgaaaggctttggaaaatcgctaaagcgcaagggaaaatcgcttttcatgccgctccgacttctgttgaccggcaaactccatggacctgacatgggggcaagtgttgcattgctctatagagctgggactagcaatgtagtagctcctgaatctggctttgtgacactggatgaaagatttaaaatgcttaggcaaattgactgggaagcattgtccaaggaccaacctgtcaaagagactgctgctcctgtctaacttagaattcactttcaaggtctatcaaataataccatggttttacacatctgtttggagccttctgttttttgtttttttttttttctgcaaatttgactagagaagtctgatttgtaatatttaccgagggatcttttatagtcatataatgagttccattttgtttaggcaagtttttatttcaatgtgactagatatatttcctatttttgtaatttggaaacatggatattttggagtgatgtttttttttaaattatttaaataagatatggaacagagaagcagtatttgcttttatatatataaaaaaaaa

SEQ ID NO: 866 - DNA, 1380 bp, Glycine max
tcagctacgtaggccccccccccgctgctgccattttgttaaaggaaggtggactctgggatggttcatcaatctcagcgcttccgattaccctttgatcactcaagatgatctgctgcacacactgtcatcaattccaagacaccttaactttattgagcacaccagtgatattggctggaaggaagatcagagagccaagcctgttatcattgatccagctctttatagtgtcaataaatctgatttattttgggtgacagagaaaagaaatgttcccacagcatataagctgtttacaggttctgcctggatgatgctctctcgccaatttgttgaatatttgttatggggatgggataacttgcctagaattgtcttgatgtattatgccaactttctatcctcccctgaagggtattttcacactgtcatctgcaattctgaggagttccgaaacactactgtgaaccatgacctccacttcatatcatgggacaaccctccaaaacaacatccacatttccttacaattgataactacgagcaaatggttgacagcaatgctccgtttgctcgaaaatttggcaggaatgaaccactcttggataagattgatactgaactcttgggacgaaatgaacatggttatgtgcctggcaggtggttcgaccaagcaaatcctaacatcaccaaaccatattctgccataagaaatatcactgaacttaagcctggccctggagcagaaaggcttaaacgccttatcaatggtttgttatcatcagaagattttcacactaagcagtgttcttgacacccaggtttaatcaccttgctatgctcattgctgtttttccatcactcaacagcaacaagcaaacaattatgatgtccagttgacatccaaggttgtttcgagaccaaacatgaaatatgagaagacagatcagaaaacatacggaacaatttcttcaaaagtacgccttcccttcaacttctatttttactcgaattttaacgtgaccacacatttgtagtcaatacgtatccattgattcacatgatatattaaattttatggatgacaaggacttgtcatcaatgcaattgttgtactccttagaatgtctttatagcaaataagagattcaatgatataacacacgggtagagtgcctggtacggttaggctggaagtgcacaagcccgtgaaaagtactcttcctagtcttttatacaaggacatgctcaagtagatgccacttattttgctttttttttctcctctcccttttcttgagttattaccctcatgaattgaggtacgtttgatttttctttcatgaatgaacatttgttatgccgttaggctcttgc

SEQ ID NO: 867 - DNA, 1977 bp, Glycine max
  misc_feature (49)..(49): n is a, c, g, or t
  misc_feature (1957)..(1957): n is a, c, g, or t
attttcccggaaaaagcaaggcgtttatagctcataactactacgtatntggaagacagctttggtttcagttttttgtcatcactctcagctggtcggtgcttatagatccagcgccagcagattcaatttgacactggaagcaacttttcatttcaaagattaagtgaaaacatggttgtccttgctgcttccattgtgagcaaatctggcaaagttctagtttctagacagtttgtggacatgtctcgtatcagaattgagggacttctagcagcatttcccaagttaataggcactggaaagcaacacacatatgttgagacggagaatgtgcgctatgtttaccagccaatggaagctctatacctgcttcttgtaacaaacaaacatagcaacatactggaagacttggcaactctgagacttctctccaaacttgttcccgaatattcttactcccttgatgaagaggatatttgccaaaatgcatttgagttgatttttgcatttgatgaagtcatctctcttgggcacacggaaaatgtgactgttgcacaagttaagcaatactgtgagatggaaagtcatgaagagaaactgcacaagctggttatgcagagcaaaatcaatgatactaaggatgttatgaagcggaaagctagtgagattgataaaagcaagattgaaaagaacagaggtgataaagggggatttggtcctttacagtcactaggctctggaaaaattgaaaatagctttagtgatttgagcatatctagcagcggacctggtcttgcaagtggctctggttttggattgagttctgatgctggttccttttctaccaggtctaaaggtcggccaacttcatctgccactgctccaccaaaaggtcttggaatgaagcttggtacagctcttcggcccgagcagtttttggaatcattgaaagcagaaggtgaggtcattcttgaacatgttcaaccaaaacttgctcaggcagctgccccaccatctacagatcccatttctttagctgttgaagagaaactaaatgtgacactaaaacgagatggtggagtcagtaattttgatgttcaaggcacattgtctctccaaattcttgacaaagaggatggacatattcaagttcaggtccaaactggggagaatcaagccatcattttcaagacacaccctaacatgaataaagaattatttgccaatgaaaatgtactaggtctaaaggatcccaataggcctttccccacgggtcaagctggtggttctgaaggtgttggtcttttaaagtggcgaatgcaaagcactgatgagtcaatggtgcctctgacaatcaactgctggccctcttcttctggaaatgaaacttatgtcagcattgagtatgaggcttcatcattgtttgatttgcggaatgttgtgatctcagtacctcttccagctcttcgagatgcaccatctgttagacagattgatggggaatggaggtatgactcaaggaattcctttttggagtggtctgtccttctgattgataattcaaaccgcagtgggtcaatggaatttgttgttccacaagccgaatcatcagcattcttccccatttcagttcgttttatagcaactgaaacatttagtgacctgaaggtcaccagcatcataccgctaaatgggggtaatcctcctaagtattctcagagaacacagttgatcacagaaaactaccaaattgtgtgatcgtttttcctctcgacactgagcttttatgacagttttgcttttacattcgtgattcttttatcaaagggcttttctttgccatgttgcatcattttattaaattcgtaaattcataatttggttttactttttgcaagcatggtgcaaagtatgattttcataatacgaaacttaagagtgtctttttactccnagaaaaaaaaaaaaaaaaaa

SEQ ID NO: 868 - DNA, 2077 bp, Glycine max
aattcggctcgaggcgcaccgtatcgtgttttcattagacgctgcaatcgttcttctcttgagtttggtcgtctgggatcagatctgctctctccgtttggattcaattcgacactttcctcgcctcaaagattaagcgaacaacatggttgtccttgctgcatccattgtgagcaaatctgggaaagtgctagtttctagacagtttgtggatatgactcgcataagaattgaaggtcttctagcagcatttcccaagttggtagggactggaaaacaacacacatatgttgagactgagaatgtgcgctatgtttaccagccaatagaggcactgtacctgcttctcgtaacaaacaaaaacagcaacatactggaagatttggaaactctgagacttctctctaaacttgtacctgaatattcttactcccttgatgaagagggtgtttgcaaacatgcctttgagttgatttttgcatttgatgaagtcatctctcttgggcacaaggaaaatgtgactgttgcacaagtgaagcaatactgtgagatggagagtcatgaagagaagctgcacaagttggttttgcagagcaagattaatgaaactaaggatgttatgaagcgaaaagctagtgagattgataaaagcaagattgaaaagaacagaggtgataaaggaggatttggtccattacagtcaatgggctctggaagaattgaaaatagctttagtgatttgagcatatctagcagtggaactggttttggaagtggctctggttttggattgacttctgatgtcgattcctttgcaaccaagcctaaaggtcgtccaacttcatcagccactgctccacctaaaggtcttggaatgaagcttggtaagtctcaaaggacaaaccagtttttggaatcattgaaagcagaaggtgaggtcattcttgaagatgttcagccaaaacactcccagtctcgggctgccgccccacaacttaccgatcctatcactttgactgttgaggagaaactaaatgtgatacttaaacgagatggtggtgtcagtaattttgatgttcaaggcacattgtctctccaaattcttaaccaagaggatggacatattcaagtacaggtccaaactggtgacaatcaagctgtctctttcaagacacaccctaacatgaataaagaattatttgccaatgattatatactaggcctaaaagatcccaacaggcctttccccactggtcaagccagtgatgctggaggtgttggtcttttaaagtggagaatgcaaagtactgatgagtcaatggtgccgctgacaatcaactgttggccctcttcttctggaaacgaaacttatgtcaacattgaatatgaggcttcatcaatgtttgatctgcggaatgttgtgatctctgtacctcttccagctcttcaagaagcaccatctgttaggcagattgatggggaatggaggtatgactctaggaattccattttggagtggtctgtccttctgattgataattccaaccgcagtgggtcaatggagtttgttgttccactagcagattcatcaacattctttcccatttcagtctgctttatggcaactgacacgtttagtgacctgaaggttaccaacatcataccattaaagggtggtaatcctcccaaatttgctcagagaacacagctgataacggatagctaccaaattgtgtgattgactttccctcttgaatttgggttcctataacagttttgcttatacagtcgtagttctttttatcaataggctttgctaagttgtacttgcctctattctcgaatttgtactttgttttacctcgcaagacatggcgcaaagtatgatttacataattaatgctcaagtgtgtctgtttactctatagcatgtatctttaatgcggaaggatgcatttcctatcttcccttttctgcgttgtagacactagtattgtcaaatgcattctaatttctaataaaaaaaaaaaaaaaaaaaaaataaaaaaaaaaaaaaaaaaaaaaaaaaaaaaaaaaa

SEQ ID NO: 869 - DNA, 1226 bp, Glycine max
tcagctacgtaggccccccccccccgtgcattgggaccaatttgattcttctctctatcgtcttcttcctctgtttcgtcagggtttccttttctcacttggagctcccaattgaaacccaatttcgcaatccctccacactttctcgttcggaaaactcgcgaattggaaagacatcgacggctccgcgtgatacgttctcttcctgtctggttatcaatgttggctattagtgcaattgcatctttgcccgtattaccaccagtcagaagaggtggccactgcattgaacagaatgttgtttccacattgagctttccaagacgactacagacaactaataattcaatatctctgagtagtacacagtttccattcggtagaagagctcgttctacgcagccagcaactataatatgtgctgcagctttgaatgcaagatgtggtgcagagcaaacccaaactgttactcgccaggctcctacaattactcatgttcctggcaaggagaagtcaccacaactcgacgatggtggaactggatttccgcctcgtgatgatgatgatggtggtggtggaggaggtggaggcggaggcaactggtctggtggattcttcttttttggctttcttgcttttcttggcttcttaaaggataaggaaactgaagacacatacagggatgaccgaagaaggtgaagaattgaccaccacaaatgcatgctttgcttggagtattttgctgcattatccttgatatcctctctcatatatgcataccgtagattacattggtccactgaggttctgtgcttgcttaagataatgtaatgcgcagaattttgtatgttacaaattcaatcccacttgaaagtttagtatggaaggaaatactgtgatatttagtatcaaattacatcagcatagtagttatgttttttggcttagatagtacaaattagcttttcatggtccttgagaggagcactttgtggcggcatacactagcaaatgctctttacctggttaatcttggttgaatattattatgttacaatctagtttgatgctaatttaggacaaaaaaaaaaaaaaaaactagaacgaacaaaattattgtcatgattgacgtgggcttaaagcttgctctttaactgccttgcttaaccttgattataattctaagaaacaaatgtccataatatgatcttcaatatagttttaac

SEQ ID NO: 870 - DNA, 1174 bp, Glycine max
ccacgcgtccgcccactcttccgcccacgcgtccggcccgatctcgagccgaatcggcgcgatcgaaccaatttggttcttctcttctctctatcgtcttcttcctctgttccattagggtttccttttctccctcggagcttccaattgaaatccaattcctcaatacctccacactttctcgttcggaaagctcgcgaattcgaaagacatcgacggctccacgtgatacgttttcttcctctctggttatcaatgttggctactagtgcagttgcatctttgcccgtattaccaccagtgagaagaggtggccaccacattgaacagaatgttgtttccacattgagctttccaagacgattactgacaactaataattcaatacctctgagtggtacacagtttccatttggcagaagagctcattctactcacacagcaactataatatgtgctgcagctttgaatgcaagatgtggtgcagagcaaacccaaaccgttactcgccaggctcctacaattactcatgttcctggcaaggagaagtcgccacaacttgacgatggtggaactggatttccacctcgtgatgatgatgatggcggtggtggaggaggtggaggcggaggcaactggtctggtggattcttcttttttgggtttcttgcttttcttggcttcttaaaggataaggaaactgatgacacatacagggatgaccgaagaaggtgaaagcattggccaccacagatgcatgcttttgcttggagtattttttctgctttatttgttgatttcctctcttatatatgcataccgtagattacattggtcaactgaggttctgtgcttgcttatgatcatgtaatgcgcagaattttgtatgttacaaattaaatcccacttgaaactttagtatggaaggaaataccgtgataattagtatcaaattacatcggtatagtagttatgctttttgacttggatggtacaaattagcatgatacttagatggagttttcatctgttaaattttcctgggaggagccctgtgatagcataccctaggaaatactctttacctggttaatcttagttgaatattatttcgtgacaattgtcccaaaaaaaaaaaaaaaaaaaaaaaaaaaaaagcggccgctctagagga

SEQ ID NO: 871 - DNA, 1395 bp, Glycine max
cccgggtcgacccacgcgtccgcccactcgtccgtacggctgcgagaagacgacagaagggggttttttttttgtgtgtgtgggatatgacttgtttcgtctctttcttccacctgtgattcttaactacgcgcacgttcctccggccaaggcaaatcggaaaatgggtgtggactattacaaacttcttcaagtggatcgaaatgtcagtgatgaggatctcaagaaagcctatcgcaagcttgctatgaagtggcaccctgataagaaccctaacaacaaaagggatgctgaagccaaattcaagcaaatctcagaagcctatgatgttttgagtgatccgcaaaagaggggtgtttatgatcagtatggtgaggagggattgaaagggcaggtgccacccccaggtgctggtggattttccggtggcagtgatggcggacccacgatgttccggttcaacccgagaagtgcagatgatatattctcggagttttttgggttttcaagtccctatggaatgggggatatgggtggccgtgccggcccatctggctatcccagatttgcggatgacctttttgcttcttttagtaggagtgcggctggagaaggctccagcaatgtgccaaggaaaggtgcgccgattgagaaaacattgcaatgcagtttggaggatttgtacaaagggactaccaaaaaaaatgaagatttccagggatgtgattgatgccagtgggaggcccaccactgtagaggaaattctaaccattgagatcaagccgggctggaagagaggaacaaaagtaacttttcccgagaaaggaaatgaacaaagaggagttataccatctgatcttgtttttattattgatgagaaacctcatggtgtcttcaaaagggatggcaatgatcttgttgtcacacagaagatatctcttgttgaagctctgactagttacacaggacagctgacgacacttgatgggaggaatcttacagtctccaccaactccgtcattagtccgatatacgaagaagttattaaaggagagggtatgccaattcccaaggaaccttccaaaaagggaaacttgaggatcaagttcaatatcaagttcccctctagactcacatccgagcagaaaactggcattaaacgattattgacatcttaaactctggtgatgcctctccttatcacataccgaatcgtgtaagattggaattattttttcaaatgtaaattctttccctttgcgagatggttttcagttagaacagtctattggacgtttgatatttgtttgctgtttcatatttatgtagtttctggtcttgatgccaaaaaaaattctcttaaccactttttaaagcggccgcgtctggggctct

SEQ ID NO: 872 - DNA, 1534 bp, Glycine max
gaagacgacaggacggcggtcagctacgtaggccccccccgccagcaatagcatcgacatctattcctcccggtacctgtatagtatcagaaggaacgtgatatgatgattatgtagagagagagactcagtgaagaaagaaagatatgagataattccttctttatcttttttcatagcagtgaagaaaaaactgagaaagcatgggcgtggactactacaagattcttcaggtagatagaagtgccaaagatgaggatctcaagaaagcatatcgaaggctagccatgaagtggcaccctgataagaaccctaacaacaagaaagaggctgaagctaaattcaagcaaatctccgaagcttatgatgttttgagtgatccacagaagcgaggaatttatgatcagtatggtgaggaggggttgaatggggtgccgccaggcgcaggtggttttcctggtggtggcgacggtgggccgacgtcattccggttcaatcccagaagtgcagatgatatattttccgagtttttcgggttttcgagaccctttggtggaatgggggacatgggtggccgagctggtggctctggattttccaggggtggcccgtttggtgaagatatctttgctcaatttaggagtgcagctggggagagctgtggccatatgcaaaggaaaggtgcagccattgagagacaattgccttgtagcttggaggatttgtataaagggactaccaagaaaatgaagatttcaagggatgttagtgatgccagtgggagaccctccacagtagaggaaatacttacaattgagatcaagccaggttggaagaaaggaacaaaaataacttttcctgaaaagggaaatgagcagagaggagttatcccttcagaccttgtctttattattgatgagaaacctcatagtctctttaaaagggatggcaatgatcttgttgtcacccagaagatatcgcttgtagaagccttgacaggttacacagtgcagctgacaacccttgatgggcggaatcttacattccccattaactccactattagtccaacatatgaagaagttgtcaaaggagagggtatgcccattccaaaagaaccttccaagaagggaaacttaagaatcaagttcaatatcaagtttccctccaggcttacatccgaacagaaaagtggcatcaagcgattattgacatctccttaagcaacagcagtagctcttcctaccatttagctaacattgtaagatgtcagttattttatgcttggtttatttgttttcaaatggaaattgctgccgctgtgaactggatttcagttagaacagtttattagaggatgatatttgttaattgtttcgcgtcttctttagtatttggtagtgaaaattttcttaacctctttttcacttgtttatgtgaaaagtgcctgtgcaataattgaatttctttgtacttgcccattagtattattcttaccctcgtgttgcttttcttcaaaaaaaaaaaaaaaaaa

SEQ ID NO: 873 - DNA, 1393 bp, Glycine max
cggctcctcctcgagccgaatcggctcgagtacggctgcgagaagacgacagaagggggcatcaattcaaaatatatcatcaattataagcatgggtttgtggaacacaacgaatgcagtgtcttgccgctttcacaagtttggtgatgaccaaaagaatctggtcttccaaggtgatgccacgtcttcttccaggggcatagaactcacaaagttagacggtggaggaaaaccagtgggtggcagtgtggggagagtgttatactcttctccagtgcacctttgggaaagctctacagtggtcgcaagctttgaaaccgacttcaccttttccatctcatcagactctactactccaggtgatggccttgccttcttcattgcaccatttgacactaaaatccctccaaactctggtgggagcaaccttggactcttcccatcagacaatgttgttgctgtcgagtttgacacctaccctaatcgtgataagggggatccagattatagacacattggtatcgatgtcaactctattgtctccaaggcaactgctaggtgggagtggcaaaatggcaaaatagccactgtacatatcagctataactctgcctctaagagactcactgttgctgctttctatcctggcactcaaactgtgacactctcccatgatattgagctcaacaaagtgcttcctgaatgggttagggttggattatctgcttcaactggacagcagaaacaaacaaataccattcactcatggtctttagccttcaacaacagtatcggatgattctggtcattcactttccatcttaataaatctcatctagctatgctatgttgtgttgtgttgtgtgccaataattaaggacaaataaggagactagagtacgtactacctagtccactactgcttaattatgtacgtacgtgtctgttatttcacttttataagtaatgaatatgaatattatgttattaagagtaaaaaaaaaaacagcccggcccgggcatgggaggattgttggcagggggtgttgctgctgctgccgctgcctatggtgctcaccacatggcacatggatatcatcgttttggacacggagcctaccatggtcatggaaagttcaagcacgggaaattcggcaagcgttggaagcatggcaggtttggatttggcaagtataagcatggttggaaaaagtggaagtgataaagagactaatatgttaaaaatgtgattttgagcaaggtcatggagctttaggtatagggtgaataatgtaagcctacaacaacatattgcatgtttggcttctgtatttaaaagaatggaatatttcggtggaatgtgtgtggcttctctattttaaagaatggattg

SEQ ID NO: 874 - DNA, 1340 bp, Glycine max
gtcattcgtcagctacgtaggcccccccccccccgatccagacccaggcttgcagttgcagcacaagacagcagtgttgatttagcgggttcggtgaaaatcggaatcgaaaacaatggagaaagagaaaggaattgaaaactggagcgaagcggtggaagacctggtagacgccggcgacgttgaatccgcgatctcactccttgaatccgtcgtcgaaaccctaaacccttccgattcggcttcgcagcttcccttggcctctgctctctccgacttggccaacctttactcctccaaaggcttctctctcaaagccgatcaccttctctctcgcgcttctgttctcaaacagcttcaccattccaattcccctggtgaacaagttccgaaagagtcgaaggaggacggagccgtcaaatcaaccagtgttgcttcgcgtcgtgctgctgaaggaagtgttgaaaagcgtgcggcggagtttcctgctcagacctccgctggcggtggttgttccgatgaagattgggaagcaatagccgatcttgaacctgatgagttactgcccacggtttcctcggattgttcatctggaatttcaaatcttaaattggagaatgccaaaagtggaaccccaaaaagacgcggaagaggaacattctcttatgagaagaaagagctttatagtgatcagttacttgatagctcggtcgttgatgttgagcaggaagagactcaccgtagttcagaagataataaagatgtacaaaactcaaaatatgggaccagtcatgttcttgttctggctgacttttcaccaagtactaggacaacagagctagagaagctttttgagaacttcaaggatcgtggatttgtgattcgttgggtcaatgatacagttgctcttgcagtattccgtacacctccagttgcacttgaggctctaaacagtgttcgctgttcattcaccacaaggatactggatgaagatgatacacttcttagttcaattaaagcaagagacttggaaccaccgcggcaacggccgaaaacttcagctcaagcagcacagaggttgattgctcatagcatggggttaaaattgtcatctactggcgttgggtcccgagaatatagaaagcaagaagatgctaggagggaacgtatcgttaccaggcaaaaattgagagatgaggcttggggagacgattaatatcttgtaatactactaacttgtaacctcattttccaaagccccaaaaaaaaagaagagattgtatcattgattgtttataacttattaaagggatttggtattcaaaaaaaaaaaaaaaaaa

SEQ ID NO: 875 - DNA, 1410 bp, Glycine max
tcagttacgtaggcccccccccccccatagatgatacggcttcaaaatcaattttattaaaaaacacatccaaatccacaattaatataaaccaaacgggttggtggtgaattccattcttaattttgcacacaaatatgtgcatatatcatatataacatccttaattatgtttttgatatgatatgacattcagttttccagtaatctgtttgttcatgcactcatcattttgcactttcattgattgcttcacttgtgaaacagtgtatcagcctggtggggctctaccctcttcgtccaccagcaaacccatatcagacaagtggaaaattctcatgcccgatggctcccatggcatctatccagagcctcgtgcacttaccacttctgagatatctgaaatagtgcatcattatcgccaagcagctattaatgcaattcgagcaggttttgatggaatcgagattcatggagcacatgggtatctcattgatcaattcttaaaggatgcaatcaatgatagaacagatgaatacggtggaccactagaaaaccggtgcaggttcttaatggaggtagttgaagctgttgtctctgccattggagcggaaagagttgctatcagaatttcaccagcaattgatttcaatgacgcctttgactctgacccacttgggctaggcttagcagtgattgaaagactcaacaatttgcagaaacaagtgggcacaaaactcgcttatcttcatgttactcagcctcgattcacacttttggcgcaaaccgagtcagtgagtgaaaaggaggaagctcatttcatgcagaaatggagagaggcttatgagggaacattcatgtgtagtggagcttttactagggactcaggaatggaagctgtagctgaaggccatgctgatttggtatcctatggtcgtcttttcatctccaatccagacttggttttaaggcttaagctcaatgcacctcttaccaagtataacaggaacacattttacacccaagatcctgttataggctacacagattatcctttctttaatggaacaactgagacaaaattaagtaactagctaaggccatgcatgccctttaattttaatctccatatggctttttgaataataatgttcataacattcaaaactcttcagttgagtttatcctcagacaaacaaattaagtggttcattcacttgttagggtatttagatcttaggttaattagtctccggcattttgatttcatttcaatttgtattcagtctttcattttgaataaaataatattaagttttttgccttaaaaaatatataattaatggaaatactcttgtttgactacccaaaaaaaaaaaaaaaaaacccaagggcggccgctctagagga

SEQ ID NO: 876 - DNA, 1880 bp, Glycine max
attttggtttggattttaatcagacaaaaggttggggacttgaactgccgaacctaacaaatcctttccaataatgaatgcaaacaaatcgacggcaggtacgctgccacgtgcctttttctctcagcgaagcctatcctgtttgcgttttgtttttgtttgttgaagatggaagagggggaactccttgggtgtgtcctcctgcgcaacagggtttccgtcatctgattcgatttttgttagcagagagaaacatagattgattaattgagaaagagagagggatctttcattttctcgggaaaatggaggattctttcttcgacgtggttgagtttctgaagaaaccctcgttaacggagacattcgtcgacattttgctatgcgcggttccgatttggctggccgtgatgatcggcctggtgatcggttggtcgtggcggccgcgctggacggggctcgtcttcctcggcctccgcagcaagttcagattcctctggacggcgccgccgggcttcggcgcccgccgcctctggctcgccttcaccgccctctccgccttcacctattggttcaatttcaaaggcaagaccaaggccaaaactcaagatccctcgccttcgcaatccgatactgccgactccaacgccatctcactcactgctcggtccggtgatatggctgaggagagggagcaggacactgttacacaggccgatttggaacattttcttcatcttcttgaagggaaggatgaaatgatggactggcagagttttatggaaaggtcaacaccaaacatgcagtacaaagcttggcgtcacgatcctgagacaggtcctactgtttactgtagtagaactgtcttcgatgatgcaactccagagttggtgagggatttcttctgggatgatgactttcgtcctaaatgggatgctatgcttgcatactgcaaagtattggaggaatgccctcgtaatgggacaatgatttctcactggattaaaaagttcccctttttttgtagcgatagagaatacatcattgctcgaagaatatggcaagctggaaacacatactattgtgtgacgaagggagtaccctatccaagtttgccaaaacgggataagcccagacgtgtggagctctatttttctagttgggtaatcaaacctgtggaatctcgcaaaggagatggtcagatgtctgcatgtgaggttaccctgctacattatgaagacatggggattcccaaagatgttgcgaagttgggagtccggcatggaatgtggggagctgtcaaaaaattgcattctggaatgagagcttaccagaatgctaggaaaacagaggcttctttatcaagatgtgcattgatggcaagtaaaacaaccaagatttcttctgacacaaacatgcattcctcagagcctgcgtcttgcatggaagatagggtgcaagccatgagtaataccgcacaaaagggtaatggcatagactggaagtgggtggctgtaggtggcactgttgctctggttttgggtcttcatactagtgctgtggggagggcgttattgttgggagcagggcacagaattgcacggaggtgactgatctaggatctgcttaatgggaaggtccacttatcaccgttcggaatattcatcataaatatatttagactatcatttatcagtatcgaatgctaattttgcggttattattattataaatattttctttttttgtattagttacagcctggttagattcatctcgctcttgcattttagaatgcaaagctgcaatcacttgccatttttttccataaccaacgaaatcctttcaacggcgcgttgttagcaaaaaaaaaaaaaaaa

SEQ ID NO: 877 - DNA, 1398 bp, Glycine max
ttccccgccggcccagccgccgtacggctgcgagaagacgacagaagggggtgcaattgaaagagagatttgatagcctcaactcaagtaagggttttctctttgagaaaatcgtatcttacaccttttggtgaccactttgagtgagagaagagaaattaagagagatactcaaattagattcaagagagatggccatcaaccatgaaacttgggctttcattttcggtcttctaggcaacgtgatctcctttatggtgttcctcgctccattaccaactttttaccaaatctacaagaaaaaatctacggatgggtttcaatcactaccttatattgttgcactattcagttcaatgctctggatttattacgcactcgtcaaaaaggatgctagcctccttctcattactattaactcctttggatgtgtgatagagacgatataccttgcaatcttcctaatttacgccccaagcaaaaccaggctttggaccatcaagcttcttctcatgttgaatgtttttggattcggagcaatgcttctttcaaccctctaccttacaacgggttccaaacgtctttctgtgataggatggatttgccttgttctcaacataagcgtttttgctgctcctctttgcatcatgaaacgtgtcataaagacgaagagtgtggaattcatgcctttcagtttgtccttctttttgaccataaatgctgtcatgtggttcttctatggccttctcctcaaggactactacatcgcactcccaaatactcttgggtttctattcggcataatccagatggtgctgtatttgatttatagaaacgccaagccacaaggattagaggagccaacgaaggttcaggaactaaatggccatattattgacgttgtgaagccgaatcatgtaacaaaaaatggtcctgtgcctgtgattgagacagctagcaatgtgtgaactagaagcaataatgtaccaagtccaaagagaaagaaggaaaggaaaaaaaaaatgaggtcccaaaatatttaatctaaaagtacaattactttaattactttgccaagtggggcctcattcaacgcaagaacgtacgtacgtgtaatttggtattaatatttaagggttcttcttttgattaacgtatttgcctgaacgggtagctgtaatatgttaggttttcaattgtgttagcatgagagtctctctttggccttttccatcactctctcattgtagtaaaacgtgtaacaacgtatcttctctatcttctttttcagtgtgtaccctcagtcaaactcctcaattcttgtacgcgtaatatatgttcatgtgatggaattaattaattattattttactaattatgcagcggccgtctagagga

SEQ ID NO: 878 - DNA, 860 bp, Glycine max
  misc_feature (785)..(785): n is a, c, g, or t
ccacgcgtccgcccccggccggataattttataaagagcccctaacggttttgttggagtgagatcaaggaaacagagaaaaaatggcatcctcaagagcttgtaccaaacccatcatcttcctctctgccttcaccaagtcaaagttctctcatcaatatcatgtctccttcatcaacaccacctcccacatacccatctacccaaagctctctcagcaacgttccttggtggtcaacaacgtattgaaaacagttgagccgacagaaagctctttgcggagctccaactccgaggaatttgggtctctgggtgaaaagcccaccatcctggtctccgagagacttggagaggcaggactgcaggtgttacgcggtgttggacacgtggaatgcgcgtatgagctctcgcaggaggagttgtgcacgaagatctcgtgctgtgacgctcttatagtgaggagcgggacgaaggtgacaagggaagtgtttgaagctgccaaaggaaggttgaaggttgtgggaagagccggcgtggggattgacaacgtggatttgcaagcagccaccgaatttggttgccttgtcgttaatgcgccaactgcaaacactattgccgctgccgagcatgggatcgctctcctcgctgccatggcccgcaacgttgcccaggctgacgcctccaccaaagctggaaaatggcagagaagaaaatggcagagaagcaagtatgtggggtgtttccatggttggaaagacattggcagtgatgggtttcggaaaagntggatctgaagtggccaggcgagccaaagggttgggcatgcacgtgattgctcatgaccccctatgctctgctga

SEQ ID NO: 879 - DNA, 1251 bp, Glycine max
gaccaagatgcattaataagagcactcgacagtggaatcgttgctcaggctgctcttgatgtcttgagcgtggcgcccccccgcccacgcggccgcccacgcctccgcgagaatgtcaccgttacccctcatcttggagctagcaccaaagaggcacaggagggtgtagctattgaaatagcagaggctgtgcttggagcattgaagggggaactttcagccactgctgtcaatgctcctatggttgctcctgaggtgttgtcagaattggccccatatgtggtgctggctgagaagctgggcatgctagctgtgcagttggtgtgtggaggaagtggaatcaaatctgtgaaggttgtttatcgatcagctaggggcccagatgacttggacactagacttctgcgagccatggttacaaaaggcctcattgaaccaatttcaaacaccattgtgaaccttgtgaatgcggatttcatagccaagcagaaagggcttcgcataagtgaggaaagagtggttgttgattcatctcctgagctgcctgttgattcaatccaggtacagatatctagcgtggactccaaatttgcgagtgctgtatcagagagtggtcagataagcattgacggaagagtcaagtttggagaaccccacctgacatgtgttggatctttcgatgtggatgtgagcttagaagggaatctaatcctgtgccgacaggtggatcagcccggcatgattggtcgtgttggaaacatactgggtgaacaaaacgtgaatgtgagctttatgagtgtgggaaggacatcgcgtaggaacaaggctattatggctattggtgtcgatgaagaaccaaacaaggaggctcttgacaatattggagccgtgtctgccattgaagagttcgtcttcctcaagctctagtactagttgataatgtaatggtatacaaacaatcatgcgtatctacctaccatctatggatggtacgttttagaaagtaaaatagctactattttggttataaagaaatgtttttgtttttttgacaattctcaagtgcacatgcacttcagatgatctagatctgtttttacaccgtagaagaggtattttgatggacaatttgaggaaacttgaagctatggtatgcgaatgtaatataatttggattggatgattcagaataaaactagctgtttgcagctagtagtgtgcacctctggggaaaaaaaattaaattttttt

SEQ ID NO: 880 - DNA, 2330 bp, Glycine max
acgagggcacactcctccttctttcttggttttatatatagacaaacaaaaaatgaatgctttataaagagcccctggcggttttgttggattggaacagagcgagcgagatcaaaaaatggcatcctctgcttgtaccaaacccatcttcccctctgccttcaccgtctctaagtcaaagctctctcgtcatgttcatgtctccttcacctcccccaaacccatctactaccactacagaaagctctctcatgcctctcaacgttccttggtggtcaacagcgttttgaaaacagttgacccgacacaaacctctttgcggagatccaactccgaggatgttgggtctctgggagaaaagcccaccatcctggtctccgagaaacttggagaggcagggctgcaggtgttacgtggcgttgggcacgtggaatgcgcgtatgagctctcacaggaggagctatgcacgaagatctcgtgctgtgacgctctgatagtcaggagcgggacgaaggtgacgagggaagtgtttgaagctgggaaagggaggttgaaggtcgtgggaagagccggcgtggggattgacaacgtggatctgcaagctgccactgaatttggttgcctggtcgtcaatgctcccactgccaacactattgctgctgccgagcatgggatcgctctccttgctgccatggcccgcaacgttgcccaggctgacgcctccaccaaagctggaaaatggcagagaagcaagtatgtgggagtttccatggttggaaagacattggcggtgatgggttttggaaaagttggatctgaagtggccaggcgcgcaaaagggttgggcatgcacgtgattgctcatgacccctatgctcctgctgacagggcacgtgctattggtgtggatctggtgtcctttgatcatgccatcgccactgcagatttcatctccctccacatgccactcactccaactactaacaagatcttcaatgacaacacttttgctaagatgaagaagggtgttcgcattgtcaacgttgcaagaggaggtgtcattgacgaagacgcattagtaagggccctcgacactggaatcgttgctcaggctgctcttgatgtcttcaccgaggagcccccatccaaagacagtaagttagtgcaacacgagaatgtcactgttacccctcatcttggagctagcaccaaagaggcacaggagggggtagctattgaaatagctgaggctgtgctaggagcattgaaaggggaactttcagcaactgctgtcaatgctcctatggttgctcctgaggtgttgtcagaattggccccatatgtggtgctggctgagaagctggggaggctagctgtgcagttggtgtgtggaggaagtggaatcaaatctgtgaagatagtgtatcgatcagctaggggcccagatgacttggacaccagacttctgcgagccatggttacaaaaggcctgattgaaccaatatcaaacaccattgtaaaccttgtgaatgcggatttcatagccaagcagaaagggcttcgcataagcgaggaaagagtggttgttgattcatctcctgagatgcctgttgattcaatccaggtacagatatccagtgtggactccaaatttgcgagtgctgtatcagagagtggtcagatcagcattgacggaagagtgaagtttggagaaccccacctgacatgtgtggggtctttcgatgtggatgtgagcttagaagggaatctaatcctgtgccggcaggtggatcagcccggcatgattggccgtgttggaaacatactgggtgaacaaaacgtgaatgtgagctttatgagtgtgggaagaacatcgcgtaggaacaaggctattatggctattggtgtcgatgaagaaccaaacaaggaggctcttgacaatattggagccgtgcctgccattgaagagttcgtcttcctcaagctctagcactagttgagtaatggtatacaaacaaacaaataaataatgtatgcgtatctactatccatggatggtacgttttagaaagtaaaatagctactattggttaaaaagaaatgtttttttttgacaattctcaagtgcacatgcacttcagatgatctagatctgtttttacaccgtagaagaggtattttgatgtgatatatttggatggaatgattcagaataaaacactagctgtttgcggctagtagtgtgctgtctctgcaaaaaaaaaaaaaaaaaaaaaaaaaaaaaaaaaaaaaaaaaaaaaaaaaaaaaaaaaaaaaaaaaaaaaaaaaaa

SEQ ID NO: 881 - DNA, 1635 bp, Glycine max
cgattgggtaccgggccccccccgggtcagctacgtaggcccccccccgaaaagtacgtgtcccattcttgtcaacaaacgtggcgcgcttcttaacataagcacttgcaatggcggattcagagcgaatccaaaattcgtggatggcttcggatcaaactgcaattgaaatgagcggcgagggcacaggttccagggaatgctcttctctccctccgccgccgcaaaaaccattcaattctgatcaattgggaatcggagaacgagctttctccgccgccggcgccgccttcctctccgccatcattgtcaatcccctcgacgttgccaagacaaggttgcaagcacaagcggcaggggtcgcatattctcatccactcagtaatatgaccagtagaatggcttgttttgggccaaatatgatatttgctgatttaaaatgttctccatcatgccaccgggctggattccagggcacagtgtccatttgtcctcccgagtgttttcgctacaaaggaacactagatgttatctacaaaattataaaacaggagggaatttctaggctatggagaggcacaaatgctggcctggctcttgcagtaccaactgtgggaatataccttccttgctatgacatactccgcaattggttggaggaattcacagctaaaaaggcaccaaccacaactacttatgtacctctagtagctggttcattggcacgctctctagcttgcactacttgctaccctattgaacttgctaaaactcgtatgcaggcatttaaagagactcaaattggtaaaaagcctcctggagtgatccagactctgctaggtgttgtttcaaatgtcaagagcacaaacactccacagaacagcttgcaaggttatcgtgttttgtggactggcatgggagctcaacttgcccgtgatgtacccttctctgccatttgttggtcgacacttgaaccgactagaagaaaacttcttggtttgattggaggtgatgatgccaatgcattgagtgttcttggggcaaattttggagctgggtttgttgcaggaactttagcagctggagccacatgtccactagatgttgcaaaaactcgaaggcagatagagagggatcctgttagggcattgaaaatgactacaagacagacactgatggaggtgtggagagatggaggtttgaaaggattgtttacgggtgttggtccacgagttggtcgagcaggcccctccgttggaattgtgatttcattttatgaagttgtaaagtttgttctacatcattagtacacagcatcatcatgattttctgcacactttttttgctgacaaagcagtttttattcagaacctctggagattgcgagcaattttttttggaatgggaatcattccaatccatcctggccataaactaacataattgaataggaaaatgaccggcataggacacacttaggttttatgagctgtttgttattattaatgttttttctttttgctgcttttgacaagcagaaattttgttacacttgggatgctcccctgaactataactgaataaataaaaatatgaataaattgagttctttacctcccaaaaaaaaaaaaaaaa

SEQ ID NO: 882 - DNA, 1336 bp, Glycine max
acaataataacaataatttctgaaaattcgtataaattacgcagttcccctcccgtctctctcacttaggcctcttcagcaattagcagcaatcaaatctgtaacctttcagaactcaaaaccccctttcaaatttcatcatgtccggctatcccaaccagcctcccagctacagctacggcgcgccgccgccgccccaaccctacggtgcccatccgccatcgcaatcatacggggctcctccgccatcgcaatcatacggggctcctccgccaccgcaaccctacggcgcgccgccgcccgctcagccctactccgcctccccctacgcccaaccgtccgccccctacgccgccccctacaacaaacccccgaagaacgagtcccactcccacggcggaggaagcagcggcggctacccggctccggcgtacgcgagcccgttcgcgtcgctggtgccatcggcgttccctccagggacagaccctaacgtggtggcgtgcttccagatggcggaccaggacggaagcggatttatcgacgacaaggaaatgcagggagcgctttcttcctataaccaaagcttcagcctcagaaccgttcatcttctcatgtatcacttcaccaattccaacgtcaagaaaataggaccaaaggaattcacttctctattttacagtcttcagaactggaggtccatttttgagagatttgataaagacagaagcggcaaaatcgattctactgagttgagagatgctctactgagtctgggctatgctgtttctcctgtggtattggatttgctcgtctcaaagtttgacaaaactggtggaaaaagcaaggctatagaatatgacaatttcatcgagtgttgtcttactgttaagggactgactgacaaattcaaagaaaaggatactgcgtattctggctctgcaaccttcacctatgaatcgtttatgctgacagtcctgccattcctaatagcttaggaaattaatggtgtgtgtgtggttggtagggtttgtaaatggccaggctgtatttggtttgaaaatgtgtggtcgaattactttactattgccagcctttaatatgctagtactccctgttgttttactctataagtaaccagatccaaaatactatggttttcagcttgttgataattatctttgggttatgcatgtgaatgaagcgttgaaaatgagatttcctggtaaaaaaaatccatgactggataagtgatttgggtaaatttctttcaaccgataaatcttgtataattttctttatacagaattaagaatacttctcattgttaatctgtgaa

SEQ ID NO: 883 - DNA, 1361 bp, Glycine max
agagtgggtactgaattccaaaactctttgttattcggtgtgtgcgtgtccaactttgaacgcactttgatactgccactttctccaccacaaagagaaaaaagagagaagaaaagcgaatcccctgtgatctctcacacaattccaattcctctggatctcgtctcgatcgatagatctcgaacatgagcactggggagcttctcaacatcgaacctctcgaactcaagttcccctttgagctgaagaagcagatctcatgttctcttcaattgtccaataagaccgatagctatgtagccttcaaggtgaaaacaaccaatccgaagaagtattgtgttcgtccgaacactggggttgtcacgcctcgatctacgtgtgatgttatcgttaccatgcaagcgcaaaaagaggctcctgctgatatgcaatgcaaggataagtttcttcttcagagtgtaaaaactgttgatggtaccagtccgaaggatatcactgcagacatgttcaacaaggaggcagggcatgtggttgaggagtgcaaattgagagtgctgtatgtttctccacctcaaccaccgtctcctgtcccagaaggttctgaggaaggatcctcacctagaggttctgtttcagagaatggaaatgccaatggttctgacttcacacaagcggcaagaggatttactgagcgacctgaatctcaagacagatctgcagaggctagagctcttatctcaaggctgactgaagaaaagaataatgcaattcaacaaaatagcaagctccgccaggaactggagctactgaagagggaaggcaacaaaagtcgtggtggagtctcatttgtcattgtcgtattaattggcttgcttggcataattatggggtatctcatgaagaagacctaagcatttctgcgattcaatctttcaccatagttttcgatcttagtttctttgttcctaccattcaagcaatcatgaggaaagttaaaatagatcaattcagcagatgttggtttttcttttttatttttgccgtttcttttcttttctttgggtggataacattttggaggtagaaaacattaggggaagttgtgggtctgtggttaagcatattgtgaactgactcatgctttcgttaactgcattctttttgtaacttaaagaggggaagcttcttgttttcttctttttgtggttcgtctagtgactacatggtaatgtcaagttgtcaaggacgaccacgaataacatcattcttcatggactctctctctatcgtcttttcatgtcaagaatgacctttagatgacagaatataactctgttaattttttggtctttaaaaaaaaa

SEQ ID NO: 884 - DNA, 1183 bp, Glycine max
gcttttgtatctgagtgccagcccctctatattgactttgtcagctacgtaggccccccccctctctttctttcaccattcccttgttcttagtttttacttccatccctcttccaagtctcagaaacgtataggaagatgtctagtttggttttgttgtccgtgttatttctccttctccaacgtcctctctcatccttctcagccaactccgaaggaaacgctcttcatgctttgagaagcaggctttctgaccccagcaacgtgcttcagagctgggacccaaatctcgttaatgcttgtacttggtttcatgttacctgcgactccaacaatcacgtcattcgcttagacttgggcaattctaagctctccggaactttgggaccagaacttgcccagctaccccacctccaatacctggagctctacaggaataacataagtggcaacattcctcgggaactttctaaattgaagaaccttattagtatggatttgtatgacaaccaatttcatggcaaaatccccaagtcttttggcaacttgaactcacttaaatttctacgcctaaacaacaacaaactgacaggagcgatcccaagagagctcactcatcttaaaaatctcaaaatccttgatgtttctaataatgacctctgtggaacaataccagtagatggcaactttgaatccttcccgatggaaagttttgagaataacaaactcagcggcccagagctgaaaggattggttccttatgattttggatgctgaagaatggtagatttcgtcactactcctcagactgcaaagaagccttctttattagggaagaaagcagtatcagaaatgtacgcttgtcacaaatctaaacgtgtggcacctatatgtgatgtcaatatatctaataaataaatgaatttatcgtctgcctctggttgcaagcagcataaccaagcttctgactgggatgatgtcaagttgaaaaaacgcctcagtctcagtctgagttgaaaaacatcctagttatgcttacatgaattaagtacaaggctctaatagtttatttccaacccccccatgttaacttggaacaagagaaaactcttttaagattgattagtttggcaaaaagaagacacattactatattattataagagcactttattcatcatgt

SEQ ID NO: 885 - DNA, 1175 bp, Glycine max
tcagctacgtaggcccccccccaaatcatgtaaggtccgcagaaaacagaattctagtgaagagatggttagacttggacgtttgtggatgtctcttcttccatttggatttctcttgttctttagttcagctttcatcagagtacctggtgcccttgcctggagcaaagagggtcatgtcatgacatgccaaattgcgcaggcacttttagagcctgaggcatcagaagccgtgtaccaattgttacctgactatgtcaaaggtaacttatcatccctatgcatatggcctgaccaaattagacactggtacaaatataggtggacaagtccacttcatttcattgacacaccagataatgcttgttcttttcagtattcaagggactgccatgattcccatggcgttgaggatatgtgtgttgcaggtgctgtgaaaaatttcacttctcaactcatgcattacaaagaggggacatctgatcggagatataatatgactgaggcgttattgttcttgtcacacttcatgggagatatacatcagccaatgcacgttggatttacaactgacgaaggaggaaacacgatagaactacactggtttaggcacaaatcaaatctgcaccatgtgtgggacagagaaataattctcactgcattagcagactattatgataaggatgtgagtctccttctccaagacattgagaggaactacactgatgggatatggtcagatgatattacatcctggaaacattgtaatgatatctctcaatgtgtaaataattgggccaaagagagcatacaaatagcttgcaaatggggttacgaaggagttgaagctggagcaactctggcagatgattacttcgactcaagggtgccatttgtcatgaaacgaattgctcagggtggaattcgattagccatgattctgaacaaggtgtttgctgactctgaagaaagatttgcaacagcaacttaggctcacagacccatcaatacaaagtgttttgaatttgttaataagcacatgctctaacttcattcattctcaattgttagtccttagaccattacctttcagacaacctgcctttgttgcaagttatttcagcatgtactaggcattgcagtgatgtgttttcactcaaaaaaaaaaaaaaaaa

SEQ ID NO: 886 - DNA, 1398 bp, Glycine max
tcagctacgtaggccccccccccggtcttcttttctcccctttctttccctaactctaccaatcactacataaactcttcatacttcacaacacaacacaacacacacaaatcttctttcaaggtttttttttttttttttttaataatttctcatcgtatctgaaacaacgaatgatccatggccccttcattcgacacaagtactcatacggtatgcgtgatggatgcttcgggccacttgggcttcagcctggtccaaagactcctccaaaggggctacaccgttcatgcctccgttcaatcatatggggaagaaaaccttttcaatggaatttcatctgatcccgataagcttagggtttttcgatctgacccatttgattaccatagcataatcgatgctctccgaggttgctctggtttgttctactcattcgaacctccctttgaccaaccaaattatgatgaatacatggcagacgtggaagtaagagcagcacacaacgtgctggaagcatgtgctcagacagaaactatagataaagtgattttcacttcctcagctaccgcagttgtttggagggaagatcgcaagaccatggaactagatctagatgagagacattggagtgatgttaatttctgtcgcaaattcaagttatggcatggggtgtcaaagacaatggcagagaagagcgcgtgggccttggcaatggacagaggagtgaacatggtgtccatcaacgcaggcttattgatggcgcatgatctctccgtcaaacacccttacctaagaggagccgcagagatgtacgaggatggggtgttcgtgaccgttgatttgggcttcttggtcgacgcccacatctgcgtctacgaggatgtctcatcctacggtcgttatttgtgtttcaatcacattatcaacacccacgacgacgccgttcagctcgcccgcaagttgacgcctggtgcctcttcctccttgcagcaaagtgatgactacgggaagagttttatcgaacagagaattaacaacaagaagttgaacaaattgatggtggacttcgaggcttgatttcgatggtgatctttttgaacggtgattagagcaatcaatcaccttcaccgtttttctgcgggaaagtatttgtgtacaaaatgttagcaaaatttgtacctatacccccatatcattattattattattatacattacaaattaatgtattttcaatcaaataagcatttctttatttatttcaacattagatagtgcaaaataattgtctgtttttaaatttgcttttcccctgtatcctactaattttagatccaactatatttacaatgccacatcttcttataactaaataaacatcaaattaatttttct

SEQ ID NO: 887 - DNA, 2675 bp, Glycine max
tcgagtcagctacgtagggcccccccccgttccaatctccgacaaaacaaacaacgtcttgatccatttcaacacatcctaatacctctcattaaagacgcaaccatctttctctctctgcactcaactcaatcatgcgcctaacttactaacaactcttcaactttacagccaccaaaacgatgtcggagaatctcgacggttccgaaatctcgccgagtacttcctcccaaagtctcggcgagttaccggaaatcgccgcgataccattcggaatcgatctcgtgtcggcggccaggcgaaatatctggttcctgaggacagtggcagattctgtgtggcttcaccacacccccattatggtggaagccgtgagaaggtaccatgatttctggatgccgttgattgctgatctcacgctgccctactcttcccctcccacgattcttcctccccttgacatccactgggtttggttctgtcacactttaaaccccgtaagttacagggaatactgtgaaacgagattctcgaagctgattgggaaagcgggaatctttgatgaagagaacagagagtacgcgttgatgcggtgcagggagatttggagcagtagatacccgttggagtcgtttgagaacgaggcgagttcggattcgcaggatttggatactgtggttgttgttggggggtgtttgaaggagagtgtgtttaaggaagttgaaaagcagagggtgttgctgtgttccatgtttgtagagccgtacaggtccgaggtggtctacttgatagctgcgagacagcgatacaaggctttcttgtttatgctgctgaggttcgcgcgtgacttctcttcgcgtttggttcctacttcggacatcctcttaatgtggttgacccaccagagctacccaacagtgtattgtgaagatttgaaagcattagctatagaaggtgatctggagaaggtggcaactctgtctgaaaaggtgaaggaaaaggagtttgaagaaaccaagaagttgtgggatagggcgttcaatcaaccttatgagaaagctggtggagaggtgcctttgacgttggagggtgttatctcaatcaaatcccctgtctattgggaggattcgggcaccgatgtaaatacaaaatacaggtccatgcttccaagatttttactggaggcctgtgtgtttgtgaggcttaagcaaagaataacaacatcgcagaaggatgtaaaccgtgattttctacgtctccaaataattaggtgtcatagtgaactaaagttagataaagccttctccaatttcaccaatgattcgtggaaaaaagcttggcacttttactgtgagtttgggactaagggagttatgtttgactatcgtcgtcatggtggtaactgtctaagaggaagtagcctgctagatactgtgtcgttccgctggaatgatttattgagagcagattctttaactttggaaaaggaagttagtcaacaggttaatgttgttacgtcaataaccccaccagttcaagcaccatacttgttgaaatgtgtgcctgatcgagtcactgatgattctggggctatgatatctgatgtgattctgaagatgaatagttatcgtccacaagaaggccgatggttgtctcgcacagttcttgatcatgcagggagagtgtgttttgttattagaattagggtaggaggaggattttggagaagagggggtgaagctccttcagctgtaaaatgggaagataggattatagagatacgcgaaggatcttggtcttatgttgccggttacattggtagagcccctgtacagaaaaggtggtggccactgcaacaccaaaggaacctactgaacaatgtaaagctgcatggtgcttttcaacaggagatgaactgacaatacaatgggactcatcacaatcagtgtcaggtctcacctttagcttgctaaatcaaacatctccagagtcatcggtactgctattgagagggaggcagatgcaatatcaagtaaagaaaacaaagaaaaaaaaaaaaaaaaaacagctacgtaggcccccccccccgaaaaccgagttagaggagaaagaggttgacgaagaggaagacgaggagagttttataacagtagtacgtttcacagaagataacccagatggaaaagcaactgctcttctaaattggaggctattggttgttgaagtattgccagaagaagatgcagtactgatgcttcttctttgcctttcaatactcaaaagcgtatcagaaatgaagaaacaagacgtgggagggttgttggtgaggagaagattaaaagaagcaaggcttggaagtagggattggggttctgtgatacttcatccatcttcatggtcctcgtccattgattcaacttatcttcaaccttggcattggaatgctggggttttgatgaaatctgatgcagtagatcagcttaaaaggtatccaacattaagtcaatcgccagtggaaggtagtgacaagttatacaaacatggaattttaagttaagtctctttaattttagcaaatactagtactatcattgtttgcacaaaatttagctttcttcaagtttacattttttccggaattcaaaattatgagccaaaaaaaaaaaaaaaaaaaa

SEQ ID NO: 888 - DNA, 898 bp, Glycine max
  misc_feature (30)..(36): n is a, c, g, or t
  misc_feature (40)..(40): n is a, c, g, or t
  misc_feature (43)..(45): n is a, c, g, or t
  misc_feature (53)..(57): n is a, c, g, or t
  misc_feature (61)..(63): n is a, c, g, or t
cccacgcgtccgcaaagatttgaaagggtnnnnnnnccanttnnnccaccccnnnnnagtnnncgtgaagggcctcgtcgagattatgatgctctgtctggctcaaaacgtccttatgctgctatagatgatcttcctccacgatatgctgatactggtgctcgccaatcaagagctcgtctagactatgactatggtgatagtgcttcgcagtatggagatgcttatggtgatagacttggaagatctagtgtgggatatggtggtggcagcagaagttctatttctagtcaagattcacatgggatgtatagcagtcggcagggcatgagttatggaggaggttcttttggtagtggtgatgttggtggcatgtattcatcaagttatggtggtgattacatttctcgtggaagtgatgttggtggcagctcatattcatcagtgtattctggaaggggtgtgggtggtggtagcagttatatgggtggtggtggttcaggatcttattattgagatctgatatgataaagtggctgctgtaggatgaccgttgaagcattatgtctacaatttggagacaaaggattgctatttatagcttttatgagaatttgttacaaaaactagcttatctcaattagagatgggatgtatttatcaagttatggtggtgattacatttctggatgggatgtattatcagtacttgaatttatgctgtatggactcaagttaattagagatggaaaaagtattgagcagtgatgtgtaattcatatcatacttggacggacaaaaaaaaaaaaaaaaaaactgctctatcttcattttcatttggacagagatcagactagagatgctacttgtttgattaaggcttcatggagttttacct

SEQ ID NO: 889 - DNA, 718 bp, Glycine max
  misc_feature (715)..(715): n is a, c, g, or t
gccaaagctaccgcccgctcgtgccggcgggccgcagctacgagaattggctttctcttctctctctctctctctctctctctctccttctgccaaccaacttctgctccctttttctgcaatgggttgtgctggatcttcacaatccaagcctgatggggcagtaaaaaagatccggaaacctaagccttggaagcatcctcagcccataacaaagactcagcttacacaattacgtgatgagttttgggatacagctcctcactatggtggccggaaagagatttgggatgctcttcgagctgctgctgaggctgatctaactttagcacaagtaattgtggatagtgctggggtcattgtccagagttctgatttgacagtatgctatgatgaaagaggagcaaagtatgagctacccaagtacgttttgagcgagccaactaacctgattcgggacagttaataacagagaatataaatagaaagattcatgggcgaaaacattgtaaatcatgtatattggttatctcattgaattggtaacttgcatagggtagcaactcttttttcttttcacctttgaaatctatctgccgctatgtttcctcaatcaattaaacaaaaaaacgtttgttctgtatctgatgacactatccctcttctttggtaaatacaaaactccgttatctattttcagtaaaaaaaaaaaaanaaa

SEQ ID NO: 890 - DNA, 3539 bp, Glycine max
aattcgtttgctcgaggcatctctcatcatctcgctctttaatttctttctgcctccttcgtggggtttcgttttgtttcgtttctcgctctgtagggttttgtcatcccttttcgatccccaattacccttttctttgatcattcagtgttttcttctctttcacttcctatttcgatttcctcgttaggtttttccttggaacccttaatctctcaaaaccagcggttcaattcagtgttccctacaatctagggttacgttttcgtactgcctccgaagacggcgaagcgagggtccgcgtcgagcgcctcgaagaggggtggcagaggtggcaggggaaccccgaaggctgcacagaaccaacagcagcatgaaactgcggaggagacagtgaaggttgaagagaaacaacaaccccgtggttgttgttgctgctgaggaggaacagcagaaggtggtggtggaaaaagagattcctgctgttgaagagaacgagtccgctgtggttattgaggataaggctattgacatgaatcaaatggctccggaggctgtggaagaaacgtcccatgcggctagtgggttgggcttggtgaaaagttaaaactgtgtttattgatgcattgcctccttcatgggatgaagattatgtccgggatcttctcaggaaatatggtgagattgaaaagattgagcttgccaggaacatgccagctgctcggaggaaggactacgggtttgtgacatttggctcacatgatgctgtcgtaaaatgtgctgatagtattacaggcacagagttgggtgagggagacaagaaggcaaaagttagagcaaggttgtctagaccactccagagaggccgcggaaaacacattagtcgtggggactatcgttctagtcggggatctggaatgatgacgcggccttcatggagccgacctgcacctcgttcttttccttctcgtagtgtaagaaggagttggaagtcgtgctccacctgtcagaccagttagtgtgagagatagacgccctatgatgtccatacctgcaagaagtaggccagtgcctcctccatctagatcttatgatttgagatcagttgctcctgcatatccataaaagtagccgggtcagccaccgtggcccccccccccccataccacctcccagaagtagagttgctgtagattatggctcaagggtggcttctgtaaggcgaccatcttacagggattatcctgcccgtggtcctggctacaccgagctccctagaagcacatctcgtgctgcaccaaggagaggctatgtggatgatgggtatggccaaagatttgaaagggctcctcctccacctcctccaccccatctaagttaccgtgaaggacgtcctcgagattatgatgctctgtctggctcaaaacgtccttatgctgctatagatgatcttcctccacgatatgctgatactggtgctcgccaatcaagagctcgtctagactatgactatggcgatagtgcttcgcagtatggagatgcttatggtgatagacttggaagatctagtgtgggatatggtggtggcagcagaagttctatttccagtcaagattcacatgggatgtatagcagtcggcagggcatgagttatggaggaggttcttttggtagtggtgatgttggtggcatgtattcatcaagttatggtggtgattacatttctcgtggaagtgatgttggtggcagctcatattcatcagtgtattctggagggggtgtgggtggtggtagcagttatatgggtggtggctgcgtaggccccccccccccagatctgatatgataaagtggctgctgtaggatgaccgttgaagcattatgtctacaatttggagacaaaggattgctatttatagcttttatgagaatttgttacaaaaactagcttatctcaattagagatgggatgtatttatcaagttatggtggtgattacatttctggatgggatgtattatcagtacttgaatttatgctgtatggactcaagttaattagagatggaaaaagtattgagcagtgatgtgtaattcatatcatacttggacggataatgtgaaagatttccccactgctctatcttcattttcatttggacagagatcagactagagatgctacttgtttgattaaggcttcatggagttttacctcctgaatttatcaataagttgattctttattttgaatctctaaagagatgtttagttactttggatgaattacttttttgttttacagtgatatgatcagaacaaaggtgaactcattagccctttgttgagatagtagtaataagagcactacttcagcaattaataaagtcaaatagttagtttcatgggatttatttggcttggtgtcttcctaagatagtaaaaagcataatgcactggtaaaatttgttgctggaatgatttgatactattgaggtttttgtgctgagggggactacaagacaatgctaaagatgcattgatatctttccttagctagttaacttcatagatttccatattgcaattcaataatttgtactcaattggttgacctccactgacatggaccttagaagatcaattgcctttgcaatatcttggggaaatgcaacaatcaactgattaacagattagcagaaaagggttgagtatagtctgttactgaatgtttctgaattggaatttaattattaaagttggttcattatgtacctggttttaccacccaatctgcttaatatagcctaaccctaacccaaaggcaaaggttgctgaaatttatgcttgtgtggatttgatcttgatttcatgtttaagtgggtgtctcttattaccatacaatgttcattgagtttcaaatacattactatttttattaggctcaaggcactggaagctattgcctatggaatggggtatcgattatgtcttcttggtggactcgcgttttagactacaaagcttgttaggatttatgaatatgctttttcatatataattttctcatgcatgtaacttggatttcagattattgttgcattaatattctcaggttcttaggctattcaaattgttaatcttacaagtagttaagtgccaacttgcctttccattctcatcgtgaccaggtttcatttgcatattcttcactcggtgagggttatgtaggtttcattttaattattcttcacttggtgagggttatgtactaacttaagttttagtttccagtttgttctctctcacggtgcagggtgtaagctctcctcaagcctttgtttggtaactctctgtatatacatatggaagtttacctcttattttttggtatcttgttttatttagttattagatgctgtcacaggttcttgtaaatcaatgttttgtggattgattcatgcatgacattgtaaatactgggtaaagtaacatgttgctcagatttctttttaaaaaaaaaaaaaaaaaaaaaaaaaa

SEQ ID NO: 891 - DNA, 1221 bp, Glycine max
tcgagtcagctacgtaggccccccccccgaaaaaactaacaacgagtcaacgaaatcgcgaacagaacagcaacgttaacaatgggttctcgctacgaggtggaactgaagctctcatcggcacgcgctctcaagaacgtgaactggcgccatggcccgaaccgcccatacgtcgtcgtttgggtcgacccaagcaacaagctctcgacgcgcgtggacgaaagcggcgacactgacgcgaattgggaccaaacgctcacaattccgttgccaccaaagcctctcgaggatcaaacgttgtacatcgacgtggtccacgccggctcggaggaggacaccaagccgcttatcggctcggctcggctcaagctggtggacattctcgacgacgttggaatcggcgagcgcgtgagccgcacgctctcgctgaagcgtccctcggggaggccgcacgggaaggttgaggttagcgtgacaatcagggagcccagctaccgtgcgcagggtgggtacaacgcgcctccttacggcgtgagggattattcccctgcgccgcaggggtatggtgggtatcctccatatggggccccaccacaacaggcgtattattccgctccaccaagtgggtatccttataatgcgccaccgcagccttataatgcgccgcctcagagtggctacggctataatgcgctgccgcaaacggcgtcgtatgggcaggggagcggttacgggtacgcgccacaagaggagaagaagaagagtaagtttggtgggatggggacgggattggctgtgggtgcggttgctggggctctaggtggaatcgcactcgtggagggtgctgagtatgttgaggacaagattgaagatgacgtggcggaaagagtggaggatgatcttggttacgatggtgatgacttctagagagtggtgtgatgtttcaggaggaggaggaggaaaaaaaaaacaaggaataataatattttaagttttttaattgatttttctttttttcagtttctttggcgttcgagttatatcttttagtgttttcttaatgatatcgttaatgatcttatcgatgcttatcttcgttgtctttgtgggaccgcgaaatgaaacaacacatcattatcaacaacaattaagttattgatgagaaaaaaaaaaaaaaaataaaaaaaaaaaaaaaaaaaaaataaaaaaaaaaaaaaaaaa

SEQ ID NO: 892 - DNA, 1223 bp, Glycine max
cccacgcgtccgcccacgcgtccgccctcccgcccccccacgcggacggcccggggcaactgtttacaacaataataagttaataactcgcgtagcgcaaggaacagcataaacgacgctgcgctgaacaacgacggtgtcagacaaacggtgccggttggtggggccgccacgctattacgcctaatcgtatccatcaccctcatcaaaacccctcctttctcttaatttagaaaccctaattcagaagataaaagttactttctccagaattagcgcgctaatggcatcttcagactcatggatgaaggaatataatgaagctgtgaaacttgctgatgatatcaatggcatgatttctgaacgtagttcgtttcctgcatctggaccagaaacccagcgacatgcatctgctataagaaggaagatcacgatattagggaccagacttgatagcttgcaatctctgttgtcaaaggtccctgcaaaaactgagaaggagatgaatcgtcgaaaggacatgcttgcaaatttgaggacaaaagttaaccaaatggcttcaacattgaacatgtctaactttgcaaatagggatagtttgctagggccagaaataaaatcagatgcaatgagcagaactgttggcctggacaacagtggactagttggtcttcaacggcaaattatgaaagagcaagacgatggccttgagaaattggaggagactgtaatcagtactaaacatattgcattggctgtgaatgaagagctgaatctacataccagactcattgatgacttggaccaacatgtagatgttacagattctcggctgaggagagtgcagaagaacttggcagtgttaaacaaacgtaccaagggtggttgctcctgcttgtgcatgcttttatcagtgattggtatagtgggtttggtggttgtcatatggctgttggtcaaatatttgtaaagataaaaaatacccaactcgtgaagtttctctttttttcatgtttctgaatgtgcattgaaacatgataacgtgtttctttgttttttcttggtgctttggcagtggcatggaatttattaaggtattgaaaggcttttttatgtaattgtcagatttcaaatgttgatacccttgagtgttgttctctttgtaaaaatcagtaaaattgaggtgacttccatttatgtattccaaaaaaaaaaaaaaaaaa

SEQ ID NO: 893 - DNA, 1208 bp, Glycine max
caataactgtgggagggccgtagggcacgggacagcttaaacgacgccgcgctgatcaacgactccttacgtaaacgacgacggtgtcagacaaacggtgccggttgggggtgccgccacgctattacgctaatcgtatccatcaccctcatcaaaacccctgggggggggtaatttagaaaccctaattcagaagaaaaaagtcaccttctccagaatttgcgcggtgatggcatcttcttcagactcatgggtgaaggagtataatgaagctgtgaaacttgctgatgatatcactggcatgatttctgaacgtgggtcattccctgcatctggaccagaaacccagcgacatgcatctgctataagaaggaagatcacgatattggggaccagacttgatagcttgcaatctcttttgtcaaaggtccctgcaaaaactgagaaggagatgaatcgtcgcaaggacatgcttttgaatttgaggacaaaagttaaccaaatggcttcaacattgaacatgtcaaactttgcaaatagggatagtttgtttgggccagaaataaaatcagatgcaatgagcagaactgttggcctggacaacagtggactagttggtcttcaacggcaaattatgaaagagcaagacgatggccttgagaaattggaggagactgtaatcagtactaaacatattgcgttggctgtgaatgaagagctgaatctacataccagactcattgatgacttggaccaacatgtagatgttacagattctcggctgaggagagtgcagaagaacttggcagtgttaaacaaacgcaccaagggtggttgctcctgcttgtgcatgcttttatcagtcattggtatagtgggtttggttgttgtcatatggctgctggtcaaatatttgtaaagataaaaatacccaaactcgtgaagtttctctttatgtttctgaatgtgtgcactgaaacatgattgatttttcttggtgctttggcaatgacatggaatttatcaaggtattgaaaggctttattatgtaattgtcagatttgaaatgttgatacccttgagttctctttgtaaaaatcagtaaattgaggtgacttccattaatgacttgagctcttgcactctgagcgtttgcgtgggtgggaagggaaataatatgtattgcagaagccgccatttcgttttac

SEQ ID NO: 894 - DNA, 958 bp, Glycine max
  misc_feature (9)..(9): n is a, c, g, or t
  misc_feature (55)..(55): n is a, c, g, or t
  misc_feature (97)..(97): n is a, c, g, or t
  misc_feature (99)..(99): n is a, c, g, or t
aaaacctgnattaattttctggaagatacttttgttcttcagcggtcaaatgcanaagtgaactacaagcaggggaatgatgatttttaaagacatnangactactttgtgaacttggccattcaacttcttactacttaccagaaagagctagggccttgtattatccatatcggaacatttgtcgggctcgagaagaatttaagtcagaggttagagatgacacccagtgcagatactgaggagtcagaagtattaagtccaaggagaaatcttgaggaggaatatttgacctatgaagccaagattattaccaccttcagtgtagtggataacataaaacagcagttttatgctcaacaggggagaatttccaggaaagatgaagagagagttaaagagctgtttgaagccattgaaaagttacgaactcaatttgagtctatagagagaccaattcttgaaatagagacccctgcaaaggctgaaacaccaccttttgagaaaaagtctgatgctactccttcagtttctgctccaactcaaggtgccgagctttcaaagccagaaacggatgagctgccaaaatcaccttcagttaagacagaccagatattggatcatgaagctgaattagctaaactggaatctgagtttgggaaggttagtcaggattattcaactgaggaaattggtgattgggaatttgatgagcttgaaagagaattgagcaagtagttaggttgaatcttatttctgagtaattaatgcttgctgttgtatttttatgattaagtgcaagtatcatataaatttgtaagccatatagatcggctgttgatgaagctataatttggatcagattcctttgaatttgtgaacattaccaagcatgatttctttattctgtaaattaacgagtttgcaacttgcagcccagaaaaaaaaaaaaagaaag

SEQ ID NO: 895 - DNA, 2561 bp, Glycine max
  misc_feature (14)..(14): n is a, c, g, or t
cgctaagcctcggnaattcggcttcgagggcaaacaacagaatagagtcagaaggagagagagagagatggtggtcggtgttctttctgattctccttgatcttctttttctcttcgttattgttcccaacacattccaaaccctaaatttattgcctggctcttccatccccaatatccgaactcaaacgcggagtggcagcagagaacaaaaacatgtcatcttggctgagatctgcggtcaacaaagccgtcgaggtcggcaacaaaaacaacctcactcgcaccgtcaagaactacgccgacaccgtcgttcaacacgccggccaagccgtggccgagggcgccaaaatcctacaggatcgcattagtgctcggaattacagaagtgttgcgcagaccattaaaaggttggaagaagctgctgtctcgtataggggacctgagagagtgcagttgcttagaagatgggtggttgtgcttcaagagattcagaagttgtccgaggcttcattggctgaaggcaaagagaggactctcgagcagcaccttgcggttgaagaagccaaggagaacccaaggaaaccatctctggttctttattacgattctgatgttgggggagaaccattaaatttccgtgatgtttttcttcaaagtcaggcattggagggtataacgttatccatgattattcatgctccgaatgaggaagaggtttcccttctcctggagatgtttggactttgtcttactggaggaaaagaagttcataatgccatagtgagcagcctgcaagatttagcaacagctttttcaagctatgaagatgaagtgctggtgaagcgagaggaattacttcagtttgctcaaggtgccatcactgggttgaaaatcaattctgatgctgcaagaatagatgctgaagcctttagtcttaaaaaaaagctcactgagataacaacttcacaggggcctgtaagcaatgttgattataaagcggctgaggaaacaatagcaacgctagaggcttttaaaattgcccttgctcagattagaatctgttctagactggaagccttattgctgaagaaaaaaaattcaagcaatggagactctcccgaaattcatgctcaaaaggttgataagctgaaggtattaacggagtctcttgccaactctgctacaaaagctgaaaagcgtattttagataacagactacaaaaagaggaagcattaaaggttcgagtgactaaagatggtgaggctagtgaaaaggagaaggaactggttactgagatatctgaactgcaatgcaaaaaagaagatctcgaagctgaattgaaaaaggttagcactactttggctgctgctcaagcacgactatggaatgtgagggaagagagagaccagtttgaggaagcaaacaatcagatagttgaacacctgaaaataaaggaagatgaactttcaaaatcaatcagctcatgtagggttgaagcagatgttatcaaaacctggattaattttctggaagatacttgggttcttcagtggtcaaatgcagaaattaatgacaagcaggtcaatgatgaattggagagacatgaggactactttgtgaacttggccattcaacttcttactacttaccagaaagagttagagccttgcattaaccatatcaaaacatttgtcgtgaacctcaagaatttaagtcagaggttagagatgacacccagtgcagatactgatgagtcagaagtattaagtccaaggagaaatcttgaggaggaatatttgacctatgaagccaagattattactaccttcagtgtagtggataacatgaaacaacagttttatgctcaacacgggaaaatttccaggaaagatgaggagagagttatagagctgtttgatgccattgaaaagttgcgaactcaatttgagtctattgagagaccaattcttgaaatagagatccctgcaaaagctgaaacgccacctttggagaaaaagtctgatgctactccttcagtttctgttccagctcaaggtgctgcagctcaaggtatcgagctttcaaagccagaaacagatgagcaaccaaaatcaccttcagttaagacagaccagatattggatcatgaagcggaattagctaagctggaatctgagtttgggaaggttagtaaggattattcagcagaggaaattggtgattgggaatttgatgagcttgaaagagaattaagcaagtagttaggttatttatgagtaattaatgcttgctgttgcattttgatgatgaagtgcaagtaccataaatttgtaagccataggtcggctgttaatgaagcttcaatctggatcggattcctttgaatttgtaaacattacatagcataatttctttattcttctgtaaattaacgggtttgcaacttgcagcccagtcaacaaaagatttgaaatgatcagtatggttagaattttgaacttcggatgatatcggtgcgcatagatggaaacgtaagcccactgatggctcgtgtcat

SEQ ID NO: 896 - DNA, 1863 bp, Glycine max
tgatacttcctctttagacttggagggtttgcttcatcaacaatacaacttattggcattgttgctgtaatgacagatgttacatggcaagttttgctcctagtagtcccgttggctattatttgtttgtggatgcagaaatactacatggcttcctcaagggaattagtacgtatcgtgagcatccaaaaatctccaattatacatctttttggtgaatcaattgctggagcagccaccattagaggttttggacaagaaaaaaggttcatgaagaggaacctctatcttctggattgttttgcacgaccattcttctgtagtcttgcagctattgagtggctctgcctgcgcatggaattactttcaacctttgtttttgctttctgcctggtattacttgtcagccttccccatggaagtattgatcccagcatggctggacttgcagtaacatatggcctgaatttaaatgcacgtctatcacgatggatacttagcttttgcaaacttgaaaataaaatcatatccattgaaagaatttatcaatacagccaaattcctagtgaagcaccagcaattgttgaagattctcgtcctccatcctcatggcctgagaatgggacaatccaattaattgatctgaaggtacgttacaaggaaaatcttcccgtggtgcttcacggagtatcctgcacatttcctggtgggaagaagattggaatagttggtcgtactggcagtggcaaatctaccttgattcaagcattatttcgattggttgaaccggaggcagggagtatccttatagacaacattaatatttcatcaattggtcttcatgatcttagaagtcatttgagtatcataccacaagatccaaccttatttgaaggcaccattcgaggcaatcttgatcctcttgatgagcactctgataaagagatttgggaggcccttgataagtcacaacttggagatataatccgtgagacagagcgaaagcttgatatgccagtgctggagaatggagataattggagtgtaggacagtgtcaacttgtttctttgggtcgagctctgctgaagcaatcaaagatacttgtacttgatgaagcaacggcatcggttgatactgctactgataatcttatccagaagattattcgaagagagtttagagattgcactgtgtgcactattgcacatcgtattcctactgttattgacagtgatctagtgctggtactcagtgatggtcgagttgcagagtttgatagtccatctaggctgttagaggacaagtcatctatgtttctgaagttggtgacggagtattcatcgcggtcaagtggcataccagacttttaaaatggatgaaaatgcatcaaaaccttcaatgatggaggtggtatgagcttaagagccttcgaagttagtgggcagcaagagctcaagacatttcgagtagaaacagtaacgatgcctcagttgctgtcactgctgcattggaaacatgctgagacataaaatgagctgatgcacgagtgagcccttatcgattaagcactccagtgggagaaattattttccagtttgaaagtatcatcagttggttcatccccataaaccacattgaggaattcatgcatggttggggcttgctttgtaacatggaataagatgatcgccctttacaggaaagaaaacatgggcgtctgaattgatttcaataatgttgaataacagttttgagaatgaggcagtaggcttttgcttgcttagaaaagtgtaaccctttgttgggatgaaacaatttaacgggagaattcattttttcaaggaatttaaaatgattcatgt

SEQ ID NO: 897 - DNA, 2634 bp, Glycine max
  misc_feature (16)..(46): n is a, c, g, or t
  misc_feature (186)..(245): n is a, c, g, or t
atgtgatgtaaagatnnnnnnnnnnnnnnnnnnnnnnnnnnnnnnnaaggttctcaaagaaggatgcatcatacagtcaggaaagtatgacgatcttttacaagcaggaacagattttaatactctggtttcagctcacaatgaagccatagaggccatggatatccctactcactctgaagattnnnnnnnnnnnnnnnnnnnnnnnnnnnnnnnnnnnnnnnnnnnnnnnnnnnnnnnnnnnncaaatgatatagacagtttggcaaaggaagtgcaagagggatcatctatttcagatcaaaaagcaattaaagagaagaagaagaaagcaaaacgatcgagaaagaaacagcttgttcaggaagaggagaggattagaggtagagtcagcatgaaggtgtatttgtcatacatggcagcagcatataaaggcttattgattccactcataatcattgcacaaacattatttcagttccttcagattgctagcaattggtggatggcttgggctaaccctcaaacagaaggagacctgcccaaagtaactccctcagttcttcttcttgtttatatggcccttgcttttggcagctcatggtttatatttgtaagggctgttctggtggctacgtttggtcttgcagcggcccagaagctgtgtcagctaatgcttagaagtgttttccatgcaccaatgtctttctttgactctacaccagctggaaggatcttgaatcgggtatcaattgatcaaagtgttgtggatcttgacattccttttagacttggtggatttgcttcaactacaatacagcttattggtattgttggtgtaatgacagaagttacatggcaagttttgctcttagttgtcccaatggctgttgcttgtttgtggatgcagaaatactacatggcttcctcaagggaactggttcgtattgttagcatacagaagtctccaattatacatctttttggtgaatcaattgctggagcatccaccatcaggggttttggacaagaaaaaaggttcatgaagcggaacctctatcttcttgattgctttgcacgaccattcttctgcagtctttctgcaattgagtggctctgcctgcggatggagttactgtcaacctttgtatttgctttctgtatggtattacttgtgagttttcctcgtggaagtatcgaccccagcatggctggacttgctgtgacatatggcctgaatttaaatgcacgtctatcacggtggatactcagcttttgcaaacttgaaaataaaattatatctattgagagaatttatcagtacagccaaattcctagtgaagcacccacaattattgaagattctcgccctccattctcatggccagaaaatgggacaattgaaataattgatttgaaggtccgttacaaggagaatcttcctatggtgcttcatggagtaacatgcacatttccaggtggaaagaagattggaatagttggacgtactggcagtggaaaatctactttaattcaggcgttatttcgattgattgaaccagcaagtgggagtatccttatagacaacattaatatttcagagattggccttcatgaccttcgaagccatctcagtatcatacctcaagatccaaccttatttgaaggtaccattcgaggcaatcttgatcctctggatgagcactcagataaagagatttgggaggctcttgataagtctcagcttggagaggttatccgtgagaaaggacaacagcttgacacaccagttctagaaaatggagataattggagtgtaggacagcgacaacttgttgctctgggccgagctctgctgcagcagtcaagaatacttgtactggatgaagcaacagcatcagttgatactgccacggataatcttatccagaagattatccgaagtgagttcaaagactgcactgtttgcaccattgcacatcgaatacctactgtcattgacagtgatctagttcttgtgctcagtgatggtctagtcgcagagttcgacactccttcaagactattagaggataagtcatccgtgtttctgaagttggtgaccgagtattcatcacgttcaagtggcataccagacttttagaacaaatggaacgtgtgaatgctttcatagtgtggtggccggagcttaagacagttcaaaagttgaatcaggaattgatgccacccttgcatgccactgctgcattcggggcatgcgtagagacacgagctggaaacaaacaaaataaaagggagaggtttgtgcctcctcatgaatcaagcatcccactaggagaaatttgtttgattattccccttaaagttgaggaattcatgcatggttagcatgctttgtaacacaaaataagttgatctgtgattacaggaaagcaacgaagtagtttgtagaatgaggcactaggattttgcttggttagaaaaagtgtagagtttaaattagttgtgtattccacaattttcttgtagtgaaagttttagaattaagccattcaagctcagaatctccgcacccccctcacaaataaaagttatattagttgtctttcctataaaaaaaaaaaaaaaaaaaaa

SEQ ID NO: 898 - DNA, 2228 bp, Glycine max
  misc_feature (467)..(467): n is a, c, g, or t
catgaaaaatagcaaggttctcgatttgttatcagacacaaacatcaacaaaatccaaattctcgtgtcacggtggcgctggatgtaagaatgggaaatcgacgcttcactcaggtcgcaaccagcgacgacgaggacgaagcgccgccggcgccggcgcctcctcccaagcagcaatcgtccgtcagtgcctccgaacaaaactgttcgaagcagcagcagcagcagcagcgccagcggcagcgcaagaggctccgggtggagctccaagaagaagaggaagaggagaaagaggaagagagaagaagaagagaaaaatcaaagacaagcaggaagagagatccaacgaagaagaggaaccgccgcaggaagacgccaagcccattggcgaaccggttaggctatccggaaagggaaggggccgcaaaaagcattaggaatccttcgagtacgacggaaaccaatancacgctggaggaccctatacttctcacgcctgaggacaaagatcaaaagccgtatgtggctattatcaaggacattacgcaatccctaaatggcagcatgatggtcacaggacagtggttttatcgtcccgaagaagctgaaagaaaaggtggtggcagctggcaatcacgtgacacaagggagctgttttatagtttccaccgtgatgatgttcctgcagaatctgttatgcataagtgtgtggtgcattttgttcccatacacaaacagctcccaaatcgtaagcagcatcctgggtttattgtgcaaaaggtgtatgacacagtagaaaggaaactctggaagcttactgataaggattatgaggacaataaacagcaagaaattgatgagcttgttcagaaaactcttaaacgtttgggcgaactacttgacattgagcccgaagaacctgttgctgatcaggaagatctgatgaaaaataaaagaatcttaaggaaaaagagcatttcacctcttgatgtttcgaaggaggaggaaacaactcgtaagggggaccaacctttgaaacccgaaacaccatggagttgtataaataatgcctcagaacattatcgcatattagtagatttcaatgttctaacaggagatactcatcgtgacaaatgtttggagaagttgcttcaaagtgttgaattcatgtttaattctgatgacagcataaagagggaagagaaaggaaatgacaattctgatgcaaccaacaatggaagcaataacaaaagtttagaatctgttaatgaatgtaaagacaaggttcaaaagagttcaaagccttttgtttggccagatgatgctgttccagctgtagttgctctggaaaaagcttcacatgataccttatcatcggattatcagaagtataaccaaaagctacggcaattagtatttaatctcaagaacaatgcaatcctagcacgccgcctactaaatggagagttggaaccttctaaaatattgaatatgacacccaatgagttgaaggagggtttgactgcagaggaaacaaccaagaaggagcctgatgagtcacaacacatgcagatgacgggtgcccgatgccgcagatgcacagagggtaaggtgggcttgagggatattatccacgccggacatggtgatcggtatcagctggaatgtactggctgtggttattcctggtttgcctcccgtgatgaggtgtctgagctgactatagatgcatcagattcaaaaagaagcgtaggcacagcgccatgggccactgcaaaatttgaagatgttgagaagaagctggtgagtccccgcgaatctgaaaagaatgacatctttaagaaaacaagtgaagcatatatgccagttttggatgcccagaaatcatttggcaaatataggaaagatgaaaccgtccaagcttcaaagcacgctgactagtggctaggaatagttatcctgtgctgtagttaattttagattattttttttttttggtactgatagtagcaaaagatcgtatatagttcgcatacaacggagccgttgtttttctgtatagctttaactaaatgtaaaatgtaaatgctcaagtagaatggtattatagccatttacgtgagttttacacgtcctcgaacactatgggtgttgccatgttgggtgtgagatgatgtttcaggttcaggttcaggtcgttactttctatctagtattttcagtttggt

SEQ ID NO: 899 - DNA, 2172 bp, Glycine max
ccttgggcaaaacaaaaccttggttaaaccctgaactcaaagttgcattacaggagagagagagagagagagagagatgtttgggaggggaacggtgtggtcagtgttgaggcgcggcaaagaagcttgcggcggatttcacaagctgagaggaacgcctttctcttattcttcttcttcaacacctttcaagttcttatcccctcccgtctccacccattgctttcatgctttccgatcccaactaatccccaagggtcatcatgttcatgtgccacaaatgaggaacttttctaagatggtctctgctgaacaaaaggaggagggattaaagctgctagtgagtgggggttctcgtgctcagaaattggttggaatatggctctttgggtcagcggcatgggtgttcagcatggtggtgctcgggggtttaacaagactcacccgatctggtctttcaatgactgattggaaattcaccggtactctccctcctttctcggatgaagaatggttgcaagagtttgacaaatataagcagtcacctgagttcaagcgtgttaacagaggcatgaagattgaagaattcaaattcatatattggatggaatatgcacatcgtatgtggggaagggcactaggagttatgtttgctttgccatattcatattttcttcataaggggtatattaccttgagattgggactgagactctctgctctgtttgccctgggtgctgggcagggtctcattggttggtggatggtcaacagtggtttagaggaaccaccatctgaatattctcagccaagggtaagcccttatcgtcttgcagctcatcttacatcagcatttgctatttactgtggcctcttttggactgcactttctgttgttatgcctgaaccaccagctgaatcgctaacatgggttcgtggggcagctaaagtgaggagacttgcattgcctatcagcatacttgttggtcttactgcagtctctggtgcattcgttgctggaaatgatgctgggcatgcttttaatactttcccaaagatgggtgatacatggataccgggagacatttttgaaatgaagcctctgattcgaaatttctttgagaatacggcaactgtgcagcttgatcaccgtatacttgcaactgcaactctgatttctgtgagcattttatggtggtcaacaagaaagctggagatacatcctgcagtacgatctgtgattggaggtgctgttggcatggcagctcttcaggtcaccttaggaatttcaacgcttctttcatatgtacctgtttcactgggcactgcacatcaggctggagccttgacacttctgacatttatgttacttcttaatcacacggttcgaagaccgtctttgtcccttctcaaatctctgcctcaagttggaaaagcacactaattgtttcccgatattatattgcatcaaggcttaggccttttaagttgacaaaatctgtggctattattttttccatgctaaattttgcgttgagctccttctccaattttccactgttggaatcttctgtatttgttttgtacatttgaagcatgaaaattcatgatgatgcaactgttctgttgattatgtaatgagcagatacatattatcagaaattataacatgtgattggatgaagagaataaaaaaattgtaatttaactgatctgttaacatgatatccaaggtttttccagggtggagctgtggaggctaccttaaatgaatattttgaaaatgaagcggctaaacacttggggttggtttattcagacctataactgaccaaatcattcaagctcacaacagagttcaataccacaatatctttacagcattgtcactatttagaaatcttaaaatgatgcagaagacaccaggtatgagatctaacaggcaatgactaatcccacaaaacagctttcgtctatgggcataggacgcaaattttttatcacaagttcaacatcttattcagcacaaatttatgctaatggagagtctaaattggccttcaaataccataaaagcaacattaacatcacagagaacacgtgagcctggtcatcaaggccaatttcatcattgaatctcatgccatttggaataggaatttctaagcccct

SEQ ID NO: 900 - DNA, 1713 bp, Glycine max
ctcgagccgaatcggctcgaggtcggtggtgggaataagcgttttagtagttgagtttgggtttcgcaaaacaaaacctcagctacgtaggccccccccccccccattgcaatttgtaggagagaaacagagatgtttggtaggggaatggtgtggtcagtgttgaagcgcggcaaagaagcatgcagaattcacaagctatgcctaagaggaacgcctttctcttcttcttcaacacaaccaccacctttcaagttcttaacccctcccgtcgccacccattacattcatgctttccgatcccaactattccccaagggtcatcatgttcatgtgccacaaatgaggaacttttctaagatggtgtctgctgaacaaaaagagggattgaagctgctagtgagtgggggttctcgtgctcagaaattggttggaatatggctctttgggtcagcggcatgggtgttcagcatggtggtgcttgggggtttaaccagactcactcgatctggtctttcaatgaccgattggaaattcaccggcacgctccctcctttctcagatgacgaatggttgcaagagtttgacaaatataagcagtcacctgagtacaagcgtgttaacagaggcatgaagattgaagaattcaaattcatctattggatggaatatgcacatcggatgtggggaagggcgctaggagttatgtttgctttgccatattcatattttcttcataagcggtatattacgttgagattaggactgagactctctgctctgtttgctctgggtgccggacagggtcttattggttggtggatggtcaaaagtggtttagaggagccaccatctgaatattctcagccaagggtaagctcttatcgtcttgcagctcatcttacatcagctttcgctatttactgtggcctcttttggactgcactttctgttgttatgcctgaaccaccagctgaatcgctaacatgggttcgtggggcagctaaagtgaggagacttgcattgcctatcagcgtacttgttggtcttactgctgtctctggtgcatttgttgctggaaatgatgctgggcatgcttttaatactttcccaaagatgggtgatacatggataccggaagacatttttgaaatgaagcctttgattcggaatttctttgagaatacatcaactgtacagcttgatcaccgtatacttgcaactgcaactctgatttctgtgggcattttatggtggtcaacaagaaagctggagatacatcctgcagtacgatctgtgattggaggtgctgttggcatggcagctcttcaggtcaccttaggaatttcaacgcttctttcatatgtacctgtttcactgggcactgcacatcaggctggagccttgacacttctgacatttatgttacttcttaatcacacggttcgaagaccgtctttgtcccttctcaaatctctgcctcaagttgtcaaagcacactaattgtttcccggtattatattgcatcaaggattagactttttaagttgacaaaatctgtgactattattttttccatgctaaattttgtgttgagctccttgtccaattttccactgttggaatcttctgtatttgttttgtacatttgaagcatgaaaattcatgatgatgcaaccgatctgttgattatgcaaaaaaaaaaaaaaaaaa

SEQ ID NO: 901 - DNA, 1378 bp, Glycine max
  misc_feature (8)..(8): n is a, c, g, or t
  misc_feature (18)..(19): n is a, c, g, or t
  misc_feature (21)..(21): n is a, c, g, or t
  misc_feature (29)..(30): n is a, c, g, or t
  misc_feature (32)..(33): n is a, c, g, or t
  misc_feature (43)..(43): n is a, c, g, or t
  misc_feature (45)..(45): n is a, c, g, or t
  misc_feature (47)..(47): n is a, c, g, or t
  misc_feature (49)..(50): n is a, c, g, or t
  misc_feature (52)..(52): n is a, c, g, or t
  misc_feature (62)..(62): n is a, c, g, or t
gaaccccngcaggtcccnnancggaaaannannccggggggangngntnncnagtgggcggncgcccgtcgttttttttttttttttttcaaatgacagtttaaaaatgttatttcgtccagaactaaaccacttgatatgaattcccacataagtctcaaactgttgtcccgacttgcaacaattcacagatttacatgctgtatgaatatctcaatttggtttaatacaatcacctcaaagtaagcaacaaaaacgagatatctgactcttaagaaaataagggaagaaagacgcttaagatggacctagataacgttgttcccatccatgtccagctgatcaagataacttgccagaaatgctcaccaggttgaagtccatagagattttaggaagaggtaggatacagaacacgagcagtagaaaactaaaaactattaaattccatcaagccctcttggcaaaatcatctgcatcgttgtcatccctgtaatcaccaaaatcctcatctcctttgctgcttgctttgctatctaattggccactgctgccaaattcagaccccgcacttccatcatagccatcagcaaagctagtgccactacctgcaccaacaccaccatccacaacacttccatcatatccattactggcaaaaccagtagagctttcatgattgcctacaccaccggcattaccagcatagcctcctgaatagttattgccagagccactgtccccataattgccgcctgatccatacctgcctccaccatatccataaccactcccatcatttcgactatagttgtcaccaccataaccaccacgatagctgctaccaccttcatagccaccgccacctacagcaccgtatgaaccaaagccaccgccaccatatccacgaggtctttcattagcataattcaccctaatcgggcgaccatgtaggtcctgaccatccaaggcctgaatggcacttgatgcctcctcaaccgaagtgtatgtaataaagccaaatcctctggatctaccagtttcacgatccataattatcctagcatcaacaacttcaccatattttgaaaaagcttccctcaaactttgctcgtcagtagaatatgaaacacctccgataaacagctttgtgcttggagcagatgacatactgcgtatagcctgaaaaaacgaaggggatgatcgcaattctgaactaacctgcctgcttgctgtctgtcttaataaattcccaattctaccaaagaaagccattgctgtaacctgtgttcactcgcgagacagtgtcttttcctaaaaccctagcaagatatctgtgatttttcgaggggccgcagcccctgcgtagctgactcga

SEQ ID NO: 902 - DNA, 1614 bp, Glycine max
tacggctgcgagaagacgacagaaggggacaacatatccattttatttacaacaacaatggcttctgtgcctcaaccaaaaatctcccttctaaccttattcttcttctcttccttcaccatcattgcgcatgcaattgttcctcaaaacgaaaccttcaaatttgagaactcaggtgaacttggaccctacatcgttgagtacggtgcagattacagaatgataagcatcttcaactctccattccaagttggtttctacaacaccaccccaaatgccttcactctagctttgcgtgtagggctccaacgctcggagcagctatttcgttgggtttgggaggccaacagggccaacccagttggagaaaatgccactttttcacttggcactgatgggaaccttgtgttggcagatgctgatggcagaattgcatggcaaactaacactgccaacaagggtgttgtggccttcaggcttctttcaaatggtaacatggtccttcttgatgcacaaggcgggttcgtttggcagagttttgatcaccccacagatacccttttggtcggtcaatatcttagagcaaaagggccatccaagttggttagtaggctctcagagaaggaaaatgttgatgggccttatagtttggtcttggagcctaaagggttagccttgtactacaagagcaagaattctcctaagccaattctctattggttttcttctgattggttcaccattcaacgagggtccttggaaaatgtcaccttcacatctgatccagaaacttttgaacttggatttgattaccatgtggccaattcttcatctggtggcaatagaatccttggcaggccagtgaacaatagcaccataacatatctcaggcttggaattgatggcaacattaggttctacacttacttccttgatgtgcgtgatggtgtatggcaagtgacctacactctatttgatagagattctgatgagagtgagtgccaattgcctgagagatgtgggaaatttgggttgtgtgaagataaccaatgtgtggcttgtccattggaaaatggactacttggttggagcaacaattgcactgccaaggctgtgacatcatgcaaggctagtgatttccactactacaaaattgaaggagttgagcattacatgagcaaatacactacaggggatagagtgagtgagagtacttgtggaaacaaatgcaccaaggattgcaagtgtgtgggttatttctaccacaaggagaattcaaggtgttgggtagcttatgatcttcaaacccttactagaggggccaattcctcacatgtggggtatattaaggtgcctaataagtaaaatattaaaaccttgatattgcggttttatacagttttacttcaattaattcctaatactagtttaagttgaaataaagttatggtatgattctgtcctccgtgaagagaaggacatggatgtacaataaagaagtttgtaataaagttttgattggtttggcttaaaaaaagattcatgtttttctcctcctgcttccttagcaaattgattaacttggtaaggcatagcttaaaattaattctttat

SEQ ID NO: 903 - DNA, 1067 bp, Glycine max
gtgatccctttatatgtctcgtccaccgtttttctctcccttgagttcaattcaagtgcagtgcagggacacctcacccacccctccttcccttccgttccgttcaccaccacctttctctcctttttcccgttccattacctctcaaacctttctcctccactcaactacacatctctctctctctctctcttgggagtatctgcaattcgtaatcctatccacttgttgaatctgaatatttccaattcaacattttccaaatggcatcctcgtcctctatgatctcaaacccggttccgaacacggaccggtcacgtgacgcgaaacggaggaagaagaaagcgcagctgaggcagcagcaacaacggcaagaggatcagagcaatcccaagtggaaatcccaagcgcagcaacaaatctactcctccaagctgcgccaagccttagccagagtgaatctcgggttggcgccgccgccgcgccgaggcaaagccgtgcgcgacgccgccgacagagtcctagccgtgacagccaaggggatgacgcgctggagccgagccatcctcaccaaccggctcaagctcaagttcaccaaacacaagcggcagagacttacaacgcccccaacccggtcaaagaaaccccgggtcagcgtttaccggctgaaggggaagggttcaccgggcgtgcagagaaaagtgaggttcctcgcacgcttggttcccggttgccgtaaagaaccgttaccggttattttggaagaagccattgattacatacccgcgcttgagatgcaggttcgagccatgagcgctctctttaaccttctctctggttcttcttcttcttccggcgccgccgcctccccttccgcgccacctagctcgtcatagaagacacttttggctctaggcctttatgtatgtatgccatgccatgtcatgtgtctgtcaatttttttaatttttatcatcatcatcatcattatttggctcgttttctttcacccttgcccccaaagaagctttctttctgtttattgttttctaattgcatagtataca

SEQ ID NO: 904 - DNA, 1921 bp, Glycine max
tcgagcagctacgtaggcccccccccccctcgtgattctgaaaatctgaaatttcatttctctctgtataaatatcctagtccttatcagcttcactatttcgattgaacatcgccgaagaaggtattgacgtcgatgatgaaaatgaaattggtgaaaacattactgcttctcctttgtgtgaaactcttctgttatgcagtgattggtgctcctcaaacttgtcctgctaacaatgaggataaatgcggcgattcagatgaatggaaaggggagtttttccctgacattcccaaaattaaatatgagggtccgtcaagtaagaatgtgctttcatttaaatggtataatgcagaggaggaaattcttgggaagaagatgaaggattggttaagatttagtgttgcattttggcatacattccgtggaacaggtgctgacccatttggtgcacctaccaaatactggctatgggaagatggtaccaattcattaaacatggctaaaagacgaatgagagctaactttgagttcataagcaaactcggtgttgacttttggtgtttccacgacagggatatagcccctgatggaaaaactcttgaggaatctaatgcaaacttggatgaagtggttgcccttgctcaagagctccagactaaggctaaaaaaagagtgttatggggaacagctcagttgttcatgcatcctcgttacatgcatggtgctgctactagctctgaattaaaggtctatgcatatgctgctgctcaagtgaagaaagccatagaggtgacacattatttggggggagaaaattatgttttctggggtggtcgtgaaggttatcaatctcttttgaacacagatatggagcgagagcttaatcatttggctaggttttttgaagctgctgttgcatacaaaaagaagattggattcaatgggacatttctaatcgaaccaaagccacaagaacctacaaaacaccagtatgattgggatgctgcaacctcagctaatttcttgcgaaaatatggacttacaggggaattcaaactcaacatagagtgcaaccatgccaccctctctggccacagttgtcatcatgagctcgaaactgcaaggatcaatggattgctgggtaatattgatgcaaacactggtgatcctcaagttggttgggacactgatcagtttcttgtagatattcaagaggcgacactgattatgctcagtgtgatcagaaatggaggacttgcacccggtggattcaacttcgatgcgaaattgcggagagagagcacagatgttgaagacttgttcatagcccacattgttggaatggataccctggcccgtggcctgaggaatgctgccaagttgattgaggatggttctcttgctgagcttgttcgtaagcgttatcagagttttgacactgaaattggggctcaaatagaggctggtaaggctgactttgaactgcttgagaagaaggtcaaggaatggggagaaccaaaggttgcttctgcgaaacaggagctagccgagatgatcctccaatctgttctgtagaaagtagaatctagccgtgtgtggtggctatttttcgtctattatattaggaacaattcggtataattaggtttactaataaaaggaaattaagattgacttatgcctgcttcgttttccttgggaaaatataagtgtgaagctgttatctgctaggtggatacgaagcctggtgaagtgcatgttagcttatgtataaaactacgtgatgcatagcttccctggctttgagcatgcttgagttaattaattttagtttcactccgtaacaattataaatcattagaatcctgttccccctctctcatccataccgaaattactgaaaaaaaaaaaaaaaaaa

SEQ ID NO: 905 - DNA, 1536 bp, Glycine max
atatgttctcggttgcgcggtaccttggagaagaaactttgtatagcaaaaatgataaaaaccaatagctcccaagattggcctgagccaataatccgtgttcagtccttatccgaaaggtgcacagattcaatccctgagaggtatatcaaacccctcagtgagcgtccatctgatgatgttgttgctgttgatgatgatgatgatgtcaacatcccaatcattgaccttgcagggctttatggtggtgaccctgatgctcgagcctccacacttaagcaaatctcagaggcttgtaatgagtggggtttcttccaaatcgtgaaccatggtgttagccctgagctgatggacatggctagggaaacttggcgccagttctttcacatgcctttggaggtgaagcagcactatgcaaactcgcccaaaacctatgaagggtatggtagcaggcttgggattgagaaaggtgccattcttgactggagtgattactattatcttcattaccttcccttgtctttgaaggaccacaataaatggcccactcagcctccctcttgcagggaagtgtgtgatgagtatgggagagaggtggtgaagctatgtgggaggttgatgaaggttctgtccataaacctaggattggaagaggatgttctcgagaaagcttttggaggagaagatgttggagcatgcctgagagtgaatttttacccaaagtgtccaaggccagagttgacgctgggtttgtcttcgcactcagatccaggaggcatgacacttttactttctgacgaccaagtccctggtcttcaagtccgaaaaggcaacaattggattacggtgaagccccttccccatgcttttattgtcaatattggagaccaaattcaggttctaagcaatgcaaactacaagagtgtggagcacagggtgctagtaaattcaaacaaagagagagtttccctagccttcttctacaatcccaaaagtgacatacccattgaaccagtaaaggaattggtaaagccagacaaacctgcactctacacgcccatgacctttgatgaatacaggctcttcattagattgagaggaccatgcggaaaatctcatgtggaatcgttaaaatctccaagatgatcgatatatcgttatcaacaaggacattgcttgcaatattatataattaatagtattgtaaatcctgttcctagatatgtacttgtctgaacaaattgcctaatagttaaaccacaaaagcaattggataatatagatatgaaattgatgtggaaaaactgtttatgttaatggatgaatttgggaggtccgcaaagatcattcctatagctttgtaattattagagatttgtgtccccacattcccaacagatgacggtgataagtgcaccataatcttaggggcaatatttgtatcatatagtaatagtatgtactgtattaattgtatgatgcaatgcttgacaagcctgcttcaaattcaatgcactatattaattattgaaaaaa

SEQ ID NO: 906 - DNA, 533 bp, Glycine max
ggctcgaggcctaaaacaaactttgtgtagttaaaaattagaatgatgaaaaacaatagcccacaagattggcctgagccaatagtcagagttcagtccttgtccgaaaggtgcacagattcaatccctgagaggtatatcaaacccctcagtgaccgtccatctgatgatgccgttgctgttgatgatgccaacatcccaatcattgaccttgcagggctttatggtggtgacccagatgctcgagcctccacactgaagaaaatatctgaggcttgtaatgagtggggtttcttccagatcgtgaaccatggtgttagccctcagctgatggacatggctagggaaacttggcgccagttctttcacatgcctttggaggtgaagcagcagtatgcaaactcgccaaaaacctatgaagggtatggtagcaggcttgggattgagaaaggtgccattcttgactggagtgattactattatcttcattaccttcccttgtctttgaaggacaataacaaatggcccagtca

SEQ ID NO: 907 - DNA, 2304 bp, Glycine max
cccacgcgtccgcaggcaatgatgaagaacaatactactacaggggaaagaagcagttatacaccctcgagaatggtgaaattccaggcaaaattataaaaccattttttttctctctctgtccaaacggcagatcagatccattcttcaacaaatccccttttcagtttcagtttttctcgaggatcccgtgaaacgacatggcgatggtggaccagcctctgtatccgattgccgttttgatcgacgagttgaagaatgaggacattcagctgcgcctcaactcgatccgaaggctctccacgatcgcgcgcgcgctcggcgaggaccgcacgcggaaggagctgattccgttcctcagcgagaacaacgacgatgacgacgaagtgctcctcgcaatggccgaggaattaggtgtcttcattccctacgtcggaggcgttgagcacgccaacgtgcttcttcctcccttggagacgctctgcaccgttgaggaaaccagcgtcagagacaagtcggtggagtcgctgtgcagaattggagctcagatgagagagcaagacttggttgaatacttgattcctttagttaagaggctggctgctggtgagtggttcacggcacgggtttcatcgtgtggtttgttccatattgcttaccctagtgcacccgaggcggtgaagactgaactgagagccatatatgggcagctgtgtcaggatgatatgcccatggttaggagatctgcggccacaaacttgggaaagtttgccgctactgttgaagctcctcacttgaaatctgacatcatgtctgtgtttgaggatctcacacaggatgatcaagattctgttcggctacttgctgttgagggttgtgcagctctggggaaattgttggaacctcaagattgcgtggcacatattcttcctgtcatagtcaatttttctcaggataagtcatggcgtgttcgttacatggttgctaatcaactatatgagctatgtgaagctgttggtcctgaccccaccagatcagaattggtccctgcatatgttcgtctgctgcgtgataatgaggctgaagtacgtattgctgctgctgggaaagtaactaagttttcccgcatattaaatcccgatcttgcgattcagcatattctaccatgtgtgaaggagttatcaactgattcttctcaacatgttcgctctgcactggcttctgttataatgggtatggcaccggtgttagggaaggatgccacaatcgagcaacttctgcctattttcctttctcttttgaaagacgagtttcctgatgtcaggctaaatattatcagcaagcttgatcaagtgaaccaggttattggtattgatttgttatctcagtctctgttgccagccatagtagaattagctgaggatcggcactggagagttcgacttgcaatcatagaatacatacccttattggcaagccagttgggtgttggtttttttgatgataagcttggagctctttgcatgcaatggctaaaggacaaggtatactcaatccgtgatgcagccgctaataacatcaaacgcttggcagaagaatttggaccggattgggcaatgcagcacattattccccaggttttggacatggttactgatccacattatctgtatcggatgacaatcttacaagcaatttctctactagctcctgttctgggctcggagattacttcttcaaaactgctccctctggtcattaatgcatcaaaggatagggtacccaatatcaaattcaatgtagctaaagtgttgcagtctctcatcccaattgttgatcagtctgttgttgagagtaccatccgtccctgtctggttgagctcagtgaggatccagatgttgatgttaggtttttcgcctcacaagcactacaatctagtgatcaagtcaagatgtctagctagatcagtttgcatgtggtctttagttattttttttttcttataagatttccattttcttgtgtaattggcatgacgccaacttgccccatcctttgtatcacatataattgttgtgatcctgctttgctttcattttatccgtacctatgctaccgggttctttgtagtgatgaaacattgttcagaattgagatgggttttgacgaccactaattatatggtttaccaatgtgaagattttgtctgaaattttgatttaccaatacaatgaatatatttcgttctgtttaaaaaaaaaaagattataaattcgaacgacctcgtgcttgtttgtgttatg

SEQ ID NO: 908 - DNA, 1325 bp, Glycine max
acacacactgcaattcaaaacaaccaacctcttcagtgatctttgattagtactaagctaaaccatttcttattccctcaaaatcaaaacctttttctttctagctatttcccttttcaaatcatgccacctaacatcaccaccgttgttgccaatgtcaccaccgagcaattacccaaggctcgtggaggaagtgggcgtgccttcgtgacctttcttgctgggaacggtgattacgtaaagggtgtcgtgggtttggccaaaggactgagaaaggccaaaagcatgtaccctttggtggttgctgtgttaccagatgttcctgaagaacatcgtgagattctcaaatcccaaggttgcattgtcagggagattgaacctgtgtaccctcctgagaaccagacccagttcgccatggcctattatgtcatcaattactccaagctacgtatttgggagttcgtggagtacaagaagacgatatacctagacggtgacatccaagtatttggaaacatagaccacttgtttgatctgcctgataattatttctatgcggtgatggattgtttctgcgagaagacttggagccacacccctcagttccagattgggtactgccaacagtgccctgataaggttcaatggccctctcactttggttccaaacctcctctatatttcaatgctggcatgtttgtttatgagcctaatctcgacacctaccgtgatcttctccaaactgtccaactcaccaagcccacttcttttgctgagcaggactttctcaacatgtacttcaaggacaagtacaagccaataccgaacgtgtacaaccttgtgctggccatgttgtggcgtcaccctgagaatgttgaacttgatcaagttcaagtggttcattactgtgctgctgggtctaagccttggaggttcactgggaaggaagagaacatggatagggaagatatcaagatgcttatgaagaagtggtgggacatatatgaagatgagacactggactacaataacaactctgtcaatgtggaacgtttcacatcagtactattggatgctgggggttttcaggttgtgccagcaccttctgctgcctaatatgattcacagcttcggctcgaggtctaattaacgacaaagtatatatgtattgttatttgtttttgtttttttttttcgtttttgggtcttatgaacgaaccacgtctatagttttaatttggatgacctttttgtatacaaagtcacatgtgacgtcttacagcttttgattattattaagatttaattatatgagtcctttactt

SEQ ID NO: 909 - DNA, 816 bp, Glycine max
  misc_feature (628)..(628): n is a, c, g, or t
  misc_feature (630)..(630): n is a, c, g, or t
  misc_feature (634)..(634): n is a, c, g, or t
  misc_feature (636)..(636): n is a, c, g, or t
  misc_feature (662)..(662): n is a, c, g, or t
  misc_feature (665)..(665): n is a, c, g, or t
  misc_feature (702)..(702): n is a, c, g, or t
  misc_feature (712)..(712): n is a, c, g, or t
  misc_feature (717)..(717): n is a, c, g, or t
  misc_feature (721)..(721): n is a, c, g, or t
  misc_feature (727)..(728): n is a, c, g, or t
  misc_feature (739)..(740): n is a, c, g, or t
  misc_feature (743)..(743): n is a, c, g, or t
  misc_feature (745)..(746): n is a, c, g, or t
  misc_feature (749)..(749): n is a, c, g, or t
  misc_feature (759)..(759): n is a, c, g, or t
  misc_feature (761)..(761): n is a, c, g, or t
  misc_feature (765)..(765): n is a, c, g, or t
  misc_feature (774)..(774): n is a, c, g, or t
  misc_feature (784)..(784): n is a, c, g, or t
  misc_feature (791)..(791): n is a, c, g, or t
  misc_feature (797)..(797): n is a, c, g, or t
  misc_feature (799)..(799): n is a, c, g, or t
  misc_feature (804)..(805): n is a, c, g, or t
  misc_feature (807)..(809): n is a, c, g, or t
  misc_feature (814)..(816): n is a, c, g, or t
gcaaggatgcatgaggtgccccaataccatccatcttattctcttcaaagcaaacaaacaaataaatattcctatttccaaaactccatttcgcaatgagttattacaaccagcagcaacaaccgccgccagtcggagttccaccgccgcaaggttataagccggaggggtacggaaaggaaggctatccaccgccaggatacccgccgccgggatacccaccgccgggatatctgccgcaacaaggctatcctccgccgccctacccggcgcaggggtatcctccgccctacgctcctcaatacgctcagcctccgccccgtcaacaaaattcaaccggccctggttgtttggaaggctgtttggctgccctctgctgctgctgtcttttggatgcgtgcttctgagatgagatgacaaattcaaaactgtttgttttagcattggactcaatgaaatttgtttccacttctctctccctctctctttcctttgcttttcctgtttcttaatttgatgctgctcctccattacacttggacttggttatcaaatcacatcatgaacaatgagaggattcgcttggcttgggagtcgtaccattccacaattctcacaagttggctgnanattnanaaaaaaaattttggtaaaaaaaaaanatnggttggtttctttttttttaaaaaaaaaaaaaaaaanaattcctgcnacccngggnatcccnntattttaaaannggncnnccnccgggtgggnancccnactttttgntcccttttancgggggnttattncngagcnngnnngaatnnn

SEQ ID NO: 910 - DNA, 793 bp, Glycine max
  misc_feature (752)..(753): n is a, c, g, or t
  misc_feature (764)..(764): n is a, c, g, or t
  misc_feature (766)..(766): n is a, c, g, or t
  misc_feature (788)..(789): n is a, c, g, or t
  misc_feature (791)..(791): n is a, c, g, or t
atgaagtctgtttcaaaagtattttgttggctagtaatgaggtgtgaggatgtatgacctgccccccaatcccattcatcctctgactcttcttctcttcaaaacaaacaaataaatatccttttttccaaaactccattaccattaccattcacaatgagttattacaaccagcagcaaccgccggtcggagttccgccgccgcaaggttatccgccggaggggtacggaaaggagggatatccaccgccgggatacccgccagcgggatacccgccagcgggatacccaccgccgggatatccgccacaacaaggctatcctccgccgccctacccggcgcaggggtatcctccgccctacgctcctcaatacgctcagcctccgccccgtcaacaaaattcaactggccctggttgtttggaaggctgtttggctgctctctgctgctgctgtctattggatgcgtgcttctgagatgagatgacaaattcaaattggaattagacggaatcaactcaataaaatttgtttctacttctctatttcctttgctttatcttgccccttgttgactttttatttttaataataatactatgaaactattgttgcttccaaaggccaaactgcctgatttgtttattgttaagaaatttagaccttcctttcctgttacaaaagaaaaaaaaataaaataaaataaaataaataaaaaagaggggcgggccgctttctagagggatccaagnncttacgtagcngncgtgcagtgcgacgtcagtagnntnct

SEQ ID NO: 911 - DNA, 593 bp, Glycine max
attcatccgttgtgttctaagattaaggccattatatataatattttgtttacaacttcctgactcagtgacaggcatgctagttccctttatgctgttcaaaaacatgtcttttttctcccccttggtctgacacaagatttttcggtgaatgagactctagcatggaaagaaggaagtgagtttcttttcttattttgaacaccacagtgatgaacgaacacccatttgaggactgttaacgttccatattaacatctttgttggttacacttgaagttagaagcctcaagtgaagtgtacttgcatcttgttcttggaaaagttcagttgaatggggactcaaagaggaatagctcttctcagtttcacattcttcttgttggtgagctcagcaaatgctttgctttctcctaagggagtgaactttgaagtgcaagccttaatgggcataaaagattctttagaggatccacatggtgttctagataattgggatggggatgcagttgatccatgtagctggactatggtcacttgttcttctgaaaacttggtcattggactgggcactccaagtcaaagtttatctg

SEQ ID NO: 912 - DNA, 1283 bp, Glycine max
cccacgcgtccggccatgtgtcgcacatgggaagttctagcccgtaagaaaaatgaccttggagaactgccacttccaatggctatttatgttgtttctggagatgaagatggggagcgtggtggagcaccagttgtctgcattgaagatgcctccaaacgctgttttgagttttcaagtggcttagctgcttggacacctctacttttattggttcctttggttcttggacttgataaagtcaatccaaggtatattccattattgcgctcaacttttaaatttccccaaagccttggcatcatgggtggcaaaccaggtgcttcaacatacattattggtgctcagaatgaaaaagcattctaccttgatccccatgatgttcagcaggttgttaatatcagtggggatactcaagagcctactggtacttcgtcataccattgcaatattatgaggcacatacccctagattcaattgatccatccttggctattggattttactgccgagacaaagatgattttgatgatttctgctcccaagcttccaagcttgcagaagaatcaaatggtgcaccgttgttcactgtagctaagtctcggagtttctcaaagcaagtgagtaatgatgtgtcaggtgacaacactggattccaagaggatgatttccctggcatggactgcggcaatgatacagtaaccaatgaggatgattggcaactcttataaatgtgattgccggactatgacatggattcaaagtacaggtcaaaaatttgttgcttgattctcatgggcctaattgccactgcaagtttggttgatccctggcatggggattccactcttcaaacattgtttaatagtcttatagaaagtaatttaaattcattatgattctttggcttaaaatcatttgctcatttgttcgtatagctaaccaggtatttgttgtacattacaacggctagtttgatcatatttgttgcctgtacccttttatttgctacacaaatgtagtggatagtattgtgggactatcaactaaatggtagaaagtagttcatattgagagaatgttttctttaaatagaacatagcataaaccaatcacttgagtcccttaatataaaatatgggtaaagctctttagtagttgcactgcagtgatgtcgcattagctagtcacgtgaatgatctgtgagtgtgttttgtctagacattttagcatttgttccacacgttccaagaaatcaaatgtgattggagaaattgatagg

SEQ ID NO: 913 - DNA, 904 bp, Glycine max
  misc_feature (650)..(654): n is a, c, g, or t
  misc_feature (659)..(663): n is a, c, g, or t
  misc_feature (722)..(749): n is a, c, g, or t
aaaaagccaaaaacaaaacaaggaacatacctaagagtttgcgagagagacagagagagatgaagtggagtccgaaccaagtctcatagctgagagtttaggatcggaattctgccaccgttcttcttcatctcacctacaaccttaacctcatattagcacaaaattagtttgcttctatgagccaactgtcgtgttttcttcagcttcataatggtcttgaagggtctatgtgagaggattgtttcttcaaaatgctcttctaaaagctcaaccgagactgtagataatacacaggtgcccgtttattcaaaagcaggatctagtgactgtaagtttcccaaggcttccttatggtcaagcatctttacatctggtttttcagtggttgaaacatatagtgaatcatcagcttctgaaaagaaagcagttccttctcgaagtagtgggtgggcagctgctgtgaggaaagttgttactggtggctcaatgaggagatttcaggagcgtgtactaggatcaagcaggactgacatttcaagttctgatggtgatatatggcttctaggtgtatgtcataaaatttcacagcaagaatctatctggaggtgtatgatactagtaatggattggcatcatttgaacaagannnnncatcnnnnntcctagttacatatcggaaaggtctgttgaatgtatactacttccttttcagggatatnnnnnnnnnnnnnnnnnnnnnnnnnnnnatgcatactataggctttgatgctattggagatacaaagtataccagtgatgttaattggggttgtatgcttcgaagcagtcagatgctggttgctcaggtatgatgccttctatataatgattgcttttgacaaggaaattgttacatgatacc

SEQ ID NO: 914 - DNA, 1481 bp, Glycine max
cccacgctcgcggttaaacctcacaatcacaaacacactcttttttgttctttgctcacttcccttgttcgtttcactctcacaatggactccctctctctcttctgcaccggagcccttctcgccggcggcctctactggttcgtctgtgttctgggccccgccgagcagaagggcaaacgcgccaccgatctatccggcggctccatctccgccgagaaagtccaagacaactacaagcagtactggtccttcttccgccgccccaaggagatcgagaccgccgacaaagttcccgacttcgtcgacaccttctacaatctagtcaccgacatctacgagtggggctggggccagtccttccacttctccccctccatccccggtaagtcccaccgcgaggccacgcgcctccacgaggagatggccgtcgatctcatcgaggccaagcccggcaacaaaatcctggacgtgggctgcggcgtgggcgggcccatgcgggccatcgcggcccactcccgcgcgaacgtggtgggcatcaccatcaacgagtaccaggtcaatcgagcaaggatgcacaacaagaaggctgggttggactctctctgcgaggtcgtgtgtgggaatttccttaagatgccgtttgtcgacaacagcttcgacggagcgtactccatcgaggccacgtgtcacgctcccaagctggaagaagtgtacgccgaaatcttccgagttctgaaaccgggggcgctctacgtttcctacgagtgggtgacgacggataagtacagcggcgatgaccctgaacacgtggaggtcattcaggggattgagaggggtgacgcgttgcctggcctcagaagctacgccgaaatagccgaaacggcgcgtaaggtagggtttgctgttgtgaaggagcgggatctggccaagccgccggctcttccctggtggagccgattgaagatgggtaggatcgcgtactggcggaaccatattgtggtcactgttctcgccgctttgggaatcgcgcctaaggggaccgtcgatgttcatgagatgctcttcaagaccgctgactatttgaccagagggggtgactctgggattttctctccgatgcacatgatcctctgcagaaagccccatgacaaggacgaacaaaactctggttagggtttcgtttcatttggaaattggaaaacaaaaaccaccaccgccaccttgtttctttccggtactcttttttctcattattatcctgggtttaacttgttgttattagttattattactatgaacttggtgtaatttggattttgatcttttcaattttaattttagtttgcaatgttgatctttgagttgaggatgtctatttcttgttttcaatggaaattactagtatttagaatagagaaaagtattaattggaaaaaaaaaaaaaaaaagcccggccgtttgttttcaaaaaaaaaaaa

SEQ ID NO: 915 - DNA, 1520 bp, Glycine max
  misc_feature (1503)..(1504): n is a, c, g, or t
ttttttttttttttttgggaccaatggtttttccacttaattattaataacaacaacttaacccagcccacacactcactagcccagtccccaaagtaagtaaatccacaatcacaaacaaaacactctattactttttctttcctcacttcccttgttctcacaaagtcacaatggaccccctctctctcttctgcaccggagccctcctcgccggcggcctctactggttcgtgtgcgttctgggccccgccgagcagaagggcaaacgcgccaccgatctttccggcggctccatctccgccgagaaagtccaagacaactacaaacagtactggtccttcttccgccgcccaaaggagatcgagaccgccgacaaagtccccgacttcgtcgacaccttctacaatctagtcacagacatctacgagtgggggtggggccagtccttccacttctccccctccatccccggcaagtcccaccgcgacgccacgcgcctccacgaggagatggccgtcgatctcatcgaggccaagcccggcaacagaatcctggatgtgggctgtggcgtgggcggtcccatgcgggccatcgcggcccactcgcgggccaacgtagtcggcatcaccatcaacgagtaccaggtcaaccgcgcaaggatgcacaacaagaaggcagggttggagtccctctgcgaggtcgtgtgcgggaattttctcaagatgcccttccccgacaacagcttcgacggcgcgtactccatcgaggccacgtgtcacgcgccgaagctggaggaagtgtacgccgaaatcttccgtgttctgaaaccgggggcgctctatgtttcctacgagtgggtgacgacggataagtaccgaggcgatgaccctgaacacgtggaggtcattcaggggattgagaggggggacgcgttgcctggccttagaaactacaccgacatagccgagacggcgcgtaaggtagggtttgctgttgtgaaggagcgggatctggctaagccgccggctcagccatggtggagccgattgaagatgggtaggatcgcctactggcggaaccatattgtggtcactgttctcgccgctttgggaatcgcgcccaaggggaccgtcgatgttcatgagatgctcttcaagaccgctgactatttgaccagagggggtgactctggcattttctcgccgatgcacatgatcctctgcagaaagccccatgacaaggacgaccataactgagcgtttcattgggaaattccaaaactataacaaccaccaccttgtttctttccggtactctcttttttttttttcataattattattatcttgggtttaacttattgttattagttattattattactatgaacttggtgtaatttggattttgatcttttcaattttatttttaattttgctatgttgaaaaaaaaaaaaaaaaaaagaacgcggcttttgtttcaatgggatatttcttagnnatatgccaaagcgtaa

SEQ ID NO: 916 - DNA, 1906 bp, Glycine max
atatcagggcgagaagaagagagtgagtgaagaagcattatttccacttgacttgggtgtctccgcctttctcttctcaaatcaaatcaatgagcatggcttctctccccaattcccccgctctttcattctcctcatctctctccaccaccgccaatctcctcccatgtcgccgcttcaccgcattcccccgccgccgcgcctcttcattctccgtgcaagctaagatccgcgaaatcttcatgcccgcactcagctccaccatgaccgagggcaaaatcgtctcctggatcaaatccgagggcgacatgctctccaagggcgacagcgttgtcgtcgtcgaatccgacaaggccgacatggacgtcgagaccttctacgatggcatcctcgctgccatcgtcgtcgccgacggcgaaactgcccccgtcggagcccccatcggtttgctcgccgattctcccgaagaagtcgccgaagccaaagccaaagccgccaaatccgttccctctggctctcccgcccccgcctctccctccgacccttctccggcgactcctccgccacctcctccgccggccaagtctgtttcagaaggtccggcgaagatcgtggccacgcctcaggctaagaagctcgcaaagcagcacaaggtcgacattgcaacggtcgccgggaccggtccgttcggtaggattactccggcggacgtggaggccgccgccggaatcgcgccgtcaaagagaaatgtggctccggcggcgattcctgctccggcgactccagctcctccatcgaaagctgcttctggttctgctgcaccggctccgattccgggttctagtgttgttcccttcactactatgcaatctgcggtggcgaagaacatgatggagagtctatctgtgcctacgttcagggtggggtaccctgtgactactgatgcgttggatgccctgtatgagaaggtgaaaccaaagggtgtgacaatgacggctattttggctaaggctgctgcaatggcacttgttcagcacccggttgtcaatgccacctgcaaagacggcaagaatttcgtgtataacggtaacatcaatgttgctgttgctgtggcaattaatggtggtttgatcacccctgttcttcaggatgcggataagttggacttgtatctattgtcccaaaaatggaaggagctagtggaaaaagctcgtgcaaagcagttgcaacctcatgagtataattcaggaactttcacgctttccaatttgggtatgtttggagttgacaggtttgatgccatacttccaccaggccagggtgctatcatggctgttggcgcatcaaagcctactgttctggctgataaagatggattcttcagcgtgaagaataaaatgctggtgaatgtaacagctgatcatcgaattatttatggggctgacttggccgctttcctccagacattctcgaaaatcattgaaaacccagaaagcctgacattgtagtcattctgtacttccaacataaaattatctccaccactggatcacgactcgataatgtttgtttagaagctatttgactcaatgccgaacattttgtgatttttttccctcaactttcattgttttatcttttaggagctatcctgaggaccaatgatagattttttgacagggagaaacagctttaaaattgtttacagtgagggatgttctaaacggcaattattttgagaatctacatgtaagcaataagcggttttaacttttaaatgttggatttttcagtaaaaaattactttttactccttaaaaaaaaaaaaaaaaaaaaaactttttctccctcatcaggccatgcacgagaagataaataaaaatgaaagatgttgtgtaaaaaaaaa

SEQ ID NO: 917 - DNA, 1271 bp, Glycine max
tggagccttcagaagaagcttttgacattaactctgtgcctaaggaggtcaagttccagcctcttgcagaaaagaaagcccctggtaaaaagccaactggtttgggtgctcccccaagtggtcccccatcaactgcagatgcatatgagaggatgctttcaaccattccagagtgtgcaaactttgggaagcttttcaagtcctcagcacctgtggagctcactgaagctgagacagaatatgcagttaatgtcattaaacacatttttgataggcatgttgtgttccagtacaactgcacaaacacgataccagagcaattgttggaagatgttattgtgactgtggatgcttcagatgcagatgaattctcagaggtgttctccaagcctctcaggtctcttccttatgattcacctggacagacttttgtggcatttgagaagccagagggagtgccaacagttggaaaattttctaacgttctgaaatttattattaaagaggttgacccaaccacgggtgaggctgaagatgacggtgttgaagatgaataccagctggaggatctggagattgttgcagcagattatgtgttgaaagtgggggtgtctaattttacgaatgcatgggaaagcttaggccctgattttgagcgagtggatgagtatggtcttggtcctagagagagcttggctgaagctagcaatactggtatccacctacttggcttggagccttgagagggcacagacgaggttccacccaattcaagatcacacacatgctgattggcaggtgtattcatagggaatgcgaatgtgctcgtacggctgtcttttggacttgatggtccaaaggatgttgcaatgaaactgtctgtcagatcagaggatgaaacagtcagcgatgccattcatgagattgtggcaagcggctagttcttttagtcaaaaaatgttgactcaaatcagccccttttttggttaatgagattggagtttagcaggcaaataaatattgtcgtttgtaaagactttcaaaatggcagttgtttgtccttcactccctgcattattgttaaactagcaagtatcgcgtcgggtttattgcgataccccttcctcataaagaaacttcatttttcggtgtagtcaatgtaagatgaattttggggatttacctaatcaacttttgtgtcctcaataagatggatatttgttggcccaaaaaaaaaaaaaaaaaaaaaaaaaaaaaaaaaaaaagaaaaa

SEQ ID NO: 918 - DNA, 776 bp, Glycine max
gtcacagcagactacatattgaaagtgggggtgtctaatttcaggagtgcatgggaaagcatgggccctgactgtgagcgagtggatgaatatggtcttggccccagggagaatttggctgaagctgtaaataccgtcattaatcttcttgggatgcagccttgtgagggaaccgaggtagtcccacccaattcaaggtcacacacatgcttgttgtcaggtgtattcataggaaatgtgaaggttcttgtgcggttgtcttttggacttgatggtccaaaggatgttgcgatgaaacttgctgtcagatccgaggatgaaactgttagcgataccatccatgagattgtggctagcggctagtgcactttgtcaagaaatgttggctcaactcggcctttctttttgttactgagattggagtttagcagcctcatagatagccgtgtgtaaaaagaattgcaaaactgtacacttagtatatgcaatttattggtcgcccattgcatgctttgttagactagcaacaatacttaccagtattacgttgggtttgttggagtaaacttcaatggtgatgattatacttcttttatttgtagcaactgtaatacgaattttggggatttgcataaatatttgttttttcaatgatttggatatttgttaaaaataacaattgtttagtgcaaaagatgtcactattttgtgctttgaaaaaacaacaaacaacttaaaaaaaaaaaaaaaaaaaaaaaaaaatttttggggggggg

SEQ ID NO: 919 - DNA, 2428 bp, Glycine max
ccaatctcgtactccaactacaaagccctcctcgcccggctgcccgggtcgcccacgcgtccgctttttcttcttctctgtttgcaacaaacttgagtggtgcactcgcatcagtgcagaggcacctgcagagttgagattgtgctctttccagatctcgtagattccgcacatgtctcagccactcgtgaagaaggacgatgaccgcgacgacgaagctgagtattctccctttttgggaattgaaaagggagctgttcttcaggaggccagggtttttaatgacccacagctagatgctaggagatgttcacaggttatcacaaaacttttatacctattgaatcagggagagacatttacaaagaccgaagccacagaagttttcttttctgtgactaagcttttccagtctcgagatcttgggttaaggagaatggtctacctgatcataaaggaactctccccttctgcagatgaggttatcatcgttacaagctctctcatgaaggacatgaatagtaagactgatatgtacagggctaatgctattcgtgtcctttgtcgtatcacagatggaactctccttactcaaattgagcgatatctgaaacaagctattgtagacaagaatccagtcgttgcaagtgcagccctggttagcggcattcatatactccagacaaatcccgagattgtaaaaagatggagtaatgaggttcaggaagctgttcaatcaagggcagctcttgtgcaatttcatgccctggctttgctgcatcagatacggcagaatgatcgactcgctgttagcaagctggttaccagcttaaccaggggaaatgttcgctctcctttggctcaatgccttttggtccgttatacaagtcaggtaattcgggagtcaggaaataatacacaatcaggggaccgccccttctatgattatcttgagagttgccttcgtcacaagtcagagatggtgatttttgaagctgccagggcaattacagagctcaatggagtaactagccgagaattaacaccggcaattactgttcttcagcttttcttaagttcatctaagccagtcttgagatttgccgctgtccgcaccttgaacaaggtggcaatgacacatccgatggcagtcactaactgcaatattgatatggaaagtttaatctctgaccagaacagaagcattgccacacttgccataactactctattgaagacaggaaatgaatcaagtgtggaccgtcttatgaagcagattacaaatttcatgtctgatattgctgatgagttcaaaattgttgttgttgaagcaataagatcactatgcttgaaattccctttaaaatatagatctctgatgaatttcctaagtaacattcttagggaagaaggtggctttgattacaagaaagcaattgtagattcaattgtgattcttattagagatatccctgatgctaaggaaagtgggttgcttcatctttgtgagtttattgaagattgtgaattcacttatttgtccacacagatactgcacttcctgggagttgaaggaccaaaaacttctgaccccagcaaatatattcgttatatttataacagagtacatcttgagaatgcgactgttagggccagtgctgtgagcacattggcaaagtttggtgctgctgttgatgcactaaagccccgcatatttgtactgctaaggcggtgtctttttgatagtgatgatgaggttcgtgacagagcaacactttatctgaacacacttggaggtgatggttcagttgtcgagacagataaagatgtgaaagatttcctctttgggtcatttgtgatcccgcttgtcaatctggagactagtttgaaaaactacgagccttcagaagaggcttttgacattgattcagtgcccagggaggtcaagtctcaaccacttgcagagaagaaagcccctggtaaaaagcctactggtttgggtgctcctcctagtggtcccccatctactgcagatgcatatgaaaggctgcttctatccattcccgagtttgcaaactttgggaagctttttaagtcttcagaacctgtggagcttactgaagcggagacagaatatgcagttaatgttgttaagcacatttttgatcggcatgttgtgtttcaatacaactgcacaaacacgataccagagcaattattggaagatgttattgtgattgtggatgcatcggaagcagaagagttctctgaagtgttctcaaagcctctcagatctcttccttatgattcacctgggcaaacatttgtggcttttgagaagcctgagggattgccaattgctggaaaattggcgtatgcctctggcatggtattgttaaagaggttgacccaaccactggtgagacag

SEQ ID NO: 920 - DNA, 697 bp, Glycine max
aaatgagttatgcaccccagtcagatcaacaaatagagattggagacttttactccagtcacctcaacacatgatccaatggttgaattccaaatctcacactttctttttgtttttttggttcaagtatgactgcaacaattcatctaaacgcttaaaatctggttcataaatcataagcagagtgaagtgttccaagaattactgacacatagcagtttatgaaacaagtgcatgtgtaaaggaacaaatagaaatccacgcaattaaatttgaagtgctcgggagtaccagaatttattcgagcacaagaacattgcattggaaaaacaaaaacaaggaaaattacaaagcacaaggcaaaattacaacataattcaaattcaagaaagagaatccttctgactggcctgctgctgcaataattcttctctaacccttctgatctcggcttccttctccaacctctctttcttttcgtcttgacggagagcgatccagacatggagcttgtccatggactgccagaacacgaaggctcctagcgtcatcgcgaagtacgtcgccactttcaccatctttctttctttcttcttctctgcttcgatttactttcagtctcagaatctcttttcttttccccttgtaatcaaaatctctgttttcccctctcctgcgttcgtcttctcgcagccgt

SEQ ID NO: 921 - DNA, 1548 bp, Glycine max
  misc_feature (14)..(14): n is a, c, g, or t
  misc_feature (1315)..(1315): n is a, c, g, or t
  misc_feature (1321)..(1321): n is a, c, g, or t
  misc_feature (1329)..(1329): n is a, c, g, or t
  misc_feature (1342)..(1342): n is a, c, g, or t
  misc_feature (1351)..(1351): n is a, c, g, or t
  misc_feature (1362)..(1362): n is a, c, g, or t
  misc_feature (1369)..(1369): n is a, c, g, or t
  misc_feature (1392)..(1392): n is a, c, g, or t
  misc_feature (1404)..(1404): n is a, c, g, or t
  misc_feature (1406)..(1406): n is a, c, g, or t
  misc_feature (1478)..(1478): n is a, c, g, or t
  misc_feature (1490)..(1490): n is a, c, g, or t
  misc_feature (1494)..(1494): n is a, c, g, or t
  misc_feature (1506)..(1506): n is a, c, g, or t
  misc_feature (1509)..(1509): n is a, c, g, or t
ttagtgaactatanatacttgactcgctgccgcgtactagctggattggcgggaggttagcataaatcatattttgattttaaagggagggaaaaaaggggaacttggtgggagagagcacagaccacaggggcatgtctcaaaatttgttgcaaagtgtatagttgagggtttggtactttggtttcatttagttaaatttgtttgtgtctggaattgccgcttgtttgaaaatgtctctctttgctgcattttccatttgtaaagttgccaaggatgcagctggagttgcaggaaatgtgtttgcttttgggttgtttgtgtctcccatacccacatttaggaggattatcagaaatgggtcaacagagatgttctcagggttgccatatatttattcccttctgaactgcttgatctgcatgtggtatggcacacctctgatatctgctgataatttgttggttacaactgttaattcaattggagcagtctttcagtttgtgtacacaatcatcttcctgatgtatgctgagaaagcaaagaaggtgagaatggttggattattgctggcagttcttggcatgtttgcaatcgtattggttgggagcttgcagatagatgacgttataatgcgtcggttctttgtggggttcttgagctgcgcgtctctcatttcaatgtttgcctctccattgtttataattaaattggtcattcagacaaagagtgttgaattcatgccgttttatctctcactttccaccttcctaatgagcacctctttcttactttatggattattcaacgatgatgcctttatttatgtgccaaatgggataggaaccatattgggattgatacagttgatattatacttctatttcgagggtaaatctagagtgaactccagagaacctttgatagtgtcatatgcatgatcagttctgctgaaaagactggagaatcagagttagaaatgaccttttgctgctagatgtggtctgaaactggagttggcaacatccctgtctgtttgattcaatttataggagagcaattaccgttgcatctttgagagagaccagaagttgtgataatgaataacttgaaattgtctatatcatagttaccatatatctggtacaagtactggtacgtggtacttgtagttgtaggtacagatggccagttttttacattattattactagactttctttaaagagaacacggtatgcagtttgtggtacgttgaatacagcacacaatatgcaggattaactatggtctgtatatttatgcaagccttganaaggtnaaccatgntccgaaatgggantatttcaanaaaggcacatngcacctntcctgcagtcgttggtggtgctntaggctggcttntnttgcagtgaggccatttccaagttcatcagatgtttacagacaaatatgtacacattatttgagtggcatanattatttattanagtntgatgttgatcnccnaataaaaaaaaaaaaaaaaagaaaaaaaaaaaaaaaaaa

SEQ ID NO: 922 - DNA, 1079 bp, Glycine max
aaaaattaaggaacattgctacaaaaacaacacatactatatataaaaaaacacacaattccgataacattattcccagccatcgcaagctgcatttggggatggtaatgggacaacagaaaatcgccctcgcccctccctcttcgtccttccgcctccgcagccgcagcctcaactccctccgcctccgccgcatcttcgacatgttcgacaagaacggcgacggcaccatcaccgtcacggagatcagccaggcgctgagcctcctcggcctggacgccgacgtggcggagctggagtccatgacgaaactctacataagacccggcaacgagggactcacgtacgaggatttcatggcgctgcacgagtcgctgggtgagacctactttgggttggtccaggacgaggaggagcagcagcaggattcggatctgtgggaggcgtttaaggttttcgacgagaacggcgacggttacatctccgccaaggagttgcagatggtgctggggaaacttggcttggttgaaggaaatttgatggacaatgttcataggatgattggatctgtcgacaccaaccacgatggtcgtgttgatttcgatgagtttaaggaaatgatgcgcgccactattgtcccggccagtgcttgattcactaccggatttggcttcttacgatcactcatccaattcaaaatgcttctaacttttttggtttcatacatacatagttatcttttcatggaaataaataataattctgttccagatgttaatactttaattttcttaggagagattgaaatctcggtttaatttcaaggaattcgatcgatcaattcaggttctgtcattgcaatttgtttcttaggtttcctttcaattagtttgattgcgggtatatatgaatgaatgttgtatgctgttcaataccagctcttcatattaccctcccatataatatgcagcctcttgatcaaaagttttcatatatatatggtacacatgtaaacgattttataacaaccaatggagttaagctaaaatatactcgtagtacttttgttctcgtcttaa

SEQ ID NO: 923 - DNA, 1085 bp, Glycine max
cccacgcgtccgcccacgcgtccgatctcataaagccttctttcatctcattttcatacactttattcgtttcttaatttcctactcttctcacctgagaatttaatttgtcatttagacatggagcttagttttaagcaccaacttggccttgtttgtgtcataatgctctttcctgcactgtgtttctgccaggaatatactaaatccagagcaaccttttatggtacctctgatggctatgggactccaaccggagcttgtggctttggtgaatatggaagagcgatgaattggtatgatggaagagtcgcaggggtgtctgatctatggaggaatggagctggctgtggaacatgttatcaggtaaggtgcctagtaccagaattatgtgatacgaatggagcatacctggtggcaacagaccaaggttatggagacagaacagactttgtcatgagcccacgcgccttcttgaaattgggacgtgatgaatattcatctgaagagcttaagaaatacggcacagtggatattgaatacaaaagggttccatgcacatacaccggcaatgtcttgttccacatcaaggaaactagcaccaaccctggttactttgctttggtcattctcaatgtaaatggaatacacgacgtcactgctgttgaattgtatcagatgggacaatggaagtcacttaacaggaactatggagcagtgtttgactttcctaacccaccaagtggcgaaatccggttaaggtttagggtgagtggcatgtctgattgggtggaccccatgattgtcatacccagtaactggcagcctggaaatacttatgccaccaaggttcagcttaaatagaaagaatcccaggaacagattacaaataataggcactagagtatattcagtttgtttcttatatggtgtcactcaatgttctattgtggaaagggactagaataaagggatattcatgtacttcccatttaagattacatgtaataatgaatcaaataaaattgtcctgttgttgttaacttcaggtatgtgttcggggtgactagttctctctctctctc

SEQ ID NO: 924 - DNA, 1685 bp, Glycine max
  misc_feature (4)..(4): n is a, c, g, or t
  misc_feature (12)..(12): n is a, c, g, or t
  misc_feature (14)..(16): n is a, c, g, or t
  misc_feature (20)..(24): n is a, c, g, or t
  misc_feature (26)..(26): n is a, c, g, or t
  misc_feature (28)..(33): n is a, c, g, or t
  misc_feature (35)..(36): n is a, c, g, or t
  misc_feature (38)..(43): n is a, c, g, or t
  misc_feature (45)..(47): n is a, c, g, or t
  misc_feature (49)..(52): n is a, c, g, or t
  misc_feature (57)..(57): n is a, c, g, or t
  misc_feature (61)..(61): n is a, c, g, or t
  misc_feature (63)..(63): n is a, c, g, or t
  misc_feature (74)..(75): n is a, c, g, or t
  misc_feature (77)..(78): n is a, c, g, or t
  misc_feature (82)..(82): n is a, c, g, or t
  misc_feature (84)..(85): n is a, c, g, or t
cgcncccccacnannnccannnnntncnnnnnncnncnnnnnncnnncnnnncttantttncnttttcttgttnntnnctgntnnttcaaagagaaaaaagtagagcaggttttatcagtaaattagcaaacaaagagaccattacaatgacaatgaaggtgacattatctgcataaaaattatccttcccaaattcagaattccttgtccctaataagattatcaagtaacaaccataaaactgtttcccttcagcccttatcaaagtctgctcatatattctgcaactgggaaaaggagatgcgaacaactgatccagaaagtggacttgcatgcttgcacacaagggcttcagtagcctgctcctcagtctcaaactgaacaagtgcctgtttttttccattcatctcaaagaccttgctgttgacaatggttccatgctcctccaaaaggcttacaacctcctcttcagttatgtcttgcgggagggtggacaagtggaccatttttgtcggtgagcagcagtaccgatagttcttggcagcattacgattgaatcgattgagatttgaattgacatactcatgtgtatcagcaccttgggttatgttcgcatgcttcgaatagttgacctccaatcgctttccaaacaacatggctcccttcagaaaatgtactgccaattcagcttggaaaccatctcccatttggataagtgcatgatctggcttatttcggagaagtttaattctgacaatgttcccataaatggagaacaagttgaacagtttatcctcatctattctatcaggattgagatttgcaacaagaactgtacacctttcatttgttccagttatgccaggaggcaaacctcccccaaaggcagctgcaattgccgcagcattggccatctgagagaacccacctgccctggctcctgaatacatgcctgctgcatcaccatatccaggttgtgaagatcgacctttctgctctgtaggcagattagggtttgtggggttgtgaagtcccttgaacggtcattattgtagttcacttgtagttcatcaaggtttgagaactgaatgtccagctgacaacaaccatcataaatattgcgtccctgaagagtacttctggcagtaacagcactttgacgggattgatactggatgagagcctgaaagccagctgacttctggaatgttacaatcttttccacaaatccatggggagaaaacacttgatgtagcacatccgctgttataggatacagcatgtgatgaactgtaactaagagaattcgatttggctcatcttctcgtgcttgattttgatccattgtagttagttcttgatgtgaggaaaactggacataaacatttctcccccttatgcttggctggacatttgcataaaattgtaaagcattaactgcagaaggaatatcttgcatttgaagaagagcctgatttttggcacgcaacatcacaagctttgttattactccaaaaggctgaaatagttgaagcaaatcattttcagatatctcatgccccacatttcgaacgtgaatgaccttggaaggttcagccattgcaaattacctccaaaatagtgagtgagagagagaacgaaggaagggggaagagagaaacagaacaaggttaacaagaggagg

SEQ ID NO: 925 - DNA, 829 bp, Glycine max
gcacgcatgacgcacgctcggatcctgtataccccgtcgaccttcgtcctgtttttttacttagttggacaagaaaattgaaatggattgagaatactacagaaaggcatacttagcctgaattatagaacatatacaacaatcattataaaaaccataaggcaatccctcaactctgaagaaggtagtaacttccctccccacttttctattcttcaagactacatccatctgcaataataaagcttgccccacaacattatgttagaaacctaaacatctctagtagaggcaatggagatgagaagataaatgattcaaagagaaaaaagtagtgcaggttttatcagtaaattagcaagcaaagagaccattacaatgacaatgaaggtgacattatctgcataaaaattatccttcccaaattcagaattccttgtccctaataagattatcaagtaacaaccataaaactgtttcccttcagcccttatcaaagtctgctcatatattctgcaactgggaaaaggagatgcgaacaactgatccagaaagtggacttgcatgcttgcacacaagggcttccgtagcctgctcctcagtctcaaactgaacaagtgcctgtttttttccattcatctcaaagaccttgccggacgcgtgggttccatgctcctccaaaaggcttacaacctcctcttcagttatgtcttgcgggagggtggacaagtggaccatttttgtcggtgagcagcagtaccgatagttcttggcagcattacgattgaatcgattgagatttgaacccaagcgaaaacggacgcgtggg

SEQ ID NO: 926 - DNA, 1551 bp, Glycine max
gcgctgcggcgaagggagagggagaggggggggggcgcacctgctcgagcggggtgggcgcgcggccgggggaggaccgcggagatgtgggttgtgtgttggctgggttgtgttttttttggtgtggggaatttgggtgtggggggatttaatcacaattttttccccccgcccggggggaccgacggttttttgggcccccggtgtttttagtaccacaaaggggcgggaaagatttataccgcccccccctttaaaaggggggcaccaaaaaaactggggagctctccccccccccggggggcgggccgcctcttagaaaataaggtgggatccccccggggcttcccaggaattttgcccggagggcccttggcttagaacatccttcgccccttcaaacttcaaagccctcctttgcctctctctcttcgcttattgttgcaccttcctcgtaaaagataactcccggtcggcgtgcatagccgccgattgaggcaaaaaaaaaacacaaaacacactgtagctcatcacagccaaacgcggcgtcaacgatgacgagcttctgaaattccaacttcgcccttcttctctgtgtatattcttttttatttatttattattatttctattattttttcggtgaggttagctccatgcctagtcccaagagcagccgcagcggccagatcgagagtcaccggaggggaaggtcgtcgtccttccacggccagtgcgcgatgtctgtcggtcagctccaccgtccgaagacggtttccgacctcccgtcgctcagaagcctcgccggaacggcgccggcgcctatgccggagggattgcctagacagccgccgaagatgctgctgaaggtgacggtgctgagaagcctcgcgcccgtgcaggtgctgatgacgccgggatccaccgtccgcgacctgatagcggcggcggtgcggcagtacgtgaaggaaggtcgccggccaatcttgccgtccagcgaagtctccgaattcgacctccattattcgcagtttagcctagaaagtttggataggaaggagaagctgctagagcttggatctaggaacttttttctatgtccgagaaagccagctacaacagtggaagatggcgtaacgacgtcgtttgcgtcttgtgcgaaagaggcagagaaagagagggagggatatggtggtggtggtggtgggtttgcttggttcaaactcatgcagttcatgatgtgattggttggttgattagtcattattgttattttatttcaattgaaatgtctttttatttgtcccagaatgaatggccggttacttgtaaaaaataataggttggcttggcaattaggtacagggtttgagatttgtgtgtaagcaaagcaaaattgtaaaatagcatgtatgatttttaaacacatacatggtaatgttaaagctttcaattgcaaaattgtaaaaattatatgtataatcttatagttccttaatttggttcaaaaaaaaaaaaaaaaaaaaaaaaaaaaaaaaaaaaaaaaaaaaa

SEQ ID NO: 927 - DNA, 1183 bp, Glycine max
gcaccagcctctcccttcgcttactgttgcaccttcctcctaaatgattactcccgctcggcgtgcatcgccgccgattgagctcaacaacaacaacaaaaaacaccataaatgaccagcttctgaaattccaacttcgcccttcatcttcgtatacttttttatttccggtgaggtgagttccatgcctagtcccaagagcagccgcagcggccagatcgagagtcaccggaggggaaggtcgtcgtctttccacggccagggcgtcatgtccgtctctcagctccgccgtccgaagaccgtttccgaccttccgtcaatcagaagcctcgccggaacggcgacggcgactttgccggagggcttgcctagacatccgtcgaagatgctgctgaaggtgacgatgctgagaagcctcgcgcccgtgcagatgctgatgacgccggaatccaccgtccgcgacctcatagcggcggcggtgcggcagtacgtgaaggaaggtcgccgtcctatcttgccggccattgaagcctccgatttcgacctccattattcacaatttagcctagaaagtttggataggaaggagaagctgctagagcttggatctaggaacttttttctgtgtccgagaaaggctgccacgacagtggaaggtagcgtaacgacgtcgtttgcgtcttgtgcgaaagaggcaaagaaagagagacagggatgtggtggtggtggtggtggttttgcttggttcaaactaatgcaattcatgatgtgattggttggttacttggttagttattgtttgtttgtttgtttcaattgaaatgtcttttttatttgtccagaaccagaatgaatggccggttacttgtaaaaaatgataggttgcctggcttggcaagtaggtacagggtttgagatttgtgtgcaagcaaagcaaaattgtaaaattgcatgtatgatttttcaacacatacattgtaatgttaaaagctttacattgcaaaattgtaaaaattatatgtataatcttatattgctcttcctgtgtcgcgagaaacacgatggacggcttcggtttgtctgttccagtttcttaatgtaagaaaattagtatatttgaataaattgaaaattattaataaaaaaaaaaaaaaaaaaactcgaactagttctctcctggtgc

SEQ ID NO: 928 - DNA, 2014 bp, Glycine max
tttttttttgctgcaaaacggaaagagtagaccaattgatagatacttcaaaaacaatcacaaaaagtagcttcttgctcaattggaatagaaaattttgacatcgattgagaatgcaacagaaaagcctacttactactttagcctgaattacaaaacatatacaacaatgatttataaaaacggctataaggtagtgaatccccctccttctattccccaagaacctatactcaataacaaaaatgtacacctccccactacattatgttagcaacctaaataaatagcagggcaatggagatgagaagataaatgattaaaggtgaaaaatgaaagagtagatattatgagtaaataagttagaaagccaagcaaccaatacaagataatgaagatgaccatcatcagcataaaaaatatccttcccaaattcagaatccttgtccccattgtgttcaataaccgttgctctggttgtccacaactccttaataaagactcatatattctgcaactgtgaaaaggagatacggattactgagccagaaagtgtgcttgcatgcttgcacacaagggcttcagtagcctgctcctcattcccaaactgaaccagagcctgttttttcccgttcatctcaaagactttgctgttgacaatggttccatgttcctctacaaggctcacaatctcctcttcagtgatgtcttgtgggagtgtggacaaatggatcatctttgttggggagcagcagtaccggtagtttttggctgcgttacggttgaaacgattgagatttgaattgatgtattcatgtgtgtcagcaccttgggttatgttcggatgcttggagaagttgacctctaatcgtttctcaaacaacatggctcccttcagaaagtgtacagccaattctgcttgaaaaccatctcccatctgaataagtgcatgatctggtttatttcggagaagtttaattctcacaatattcccataaatagagaacaggttgaatagtttatcctcatcaattctatcaggattaagatttgatacaagaactgtacacctgtcatttgtcccagttattccaggaggtagacctcccccaaaggcagctgcaatggctgcagcatttgccatctgtggaaatccaactgccctggctccagaaccttgagcagcatacatatttcctgcatcaccatatccaggttgtgaaggtcttcctttctgctctgtagggagatttgggtttgtgaagtcccttgaacggtcattattgtagttcacttgtaattcatcaaggtttgagaactgaatgtccagctgacagcaaccatcataaatattgcgtccctgaagtgtacttcttgccgcaacagcactctgacgtgattgatactggatgagagcctgaaagccagctgacttctgaaatgttacaatcttttccacagatccatggggagaaaatacttgatacagcacatccactgtcataggatacagcatgtgatgaactgtgactaagagaattcggtttggctcatctcctcgtccttgactttgctccattgttgttaattcctgatgtgaggaaaattgaacataaacattcctcccccttatgcttggctgaacatttgcataaaattgtaaggcattaactgcagaaggaacatcttgcatttggataagagcctgattttttgcacgcagcatgacaagctttgttatgactccaaaaggctgaaacagctgaagtaaatcattttcagatatttcgtgccccacatttcgaacgtgaatgaccttggaaggttcagtcattgcaaattaacctgaaagagggtgacacggaaagagaaaaaggatgagagagttaaagaggagtggcacgcatgatgtggtgggggggggggcctacgtagctgaaaactcccttcccttggagcattttacaagagagagaaccttaattgaatttaaggttccaagtgtaagatttgc

SEQ ID NO: 929 - DNA, 2392 bp, Glycine max
gagagtcgagagaggagaggagagaaatttgaagaaacagcaaaggaaaatttccaattttgatgtcttctcttttactgtatgtaatgtgagtcatgtcacttcccaacacctaccactgataattccatgccttcttcttattaaccccaccacttgcctctcagaatttcatgtgcctcatcttgtgttctccacttccctccaactgcaccacaacagggcctggttagtgccattgctgtgacctcctccttcaagtgatgagagggggtctcagaagttcacatttcaggttggaatcagacacccttttgagcaattaagaaaagccagaaagcaaaatctcaaattggtaaggttttgtcaatggggttgaacttgtggtgctacaatggcttcacaaccaagagggttttgggagcataagagatctagtgtttaagttgcttcagggtctgaaaaaggtgcttgagagttggctcgctgccggcatggttctttggctttggcagcagcaaaatggcatctgatctgaattcggggttgtccaagaaaacatttgtttttggattgaaagtgtgggtactaatgggaataatagttggattattcatcataatcattctcgtggtgctatcaatatgtctcactttacgaaagaagttcagaagagtcaatggcaagcttccacttagccatgtgatatctgtttcagacgagatcaaagaaatcaaagtcgatcaagttccagcaaataatcatcctcaaaatggtgtctttacgagtctgaatgacaaatttggtgacagggagtctgaaaaggttttgaaccaaacaaagaatggggataatagtagtcaatcaggttcatctaatcatttagagaaagatgccaatggctctcaatcaggtgaagacagcggtgttaagagtgtttctgcttacagatcttcttcgcatcctataaccgcaccatcccctttgtctggtctgcctgaattctctcaccttggttggggccactggtttacattgaagggacctggaacttgctacaaacaggtttgcaaaagataacgttattggtgaaggtgggtatggaattgtttatcacggtcaattaatcaatgggaatcctgtggccattaagaagctcctcaataatttaggacaagctgaaaaggaattcagggtagaagttgaggctattggtcatgtgcggcataagaacttggttcgacttttgggatattgcattgaaggcactcacaggctgttggtttatgagtatgttaacaatggcaatttggagcagtggcttcatggagccatgcgacaacatggctttcttacttgggatgcacggataaaaattctccttggaacagctaaagcgctggcctacttgcatgaggcaattgagccaaaagttgtgcatcgagatattaagtcgagcaatattctgattgatgaggactttaatgccaaaatatcggactttgggttggctaagttacttggtgctggaaaaagccacattacaaccagagttatgggtacttttggatatgttgctccagaatatgccaattctggcttgctaaacgagaagagtgatgtttatagctttggggtattgctccttgaagcaattacaggaagagaccctgtggattatagccgaccagcagctgaggtaaatttggttgactggctcaagatgatggtggggtgtcgacgctcagaagaggtgttggatcctaacattgagactaggccatcgacaagtgcccttaagcgtgccctcttgactgctttgaggtgtgttgatccagatgctgaaaaaagaccaaggatgagccaagttgttcgtatgcttgaatcagaggaatatcctatactgcgagaggatcgaagacgccgaaggagtcaggcaggaaacatggaagtggagactcagagggagaattctgatactgataagagcgacaatccagattataagcccagtggcagaaggaaccaacgcatgtagcaccagttatctcaaagaatttccagaatgaagaacacaagtgaactgggaaattttgcattcttttgagcttctgtaagttctgatgcgcctgccactttttacatgaaaaacatggagcaggaaccagttactttagggtggtttatatataactgtctgttatattgtagatgttagaatgtagattattgtgtatgaatatgggattgaacagctcccttgcactaattgtgctgtgtacagtcctttactattcttgccttttatcctttcattgtgatggaggaagaactacccttgctttctggaagatcagaaaaaagataagctgcttgttcacatctccagtgc

SEQ ID NO: 930 - DNA, 825 bp, Glycine max
  misc_feature (821)..(821): n is a, c, g, or t
aaaaaaaaggttaagtaaatttttttttcttaggtcaattataaatataaattataacattcaaaatcaaaaggtagagaacaacaacggagaacacatggcctcgccattttaacaacgaaggaactgcccctatagaacaataagaactggtacagaaaattcaaggtaatcacacatgaagtaactgggtgaaatactggaaaattaataagaagtggcactaagatatatttgccacatataagggcgaaccaacattgaaccatttatttctgtgcatattttggccttcacattttactggaaagaggaagaaacttggtatgacgcccctgggcaaaaactttgccagtttttttcttcttgaactccacgcttataacggcaacagccttccctacacgcaaagccctggcctcgatctcaatctcctcatcggcataggcagcatccaaatacgaaacattaatctcaacagaaaccccagtattgggagccgaatatccaacggtgggaatcgcagcggaccccaccacgtcgaccagagcagcgatggcgccaccgtgtaacgaattcccagcattgagtaaacgcggaggtatcttcatggagcagacaacgcgaccagtttcgatgagatcgaccttaagagcgttcattattaacggttccagaaacctcggaggcaacccatccaccgccgatgctgtttctcctcctttctctaagtacctcttcactgcttccaagtccattttcacttttcacttttcacttaaccttctttccaccttcttctcgcagccgtcggacgaaancacc

SEQ ID NO: 931 - DNA, 1108 bp, Glycine max
ctgcagatatatattggcagtggcaaatggcatccgatctaaattcggggttgtcccaggaaacgtctgtttttgggttgaaagcatgggaattgatggggataatagttgggttgttcattataattattctcgtggtgatatcaatatgtcttacttcaagaaagaaatctagaagagtcaatggcatgcttccccttagccatatgttatcggtttcagatgggatcaaggaaattagagttgatcaagtttcagccaataatcatcctcagaatggagcttttgtgagtctgtatgacaggtttagtgacagggattctgaaaaagttttgatccaaacaaataacggggaaaatagcagtcaatcaggctcatttgttcatcttaagaaagatgatggctctcaatcaggcgaagaaagtggtgctaagtctgtttctacttacaggtcttcttcacatcctataactgcaccgtcccccttgtgtggtctgcctgaattttctcaccttggctggggacactggtttacgttaagggacctagaacttgcaacaaacaggttttcaaaagacaatgttattggtgaaggtggatatggtgttgtttatcagggccagttaatcaatgggagtcctgtggctgttaagaagctactcaataatctaggacaagctgaaaaggaatttagagtggaagttgaggctattggccatgtgcggcacaagaatttggttagacttttaggctattgcattgaaggcactcacaggttgctggtttatgagtatgttaacaatggcaatttagagcaatggcttcatggagccatgcggcagtatggttttcttacttgggatgctcggattaaaattcttcttggaacagctaaagcgctagcttacttgcacgaggcaattgagccaaaagttgtacatcgagatattaaatcaagcaatattctaattgatgatgacttcaatgccaaaatatctgactttgggctggcaaagttattgggtgctggaaaaagtcatatcacaactcgagtaatgggtacttttggatatgtggctccagaatatgccaattctggattactaaa

SEQ ID NO: 932 - DNA, 1088 bp, Glycine max
tgattagcaagtcttcttacacacgcaccgagtccatttttcaattccgtgtgcccactcacttcatcagaccgaccacgcctaaatcccaattcccaaattcctcccattagggtttctctctctctctctccaattcatgttctcttattcttgattgattctcttctattcgattcgattgttctatggaaccgcagcttcagcccaagctggaccccgcgccggaggttgttagcggtggcggtggggattcggagaagtcgcatgtcagtgatgtcaccgaggttcgcgacgttgacatggcgcaggcaaacggcgcttgttgcccttccgttttgaaacggaagcgcggtcgcccggccaagggaaaccgcgttccgaaagggattataccgccgtcgaggcagaaacaggaagaagaggatgtttgcttcatatgcttcgacggtggaagcctcgttctctgtgatcgccggggatgccctaaagcgtatcatccctcgtgtattaagcgagacgaggccttttttcgctcaaaggccaaatggaattgcggttggcatatatgtagcacttgtgggaagggatcacattatttgtgctatacctgtacctattctttgtgcaagggatgtacaaaaaaggctgattttgtctctatcagagaaaataaaggtttatgtggaatgtgcaagaagactataatgcttatagagaattgtgcccagggtgacaaggcagcgtgtgaggtggattttgatgacaagagcagctgggagtatcttttcaaggtgtactggacgtatttgaaggagaagctatctttgacatttgatgagacccttcaagctaaaaatccgcacaaaggagctgcacgactacaagcatctgcgcgttgcgccgcccgcgcaacgcaccatactgacccgcccaacgcacgcttccctccacacctccccgccacttgcccccgcccgggccccccccaatcccccccacgcccgccgatctgcgcccacaccgcccggcaccctcaccgagccgaattcctacaacatccttactgtgtactcgcttcactccct

SEQ ID NO: 933 - DNA, 1645 bp, Glycine max
aaaattttgtttctttgtgtgtgtatggtgatgataacttaattagtgttcaaaaaatgtgtcattgccaaacaacagccaacagctgtctttgggaaccaatagtacattggaaaataaagaaaatagtcaggatggtggtgagaatgagaacaatgcgacaaggaatggaaattctgcaaaccatcaaattgttgagcagtgtgatgagcaaaaagtggctgatacttatacacaatctaatggtaaagatgaatctgtaaggagcaatggttggaactctcagtctccaggtttgactatacaagcagatgggaataacaatgaggggcaaagtggaaattctgaaaggatggaggagtcacccaaatgtgaaatttcttgtcatgacatcccccatgtatacacttcactgccttcaactgcattttctgagaaactgaacgagaatccttctgataagttaacagaagttcataagattgaagtaatgtctgaagataatggaaattctgtcttgaacagagtttctgagggtcaaagtaatagtgggcaaagttgtcagaaacaatcagacagtgaggagaattcagggctatcttctggtcagaactggagatgccctgatgtaactaatccagtatgtaacatatctacatggctatcaatctttggtgaaccaaatgatttggatgagtcagtttcagatctgttggctgaagtggaggcaatggagtcacttgggggcctggaatctcccacttcaatcatgaaatgtggtgaggagttgactgacggttctataactgattgtcttagttttgcagatgcgcttagcccaatgcttgatgcaggtaagggtgatgcactaagctcctcaggtgatttatacttaccatctcaaaccacaacaccagatgaaccgtttaagcaagcagatgtatatcatcctcaaaaaatatccggggagcattcaacaaagagttcagaagttgagtctactttctctaggataagctggaatccaattattcaatattcctgggatccacctaattgttgacatgacagattatgttgaaggccatttttcttatctttaggcgacacatatcttagacaaacttaatttggatagatattatcctgtttataacagcattctttgcaaacagtaacctctcgccttcattgtttgcttgttgatgaagaaaagaaagagcgttagggttcttcgtagtcttgtctattctatgtaatctcattgaattttaaatgtgaagaactttcttaggttttattgtttgacagatccgtattcgtctttccttcaaaatttcgaagaaattaataatttacgggatgtatatctgttcttcgagatctttagattgaattgtgcaaatatagtaccaacatcccaccggtagttgcacgagtagggtcaggaaactcggaatcaagttgcttgtgatagattaagttggctccaacgttgtaagtattagtaggccatttccgaattatgaaggagggaattgacattcattgtgattactataatttgtttaaacggtgtcatttcttttatattttgaaattttgttaactttgttgttgaaatttgattctaatgaataaaaaa

SEQ ID NO: 934 - DNA, 1613 bp, Glycine max
  misc_feature (1594)..(1594): n is a, c, g, or t
  misc_feature (1597)..(1607): n is a, c, g, or t
  misc_feature (1609)..(1609): n is a, c, g, or t
tcagctacgtaggccccccccccccgatatcataggcagagttacttgatatttttcatttgacatgagatttccaaaataaattgtcacttatgtcataggtaatctaagaaaaacattaatgctatactatttgagtttgagcttgagatagacttgttcatcaagtaatcatagcatatttgaatgtttaatatactaaatcaaattgatttgaatttggatagggatattagttaagtttggatacttaaattgactgtgataaattagacttcgattttcatgcactgtcaatcagaaagcatggtaggcgtgaatttgaaagtagtgattcaaaaagttaacaaatttaccatacatgatagtaagtcttattagatgacattgtaaaatccttttacactatttactcaaaaattatatggaacggtttgcaatataatataagtattgcctgtattagtaacttcttactcatttggatactaatatgaaaaatatctatctatttcattgtaaagaaatctttgctgaacaatattaactatatttctgcattagacgcttgattcattaagttattctgttggttgaagttgataaattttaaatcagggtttcgtctgtacgtagcagatgaacttggcaatgtttagtattcaagagaatgcttgtgttgttcttgttcttaattttcctacaggagcatgtcctcactggtggtcatggactcatggtaaaaggatatgatcctgttgtaaaagctcttgcaaatgatctcgatatacgcttaaatcacagggtaacaaaaatatccaatggttacaacatggtaatggtcacagttgaggatggcagaaactttgttgctgatgctgttattgtaactgtccctattggaatccttaaggccaatttaattgaatttacaccaaaactgcctgattggaaagcttcagcaattaatgatattggtatgggaaatgaaaataagattgccctaagatttgatagagtgttttggcctaatgtagaagttctgggcatagttgcacccacctcttatgcctgtggttattttctgaatctccacaaggcaacaggccatccaattcttgtgtatatggcagctggcaggtttgcctacgaccttgaaaagctatctgatgaatcagctgcaaattttgtgatgcaacaactcaagaagatgtttcctgatgcttctaagcctgttcaatatcttgtgtcacgttggggaacagatccaaactctcttggctgttatgcatgtgatttagttgggatgccagatgatgtgtatgagaggcttcgtgcaccattaggtaatctattctttggtggggaagctgttagtatggatgaccaccagggatatgtgcatggagcttactcttcggggttgatggctgctgaaaattgtcagagacatcttctacaaaaacagggtcacatggaaaatctccctctagttccttctgttagacatgaaatgtttgaaactactatacctcttcaaatctctagaatttgatttatgtaacttccttgttcttgaaaatgagagcaatgntannnnnnnnnnnanaaaa

SEQ ID NO: 935 - DNA, 484 bp, Glycine max
tccggcattctcctccttcgaaaataaaacctcatatttttaaaattcgaaaccctaaattcccgactcctcccaacccattcggttcactccctgcaacatcgaagagtaaagaatgggagacaaaaagaagaaggctcagatgtttgtaaagctagtgtctgctgctgggactggatttttctatgttaagaggaagccaaggcagttcacagagaagcttgagttccgaaaatatgatcctagggttaatcgtcacgttctgtttacagaggctaaaatgaaatgatattgtacctttcatggctgcctttgcattgtaactggatcaatcttgtatttctccttgagacaattatctcatttggtattagattttgaatcatgccaatctttttactgtctatgcctcttcttagctattcagattttgtatttgtttctgctggtgtttatgcctttggttgattagatattattcaat

SEQ ID NO: 936 - DNA, 697 bp, Glycine max
agggcggactatcgaaggatgagattgagaagatggtccaagaggcggagaagtacaaggccgaggatgaggagcacaagaagaaggtcgacgcaaagaatgctttggagaactatgcctacaacatgaggaacaccattaaggatgagaagattgcatcaaagctttctgatgacgacaagaagaaaatcgaagatgccatcgagagtgctattcagtggttggatggaaaccagctagcggaggctgacgagttcgaagacaagatgaaggagcttgagagcatttgcaacccaatcattgccaaaatgtaccagggtgcaggtgctcccgacatggctggaggcatggatgaagatgttcctccatctggatccggtggtgctggccccaagatcgaggaagttgattaaattgtttcattatttagatgggatgggcttgtgttggatctattccgtttttttttcctttattttatttggtctagaatattggcccattattttggttactaacaccaggtatggtgattggtaattctttttttttggttttgaatagtttatccagatttcacctcgatggagacttgtttaaaaatttttgccaaagaaaacaattttatgggccgttcctaggcaatcctatctttaaaaaaaaaaaaaaaaaaaaaaaaaaaaaaaaagggcggccg

SEQ ID NO: 937 - DNA, 584 bp, Glycine max
tcgagccggcgccggcgccccccccccccctgattctctttacgagggtgttgacttctacaccacaatcacccgtgccaggtttgaggagctcaacatggatctcttcaggaagtgtatggagcctgttgagaagtgtttgagggatgccaagatggacaagagcactgtccatgatgttgtccttgttggtggatccactagaattcctaaagtccagcaattgttgcaagatttcttcaatggaaaggaactttgcaagagcattaaccctgatgaggccgttgcttatggagctgctgttcaggctgctattttgagtggtgaaggtaacgagaaggtgcaggatctgttgctgttggatgttacacccctttctcttggtttagaaactgccggtggtgtcatgactgtcctcattcccaggaacactactatccccaccaagaaggagcaagtgttctctacttactcagacaaccaacctggtgtcttgattcaggtgtacgagggagagagagctagaaccagggacaacaatttgttgggaaaatttgagctttctggcattcccccagcaccca

SEQ ID NO: 938 - DNA, 1214 bp, Glycine max
aacaggaaaatctcgcgggcctaaaaaggtttcacatttctctctctctctctctctcttctccgtcaatgccttctcctctcacagtcacagggtctgtttgttagggtttcctttttttccatttcccccctttctcccacactatctctttccgcattttcccaattaggatgtgtcattgagacagaagaagaagaagaaattggagggggtgtgtgatcgggtcctcaggtgaagatctgaggctgttggtgtctcttttcttttctccgagttccaaagatgagcgcttctaggttcatcaagtgcgtcactgttggggatggtgctgtgggcaaaacctgtttgcttatttcctacaccagcaacacttttcccaccgattatgtgccgactgtttttgacaatttcagcgcaaatgtggttgtcaatgggagcattgtgaatctgggtttgtgggatactgctggacaagaggattataacagattaagacctttgagttaccgtggtgccgatgttttcatactggctttctctctcataagcaaggccagttatgaaaatgtctctaaaaagtggattccggagttgaagcattatgctcctggtgtccccattattctggttggcacaaagcttgaccttcgggatgataagcagttctgcattgaccatcctggtgccgtacctattaccacagctcagggagaagagcttaggaagctgattaatgcgccagcttacattgaatgcagttcaaaaacacaggagaacgtgaaggcagtctttgatgcagccataagagttgtccttcaaccacctaagcagaagaaaaagaagggtaaagcacaaaaggcctgttcgatattgtgattcactaggtgttaacatttgactgccctttgttctccctgtattaccctccccttctttatttttatcatttccttgctattgaagaagttgtagtttatgtgggtgttcctcagacaaatactctagatctccttgaagcataagttggcttaatgctttcctttctttgaattattgtaaactctaatagtcaaatttgcatttcatgattcccacctttttttcttgtaactttcgttttgatttatgtattaatagactggaatatccagttaggataacgaccttgtttgcttgaagatatatatttaaattatattatttttcaattc

SEQ ID NO: 939 - DNA, 812 bp, Glycine max
tttagtaaaaagacgacagttggttgctgtgctgggttgtatgagcggttcaacaggaaaatctcgcgggccaaaaaagatgtgtaattgagacagaagaagaagaagaagaagaagaagaagacgaagaagaagaagaaatttgagggggtgtgtgatcgggtcctcaggtgaagatctgaggctgttggtgtctcttttcttttctccgagttccaaagatgagcgcttctaggttcatcaagtgcgtcactgttggggatggtgctgtgggcaaaacctgcttgcttatttcctacaccagcaacactttccccaccgattatgtgccgactgtttttgacaatttcagtgcaaatgtggttgtcaatgggagcattgtgaatctgggtttgtgggatactgctggacaagaggattacaacagattaagacctttgagttaccgtggtgccgatgttttcatattggctttctctctcataagcaaggccagttatgaaaatgtctctaaaaagtggattccagagttgaagcattatgcacctggtgtccccattattctggttggcacaaagcttgaccttcgggatgataagcagttctgcatcgaccatcctggtgccgtacctattaccacagctcagggagaagagcttaggaagctgattaatgcaccagcttacattgaatgcagttcaaaaacacaggagaacgtgaaggcagtctttgatgcagccataagagttggccattcaccacctgaccataacatgaaggatggtaaagcacaaaaacgctgttcaatattg

SEQ ID NO: 940 - DNA, 2171 bp, Glycine max
tccgttgcgagaagagacagagggggctgaaaaagaaaaaaaggaacatacgagagaatcttctgacaacatgcgagaaacaataataataaatagtaaataaaattaaaaaaggaaaaaaaaatggtcattcactgattcacgtgactaaataaaggctcgagctcgagccgaatccgctccggacttccctccgttctgttgttgtgttgtgttgtgtgtcttcccttggtgttccagtttttatttgcagccgccatgtgcggaatcctcgcagtgttgggttgcgtcgacaactctcagaccaagcgcgctcgcatcatcgaattgtctcgcaggttgcggcatagaggtcctgattggagtggcatacattgctatgaggattgttaccttgctcatcaacgccttgctattgttgaccctacttcgggggatcaacctttgtacaacgaagacaaaactgttattgtcactgtaaatggggagatatacaatcacaagcaattgaggcagaaactgagttcccatcaatttcgaactggtagtgattgtgaagtgattgcccatctttatgaagaacatggagaagaatttgttaatatgctggatgggatgtttgcctttattcttcttgatactagggataaaagttttattgctgctcgtgatgctattggcattacccctctatacttgggctggggtcatgatggatcaacatggtttgcatctgaaatgaaagctctgagtgatgattgtgagagattcatatcttttcctccagggcatatctattccagcaaacagggaggattaagaaggtggtacaatccaccatgggttttcagaggatattccatcaactccctatgatccaacccttttgcgtgagaccttcgagagggctgtagttaagagaatgatcagctacgtaggccccccccccccttttgtctggaggattggactcatcacttgttgctgcagtggtcaatcgctatttggctgaatctgaatctgctcgtcaatggggatcacagttacatactttctgcattggtttaaagggctctcctgacttgaaagctgcaaaagaggtagcagattaccttggtactcgtcaccatgaactttatttcacggttcaggaaggtatagatgcacttgaagaagtcatttaccatattgaaacatatgatgtaacgactatcagagcaagtactgcaatgtttcttatgtccagaaaaattaaagccttgggagtgaaaatggtactttctggagaaggttcagatgaaatatttggaggttacctgtattttcacaaggcacctaacaagaaagagtttcatgaagaaacatgtcgaaaaattaaagctcttcatctttatgactgcctgagagccaataaatcaactgcagcatggggtgtagaggcacgtgtaccattcttggataaagaatttatcaacgtagccatgagtatagatccggaatggaaaatgataaggcctgatcttggaaggatagagaagtgggtattacgcaatgcatttgatgacgataagaatccatatttaccaaagcacatattgtacaggcagaaggaacagttcagtgatggggttggttacagctggattgatggcttgaaggatcacgctaacaaacaagtcacagatgcaacgatgatggctgccaattttatttaccctgaaaacactcctactacaaaagaaggatacctctacaggacaatttttgagaagttctttccaaagaattcagcaaaggcaacagtgcctggaggtcctagtgtggcatgcagtactgcaaaagctgtggaatgggatgcatcatggtccaaaaatcttgatccttctggtcgtgcagcgcttggtgttcatgcagctgcatatgatggtgcagtggatacaaccaaaaatggacccctttaagggcccataatacattgtcaagaaaaaaaaagaatgtgtgcaacaaactgtcaagtggggatttaaatttcaagtagatgaaactaatgaaaagtggagttgtttttatttacaggttaaaataatatgtaggtcttgaactgtttggattattttaaataaatatctatatttaaaattttgttattaagtcattaaattttagtagtt

SEQ ID NO: 941 - DNA, 2336 bp, Glycine max
  misc_feature (1328)..(1328): n is a, c, g, or t
ccggaattcccgggtcgacccacgcgtccgcttttgtgttccagtttttattttcagccgccatgtgcggaatcctcgcagtgttgggttgcgtcgacaactctcaggccaagcgcgctcgcatcatcgaattgtctcgcaggttgcggcatagaggtcctgattggagtggcatagattgctatgaggattgttacctagctcatcaactccttgctattgttgaccctacttcaggggaccaacctttgtacaacgaagacaagactgttgttgtcactgtaaatggggagatatacaatcacaagcaattgaggcagaaactgagttcccatcaatttcgaactggtagtgattgtgaagtgattgcccatctttatgaagaacatggagaagaatttgttaatatgctggatgggatgtttgcctttattcttcttgatacccgcgataaaagttttattgctgctcgtgacgctattggcattacccctctatacttgggctggggtcatgatggatcaacatggtttgcatctgaaatgaaagctctgagtgatgattgtgagagattcattgcttttcctccagggcacatctattccagcaaacagggaggattaagaaggtggtacaatccacccgtggttttcagaggatattccatcaactccctatgatcccaacccttttgcgtgagaccttcgagagggctgtagttaagagactgatgactgatgtaccttttggagttcttttgtctggaggattggactcatcacttgttgctgcagtggtcaatcgttatttggctgaatctgaatctgctcgtcaatggggatcacagttacatactttctgcattggtttaaaggtcagaatgagttgtgttacccttcttcaacgcaaggaagctattatattagattttgtatgcttcatgatctgacagttccaccattcagggctctcctgacttgaaagctgcaaaagaggtagcagattaccttggtactcgtcaccatgaactttatttcacggttcaggtaatcatctctcattctctcttcattttattttttttcaaatgagttcttttattgtcactcagaagtaattttttgttttgctgtatcaggaaggtatagatgcacttgaagaagtcatttaccatattgaaacatatgatgtaacgactatcagagcaagtactgcaatgtttcttatgtccagaaaaattaaagccttgggagtgaaaatggtacggggtggagaaggttcagatgaaatatttggaggttacctgtattttcacaaggcacataacnaaaagagtttcatgaagaaacatgtcgaaaagtaatgcaataattgttatgtaattctgtttgatttaatttattttgcaaagtttcatgcgtgctcaaatcgttatattctctctttatctcttcattcgttttgtgctttgcttgtttattcaagtttttatggctttgatgatttggcagattaaagctcatcatctttatgactgcctgagagccaatagatcaactgcagcatggggtgtagaggcacgtgtaccattcttggataaagaatttatcaacgtagccatgagtatagatccggaatggaaaatgataaggcctgatcttggaaggatagagaagtgggtattacgcaatgcatttgatgacgataagaatccatatttaccaaagcacatattgtacaggcagaaggaacaattcagtgatggggttggttacagctggattgatggcttgaaggatcacgcaaacaaacaagtcacagatgcgacgatgatggctgccaattttatttaccctgaaaacactcctaccacaaaagaaggatacctctacaggacaatttttgagaagttctttccaaagaatgcagcaaaggcaacagtgccaggaggtcctagtgtggcatgcagtactgcaaaagctgtggaatgggatgcagcatggtcaaaaaatcttgatccttctggtcgtgccgcacttggtattcatgatgctgcatatgatgcagtggataccaaaattgacgagcccaaaaatggaaccctttaaggcccataatcgattgtcaagagaaaaaaatgtatgcaacaactgtctagtggggatttaaacttcaagtagacaaaactaatgagaagtgggattgtttttattttcaggtcaaattaatatgtaggttttgaactgtttgtgggttattttaaataaatatctatatttaaattttgtaattaagtcattaaatttttaaatcattagttggaccttttgatcccc

SEQ ID NO: 942 - DNA, 1583 bp, Glycine max
caggatttggcttctgctgagaaatcaataagggagacaatggaaagcaaacaagttctgcaggggagtctggaatggctcaagaatgtttttggctcggaggttgagttgccatggagtaggattcgggaacttgttttggaagatgaatcagatctttgggatgaaatttttgaggatgcttttgttggcaggatgaaagcaatcattgacttgagatttagggagctaacaggtgctgttgatgtggtgaactcaatttctgctataggtgacttgtgtaccaagctagatgatgttcaggggtatttgaacagaccttctacggctggtggtgtttggtttctagaatcaaatgccagaaaaactggagttgcttctgggtttaaagtccagcctgaagagagcgaatttcagtattgtcttaatgcctattttggtcctgaagtaagtcgaatcagggatgcagttgatgtttcttttcagagcatccttgaggatctattaagtttcttagaatctccaaaggcttcccgaagattgaaggatctggcaccatatctgcaaagtaaatgttatgaatgtgtgtcttctatattgatgacactgaaaaaagagctggatagtttatatgccccaacagaaaatggcgaggtgccaacagcggttactgttgaaaaatctcttttcattggacgattattgtttgcattccaaaatcattctaaacatatacccttgatacttggttctcccagattttgggttaatgggaatgcatctgcagttgggaaattaccagctctggtaaaacaatctcgatttgggtctgattctgctatctgtgatagtccgggaagacaaacgagccttggctctaaaagacaaaattcatctgtcgtatccgctttgcttggcatgagagaaggtgcaagccatgagttggaagaactgaataagaccattggggatctttgcattagagcttacaacttgtggattttacggatctcaaatgaactttctgccattgtctctcaggatcttaaacaagatgatgctttatctttgagctcaccctggaggggctgggaggatatcattgtcaagcaagatcagtccgatgagaacccaccagagatgaaaatatctcttccatccatgccttctctgtatatcatctcatttctatttagagcctgtgaagaagttcatagagttggaggtcatgtacttgacaagaagattttgcataaacttgcatcaaggctactggaaaaggttactggaatctttgaggactttctttccactgcagagagtggtgttcatcaagtgtcagaaaaaggagtcttgcaggttttgttagatgtcaaatttgctactgatgttctctctggtggtgattcaaacatggttggggaattatctagtaacccaaaagcaaagctacctggcagaaggaagcaggaccaaagtttgacaacctcagccattagagaacgttcaaatcaattgttaaatcgtctttctcagaaactggatcccatagactggcttacgtatgagccatatctctggga

SEQ ID NO: 943 - DNA, 1401 bp, Glycine max
ggaatctttgaggactttctttccactgtcagctacgtaggccccccccccgtcagaaaaaggagtcttgcaggttttgttaaatttcaaatttgctactgatgttctctctggtggtgattcaaacatggttggggaattatctagtaacccaaaagcaaagctacctggcagaaggaagcaggaccaaagtttgacaacctcagccattagagaacgttcaaatcaattgttaaatcgtctttctcagaaactggatcccatagactggcttacgtatgagccatatctctgggagaatgagagacagtcttacctacgacatgctgttctctttggtttctttgtgcaactcaaccgtatgtacacagatactgttcagaaactgcctactaattcagaatctaatattctgaggtgttctacagttccccgatttaaatacctccccatcagtgctccagcattgtcctctagagggacaaagaaggcctttactccatcatcaagtgaaatcgcttcgagaagttcgtggaattcaattacaaatggagaactttctcaaaagataaatttggatgacagttcaagtctgggggtggcagcacccttactgaagtcttttatgcaggttggaagcaggttcggggagagtacttttaaactgggatccatactaactgatggtcaagttggcatatttaaggatagatctgcagctgccatgtcctcatttggagatattctacctgctcatgcagctggtcttctttcatcttttacagctcccagatcagattcataatgtcccaatgatcaaaaggcatcccggctgctcttttcaaagtctcgttaccataaagtgtgatatcccatgaaaccttcccaaccctccacaccttatattcatggcaccactctagtagagcaacattagaatcatatttgccagctccaactccaaatatcctagacatctggagcaaatggatcaataaattctgggatgaggattctgaatgttggctgctgtgattaatttcattttatcatctagcttggaaacggatgtgaatataaatgcccaaattgtaagcttgaggaaacttggcaacagactgatgagcaaaaatagggttgatggcagattcaagttcgcgtgtcatttgggtcaaggaaataggatcttgctaatgtcagttgagagctgctataattcgtggctactgtattgcgtggttctaaatttttggtgtatgtctatagttgcctaaattcaatcaaattatcttgttagattttttttttaatgttctgattacaatgtaacactgtattttaagatacttattcaatgaattgaattcacataaaaaagcagccatttttttcattaaaaaa

SEQ ID NO: 944 - DNA, 2054 bp, Glycine max
  misc_feature (1827)..(1827): n is a, c, g, or t
  misc_feature (1992)..(1992): n is a, c, g, or t
cggacgcgtgggtggaatttcactgtactccattgcaactgatttgtatgttaaagcgggaattcttgctcctctaataacggctgcgagacatgcaaaaggaggaaagtgtattgttttcactcaaacaaaacgtgatgctgatcgattatcgtatgccatggcaagaagtgttaaatgtgaggctttgcatggagacatatcacaagctcaaagggagaaaactcttgctggcttcagaaatggccattttaatgttttagtggcaactgatgttgcctcacgtgggcttgatatacctaatgttgatcttgtaatacattatgatcttcccaacaattcagagatatttgttcatcgttctggacgaacaggtcgtgctggtaagaaaggaactgcaattcttgtgtatacagaagatcaatcgagggctgttaagcttatagagcgtgatgtaggcagtagattttcagagctgccacggattgctgttgatagtgcatcagtggacatggttggtggcatgggtggtgggcgatttggttctttcggaggtaccagggatcgtcgatatggtgatacgggttttggatctggccgttctgggggctacagtaaccctggttctggccgctctagctttggaaattctggtgaaaggtttggtggacagaattataatcgttttggttctggtaattcatctggtgaaatgaatagatatggtggaccaagctctggtcgttttggatcatctggtggctatggttcaggtcaatcaggaagtagatcaggtggatcatccagtgggtctaggtttagtcgctcggatgattttgggggatttggtggttcagatcgctcaggtggttttggagattttggctcaggtgagcctagtggctttggtggttctcgtggtagtaatcagaacaatagaagacctttttaacttaattaacatatatataaaaaaatgcaccatccttatttatggtggcttagttcttgtagagtttgcttctgtcatttcctctaaaacttataggtttcttggctaatccttgtattactaaggattttagaagacaaaagttctacggccattggatttttcttttcttttctgggacttttggcccagtctcagctgtgtattgttctttttgaaacttttataaaaaaagaaaaaagggagggctgtattctgcggcttccatcatctgccatggcacattacttgtctctatgggccccccatcagcacggatagttttccccacccagccgcatttatatttatgttccttacagtagtagtagttaaggggaagatcaaatgtcttggtaacctgtagtgtagggtgctttgctgttttactttatactaaaaatctattatgcaagaaaattctcatccaatatgtaattttggttatcaacaatttgtttttcgccccttcacccttggttacttaaggggtttgattaaataatttgggaatcacgttgtttaaatcctgcctttcctgctgttcgtattttgcccaacagttgctagatttcgttgatcaacaaggaagtaatgaaatgtctataaaaattaaaaaaaaaaaaaaacagcaacaggtagcggaaggagcattatgagcattaaccctgtacgtgagaaaaaaggaggaaagaattgtagaaattttacaagtttcattgtttggttgaagattgaagggaaagtagaaaatgttgacttttaaaaattccatttatttttcaatttttctttccagtttaaaattttattttatttttctctttctttcctgncatttgaacgaagggtaaatgttaggggagtaattccttatgcttggattggtgttgcttaattaattttgaattaaattaattttgtaaaattaattttgattaaaattgattttgaagtgatgtgatttatgtctgaattttttattataagttagaaataanaattagtattaaattttagatttatataaatgtggttaaaagttttttaacttaaaataatt

SEQ ID NO: 945 - DNA, 1438 bp, Glycine max
aaccgagcgactaaaacggtgcgtttgggtcgggttgaacttcgaagtcttgatcgacgacgttgagcgttctctctcttcgttcagctcaatctgggatacgaagctggcaatagctgcagcatctgaataggaatggattatatctgtctttttgtcaccttcactgcgattgcgctcttagggtttgtctttgtagtgttttttgaagcatataaaagaagaaacaaccatcagcatattgaagttccggctatttttgaagatcctagctcattgaaacaggttccttgcccacatattgttgatccagccacaaagtatatttctttgattatccctgcattcaatgaggagcataggcttccaggagctcttgaggaaactatgaattatcttcatcaacgtactttaaaggattcttcatttacatatgaggttgtaattattgatgatggaagtgctgatgagacaaaaagagtagcttttgaatttgtgaggaaatacacagtagacaaggtaagggtcatccttctaggaagaaatcatggcaaaggagaagcaatcagaaaaggaatgatgcattcacgtggtgaactacttcttatgcttgatgctgatggagcaactaaagtcactgacctaggaaagcttgaaaatcagattcaagctgttgccaaaagggaatatcaccatggagattcaagtgatagtgatcctagatttagaatatctgatgtcccagctgctgtgtttggctcaagagctcatctagaggagaaagctttagctacaaggaagctggtaccgcaattttttgatgaagggcttccatcttgtggttctcttggctgctggtcctggaattcgtgatacacagtgtggtttcaagatgtttactagggcagcagccaggaagcttttttcaaatgtacgcttaaaaaggatccaaggtgaatcttctgagtatacctaacatgctttgggagcttgtgctcatgtctgtggggtacaggactggtatgtggagaatttctaattctacctgagcgagcgtggatgatcaacttaactgggaagagaagtggcattttcctatctaaacaagagtcacctcttacaagagaacatatactctcatgccgggcttaagggacaatcatgcaatatttaaagtttgtaggactaaccataactttccgggttattcccttcagtttgggatcatagaggcttttatcctttttacttttagtattgctatttctaccaggtaaaaatatattcaacattatgttgttactgttggctgggaatagttttcaatcacattggtttgtatttttcttaatcaaaatattatatagataactttgtattcctttcattccatttgaaagacgttatctaatattggtgagttgttaaaaaaaaaaaa

SEQ ID NO: 946 - DNA, 1348 bp, Glycine max
aaaatcatattaactcaaaatgggttccatgcgtctattagtagtggcattgttgtgtgcatttgctatgcatgcaggtttttcagtctcttatgctcagcttactcctacgttctacagagaaacatgtccaaatctgttccctattgtgtttggagtaatcttcgatgcttctttcaccgatccccgaatcggggccagtctcatgaggcttcattttcatgattgctttgttcaaggttgtgatggatcagttttgctgaacaacactgatacaatagaaagcgagcaagatgcacttccaaatatcaactcaataagaggattggacgttgtcaatgacatcaagacagcggtggaaaatagttgtccagacacagtttcttgtgctgatattcttgctattgcagctgaaatagcttctgttctgggaggaggtccaggatggccagttccattaggaagaagggacagcttaacagcaaaccgaacccttgcaaatcaaaaccttccagcacctttcttcaacctcactcaacttaaagcttcctttgctgttcaaggtctcaacacccttgatttagttacactctcaggtggtcatacgtttggaagagctcggtgcagtacattcataaaccgattatacaacttcagcaacactggaaaccctgatccaactctgaacacaacatacttagaagtattgcgtgcaagatgcccccagaatgcaactggggataacctcaccaatttggacctgagcacacctgatcaatttgacaacagatactactccaatcttctgcagctcaatggcttacttcagagtgaccaagaacttttctccactcctggtgctgataccattcccattgtcaatagcttcagcagtaaccagaatactttcttttccaactttagagtttcaatgataaaaatgggtaatattggagtgctgactggggatgaaggagaaattcgcttgcaatgtaattttgtgaatggagactcgtttggattagctagtgtggcgtccaaagatgctaaacaaaagcttgttgctcaatctaaataaaccaataattaatggggatgtgcatgctagctagcatgtaaaggcaaattaggttgtaaacctctttgctagctatattgaaataaaccaaaggagtagtgtgcatgtcaattcgattttgccatgtacctcttggaatattatgtaataattatttgaatctctttaaggtacttaattaatcatatagtccatatttgttggatggctagaaatcaaaagaaaatatcttcacaacccgttcaattaagtagttaattaaattcagat

SEQ ID NO: 947 - DNA, 1747 bp, Glycine max
ggctcgagcgaaagacaataagtacgtgtgatgtggtgagtggaacttggacatcaattcggctcgcgcaccattataactctttccttctttggcccatttgcttctagttctagccccttcctttgttaactcttttgtttattcagaagaatggcatcctggttattgggaaggtcgagtaggatcttgattcatcaacatcaccaccttcacaaaaagtacttgcctttcttgttaggaccatttcttaaccataataatagctcttgttcctcttttccatcaactgaaccatttaggtgccgtgatgcatttccgggtaagaactcatcacccaccctcttccgattctcgcgtcatgaatcaaccaaagctgaggcacaattggaattggagcaagatgttgccaccgaggatgagcctaatcaggtcattgattttcctggagggaaagtgggatttacttctgaaatgagattcatttctgagtctcctgagaaaagggtgccctgttatcgtgttcttgatgacaatggtgagatcgttaaatacagcaactatgtacaggttagcaaggaaatgggtgtgaagatgtattctgacatggtcactcttcaaactatggacaacatattctatgaagtgcagaggcaaggtagaatttccttctacctcacccaaatgggggaagaagcagttaacattgcatctgctgctgcacttgctcctgatgatataatattgcctcagtaccgggagcctggagttctattgtggcgtggttttacactgcaacaatttgttcatcaatgctttggaaacacacatgattttggaaaaggcaggcagatgccaatacattatgggtctaaccagcacaattacttcacagtgtcatcccccattgcaacacaacttcctcaagctgttggagctgcttattcccttaaaatggatgggaaaagtgcatgtgcagtcactttttgtggggatggtgccaccagtgagggagattttcatgctgctatgaattttgcagcagtaatggaggcccctgttgtttttatctgtcgtaataatggatgggcaatcagtacacctgtggaagaccaatttcgaagtgatggtattgtagttaagggtaaagcttatggcatctggagcatcagagtagatggaaatgatgctcttgctgtttatagtgcagttcacactgctagagaaatcgctataaaagaaaaaaggccagttttaattgaggctctcacttatagagttggacatcactctacatctgatgattcaactaagtaccggggaactgatgagattgaatattggaagatggcaaggaatccagtgaataggttcaaaagatgggtagaaaggaatggttggtggagtgacaaggatgaattggagcttagaagcagtgtcaggaagcagttaatgcatgcgattcaggtggcagagaaagcacaaaaacctccacttcaggacttatttaatgatgtctatgaccaaataccatcaaaccttcaggagcaagagagactaattagaaaaaccatcgagaagcatcccaaagactacccttctgatgttcctttgtagatattgccaattcaaacaagaaattgtactaaatcttacaatcaaaatataaaataaagggattggatgccctgttcttatcttttaaaaaaaaaaaaaaaaaaaaaaaaaccattaaactagttcaaaa

SEQ ID NO: 948 - DNA, 1997 bp, Glycine max
gtttgttcccaatgtgctaataaatcagctacgtaggccccccccccggatctttctttttttaaattaataaattaactcagaaagggttccttcacttcccttccttttccattccacgtccaacacactcttgtcttgtgattcttcttcttcattctccctttttttgccctagattagatcctttctcttccaatcattaattaattagattagatttgatttgatttgatttaccttaatccttcgtctgctttttccttccctcaactccaccattcctgatttttctgcatcagtctattcaagttcattgtagggtgtatatccttgattttgtgtgggtttgagttagggtgcatgtgaatgaaaaggagatttgctggaggtgatgcatttgcatagatgaaggcagaaaaagtttggcgtttaggcagcatgggtgatatgcagatactgcctgggtctcgccaccgtcctcccatgaagaagccgatgtggattattgtcttggtgttgtttgtctgtgtctttctaatctgtgcttatatctacccaccgcagagcagttcagcctgttatgtcttctcttccaaagggtgcaagggttttgttgattggcttccgcctatgcctgcaagagaatacaccgatgaggagattgcttcgcgtgttgtgattaaggatattttaaactcgccagcaattgtttcaaaaaattctaaaattgccttcatgtttttgtcacctggctctctgccatttgaaagattgtgggacaagtttttccaaggtcacgaagggaagttctctgtttatgtgcatgcatccaagacaaaaccagttcatgtgagccgttattttgttaatcgggatatacgcagtgaccaggtgatttgggggaaaatttctatggttgatgctgagagacgactattggcaaatgctcttcaagatactgacaaccagcaatttgttctactgtctgatagctgtgtgcctctatatgattttgactatatttacaactatctgatgtatacaaatatcagctttgtagactgctttaaggatcctggtcctcatggcaatggcaggtattcagatcgcatgctacctgaagttgaggtgaaggactttagaaagggtgcacagtggtttgctatgaagcggcaacatgcaattatagtcatggccgataacctttattattcaaaattccggtcttactgccagcctggtttggaggggaagaattgcattgctgatgaacattacttgccgaccttcttccagatggttgatcctggtggcattgcaaattggtcactaactcatgttgactggtctgagagaaaatggcacccaaaatcttacagggctcaggatgttacttacgagcttttgaagaatatcacatccattgatgttagcgtgcacgtaaccagtgatgagaagaaagaagtgcaaagctggccttgcttatggaatgggattcagaagccatgttacctatttgctaggaaattcactcctgaaacaatggatagtttgttgcgtctattggccaattattcaggaccttgagcctgctattttgatctaattctttggttggaaagtaatgttactttcagccccgatcttggtttctcatatggtatgagagttgtaaattgcagcattattgcggcttgatcgcctgccagccacatatattgagtgctaggtgaactggccttggagttcgagtgggcctaacatggacagaagaggaggctaacgatttagtgttccttttggggatggatggatggcttattattttttccttccatttctgttatattttacattatagatttttggagaaatcatatcaactcattatggttgttcatctttgtaaaacttgcaaaattgtttagttgaaaacaccacgtgttactgttcattcagaaaattcattggtctattcttaaaaaaaaaaaaaa

SEQ ID NO: 949 - DNA, 1733 bp, Glycine max
acgcccccgcgtccgtacggctgcgagaagacgacagaaggggggtgttgtagctgaaggaacatgaaagggtacaaggtttggaactcaaccttcatacctttcaataataatctctccccaaattaccccttaaccccttcctcctatactgcttcaaactacaccccatccttccaaaaccaaagaccaaaacttaaagctcagaatttcaaaccccacattcttctatgcgcctctctgcccagtccgcaggcaagcagtgcttccacggctcaagctgaggagcaagaggttgaaattgcaaggggttacactatgacacaattttgtgacaaaatgatagatttctttttgaatgaaaaaactaaatcaaaagaatggaagaagtacctgatatttagagaggagtggaaaaaatacagtgatagatttttcagtaggtgccaaagaagggcagacatggagaatgacccagttatgaacgccccccccatttcattgcggagaaagttgaagaagattgatgatgaaatggaaggacactatgaactgctcaaggaagtacaagatagcccaatggacattaatgccatagttgcccgaaggcgaaaagattttacaggagaattcttccactacctcactcttatttcagatatgtatgacagcttggaggagcgtgatgggatttccagactggggagtagatgtttgtcagctgtcagtgcatatgataatacactagagaatttagagacattagatgctgcccaggccaaattggatgatatcctcaattctccttctattgatattgcttgtcagaagatcaaaagcttggcaaaggcaaaggaacttgattcttcattgatattgttgataagcagcgcttgggctaaagccaaagaatctacaacgatgaagaatgaggtgaaagatataatgtaccaattgtacaaggccacaaagagcagcctaaggagtattactccaaaagaaataaaactactcaagcatttgttaaacatcatagatcctgaggagcgattctctgcattggcaactgttttctcccctggtgatgaacacgaagccaaggaccctaatgctctatacaccaccaccccaaaggagctgcacaagtggattaagatcatgctcgatgcatatcatctgaacaaggaagaaacggatttgagagaagccaggcagatgactgaccctgtggtaattcagaggttgtttatccttaaagatactattgaccaagaatatatggaaaaagatacaacccagaagtctgagacaaaagacgaatctaaatcagaagatttttaaggtctcataagcatccattcttgccaatgtgtttcctgttctgtgcctcttttaatcgagaaggaaggggttgaagtggagagaaccaccaaatgcaagagaaaaagttactacttactaccctttcaaagattttgtaatactttgcaattggatgtttagatgttaacatatttcacctgattttcattgcaaagttgaggattgtacttctaggtgtaaactatgaagcatccaccagatcaaggtggatgatgacaaaacattttgaggtttaacctagaatataagtaggaagtaaattgtccttctatatataaacaatcctccatgtttctatgggaaattttcttaactagttatatcaaaaaaaaaaaaaaaaaactcgagac

SEQ ID NO: 950 - DNA, 1265 bp, Glycine max
  misc_feature (1217)..(1219): n is a, c, g, or t
  misc_feature (1222)..(1223): n is a, c, g, or t
  misc_feature (1225)..(1225): n is a, c, g, or t
  misc_feature (1228)..(1228): n is a, c, g, or t
  misc_feature (1232)..(1233): n is a, c, g, or t
  misc_feature (1236)..(1237): n is a, c, g, or t
  misc_feature (1240)..(1241): n is a, c, g, or t
  misc_feature (1254)..(1254): n is a, c, g, or t
tcgagtcagctacgtaggccccccccccatcagtatagaccaccttccctctcttctgttaccaatggctccctcatcaaactacatttctttccttttcctcaccacccttttgtttgctcttcaaatcagtgcaagagacagccagttcttcagcaaagtcacccattttgacaaaaacagtgtcaaagagacagaacttcccaacaaagaagcaccagaagtgaacaagccagagcaacaaccacctttcattccggagactgaaaacagctatggcctatatggtcatcatgatgagtataaccaagtcccttccaccaccaccaaccccacttcttaccacccctacaagaccgagtttgagaactccaacaacaagtattacaacaatgatgcctataacacaaggttctccgaaaccggttacaacaacaacaaggattcttatgagggtaaccaatatgagttaagtgacacaaagtacacagaagaagaatacaacaacaacaacaacaacaagtatcacaactcctatcagaacaacaaccagaagtactacaacaacgatgctgccaatggcatatactcctacaacaacaacaacaacaattacaatgctaacaataacaggtacaatacttacaacaacaacaatgccgttaacgggtacaatggtgagaggcaaggaatgagtgacacaaggtttttggagggtggaaaatactttcatgacgttgccgccgagaagtacaatccaacaaactatggtgactcatcaagggaagtgaacactaacaactggtacaacaacagaggtggcaactacaacgggaaccagaaccagcaggagtttgaagatgaacatgagaacttcgagccatgagcttggatcattggcaaagtaaagagttcactatacttttgagtatccactatgggtgtttaatgtttttattgtgctttagattcaagaaaacacaaagttaaaggatatgttaactatgaagggcttttattttattttttacttagtagtacttctattaagtcttgcttccggattgcgttgtctctgtcatgatctggaaatacctctacgagagcatgagtaatttttgcttaactaataagttgtataatattgtgaagtaagcttgtttcttgctctcatttttattaaaaaaaaaaaaaaaaaaaaagcccgccgcttgggnnntgnntnaantagnnttnntgnnccggggtcccttntttaacgggcc

SEQ ID NO: 951 - DNA, 1691 bp, Glycine max
  misc_feature (1686)..(1689): n is a, c, g, or t
cgttacagcattagcagaacatccacaccgcatcgctcgtggttccatcctttgtgtctgtctctctcttcggacacaaagcaacactttccatgtccatgtctctgtctcttcttcgtatcttctcttcgccccacctttccacctctctcttctttccaactccaactctttcttccctctgcccttctttcctttccaaattaccaaatgccccctctcccctcattgttttatgccacagggacgcctcagcttcgaagcaaggtcacctcggagtccctgaaggtgcagaacgtgacagtgggagcgaagaagatgatgatgctgttgaacaacccatgagggccagttacgacgacgacgaagacgaagaagaaggagctcttagctccttagtttttcctgaaagatgggatgtattgggtctcggtcaagccatggtagacttctctggcatggttgatgataatttcctgaagaatttgggattagagaagggaacacggaaagtagtaaatcatgaggaaagaggtagagttttgcaggccatggatgggtgcagctataaagctgcagctggtggatctctttctaataccttagttgccctcgcaaggcttggaagtcgctccgaaaaagttcctgctataaatgtggcaatgaccggtagtgtagggagtgatctattagggggcttctacagggaaaaattacgccgagcaaatgtgcaatttctttctgcaccaatcaaggatgggactactggaacagttatagttctcacaactccagatgcccagcgcacaatgcttgcatatcagggcacatcttcaactgttaactatgatgcatccttagctaatgcagtttccaagacaaacatacttgtcgtcgaagggtatctatttgaacttcctgataccattaaaacaataaccaaagcatgtgagaaagcacggtcgaacggtgccttggttgcaataacagcttcagatgtctcctgcattgagagacactttgatgatttctgggaaattattgggaattgtgtggatttagtctttgcaaatggaaatgaggccagagctctttgtaattttgaagcaaaggaaagtgctgcttcagctgcaaggtatctgagccactttgttcctctagtatccgttacagatggtcctacaggctcttacattggtgtaaaaggagaagctgtatatatccctccttctccatgtgttccagttgatacttgtggtgctggggatgcatatgcatctggcatactctatggtcttttaagaggcatatcagatttgagaagcataggctcattagcagctaaggttgctgccactgttgttggacaacagggaactcggcttaggatttcagatgcagtcaaattggctgaatcttttgaatttcaacttgattcctcctctgttggcactgatcataatatttccagcgtctaatcagagattgcactttgaattgaattacattttttttccataagatcaatgtattccttgattaatattatgtttcaaaagaatagccttgtaaatactctcattgtaaaaagaattcaattgcttaggccaaaaaaaaaaaaaaaacatggttattactatgctaggcacatcgatatattctatcatcatcgtgactgtaaaaaannnnga

SEQ ID NO: 952 - DNA, 1811 bp, Glycine max
tcgagtcagctacggtaggcccccccccccggaacactccatcaaatcaattgtgtatttgtagagagaaacaaagttctcttctactttctgtctccagcaggctcagaatctttttgcaactgttctctggattttcgttcattattttagtttcctcttttgttttctctcctttttctttgaagcaaagtgaacttgtggtatacctttccaattgaggtttctagcgaaagagaaaggatgtcaagtgggacaacatactggtgttacacatgcaggcagccaatctggcttgaagggagggaaggcttttgcccctactgcgatggaggctttgtgcaagaactcaacgagatgcgaggagttgcgcgccaacacggcttctcaacgcggatggaagatgttcatcaaatgcctgacattatggatgctgtaagagctgttatggagcaaagaggttctgaaccgagcattcgggttagagatgctgttgataactttatgaggcagagaatggccggaagatacacaaactttgatgtgagaaggaggtctggttctggttctggttctggttctatccttattcctgatgagacttggggtgtctttagttctggtccttatttgatatttcatggtcaagcaccaggattcaccaattctaatggtagctcaagaggtggtcctaggcgtgttgattttggtgactactttctgggtcctagactagaaggactaattgaacaacacatttcaaatgaccggcttggtccaccccctgcatcgcgctcttcgattgatgcaatgccaactatcaagatcacacatgagcaccttcagtctgattcacactgtccagtttgtaaggaacgatttgaacttggttccaaggcaaggaagatgccatgtaaccacatttaccactcagattgtattgttccatggttagttcttcataactcgtgtcctgtgtgtcgtgttgagctgccaccgaaagaacatactagttctcgaggtagacgtatttggggaggtagaaatggtaatgacagtggtagtgacaatgatatctctaggggaagggagaatacacagatgaacaatggaaggagaaatctgctatcatatttgtggccatttcggtcctctagttcaagtacttagtgtgtgtttgttttacctgaatcacgtgttccaaagcatgttgaacgtgatttctatgagactgattttgaatttgattcaacgtcaaacctaacaaagccttaatcattatgctgagtctgggaagctactcttttataattctttggccagaacaatgacagaagttaaaaagtttcatttcttctccaggacaagtgtaattagctgtcaaaaaatgcttgtaatttaaatgacatgaagaaagtttctgtagattgtgctttgaacttgatctcctagatactagatcatagaagtatgtgaatatctttgtaaatacaatgttcttaaaaacaatttttgttttacattttcagtagcttagaagctttcactttggtgcataaggaatccaaggggaaggaaaggtgaatgatgaaagaaaactatggataaatcctttcccatatttagatattaccaatttataaggaaaggaagagttaaacgtttgataataatgtaatttaggaaaaaaattatttggtaatctagaactaacaagtgttgtcttttccaatttctgcatgacatgttttaagtttttcaattcactagaaaaattaatgatactcaattgcatgtcatgtgatagtaag

SEQ ID NO: 953 - DNA, 1245 bp, Glycine max
gaagtaaaaggaaagagcagagttgagtacaagacaattaagaatgaagctgggtggactgaaatcggtggagaacgcgcacgatgattcggtgtgggcggtcacctgggtacccgcaaccgccaaccgaccaccgctcctcctaaccggttccctcgacgagaccgtcaggctctggcgctccgacgacctcgttttggaccgcaccaacaccggccactgcctcggcgtcgcctccgtcgccgcccaccccctcggctctgtcgccgcctcctcctccctcgacagcttcgtccgcgtcttcgatgtcgattccaacgccaccatcgccaccctcgaggctcctccctctgaagtttggcaaatgcgcttcgatcccaagggtgccattctagcagttgctggcggaggtagtgcatctgtcaagctttgggacacttcctcatgggaacttgttgccactctgtcaattcctcgtccagaaggacagaagcccacagacaaaagtggcagcaagaaatttgtgctatcagttgcatggagtcctgatgggaaacgacttgcttgtggttcaatggatggcaccatttcagtttttgatgtgccccgcgccaaatttctgcatcaccttgaaggtcacttcatgcctgtgcgatctcttgtttattctccttatgatccaaggctgctgtttacagcttcggatgatggaaacgtccacatgtatgatgctgagggaaaagctttaattgggaccatgtcaggtcatgctagttgggtactgtgtgtggacgtgagcccagatggggcagccattgctacaggttcaagtgatagatctgtaaggctatgggatcttaacatgagggcatctgtgcagacaatgagcaatcattcagaccaggtatggggagtcgcatttagaccacctggagggagtgatgtgcgaggtggtcgacttgccagtgtatcagatgacaagagcatatcactgtatgattattcctgatttagatattgtgtgctgtatttgtactctttgtggaatgttatttactcttttgtctacaaattgattttgaattgaagaaaatgcatggttgtacatgctgtatccgtgttttgattctgtatcatttatgcatgatttgttccccgtcaaaaaaaaaaaaaaaaaaaaaaaaaaaaaaaaaaaaaaaaaaaaaaaaaaaaaaaaaaaaaaaaaaaaaaaaaaaaaaaaaaaaa

SEQ ID NO: 954 - DNA, 1338 bp, Glycine max
tcgagtcagctacgtaggccccccccccgactaagtgtcttcatgaccgagaattatccaaaatcctaacccgacgatggcgagtcaaaagttggtgctggcattgatcagggccgcgaggccaaccttccgaaaccaaaacgacaaaatcgcctttgccgttcactcctccttcctcgcctctggttatgtccttacagctacgggtccccaggccctctccgacgatgcgttttctgacccatccaatgacgaggtgtccgttgatcactggaacgagctgaacgacgagtacgcgttcgtttacgcgaatccagaaaagggttcggagaaagtgcttgtcaagtgcctcgtgatgaacgacaaattgctcgttcatgctttgactcaagggtcgtcggagcctttgagccttgagattgatgttggggattatgctgaagaggatggaggcagcaattattctcagcagttcaagaatttggataagcttgtgaagagaatagatggggatattttgtccaaattagatggttctgctaaagccagctcatcaagtagaagctcggaaacaagtgacagaactagacaagagatacctgaccctgttgctggatttggtgaacctgctgatcctccaactcaaattattttcccttcagttcccattggctctggtagtgatcttgttccagggcctgctgctggagtgtttccttcaaggggtggtcatggcattggtggaagcatgctcgtagggcctaatgacccccgttggtttggtggtattggtggagatcctgcttttcctggaggattgccgggtgttcctcccggtgcacgatttgatccctatggacctcctggtgttcctggttttgaacccaacaaatttgcaaggaatcctaggaggccaggatacgacgctcatccagatttgcaacatttccgaagagatgctgattcagactacatataggatctgtttggatacaagcactttgagagctttcttactgaaaatatagttttttcccgtaacttatagcttgtatccaaacaacctcatagtatagttgtcgtaatatgtggacaagttgtgtcaagtcaatttactaaaaacaacttgagcaaatactagttctattgacaagttctgcatgcgtattttctttcagggctattagttttatgcgaggacagggaaatatgtcaaaatttaattacatatttatagtttaaataagatctaagtccttatagtacaaaaaaaaaaaaaaaaaaaatacaggctgatccctatcacgaagtgtttggtatcaatattttttcatattt

SEQ ID NO: 955 - DNA, 1339 bp, Glycine max
caggaggcagagggggtacatctacgactcaggagctattctagtgtcttcttgacccgacgatggcgagtgaaaagttggtgctggcagtgatcagggccgcgaggccaaccttccgcaaccaaaacgacaaaatcgcatttgccgttcactcctccttcctcacctccggctatgtcctcaccgctacaggtccccaggccctctccgacaatgcgttttctgacccatccaatgacgaggtatccgttgatcattggaacgagctgaacgatgagtacgcgttcgtttacgcgaatccagaaaagggttcggagaaagtgcttgtcaagtgcctcgtgatgaacgacaaattgctcgttcatgcttttactcaaggatcttcggagcctttgagccttgagattgatgttggggattatgctggagaggatggagtcagcaattattctcagcagttcaagaatttggataagcttgtgaagaaaatagatggggatatcttgtctaaattagatggttctgctaaagccagctcatcaagtagaagctcagaaacaagtaacagaactagacaagagatacctgatcctgttgctggatttggtgaacctggtggtcctccaacgcaatttattttcccttcagttcccattggttctggtagtgatcttgttcctgggcctgctgctggagtgtttccttcaaggggtggtcatggcattggtggaagcatgcttgtagggcctaatgacccccgttggtttggtggtgttggtggtattggtggagatcctgcttttcctggaggattgccgggtgttcctcccggtgcgcgatttgatccatatggacctcccggtgttcctggttttgaacccaacagatttgcaaggaatcctaggaggccaggatatgacactcatccagattggcaacattttcggagagatgctgattcagactacatatagtcgtaatacggacaagttgtcttaagtcaatttaccaaaaacaacttgagcaaatactagttatatggacaaattgttctccatgcgtattttctttcagggctattattagttttattggaggacagggaaatatgttgataggatgatttgaaatttgtaaatagttaaggatttaattacaaatttgtagtttgaataagatcttcgtccttatactttattcataagattttgacatagggtttgatccctatcacgaagtgatatttatttaagaataaagtatgtttttatatttataaagatgaagcgggaacagattttaaatatttttatatttataaagatgaaaaattatttta

SEQ ID NO: 956 - DNA, 1958 bp, Glycine max
gaccaactacctgaactaaatattggttttccttctgttttaacaaaattaaggtctaaaaggggttcaagggatcctgaaagtccatccaagcatgaaacaaaatcttcagtgctaaagaatagtgcatgtagcactaatgataagaataatttcaacaatgaacagcatgtggttgtggatgaccacaacaacactagagtagcatctaatcagggagagaatggatctcaagaagtagatcctcagattaggcaaaatagtactccactcggcttcccaggccctcccccccaaagagataaaatgtataaagctgtttatagaagatcaagatctcatagggctgtgactaatttagctgacagtagtggccagggagaattcaattcaaatgggagaaacagtaatttcaatgctacagcaaacttcagcaatggcacaaatgaagctattcatacaaatggatccttagagttggaaccaaccacttgtgatccaaattatgagcggaataatctcaaagtgctgcaaggacctggaaattgtatggttaaaagtccacagaatgtttccacaagtggaggacaactcacagaagaagaaaggtgttctaattcaaaattgactgttggtttgaggtccactaggaatcggaggtctagttataatattcgtgagactagtcctgtaaataaaaggaaatcactacaatcagctaccagaggatcatggttgttgtgatcaacccatgaggaaggatgcagatatattccccaacagggggatgaagttgcatatctgagacaggggcaccaggagtatatagattattgccgtaaaagagagtcagggccttgggtatcacttaagggacatataagagctgtagaatattgtagagttcaaagtctagagtattcccatcttccagggtctggtgatagctgctgcaaaatgaaccttctgtttgtagatccgaattcaagtgttgttggaaaatcttttaaattaaccctacctgaagtaaccagtttccctgattttcttgttgaaagaattaggtttgacactgctatgcaaagaaattggactcgcagggataaatgcagggtttggtggaagaatgaggataattcctctggtaattggtgggatggtcgaattctgtgcgtgaaagccaagtcttctgaatttccagacagtccatgggagagttgtactgttcggtacaagagtgacctcactgaaacacatttgcatagtccttgggagctttttgatgctgatactgaatgggaacagcctcacattgatgatgacatgagaaataaactgcaatccgctctcaccaaattacagcagtcaggcaacacagtccaggatcgttatggagtgcatgaattgaagaaaatttcaaacaagtccaaatttataaacaggtttcctgttcctatatccattgaattgatacagtcaaggttggagaacaattactaccgtagtttggaggcgctgaagcatgatgtgaccattctactgtccaatgccaccacttttcttgaaaaggatgcagcgctgtcagcaaaaatcaaacgcctttcagaatggttcacacgggcattatcatctctatagctcttggctttctggagtcacaggccagcattatggccgaagcagcctagctggttattcccccccccatacattttttgtagatagatttttaaattatccccttggattcgttttctcttgttcgctgaattagcttctgaggatagagataggaatatcgagataaagtagcattttgctgtggaaaattcatgcggctacattcattgtttgtacagagacaccacattgtggcaaatgtataattcgcattcagattaaaaaaaaaaaaaaaaagggcgggccgtccgctgtataggagcctacgcacgcgtgcg

SEQ ID NO: 957 - DNA, 1367 bp, Glycine max
tcagctacgtaggccccccccccccccccattgtcgaattaggccatttcttccagggcaaagtcaaagccatacaacaattgagtttgttggtgatgatggagaactgattgttggcaatcctcttaaacaaggaaaagaaaatcgcaagctttttaaatttaataaggttttcggtcaagcaacaagtcaagaggaaatattcaaggacactcaaccattgattcgatctgttcttgatgggtacaatgtttgtatatttgcttatggtcaaactggctcgggaaagacatatacgatgagtggacctggcctatcatcaaaatcagattggggagtcaactatcgggcacttcatgatcttttccatatctcccagagtaggagaagctctattgtttatgaagttggagttcaaatggttgaaatttataacgaacaagttcgtgatttactatcaagcaacggtcctcaaaagagacttgggatttggaatactgcccaaccaaatgggttggctgttcctgatgcaagtatgcattctgtgaattcaatggcagatgtcctcgagttgatgaatattgggttgatgaatcgggcaactagtgccacagccttgaatgaaagaagtagcagatcacacagtgttctctctgttcatgttcgaggaacggatttgaagaccaacacactgttgcgtggatgccttcatcttgtagatcttgcaggaagtgaaagagtggatcgttctgaagcaactggagacaggcttaaggaggctcaacatataaataaatcactatctgcactaggagatgtaatatttgctctatcacagaagagttcacacgtgccatatagaaatagtaaattgacccaacttcttcagagttcgttaggtggtcaagcgaaaacccttatgtttgtacagcttaatcctgatgttgcttcatattctgaaactgtaagcaccttgaagtttgctgaacgggtttctggcgtggagttaggcgctgctcgtagcaacaaagaggggagggatgtgagagaacttatggagcagttggcatctctcaaggatgtaattgcaaggaaggatgaagagattgaacggttacagtcactcaaggctaatcataatggtgcaaagcttggtatgatctcagtaagacatgggtcatcatctccaaggagacattccatagggactccccgaattagcacgagacttgcaggagcaaggagctttggagtcaatggaaaggcagcttctgacatggataactgctcagagtatagtgataagcattcagaaactggttctcatcaatcaatggatgatttcaggaacaagtccagttcccttc

SEQ ID NO: 958 - DNA, 2280 bp, Glycine max
gaaatccccttgctattcttactatatgtaacccttgtctattgcatttgcaggatgcaggatatgagacaatcatggtgaactcaaaccccgagacagtttccacagattatgacactagtgaccgtctatactttgaacccttgaccgttgaagatgttttgaacattattgatttggaaaggcctgatggtatcattgtacaatttggtggtcaaacaccattgaagttatctctccccttacaacaatacctagatgaacacaagccagcatgtgctagtggggttggtcatgtacgcatttggggaacatctcctgattccatagatattgctgaggaccgagagaggttcaacgtgatgcttcatgaactaaagattgaacacccaaaaggaggaattgctaggagtgaaactgatgcacttgccattgcagcagatattggatacccagttgttgttcgtccttcttatgttttgggtggtcgagcaatggagattgtatatagcgataataaactggtgacttaccttgaaaatgctgttgaggtggatccagaacgccctgtattaattgacaagtatttatctgatgcctgtgagattgatgttgatgcactggctgactcacaaggtaatgtagtcattggtgggataatggagcacattgaacaggctgggatacattctggtgactctgcctgctctattcccaccagaactgttcctgcttcttgcttggagacaatcaggtcgtggacagtaaacttggctaaacaattgaatgtttgtgggctcatgaattgtcagtatgcaataactccatcaggggatgtatttttgctagaggccaaccctcgagcttctcgtacagttccatttgtatcaaaagcaattggccatcccttggctaaatatgcttcccttgtcatgtctggaaagaccctctatgatttacagtttacaaaagaagttatccctaaatatgtgtcagtcaaggaagctgttcttcctttttcaaagttcccaggctgtgacgtgtttttaagtcctgagatgcgaagtactggtgaggtcatgggtattgacccttcttataatattgcatttgctaaggcacaaattgctgctggccagaagttaccactttctggtaccgtgttccttagtttgaatgacttaacaaagccacatcttgagaagatagcaaaggcttttgttgagaatggtttcaagattgctgctaccagtggaacagctcatgttcttaacttagctaaaattccagcggagcgagtgctgaagttgcatgaagggaggcctcatgctggtgacatgattgccaatggggacattcagctgatggtggtaaccagttcagatgatgcacttgatcggatagatggtctggccctgagaaggatggctttggattacaaggttcctatcgtgacaacagttaatggagctctggcaactgctgaagctataaacagcttgaaggccaactctatcaaaatgatcgcacttcaggacttcattgatggtgaatttaatgagtgagaaagttttttgcagacaaccactttctttctgaattggttaaggcgatacacaccccttaccgtgagattgtacaagttgctagatttgggagtggcagatgaattgctatgggatgctttcatttgtaaagtttccagatgagatatgtaaaggtcatgtagtctgtgtcctgactcctgatatatagcatttgtgtttttgtgtaaacggttttgtagtatttggatatctactgcttaataattaaactcattttttaaatcttacagcatgcagttgatgctgatgctgcttagccatttcatttataaggctttcactttcatcaacccttataattgatttgtagaagaaatccagctatcatcatccttcaacttcaaaattaaacaatcataaaaataaaatacctttttttaaaaattattttagatttttaaatcaaaagtatgcttgtttgagctaacaaacatctattgttaattatttaattgtaaaaaattcagctcctaaacactgtaatgaggctgaatgatgttatttattgtttatttagatttttaaccctttaaaattattaatttaaggtacaacttactcttgaatcttcaaccccttgtcttttgcagccaattcagcaactccattagatcatatgggtctttcataaaattcctttaagaaaactttttatggctttcaaatcattagt

SEQ ID NO: 959 - DNA, 1377 bp, Glycine max
acgagaatcaaggccctggaagagtccgggggatggttagagaggacaactgtagaagatatggacattgctgtccgagctcatctgaatggttggaaatttatcttcctaaatgatgtaaaggtaccttgtgaagttcctgagtcgtatgaagcttataggaagcagcaacaccgctggcattcaggtcctatgcaactttttaggttgtctcttccagcaattgtgagatctaaggtgtctccatggaagaaagcaaacttaatactgctattttttctgttgaggaaactgatccttcccttttactccttcaccttattttgcataattcttcctctaaccatgtttgtaccagaggcagagcttcctttgtgggtgatctgctatgtgcctgtatttatgtcactccttaatattcttccttctccaaaatcctttcctttcattgttccctacctccttttcgaaaacaccatgtccgtcaccaaattcaatgcaatggtctctggtctcttccaattgggcagctcttatgaatgggttgtcaccaagaaagctggcaggtcatcagagtctgatttactggctgctgcagaaagggaagccaagtcaatagaacaaaagattcatagaggagcttctgacagtgagcttattgagtcaaaccaattgaaggaacacaaagaagcagctcctgcaaaagttaagaaatctaataagatatatacaaaagagctgactttggcattcctccttctcaccgcttctgtcaggagtctgttatctgcacaaggagttcacttctactttctacttttccaaggggtgaccttcctccttgtggggcttgatttgattggagagcagatgagctagttttcattcaaaaaatcataagagatgatgaatggaaaacaacacctactgatttatcagccaagttgcattccagcaacaaagtgaaacaatgaagcatagttaaaccctttctttcattctaaaatttgcagtacaggtctagccaacacataattattgattgcaagtaccaaaacaaggtttctctgtaatccaactctatatccattttgcattcacacgattcatcccaagtattccttatagggcactgctcattgtactcttacaggtattgaattcttgtttactggtattggaagtgtataaaatcttcagttttcttcattgtgttcttgggattgggatttctaattccaaatgtctgagtggagtgcatcttgcttgatgtgtcttgaatcataggtgccttcatggtaaatagggtgtgtaaaccaggatatctttctgtacattcattgttatctaatttaaacaataaattttattcccctt

SEQ ID NO: 960 - DNA, 592 bp, Glycine max
ctccacaaccttagcttaagctttattttcactaaactaacttcctcaaatcaattacaatttttggacattttctctctcaaccctccaacaatattcccttctctctcatcattctcatgacataatcacatcacacaattgatttcctcaattacttctaatccacaatcaaatagcgcagcatggaagaatctgcgccccaacccaaaccaatcttacagaaaccccccggttaccgggaccccaactccaaaccgccaccacctcctcctcgaaagctcatgctgcccccccccttccagcccaaacggaagcgtcgcaacttctgccgcatatgctgctgtaccttctgcatcctcatcctcatcctcctccttgtgctcgttatcgccgccgctctcttctacctcatctacgacccctccctccctgagtttcacctcggctccttccgcgtccccaaacttaacgtcaccaatgccgccgacggggcctacctggctgccgacacggccgcacgtgtcgaggtcaagaaccgcagcggcaggatgtcgtggcatttctcccagagccgcttctcggtttcggc

SEQ ID NO: 961 - DNA, 2530 bp, Glycine max
  misc_feature (7)..(7): n is a, c, g, or t
tcccggngtcgaccctcgcggccgcagctttgtagtttcttcttggtggatccattcagatctcatccacgatgtgttgcatttgtttttcacgatgctgaacccgaagccgcgcttcttctaatcacacgacgactcattccgtacacttgacactctcgtcaacaatggccgatgttgccggagccacagtgagtccctctatcggtgaaaccaacgatgcgcagaagaatgtgttcgatttgggagcgtttgttggagacctaactttggaagatgatccaagcagcgatgatatatcattggaaggactagaacaggaactagaagagtgtaagaacaatgatgtagttgcaaatatactgtctaaaggtaccaaacttagggattatacaaaaggagttgagaacgatttgcgcaaagttgaattggattcaattcaggattatattaaagaaagtgataatctagtttctcttcacgatcaaattcatgattgtgatagtatcttgtcacagatggaaactcttctaagtggatttcaggctgaaattggttccattagttcagacataaagattctccaagagaagtctatggatatgagtttgagacttaagaatcgcaaggtggctgaatccaaattggctaagtttgtggaggacataataattcctccaaggatggttgacgttcttgttgatggagaggtcaatgaggaatatatgagaactcttgagattctcagtaaaaaactgaagtttgtagaagtagatccaatggttaaagcttcaaaagctctaaaagatgtccaacctgagcttgaaaagctcaggcagaaagcagtttcaaaggtgtttgactttattgttcagaaactttatgcactgagaaagcccaaaacaaatatccaaatacttcaacaaagtgtccttttaaaatacaagtatgttgtttccttcctcaaggaacatggcaaggaaatatataatgaagttcatgcagcatacattgatacgatgaacaaggttcttagtgctcatttccgtgcttatatacaagcattggagaaactacaattggatatagcaacatataatgatttaattggtgtagagactagaagcagtggcctattcataagagcaagggaaccgctgaagaatcgatctgcagtatttgctcttggggataggattagtatattgaaggatattgatgaacctgcattaattcctcatatagctgaagccagctccaataaatatccatatgaggtcctgttcaggagcttgcagaagctgctgatggatactgctacttcagaatataatttctgtgatgatttctttggagaagaatctatattttatgaaattttttcaggtccatttggtgtcattgatgagcacttcgattctatacttccaaattgttatgatgctataggcctcatgcttatgattcgaataatacacaagcatcagctcatcatgtctcgaagacggattccatgcttggattcatatttagacaaggtcaatatatccttgtggcctcgatttaaattggtatttgacatgcacctcaacagcttgcgtaatgcaaatgtgaagacattatgggaagacgatgttcatcctcactatgtcatgaggcgttatgctgagtttactgcttcgcttatccatttaaacgctgaatgtggagatggtcagcttgatttgaatttggaacgacttagaatggctgttgatgacttatttatcaagcttgcgaagaacttcccaaaaccaaaatcacaaactgtgtttcttataaacaattatgatatgacaattactgttctgaaggaagcaggtcctgaaggtgggaaaattcaaatgcactttgaggaactgctaaagagcaatacaacaatatttgtggaagaactgcttcaagaacattttaatgatttaatcaagtttgtaaagtccaaagcctccgaggacccaacatcaagtccggataagcccataactgttgcggaagtcgagccactagtgaaggattttgcgagtaggtggaaggctgcaatagagctgatgcataaagacgttattacttctttcagcaacttcttgtgtggtatggagattttaagggctgccttgactcaattgttgctttattacacaagactctcggattgcattaagagaatcgtcggtggatctgcattgaacaaggatcttgtttccatatcttcaatcatgtatgaaattaggaaatactcgcggactttctgatttgtcgaggatgtcatagttatttaccggatctaattcacaatgaatgctattccatgtagtattatgccaaaaaacaactctcttggatcctgtatgtaaatgaaaagatagtttgcttctttcgggaaacccaaataagtgagcttttttttgtgcaacctatttgggaattacaaaagtacaagtaaaagagaaagcacactgttgttgtataatggaagacacatcagttgttc

SEQ ID NO: 962 - DNA, 1474 bp, Glycine max
agatttaaaatagaaattattggtatcggtacggggcaggtgcaaaatcacgtgtgaacctcatccctgtgaatgccgctccacttccaaggcaaactctgaaacctctctggttctctgtgacagcggaacaaattatatgatcatgtattcgttgacactgaaacccttcttcactcctcaattagtttcttcgtcttcttcaacttccacttcgtcctcttcgatttctctcgtgtccttcccatctcgttcggtctcatcaattagctttcccagaaatttaaagcacaaaggaagatttggtctcagagttgaagcatacgattcctccaataatgacacttccaaccctgccagtgctggcggcgactccaaaccccctaatggcactttgtcaaagagcaggagagaaattttactggaatatgttaagaatgtgcagccagaatttatggaattgtttgtgaaaagagcgccacaacaggttgtggatgcaatgcgacaaacagtgacaaatatgattggaacactgccccctcaattttttgctgtaacaattaccactgtagctgaaaaccttgcacagctcatgtacagcatcatgatgactggatacatgttcaagaatgcgcaataccgtttggaattgcaagaaagtttggaacaagttgttgctcttccggatgtgcaagataaaaaggatgtgccagactatgcacctggcacacaaaaagaatgtttcaggtgaagttattcggtggaacaatgtttctgggcctgagaaaatagatgctaaaaagtacattgaattacttgaagcggagattgaggagctgaatcgtcaagttgggagacaatctagcaatggacaaaatgaactgttggaatacctaaaatctctcgaacctcgaaatttgaaggagttgaccagtagtgctggcgaggatgtagtgtttgcgatgaatacatttataaagcgcctgctggctgtttcggatcctagccaaatgaagactagcgtgaccgagactagtgcagctgaacttgcgaagctgctttattggttgatggtggttgggtacagcatacgcaatattgaagttcgttatgacatggaaagagtacttggcacccctccaaagctagctgaattgccgccaggtgaaaatgtttaagcagtctggagtaaagtagttcaacaaagtactggtgtctcttagttgaagccaagtgccctaattagattttgcactttttttgttgattggctgaaaggccagtcatgagctcaaagagaagtctgcatttttcagcggccatgaacgattgatctcttaatattattaatatatttgatgaaacttttattcacaattatactgacaaagatatcaaggtcgattccctgaagatgtgctatgcttttatattacttctttgacagcctgaactgtggtgattttttttaaaa

SEQ ID NO: 963 - DNA, 1271 bp, Glycine max
  misc_feature (18)..(19): n is a, c, g, or t
tcgagtcagctacgtagnnaccccccccccagtcgatcaaataggagagcagttgcagaggccggtggtgttcaggttgtattggatctgataggttcaagtgatccagaaacatcaattcaggcggcaatgtttgttaaacttctcttctcaaataatactattcaagagtccgcgcccgcggactcgggccgagcaattactgccgctattgagaaagatttatgggcttctggaactgtgaatgacgagtatctgaaagccttaaattctctatttaccaacttcccaagacttagagcaactgaaccagcaacgcttagcattccccatctggttacagccttaaagacaggttcagaggcttgtcaggaagctgcattggatgcacttttcctgctcagacaagcttggtcagcatgcccagctgaagtttctagagctcagtcaattgcagctgcagatgctattccattgctgcagtacttaatccagtctgggccacctcggtttcaggagaaagcagaatttttattgcagtgtttaccagggacattggtggtgatcatcaagcgtggtaacaatatgaagcagtctgttggaaacccaagtgtttactgcaagcttacacttggcaacactccaccaaggcaaacccaggtggtttcaactggccctaatccagagtggggtgagagcttttcatggacctttgaaagtcctccaaaaggccagaagcttcatatttcttgcaaaaataagagcaaagtgggaaagagtaaatttgggaaagttacaatccagattgatcgagtggtaatgcttggatcagtagctggagagtatgctttgttgcctcaaagtaaaagtggccccccacggaatctagaaatagaatttcagtggtctaacaagtgataccatccagctttcaaattggaacgttaaagatcaagctggaaagaaatttttggattttttttttattacaccacatgtatatagctgttgtttatttttggtcaaaacagattcttttgtcataatattcttttgtaacttgatctttcattcctaggataaacactaggagcacgaagatcaggccagcttcgagtttcttgtatgattctttgcgtgttgtcaatttaaagtgatatagcgagtctgtttttgtttatcatttttgctttggggcttgcataagtacgtcttagtataattatttgacactaaattgaacgtaaaataacagtgacaaagattgtcgt

SEQ ID NO: 964 - DNA, 1424 bp, Glycine max
gttaggaaaagccaggcctgcttggtaaagtgggaatggtgaaagctggagttattgaaagcgtccttgacatcttacatgaagcacctgattatctatgtgcagcttttgctgaactgttgcgtatattgaccaataatgctagcatagctaaaggaccatctgctgctaaagtggttgaacccttgtttttgttgttgacaagacaggaatttgggcctgatggacagcacagtgcattgcaggttttggttaatatcttagaacatccacagtgccgcgctgaccattcattgacttctcgccaagttattgaaccgcctcgccctccccccgattcgccaatttcagcagtgcaacagttggctgctgagcttctttcacatctacttgtagaagagcgccttcagaaggatccagtgacacagcaagcaattggccctctcattcgagttcttggttctggtatacacatattgcagcagagagctgtaaaagccctagttagtattgcactaacatggcctaatgaaattgctaaagagggtggtgttattgaaatttccaaagttatattgcaagctgacccttcccttcctcatgctttatgggaatctgctgcctcggttttgtcaagtattctgcagtttagctctgaattctacttggaagttcctattgctgtattggtaaggttgcttcgatcaggctcagatagcacagttgttggtgctttaaatgctcttttggtgttggaaaatgatgacggaactagtgcagaagctatggctgaaagtggtgctatagaggctctcttggagctcctacgatctcatcagtgtgaggaaactgctgcaagacttttagaagtattgctgaacaatgtgaagattcgagaaacgaaagtaacaaagtcagctatcgtaccattatcccagtatcttttggacccacaaactcaagcacagcaggcaaggttgttggcaactttggctcttggggatctgtttcagaatgaggctcttgctcgaacaagtgatgcagtttcagcttgtcgtgctttagtgaatgtgcttgaagagcaaccaacagaagaaatgaaagtcgtagccatatgtgctttgcagaatcttgtgatgtacagtcgatcaaataggagagcagttgcagaggctggtggtgttcaggttgtattggatctgataggttcaagtgatccagaaacatcaattcaggcggcaatgtttgttaaacttctcttctcaaataatactattcaagagtatgcttctagtgaaacagtcagagcaattactggtgagtttctttgctaatcttgcagtttttactgcttggctgattgagccccttatacttttttcccttctaaattcctacaaaaagatgcataataacatgccctc

SEQ ID NO: 965 - DNA, 620 bp, Glycine max
gcacgcgtaggcacgcgtacgaaaccgctcgagcaggctctggttcgactaatcctatgtaaatactcatcatcatcgttattgtatcgtcgcagacacaacaacctaagcagaagaatagcagacaaatcaacaaccactgccttcatcagtttttacaaatcctcacaacatgttcatgtctctcttcagccacttcgagatcgcacaggcccagaagtggaggttttctttgtcccccgtaaaaggtacgaattccaagcccaacgcggaagccacctcttcctccgcagagtccaaaaccgccggaaaagataagaatccatcacaacccggtgggcccaggtttgcgccggagttggatggactacactgcttcgaatccatcgtaccctgttagatgagatggattccttacacctccaatctaaattcgtttataataatcacatcatatcaaagatcataggttattcaattcaatttatttttactgtatagtttaatcaatttgttggggaagccatgtactatacccgagagatcaatttgtgtttccctgtaactcgaaatttgaaatagtaatattcttcttattgctgattaaaaaaaaaaaaaaa

SEQ ID NO: 966 - DNA, 1400 bp, Glycine max
taccgcggcggctacgtgcccccccccgaagcagcttaacaacaaagcaccatttctcttccctcaactaaactcatattccaaaacgcagagccaaaccatgtcgttccccttcaaccactctcacgccacccacacccaccaccgcagggacgacgacgacgacgaacgacccaccgtttaccctccgccgggaaactccttcagcaacccgccacctccgttctacggcgtccctcaaccaccaccccctcagccggagacccacgtgttccattccgctcacgtgacaccaggacacgtgtcccatgacttcaacaactactccgctcccccgcctccacccccttcccaccatcatcatgatcgtcatcatgactccttcacccacgcttacccacctgctcccgctgcagctgattaccccgctcacggaggcagcagtaccaccgtgcaccacgtggctcacgagtctcaccaccacaccccccattccgctttctcctcccacaacaacgcaccccccaccactgttcatcacgtgagccaccaggttaacaccggtggtctctcgaccaaacccactgtcagggttttcaccaaagctaatcccaatttctctctcaccattcgtcgcggccaagtcattctcgctccctccgatcccaccaatgagtaccagcattggtataaggatgagaagtacagcacgagggtgaaggatgaagaggggtgccctgctttctctttgatcaacaaggccactggtgaggccttgaagcactccatcggtgctactcatccagttcggctgataccttacaagccagactatcttgatgagtctattctttggactgaaagccgtgacttaggagatggccacagagctataaggatggtcaacaatgttcatcttaatgtggatgcttttcatggcgataagaattctggaggtgtgcgtgatggcactacaatagtcctctgggactggaacaaaggtgataaccaacggtggaagatcttaccttactgagtaaaattgacgggatttgtgagtggctttgaagatgcattaagttgagaggactattggcccttctatttgagtagtttggtgttgtctagagtatgaatggtgtgtattgcatttactggtaccaagcaatcggcttttttcaatagaataagtgtgtttatctaatatttattgcatacatgtggcactggttaatgtgctgattgccatatatatattggtatacagttcatgtatcttcttactagtatatcttaatgtgattcagtgtgaacaattacagctgtaaaaaaatgttccatctatccctgatgagtgatgattagttaactaacccggggagagtccaatgtgccttgct

SEQ ID NO: 967 - DNA, 1173 bp, Glycine max
cacccatttctcccgcgcctcctaaactcatatttccaaaacgcagaaccaacaatgtcgttccccttcaaccactctcaccgcagggacgacgacgacgacgacaaacgacccgccgtttaccctcctccgggtaacaccttcaacaaccctccaccacccttctacggcgtccatcagccagaaacccacgtgtcccatgtcttcaacaacagcaactactccgctcccccgcctccaccaccttcccataaccaccaccatgactccttcactcacggaggcggcagcaccgtgcaccacacccctcacaacaacgcgccacccaccacctctgttcatcacttgagccacctggttaacaccggtgttctctcgagcaaacccactgtgagagttttcaccaaagccaatcccaatttctctctcaccattcgtggcggccaagtcattctcgctccctccgatcccaccaatgagtaccagcattggtataaggatgagaagtacagcactagggtgaaggatgaagaggggtgccctgctttctctttgatcaacaaggccactggtgaagccttgaagcactccatcggtgccactcatcctgttcggctgataccttacaagcccgactatcttgatgagtctattctatggactgaaagccgtgacttaggagatggccacagagctataaggatggtcaacaatgttcatcttaatgtggatgcttttcacggtgacaagaattctggaggtgttcgtgatggcactacaatagtcctctgggactggaacaaaggtgataaccagcagtggaagatcttaccttactgatttcaattgacgaaattatcaatggctttgaagatgcatcaagttaagaggatagttggcccttgtatttgagtggtttggtgttgcctagagtatggaatggtgtgtagtgcatttgcttgtaccaagcaatcggcttttttcaatagattaagtgcgttttatgtaatatttattgcatacatgtgacactggttaatgtgccgattgccatatatatattggtatacagttcatgtatgtccttatatcttaatatgattcagtgtgaacaactactgctgctgttgttacttgttacatggggagactacaatgtgacttgctagcata

SEQ ID NO: 968 - DNA, 1071 bp, Glycine max
attcctatcctcttttccaaatttccatggcttctgcggatgttgaataccgatgctttgttggtgggctcgcttgggccactgacaactacgatctggagaaagccttctctcagtacggtgacgtcgttgaatcgaaggtccgcatcgcatatgatctgacacaattcggatccggaatttctccatcccgttctgatctgtgatctctgatctatttgcgttacttgttctatgatatgatacttgtgttactatatgattcttttattactcacgccaataggtacgttcatcttcatctttttgccaaagaagaagatcgatcggtttctattcggttctggtttttgttttcgtgctgttttgcttttcatttcaatttgatgaaccgtttgtggttttatgtgtagattatcaacgatcgtgagactggaagatccaggggatttggatttgttaccttcgcctccgaggattcaatgagggatgcgatcgaagggatgaacggtcagaaccttgatggacgcaacatcactgtgaacgaagctcagtcccgcggaagccgcggtggaggcggtggcggttacggaagtggcggtggatacaaccgcagtggtggtgctggaggatacggtggccgtcgggaaggtgcatataaccgtaacggtggtggttatggcggtgacagagaccatcgttacggaccttacggggacggtggatcacgctactctcgtggtggtggtgatggaagctggagaaattagggcttaatgttgtagattagtgtttattgctatgtttgtgttccgtaattttaggtgttacggtttggtaatttgtcttggtttggggctcctggatacggttttttacctatatatctctggttgtgtagaatcgaataaatgaaaagattgccagaaattagggtactactatagtgctatcacatttcaacagatttttatttggaaaatattttaattgcaccaatgccgtttgcttattggttctgataagctaaaaaaaaaaaaaaaaaaaaaaaaaaaaaaaaaaaaaaaaaaa

SEQ ID NO: 969 - DNA, 1631 bp, Glycine max
ctccctttaagatttgaaattaagtgggccagcagaatacggcggccaaataacttagatgggttgggaatgagggtagtggcgagacagtgagagggtggaaatggcggctgtggcagcgagaagcacaggcagcgttggtgttggtgctgtcatcttcatctcagtcgctctcaccacttatttcatctcgaaaaagaagaagaagaagaagaaggaatccaggaagaagaagaagggactggtggacgccataggcaacactcctttgattcggatcaacagcctctccgccgccactggttgccaaattctcggcaagtgcgagttcttaaaccccggaggcagcgtcaaagaccgcgttgctgttcaaattattcaagaggctctagaatctggccagctacgtccaggtggaatagtcactgaagggagtgctggaagcactgccattagcattgccactgttgctcctgcctacgggtgcaggacccatgtggttataccagatgatgctgccattgagaagtctcaaatacttgaagcccttggggcaactgttgaaagagtgagaccggtgtccatcacccacaaagaccattttgtcaatattgcaagaagacgggcatctgaagcaaatgagtttgcattgaagcgtagaaattcacaacaattgaatggcaaggaggacaccgagaaaataaatggttatgaatctaatggatgcaattacagctctctgtttcctgaagattgtcaaggtggcttttttgctgatcagtttgagaacctagcgaacttcagggcccattatgagggtacagggcctgagatttgggaacagaccaatggaaagttagatgcatttgttgcagcagcgggtaccggtggtactgtggctggtgtttctaagtttcttcaggaaaagaatccaaacatcaagtgcttcctcttagatcctcctggctctggtttgtttaataaggtaactaggggagtgatgtacaccaaagaggaggcagaaggaagaagactcaagaatccatttgacactataacagaaggaattggaattaacaggataacaaggaattttgcaatggcaaaacttgatggggcctttagaggcaccgatagggaagctgttgaaatgtctaggtttcttttgaagaacgatggtctcttccttgggagttcttctgcaatgaactgtgttggagcagttagagtagcgcaagcaattggcactggtcacacaattgtaaccattctctgcgacagtggaatgagacatttgagcaaattctatgatgctgaatacttgtctcagcttggtttgacaccgaaagcaattggtttggagttcttaggcgtcaagtgagaaggtttcttcagagtttaaaattttaatgccactgccttggatgagagtggccacctagaagttagaactgagggtgttgtagttattgatatagaagatattacacttattaatacaatgttttggggatattacatggctcattctttgttagtctttcatggtttattgatttattaactaggccaagatgaccaaaaaaaaaaaaaaaattaatatattcaactctaactatttcagtacgggg

SEQ ID NO: 970 - DNA, 814 bp, Glycine max
atttatattttatcagatatttgtaatgaaaattggaagagggtgatgaggatttatttgacatggtgggttttgtggcattagccggtccgtgagtgagttggttgaatggcgagtagccggagaagaacgtttggcaacatgaggtcattcgtaagcaattcgatgggaggtctcaggggcggaagcaaccttgcttcttgggtcgtcgccggaaccctagcctacttcctctggatcaaaccctcccaagacttcaagcgtcaacaacaggagaaggccactcttgccgccgctgagtctgattcttatcgtaaacccattcccgaccctcaggttacgggtttgatatatggaaacaagaacaaggacaaagcaaccaaaccagaggattgattgattagcattcatgtgagtttgttgccttacttctactcagtcctacacaaatacaccatcccaagagttaatgaagatagatagatcatagatgtgagtgtgtttatgatgttcttggcacttggcaggattcaaatggatgtaattaacaatacggcatatctcgtgttttcatgcgcgctcagtttcatctttactaaatattactactgtttattgtattcacgtttatgtgtttatacagtaaattaggttgtctgttttacataacactataacagcagtgctcttcctgtcatatttgttttttttttctttttgtttcgagaatcagcatctgcaagactgtaataatccatccttccggagacaagaggcatgttattataatgaataagtccttctgccattactc

SEQ ID NO: 971 - DNA, 831 bp, Glycine max
cttcagaagaagctacagtcgctctccctattcttcagaccgaagtagctgccgtgctcccccccccgactatcagaggaggaggtcttactctccatatcactccaggcggaggtcttactctccattctatagccggtacaggtcctattctcgatatgatcgacacaggtcatattctcgatctcgctctccgtatagcaggtcacctgtcagcatgcatgacagatcatactctccctatgaaatacgatatgactcgccggatgcgcactcctacagaaggcaccgttaccgatctgtttcacgaagtgcctcgcctgatgatccttattatggaaggcaccgttacaggtctgtttctcggagtgcctcacccaggccaaggagaaggtcaaggaggagctactcacggagtgctacacctgtttcaaagagaagcaactcacgaaatgtgtcccccaggtcaaggaggagccattcaagaagctctaagaggagtggcaaatgtgagaaacgctactcaagaagctcgagtgtgaatgcaagttcaagatcagtatcgaggtcaaatactccaaggtctacctctccttcaacttgaaatttgttggtcctatatggcttaacatcttaggcttatagtggataatatattagtgtggtatatgtatgcagttctagatggagttttcgtttggttccgttcaggacttgtctaaaaaccacctgatcttatttcatgtagtatgggattgaaattatgttactcagtatagattatctaatttcgtacttacaaaaaaaaaaaaaaaaaaaaaaaaaaaaaaa

SEQ ID NO: 972 - DNA, 1050 bp, Glycine max
cgttcgcgagctgggaaaccggcgcgagaaggcgacagaaggggggctgagaactattcgtgctcaacggcgttctccaagtgactctcctcgtcgctcccctagctattctccttatagaagaagctatagccggtctccctattcttcagaccgaagtaggagtcgttcttactctcctgactataggaggaggaagtcaaactatccatatcactctaggcgaaggtcatactctccatactacagccggtacaggtcttattctcgatatgatcgacacaggtcatattctcgctcttgctctccttatagcaggtcacctgtcagcatccacgacagatcatactctccttatgactcacgatatgactcaccggatgatcactcctacagaaggcaccattacagatctgtttcacgaggtgcctcgcctgatgatcgctattatagaaggcaccattacaggtctgtttctcgaagtgcctcacccaggccaaggagaaggtcaaggaggagctactctcggagtgccactcctgtttcaaagaggagcaactcgcgaagtgtgtcccccaggtcaaggaagagtcattcaagaagctccaagaggagtggcaaatatgagaaacactactcaagaagcccgagtgtgagtgcaagttcaagatcagtatcgaggtcaaatactccaaggtctacctctccttcaacttgaaatttgttggtcctatatggcttgacatcataggattatagtggataatattttagtgtggtatatgcagttctagattgagttttggtttggatccgttcaaggcttgtctaaaaaccacctgatcctatttcatgtaggattcaaattatgtactgtcagtatagattatctaatttcgaactttcccttggtttagttccatttttattttgccattatcttcttttagactttgtattttctgtgttgtcttttctgatgttcagatgatatggtctccctaatgtttacattttttataaatagatgattgcccgattacccggtat

SEQ ID NO: 973 - DNA, 1326 bp, Glycine max
tcagctacgtaggcccccccccaattcccctgattcattggagacgcacttgctctcttttgaattatatacaaggaaacaacccacgcggccggccttgcaggctgtaaagcagttactgagattggatgctgaacaccctgattctcatcgttgtttgattaaattcttccataaagtgggatccatgaatgcttctgtgactgacagtgagaaactgatttggagtgtcttagaggctgagcgcccaactattagtcagctgcatgagaaatccctgtttgaggcaaacaactcattccttgaaaaacataaagattctttgatgcatagagcagcttttgcagaaatattgcatattttggattcaaacagaaagtctgaggctgttaagttcattgaagagtcaacaaataacattgtgcccagaaatggagcacttggaccaatcagggaatggaatcttaaagactgtattgcagttcacaagcttcttggaacagttcttgctgatcaggatgctgcattgagatggaaggtgcgttgtgcagagtacttcccatattctacatactttgagggatgccacagctctgcctctcccaactcggccttcaatcagttacgtaagaactctgaaaatgagagtcctaaccattcagtgggtggtcaaaatgtgggctccatcacatcaaacgggaaactagaggcatttaaagatctcactatctaatcaagtcgaaatacacatccatgaggctaaatatatatgcgtgttacccagcttggatgcttgcaaaaccaaacggcgtttgacacttccagaaacgactgtgttgcaatttgcagcaacaacggtcacagttttggtgcgggttatggcaaattctacacacgttattccgatgtattttctttgcatgatttcccccccccccccagctgtgaaatttatttggtttgcaaatgtgtataattttacctcaattatgtcttaggattgactttttcaatttgttcacccctttttttctgggaggtggtagaccggagctgcatggtctttgtaccgttgtcttagattttcattttggtcgttgggagagttacataatttttgttttctggtcctgtatccagtcaacatacatctaggagagcatgttgtatctttcctattttattggcttattcatcatgtataaacattatgtgaaaattttgctactggatgccaaaatgacatgtaattttggatgaattcagtaaaaaaaatggaggttaatattgctgttgaaaaaaaaaaaaaaataaaaacaaaagggc

SEQ ID NO: 974 - DNA, 2426 bp, Glycine max
cccacgcgtccggctgttaatagaataccactagattttctacaaggtgacaaatttcgagaagcagcagacaattatattaggcctctcctaaccaagggcgttccacctccgtggccccccccctcatctttgtacaatcatcctgggaaggcagacattttggaacaacttattcttgagttagagcgttcaattaggatgtctggccaatatcctggaaggatggacaaagaacctccttcaactctcatgtggactttgtttttattggctcagcattatgacaggcgaggccaatatgaagttgctctttctaaaattgatgaagctatagaacatacacctacagtcattgatctatattctgttaagagtcggatactgaagcatgctggtgatttggttgctgctgctgcatttgcagatgaagctaggtgtatggatcttgccgatcgctatgttaatagtgaatgtgtaaagcgcatgttgcaggctgatcaggtggctttggctgaaaaaactgctgtattgttcacaaaagatggggatcaacacaataaccttcatgacatgcagtgcatgtggtatgagcttgcctcaggtgaaagctatttccgtcaaggtgatcttggacgggcactcaagaaatttttagcagtggagaagcattatgctgatattactgaggaccaatttgattttcattcatactgcttacggaaaatgactttgcgtacttatgtggaaatgcttaaatttcaagaccaattgcactcacatgcatattttcataaagcagcagctggtgctatcagaggctatattaagttgcatgattctcccccaaagtctacagcagaggaagatgataatatgtcaaagttgcttccttctcagaagaagaaaatgagacaaaagcagagaaaggcagaagcaagagccaaaaaggaggcagaagagaagaatgaagagtcaagtgccagtggggtatcaaagtctgggaagcggcacgtaaaacctgttgaccctgatccaaacggggagaagttgttgcaggttgaagatccactgtcagaagctactaaatacttgaagttgctgcagaagaattcccctgattcattggagacgcacttgctctcttttgaattatatacaaggaaacaaaagattttgcttgccttgcaggccgtaaagcagttactgagattggatgctgaacaccctgattcgcatcgttgtttgattaaattcttccataaagtgggatccatgaatgctcctgtgaccgacagtgagaaactgatttggagtgtcttagaggctgagcgccctactattagtcagctgcatgagaaatccctgtttgaggcaaacaactctttccttgaaaaacataaagattctttgatgcatcgagcagcttttgcagaaatcttgcacattttggattcaaacagaaagtctgaggctgttaagttcgttgaagattcaacaaataacatagtgcccagaaatggagcacttggaccaatcagggaatggaatcttacagactgtattgcagttcacaagcttcttgaaacagttcttgctgatcaggatgctggattgagatggaaggtgcgttgtgcagagtatttcccatattctacatactttgagggatgccacagctctgcctctcccaactcggccttcagtcagttacgtaagaactctgaaaatgagagtctaaaccattcagtggatggtcaaaatgtgggctccatcacatcaaacgggaaactagaggcatttaaagatctcactatctgatcaaatcaaatacatccatcaggctaaagacacgtgcgtgttacccagtttggatgcttataaaaccaaacggcatttcatactcccagaaacgactgcgttgcaatttgcagcaacaaaggtcacagttttggtgcgggttatggcaaattctacactagccattccaatgtattttctttgcatgatttctccctctcagctgtgaaatttatttggtttgcaaatgtgtataatttgcctcaattatgttttaggattgactttttcaatttgttcacccctttttttgagaggtggtagacgggggctcatgggcttgtaccattgtcgtagattttcattttggtcgttgggagagttacagaattttaggtttctgttcctgcattcagccaacatacatgtagggagagcatgttgtatctttcctattttattggcttattcatcatgtataaacattatgtgaaaattttgctactggatgccaaaatgacattctattttggatgaattcagtaaaaaaattggaggttaatattactgttggaaaaaaaaaaaaaaaaaaaaaaaaaaaaaaaaaactcgagactagttctctc

SEQ ID NO: 975 - DNA, 1338 bp, Glycine max
gaagtgggctcgagcacctagtttgcaagggggattttccagccgggaagtagtctatctgtcttccgagtctattctctgctcatctcactattgtatgcatactctttccttcatccagctcactctcttccgtttctttccctataaaattaactccttaccttcctccaatatttctcttaatcatacttaacgtgcactcaaccacattcatcacaactcacacccttcataagctttgtgttttttcgtagaaacaaagatctgatcatgacgatgatgagcagcagcaacaacaacgttggagaatttggagacaccactctgaccaaggtttttgttgggggcttagcttgggagactccgaaggatgcccttaaagaccactttgagaagtatggtcagatccttgaagctgtcatcatttccgataagcacactggcaaatccaaaggctatggctttgtgactttcaaggaggctgaggctgccaagaaggcttgtgagaattcaacaactctcattatcaatggccgtcgagcgaattgcaatcttgctttcctaggtgctcgtcgcccaaggtcttcttccaatgtttcacctcctccaccgcaagcacaagggggatccaacggtggaatagtgaagaatgttaacaatgcatcaggtccaccaccagccattaatcacgtgcagccatattattatccagtgaggacaactgctctgccattccataatcacactcttcctttctatgggtatgcgcctacctacattgttactgacgtaaactacaattacaatcagaatcagaaactgtgctatggtagcggtggggcctacatgaatgggcagcatgtgtacccgaggcaggctattgtgggcggcaacacactgatgccaatgtatcctctctatcagtatcaccatccaacggagaccattggcgtgccagctcatcacaacttttatcaaacggcaccgtgggtcccaatgaccatcatgtccaagccatcgtctatcgttcctcacacaggtacagttggcacaggtgagtgttttaaaagggttgtctgagaggagcttagttggctaaataacagcagagggaggggatatgatggtggtggccgcacagagcaacattattatctgatctgtcgtggctttactttcctttttttgttgtctttcaaacattgtttcatttttagttgttaatcgtaggcattttgttcttgatgagattctttcattctccttatctgtctaacatatcagcatgtgctgtgaacagttgcattcagttgaaattatcgttttaatttgttc

SEQ ID NO: 976 - DNA, 1558 bp, Glycine max
cgattgggtaccgggccccccctccggtcagctacgtaggccccccccccccgaacaagtgtgagatattataaccctcttagtattcgggttcttcttactcacctacggaacacaggaaaagcctccaaaaccaacccaccgttggcgcgatggctttcccctccaaaggcgatgacgagcaggttctggtgcagcgtaaatcgaatgcgagagttttgacactaaacaggactaaacagttgaatgccctctctttttatatggtttctcggctacttgaaattttttctgaagatgagaaagattctgatattaaattggttgtcgtgaagggaaatggaagggctttttgtgctggtggtgatgttgcagctgttgctcgtgatggaagtaaaggtgactggaggtttggtgcaaatttttttcaaagtgaatttaaattgaattacttgatggcaacatatagtaagccccaggtttcaattcttaatggaattgtcatgggaggtggtgctggtgtttctgtacatggaagatttcgtgttgttactgagaatacggtctttgcaatgccagaaacagctttgggtttatttcctgatataggttcctcatacttcttgtctagactgcccggatttcttggagaatatgctggtcttacaggtgctaggttggatggtgcagaaatgcttgcttgtggtcttgcaacacattttgttccttcatcaaaattgtctttattggaagaagcattatgcaaggtggaaactagtgatccaaatgcggtgtctgcaatcatcaataagtattcagagcaacctttcctaaaagaggatagtgtttatcacaggatggatgtgatcaataagtgcttctctaaaaaggctgttgaggaaatattatcttctctcgaggtggaagctacgagaaaggctgatccttggatttctgcaactattcaatccttaaagaaagcatctccaacaagccttaaaatctttcttagatcgattagacaaggaaggctccaaggtgttggacaatgccttgtttctgattatagagttgtttgtcatattctaaaaggacactacagcaaggatttcttcgagggttgtagggctatactgatagataaagacagaaacccaaagtgggaaccttccaaattggagcttcttagtgatagcgatgttaatcgttacttctctaaacttgatgataaaggatggaaagatttggagcttcctaaaaggtttaataatctgcctacatatgctatttcaaagctgtaaagcatcatcattctcatattttcaagcccaaagtatggaagacacgtattgctccattcaattgattcttggatgtttcaatgtatggcagtttatgaattgctaccgttacaattgataagattttaaaactagtgaagtctaccgttgagaatcagagtatgatactctaataaatgtagtttccaggtataaaaaaaaaaatagaaaaaaaaaaaaaaaaaatctatttatgtgcaattaattcaataagcgct

SEQ ID NO: 977 - DNA, 1617 bp, Glycine max
  misc_feature (6)..(6): n is a, c, g, or t
  misc_feature (1605)..(1606): n is a, c, g, or t
tcgagnagctacgtaggcccccccccatcaaggaaagagtgctgataaaaccctaattcaacccttcttctatagttgtgtggcacagaggacggagccgaagaagccgttttcgcatgcctgcaactccacccagtaacaaaggaagaatctctaccctcttcgctttcactcctcgccaagttttgttaagcaaccaaacaatgaagcacaccactgacaatggaacccccatctcggaacacaaagttcttcttcaccaatccattgcccgttacttggaacgcagtggcttctccaaaactctgaaaaaatttctctccgaagcgcatatcgagaaaaacgatttggagggatcaccagttgatctggaagaaatgtgtctcaagtatttagaaatatgtggcaaagatgggaagtcaaatattaatgatcaaaatgagcaagttgcaggtgggcacagcaaaaacaaagaagagggtaaatccaaggaaaagaagaaaaagaaaagcaagttagtttctgaatctcttgctactaatgtggaagacaatcatttagagtcagtagctactgttgaagaaaataaagtaaaggatggtgtttctacagatgccaaagttatcaatggttctgagaaagagaaaaaatccaagtctaaaatgaaaaagaaggacaagcaaagtggtcaaggtgatgtaatagagcagattggagatcccaatgaaactgtttcgaaggaagagaatattgaagcatcaaacaaagaaatgatgcatgaggtggagaaagattctaagaaaagaaaaagaccaatttctgaagaaaatggtcaacaggttgcagatgaagaaactaaacgccaaaaaaatagaaaatttgaatgaatctaaggaacaaacaaatgggaaccttgaaaagggtggagagaaatcttcggttcagggttctctgaagaaacaacaaaagggatcagttgagaaaaaaccagtgaaacccgcatttcagcgagtacaagttgacaagatacaatttactgatgagaggcttcaggataactcttattgggcaaaggatggtgctgagaatggttatggtgctaaagcagcagaaattcttgatcaagttagaggaaggggttttcgtcatgagaagaccaagaagaaacgtggaagctatcggggaggacagattgatttacaatcccactctgtaaagtttaattattctgatgaggactgattgggaagcatatagaattatagattcgtttttggtttgtagtttgaacaatgttggtggacggcagtattgttttattttgtcggggactgcgcaggattgtactattgttgcccatatttctttaccatcaaacataaagggaatcatgttgctgatatgaaatttgtgatcggggagaatgttacatccaaaagacattgctaggttcaggtaaaaagttgatttccacctgtatgttttctttgtgatttttgctgtacgatcccaaaggaacgataatttttgtagctggcaaaatgaagaaacctttttgtctgaatacctcatcccagagaccatgcagttttaattctacgccgnngaaattgcaga

SEQ ID NO: 978 - DNA, 841 bp, Glycine max
ttttgcagggaaagggtgttgatatcgccctagagccgcccaggccccccccccgtgtggcagttgcagcgcggtggttcacacttcacacggagaacggagtcggaggatccgttttcgcatgcctgcaaccccaccgagtaacaaaggaagaatctctaccctcttcgctttcacttctcgccaagtttagttaagcaaccagacaatgaagcacactgacaatggagctttcaactcggaacacaaagttcttcttcaccaatccattgcccgttacttgaaacacagtggcttctccaaaaccctaaaaaagtttcgctctgaagcgcaattcgagaaaaatgatttgaagggatccccagttgatctggaagaaatgtgcctcaagtattttgaaatatgtggcaaagatgccaagtcaaatcttaatgatcagaatgagcaagttgcaggtgtcaacagcaaaaacaaagaagagggtaaatccaaggaaaagaagaaaaagaaaagcaagttagtttctgaatctcttgccactaatgtggaagatgatcaattagagtcagtagctactgctaaagaaaataaagaaaaggatgatgtttctacagatgccaaagttattaatggttctgagacagagaaaaaatccaagtctaaaatgaaaaagaaggacaatcgaagtgatgaaggtgatgcaatagagcagattggagatcccaatgaaactgtttcaaaggaagagaatattgaagcaaacaaagaaattacacatgaggagaagaaagattctaagaaaagataaagatcgatttctgaagaaaatggtcaacaagtt

SEQ ID NO: 979 - DNA, 1351 bp, Glycine max
tcagctacgtaggcccccccccctccatcggaacctggagtagaagtgcgatcccagtgttagtgtatttcctctctactcactccctccgggatcgatattttcaagaacagaccgaaaagctgttcatcgatctgttggatctgcgagtgaattgggcgaaagaaaatggttaccaaatcagaggaaactcaactgagcaggctagaaaatcaggtcgataacggcggcggcggcgcgtgggagtacctctgcctcgtgcgaaagctgaaagttcggcggtcggagaaagttctgaagcatggtctctctatccttaacgaccccaaacaccgatcctctctcggctccgatgaatggaccttgtatgagcaggttgcagttgctgctatggattgccaatgtctcgacgttgccaaggactgtacaaaggttcttcagaagagattcccagagagtaaaagagttggtaggctggaggcaatgttgcttgaagcaaaaggatcctgggaattggcagaaaaggcttacacaagccttttagaggacaatcctcttgatcaagccatccataagaggagggtggcaatggcaaaggcacaaggcaaaatttctgtggctattgattggcttaataaatatctggaaacattcatggcagatcatgatgcatggagagaattggctgaaatatacatctccctgcaaatgtataaacaagcagcgttttgctacgaggagttgatattatctcagcctactgttccactctaccacttagcatatgctgatgtactttatacgcttggtggattagaaaacctccaaactgccaagaaatactactcatctactattgacttgaccggaggcaaaaataccagagcactctttggtatatgcttgtgcacctctgctgttacacagcttacgaaagggaaaagcaaggaggacaaagaagggtcccagttacaatctctagcagccaaagtattagagaaagattacaagcagagagctcccgacaagcttcctcaacttacaactgccttgaagagtttaacattgtcatcatgatgcagcatctcttaaagattattatttagttacttttgacattttatcagattgttgcgagctttaatcaacatatttagatttcctcaatcattttttccccaatattagaatgaaaattcatattgttctgcattttagcttcgataatgaatatttattgaaagacataaagtttcagatagccctgtactgtagatctaaaaatattgtcatagctttcctaatgcataggacggggcataatttgtttttgaaaaaaaaaaaaaaaaaa

SEQ ID NO: 980 - DNA, 1544 bp, Glycine max
  misc_feature (1521)..(1521): n is a, c, g, or t
agctacgtaggcttccccccccccatttaactataactatcttataataatttgtgaggcggaacctggagtggaagtgcgatcccagtgttagtgtgtatttcctctcttctcactccgggatcgatattttcaagaacagatcgaaaagccgttcatcgatttgttggatctgtgagtgagaagatggttactaagacagaggagactcaattgaacaggctcgaaaaccaggtcgataacggcggcggcggcgcgtgggagtacctctgcctcgtgcggaagctcaaagttcggcggtcggagaaagttctgaagcacggtctctccatcttgaacgacctcaaacaacgatcctctctcggctccgatgaatggaccttgtatgagcaggttgctgttgctgctatggactgccaatgtctcgacgttgccaaggactgtacaaaggttcttcggaagagattcctagagagtaaaagagttggtaggctggaggcaatgttgcttgaagcaaaaggatcctgggaattggcagaaaaggcttacacaagccttttggaggacaatcctcttgatcaagccatccataagaggagggtggcaatggcaaaggcacaaggcaacatttccgtggctattgattggcttaataaatatctggaaacattcatggcagatcatgaggcatggagagaattggctgaaatatacgtctccctgcaaatgtataaacaagcagcgttttgctacgaggagttgatattaactcaacctactgttccactcttccatttagcatatgctgatgtactttatacgcttggtggattagaaaacctccaaactgccaagaaatactactcatctactatcgacttgactggaggcaaaaataccagagcactctttggtatatgcttgtgcacttctgctattacccagcttacgaaagggaaaagcaaggaggacaaagaagggtcccagttacaatctctagcagccaaagtattggagaaagattacaagcagagagctcccgacaagcttcctcaacttacaactgccttaaagagtttaacattgtcatcatgatgcagcatctcttaaaagattattatttagtcactttttgacattttctcagattgttgccaacttgagtcaacatatttagatttcctcagtcattttcttctcaatattaaaatgaaaattcatatcgttctgcattttaccttgggtgatgaatatttattgaaagacatgtaaagtttcagatggccctgtagatctaaaaatattgtcatagctttcctaatgcataggatggggcataatttgtttttgacatccttttaccatttgtttttcattggctatacaaattaagttagaagattaccccctccccccctttttaataattttcttcagggtttcatttagcataaatggtaatattatgctatgatgatgtggcacgttgtagtataaatgaatccctgtcatccggaaaanaaaaaaaaaaaaaaaaaaaaaaa

SEQ ID NO: 981 - DNA, 1061 bp, Glycine max
cccacgcgtgcgttcaaatgtctttatgaacctaaagtgcattctttaaactctacaattgtgcattttgatagcagccctggtgaagaaggtttcaagttttgaaacccccatacatatcctaacccacttcgttgattacgttacaaaagaagtgactgtgaatccgaatccaaatctgaatgggttatcttcaatttggcagacatggtgttaggcaggtccttagatttagagatgctagttgtgataatgttgtggtaaacccactcttatatgcttcccaaggacttcgttacaagaggaagctccaagtcatccttacaactgacatagataagctgggaaaggcaggtgacactgtcaaagttgcccctggatattttcgcaaccacctaatgcccaagctccttgctttccctaacattgataagtttgcttatctcctcaatgagcagcgcaagatctatcaaccaactgaagaagaaaaacaagaagatgtcactctagttaaagagtccaaggaagatatgatgaaagagtatgaaaaggcagcattacgtcttgataaagctcagctggttttgcggaggttaattaatgttcaaaaagccaagtcacgtgaatcaaaagaagaccccttggagttacgttatcctgtgacaaaagatactcttgtggctgaggtggcaagacaactttgtgtgaacgttgcacctgataacctgcatcttccatcacctctatccacattaggagaatatgaggtgccactgcgtataccaaggtccatcccgttgccagagggcaaggttaactggagtttgaaagttaaagtcaggagtaaataaatcactcatcttgttgaattcaagttcacaagggatggaatagtggttttatgctaataaatcattaaattgaatccgaggattataagattttgacattgcttttatttatagaaacagaaacgccactcatttaacaatgtctcttgaatagtctgtttttattgagtggagtctcatgtgttattgacaagaaaaaaaaaaaaaaaa

SEQ ID NO: 982 - DNA, 1461 bp, Glycine max
ccacgcgtccgcccacgcgtccgtacggctgtcagctgcctacacacggggattgtaacagagaaagaaacatttgagcaaaaatggttcaagcacagcctctacaacatgttggtaatggtgcagggaaagaagatcaagcttattttgatccaagtgctccaccacccttcaagattgcaaatatcagagcagcaattccaaaacattgctgggagaagaacacattgagatctctgagttatgttctgagggatgtgttggtagtgactgcattggtagctgcagcaatcggcttcaatagctggttcttctggccactctattggcctgcacaaggcacaatgttttgggcactttttgttcttggacatgattgtggtcatggaagtttttcaaacagtcctttgttgaacagcattgtgggccacatcttgcactcttcaattcttgtaccataccatggatggagaattagccacaggactcaccatcagaaccatggccatgttgagaaggatgaatcatgggttccgcttacagagaaagtttacaagaatctagacaacatgacaagaatgatgagattcactcttcctttccccatctttgcataccccttttatttgtggagcagaagccctggaaaagaaggctctcatttcaacccttacagcaacttgttctctcctggtgagagaagagatgtgctaacttcaactctgtgttggggcatcatgctttctgtgcttctctatctttccctcacaatgggtccactttttatgctcaagctctatggggttccctatttgatcttcgtcatgtggctggatttcgtcacgtacttgcatcatcatggttacaagcagaaactgccttggtaccgtggccaggaatggagttatctaaggggtggtcttacaacagtagatcgcgactatggttggatcaacaacattcaccatgacattggcacccatgttatccatcaccttttccctcaaattccacattatcatttaatcgaagcgactaaagcagcaaaggcagtgctaggaaagtattatcgtgagcctcagaaatctgggccattgccacttcatctaataaagtacttgctccacagcataagtcaggatcacttcgttagcgactctggcgacattgtgtactaccagactgattcccagctccacaaagattcttggacccagtccaactaaagtttttgatgctacatttacctatttcactcttaaatactatttcctatgtaatatgtaatttagaatatgttacctactcaaatcaattaggtgacatgtataagctttcataaattatgctagaaatgcacttacttttcaaagcatgctatgttagaattgaatctacttttcaatacccagatcatcaattagtaaaaaaaaaaaaaaagcggccgctctagaggatcca

SEQ ID NO: 983 - DNA, 1510 bp, Glycine max
ttttgccagggcttctcttgatcgcaccataaaaattgggaatcttggctctcctgaccccatttacattgaatgccatcaaaagggtgaatgtgtgatacttacaggggggacaagcctatctaataactgggtctgatgatcacactgccaaagtatgggattatcaaaccaaaagttgtgtccagactctagaaggtcacacacacaatgtatctgctgtatgctttcatcctgaactacctataatcattactggctctgaggatggcacagtgcgcatttggcattcaacaacttataggcttgagaacccattgaactatggtcttgaaagagtttgggctattggatatctgaagggttcacgccgggttgtgataggctatgatgaaggtactattatggtcaaacttggccgagaagaacctgtagccagcatggataacagtgggaaaataatttgggctaagcataatgaaattcaaactgtcaatataaggagtgtaggagcagatgtggagattgctgatggagaaaggttaccattggctgttaaggagttgggcacctgtgatctctatcctcaaagtctaaggcacaatccaaatgggaggttcgttgttgtttgtggagatggggaatatattatatacactgctttggcatggagaaatagatcatttggttcagcactggaatttgtttggtcttcagatggggagtatgctgtaagagaaagtacatcgaaggttaaaattttcagcaaaaatttccaggaaaagacgagtatccgaccaactttttcagctgagcgaatatttggcggcactgtattggcaatgtgctcctacgttggcccccccccccacgattgggttgagtgtaggttgattcgtcgtattgatgttaatgttaaaaacctgtactgggctgatagcggtgatttagtgacgattgctagtgatacatcattctatatccttaagtacaatcgtgatgtcgttgcatcatatttagatagtggaagccctgtagatgagcaaggtgttgaagatgcctttgagctccttcatgaaatgaatgaacgtgtcaggacagggatctgggttggggattgttttatctacaacaattcttcttggaggcttaactattgtgttggtggtgaggttactacaatgtttcatttggaccgtcctatgtacttgttgggatatcttgccagccaaagtaaggtctatttgatggacaaagaattcaatgttatgggatacacgctacttttaagtttgattgaatacaagacacttgtcatgcgtggtgatttggaaagggccaatgaaattctaccatcaattcctaaagagcatcataacagtgtggctcatttcctggaatcacgagggatgatagaggatgctcttggaagtagcgaccgaccctgactataggtttgatcgagccatacagcttggaagattagaggtacctaagggtattgccactg

SEQ ID NO: 984 - DNA, 1363 bp, Glycine max
tttttttttttttttttttttttttttttttttttttttttttttttttttttttttttcgctttttccttttttattacttgtttagatagtaattcaattcataataatgtagataagatcagactccagcaacctcattaaaaactcattttttgaattcagtcagaccaattcaattaaaaccaaagcaggtacactctgtaagtggatgtgtaagacgaacaactggacagacacacatagtagtacaatgtaaatcatcaaacaataggtccaaccaccaggaatattaaaggtacaattcaagtaagatcatcctcctcaagttctttggctttcagcttttccttcacccttaagagaagtgtggtcttccaagaatccagaggggtcatactatcaaattccttgacaacatcagtaaactttgcaacatcttcttcatcaattgcagcagcaatgtccgccaacaatctatattcacgtgttcctgaaaatgttggatccagttcctgatatcgttctaatgcattggttatagcaacaacgtcctctttacagagttggcagatgccagcattaagaaggtgtcctttaactccatacttcagcaaattattgttgagggattggcgagctatctcttcataaatgtcaatcgacttctgatattgttctagctgagcagcaaactgggcaactttttgtttgcattggttcgcagaagttgtcacttcttcattttgaaaaaaatcagctgatttttcatagtaaacaagagcctgctcaatattctgttcaccctcgtacaattcagcaatttcctttaaatatctagcagccatagagagtcttccaatgtcacagaaaagatttacagctcggtctaagcaagatacagactcgtttatattagtctttttgtagcaatgtgcagcatcgacatgggcctgtgcagcttcatgcttgctttccaacttcaaatgacaacttgccaacttcaggtatgtcgctccagccttgtcccatgatttggcgagcttgaagcaattggcggctttatcgaagagatcggcggcatcttcatacttggagccaaacaagccccaaccgctgagcttcttctcagcctttttctcgaattcctctcccttcgataactgatcggccattttcctccgatcgaaacaaagcaattgaagatggattgattgatcgaattcagtgcgttgcaggaacaagaagaagaagaagaagattcataagcgaaggagcaaaaagatattaattagactgtgttgacgaccaagtccaaatccaaaacccgcaaattcagaattgcgggggcgcgggggttgtc

SEQ ID NO: 985 - DNA, 1591 bp, Glycine max
tcagctacgtaggccccccccccacaaaacctgaaaacctagcagaagcaagtgcacaggaaacaaagcagaaagcagaaagcagaaagcagggatggaaaagcactcagatgaggagaatggcgtagaagaagaacctcgatcacttgagcagaaggagaagcgaaaggggaagcacgacaagccaaagccatgggacgacgacccaaacatcgaccactggaagatcgacaagttcgacccttcgtggaacgacggcggcatgctcgaagttagctccttctccactctcttccctcagtaccgcgaaaagtacctccaagaagcttggcccatggtcaaatcctcactcaaggagttcggtgttgcttgcgaactcaacctcgttgagggttccatgactgtttcaaccaccaggaagactagggacccctatattatcatcaaagccagggatcttatcaagcttctatcacgaagtattcctgctcctcaggcgataaaaatacttgacgatgagatgcaatgtgacatcattaaaatcagcggcatggttcgcaataaggagcgatttgtaaaaagaagacaacatcttgtgggccccaattcttccaccttgaaggctcttgaaatactcactggctgctacattctcgtccagggaaacacagttgctgctatgggttcattcaaaggcttgaagcaagtcagaagaattgttgaagaatgcatgctgaataaaatgcatcctgtatacaacattaaggttcttatgatgaagaaagaacttgaaaaggatccagcacttgcccaggagaactgggataggttccttccaaaattcaagaagaaaaatgttaagcaaaagaaggttaacactaaacagaagaaaccatacactcctttccctccacctcaacagcccagtaagattgatatacaattagaaactggagaatactttttaagtaacaagaggaaatcagcaaagatatggcaagagaagcaggagaagcaggctgaaaaaactgctgaaaacaaaaggaaaagagaagaggcctttatcccacccaaggagcctgcaaacctggtggataaatctgaggatgctaacagtaatgtagctgacatggcaatgtccttaaagaaaaaaacaaagaagtttgggaagcgtaaatctgaagaaaatataaatgccgagacatatattataggatcatcagaacaagcatcgggaaagaaatccaagaagcaaaggtcttaaacataatcttcattttggagatgaaaaatgagcatgtgatgtctatgttaattcaatcaagatcttctgcatccaatgtctttgcagtaacagttttgacaccaatgtattttgaggcatagttgttcattccatttgtcatggagatgagtgcgtggcattgtgtatcttattgtacttgccaatagacagtaagtcagtatcatgtacactacctgttatttaagttttacatcttttccatttcaaaaaaaatgtccgacacacatggtgatgctatatctgtagttttgactatgatttatttgttatattttttctagtccc

SEQ ID NO: 986 - DNA, 1088 bp, Glycine max
tcagctacgtaggcccccccccccacactgctactacttggctagggcacaaccaccgctaacactctgttcattcttctccgtcagtagcagagagaaagagagagagaatgctctcaggggatatacctcccaatcagaccatttacatcaagaatctcaatgagaaggtcaagaaagatgaattgaagagatctctgtattgcttattctctcaatatggaagaattttggatgttattgctctaaagacacccaagcttcggggacaggcatgggtttgtttcagtgaagtcactgctgcaagcaatgcagtgcgacaaatgcaaaacttccctttctatgacaaacctatgagaattcattatgcaaaaacaaagtcagactgtattgcaaaagaagagggtagttttgttccaagggaaaagaagaagaaacaagaggagaaagctgaaagaaagcggcgtgttgaggaagcacagcaatctggtgtggctaatggaacacatagtgcaagtaatggtggtccaactgcatcattccgtcaaggacccggtgctcaagaagcagctgctcctaacaatattttgttcatagagaatctgcctcatgaaactactggtaggatgcttgaaatgctctttgaacaatacccaggttttaaggaagtgcgcttgattgaagcaaagccagggatcgcatttgttgattttgaagatgaggtgcaatcatccatggccatgcaggctcttcatggcttcaaaatcaccccccagaatcccatgattataacctttgctaagaagtagctaattggttttcagccgtctgtttttttgtagatcattgaaaaactaattgcaaacgttgttaagtttacaggaagttagaaaccagcaaggcggagtcagaattcaaccacatttgtggaaaagatgagatagtgctgttataatgtttattaattgtatgttatgttatcaaatagagtttgtaaacttatgagagtttcataaactcaactcgtaagagttcactttatataaaaataattataaaatatttataaacaaaaaaaaaaaaaaaaa

SEQ ID NO: 987 - DNA, 654 bp, Glycine max
ctagcttgctaaattcccttataattattccttcttgtgttgagttgattcaaacataaacacaccaccctgggttcattaattgatttcattttgcagtaataacaagaacaaaaaataagcatgagttgcaacgggtgccgcgttcttcgaaagggatgcagcgagtcctgtattttgcgaccttgtttgcagtggatcgaaaccgccgaagcccaaggccacgccactgtcttcgtcgccaaattctttggccgcgccggcctcatgtccttcatttccaacgttccagaaaatcaaagacctgctctgtttcagtcgctgctcttcgaagcgtgtggcagaacggtgaaccctgtgaacggtgccgtggggcttctctggactgggaactggcacgtgtgccaggccgcggtcgagacggtgctccgcggcggcacgctgaggcccatgccggagctcatgggcctcgacgctgccgctgccgccgcggccgccgccgacgaaacatcggaggccgaagtcggatgcaccgacacgtggaggatccgaaacccgaacacgaattgccggttcacaagctcgcgatcctcctccggcggcggcggtggtaaacgcaagcggtcggaggagctggcaaagcttcaggagcag

SEQ ID NO: 988 - DNA, 833 bp, Glycine max
  misc_feature (825)..(825): n is a, c, g, or t
  misc_feature (828)..(831): n is a, c, g, or t
tcggcgagctgcggcgagaccacagaaggggggaacgaaagagaatggagaacagggtaatattacaggaatggtttgaccgcgttgactcggagaaaagtggaagcataacagcggtacagctgaagactgctcttgctgtgggcaacctggaatttccgctctcagttgttcagcaaatgatcaggatgtacgatttcgacaggaatggtactatgagctttcaagaatttgttgcactcaacaacttccttcttaaggttcaacatgcattttctgatctagagaggggtcgtggttttcttgtacctgatgatgtatttgaggctttgggaaaaattggtttcatgctggattctcctgctttttactctgtctgcgagagctttgatcaaagtaaaaatgggaggtttcggctggatgacttaatatcaatctgtatattcttacaatcagcacggaacctatttaattcatttgatacagctaaacaaggcagagttactctcgatctgaatcaatttgtctattgtactgccaattgcagaatatgattcaactatatgacggtttgagaagatgattcacaaatactgcactttgtaataccataaagtcatcttagagtaagttaaattgtgatggtgttgtataagatgaaaacatctcgggtttggatactatttgtcatctgtctgcaaaatactgtggttttttttttctttccagatgatgtaattttgtttataaaacgtaagttgttataaaacatcttgagttatgataacttgtgaagttgattccccaaaaaaaaaaaaatataanagnnnnaa

SEQ ID NO: 989 - DNA, 962 bp, Glycine max
tgggtaccgggccccccctaccgtccgctccggccgccccccccccatcaccacttggacgcaaaaatggcacctgcaacactgtctctgtctctcctcctcctgttctcactcagcatcgccgtaaccgttagatcgagcgactacgactacgattgtgtgtacactgcatacgttagaaccggttcggtgttgaagggcggaacggactctaagatcgggctgaagctgtacgacaagtacggctactacatctacattaaaaacctcgaagcatggggcggcttgatgggcaagggctacgactacttcgagcgcggcaacctcgacatcttcagcggaaggggaccctgtcttgacggacccgtctgtgccgttaacgttacttctgacggatcgggttctcaccacggctggtaccttaactacgtccaggtcacctccactgggccccacctttcctgcgctcaggatcagtacgaggtggagcagtggctcgctctcgacacttcgccttaccagctttgggccgttaggaaccactgccgctacagtttggaccgggcccagcccgtttcggagcgccccggatccggatccggatctgcgttctctattttgaatgcacgagcctgaggaaggtttttgagtcgctggtgttttatgtgtgcttcgtgtatttatatttattaatattgagaaacagatcgccatagtacttgaattggcatcgggtttgggttaacaacccgttttgtctatgtagtcttcaataataattggccctatctgtatggcctcgatgatctggatatgacagtactactatatgcttaatgcctcaatggtagccaactatttattactcaactttatcttttccaaataatatatagatggaacgattgatggagtaaaaaaaaaaaaaaaaaaaaaaaaaaaaaaaaaaaaaaaaaaaaaaa

SEQ ID NO: 990 - DNA, 889 bp, Glycine max
atttgattgaggagaatgatgaatcatgtgtccctggctggctggctctatttatcagaagctatggcattggcctcatcaccacttggattaaaaaatggcacctgcaacacagagtctctctctcctcctcctgttctcactctgcatcgccgcaaccgttagatcgagcgacagcgactacgattgtgtgtacacggcctacgttagaaccggttcggtgttgaaggggggaacggactcgaagatcgggctgaagctgtacgacaagtacggctactacatctacattaaaaacatcgaagcatggggcggcttgatgggcaagggctacagctacttcgagcgcggcaacctcgacatcttcagcggaaggggaccctgtcttaacggacccgtctgcgccgttaacgttacttcagacggctcgggttcgcatcacggctggtaccttaactacgtccaggtcacctccactgggccccacctctcgtgcggtcaggagcagtacgaggtggagcagtggctcgctctcgacacttcgccttaccagctttgggccgttaggaaccactgcccctacagcttggatcaggcccgccccgtttcggagcgacccggatccggatccggatccgccttctctattttgagtgcacttgcttgagtcgctggtgttttgttttacgtgatttcagtgtatttattaatattgagaaacagatccgaatcctagcttgagttgtcccagatcaccttagtacttgaataataatcggtgatctggatgaaagtactactatgcataatgactcaatgctagtctactatttattgctcaactttatcttttccaaactggttaaataattaatttgatttttatcat

SEQ ID NO: 991 - DNA, 1178 bp, Glycine max
ttttttttttttttttttttttttttttttttttttttttttttttttttttttttttttttttttttttttttttttttttttctctcttttgttttttttttttttttttataattaagtgcaaaatttcatcgctaatccactatttatgaacaacttttgacaataatccattgtatacacaagacaccttgcgacaaagcaagccccaaagatttattaattgacaagaatttgtttttcagaacccaccctcatcacagaaaacaaataatgtgcaggcaaggaacggaatatttgaatatgacacaatgatctaactatcagcggctctaaaaatagtgagcagagacaggaagaggttgatgatgtccagatacaaggagatcgaagcccagatgtattcatcgtacgagtatctcttgatcaggttgtctgtgtcatagatgatgtagccacaaaatataatggctgccaagcaaccatagatcatcacggacaatttacccagtggaaacagaacctgaatcagagcaaagaccatgagaactagcacagcaccaaacaagaaggggccaaggaagttgaaatcatggcctctccttgcagcccaaaatgtgtatagagtcagaccaatcaccaccacagcagtcaatatgacagcttccagaataactttctcgctagtaaaggcgcaactcaatccaacgacaaatccaagagacacagtgaaaacccctaggagcaagtaattgacgggatgcttctgggaatagtagtaaagtggacacaacgttataaagggaacaaaaatgaggacgatgtagagagccagtccggcgccggtggtggcgaagaagacactgattgggcggacggtgacgacgacggcgccgacgacgatggttacgagcaactggatggcgattatggagtacacttttctgatgaacgaccaccgcagttcagggctctcgagcatcatcggatacagaggccgagaaccgctttccaaatcggtttttccgaatggttggttccacatcttgctgctgcgatggtgatgactgagaaactgagaaactgagaaagagagagaaaacgaaggaaaatggaaagaaagtaatttagcgcttttggatcttgggggggggggggcctacgtagctgactcga

SEQ ID NO: 992 - DNA, 1835 bp, Glycine max
  misc_feature (1795)..(1795): n is a, c, g, or t
  misc_feature (1804)..(1805): n is a, c, g, or t
  misc_feature (1809)..(1809): n is a, c, g, or t
  misc_feature (1811)..(1811): n is a, c, g, or t
  misc_feature (1817)..(1818): n is a, c, g, or t
  misc_feature (1824)..(1833): n is a, c, g, or t
atcacactaccccttagagaactaagatgagtctccttcaaattcaatcctctcctcataaccaaaccctcctttctctctctttctcatcttccctctcccattcctcctcactccacttcaaccactcttcttcttcctccaccactctcacccatgctcacacgtgcttccaccctcgcctctcggtggtcacgtgctccatctccaacatccacagctacggcaccgtcgactacgagcgccgccccatcgtgcgctggaacgacgtctaccgcaggatatctctcaaccaaaacccccaagtggggtccgcagaggtgctcaaccagtgggagaacgaagggaggcacctcacgaagtgggagctttcaagagtcgttaaagagttgaggaagtacaagagatttccaagagccctcgaggtatatgattggatgaacaatagaccagagcggtttagagtttccgagagtgatgcagcaattcagttagatttaattgcaaaagttcgtggagtttctagtgcagaagcattctttctgagtctggaagataagttaaaagataagaggacttatggtgccctgttgaatgtatacgtgcattctagatcgaaggagaaggcagaatctttatttgatactatgaggagtaaagggtatgtaatacatgccctaccaattaatgtaatgatgactctgtacatgaaccttaatgaatatgctaaagttgatatgctggcttctgaaatgatggaaaagaacattcagctagacatctatacatataatatctggttatcttcgtgtggatctcaaggatcagtcgaaaagatggaacaagtgtttgaacaaatggaaagggatcctaccattgtccctaactggtctacattcagcacattggcttcgatgtacattaggatgaatcagaatgaaaaggcagaaaagtgcttaagaaaggttgagggtagaattaaaggtcgagatagaataccttttcattatctcctgagtttatatggaagtgttggaaagaaagacgaagtctatcgtgtgtggaatacttacaaatcaatttttccaagaataccaaacttgggataccatgctattatttcttctctggttaaattggatgatatcgagggtgcagaaaaactatatgaggaatggatttcagtaaagtcaagttatgatcctagaattggaaaccttctcatgggctggtatgttaagaaagatgacacagataaagctttgagtttctttgagcagatatcaaatgatggctgcattccaaattcaaatacatgggagattctttctgagggccacattgcagataagaggatttctgaagccctgtcctgcttgaaagaagcatttatggttgctggtggttcaaagagttggagaccaaagccctcatacttgtctgcattccttgagctttgtcaggagcaaaatgacatggaaagtgctgaggttttaattggactgctgaggcagtcaaaatttagtaaaattaaagtttatgcatctatcattggctcacctgattgtaccattgacaatggtgaattgcaaagcaagattgatataactgatagaactgatgatgctgttgacagtgaaaaaaaaaaaaaaaactctcaaatgttgttgaaccaactagatagtagattttgatactttatttcttttttcttttgactagtggaaaatgattagttagaacatactggggattttttgtcaaatatgatgtcatttagagtttcatggctaanaaaaaaaannaaananaaaaannaaaaannnnnnnnnnaa

SEQ ID NO: 993 - DNA, 1476 bp, Glycine max
aataaatgtgtctctcagtttcttaaatcttaatctttcacttcttcgctaatctctagattactcccattcattccattttgtttcattaattaaccaaataaaaaacgatgagcacttctcatcaacaacgttatctcctcttcgctttcactacgttaatagttttcttcagcttcaacactacaccagtttcggctcgtttgttccccaacgtttcctccatcccaaggtggaacacatcccacgcgccacctgatagcgcgtggaacgcgtatcgcaatttcactgggtgccgcccgggaaaaacatataacggtctttcgaatctgaaaaactactttcattattttggctacatctccaacgtgtcctcgaagtcgtcgaattttagcgacgatttcgatgatgcgttggaggcagccgttagagcctaccagaagaacttcaacctcaacatcacaggggagctcgacgaccccacgatgaaccaaatcgtcaagccacgctgcggcgtggctgacatcatcaacggaaccacaacaatgaactccggcaagacaaacaccacggattcaccgacgttccacacggtagcgcattattctttctttgacggccagccgcggtggccggtggggacacaagaactaacctacgccttcgatcccgataacgctctcgacgacgtgattaagaccgtgtttggcaacgcgtttagcagatggtcagaggtgaccacgatttctttccgcgaaacggcgtcgtatgtggctgcggacataagaatagggttttacggtggggaccacggcgacggcgaaccttttgatggcgtgttggggacgttggcgcacgcgttctcgccgacgaacgggatgttccacctggactcggcggaggactgggtggcctccggcgacgtgacgaaggcgtcgctgtcgaacgcggtggatcttgaatccgtggcggtgcatgagattgggcacttgctagggttagggcactcttcggttgaagatgctattatgtaccctacgattaccgcgaggacgaggaaggtggagctcaacgaagatgatatacaagggattcaggttctctacggttccaaccctaatttcactgggactcctgctacctcttcgcgtgagagcgacacgagcgatggtggtgttcggcacgtgggagccacgtgcggtgtgttcttctctcttttgttcttcgttgtgtttggattgcacgtgtgagtttttgtaggacgggtttttttttttttggttgtttgggagttttgtacagggggggcgtttctgatacgcacgcgggtatacggatacgtagtgtataggatttcgttttggtccgatacggtacgctttgtaccatcattccttagcattctttttgcgtgatggtctattaaagaataataatatacagttccaaaaataattctttgaaactaaaaaaaaa

SEQ ID NO: 994 - DNA, 1660 bp, Glycine max
tcagctacgtaggccccccccccccttctcttttcatccctcttctagctatagtttttacgttataaggtggcttagggttttcaaatggctatggagaattaattatacatctagaagtaacttcatgaagaattcttgagagtttgtaatttgtttctttttttatgtcgtccagtggtgctcctcacttgaacattaatcttcaaatgaattattggccatcccttgcttgcaacctacacgagtgtcaagagcccttatttgatttcatttcctctttgtcagtcattggtaaaaaaactgcaaaggtgaactatgaagcaaatggctgggttgtacatcaagtttctgacatatggggtaaaacatcaccagatcgaggtgaggctgtttgggctttatggccaatgggtggagcttggctttgtacccatttatgggagcattatacttatacaatggacaaagtttttcttaaaaataaagcatatcctttgttggaaggatgcacatcatttttgttggattggttgattgagggccgtggtggattattggaaactaacccatcaacttcaccagagcacatgttcactgcaccagacggaaaaactgctagtgtgagctactcatcaaccatggacatttcaatcataaaagaagttttctctatgatcatttctgctgctgaggttttaggaaggcataatgatactattatcaaaagagtcaccgagtatcagtctaaacttcctccgacaaaagttgctagagatggttccattatggaatgggcagaagattttgtggaccccgatgtacatcatcgacatgtttcgcatctgtttggactgtttccaggacacacaattagtgtcgagaaaactccagacctctgtaaagctgtggaagttagtctaattaaaagaggagaggatggtccagggtggtcaacaacttggaaagcttcactttgggcacatcttcacaatagtgagcattcatatcgcatgataaaacacttgattgtcttggtggagcctgatcatgaaagggatttcgaaggaggactttacagcaacctgttcacagcacatccccctttccagattgatgcaaactttggtttttcaggagcagttgcagaaatgcttgttcaaagcacaatgaaggacctgtacttgcttcccgcattgccacacgataaatgggcgaatggttgtgtgaaaggattaaaagctcgtggtggggtgacagtcaacatttgctggaaagaaggagatctgcttgaatttgggctttggacagaaaaccagaattccaaagtgagactacattatagaggaaatgtggtctcagcaagtttatcacccggcagagtttattcatatgataaccagttgaagtgtgcgaagacatactcccttagtgaagtgaatccttgaatcttttgcaataaatcttctgaagaacatacattgctttttgcaatgtttgatgtagttttgtggaacaagatacatttatcttgtttcctaatattattcttccagagtcatttagtcaccgagaatgtaatttttactaatttaacggataagttgttttattgaagcatttgttctacggtttgcggtgcaaaaaaaaaaaaaaaaaa

SEQ ID NO: 995 - DNA, 1433 bp, Glycine max
ataagcttgtccaggttagtctttctcagaatcctatagtgaaggtgaagttagaggatatgatggctgctactagtaatttcagcggggagaatgttcttttcgcgacgaggaccgggactacgtataaggctgatcttccggatgggtccacgctcgcggtgaagcggttgagtgcgtgtaggatcggggagaagcagtttgggatggagatgaatcggttggggcaagttaagcaccctaatctggcgccgctgttggggtactgcattgtggaagcggggcacctgcgggttgcccagcacatgtcgaacgggacattgtattcattgttgcataagaatggtggcggtgcattggattggttgatgaggtttaggattgcattgggtgtggccagggggctcgcgtggctgcaccatggctgccaccctccgattatacagcagaacatttgctccagtgtgattcttgtcgacgaggagtttgatgcccggttgatggactttgggcttgcgaggctcatggcttcagactcaaatggtagttttgtgaatggtgatttgggggagctcgggtacattgcgccggagtatcctagtacacttgttgcttcgttgaaaggggatgtgtatgggtttggtattttgcttttggagttggtgactgggcgaaaacctcttgatgtaagcaatggggaggtagagttcaagggtagcttggtggattgggtgaatatgcattctagttctggccgaatcaaggattgcattgataaagccatatccggaaggggacacgatgaggagattctgcagtttctgaaaactgcgatgaattgtgtggtttctcgccccaaggatagatggtctatgtaccaggtttatcattccttaaagagcatatccaaagaccagagtttctttgaacatgatgatgaatttcccttgatctttggtaagccagaaaacgaggttgtggcgtagttcttgaggaagcattgcagcatgagaagatgatgagagattgttctcactgaattgctattttatagtggagagttctcacaatggtgttaatgtttatggtttgagcatgtccatgggtgaccctaatcaggtatagttgtattgtattgtatgatatataataaactttctggcaggttaggttttttgagatcttatctgtttcactgtttgttgtatgcaaatgcaatctctaatgatgtccaaagtgtttggtatatgcttcggatttgaatcctcaaattatatatatgtcttcaagacaaaaaaaaaaaactgggcatctacttgtactctgtaaagacatctcaccatgatgttttttattcgtttagatctaattgttggaatgtttgaaacatttaatttctgtctaaataaaaaactaggtaagcatttgaaaaa

SEQ ID NO: 996 - DNA, 1064 bp, Glycine max
gcttcataaacactcccccgcgcccggcctggcagcacaagaatcccatattctcattctcttaagccagtgattagaagccagtttttctgtgcttcatactacaccttcacaaaccccaagaagaatggaacggggaagaagaagcagctcttttggccctatgtcctcaaccgtcccttgttttctcctccttttgttctgtctctcaggatctgctgaggcctacaagaattatacagttggagactctttaggatggtttgacaatactgagaagtccaatgtcaattaccagaagtgggctgacagtaaagaattcagcttgggagatttcctcattttcaactcggacactaaccactcagtggttcagacatacaatttcaccacatacaaagaatgtgactatgatgatgcacaagacaaggacacaacccaatggtcagcttctgatccatccaacacccaaacacatcctgtgacagtggctgttcctttggtgaaggaaggcatgacatacttcttctcaggtgattatgatggtgaccaatgcaagagtggacaacacttcaaaataaatgtgacctatggacaagggttgccaaagagtcttaaatccccagaagatgctccatctcctgctagtcctgttgctggagatgatgattcagcaccagacactattgttccttccaatttcagtcaccccaaagaagaaaatgatgacgacaaagctagtgacgaccagaaatctagtagttctgtttcaattttaatgcatgcacaacttcacattgtcttattagggatactacttttcttgttttaaagagtcaagatttattttttatatatatatatatatatatatatatattttaaatatatgctactattgttttatctatttttttttatctagtgtgagtgagacagtggggttttgagagattcaactgtgagctaggatataccatatattattattgttgtaaactaaaataatgtaacaattacaatcctttattgttatatatgagtttcaatttagatcatataac

SEQ ID NO: 997 - DNA, 1104 bp, Glycine max
  misc_feature (23)..(23): n is a, c, g, or t
cacgccgtacgctaagcctcggnaattcggcttcgaggccggctcgagggcagcacaagaatcccacattctcattctcttaagcctgtcattaaaaaccagtttctctgtacttcatacattttcacaaaccccaagaagaatggaacagggaagaagaagaagaagctcttttggtcctatgtcctcaactattccttgtcttctcctccttttgttctgtctctcaggatctgctgaggcctacaagaattacacagttggcgactctttaggatggtttgacaatactgagaaatccaatgtcaattaccagaagtgggctgacagtaaagaattcagcttaggagatttcctcattttcaacacggatactaaccactcagtggttcaaacatacaatttcaccacatataaagaatgtgactatgacgatgcacaagataaggacacaacccaatggtcagcagctgatccatccaacacccaaacacatcctgtgacagtgtcagttcctttggtgaaggaagggatgacatacttcttctcaggtgattatgatggtgaccaatgcaagagtggacaacacttcaaaataaatgtgacttatggacaagggttgccaaagagtcttaaatccccagaagatgcaccatctcctgctagtcctgttgctggagatgatgaatcagcaccagacactattgttccttctaatttcagtcaccccaaagaagaaagtgatgatgacaaagctagtgatagtgacaaacagaaatcatctagttctatttcaatctcaatgtatgcacaacttcacattgtcttactagggatactacttttcttgttttaaagagtggagatttattttatattattttttaattatagatatatgctactattattttatctatttttttattgggtgtgagtgagacagtggggttttgagttgaattgtgagctaggatataccacatgttattgttgtaaactaaaataatgtaacaattaattacaatcctttattgctaatttgctatatgagtttcaatttaattagatcatatataatattgcttgtccctttataaaaaa

SEQ ID NO: 998 - DNA, 1322 bp, Glycine max
tcagctacgtaggccccccccccccgatatgtccacaaaacatggcacttttgcaacaaaaactaggcttctcatatctactaatcctttgcttagccactcttgtttcttcacacaggccttatacaactccaagtgtcacacgcttgactgattcttttcctcgtgtccaagttgatagtgctttttctaagacctttggggccaaaaatatccagtttcttagtaatgggtccacggtcacactggctcttgacaaaatctcaggctcaggcttggtatcacaaagcagatactcctatggattcttcagtgctgcaatcaaactaccttctggtttgtcacctggagttgttgttgcattttatttgtctaattcagataaatttcctcacaaccatgatgagatagacattgaactgcttggtcatgataagagaaatgactgggttattcaaacaaatatctatgccaatggaagtgtcagcacagggagagaagagaaattctatttctggttcgacccaacacagcagtaccattattacagcatcttgtggaacagttatcacacagtgttcttagtggacaatattcctgtgagataattcatacacagcaacacatacccttctatttatccatcaaagccaatgtcagtgtatgccacaatatgggatggttcagaatgggctactcatggtggcaaataccctgttaactataagtatgcaccatttgttgtttcatttgcacaaatagaattgagtggctgcatttctgatcccacagcaccagtttcttcatgctctaaggccagttcttcaggcctagacccagttaatggaccagaatttactaagctatcacagcagcagatagcagctatggattgggcaagaaggaagctcatgttttactcttactgcaacgacagatccagattcaaagtcatgccaccagaatgccattgatttaaattaatttgagaaaaaatacgaaaagggaattcctgaaattgcatttattaattatcatgaaggaagcaatagtcatactttatataaattaataccacttttcgatttaatcccttcatggtaaagattttttagaaattctccttttcatgaatttttctgttgaatattaatctttactttttttaaagtatattttttctcaacagtggggaataattacaatgttgtaacttcaattctttggctcaataattgcacgaaagtgtcagaaagagcactggaacagaaaatggacaaaataatgcgttctaattagtactttagtctggtgtcttcgta

SEQ ID NO: 999 - DNA, 1389 bp, Glycine max
ctcgagccgcgctgataagtacgcacacgacacaagtctttgatttttaaactcctcagctacgtaggcccctctgttttattattgcaagagttaagaactcgactcaagaagacagcaaaagtactgagccatgggtaccgtcatcgagtcccatttcttagccttcactgcccttgtcactattgcctatcagtttctgtttttcgtcgtcactgcgctcctcaaattcgacaaagtcactgattttgctggaagtacgaatttcatcataattgctgcattgaccctggtcatcaaagcctcctggtattttcgacagataatcctcactttgtttgttgggacatggggacttcgcctctgccttttcctcctattcagaattttgcagtggggagaggaccggcgcttcgatgaaatgcgtagtaatttgggtagactggccatattttggatatttcaggctgtctgggtgtgggttgtgagtttacctgttacgttggttaatgcaagcgacagaaatcccttcctacaggttgttgatatagtagggtggattttgtgggctgtgggttttattgtggaaggtacagcagatcaacaaaagctgcatttcaaaagatcttcagaaaatagagggaagtggtgtaatgttggactatggaaatattctcgtcatcctaactattttggtgaaatattgctttggtggggaatttttgtggcatctacacctgtactgaagggtgctgaatggctggtgatcattggaccaatctttctcacattattgcttctttttgtcagtggcattccacttcttgaggactcagcggataagaagtttggcaatgtagatggatataggatatacaaaaagagaaccagccctttaatcccgttgccacgatcaatctatgggaacttgcccgcatggttcaaaacaacttttctcttcgagtttccattctacagtcgtaatctaccacaagaagagaaccggtgaaatcgtattaaattgtatactatctgctcaaggtgcagagcaagcagtggaaaaagcagcgatgctctgaaaattggctagcacttggttctttgaatttgtttgattcctttcttacgtcagactgaagttgcagctgccgtggttagggatgtagttttgtaatgctattgcagctttccttctaaatttaatctttctaatttgcttgttctctcttagatatgtataataaatttacgtactatatatgctgtttgcaagtattatggcttgtgcacgtaactaatagatttcttctattcaactctcgaaaaaaaaaaaaaaaaaaccaacatattgtatttagcaaaatttatttttgaatacaatgtagttat

SEQ ID NO: 1000 - DNA, 922 bp, Glycine max
ttttttttttttttttttctaagttacgaaatagcgaatctaattaagtttcctacaagcatagagaactgcaagaaaatgacagttcagacacacttgcatttcagtgcaatgaaattatggaagacaaaagacaaaggtggtacagcacaatcattaataattagttgtttaatttggcaacacgcaggcacatgcgttctctcctaaaaaataatgaatcaacttcagttagtgtgggagacctggccagagtagtaaggaatcctagtgaccctaatccagtcatctccatggaaaaacatggatggcaagaagtttgttattccatctgaatcaagggtcttaactccttcccacttcacacgcttggttttgtctgaaccagggccacggttgttgaactcagcgtagaaacaagtatccattccactaaaaccctccaatgtttgccatggcatgtaaccatcaggtgtgatcaaatcaccaatgtaggagtccatgaagatggtccttgagaaattcttccatggacgtgccaagtaagctttgttgtcgaatctaactgggtagtacgtggggtctgacacaatgcttcctccatggatgactaatcctgatggttggttcctctcttttctgccttgtgcagtcacaatgcattgttggttttccaatggttttcgcaccacgaaagtgcaattttggagaactcagctggtgctgaaaaacatcaagcagtggccttgagggttcaagctgacaggtccatcttttacaaatgtcgaatggatgggtaccaggacacactctacgcacacaccatgcgtcaattctaccgtgattgcatcatttcaggtaccatcgactttgtctttggtgatgcagtggctgttctccaaagacaaagtcgatggtacaa

SEQ ID NO: 1001 - DNA, 756 bp, Glycine max
cgctccggggggccgggcccccgcctccccctccctcgcgcacttctctctccaccatgcaccaagccatttcccacagaagcttcatccccataggagcacgtggcatgccacacgcaggaggaatcaaagaatccaatggcacctatccatccaaagctgccacaatggtatcggagaacgcggtggtaatcattggaaaacggggatgctgcatgtgccacgtggtaaaaaggttgttacaaggtctgggagtgaaccctcccgtgtacgaggtggacgaggaccacgaagccgccgttgctctccacctgtccccgcagggcgccgaaacggtgcagtttccggcggtgttcctggccggcaagttgttcggagggttggaaagagttatggccactcatatctcaggtgaattggttcccatcttgaaggatgctggtgccttgtggctctgactcttactctagctacctccatcttttttttctacatctgctcttttttttttaaacctattttctcgagtgggaaattaattagatatagcgaaattaattttcttaggttcaattccctccttttttgtgttttatttttcttttcctgcgtctcttaactgggcaagatgagaaactgcgttgttaacaactcccttgtgttgaaaagtctggaagagagatattgtacattttgtttcaattagttgatgttgacgtacaagttcatcaaaaaaaacaaaataatttatcacaa

SEQ ID NO: 1002 - DNA, 1040 bp, Glycine max
tcgcctcgcgccgtaggccccccccccccgctgctatacgcttggatgagaagccagatcgcattgaaagtgcacttcattcatctctcatagataaaactagtgctgcaacatcttctcaatatctaactagggaagcttctgtagatccattggcttcaagcacatgggaggaggtttccccagaagatgtgcttatcactccagtgcagtgcaaggctttgtggagacaatttcagggagaaactgagtatacagttactcaagctatttcagctcaggaggcctacaagcggagtaacaattggttacctcctccatgggcaataatggcaatggtcatacttggttttaatgaatttatgttgctactaaaaaatcctctctacctgatgtttatatttgttgcctatctactcggaaaggccatctgggtacaaatggacatagctggagagtttcgacatggcactctgcctggactactatccatttcatcaaagtttcttcccacatttatgaaccttattaaacgtcttgctgaagaagctcaggggaatcaaacccctcaagaatcacaagggtcagcttctcagacacagatcttcagaaatcaagtgcacaaaccagattcagtatcaacctcaatttccaatgtatcgagtgttggcttgtctgttgatgataacgaatactcaaccacaaacttgtctcagaggcgaagaacaaacgctcccgaagctgaattttcatgacaaaattcatgacaatttgatttgaagacggttggcatcagattagacatgcaccagttagggtgacttcccagatcagttttgtattattactccctatctatattttacatcaatattttacttttcttctttaccgtaacgtgtaaattatctgagtatatgaaggacccctatttgggttctataactacagaacatatctcagtccaatagtgacggaataacaatattataaactagtttcgctttatgatcacatgaaattgccgatcgtcgttgctg

SEQ ID NO: 1003 - DNA, 2432 bp, Glycine max
catcattccttttccctctttctttcggctaaggccggtggcagcatagtagcaagcgcacaccacaatcaaagaacaatctccactccaagcaaaccaaagcgaatcggagattcaaactcagttcttcaactctctgatctccacttccacttcagcttcttcgccatggctaacgacgattgctgcgccacgcaactcatcgacggccacggcgagttcaacgtcgccggcctcgacagcttcatcaggaccgtcaatctcgcctcctgcggcctctcctacgccgtcgtcgcaatcatgggacctcagagtagcgggaagagcacgttaatgaatcatcttttccacacaagtttcagggagatggatgctttcaggggaagatctcaaacgaccaagggcatttggatagccaagtgtgttgggattgagccaagcacaattgctatggatttagagggcactgatggaagggagaggggcgaggatgacactgcttttgagaaacagagtgctctttttgctttggcaatatcagatattgttctgataaacatgtggtgtcatgatattggtcgagaacaagcagcaaataaacctcttttaaaaacagtttttcaggtcatgatgcgtctattcagtccccggaaaacgacattgctttttggtatacgtgataaaacaaagaccccacttgaaaatttggagcctattctaagagaagatattcagaagatttgggatggcattcgaaaaccccaagcccatctacatactcctcttagtgaattttttaatgtggaggttactgctttgtcaagctatgaggacaaggaggacaagttcaaagaggaggttgctcaattacggcagcgtttcttccattctatagcgcctggaggtctggctggtgatcggcgtggtgttgtgcctgcttctgccttttctattagtgcacaacaaatatggaaagtcattcgggaaaacaaggatctcgatcttccagctcataaggtaatggttgcaacagtgcgttgtgaagagattgctaatgaaaaacttaaccgactacgctctgacaagggttggttggaattggaggaagctattgaattgggtcctgtacgaggttttggggaaaagcttagctccattattgatgcctgcctttcacaatatgatgaggaggcaatcttctttgatgaagctgtgagaaatgcaaaacgaaagcaattggaatcaaaggctttggatcttgtgtaccctgcttatacaacattgttagggcatatacgctctaaagctctagatgattttaagactaagctggaacaatcactaaacaatggagaagggtttgcttcatctgttcgcacttggactcagtctactatgcttcagtttgacaaagcatctgctgatgctgctgtaagacaagctaattggggtgcttcaaaagtgcgagacaaacttcaccgtgatattgattcacatacttcatccatgcgcagtacaaaactgtcggagataacagctaattttgagaaaaaattggccaaggcgttgacagagcctgtggagtctctctttgaagcaggtggaaaggacacctggctttcaataagagagctacttaaacgtgagactgaaattgctgtatcagaattttctgcttctgttgctggttttgagctggatgaagaaacagttgaaagaatgcaacaaagcttaagggactatgcaagaaaagtggtggaaaataaagcaagagatgaagctggaaagattctgatacgcatgaaagataggttctctactgttttcaatcatgataatgattcactacctagagtttggactgggaaggaagatgtcagagctattacaagggatgctcgctctgcgtcgctgaagcttctatcagatatggctgctatacgcttggatgagaagccagatcgcattgaaagtgcactttattcatctctcatagataaaactagtgctgcaacatcttctcaatatctaactagggaagcttctgtagatccattggcttcaagcacatgggaggaggtttccccagaagatgtgcttatcactccagtgcagtgcaaggctttgtggagacaatttcagggagaaactgagtatacagttactcaagctatttcagctcaggaggcctacaagcggagtaacaattggttacctcctccatgggcaataatggcaatggtcatacttggttttaatgaatttatgttgctactaaaaaatcctctctacctgatgtttatatttgttgcctatctactcggaaaggcaatctgggtacaaatggacatagctggagagtttcgacatggcactgtgagtatgactggacttatacctttccgcagcagttggattgtaaagattctgtg

SEQ ID NO: 1004 - DNA, 811 bp, Glycine max
  misc_feature (671)..(671): n is a, c, g, or t
  misc_feature (754)..(754): n is a, c, g, or t
  misc_feature (767)..(767): n is a, c, g, or t
ctctccataaaaaccccaaccccatttctccaataaacaaattccaaatccttctccaatcttctcttctcacacaatctctgttcaacaacgctagagaataatatctcaagtatcatgtgatgagatgaaccaagcacaacaacttcaagaagcttgaagtttgaactgtctcaaacatgttctcaaagcttcagccacaacaccagcaacagcatcaaccttttcaattctctcgtgaatgtcaaacgtccgaggacgatgacagccgaagcagcggtggccctaacaccgccgtcgctcaaaaatcagttttaggcggcggaggatgcagcgatggggccacaattgaagtggtgcggcggcccaggggccgcccgcccgggtccaagaacaggcccaagccgcctctcataataacgcgcgaacccgagcccgccatgagcccgttcattctagaaatcccgggcggaagcgacgtcgtcgaagccctagcccggttcagccgcagaaaaaacactggcctgtgcgtgttaaccggttcgggaaccgtcgccaacgtcactctccgtcaaccttctttctctcccgccggcgccaccgtcgccaccgtcactttccacggccgcttcgatatccttctccatggccgccacctttcctccacacgncttccccgggggggatcccgaacgccttcgccgtgtccttttccgaaccgaaggggaaaatcgtcgggggaattcgtcgccgnaggttctcgcggncggaaaagggggtcctgaattgcccggttcttaaaaatccgtca

SEQ ID NO: 1005 - DNA, 754 bp, Glycine max
acgaggggaaccgtcgccaacgtcactctccgtcaaccttctttctcgcagcgatggcgccaccgtcgccaccgtcactttccacggccgcttcgatatcctctccatgtccgccaccttcctccaccacgcctccccggcggcgatcccgaacgccttcgccgtgtccctttccggaccgcaggggcagatcgtcggcggattcgtcgccggcaggctcctcgcggccggcacggtgttcgtgattgccgcgtcgttcaacaatccgtcgtatcaccggctttcgtcggaggaggaggcgcagaacaactctggcggcggcgcaggagacgcgcagtctccgccggtttccggtggcggcgtggagagcggacacgttccggctgagtcgtttatgtacagctgtcaccttccttcggatgtgatttgggctccaacccctagaccacctttctgatcatcatcaatcaactctatttttaattcgtgcttgtgttgtgaattttgtttcgttaatctagttgtttgagttgtaatgctgctgttagcttatttagttctagttctaaattcaaaaacaatgatttagatttttggtgtcatgcttagtgcgttaattaccccttgatccttggtttctttttcatactagtggaaagctgttgacattgtgatttttgctcgacagaaagaaaatttatatgatttagttatacttcttatgacttcattcagataaaacttgcttatatta

SEQ ID NO: 1006 - DNA, 2629 bp, Glycine max
ccacgcgtccgtctaaattaacccttacctactatcttatttaccatgggttccacaaaattaaatttgtcccccgcgtccctacaacctggtatttctatgtggcaccgtgcttcaagaagttgcaacaagcgccttagagcatagtgtgatattagtggagtttcttctacaatttgtgtccatggagaaaaattctcttgattatagtcctttgctttctcctcgtggtgatgaaaatggaagtgagacaacagcatctcctcttgtgtcagctactaaatggactctcaagactttgatcttgatgatctttgttctatgggcagctttcatcttttttctccctgcaaagcctgtgaatgagttgttctcaaaatggaatgatctcaaccgtgacactccttttggagtcacaggaagcatttttctggtcttcactgctccaattctcataattgcatttcttgccattgcacaccaaattcttactggggaggatcagcttcatgagaagaagacttccaaacttccaaggttccgcctatggacgtttcctgtgtttgtgaagggaccatttggggttgtttctgccacagagcttattgggattgtcctcgttttgttgtatgttatctgggctctctatgcttacactgtgagggcgcttgattttatctctgaatttgatgtgccatcctttagagacaagagcataatcatgtttaaagtgatgggacttcgcacgggtgcaattgggttgatgtgtttggctttcctgtttatcccagtttcaaggggatccgttcttctccgctatatagatatcccttttgaacatgccacaagatatcatgtatggctgggacatctcacaatggtgctttttactgtccatggactcctctatgttattgcatgggcaatggaaggccaccttgtacaagaattaatacaatggaaagatattggtgttgccaatctcccaggagttatcagccttctagctggtttgttaatgtgggtgacctctcttcccggagtgcggacatggaactttgagttgtttttctacacccaccaattatatgtagtctttattgtctttttggccctgcatgttggtgactttgttttcactatggctgctgggggaatatttctctttgtgcttgatcgatttctgaggttctgccaatcacgaaggacagttaatgtgatctcatctagatgccttccatgtggcactgtggaattggttctgtctaaacctcaaagtttgagatacaatgcactaagtttcattttcgttcaagtccgggaactatcatggctgcagtggcatccattcagtgtttcttctagtcctttggatggaaagaatcaccttgctgttctcattaaggttcttggcaaatggacagaaaagttgagacaaaggattactgatgtcgatgcacaaaaagattcatgtgtcataacaacttcagttgaggggccatatgggcatgaagtaccataccacttaatgtacgaaaatcttatattagtggctggtggtattggactctcacccttccttgctatattgagtgacattctccaccgtgttagggaggggaaaccctgtcaaccgagaaatattttacttgtttgggcggtaaaaaaatcaaacgagcttccacttctctcaaccattgacatggaatcaatttgtccatcattttcaaataaagtaaacattgatattcatatttatgtcacccgagaatcagatcctccattggaagagggatatagttacaaaccaataaaatcttcattctgtcctatggctagtgattgtggcatgtctgttttggttggtacaggagacaatttttggtctggactatatgtcatctcatctaccgttggctttgtgatattgctggctttgttgtatgtttactacgtaaccccatttcacatagaaacatggtggtacaggggactactatatgtaatctgcatggttgcaagtgttgttatctttggtggttctgtggttgcaatgtggcatatttgggaaaagcaaaattctttgaaggacaagtccaatgatacaaaggttgataagattcatcaaaatggctctttggctaccaaggatcaaagtcaagacagtagtattgcgaagtcaacggtcattcattatggttccaggccaaactttaaagaaatttatgactcgatatcagagaaatggggccttgttgatgtgggtgtcatagtttgtggcccttcaacacttcagacaagtgttgctgaagaaatcaggtcacacagtatgacaagacaacgccatcattccatcttccatttccacagtcacagctttgatctctagcttccctaatggaagatggaagacatgcattcactaaagaaaaaagcatatatatatataatgtgtattgtatatagcagtaatcaaattctagaaccctttgtagcattggtgctatagtagcctacagtccttagaagggttctaattctaagcgggatgatatgattttactccttaattatgtgaatatatgcattatcactcagacatatttatatgcaattttcagcttccttg

SEQ ID NO: 1007 - DNA, 1380 bp, Glycine max
cctgctcacgcgtgcgtacggctgcgagaagacgacagatgggggttgttgtgtgtaagtgtgaagagaagagaatggtagtaggattgaatgtgcctcagccatttctgtcaccagtttgcaagacggcaccttacccacttgatctcatcgccaccgccgcgtccctccacttcggccaccttctccgccgccgcgcgacccaccatctccgccttggggttcttcttcactcctgtttcaagaaactcgctcctttaactcacatttttagattgaacgataagtggtgtcaaagatgctttcaactcaatgggttgaactatcttcaactgtcaaccggtgatttgacttcctcatggtcaactagtttctctttctttaatgggggaggagatggaggccgccgctatggaaaggctgggatgtccaactccaagatgtctggaaaagatccatttaatggaaggaaatggacagaaattctccttgctgccaatgttttattttatattgcacaacttgcaacccaaggcaagctattattgtggggagcaaagataaatagtctaattgacaaaggacaactttggagacttgccacgtcttcctttttgcatgccaacatcggacaccttttggtaaattgttattccttgaactcagctggtcctactgtggagagcttcactggccctcggagatttcttgcagtttactttatctctgcaattgcaagttctgctacgagttattggttctgcagaatgcctgctgtaggtgcatcaggagcaatttttggactagttggatcagttgccgtatttgtattaaggcacaaagaccttgtgggaggtggtaaaaaagatttacaacacatagcccaagtaattgccctcaatatggttattgggctattatccactgggattgacaactggggacatttaggagggttggttggtggagttgctgcatcatggtttattggaccggcatggaaacatgaatccacatcaagtgatggaagaagacttttcattgacactgcaccaatgtataaactcttcaagattaaaagagtacctaagcaatggaaatagaaacatttcattatgtatggaatggaactcataactaatcattgctcgttgtttattggtaaaatgattcactgctgtgagcttctcttaaaatacttaagattgtggggttgtagtacaagtacctgacacgtctgaattattttgtatactttaataaccttcacactgggacattgtatttataaattgtatttgtgtaattggtatccttcattttccctcgtaaaaaaaaaaaaaaaataaaaaaaaaaaagcggccgctctacaggatcca

SEQ ID NO: 1008 - DNA, 1305 bp, Glycine max
aaaaaagccccagcaaccttttccccttataatattatccttgcgggttgcgaggggatagggatagggatagggatggagaaagtgaaggtgcttcggcgactcctcgagacaccaggggttcaccaggggccagcctgtttcgacgctctgggtgcgaagctcatagaatccgctggcttcccctactgcatcaccagtggcttctccatcgccgcttccaggttggctctgcccgacaccggcttcatctcctacggcgaaatgctggagcagggccaactcatcacccaagccgtttccattcccgtcattggcgacgccgacaacggctacggcaatgccatgaacctcaagcgaaccgtcaagggtttcattgccgccggtttcgcaggaatcattctggaagaccagattgcgccgaaagcgtgtgggcacacgcgcgggaggaaagtgataccgagagaggagggcgttatgaagattagagccgccgtggatgcgagaagagagagtgggtctgacattgtgattgtggcgcgcacggatgctcggcaagctgtgtccttggaggaagcgttgacgaggtgcaaggcttatggggatgctggggccgatgttcttttcatagacgcactcgcttcggttcaagaaatgaaagctctctgtcaactttctccccatcttcccaaactcgcaaatatgcttgaaggaggaggcaaaacgcctatacttagtcctcaagaacttgaagacgttggttataaacttgctatttatccaatttccttgattggggtttgcatacgagcaatgcaggatgcactcactgctattaaaggaggcgctgttcctcctccgggaagcatgccatcttttgaagaaatcaaggacatcgtaggtttcaactcttattataaagaagaggagcgttatgctacaagcaccaatcaccagccttaaaaattataacagaggttggagagaccaatcttaaacaacagcccttgtactgtgtgatgatatcagtctacttttattctcagctacttttaactgtctttgggatatgttcattgttcaataccgaatgatgaatatcgatcttaatgtctgtctgtttagtagtattttatcaaaataaataagacccgtctaattaatcatggagtaaatttcgtgataaatggcaaggttgctcaaccagttatcgatgacaaaattgactttttcatgcttgtcgtcaaggatgcatgtttgtggatgccgatttagactgagtgaatgaagttgaaagggattttt

SEQ ID NO: 1009 - DNA, 670 bp, Glycine max
  misc_feature (7)..(7): n is a, c, g, or t
  misc_feature (608)..(609): n is a, c, g, or t
  misc_feature (638)..(638): n is a, c, g, or t
ctggtancgcctgcaggttaccggggtccggaatttcccggggaaaaatttggggttttctctttttcccatcgatcgtgtttctcgctaatttgcgtcttccttcgtttccaagtcagcgttaagggtttagtttggtgcgtgccatgaagatcgaggaattggacgatggagagtgtagtagggacgaggaagagaagtgtgagaggcagattgtgagcgttgatgcgaagagagcgttggttggagctggtgctcggatcctgttctaccccacactcttgtataatgtgcttcgtaacaagattgaagctgagttcaggtggtgggatcaaattgacgagtttttgttactgggcgctgttccgttccccaaagacgttcctcacttgaagaagcttggtgtgggtggtgtgattactctcaatgagccctacgaaaccttggtgccatcgtcgttgtatcatgctcacgggattgatcatttggtgattcccaccagggattatctctttgccccctcattcgtggatattaaccgggctgtgcagttcattcatcagaaatgcaactttgcgcaaaactacttatgttcactgtaaagctgnngcggggaagagtacaaacattgtgctttngtatatggttgaatataagcacatgacacctg

SEQ ID NO: 1010 - DNA, 1369 bp, Glycine max
  misc_feature (258)..(258): n is a, c, g, or t
acggctgcgagaagacgacagaaggggattatcaatggatgctagaattgaaaatgtccatgctggaagctcagcagatggtatgacaaggggtcttggttctgagaaaaaacgacatagtgtgtctggttttactcctcaacatgctaattcacaagccactgaaaagattaggatgagcgagaggcagattttgggtataaaccgtacaaaaattgaagagatatggttagaggtgcttgagaggccccccccccnggatacaagttactggtctgaaagagtttctgtttaaagaaggcaagctgatctctgttagttttggggcagctccaactgtgcagctaatgttcagttctcaattgaccaaatctactgccgagaagttcagaggtcacatcttacaagcatttgaatccgtccttggatcttctataacaatagaaattagatgtgagttaaataaagatgcagcctcggctgttcaacaacctcttacattgcccgctaccaatgatagttcgtcccagattagagactttaatggtgttggcactctagctcatccatcagtaactgattctgttgaaaagagaaggggtgaaattgtagaagaagcagcttctcaagtggagcacatgaatagcgagcagcaggttgatgctcatggaacatcttataaaagtttagaaggtacaagtataggacaatcatcagcttcccaaaaaatgccaattgttaagtcgcatttagacgaaagaaagcttatggagcaaggtcaaagtcggagtcttgtaagaagcaaagtatctcttgctcatgtgatccaacaggcagaaggtcagagaagtgggtggtcaaaacgtaaagcggtttctattgctgagaagcttgaacaagagaatctgagactggaaccaagatcaaggagcttgatatgctggaaagcatcaagagtaacccggcgaaagctgtcacgcttgaaaattcgaagccgaaagccacgtgcactgctgaatcttgtctcatgtgggaaatgtctgtctacaaaatctccaaggtagttttgggtatgtcgtgggttcattcaatagcaatttgtaatgcctctatttaggctttttcctgacgtgttatagggtccaattttacagggtcaagccttttttttttttcatttaattaaataaaagcatgtagttatatatcagatgaagaaaatgtaggaaagtaattaaactagtaaactccattttagtgataagatattgtatatgtttccttcgtagcataaatctgatggaaatttttattgggattcggtttacaatttttagtcaaaaaaaaaaagaaaaaaaaaaaaaaaaaa

SEQ ID NO: 1011 - DNA, 1652 bp, Glycine max
acattacaatatcagtgacagtaacatcattttcgttcagctacgtaggccccccccccaaaaaacttaaattgaaaacagagtccttccttgtctgttatcactgtgtaagcagtgatcgattctgcgaactgcgattcgcatcgccaattcaaaagcgttcgttcgtcggagatggagacgctaccgacgacgacgacaaagcgaggaggagcgagatcgaagcccgttcagacctcgaaatcgtctctcgttatggccttcttctcctgcgtcgcgtggctctacgtcgccggaaggttatggcaagacgcagagaatcgcaatttactcgctagtcttctgaaaaagaattcagctcagaggcctaaggttcttacagtggaagataagttaatggtgcttgggtgcagggatctggagaggaggattgtggaagctgagatggaattgacattggctaagagccaagggtacctaaaggggcaaggccagagaagcggctcttctgatcgtaggcttcttgctgttatcggagtgtatactggatttgggagtaaattgaagagaaatgttttcagggggtcttggatgcccagaggtgatgccttgaaaaaacttgaagaaagaggagtggtcatacgttttgttattggtcggagtgctaatcgaggtgatagcttagatcgcaatattgacgaggaaaatcgcacaacaaaggatttcctgattcttgaaggtcatgaggaagctcaagaagagttgcctaaaaaagttaaaaccttcttcagtactgcagttcagaactgggatgctgacttttatgtaaaagttgatgatggcattgatattgatctcgagggtttaattgaacttcttgaccgtcgtcgtggtcaggatggggcatatgttggatgcatgaagtcaggagaagtgatatcagaagagggaaagccatggtatgaacctgattggtggaaatttggggatgaaaaatcgtatttccgacatgcggctggttcacttgttataatttcaaagaatttggcacaatacattaatataaacagtgtatctttgaagacatatgcctatgatgatacatcattgggatcatggatgatgggcgtccaagcaacttacatagatgacagtcggctttgctgcagtagtatcagacaagacaaggtatgctccttggcttgattggaggatcacaagcacattcttccctactcttatgggaactcacacaatttgtctgaaaatcagtatcagttgaacattatgttcactcttttcagttgcatactgccttgagagctttgtagacaatatcaatataattcctttctagatccagttatctgttcattcttttagatgctagcagcgaaattgagggataactactgattacggagttcagcccttggtgctcaattgctatttccgggggtgatatgattgtacttttactctgctattggatatacacaacttctgttgatgaccaaatattgaagagaaaaaaaaaactatatactaaatattgatgtattgaaccgctgacgaactaattgtagactttgttgcactgaaattttgctgcaactcaatttatttatgatgcttttgcctttcgtattaaa

SEQ ID NO: 1012 - DNA, 1457 bp, Glycine max
  misc_feature (1374)..(1374): n is a, c, g, or t
  misc_feature (1430)..(1430): n is a, c, g, or t
aagagcttgacggcgatgccccccgtccgtaggctcggatttcggttcgggggaaaaaggccccacttattcctgaagcactaataggaagaggtccagcatatgcattccaaagggaacttgatgctgctatagctgattttacaaaggctatacaatttaatccatcggctgcgtgggccccccccccaggcatggaaaaggagaggtcaggccagggcagccttgggagagtttgttgaggctattgaagacttgaccaaggcattagagtttgaacctgacacagcagatattttacatgagagaggaattgtcaatttcaaatttaaagagtttgatgcagctgttgaagacctttcagcttgcgtgaagctagataaggataatacgtctgcctacacatatttgggtttagcattatcttcaattggtgaatataaggaagctgaggaagctcatctcaaatcacttcaacttgacaaaaatttccttgaagcatgggcacatctgactcagttctatcaagatttagctaagccaacaaaggctcaggaatgtataaataggatgctacatattgatgggaggtttgcaagagcttatcatttgcgtggccttctgttccatgcaatgggtgaacacaggaaggctatcaaggatttgacaatggggttgagcattgatggcagcaacattgaatgtttgtatttacgtgcttcctgctaccatgctgttggacaatacaaagaagcggtcaaggactatgatgctgcattggatttggaactggattcaatggacaagttcgtgcttcagtgccttgtcttttatcagaaagagattgccctgtacacagcctcaaaatttaatggtgatttttgctggtttgatattgatggggatattgatgctctttttaaggaatactggtgcaagaaattgcatccaaagaatgtatgcgaaaaggttttcaggcaacctcctttacgcgagtctttaagaaagggaaagcttaaaaagcaagagtttactattaccaagcagaaggctgctcttctacaggcttcagattccattggcatgaaaatccatatgattgtccaggattcctacctaatagacgtcagcatcgtatggctggacttgctgccattgaaattgcacaaaaagtctctaaggcttggcgttccctgcatgctgaatggaaatattcgaataaaggaaactcaaagaatggtagaagggccaggagaagggaaagaattaatatgcccagtcaaaatagaggaggagctggttgtagtacaagcagtacctcagtaacatcttcaaatggaactgtagatgatagattatccagccgtacattgncgtggcacaatgtttactcattagctgttagatggagacaaatttctgagccttgngaccctgttgtatgggtgaacaagcta

SEQ ID NO: 1013 - DNA, 1034 bp, Glycine max
ctagttctagatcgcgagcggccgctcgcgatctagaacctcgagccgctttataatgttgttggtgaggatttctggtcatctacttggtgcaacagtactgcatttgaagggaaacaacttgaggggacaaggataacacttgtaaaaatgggggagaatggttttgactttgcaattagaacaccttgtacacctgctagatgggaggattatgatgcagaaatggcaatggcatgggaagctctctgcaatgcttactgtggtgaaaattatgggtctactgatttcgacgtgcttgaaaatgtgagagatgcaattttaaggatgacatattactggtataacttcatgccactgtccagaggatctgctgtagtcggatttgtagtcatgctgggtttgttacttgctgccaatatggagttcacaggaagcatcccacaaggttttcaggttgattgggaagccgttttgaacttggatcctaattcctttgtggattctgtcaaaagttggctatacccatctctgaaggtaacaacctcatggaaagactatcatgatgttgcatcaacttttgcaacaacagggtcggttgttgctgccttgagctcttctgatgattgaactccttggaataatgacaggttagtcaatgaccaagttattttcaatttctgtttttcttaatttctggtcttgtactgtagcttttgcaattaattacccaatacaacagaacggttcaattcaatgtctctgctaaagcaaacacaaggttctatctgcttttgtacgcttctgtatgctcacctagtaactatattgctgctggtctttcataaatcataacctgcggaaaatgcagcagaaccgtaaaagctttgacatttacttattgatcttcctattgatgcttaatctgtatgcagtctttataaattgtaataatatatgatagccattgtacagtcttgtaacttaaggcgttggatgatgaaattatcatttatcttttccactattccaat

SEQ ID NO: 1014 - DNA, 1362 bp, Glycine max
cagctcggaatgaggcgcctgggaaaatagataaagggagtgggagtgggagcaaatgaggcgaatagacaatgaaggtcggcggcgtggtgttatacggcggagttccacgtggcagcgtcgtgcctctgcttctcagccgccgcagagtttctctttgcgcctcttcttcttcttactcctccatttctgaccacgtttctttcgtgaaggatgtagctgcgactcagcctcctcagcatctttcacaactcctcagcattttgaaaaccagaggtgaatctattatctccccgggtgccaggcaaggattaattcctcttgctataccactgtcgaaaagtagctctggtaatgtaactgcactgctgcggtggccgacggctccacctgagatggaaatgccaagtggtggaagtcagctacggaggcccccccccatggcttttagctaagagtgtagaccaatttatacaccgaatgttagttgaggaagatgcaaagaatggtcaagagagaaatgaagaagtattttatgcttcaggtgatgctggggagaaactttacagaaagggtgattttgcagagtctggaatctctaacctagatgtctatcttttgaaaaaggttggtctatttccagatatcatagagcgcaaagtggcacggcattttgaggaaggagatcttgtttcggcattagtaactggggaattttataccaagaaggagcattttccaggatttgctcgaccttttgtgttcaattctgaggttttgttgagggttgggcgtaaagtagaagctaaagatgctgccaggggagctttgaagtcaccatggtggactcttggctgcaagtatcaggacgtagctaatatagcacaatgggatgatgagcaaattgagtacgttaaagagaaggtaactgaagagggaaggcaagaagatcttaaaaaggggaaggcccctgcacaggttgtattagatgaagctgctttcttgttggatttggcttctatagagggagaatgggatgagtatttggagcggattgccaaatgttacgaggaagcgggacttcatgatgtcgctaaattcatactttatagagattaatattagcagatttctttccaccaacaggcttctgtacatttccatttcggcatttccagtacttcatagttcatatgaagttttgaaaataattagaggaaaattatacgatttattccgcaggcttggatatttttccttcagttctcgtttgttggcaatcaatttaacctgaattcctcataaaaaaaaaataagaaatcccctgcctagaagaataatgatatttttacagtctttttt

SEQ ID NO: 1015 - DNA, 1587 bp, Glycine max
  misc_feature (1530)..(1532): n is a, c, g, or t
tcgagtcagctacgtaggcgcccccccccgaaaaaggaggctttccatcggattccagtgtcgattttctgcttctgcatctgcataacccgttaataattgctgcaaaaccctaattccccaaatcgttgatgaaaggttcgaagcgtttggccgcgtcggaacccaaccagatcgataccaacgaaacggggttccggaataaaagaataatggaaggatccctctttgatgtccatagggccgaaccatcccaacaaccaattgtggcagcaccaccattggatatgaaacgggcggagtcatcacagcagcatgtgagagctttaaatacccagtttgcaagttgggttcaaacacaactaaagaatcatcctgatgagctttgggaagatggtgtcagagattacttagatcatgcttcaagcattatggaaaagtttagtgatgttgtcaactggctcaaagcaaatgccactaaggcagaaaattcggctgctgatgctagtgctgctttttctgggaaaaagctcttgcctgaagtaataatcaatgaaaataaatcttctggagaaaaaactgggtctactcctgttagtactgctacaaattttactagttcttggagccctggattattttcaaacagtcaaggcatttttggaattggaaatcaaagttcggctatctctaatcagagtttgtctccctctaatcaaagtttggctccctttaacaacaatgcttcagatgatgtagatggtgaaaatgagttggagcagcctagcagcccatcagttaagaagtcagaagagaaaggtgtagtagttgtacatgaagtaaagtgcaagctttatgtgaagtcaagtgatccagcagataaagatgcatggaaagataaaggaatgggccaactgtctattaaatgcaaagagggtgtcagcaaggctaccaaagagtccaaacctacaattgttgttcgaaatgaggtaggaaaagttcttctcaacgccctgttgtatccaggaatcaaaacaaatctgcagaagaactctcttgttgcaatattccatacttcgggtaatgctgacggaagtggtggagataacgatagtgttgttgcacgtacattcttgatccggatgaaaacagaagatgatcgaaataaactggcttcaaccatcaaagaatatgctccaatgtcttgagagtacaagagtcatgattattgtgccaccttgagccatttaaagtaatcgaatacgggatccaccttcaatttttcctttcaccattttatttttttatgatgtcatttgttagattctgtgtttccaaaccttgtgtttggaggctgttgcttatgtaccatatgagaaggttgcatttgttcggataaaatgccttagattaatgcaattgtagtttaaagtcaaaaaaaaaaaaaaaaatgcatgcattaccttggacctgccgttctattttattcaaagccagccaaatggcaggttcatgattaataccgcatgnnngcagaatttgaagactaggtggaggattagaggatgtttgtttcatataaatttg

SEQ ID NO: 1016 - DNA, 1355 bp, Glycine max
  misc_feature (1289)..(1289): n is a, c, g, or t
  misc_feature (1322)..(1322): n is a, c, g, or t
  misc_feature (1333)..(1333): n is a, c, g, or t
gctggatattgttgttgttggtcggttcacagataaaataacaatctctcttttctatcttcttctgcactttctgcactctagttaatttccactattttattctttctctcacacccctcatcatcatcatcattatcatttttctctctgatacaaaccatactattcacaccctcccatactctgcagccccctctcttttctcaccttccccattcttcttctcctctctttcatggatgtggacatagtgaaaacttccaacaacaacaacaacatggacgttatggcaatgatgatgcaaatggaaaagttccccgaattattattctgcgacgaccctttttataccaccacacccacttaccaagaaaccgatttgttatcaagtggaagaagctcctcatcaacaaccagcgcttccaccctattcaacaacaatgtaacaaccacaattccaccgacgacaacaccgtcaaataatgttgtccaattttccaacattgatgaccttttccaacaacaaccacctatgtcacagtcccttcaacttcaaccctacccttctgaaaagaagaagaagaacaacaactcgatggcggcgatgagggagatgatattccggatagcggtgatgcaaccggttcacatcgacccggaatccataaagccacccaaaagaagaaacgtgaagatctcgaaggatccacagagcgtggcggcgcggcaccggagagagaggataagcgagaggataaggattctacagagactggtccctggcggcacaaaaatggacactgcttcgatgctggacgaggctattcactacgtcaagttcttgaagaaacaggtgcagacgctggaacaagcaggggcaaataggtcaccacacagtagtaataataataataatattctcaatactactcacgttgttggtgctgttggttttccgctagggatgtcttctaattactccaataatataattagtaatgttgttaattattctttgttgatgaagggtggttgccaaccttgtcaagtgttcggttccacttctaaacaattgctcagctaattatagttgagaggggaagttttgtgagagggaatttgcttgtttttatgatgagaagcagtgggttgggttctgtagtgttaattaattggtgtatgcatgggttcggtgggtcgtgatgaagaacatgttttctccatgttgttgccgttgttgcaaatgaatttcttttgcttttacaatggtcggaaggtgataaatngaagtttcaataacgtaatggatgaatctgttntacattttttncaaatgaaaaaaaaaaaaaaaa

SEQ ID NO: 1017 - DNA, 944 bp, Glycine max
  misc_feature (755)..(755): n is a, c, g, or t
  misc_feature (762)..(763): n is a, c, g, or t
  misc_feature (795)..(795): n is a, c, g, or t
  misc_feature (800)..(800): n is a, c, g, or t
  misc_feature (807)..(807): n is a, c, g, or t
  misc_feature (814)..(814): n is a, c, g, or t
  misc_feature (821)..(821): n is a, c, g, or t
  misc_feature (825)..(825): n is a, c, g, or t
  misc_feature (831)..(831): n is a, c, g, or t
  misc_feature (840)..(840): n is a, c, g, or t
  misc_feature (847)..(847): n is a, c, g, or t
  misc_feature (849)..(849): n is a, c, g, or t
  misc_feature (854)..(854): n is a, c, g, or t
  misc_feature (860)..(860): n is a, c, g, or t
  misc_feature (864)..(864): n is a, c, g, or t
  misc_feature (866)..(866): n is a, c, g, or t
  misc_feature (869)..(870): n is a, c, g, or t
  misc_feature (877)..(877): n is a, c, g, or t
  misc_feature (882)..(882): n is a, c, g, or t
  misc_feature (887)..(887): n is a, c, g, or t
  misc_feature (894)..(894): n is a, c, g, or t
  misc_feature (896)..(896): n is a, c, g, or t
  misc_feature (903)..(903): n is a, c, g, or t
  misc_feature (911)..(914): n is a, c, g, or t
  misc_feature (916)..(916): n is a, c, g, or t
  misc_feature (921)..(922): n is a, c, g, or t
  misc_feature (928)..(928): n is a, c, g, or t
  misc_feature (931)..(931): n is a, c, g, or t
  misc_feature (933)..(933): n is a, c, g, or t
  misc_feature (935)..(936): n is a, c, g, or t
  misc_feature (940)..(940): n is a, c, g, or t
  misc_feature (942)..(942): n is a, c, g, or t
agctggagctccaccgcggtggcggccgctctagaactagtggatccccccggccgagtccacccccacccttacccccatcctcacccccacccacacccttacccccatcctcacccccacccacaccctcatcctccttacgtttaccactctcctcctccaccccctaagaagccctacaagtacccttcacccccaccaccagttcaccctccctacattccacacccagtttaccactctcctccaccaccaccttacaagaagccttacatctatgcatcacctccccctccttaccactattagcatacctcttatcgatatgaagaatatgtgcaacgaataaaagaaagcgatggaaagcgcttcgcgatgcacgaaagagaagaaatggaagcaaagtttccgcgttttgtctttcataaaaaaaatgttaaattattattttctatgataggattggtttcttgtcttttttctcttgtttaagaatttcggtgtattttaacagttgtaaagcactctgcgctctctctgcatgatcatgtacaactacaagcatgctctctgtagttttcaacctgctgcgcttgcaggggttgtaaaactaatcaatataattaaataaattacattctgtctctctcaaaaaaaaaaaaaaaaaaaaaaaaaaaaaaaaaaaaaaaaaaaaaaaaaaaaaaaaaaaaaaaaaaaaaaaaaaaaaaaaaaaaaaaagccggggatccctnttttaanngccgccccgggggagctccgtttggtcctttnggggntattcgngctgggnacagggnatantgtccnggtaatggntccgccnantccantattanaacngnacnnaatgaanccggngccanagggggnancattatnggggcctnnnncngttcnnggaacntgncntnnattngnat

SEQ ID NO: 1018 - DNA, 2618 bp, Glycine max
tcagctacgtaggccccccccccagaagaaacgcactctctctctcttcctctctctctcttcggagctcaatttggccgtcaatggcggcctccaatgctcacaacggcaccaccaccaactccatcaggcacgccttcggcaacgtcctcgcgttcttcatccttctcctcatcggcgttctggccttctcgatccgtctcttctccgttataaagtatgagagtgttatccacgagtttgatccttatttcaactatagagtcacccagtttttgacaaagaatgggatatacgatttctggaactggtttgatgatcgaacttggtatcccctcggtcgtgtaattggtgggactgtctatcctggtttgacgttgacagcaggcaccttatggtgggtactgaattccctaaacatacctctctcagttgaaactgtttgtgtgtttactgcacctatattctcagcctttgcttcatgggcaacttatcttctgacaaaggaggttaagggtgcgggggctggcttgacagcagcagttcttctggctatggtcccttcatatatatctcgatcagtggctggcagctacgacaatgaagctgttgctatatttgctttgatattcactttctacctctatattaagacgctcaatacagggtccctcttttatgccactttgaattccatagcatacttttacatggtttgctcatggggagggtacacttttatcattaatcttattccaatgcatgttctcttgtgcatagtaactggtcgctattcttctcgactgtacattgcatatgcacctcttgttgtattgggaacattattggctgccttggtgccagtggttgggtttaatgctgtaatgacatcagagcattttgcatcatttctggttttcattatcatccatgtagtggctcttgtgcactatatcaaaggaattctttcaccaaaaatgttcaaagtagctgtggcactagttgtttctgttggccttgcagtgtgttgtgcaatggtggcagtacttgtagcattggtagcttcaagcccaacaaaaggatggagtggaagaagtttaagtctgcttgatcctacttatgcaagcaagtatataccaatcattgctagtgttagtgagcatcagccacctacttggccttcatactttatggatatcaatgtcttggcattcctcgttccagctggcattattgcatgcttttctcccctatctgatgcaagctcctttgtggtactttatattgttacgtcggtatacttttctggagtcatggttcgcttgatgcttgtacttgctccagcagcatgtatcttgtctgggattgctctttctcaggcttttgatgttttcacaagatctattaagttgcagttgcccagcctattgggtcattctcacgttgatgcaggggaagccagttctgaaagtgttgtgacaaatgattcgatgaagtctgataaaagtgaggacacatcaaaggaacgaacctcaaagaagagcaagaagaaggaaaaggaacctgtggaaaagcctccgagcaagtcacaaattaagaaaaggcttttggttttacctctggaaacatccatcattgctattgtcttgcttgtgttgctaggtgccttctatgtggttcatagtgtatgggcagcagcagaagcttattcagccccttctattgttctaacatcacattcacatgatggacttcatgtttttgacgattttagagaggcttatgcttggctgagtcataatacagaaatagatgataaagtggcttcttggtgggactatggctaccagacaactgccatggctaaccgaactgtcattgttgataataatacctggaataacacacatattgctactgttggtactgccatgtcttccccagagaaggcagcttgggaaattttccactcattggatgtcaaatatgttcttgttgtctttggaggactggttggctatcccagtgatgatatcaataagttcttgtggatggttcgtattggagggggtgtattccctcacataaaggaaccagattatttaagggacggtcaatatcggattgattccatggccacaccaacaatgctaaactgcctcatgtataaactttcatattacagatttgtggagactgatggtaaagctttcgatagagtgaggcggactgaaattgggaagaaatatttcaaacttacgcattttgaggaggtgttcacaactcaccattggatggttcggatttacaagttgaaaccaccaaagaaccggattcgaggaaagattaaaaaatcaaaatctaaagcaagctcaaaaactacctcgaaaagaaaaggattaaaacggaaccccttttagtttagattttcgtttcttttagtaggtgactttatttcttagctgcgtttcatgtatacatgtatacgactaatgcaattgccatgatagggattttgccggcattattagttactttcttgagtaatgaatgatgaaacaaaaaattttgaaactatatattttgactgaatgtttaagatctcatttttatgattg

SEQ ID NO: 1019 - DNA, 1126 bp, Glycine max
gtcgttttgcggtgaaacatacttgggcacactattattctaccattttcgttctctccgttttctttctttcttcttcttcttctcttcttcttcaagattgcgacgacgatccaagtgatagacactcgttgcgatggaacttgtagctgaatccgagcgaactctgtacccatacgtgactggatcctctgtagtcgctatcaaatacaaagatgggattctaatggccgctgacatgggaggttcgtatggatctaccctgcggtataagagtgttgagcgtatcaagcctattggaaagcattctcttcttggtgctagcggggagataagtgactttcaggagattctgcgttaccttgacgagcttatcctttatgacaacatgtgggaggatgggaattctctagggccgaaggaggtgcataattatttaacccgtgtgatgtataatagacgtaacaagttcaacccattgtggaatgcacttgtacttggtggggtgaaaaacgggcagaagtaccttggcatggttaacatgattggcattaattttgaggacaaccatgtagcaaccgggcttggaaatcatctcgctaggccaattctccgtgatgagtggcatgaaaacttgacctttgaagagggcgtcaagttactggaaaaatgcatgcgtgtgcttttataccgtgataggtctgctgtcaacaaaatccagatatctaaaattacagatgaaggtgccactgttttcccaccattctcattgaaaacgtactgggagttctctgccttcaagaatccaactgtgggcgctgaaggttcatggtaactgactcattgtgaaatgaaacagaattttaaatggatatgaaatggattccaatagaactctttaaggtgttaatggatattaaattagacttggtgtttttatattttttttaaagattcctatgatggtccaaattgatattttcattagaatttctattccagtttcctttcattatgacattcatcataggcatttttctttttcaattgcttgcatagacatcaacgcggtgctcgtgtttgaaattaatcatgcaaagatttgtcaacaaaaaaaaaaaagaaa

SEQ ID NO: 1020 - DNA, 1430 bp, Glycine max
gattcgatcgcattcttcttctacattctcgattccttcctttctcaacaactattatcagctacgtggcccccccccatttctcaccaaccacctagggtttctctccgacgttaggtttttttttctcgccgggattttgggggcagacttaatctccggcagctatggcctccaacttgcagatgagtcctcaggtggagcagatccacggtgaaatccgcgacaactttcgagccctcgcaaatggcttccagaagctggataagattaaagatgccaatagacaaagtaatcagctggaagaactcacggacaagatgagggagtgcaaaaggttgataaaggagtatgatcgtgagattaaagatgaagagggaagaaatcccccagaagtgaataagcagctcaatgatgaaaagcaatcaatgatcaaggagctaaactcatatgtggcattgagaaaaacgtacatgaataccattggaaataaaaaacttgaactttttgacaatggagcaggagcaagtgtatctacagctgaagaaaatgttcaactggcatcagaaatgtcaaatcaagaacttatcaatgctgggacgaagacaatggatgaaactgatcaggctattgagagatctaagcaggttgtacatcaaacaattgaagttggcacccaaactgctgctaccttgaaaggccaaactgaacaaatgggtcgtattgttaatgagcttgattcaattcagttctcaattaagaaggcctcccaacttgttaaggagattggtagacaggtagctactgacaagtgcatcatgctttttctgttccttattgtctgtggtgtaattgccattattgtcgtgaagattgtgcatcccaacaacaaagatattagggatataccaggattggcacctccagttcccaccaggaggcttttgtatgcaaggagtggagatcattttgattaattcttatatttgaacaagagtgaacttcatcctagtcctaccaacttgattattgttctcattaatgggaaagttagaggattgctgtctggaggcattattttggtctcatcggttaatgaaatatatatatacacacacacttgcataccctgtttgtgattttatgtaaatcacacgaaagccttctgctttttcttgagtgccatgtttctttatgtaacattccaaaagtgtaggactagagagaaagcaatactgtgaaattcgttctgtatatgtctaattcaaaggagatttatccctcccccctcttcattgttattaaattttttttatttatttctgtacacattccaaactgtctgctggattggttttgtaaaattacattcagagttggcttgcagctgttcatatttagcttctttacttaaaaaaaaaaaaaaaaaa

SEQ ID NO: 1021 - DNA, 1273 bp, Glycine max
tcagctacgtaggcccccccccccactttcactttcacagtttctttccttctctctctctggagctagcgcgagtgaccggagcggcgaagatagagtcagatcggaagcggaagaaggcgtcgacctcggcggcggagaaggagaaccggaataagcataagaagtcgaagatgtcgtcgtcgtcgtcgaagggtggtggcggtattgaggttagggcttcgcacatattgataaagcacgaaggttctagaaggaaggcctcgtggaaggatcctgaaggtcgcatcatcaagagcacaaccagagaaaacgcggtttctcagctcaaggccctccgcgacgacatcgtttcgggcaaggcctccttcgaggacatcgcctctcgcttctccgattgcagctccgccaagcgcgggggtgatctcggtccttttggtcgtggccagatgcagaagccttttgaagaagcaacttttgctcttaaagttggtgaaattagtgacattgtggatactgacagtggagtccacattattaagagaacaaaatgagattattacacggagtaatctcctaataaggagagacattaacatctgtagaatatttccaggattcttgctcaactcaagatctgttgatatatgttttagacatggcggtgtcttgtttttggatgatatattgtttttgtgacaattaaaaacatatgcttgtaattttgaaagacaattataaggtttggattctattgtcttaaaaaaaaaaaaaaaaaaaaaactcgagactagttctctctctctccctcgtgccgaattcggcacgaggcttaagcttgctactgagtttccacactgcataccttaggtcttccgaattcgaagttaatttgcaagatggctaaggaaaaggctcagatcaacattgtggtgtttggtcatgtggaccctgaggaggcaaccaccatttacgagctgaagaagcctgttttggagaaagaagctccagggcatgccatatgaggccaatgcacgtacggcttcggagggggaacccagaaattaatgttacccaaataatctggaaccctaatgtaatcagtgtcatcatcaagtgtgtagtttaagctagctttgctatggttacgttctttgagatgagagtcttgatgaacagtaccattctgatgtattgctttccttgaaagttaatgcatgcttcttatcttctgtctaaaaaaaaaaaaaaaaaaaaaaaaaaaaaaaaaaaa

SEQ ID NO: 1022 - DNA, 812 bp, Glycine max
ctcgagcgattcggctcagccgtttctttgcttctctctctggagctagggcgagtgaccggagcggcgaagatagagtcagatcggaagcggaagaaggcgtcgacctcggcggcggagaaggagaaccggaataagaataagaagttgaagatgtcgtcgtcgtcgtcgaaggctggtggcggtggtgaggttagggcttcgcacatattgataaagcacgaaggttctagaaggaaggcctcgtggaaggatccagaaggccgcatcatcaagagcacaaccagagaaaacgcggtttctcagctcaaggccctccgcgacgacatcgtttcgggcaaggccacttttgaggacatcgcctctcgcttctccgattgcagctccgccaagcgcggcggtgatctcggtccttttggtcgtggccagatgcagaagccttttgaagaagcaacttttgctcttaaaattggtgaaataagtgacattgtggatactgacagcggagtccacattattaagagaacaaaatgagattattacggaataatctcctaatagggagagacattaacatctgtagaagatttccaggattcttgttcaactcaagatctgttgatatatgtttgagacatggcggtgtcatgtttttggatgatatattgttttctgacaattaaaaacatgtggtatgcttgtaattttgaaagacatttataaggtttggattctattgtctttgggctggagcttctctcttgctggggacgggaatttgtggttaaaaaaaaaaaaaaaaaaaaaaaaaa

SEQ ID NO: 1023 - DNA, 1715 bp, Glycine max
ctcgagccgctcgagccgattcggctcgaggcccatccttgcttctctctctctctctctataagtttaactttgctagctaactcaaaagcgtgtttcaaacctcaaactccaattataatcagctacgtaggcccccccccccatgctaaacacacacacacgccatgaagtccaatccaaaatcaaaaacaccaccccacttattatactaccttctaataatcctctccttactgttcttcttcccgtgtgtatcctctacccaacaattcaaagaagcccctcaattctacaactccccaaactgcccctcaattgaacacaacatatgctccgaggaagccgtccacgtggcaatgacactcgacacgacatacatccgaggatccatggcggcgatcctttccgtcctccaacactcttcgtgcccccaaaacaccttcttccacttcgtgtgctcctccaatgacaacaccaacgcgtccctcctacgcgccacaatctccaacacattcccctacctgaatttccaactctaccccttccacgacgccgtcgtttcgggcctcatctccacctccatccgcgccgcactcgattgccccctcaactacgcgcgcagctacttggccaacctcatcccgccctgcgtgaagcgcgtggtgtacctcgactccgacctcgtactcgtcgacgacatcgccaagctcgcgacaacctcgttgggagaaaacaacaacgttttggcggcgccggaatattgcaacgcgaacttcacctcgtacttcactcccacgttctggtcgaacccttctctgtcgctaacgttcgcggacagaaaacagaaagcgtgttactttaacacgggggtgatggtgattgatttggaacggtggcgcgaaggggattacacgagaaaaatcgaggagtggatggagcttcagaagaggatgagaatctacgaacttggttcgttgccgccgtttttgcttgtgtttgcggggaacattgtttcggtggatcataggtggaaccaacatggtttaggaggggacaattttcgaggtctgtgtcgggatctgcacccaggtccggtgagtttgttgcattggagtgggaaggggaaaccatgggtgagattggacgctaacaggccttgtcctttggatgcgctttgggcaccttatgatctattacgtacccccttttctttcgactcttgaaatttgaatttgggatattcctgtaacatagctacatacaaatcaggcttaatttctcgatctatatgctgcttgggaagattgaattgaagagacaacaacataacatgggtccaattatacacgtacgaagagctagctactcatcggaccaaggatacatgttcaaagtgtacattaagatgtgaaggaggtgagtggggttcgtgattgggattgtacgattgagtttgtatatagcgaagatcgagctacgtaataagttttggatgcgcatattcagatttctttttttggtcctgataatgtgaacatagtgagggtttttgtataggcaaactcattttccgtgttcagatccttttctttttaccttgtatttttatctgttttatgctttactagtattgctgacctgttactttgttcctttgataatgggtctagagaactgacttccaaccaagacgaagagatttattcgttatc

SEQ ID NO: 1024 - DNA, 838 bp, Glycine max
gtgagatatatagaaaaacaaaggagaaaagatagaaatggagaactttccagttgttgacatggggaaccttaataatgaagagagatcagcaaccatggagataatcaaagatgcctgtgagaactggggtttctttgagttggtgaaccatgggatatccctagagttgatggacaccgtggagaggatgacaaaagagcactacaaaaagtgtatggagcaaaggttcaaagaaatggtagcaagcaaaggtttggagtctgctcaatctgaaatcaatgatttggattgggaaagcactttctttttgcgccaccttcctgcctctaacatctcagagatccctgatcttgatgaagattacaggaaggtaatgaaggattttgctgtggaactggaggaactggcagagctagttcttgacttgctgtgtgagaatcttgggctagagaaagggtatctgaagaaggtgttctatggatcaaagggcccaaattttggtaccaaagttagcaactaccctccttgtccgaagccagagctgattaaggggctcagagctcacacagatgctggtggcatcattctactcttccaagatcacaaggtcagtggattacagctcctcaaagatggccactggattgatgtccccccaatgcgccactccattgtcatccaccttggagacctacttgaggtcatcaccattggcatatactatagtgtgatgcaccgtgtgattacttatacggatggtaactatattgtccatagccgtcttttaactaatccttgtcttgtagcattgatcggctccacaccagccttggtg

SEQ ID NO: 1025 - DNA, 1376 bp, Glycine max
tacggctgcgagaagacgacagaagggggagccactaagtaatatggtttgttattcaccactctttatatagagaggaatcgaaattggttttgaagaccatgttcaggacgcaacgggggtgatggcatcatggttattacagaataaatgatcgaagagtgatggaaggttcttgcttttgtttgtatatatacatactattattgctaggaaattgaagacctaagatacaatagagatggcaaagctatttttgaaacaggcaaagcaatacgcagatgcaagaccaagctatcctccacaactcttccaattcattgcttccaagactccctctcacaacctcgcttgggacgtcggcactgggagcggccaagctgccaaatctttagctgcaatatacaagaatgtgatagccacagatgctagtgacaaacaacttgaatttgcagccaagctcccaaatgtgagataccaacacaccccttcaaccatgtcgacggccgagcttgaacaaatggtggcatctaagggaaccatagaccttgtgaccatagcacaagccctgcattggtttgaccgcccaaccttctacgaacaagtgaagtgggttctcaagaaacctcatggaatcattgctgcttggtgttactatttgccaagagttagtgatgcatttgacactgtctttgaccaattctattccactaatgtaagcccttattgggacccagctcgtaaatgggttgatgacaattatagaagcattgattttccatttgagcccgtggatggagctgatcacacaggaccctttgagtttgtgacggaaacaatgatggatttggatgatttcttgacctacataagatcatggtcagcatatcagacggctaaggagaaaggagtggagcttctcgcggaggatgtggttgaaaaattcaagcttgcttggggtgaagatgctaaaaaagttgtcaagtttccaatttatttgagaattggaagaacaggggattcctaaagacatatgcaaatggttgcttttactgtgtgggagatgtgacgagtaccaacttttatgagtttatccattgattgaataatgtaattttattgaattgcgttcatgttaagaagtcaaaagcttttaaattcgaagggtacaattcctacttatctggaaagagttgagccttagtttgctatgttaattttgtaatttggtattgataaattttgttgtgtgtgtcaaccaaatttttgatagaaaagtacttgtagtaaatacttgataatttattttaatgatgttaaattaaggtatttgctggattcaggttctcgtgacttgttcattttattcgccagcc

SEQ ID NO: 1026 - DNA, 2026 bp, Glycine max
  misc_feature (8)..(9): n is a, c, g, or t
  misc_feature (14)..(14): n is a, c, g, or t
  misc_feature (24)..(24): n is a, c, g, or t
gtaccggnnccggnaattcccggngtcgacccacgcgttctttataatttttttttttttttttttgtgctgagttgttttgtttattactatttcttctcttttccttgtgacacagacaaggaaaaagggagaaagaacagttttttttttcttttttttgaataagtctttctctaccctcagttgctctcatagactcttgactctttcagttgtttactaattaacactcatcacattcgttgtgtttggcttcttcactcgctttctctatttttttctcactaaaaagttccatctttttttttttttttaatttctggggttattattgctttctgtgattctgtctcagttccattttggtatctttgagggaaattcattgggtttgcagggttttatcttgttagaatttagaccaattggctaacagataatagtcttcattgaacatcaatttcaagcattctctctgatttttttgatcaagtggctcttttctagattccgattcccttcaaaatgcttctggatttatccttagtattgttgtggtaaaacctccacttctgttatcattttctctcttctgccttatcttcctcagtttccactcatcaagtttcaatcttcctttgaataagcccaaatttgattgtatgaaccagtagctttttgcttgtacaaaattgaattgatgaagtgggaaagtataaccctctcttctcctacaccttgcactccaaactccaacaccaattggttggtgatggaggataataatagcaggagcacaaaatggacctctgaagagaacaagctctttgaaaatgctcttgcagtgcatgataaggacaccccggatcggtggcacagagtggctgagatgattcctggaaagacagtggttgatgtgataaggcagtacaaggagttggaagtagatgttagcaatatagaagctggtttgattccagttcctggctatagtagcactgctacctcacccttcaccttagattgggtgaacactcctggctatgatgggtttaaaggatgtggaaagagatcttcctcagtgagaccgattgagcatgaaaggaagaaaggagtgccttggactgaagacgaacataaattgtttctattgggtctgaagaagtatgggaaaggtgattggagaaatatatctcgcaattttgttattacaagaactccaacacaggttgctagtcatgctcagaagtacttcataaggcagctttcaggaggcaaagacaagaggagggctagcatacatgacataacaacagtgaatctcacagaaaccataacaacttcttcagaagacaccaatggatcctcttcaccacatgtgctctcacagcaacaacagccaaattctactcctactacaccaagaactcgttttcagtggagtaatcagtctaacacaggagtagctatgactctcaaccctgctcatgaaagagtcttcatgtctcattatggtgctaactcctttggggttaaaattgagggacagaatcttcatgagtcttcttacttgcgacctcagacacagaacatggttttccaaatgcaacagtcctctcaacactagttccatgcattatcacttgttgtagtgaattattaatgggcagaagtagaaccagaatcttctgtccatttcaataagtacagtgcttgagttgagctttttccccaagttcttatgtgaataccctagattgttggttagttattatgaacttgaaggaaggtacatacatttgtttcttcaacaaataagaacttcctgaaaggagtggcaggcaaccaagtccccaacgttggttttggttggtttttctatgttgtctaagaataatggatttcaagccccgtgtataattaatgaaatgtttcaacttagaggcaaaaaaaaaaaaaaaaaaaaaaaaaaaaaaaaaaaaaaaaaaaaaaaaaaaaaaaggaaagaaaaaaaaaaaaaaaa

SEQ ID NO: 1027 - DNA, 1718 bp, Glycine max
ctcagcatctaagggttcattggagtggaaccctaattttaaccaaagaagttacattttctttcctaagctgcctttattttttcaaatgattattttgtgttcaatggggtgtgtttgttttgcaggtatgagcttgggaggcagccagcaaacacaaagctatcaagcaacaagacggttaggaggattagggttcgcggtgggaacgtgaagtggcgcgctttgaggcttgatactgggaactactcttgggggagtgaggctgcaacccgcaagacaaggattcttgatgtggtgtacaatgcatccaacaatgagcttgttcggactcagacattggtcaagagtgccattgttcaggtcgatgcagcacccttcaagcagtggtatctgcagcattatggcgctgaggttggccccaagaagaagagtgcagcagcttctgccaagaaggaaggggaggtacaacaagttgaattgaactgtgtgctaaatgctaatacatgtttgtttgttatgtacagtttctgttttagatgctttccaagatgaatgctgtgctgtgatattagaatagcttttgttgttgctggttgttggaaacttggaagcttgaatcttttgctttgttctgtggattatacttcaatttcaataatgtgcattgcgcactttatttggttatgatgcacttttttgtcattccactaactctctatattttataaaaatttattttatatgcactactttttcacacaaacatccaatgagatttgatcattttaccatgtcatctttttaattaatatgatgtggtgacaccgtgacatgacaaattcctgttgcatgtcaatgtaaaaatgttttacaccgacagtgtgtttaattaaactcattttgtaagttttgaattattcaagggctgtaaagtctttatgcaggaaaaaaaatctctaaaatgagttcgggaactgggttgctaaggctatatatgaaatgtttttttttaattagaataaggttatctttttttatcaactgtgattttctttattcaagttctgtttttcttgcagtttttatgataaccttagactgtttcttacatcattcagcttctgtcaagatggaaggggaggatggtgaagctgcaactgaggaggtgaaaaagagtaaccatgttttgagaaaattagaaaagcgaaagcagaaccgagttcttgatcctcacattgaagaacaattcggaggtggtcgccttttggcttgtatctcatctcgacctggccaatgtggtcgtgctgatggatatatattagagggaaaagagctggaattttacatgaagaagcttcagaagaagaagggcaagggtgctgcttaagatattgtctatcttcctactcgttgtatcagaatttcttgaagctcttaactatccaccaacagattatcagttttgctacgaactctattttctttgggaggggtttatgggtgtaaacatggccaagaacttttatttgtttacttatagtgagtcctgtttaaattgattatttctaccattacaattttctagtgcatttactttctttccttgattttctttagagcagacagagtccttggaattattttcgtttgccgtttataagtttaattatgtgtcctggtctttggtcttaaaatgagtagttcttttgatttct

SEQ ID NO: 1028 - DNA, 1139 bp, Glycine max
  misc_feature (31)..(31): n is a, c, g, or t
  misc_feature (1131)..(1133): n is a, c, g, or t
cagggtagcgcggtgccggaaatgtcccggnggtagcacgcgcttcattagcacgagctcgcaataccagcaccgttctattcttcttccaaaatgggtatctctcgtgattccatgcacaagaggcgcgccaccggcggcaagaagaaagcttggaggaagaagagaaagtatgagcttgggaggcagccagcaaacacaaagctatcaagcaacaagacggttaggaggattagggttcgcggtgggaacgtgaagtggcgcgctttgaggcttgatactgggaactactcttgggggagtgaggctgcaacccgcaagacaaggattcttgatgtggtgtacaatgcatccaacaatgagcttgttcggactcagacattggtcaagagtgccattgttcaggtcgatgcagcacccttcaagcagtggtatctgcagcattatggcgttgaggttggccgcaagaagaagagtgcagcagcttctgccaagaaggaaggggaggatggtgaagctgcaactgaggaggtgaaaaagagtaaccatgttttgagaaaattagaaaagcgaaagcagaaccgagttcttgatcctcacattgaagaacaattcggaggtggtcgccttttggcttgtatctcatctcgacctggccaatgtggtcgtgctgatggatatatattagagggcaaaagagctggaattttacatgaagaagcttcagaagaagaagggcaagggtgctgcttaagatattgtctctcttcctactcgttgtatcagaatttcatgaagctcttaactatccaccaacagattatcagttttgctaggaactctattttctttgggagggaagggtttatgggtgtaaacatgaccgagaacttttatttgtttacttatagtgagtcctgtttaaattgattatttccaccattacaattttctagtgcattgactttctttccttacatttctttagagcagacagagtacttggaattatttacatttgccctttataagttcttaaaatgagtagttcttttgatttctgaacttcctcttcatggatcttgattctcatgttgagtaaaataacaaactcatatggtatttatgagnnnttttta

SEQ ID NO: 1029 - DNA, 1091 bp, Glycine max
agagaagccctaatcaaaccaaaacaaaagaaaacgaaaatccccaatcctgcgttgtgttgcgacttgcgagccatgagaggggtcgtgaaagcgtttgcggggaatctgttgttccatggaagaaagactcagactcagtgcattcgctcctacagtctgatcccaatggtgatagagcactcttcccgaggtgagagggcatacgacatcttctcgcgccttctgaaggagcgcattatctgcatcaacggacccatctccgacgacactgcccacgtcgtcgttgcgcagctcctcttcctcgaatccgaaaatccttccaaacccatcaacatgtacctcaattcccccggtggcgccgtcaccgcagggcttgctatttatgatacgatgcagtatatccggtctccagtcaatacaatctgtatgggtcaagccgcatccatgggttctctccttttggctgcaggtgccaagggggagaggcggtctcttccaaatgcaacaatcatgattcaccagccttctggcggttatagtggccaggcaaaggatattgcaattcacaccaagcacatagttcgggtttgggattctttgaatgagttgtatgccaagcatacgggccagtcggttgaggttattcagacaaatatggacagggataactttatgactccaaaggaggccaaagagtttgggctcattgatgaggtcattgatcagagacctatggctttggtttctgacgctgttggtaacgaaggaaaagataaaggttccaattagaaccagatggagggtaagatttctttgaggaatccttgctgtatttaaatgctttgtctgtctctgtcaccttaggtataagttgcagctgatattattttatcaactgaacataattttgtcagttttggttgttagatttgaccattaaatttcagtcttgtgctcaattcggtttcattggcatatttttttgacatacagatttggaattttaagtacctttatcttgaaattgctaattatccacagtaatatcagatgattgtttcggtgagaaaaaaaaaaaaaaaaaaaaa

SEQ ID NO: 1030 - DNA, 1428 bp, Glycine max
tcgagtcagctacgtagggccccccccccccaaaaaaaccgtagccaggaaaatgatgaaagaaacaagtagcagtataaaccaattggagttggagagaaaagaagaagaatctagaaagctgaaatgaataggattcacagcagatatagcaaagctcacactaacatcaatttatgataacaacctcaaaatcaagttatcagtgtgtcaccctgacttttcaaaaacaattatttgttgcttcatatttcactgtgatttcataatagattttcactcatcttacttgactccaagcattctatatatctagtgcctccacgcatctctaccctcaaatcttcaccacacaacactacctcaattactcaactaaagcttcattcattcatcgtgtcgtgttgtgttctttgcaaccatgcttcttagaacagcgtcctctttctctctcttcaacgccaacggcgaccatatactactcccttcctctgttcgctactctcagggcaaacacttggttccatgcgctaccaagaactccaataaccggcccttaaccggcgtcgtatttgaaccctttgaagaggtcaagaaggagctcgaccttgttcccactgtcccacaagcttcccttgctcgccagaagtacaccgatgagtctgaggctactatcaacgaacagatcaatgtggagtacaatgtttcgtacgtttatcatgcgatgtttgcctacttcgatagggacaatgttgcgctcaagggtcttgccaagtttttcaaggagtcaagcgaggaggaaagggagcatgctgagaaattgatggaatatcagaacaagcgaggtggaaaggtgaagttacaatctatagtgatgcctcttactgagtttgaccatgaggaaaagggagatgcgctatatgcaatggaacttgccctgtcgttggagaagctgacaaatgaaaagctgcttaacttgcacagtgttgcctcaaagaacaatgatgtgcaattggcagattttattgaaagcgagtttttgggtgaacaggtggaagccataaaaaaaatctctgaatacgttgctcaactcagaagagttggcaaaggacatggtgtgtggcactttgatcagatgctactccatgaggaaggagttgctgcttgattaacattttttttctacctctcgttcgtgcatctagttagttattcggattagtattttcaggtcttttaatgctagagatgaacaaagtggatatggagtaatattggtcatttgtatgtcgtgttttttttagtaatattggagtaatatggaatttgcgtattggactaatatggaattgacgtattgttggagtaatatggaattgaaactcaaattacaattatatttttgttccttaaaaaaaaaaaaaaaaa

SEQ ID NO: 1031 - DNA, 1539 bp, Glycine max
tttttgttcattcagagctttactcactcctttgcacgtctcaatctgagtcttcacttcatcgtttttgggattctctctctcaataatggcagcacgctttcaatctgcagctgtaagttcttcattttttctcattctgtctgtctgtctgtctctctctcactcactctttaagcactgagtaatttgtaatattattctgttcttgcttttgaggtcactgttctttctgcagttgctgcattagcattttgggaccattttgttctttaccactactttttctctgtgatgccattgttgtattgtactcttccttgtgctagatctgaagctgtgaggccagactctctcatttcatttccatcccgtgtttaaattggaagctggaacctagtttatgccctgcttgatttggttgctcttaacccttttcagaaatcaaaagcacttgtactatgctggtgttccctatagggaaagatgaaattgaagtctaagaaaggatggaaatctattgtaccacttcatttgaaaggaaaatcagcaagccgtttttctttatttcgcaaagtcaattctgctggctatggacctggcaaaacaccagtttatctgaatgtgtatgacttgacacccatgaatggttatgtgtattgggctggtcttggtatctatcactctggtgtagaagttcatggtgtagaatacgcgtttggagctcatgactacccaacaagtggtgttttcgaggttgaacctcgccaatgccctggcttcaagttcaggaagtcaatattcataggaatcacatctttggattctactcaggttagggagttcatggaacgccagtcagcaagatacaacggtgacacatatcacttaattgtcaagaactgcaaccacttctgcaaagacatctgttacaagctgacggggaaatcgattccaacatgggtaaatcgactggccagactaggttcaatttgcaattgcattcttcctgaagcactaaggatttctgctgtggcgcatgatcctaattatcagcctcatgatagtgaaaagagaaggcttcgaagtggcttcaattgcttgtcctcaatctcaatgcgtcaaaaacacctttccacatcttcactgtttctacagtcacccataagaggctgcttgtcgtcgtcatggccctcctcggaattgagaaaatccattaaccgttccttgaaagaaagataaccgaactttgagaaggtaggaaatgaatgattgtaagaatcttgtttatgtaagtaggatttggtttcatcacataacctcattttcttttatttttctttccttgtcttttgcagttaaacctgccctgttttattatttttttattgtggtgactaagaatgatcctttccaagcttagaagaaactttataaatgagcatcaccaccatctgctgtgtattattttaatttttgtacatacattagcatgtaaaatgatgcaccaacaacttcaatctaaaaaaaaaaaaaaaa

SEQ ID NO: 1032 - DNA, 1181 bp, Glycine max
attatttttctacttcacaaaggtttggcgtgtggctacgtaggccccaacattactaaacaattgttgttcattcagagcttcactcaatcctttgcacgtctcaatctgactcttcacttcacttcatcgattttgtgattctctctctcaataatggcagcacgctttcaatctgcagctgtactatgccggtgttccctatagggaaagatgaaattcaagtctaagaaaggatggaaatctattgtaccacttcatttgaaaggaaaatcggcgacccgtttttctttatttcgcaaagtcaattcagctgcctatggacctggcaaaacacccgtttatctgaatgtgtatgacttgacacccatgaatggttatgtgtattgggctggtcttggtatctatcactctggtgtagaagttcatggtgtcgaatacgcgtttggagctcatgactacccaaccagtggtgtttttgaggttgaacctcgccaatgcccaggcttcaagttcaggaagtcaatattcataggaaccacatctttggattctactcaggttagggagttcatggaacgccagtcagcaagctacaacggtgacacatatcacttaattgtcaagaattgcaaccacttctgcaaagacatttgttacaagctgacggggaaatcaattccaacatgggtaaatcggctggccaggctaggttcaatttgcaattgcattcttcctgaagcactaagaatttctgctgtggggcatgatcctaattatcagcctcatgatagtgaaaagagaaggcttcgaagtggcttcaattgcttgtcctcaatctcaatgcgtcaaaagcacctctccacatcttcactgtttctacagtcacccataagaggctgcttgtcgtcgtcatggccctcctccgaattgagaaaatccattaaccgttccctgaaagaaagataactgaactttgagaaggtaggaaatgaatgattgtaagaatcttgtttatgtaagtaggatttgggtttcatcacataacttcattttcttttcttgtcttttgctgttaaacctgtcctgttttttattgattgggaagaatgatcctttccaagcttagaagaaactttctaaaaaaaaaaaaaaaaaaaaaggaaaaaaaaaaaaaaaag

SEQ ID NO: 1033 - DNA, 2389 bp, Glycine max
tcggatcgtgatgcatcagagaagtatgaatgctgccgttgaccaatctcgcatgggttcttcagctggccaaactatggagagcaatgctagaaaatctcaggaactagatgttaaaatagaatctcaaggattgcaaccaagccaattgacatcttccagttccaacaaaattgctcaagaaacagaaagaacatcagttcacatacaagggcttaataagcagcagcaacaacatctacatttcccatcagcatatggaaatagtggtggtaactataaccctttttctgggacaaccagtagttccacttcatctatcaaatcacaatcgcatgattcacatatgagtcaaatttcgtatcaaagtattggttcaaatcatcacttaggtgggtcaacacatggtttgaatgtaattggtatgtcaaaacttgaacagcagaattctttcaatgatcccaagagactgccaggtggatctgtgtctcctgctgtaaacaatacagtgtctcaacaaactaaaaatgcttggcaaccatcaccaaacaaagaacaaaatctgggcttaatgtcatctgtttcttatgtcaaaaaggaacctagtgacttatctactgagcagcaaaataggcatagtttgtctaaattgcatgggtattctcctgttaattctgctcagcttgaacagggtggtgctagtcaaggaactgtaaaggtcgagtttttcagctacgtagcccccccccccatgcctcctacatctactggcttgctgccacaaagttctgcttccccttctgtaatgacccaactagaccccagtgtctcgctaagctctcagatcccatcaaatgcttctggaattggtgcaaggacatctcttaaaaagcctgctgctgcccaaaagaaaccacatgaagcacttggttcctcacctcctcctgcaaataaaaaacaaaaaacttctgggggatctgtagaacaaagcattgaacaacttaatgatgtcactgctgttagtggagttgacctcagggaagaggaagagcagttattttcagggcccaaagaggatagtcgagtgtcagaagcttctcgaaaggctgtacaagaagaagaggaaaggctgatcttgcagaaagctccattgcaaaaaaaattaattgacatcatggccaagtgtggcttgaagggtatgagcaatgatgtggagaaatgcttgtcactgtgtgtagaggaaaggatgcgtgggctgataagtaacctgattagaatatcaaaacagagggttgattttgagaaaacaagacatcggactgttgtcacttcagatgttcggcagcaaatcatgacaataaataggaaagtaagggaagagtgggataaaaaacaggcagaagcagagaagattaggaaactaaatgatgttgacagcaatactggacttgatggtgacaaggagaaggacgacggccgtggtaaatcaataaaggtgaacaaggaagaggatgagaagatgaggacaaatgctgcaaatgttgctgcccgtgctgcttatggaggagatgacatgctgtcaaagtggcaactaatggctgagcaagccaagcagaaacgcgaagggggggtggacgtgttatctggttctcaaccagctaaagatgtgaaccgcaaatttttatcaacatctggaagaagtacaaaggataatcaagaaggggagaaaaaaggttcatctacttttatagcaagttcagtggctagaaaacttgggaggagtcatgccatggcacttcaaactagggtagctcgaagcatctctgtcaaggatgtgattgcagtcctggagagggaaccccagatgtctaaatctccactcatgcaccgcttgtacgagagaattcattcggatgccccagtttaacaaaggttaagcaaagtacctaggtgtctgggttttttaatgttgttgctgagcttgttaagttattatcttctaatgcttgccgacagaaattgaaaggtttcctcaagttgaaatcggctgttttgacttccacttcatacaaccctggatagtttacctgttgaatttgatttttctcctttatttgtgatcgccttgtcagaggtttgcctagtttttggttccattgtgtgtattcttttgtatagtcactcggtaaaattggaaattagtgcaattaaacagaaacctctcactgggcaggcttttttagctacagtgatgctactaaaaaaaaaaaaaaaaaatcgccttgtgccattgttgtttaaatgctattaaactaatattgagccagagttgtagctttttgctcaatacatttgtaagtgcaggccatcgaaagtagcatgattcttt

SEQ ID NO: 1034 - DNA, 787 bp, Glycine max
cccacgcgtccgcaagattattatgaaaaaaatatagttttcataagaaaaaagttatagcaatttatttggaggccatgagaaattttaacccaccatcacttaaaatctaattaattttgtttttagttggctcctggcctgggaagggtatagatggtgaggctgagctgaacgcagtaagcactaaggagtagcgagtattggctgatacttgcaccctcttaacaataacatgagacagagaaagggttgacggaaaggaaaaccaaatcaaacccaacccaccttgtccgatctgccaccaggtgtggttgttgtgatttgaatggaggcaagtggaggtggcggtggcggtgcttcaccgtctgcaccagtgaagcaatatctgcacgatttctcgaagctgtttcagtactatctggataaatccactccacattccacgtacagatggattgggacttttgtgatagcatccatctacgttttacgcgttgtttatgtgcaggggttttacattgtctcttatggcctcggaatctaccttctgaatctcttgattggttttctctcccctttggtcgatccagagctcgatccctccgattcccctttgcttcccaccaaaggctccgatgagttcaaacccttcattcgccgcctccccgagttcaagttctggtattctttcacgaaggctctctgcatagcatttgtgatgacttttttttccctgtttgatgttcctgtcttttggcctatattactctgttactgggttgtt

SEQ ID NO: 1035 - DNA, 1076 bp, Glycine max
ccatagatggtaactaagaaggtggtgaggctgacctcagagcagtagatggcttccacttccatagttccattccagctcttaacaattacatgagacagagaaagggttgacggacagagaacccaccttttgttgtattgcagatccatccgctctgccaccaggtgaatggaaggaagtggcggtggcggtgcttcaccgtctgcaccggtgaagcagtatttgcacgatttctcgaagctgtttcagtactatctggataaatccactccacattccacgtacagatggattgggactttcgtgatagcatccatctacgttttgcgcgttgtttatgtgcagggtttttacattgtctcttatggactcggaatctaccttctgaatctcttgattggttttctctcccctttggttgatcctgagctcgatccctccgactcccctttgcttccaaccaaaggctccgatgagttcaaacccttcattcgccgccttccggagttcaagttctggtattctttcaccaaggctctctgcatagcgtttgtgatgacctttttttccctgtttgatgttcctgtcttttggcctatattactctgttactggtttgttctctttgtccttacaatgaggcgccaagttgctcacatgatcaaatacaaatatatccccttcaacttggggaagcagaagtatagcggtaataaatcttctgcaaggagcagtagctctcgtgcagactgaaacttgtctctcatgattggaagatctacttagttaggttttctgaacattcaggctagtcaatgccccccttttctatgaaagaatttgtattcatggtattatggatgtcagtatgcattatgctgttacggaaaatcttaatgtccactcgttttattatacatgaagacgtgctaatattgatagtgaatctcattgtcagtgcacgttattgattggacttttcttgtaaatctcagcttgtattgtgaatttgtgatgctgtaatttttccatgcttggtggcttctacctcaatattaaggcaaagttcatct

SEQ ID NO: 1036 - DNA, 1035 bp, Glycine max
tcagcccagcatgtattgtagattgtagatccatccgcatccgctagctcgcgcaggcaccagcaggtgaggttattgtgatttgaatggagggaagtggaggtggcggtgcttcaccgtctgcaccgttgaagcaatacttacaggaattctcgaagctgtttcagtactatctggataaatccactccccatcccccctacaggtggattgggactttcgtcattgcatccatctacgttttgcgtgttgtttatgtgcaggggttttacattgtctcttatggcctcggaatctacctcctcaatctcttgattggctttctctcccctttggttgatccagaactcgatccctccaacgcccctatgcttcctaccaaaggctccgatgagttcaaacccttcattcgccgcctccctgagttcaagttctggtattctttcaccaaggctctctgcatagcgtttgtgatgacctttttttccatgtttgatgttcctgtcttttggcctatactactctgttactgggttgttctctttgtccttacaatgaggcgccaagttgcacacatgatgaaatacaaatatatccccttcaacttggggaagcagaagtatagcggtaagaagtcttctgcaagtagcagtggctctcgtgcagactgaaacttgattcttatgatttgaagatctactaagttaggttttgtgaacattcaggctagttaattttcccccttttttaatgaaagaaattgtattctgggcattatggatgccaatatgcactatacattatgcagttacagaaatacgtgctaatattggtagtgagtttcattgtcggtacacatgtattgattggatttccttgtaaatctcagcttgtattgtgcatttgtgatgctgtaatttttccatgcctggtggcttctacttcaatattaaggcaaagttcatctaaatagataaaaaaaataaaaaaatataaaaaaatatataataaatttattaggggcggccgttctaa

SEQ ID NO: 1037 - DNA, 700 bp, Glycine max
cccacgcgtccgtacggctgcgagaagacgacagtaaaaaaggcagtagtagtgttactttccaatttgaattgttccattttcatttctttcgcaaaagttgcaactacttcctcagaaaaaaagtttctaagttaaggaaatccagagagacaaaaatggccggtgacggtgcagctacatgcatagacatcctccttgccatcattctccctcctcttggagtctttctcaaatatggctgccaggtggagttctggatttgtttggtgctgaccctttttggttatatacctggaattatctatgctgtctatgctatcaccaagtgatcaccctttaactttgtgtggacaataaacaaatgtcatgggcgtttctgtctttcaactcagatattagtgtttctttaatatatcgccaatgttgtcatattcttatgttctgtttttaaaaccccttttgttcttagcttaagcgagagtggagtgtgtagcttactagcttgtgtatgtagtctctagatttggtaattgatttgaaatacacaatttcatttgtatcaacgatcttgttcatgtatcttatgtaaactgtgctattcattactttcaaattaataaatcggatttattcttattaacccagaaacaaacagctataaaacaagatggccatctgtgaggggaatggagcggcc

SEQ ID NO: 1038 - DNA, 762 bp, Glycine max
gtcacaagttacaactcatcaattcggcagataaaggtagtagtagtgttacgttcgaattcgaattgttccatttgcttcgcaaaagttgcaactacttccacagaaagaaaaaaagtttctaagttaaggaaatccagagtgaaaaaaaaaaaatggccggtgacggtgcagctacatgcatagacatccttcttgccattattctccctcctcttggtgtctttctcaaatatggttgccaggtggagttctggatttgtttggtgctgaccctttttggttatatacctggaattatctatgctgtctattctatcaccaagtgatcgtcaccctttaacttttgtggacaataaacaaatgtcatgggcgtttctgtctttcaactcagatattactgtttcttcaatctatcgttgtcaatgttgccattttcttttgttctgtttttaaaaacccttctgtttttagcttaagcgagagtggagtgtgtagcttgctagcttgtgcatgtagtctctagatttggtaatcgatttgaaatacacaattttatttgtatcaacggtcttgttcatgtatcttatgtaaattgtactattcattactttcaaattaataaatcggatttattcttcttaaaaaaaaagttttgatttttgaaaatgcattttgagtgtttgttaagcagttaaagttgttctgtcgatgtcattcatctgttcaatggggacaaggttcttgtattaaaaaaaaaaa

SEQ ID NO: 1039 - DNA, 1013 bp, Glycine max
cgcttcaacttccaacacccactagactggcacattctctcaactctctcaataagctttctctcatgctcatggcctctaccactacctttatctctctctcttcctagttcattcattctcctctctcaaaaacataaacatcagcacttctctcttttgaatattcctcaattttatagctacctagctacctagctacctagctaagctatacttggttttctttaatttctctgacaaatattccaacttcttttctatataggctctagtagcttagtagttatctttcagttaccttgaacaaatcaacagcaaaatatatttctgacacactcatcagagaccattttaaatttaattaacaacaaacaatgtctagcagaagatctcgttcgagacaatcgggtgtttccactgagatcactgatgctcagatcactgatctcatctcaaagttacaacaactgatccctgagctacgcgcaagacgttctgacaaggtttcagcttccaaggtgttgcaagagacttgcaactacatcaaaagcttgcacagagaggttgatgatctaagtgaccggttgtcacaacttttggccaccaccgactccaacagtgcccaagcagccattattaggagcttacttatgtaatatataataatattctaataattactattaattatagagctttaattttatgtgtcgtttgcatgtccatgttaattttttttattgtcatgatatcctctattctgggtagggtttggtttttaagaccaaagcaaaaaggccaccgtgggctccatgttctcccttacttagttttatcagacactttatattattgactatcatcaaattgtattactaaaataaaatgaccttgcatcttgatgatcgagtctttagtttgaatgtaaagtcatatatattaatgtgtataaatatatatacatgaatctgtgcccgagtagaacatatatgacatatatttatattttc

SEQ ID NO: 1040 - DNA, 1683 bp, Glycine max
ggtgcatcacacaagtacacaaagttgagcctagatgcttctgaggctgactgcttgaagaatttacataaaattggtaatggggatgattcagctacgtaggccccccccccccaaccccaaaaggcacctaatgggcatgctgttatgcatgttaaggatatactgcctcgaggccttatcaactctgggaatctatgttttcttaatgcaaccatgcaggctctcttgtcatgctcacctttcgttcatcttttacagcaattaagaactcgcaaccttcctaaggttgggtatcccacattgacggcatttgctgagttcatagcccaatttgatatgccaagcacaactaaagtaaagaagcaagatacagatacgtttgagtctggaaggccatttcgccctgttatgtttgaagttgtcctaaagaattttactccggatgtgccaaatagcatttcaggaagaccaagacaggaagatgctcaggaatttctgagctttgtaatggatcaaatgcatgatgaattactgaagcttgaaggacagtcttcaagtcttaatggcagcaaatcttctctggtttcttcggtggaagatgatgaatgggaaacagtggggccgaagaataaatctgctgttacaaggactcaaagctttctcccatcagaattaagtggtatttttggaggacaacttagaagtttggtgagagctaaaggaaatagagcttctgctactgttcaaccatatctcttgctccatcttgacatctatcctgatgctgttcacacaattgaggatgcacttcacttgttttctgcaccagagactcttgaagggtaccgaacatcactcactgcaaaggctggtgttgtgactgcaagaaaatctgttcaaatagtgacacttcctaaaataatgatattgcaccttatgcgttttggctacggaagccagggtagcaccaagttgcataagcctgtgcacttccctcttgagttggtattgggtcgtgacttgcttgtttcaccatctactgagggtcgaaagtatgaacttgttgctacaattactcaccatggaatggagccttcaaaggggcactacacagctgatgcccaatatcccaatggtcggtggctacgatttgatgaccaatctgtctttgctattggaacaaataaggtgctgcatgatcaggcatatgtccttttctacagacagatttgaacatatacatattgttctgtcaaatatctactcccttctgctcctaacagaaaaaacactactcccctataagaaaggattgctggtcgattaatgtgggtgattatttattagctggtcaagctcaatatctattgttcatggctcagattgttaaggtataccataaatggtcgatccaatccagtgtgtgataagagtcattgttgtaatattctttttcctattatcttaaactgaaaaagttttgtagtcctagtgtaggacatgggtatgtatttatggtaatagtgagtaaaggtttataagaatacgctggatattataaagttccaccagacttgaaagagattgggatctaaagttattaagcttaagctttgttctgtttccgggctgttaaagattaattatggctgcccgccggctagtgagataaactaatcg

SEQ ID NO: 1041 - DNA, 1098 bp, Glycine max
attacgtattttttgcgttgcgttttctgcaaataggttcggcccatgcgcatctcacattaggacccgcgtccgtggacatttacctttacatcctaacacctccctcgcgcttttcctcgttcccaaacccgaaaggcccagccacagagtctccattgcccatcgctctctctattagttcacgcgcggcaattggagattcacgcgccaccatggcctctccatcgagcctccctatatcctcccaatcaagcgcttccgccgccggcgcctcgcagtcccagcctccgatcgcgacgccggcgttccgcgccttcatctcccgcatctcctcgtcgctccgccacgccttcgcgcagcgccgcccgtggacggagctcatcgaccggagctccatgtcccgacccgacaccctcgccgaagcatactctcggatccgtaagaacttcgcctacttccgcgtcaattacctaaccctaatcgtgttggcgctcgcggtctcgctcatcacgcatccgttctcgctattcgtcctcttcggtctcctcgcgtcgtggtcgttcctttatctctttcgcccttcggatcagcctgtcgtcctcttcggacgcaccttcgccgatcgcgaaaccctagggatcctcgttgtgctcaccgtgttcgtcattttcctcaccagcgttggatccttgttaatctctgcactcatggttggattggcgatcgtgtgcgcgcacggcgctttccgcgttcccgaggatctgtttctcgacgatcaggagcctaacagctccggattcctctcgttcctcggcggcgccgccgcttctgccgccgcgccggcagtcgcgcgcgtgtgaacggcgggatctggacggccggtcagttcggtggattcttctcaggttggttcggcctttttagttgtaatatgttgaactgaaattgttgcgatattctttgtcttttgagatccaaagcgaattgcttagggtttagttctgttactactttttgttttacgccaatatattattgtgctattaaacctcaagtaatgcagcagcttagtcattgattttgcttctgaaaaaa

SEQ ID NO: 1042 - DNA, 1137 bp, Glycine max
  misc_feature (1134)..(1135): n is a, c, g, or t
acaacacaactcaactctgcatccacttccccactctctcacatattgcctctctctttcctctttccattgtccatggcgtccctcatcgaatctggctggcagtacttgatcacacatttcagtgactttcaactggcgtgtttgggaagtttctttctacatgaaggcgttttcttcttgtctggacttccctttatatggcttgagagggcagggtggatgagcaagtacaaaattcaggccaaaaataacacccctgcagctcaggagaaatgtattgttcgtctgttgctttaccattttggtgtcaatctacctgttatgattttttcatatcctgtcttcacatacatgggcatgcggagtagtcttcccctaccgtcctggaaagtagttctaattcaaataatcttttacttcattttggaggactttatattctactggggacatagaatactgcacacaaagtggttatacaagcatgtgcacagtgttcatcatgagtatgctacaccgtttggattgacttctgaatatgctcatcctgctgagatacttttccttgggtttgctaccatttttggtcctgccattactgggccccacttgataactctctggttatggatggttctgagagtcctagagacagttgaggctcattgtggttaccatttcccatggagtctttccaacttccttccattgtatggaggagctgatttccatgactatcatcaccgtttattgtacaccaagtctgggaactattcatcaacttttacttacatggaccggatatttgggactgatataggctacagaaagttgaaagcattgaagagcataggagttgaagacagtggcgagcaaaagaaacaataagaatacgtttttaggaatatccaggaatgattagagagttgatttgcaaaagggcatatttgaaaaatgtctatgatatcaactccttatgtgttcttgtgtttttgtagtagctggtgtttgtcttcaatgtgctgatggctttttctggacattcatgccctgttattagaaaaacttcattattgacagtaatttcaattttgggatgtttccctttgctgatctaaaaaaaaaaaaaanncc

SEQ ID NO: 1043 - DNA, 1310 bp, Glycine max
aattccacaatacaactcaactctaaatccacttccccactctctctcctctttccatcgtccatggcctcactcatcgaatctggctggcagtacttgatcacacatttcagtgattttcaactggcgtgtttgggaagtttctttctacatgaaggtgttttcttcttgtctggacttcccttcatatggcttgagagggcagggtggatgagcaagtacaaaattcaggccaaaaataacacccctgctgctcaggagaaatgtattgttcgcctgttgctttaccattttggtgtcaatctacctgttatggttttttcatatcccgtcttcagatacatgggcatgcggagtagttttcccctaccgtcctggaaagtagttctaattcaaataatcttttacttcattttggaggactttatattctactggggacatagaatactgcacacaaaatggctatacaagcatgtgcacagtgttcatcatgagtatgctacaccgtttggtcttacttctgaatatgctcatcctgctgagatacttttccttgggtttgctaccatttttggtcccgccattactgggccccacttgataactctctggttatggatggttctgagagtcctagagacagttgaggctcactgtggttaccatttcccatggagtctttcgaacttccttccattgtatggaggagctgatttccacgactatcatcaccgtttattgtacaccaagtctgggaactattcatcaacttttacttacatggaccggatatttgggactgatataggctacagaaagttgaaagcattgaagagcataggagttgaagacaatagtgaacaaaagaaacaataagaacaagtttttgggaatatccaggaatgattagagagttgatatgcaacttgagggtatatttgaaaaatttcctatcaactccttatgtgttcttgtgtttgtgtagtggccggtgttgtctacaatgtactgatggctgtttctggacattcatgccctgttaattagaaaaacttcattagtgacagtgatttcaatttttggatgtttacctttgctgatctaatattcttgataataccctgttttttccttgttgcccgtgaatgttatttgtttgatgataaaatcatttgaattgtatggagccaaatgacagttgtgattgaattggaacttatttttaagtatcacttttaaaataattatagaagtcagaagctttatcatgtaaaaaaaaaaaaaaaaaaaaaaaaaaaaaaaaaaaa

SEQ ID NO: 1044 - DNA, 900 bp, Glycine max
gagagaacggccgccggctttttttttttttttttttcgatccttcaaatcttctaagcatatatattacttgaaaataaagccaaaaaccatagtcatctctttaaaagacaacctccaacggctaaaagaaaaagaacaccacattgataaattgacttaactagttaaattatctttcccagtcaaaccataggttcttaacaaaattaagccacataacctatccagccttcaaataaacatcaaaatgatatcgcaaattgctagctcaacggcgactgcacggtagcaaaacccatgaaagttgatacattctctaagcaaccagagtgctagcagttgttgattcgtacttccagactggtgggagcttcttagtcttcttgtaatagcgagcaagtcggtggattctgctctcaacaagaatcaacctgaacttggagtccttgtccttcctgttcctctcaagatgcttcctaattgaaactgccttcttaatcaaatggtacaggtcctctggaatttcaggcgcaagtccgtgagctttgaggatgcgaaggattttgctgccagtgacgctattgacctgagcaataccgtgagaatctctgagaatgacaccaatctgagacggggtcaaacctttcttcgcaaacttgcagatattttcttcgacatcttgcgaagagatcttgagccagctaggaggtgtccttttgtagggcaaagcagaagaggatatacccttaccgcggctgtgcatacgacccatggctggtggctgtcactcgcttgaagctgcgcttcttctgattagggttgcgactgcgacgctcttctgcacactccaccactctccccgtccgtactctgctcgcagccgtaccggcgcgtggg

SEQ ID NO: 1045 - DNA, 895 bp, Glycine max
ttttaaaatttttttataggggagaccccgcgcgagttttttttttttttttttttttatccttcaaatcttctcagcatatatattacttgaaaataaaaccaaaaaccatagtcatctctttaaagaacaacctccaacggctaaaagaaaaagaacaccacaatgataaattgacttaactagctaaattataggttcttaaaaaaattaagaccacataacttatccagccttcaaatacacatcaaaatgatatggcaaattgctagctcaacggcgactgcaaggtagcaaaacccatgaaagttgatacattctctaagcaaccagagtgctagcagttgttgattcgtacttccagactggtgggagcttcttagtcttcttgtaatagcgagcaagtcggtggattctgctctcaacaagaatcaacctgaacttggagtccttgtccttcctgttcctctcaagatgcttcctaattgaaactgccttcttaatcaaatggtacagatcctctggaatttcaggcgcaagtccgtgagctttgaggatgcgaaggattttgctgccagtgacgctattgacctgagcaataccgtgagaatctctgagaatgacaccaatctgagacggggtcaaacctttcttcgcaaacttgcagatattttcttcgacatcttgcgaagagatcttgagccagctaggaggtgtccttttgtagggcaaagcagaagaggatatacccttaccgcggctgtgcatacgacccatggctggtggctgtcactcgcttgaagctgcgcttcttctgattagggttacaactgcgacgctcttctgcacaccccaccactctgaaacccccttctgtcgtcttctcgcagccgta

SEQ ID NO: 1046 - DNA, 850 bp, Glycine max
  misc_feature (3)..(3): n is a, c, g, or t
  misc_feature (850)..(850): n is a, c, g, or t
ggnaaccaattgaatgcgtttgcgttaaagaatgcgacccttcaaatcttctcaacaattatattattaaaaccaaaaaccacagccatctctgacaacctccaacagctaaaataaaaagaacaccacattgataaattgacttaactagtatctttcccagtctaaaaataggttcttaacaaaactaaagaccacatcacctatccagctttcaaataaacatcaaaatgatatggaaaactgctagctcaacagaggctgcaaggtagcaaaacccatgaaagttgatacattctctaagcaaccagagtgctcgcagttgttgattcatacttccagactggtgggagcttcttggtcttcttgtagtagcgagcaagtcggtggattctgctctcaacaagaatcaacctgaacttggagtccttgtccttcctgttcctctcaagatgcttcctaattgaaactgccttcttaatcaaatggtaaagatcctctggaatttcaggcgcaagcccgtgagctttgaggatgcgaaggattttgctgccagtgacgctgttgacctgagcaataccgtgagaatctcgaagaatgacaccaatctgagacggggtcaaacccttcttcgcaaacttgcagatattttcttccacatcttgcgaagagatcttgagccagctagggggtgtccttttgtagggcaaagcagaagaggatatacccttaccgcggctgtgcatacgacccatggctggtggatgtcactcgcttgaagctgtggttcttcttattagggttgcgactaggacgctctcttctgtcgacgttggaacccttgtactcn

SEQ ID NO: 1047 - DNA, 2021 bp, Glycine max
cgacacatcaccctcattctctctccaaagaaagaacacatcacaatggagtacggaaggttaggaccctctgatcctggtggctcctcgcgcctcaaccctccgagatcttccgggaggaaaaacattgtgtttctgtcactctttgctgtcttattaatagccgcgtccgctgttactgcagttgccgtccgctctcgcaccaaaaataccggaggggacggaactagtctcggcaagttcacacaggccatttcacgcacgtgcagcaagacacgctttaagatgttgtgcatgaaatcattactggacttcccgggatctcaaggagcatccgagaaggacctcgtccacatttccttcaacgtcacgctgcagcacttctccaaggcgctctactcttccgccaccatctcctacaccgccatggatccccgcgtccgcgccgcctaccacgactgcctcgagctcctcgacgactccgtcgacgcgctcgcccgctccctcaacacagtctccgtcggcgccgtcggctccgccaacgacgacgtgctgacgtggctcagcgctgcgctcaccaaccaggacacctgcgcggagggcttcgccgacgccgccggcacagtcaaggaccagatggccaacaacctcaaggacttgtccgagctcgtgagcaattgtctcgcgatattctccggcgcaggcgccggcgacgacttcgccggcgtccctattcagaataggaggcggttgatggcaatgcgagaggataattttccgacatggctgaatgggcgagataggagattgctgagcttgcctctgtcgcagatacaagcagatattgtggtttccaaagacggtaacggaaccgttaagaccatcgccgaggccattaagaaggtgccggaatatagttcacgccgcattattatctacgtcagggcaggaaggtatgaagaggacaatttaaagttggggaggaagaaaacaaatgtgatgttcataggggacgggaagggcaaaaccgtcatcacgggcggaagaaattattaccagaacctgaccacatttcacaccgcgtccttcgctgctagtggttctggtttcatcgcaaaagacatgacgttcgagaactacgcagggccggggaggcatcaggcggtggccctccgcgtcggagcagaccacgcggtggtgtaccgctgcaacatcatcggataccaagacacaatgtatgtccactcgaaccgtcaattttaccgagaatgcgacatttacggaaccgtggacttcatattcggcaacgccgcggtggtgttccaaaactgcaccctctgggcccgaaagcccatggcccaacagaagaacaccatcacggcccaaaaccgaaaggacccgaatcagaacacgggcatttcgatccacaattgtaggatcatggccacgccggatcttgaagcatccaagggtagctaccccacttatctgggacgtccttggaaactttacgctagaaccgtcttcatgctgtcctacataggggaccacgtgcatccacgtggctggctcgagtggaacacttcctcctttgctttagacacgtgttattatggtgaatacatgaattatgggccgggttcagctctgggccaacgggttaattgggccggctatcgggccatcaattcgacggtggaagcgtctagattcacggtgggccagtttatatcgggctcgtcctggttgccctctaccggagtggcgttcattgctgggttatcaacgtaagttgatccactgccactgtagacccttttcaaaatcttggttcatagtttaaagtttaaaccaaaccaatttgcccatataatttttatttgtgactgtaataaactacaatatagtttttttattttattttcttttaacccaatgatgatgataataaggaatatatcatgtatgtaaacagtgttcagtgtcatatatagcacttattttttgcttgcctcactcca

SEQ ID NO: 1048 - DNA, 1447 bp, Glycine max
ccacgcgtccgtttactcctctttctgctcatgtctccacgctttcttctcagattcgttcaatggctaatgattttctcactcagcatccccccttcctaggccccccccccttaattaatgaagctgatcagcaacccccgcataaaatggatgagaacatgtggaagaatcgagagtacattgaagaaacaatttttttacttcaaagttctaattggccagaggcgctgaagcagcagtccgcagctgactgtgttgaattttccattacgcttgggaaactgaaagataaacttcataatacattgaaggctttggaatctttccaaactaaaaatgctgaacatgtatttaacacagttatgacatatttgcctcaagattttcgaggaacactaattagacaacaacgggaacgctcagagaggaataagcaagcagaggttgacactttggtaaattctggtggtagcatacacgaccggtatgctttgctgtggaaacagcaaatggacaggagaaggcaattagctcagcttggttctgcaacaggagtctataaaacacttgtgaagtaccttgttggggttcctcaggtattacttgattttactcggcagataaatgatgacgatgggcccatggaggaacagcgtcatcgctatggaccaccattgtacagcctcacctcgatgattctttctattcgactcttcctttcattatcatgggcacgatatgatgctaacaagttaaaaatggaacaaattgctgtcctggaacaagctgttgatgtctataccatggagttggaaaggtttttgacatttatcagtgaggtctttgcaaatgcacctttttttatttcagcagaggttgctggtgcattggaagcaaggaaaaatgatgactacaaagagataaatgttccagccgggaaaacttacgaggttttactctctgttgatgctgtaaactcatacattgcttgggatttttcattggtgcaaggcactataaatatggatattggatttagtttggagtttctaagtcctacgggggaaaaaactctgatgttaccttaccgccgttacgagtctgaccaagggaacttctgcacgttaatggctggaagctataaactgatctgggacaacacatattcaacctttttcaaaaaggtgctacggtacaagatagattgtatacctcccgtcacagattcagtgcagtctgactgaagcaagaatgctggagaaggccttgtgcttgagacaggatagctgatgattcatttgctagtcattttaatctttttagaaacaaatgttccaattactcatgtcaagattgatacacatttaattgtgaagaggaaatgaacgggaaaaattaatcttttgtataaaaattttattgctacaaaaaaaaaaaaaaaaaa

SEQ ID NO: 1049 - DNA, 820 bp, Glycine max
actcgagccgaatcggctcgaggcttcctttgccatttccatggatagagaattcttaggcatattaacatttaagtgatttaacacatctctgccactgactctgctgaatagcattgaataacaaaggccatttctttagtttttgaagatagatagagtcaaagagagatcaaggggtagcttaaatttttcagcttttggagaaagagacatcactcacgcaccaccgagatccattttttcaagacagttgaagagaaaaaatggaaacaatgttgcctccgaaccaagcagaggaagcaatagtcacaacaagccttaacgagacagagagtgaagttggtatgagggaagaagagaaggagttgcaacaacaagatcactccatgttcaacatcaagagcttcctctggcatggaggctctgtttgggacgcatggttcagctgtgcttcaaatcaagtggctcaagtgctgttgacactgccctattctttctctcaactgggcatgctatcaggaatcttgcttcagattttctatggaatcttgggaagttggacagcgtatctaatcagtgtcctctacatggagtaccgtaccagaaaggaaaaagaaaatgtcagtttcaagaaccatgtcattcagtggttttgaagtgcttgatgggttgctgggtccgtattggaaagcagtgggcttagccttcaactgtactttcctcctctttggatctgtgattcagcttatagcatgtgccaagtacatctactacataaatgaccacttggataaacgaacttggacttatatctttg

SEQ ID NO: 1050 - DNA, 2842 bp, Glycine max
ccacgcgtccgcttcagaggaaccagaaaagattgaagaagtggagtcagtccaggtggatgacaaagttgaacttcctgtagctgttgaagaggatggtgaggaagatgatgacgaggatgaatgggatgcaaaaagctgggatgatgttaatctcaatacgaaaggtgcatttgctgatgaagaggctgactcagagcctaaacctatcgtcaagaaggagattcagctacgtaggcccccccccccccaaaaatgctgtacctgctcagaatgctggtgctactaagcctgtggttgaagaaattgaaaatggaaagcaggctaagcctcacttgaatagggaaccaagaaagtctgctgtgcctcctaagcctagtgatgagaacctccgatccccaatttgctgtatcatggggcatgtcgatactggcaaaaccaagctgctggattgtattcgaggtactaatgttcaggaaggtgaggctggcggcatcacacaacagattggtgctacatacttccctgctgagaacatacgtgaaagaacaaaggaactgaaagctgatgcaaagctgaaagttcccggtctactggttattgataccccagggcatgagtcatttactaacttgaggctctcggggttcaggtctatgtgatattgcaattttggttgttgacattatgcatgggttagagcaacaaacaatagaatccctaaatctattaaaaatgaggaatacagaattcattgttgccttgaataaggttgacaggctttatgggtggaaaacatgtcgcaatgctccaattgttaaagcattgaagcagcagactaaggatgtccaaaatgagtttaatatgaggctcactcagattattactgaattcaaagtacaagggctgaataccgagttgtattataaaaacaaagaaatgggagaaacgttcagcattgtgcctacaagtgcaataagcggtgaaggaattcccgatttgttattactattgattcaatggacccaaaaaacaatgggtgggaaacttaaatacagtgcggaggccccccccactgttttagaggtgaaggtagttgaaggccatggaactactattgatgttgttttagttaatggtgttcttcatgaaggagaacaaatagttgtctgcggaatgcagggtccaattgttaccacaattcgagctttattgacacctcatccgatgaaggaacttcgtgtcaagggaacatatcttcatcacaaagaaatcaaagctgcaatgggtataaaaatcactgcccagggccttgaacatgccattgccggcactggtttatatgtggtgaagcctgatgatgatttggaagatgttaaagaatcagccatggaagatatgcggtctgtcatgagcaggattgacaggactggggagggtgtttgtgtacaggcatctacccttggctccttggaagcattactggagtttttgaaaactccagaagtgagtatcccagttagtggtataagcataggccctgtacataagaaggatgtaatgaaggccagtgtaatgcttgaaaaaaaacgagagtatgcagctatattggcatttgatgtcaaagttactcctgaggccagggaactggcagatgaattgggtgtcaagatatttattgctgatatcatttatcatctgtttgaccaatttaaagcttatattgacaacattaaggaggagaaaaagagagaagctgctgatgaggcagtcttcccatgtgttatgagtatcttaccaaattgcattttcaacaagaaggacccaattgttttgggagttgatatccttgaaggcattttaaagattgggactccaatttgcattccttctagagagttcattgatattggtcgcattgcctccattgagaataaccacaaacctgttgattatgcaaagaaggggcagaaagtagccattaagattgttggcagcaattctgaagagcaacaaaaaatgttcgggaggcactttgagattgatgatgaacttgtaagccatatttcacggagatctatcgatatactcaaagctaattatcgggatgaactaaatatggaggaatggaggttggttgtgaaattgaagaatcttttcaagatacaatgaggagacttgatgtgtgggcattcatttaagaaaaaacaaggttttagtgaaatgtttggttttatgcaacactttgaaggatttgttgagcatgcggttggatccaccagagaccagtaaagatgatgcaatgattcagatagatggctgtgtcatggagaggcaaaagtaacttaaacagacgaaactccaattctttgtcagctgagaagcgcaggtaaaaaaggtgcggaaagggaaacaggcaaggtcaaaattgtgaattactaccccatatatacatatctgtggcatacatggaagcaaataagggttctaaatgcaattcagtgaggaaaagcaaaattttacggaagtaattgatttgactaaaaagttgttcacttttggtttcctagtgtattattgtacaaattttttccatttgtagctgagaggcactttatttttcgcgggctatgtatccttttggtgtttcctaccaagcatttggttatggaaattggtattaatggcaaaggttcaataagccacgtggaacctgaaaaaaaaaaatacatgagaggattattacgtgaaacctgctgagagcaggaggccattccgtgctctaattgatgttggtcttattaggactaacaaccgtaaccgaaaaattgctgcggtgagg

SEQ ID NO: 1051 - DNA, 652 bp, Glycine max
tcagctacgtaggcccccccccccgaaactccaacaaaaagacccaaagagtgtgtttttgcgcattcattcatttggtgatgtgcaacaagaacagtccttcttcttcggacattcaagcaacctctattatgaagaggacgcggaagccgaatagaaggtatcatcataataccacttcttcctcttccttcttcttcttcttcttcttcttcttcttcctccacgacgtcgtttaagccgcaccggcgcgggaacagaaccaagacgcggaagcccaagtttgtcagcctgcggcttcagttatccgatcctaagaaaaagatgaaaacaacccagcccaagcccaagcccaagcccaagcctaaggcccaacaacaagaacagcagcagcaacagccgcagctgaatctcttccctctccatccggaccaccatgacatgcacgaggagcagaacgtggcgcttctctttagctccgatggtggggccacactcaacggactactggaggaggagacgactacgacggaggaagggtcgatgtcggtgctgacgtgtccggcggaggacaccgggaaccggctggtacggaaggcgatgcggcggatggagagcgaggaggggagtgaaaagcggtgggtgtgctact

SEQ ID NO: 1052 - DNA, 1067 bp, Glycine max
cctcgagcatcgatccacacgctcacaataacacactgtcaccgttccgttccgttttcctctgttttttttttctttctttcaaatccccgcttcgtggaaatcccgaaccagaaaccatgcttctccgaaccgctgctgcttctgcttcgtccctctccctcttcagcccgaacgccgaacctccccgttcggttcccgctcgtggattggtggttcgcgcagcgaaaggatccacgaaccaccgcgccctgaccggagtgatttttgaaccgttcgaagaggtgaagaaggagctcgatctcgttcccaccgttccgcaagcttctctcgcgcgccaaaaatacgttgacgaatctgagtccgccgttaacgaacaaatcaatgtggagtataacgtttcgtacgtttaccatgccatgtttgcgtacttcgatagggacaacgttgcgctgagaggacttgccaagttttttaaggaatcgagtgaagaagaaagagagcatgctgagaaattgatggagtatcagaacaaacgtggtggaaaagtgaagttgcagtcaattgtgatgccgctttctgattttgatcatgcagataagggagatgcgctgcacgcaatggaactcgctctgtcattagagaagctaaccaacgagaagctccttaacttgcacagtgttgccacaaagaatggtgacgtgcagttggctgacttcgtggaaactgagtatctgggtgaacaggtggaagccatcaaaagaatatccgagtatgttgctcagctcagaagagttggcaaaggacatggtgtttggcactttgatcagatgctcctccacgagggaggagatgcagcttgatgattattactacattacccccctttctattattattttgtatcttgctcatctaggtggctttctagtcttttgctagaaggtggaactgaactatatggatgaataaaataaatgtggactggtttcggtcctctcgtagattaaaaaaaaaaaaaaaaaaaaaaaaaaaaaaaaaaaaaaaaaaaaaaaaaaaaaaaaaaa

SEQ ID NO: 1053 - DNA, 1267 bp, Glycine max
aatggttaggttatccttttcgtcgtggcggggctcgaggggagaaagaacaaagaaatgggaagttcattggtggaaatccaagttcccgggcagaagtttgtgaacggagttccgttccccgctgtggtgtctcctccacctgcaactgcaagtgcggttcctcttacggactccgtcaaaacccagaaagctttccttgaatcattgctactccaatcgggtgctgtccttttcaggggattcccactctccaccgcttctcacttcaacgacgtcgtcgaagcattcggctacgacgagcttccctacgtgggcggcgccgctccccgcaccaacgtggtgggtcgcgtcttcaccgccaatgagtccccacccgatcagaagatccctttccaccacgaaatggctcaggttcctcaatttccttcgaaactgttattcttctgcgaagtggaacccaggagtgggggtgaaacccccattgttcttagccacgtggtgtatcaaaggatgaaggacaagtaccctgagtttgtggagagactagagaagcatggtttgctttacaccagggttttaggggaagatgacaaccctaactctccaattggccgtggctggaaatctaccttcttgaccactgacaagaccctcgctcaacaaagggcggctaaactgggtatgaagttggaatggttggaagatggggtgaagacagtcatgggtccaattccgggcgttaaatatgatgagaggagacaacgaaagatatggtttaacagcatggtggctgcttacactggttgggaagatgaacgcaacgatcctgttaaggctgtgacctttggggatggtctaccattaccctttcacattgtctatgattgtctccacattctggaggacgaatctgttgccattccttggcaaaaaggagacattctcttaattgataattgggctgtcctccattcccgaagatcttttgatccacctcgcagggtcctagcttcccttgtcaagtgagccttgtaccaatttcaactaccttaaattaaattatgtttgtactataccaacttattagaaacaataactgcttcagcagtaatagcataaccatgaattgttaatcatttagaaacaagagatggaaataaataaagacgtgtcttattagatttagttctcaaaaaaacatctactgtattgtatgtaactatgtatccattctcttttggccattataataaacaggcaagtc

SEQ ID NO: 1054 - DNA, 997 bp, Glycine max
acggctgcgagaagacgacagaaggggagattaagttgtgggactgagtggctgctattatatatttataaagacttgtgtaagtctccaacattcccatacccaccttgctctcattttttggtgttccattaattttcctttggaagaagaagctataggcgatgggaaattgccaagccatcgatgcagcaacattagtgattcagcacccgaatgggaaagtagacaagttctatgcacctttgagtgccacacatgtcatgaaaaccaaccctggtcactatgttgctcttctcatctccaccacattctgtccaaccaaggacattcaaaattgccccaacaagagtgacatcaaaaacaaaaacgccaacaacccagttcgcataactcgaatcaagcttctcaagcccactgacacgcttgttcttggccaagtttatagactcatcaaaactcaagaggtcatgaagggtctgaaggaaaagcaaaaggcaaagatgaggcaaaacgtgccagagtcagctcacaagccagatttggagaaggagaaagtagcaaggaggtctgaaatggaggacaataaggtaattaccaaacccgaaagagctcgaccaaggattacagcaccaactaataatggtgccacagctaagacaagattttggcaaccctctttacaaagtatctcagaggctgccagctgatctttgttttcaatgttacccacatgtggtgtgagggacagagaagcaactgaggaaaaaaaaaattaacagcaaaaaaaaaaagaaaaaaaaacccatgattgcttggtcatgtgaaaattaaatatagtacactgaggttcaggggaggccagaaaccacagagatgataaaaattctcctcttgagttgaggcatatattgggtatagtaaagttgacatgtcctatttcttttagtgtaattagatattactctctaatgaaatcaatcttcatcatcatgcc

SEQ ID NO: 1055 - DNA, 2024 bp, Glycine max
  misc_feature (2017)..(2017): n is a, c, g, or t
cacaaatgtgaattgtccccagtctctcgagaacttagaatagaatactcgtcccacaccctattttcttctctctctcctctcatcacttcatatattcgcaatttctcttccaccgtgaaaccctagacccaactgcgagcgcggagccaagccatgtccctcaaccgcctccgccctctcctccctccgatccctctctgcctccgccgccgctgtggctccctccgcctcctcccctcccgcccctcttccccccaccgccatgatctacgaccgcgccgccgaggccgtgaagtccaagctccggcagctcgagaaccccgacccccgcttcctgaagcatgggtccccccggcccaccctctctgaccacacgcgcatcctgtcctcccccgagacgcgcgtgaccacgcttcccaacggcctccgcatcgccaccgagtccaccctcagcgcccgcaccgccaccgtcggcgtctggatcgacgccggttcgcggttcgagaccgaggagaccaacggcaccgcacacttcctcgagcacatgatctttaagggcaccgagaggcgcaacgcgcgtgagctcgaggaagagattgagaacatgggaggacacctcaacgcctacacctcaagggagcaaaccacctactacgccaaggtcaccgacaaggacgtcccccaggccctcgacatcctcgccgacatcctccagaactcccgattcgaggaaactcgcatcaaccgcgagcgcgatgtcattctccgggagatggaggaggttgagggtcaaactgaggaagtgatttttgaccacctacacgctactgcattccagtacactcctcttggaagaaccattcttggacctgctcagaacattaagacgatcaccaaagctcatctgcagagttacattcagacacattacacagctcctaggatggtgatagctgcatctggagctgtcaagcatgaagacattgttgagcaagtgaaaaagttgtttactaagttgtcaacagatcccactaccacatctcaattagttgctagagagccggctatttttactggttctgaggttagaatgcttgatgatgatattcccctagctcaatttgctgtggcttttgaaggggcatcttggaaggatccggattcaattcctctcatggtcatgcaagctatgttgggttcttggaataaggcagcaggaggtggaaaacacatgggttctgagttagcacagcgaattggcattaatgaagttgccgagagcattatggctttcaacaccaattacaaggacacaggtctttttggtgtttatgccgttgccaagcctgattgcttggatgatttgtcctatgcaataatgtatgagacaaccaagttggcttatcgtgtttcagaagatgatgttacacgtgctcgtaatcagttgaaatcttcactgctactacacatagatggaacaagcccagtggctgaagatattggtcgtcagctactcacatatggtcgaagaatcccatttgctgaattgtttgctagaattgatgctgttgatgccagtacaattaaacgtgttgcgaaccgatttatctatgacaaggatgttgttattgctgccacgggtcctattcagcgtttgcctgattacaactggttccgacgcagaacctactggaaccgctattagttcattatagtttttttgcctcatttaaacttcattggaggtctggcaaatgttttattcaaatttacaagatttatgcctctggatggctgctttggcagccatttttcatttatttgtcatggacctctattttgtaacatttttgcagtaataagtatgctgttgtcagtgatgtaattggcatccttcgcaattactcattcctgttgaaaatggtgtttacttaaaaattgcccttgtttctcttgaacctcatatttggtttttggaccctttgaactcatcgattcaatcaatagttgcagnttggatg

SEQ ID NO: 1056 - DNA, 1946 bp, Glycine max
gcgatttctcttccaccgtgaaaccctagacccgactgcgagcgcggagccacgcctccgccctcaaccgcctcctttccgcggcccgccgctccgaccggcgggcctccgccctctcctccctccgatccctctccgcctccaccgccgtggcccccgccgcctcctcccctcccgcccctcctccccccaccgccatgatctatgaccgcgctgccgaggccgtgaagtccaagctccggctgctcgagaaccccgacccccgcttcctcaagcacgggtccccccggccgaccctctcggaccacacgcgcatcctctccgcccccgagacgcgcgtgaccacgctccccaacggcctccgcatcgccaccgagtccaccctcagcgcccgcaccgccaccgtcggcgtctggatcgacgccgggtctcggttcgagaccgaggagactaacggcaccgcgcacttcctcgagcacatgatcttcaagggcaccgagaggcgcaacgcgcgtgagctcgaggaagagatcgagaacatgggaggacacctcaacgcctacacctccagggagcagaccacctattatgccaaggtcaccgacaaggatgtcccccaggcccttgacatcctcgccgacatcctccagaactcccgattcgaggaaaaccgcatcagccgcgagcgcgaagtcattctccgggagatggaggaggttgagggtcaaactgaggaagtgatctttgatcacctacacgccaccgcattccagtacactcctcttggaagaaccattcttggacctgctcagaacattaagacaatcaccaaagcccatttgcagagctacattcagacacattatgcggctcctaggatggtgatagctgcatctggagctgtcaagcatgaagacattgttgaacaagtgaaaaagttgtttaccaagttgtcaacggatcccactaccacatctcaattagttgctaaagagccagctatttttactggttctgaggttagaatgcttgatgatgatattcccctagcacaatatgctgtggcttttgaaggggcatcttggaaggatcccgattcaattcctctcatggtcatgcaagctattttgggttcttggaataagacagcaggaggtggaaaacacatgggttcggagttagcacagcgaattggcattaatgaagttgctgagagcattatggctttcaacaccaattacaaggacacgggtctttttggtgtttatgctgttgccaagcctgatagcttggatgatttgtcttatgctataatgtatgagacaaccaagttggcttatcgcgtttcagaagatgatgttacacgtgctcgtaatcagttgaaatcttcactgctactacacatagatggaacaagcccggtggctgaagatattggccgtcagttactcacatatggtcgaagaatcccgtttgctgaattgtttgctagaattgatgctgttgatgccagtacgattaaacgtgttgccaatcgatttatctatgacaaggatgttgttattgctgccatgggtcctattcagcgtttgcctgattacaactggttcagacgtagaacctactggaaccgttattagttcattatagtttttttttttgcctcatttcaacttcatgggaggtctggcataatgttttattctaatttacaacatttatgcctctgtttttcatttatttgttatgggcctctattttgtaacaattttgcagtaataagtatgctgttgtcagtgatgtaattggcatccttcgcaattattcctccttgtcgaaaatggtgttttgattaaaaattgccttggtttgttttgaacttcaaaaggatgtgaggacccggggagcgtgttgattcaataatgcacatggatggatttgtgcct

SEQ ID NO: 1057 - DNA, 1778 bp, Glycine max
cttttttatttcattttcacgttttgcgccagaaacgaaaacctccaaacccaaaccctcgcgaattggggtgacttgattttccctcttctccttctctctcgtgagattcgtccctgaagcgaaattctagaatggcggaagaagctccagcatctgaaacctccgtcacaatgcctcaaccgtcggaggttatcaccgtcgacggcaccctaaactcttccgagaacgacaagagcggaatctccgtcgatgcggccgcgcacagcggtgaagagacggtgtctaacgctgaagcttccggtagcgatcctcagaagtctctggagttggcgaatgagctgatggaaaaaggaaacaaggcaattaaggaaaacgattttggagaagcagctgataactttagccgtgctctcgaaatcagagtggcgcattatggtgaacttgctcctgagtgtgtgcacacatactacaaatatgggtgtgctcttttatacaaggctcaggaggaagctgatcctttagctgatgtgcccaagaaggaggatggatctcaacatggctccaacaaagatggttctgtgaagggttctttgaatgctgaatcttccacagcttctttttcaaacaatgccgggcaggatgtgacttcaaatgaccagggtggagcagtggatgatgggtcaactaagaatgacccggaagaagatgacgaggatagtgatgctgaagacttggcagaagctgatgaagatgagactgacttggacctggcatggaaaatgcttgatattgccagagccattgttgaaaagcaatctgtcaatacaatagaacaagtggacatattatcaacattggcagatgttgcattggaaagagaggattttgaaacttccctctcggattatcagaaggcactaaccatcttggaacaactagttgaaccagatgatagaaaaattgctgacttaaattttcgcatatgcttgtgtttggaggttagttctaagcctcaagaagcaattgcttactgccagaaggctacatctgtttgtaaggcacgattacatcgtcttacaaatgaagtaaagagttgttcagatttgacatctgcttctgagttagctcaggatgttccagcatgtcccaaatctgagtctaataactcaattttggataaacaatcagagattgaaactctcaaaggtctatcaagtgagctggaaaagaagcttgaagatttgcaacagttagtgtcgaacccaaagtcaattcttgctgagatcctaggaatagcagctgccaaggcaggcaatgtgaaggaatcatcttcagcaatggtgagttcctcacggttggctactgccaacagcagtggaggttttgactccccaaccatttcaactgcccacaccaatggatctggtggagtcacacaccttggtgtggtgggaagaggagttaagcgagcatcaaatgccactccggcagaaggaagcacaccaaagaaaccggcattagagtctactgaagacaaaggtgatggcaacgcacactgatgtaggtcttggtttgtttgtatggtgtgtttaatttgaactttgaatgcaaccatacaatttggttacacttttgaactattgataaggacattttaaggggattgactgttctcaggggaatagtgttatgccatatattatccttattgattttatgtgcagctaattgatattgtcaaaactttcaagttacttaaaaaaaaaaaaaaaaaa

SEQ ID NO: 1058 - DNA, 1472 bp, Glycine max
cctcgtgccgacctcgtgccgaattcggcacgaggtttacagccaaagtttgaagttaagccatctctgaatatttccaaaattcagaatcaaggccattttgctccacatacgtacttgaatggtaatgctgctcatacagattgtttggacacatcatcttctacaacgtcagtttgcctttctcagagtgacgctcatatgaatcagaatagcaatccattgtcttacaatcgacagtctatgttgtttagagacaataatcaagatggggaagttcaggctgatgctaggagcaatattccttatgccaataacattgatagccaaataggaatgccactgaatccagattcactcttaaccaaaggcacattaaggttggggaagtatttgtctaataatttctcttcagaaggcatgcttggaaattatgaaaataacagagatgctcagcaagaactttcgtcttcaatggtttcacagacatttggtgtccctgatatggccttcaattcaattgattccacaatagatgatagtaacttcttgaacagtggtccgtgggctccaccaccagcaccgccacctctgccaccagcacagtttcagcggatgaggacatataccaaggtatataaacgcggagctgtgggaaggtccatagacataacacgatattcaggttatgaggagcttaaaaaggatctagctcgtaggtttggcatagagggacagctggaggatcggcaaaggataggttggaaacttgtctatgtagatcatgagagtgatgttcttctagtgggagatgatccttgggaggagtttgtgaactgtgtccgctgtattaaaatactttctcctcaagaagtgcagcagatgagcttggacggagattttggcaatggtggccttcaaaatcaagcctgtagcagctctgacggtggcaatacttaaatgaagttcagtaatacgctaactattcttccgtattgttaacttagattatttctgggagatgcattattgtcctaattccgaaaggcaattattatgccactgcggacttctgtgtccaccatcaggacttgaaaggagaagttttgtctatgttccggacatgcaaatttgaagagccaaatgagggcggagaagtgagctgctgctctggtttaacattgagcggtaattttgaatgtataaagtcttaggcagctagattttgcggaagctttcatgatcttccatccttggaggcaccttattattttttagccaatatgactgtgaagtagagaaacttcaaatgttgtaaggtcaagtgcatactgttgcattgtttgcttgaagcgtaagtactaaaaatgttggagttatttgactgtacaggagatcaattactagtatttgacacatgaatctaatgttcatcatcgactccctcttattctaattcagtaattgtttcg

SEQ ID NO: 1059 - DNA, 2093 bp, Glycine max
ccctcacgcatttgcaatcattatgaacaactctacgtctctctctataaatccctctctcactcctccttttcgtttacctgccacacaaacaacaaccctatcttcttctttttccactttccctcagaactctcttagatttagctgtttccaatcgtttcgaccaaaacccattaaccccttttgcagaaaagcaagattgtgctctctgcaagggtcaacgagtgtgaaaagcagaaaaagtttggtgctttgtgctaccaacatgactatagcagaggatagtttgttgcaggtggtggaggaggaagagggtcctcctgattttgctttgcttgatcctgaggacaattctaggcctcgtagaattgctctcttcgttgagccttctccttttgcatatgtctcaggatacaaaaaccgtttccagaattttataaaataccttcgtgaaatgggagatgaggtgatggtcgtgacaacacatgaaggagtacccaaggaattttatggagccaaattaattggatcccgaagcttcccttgtccctggtatcaaaaggtacccctctctttggcacttagtccaagaataatttctgctgttgctgagtttaagcctgacataatacatgcatcatcaccaggcataatggtttttggtgcccttatcattgcaaagcttctgagtgttcctattgtcatgtcctatcacacccacgtaccagtatacattccaagatacacctttagctggctggtgcaacccatgtggtgggtcataaaatttctgcatagagcagctgatcttacactggtgccatcagctgccattgcaaaagatcttgaagaagctagagtaacagcagcgaacaagatttgtctttggaacaagggtgttgattctgaaagtttccatccgcgattcaagtcccatgaaatgcgattaagactgagcaatggtgaacctgagaagcccttgatagttcatgttggacggcttggagttgagaagagtttagattttctcaaaagtctcatggataggcttcctgaagcacgaattgcctttatcggagatggaccttacagagaggaactagagaaaatgtttgaaggcatgccagcagtgttcacaggaatgttaggaggggaagaactatctcaagcctatgcaagtggagatgtctttgtgatgccgtcagagtcagagacacttggccttgttgttctggaggccatgtcatcaggaatccctgtggtgggagcgcgtgccggtggcattccagacataattccagaagaccaagatggcaaaattggttacctctatacaccaggtgatcttgaagattgcctgagcaaactaaagccgcttttggatgacaaagagttgagagaaaccatgggagaagctgcacgtttggagatggagaagtatgattggagagcagccactcagaagattcgcaatgaaaactacaatgctgccatttggttctggcgcaagaaaagggctcaactcttgagaccctttcaatggttggctcaacgtattttccattctccagatccagaagccaacacatagcgtggtgattgatgcaaagcaaatgcttcttttgagctttggatggttctttgaattgttcattgctttggctttaaggaagcctattatgggacataagtgtggttggttgtgtaatgcattcatttgattgatgtatataataatgggacaaaaattatggattgtgccattgtagagtggattaattagagttgaatgtcaattcatgatgatgtattggatagtgtaagataaattgtccaatcagtaacgggagaatccattcatattttacaacccagatatgcaatagcatagtagaaaactagtcattaaaagtaaaaaaaaattggcccttaagaggatccgagatagagatcaaaacattgtaaatctgtgtccaagtataattttcattactttgagctctttttcggttttgttttgtcttgtaagaagcaatttggcccatctaatcacaacctttatttggtcttcaaaaaaaaaaaaaaaaaac

SEQ ID NO: 1060 - DNA, 1908 bp, Glycine max
atcatcggattattctctctcttctaacactcccactgtagttcgatattattctatccaaattcgaaagcttttttctcacacatcgtataacatctttacaaccatgaaaaccactgcaatcactataaatccctcactctctccacccttttgttccaaagccactacccctccttcttgttcttcatcatcttcttcgttccctcctagtttcccacgttttcacttgtcgggagcaaaacccatttctctttcttgcagaggaacacgattgtgctccttgaaagggtctaaaactctttggggtagaaaaagttttgtgcttggggctggaaacatgaccatggcagaggttgattctcatgaagagggggagaacgagggtgctttggttggctctgagaatgagaacaattcaaggcctcggagaattgctctctttgtcgagccttctccctttgcatatgtctcaggctacaaaaaccggtttcagaactttattagatgcctacgtgaaatgggtgatgaggtgatggtcgtgacaacacatgaaggagtgccacaggaattttatggagccaaattaattggatcttggagctttccctgccctttgtatcagaaggtacccctctccttggcacttagtccaagaataatttcggaggtagcccggtttaagcctgacataatacatgcatcatcgccaggcataatggtttttggagctcttatcattgcaaaacttttgtgtgttcctattgtcatgtcctatcatacccatgtaccagtgtacattccaagatatacctttagctggctggtgaaacccatgtggttgatcataaaatttcttcacagagcagctgatctgactctggtgccatctgctgccattgcgggggatctcctagcagctagagtcacagcagctaacaagattcgtctttggaacaagggtgttgattctgaaaaattccatcccaaataccgctcccatgaaatgcgattaagactaagcaatgatgaacctgacaaacccttgataattcatgttggacggcttggagtagagaagagtttagattttctgaaaaggctcatggataggcttcctgatgcccgaattgctttcgttggtgatggaccatacagggaagaactagagaaaatgtttgaaggtatgccagcagtattcactggaatgttaggaggagaagaactgtcccaagcatatgccagtggagatgtatttgtcatgccttcagagtcagagacgcttggttttgtagttttggaggcgatgtcttcagggatacctgtggtggcggcacgtgctggaggtattcctgatataatccctgcagatcaagatggtaaaactagctatctgtatgatccacgagatcttgaagactgcttgagcaaactaaggccccttttgcacaacaaagagttgagagaaaccatgggtaaagctgcacgtgaagagatggaaaagtatgattggaaggcagccacgcgaaagattcgcaacgaacaatacaacgctgccatttggttctggcgcaagaaaagagcccaactattgagacccttccaacggctggcaaaacgttttttcccatccccacaagtcaactacaggtgatgcaacttcacctaccaagcttaggctggtcccttgctagctttctttggcttcatagaagacttgtattggataaatgtgtggttgatagtgtaatggattcattctttttgaatgtaaaggaacatacaatatggtggcttgcaccgtattttgtgcttttataaagggaatcagtgccacaggtttaatccttcatgtctctattctattaaattaaatatttgaatgccaaaccaaaaaaaaaaaaaaaa

SEQ ID NO: 1061 - DNA, 1984 bp, Glycine max
  misc_feature (10)..(10): n is a, c, g, or t
cccacgcgtncgggttgcgaaaaagacgacacgacagagggtgacctcctgcgtgctcgcggcggagacacgcggggccgctgagctccctttctcctcggtccacagagacaaaatgtaagacaggtgccaacagttcatcacgaaagaaaggactagctgagccgagatcactaactaaaacgaatttaatactaatcgaaaatactaatagaatagaaatagaactgtcttttcatatagatatcccttcaacacaacataggtcatcgaaaggatctcgaagacccaccaacgcacgaaagccgggatctttcagaaaatggattcctattcgaagggtgcataaccgcatggataagctcacactaacccgtcaatttgggatccaattcggttccttaggaggtatcgggaaggaattttggaatgtaataatatcgattcatacagatacagaagaaagggttctctattgattcaaacgctctacctacgagatagggatagagaaagaggaaaaaaccgaggatttcacatagtacttttggtcgaaaaatcgatctgatttttttcgtacttttcgctcaatgatgaaatgggtcagattctacaggaccaaaccttgtgggagttaaggaatgatggaagaaaagaaataaaaaaaagtaaataaaaatgcagtagaagagtcctgattccaaacgaaaaaattcaaacttgattgaaaaggatctttctgattattgaagaatgggacaaaaggattgatcgcgaaaaagatttcttgttcttattagaagatcgtgattggatccacatatgtttggtaaaaagaaagaaaaatattcttctttgagaataataaaaaaggaaagtgttcaattggaacatgaaaacgtgacagaattggtcctagttactcttcggaacggaatagaagaaggggagagattctcgaaccgaactaggaaacggatccaatgacttcaaaagaattgaacgaggagccatatgaagtgaaaatctcatgtacggttctgtagagtggcagtaagggtgacttatctgtcaacttttccactattacacccaaaaaaccaaactctgctttacgtaaagttgccagagtacgcttaacctctggatttgaaattactgcttatatacccggtattggccataatttacggcaactttactgtagtcttagtaagaggggggagggttaaagatttacccggtgtgagatatcccattgttcgaggaaccctagatgctgtcggagtaaaggatcgtcaacaagggcgttctaaatatggggccaaaaagccaaaataaatgattttagcccttataaaagttataaaaaaacggattcctcctttcacgctcatgtcacggcgaggtactgcagaagaaaaaaccgcaaaatccgatccaatttatcgtaatcgattagttaacatgttggttaaccgtattctgaaacacggaaaaaaatcattggcttaccgaattatctttcgagctttgaaaaagattcaccaaaagacagaaacgaatccactatctgttttacgtcaagcaatacggggagtaactcccgatatagcagtaaaagcaagacgcgtaggcggatcaactcatcaagttcccgttgaaataggatccacccaaggaaaagcacttgccattcgttggttattgggggcatcccgaaaacgtccgggtcgaaatatggctttcaaattaagttccgaattagtggatcctgccaaaggtagtggtgatgccatacccaaaaaggaagagactcaccccatggcaaaaaaaaatagagcttttgcacattttcgttaatccctgaacaggatctatatagacacatagacccatgaatccatacatctcgatcgaaaaagaatcgataattgatgaatatatctctcgaaacaaacaaaaaaaaaaaaaggtttaactc

SEQ ID NO: 1062 - DNA, 833 bp, Glycine max
gctctgcaaggcaacctccactctctgccagcatgaacaatgagtcatttgtgttgcctcggggaaaagggttatcaatgcttgaagcattctataacaatgatgttaacggagtgtacactagagattttccaaatcagcctccgattgtgtttgactataccgacccaaacataacgagcactacagaattagccttcaaaatcgcacccaaatcaacgaaagtgaagacgttgaagttcaattcaactgttcagattgtacttcaaaacacggccattgtctctgcagagaaccaccccattcacattcacggcttcaatttccatgttttggctcaagggttcgggaattacaacgccactagagacgagcccaagttcaatcttgtcaaccctcagatacgtaacacaatttctgtccccgtcggaggatggtccgttgttagattccaagcaaataatccaggtgtttggcttgtgcattgccatttggaaactcatttgccgtgggggctagccatggctttcgaggttgagaatgggcccactccttctttatcagtgcctccgcctccagctgatcttcctaggtgctaagcgcacgccatgcgttcatgactaaaaacatttatagattggttaatgtttatacacatacatactttcataatgtggatttctaatatcatttgtttgattgagaaaaataaggtgtaataaaggaggaaagtttggctattctttcaaccatgtgacttgatggccaattgtactctatcaaataacatatgttaatctgtcattaattatatttttttattttctcgtaaa

SEQ ID NO: 1063 - DNA, 2547 bp, Glycine max
ccacgcgtccggtatattatctcttctacatagagtgagagagaagaaaagaggaagaaaacaaaaaaaaacaaaaacagaaaaccgatgaagagcggtggtggtggtggtggtggtatgggcgcggttccgtcgtacggcgtccccgcgaaacggcggtggagagggctcgtaattgcggtgctcggtcttgtcattctctccatgctcgtccctctcgtcttcttgctcggtctccacaatggtttccactcctccggatatatatatgaacagaagaatactccttcgaatgagaaaagtcttgaaagatatgatagacatgatgttggccataatgagtctgagggagaacaatcaagtcatgtggaggatcttatcacaaagtttgcaccaaattcatgtcaggatgttctgaagaaatacactcgagaaggcaagagtgataaacaaagaggttctagggcgccacctaagggtgttctgcaatcacctccaacttcaaatagtcctagaagtggtcaaattgagcaagtcaacaaccctaaaacaagctctaccgatgaaggtggaaagtcatgtgagctcacattgggaagttattgcctttggcaacaagaacatagacaagaaatgaaagatgctctggttaagaaattgaaagaccaactatttgttgccagagcttattatcctagccttgcaaaactcccagcaaatgataaattgtctcgccaactgaaacagaatatacaggagatggagcacatgcttagtgaatctaccacagatgctgatcttccaccagtggctgaaagttattcaaagaagatggaaaaaacaataaccaggggtaaaatcaatccctgtggtttgcgacaatgtggacaagaaattgagacaaatatttgatttgactgaggatgaagccaacttccacatgaaacagagtgcattcttgtataagcttaatgttcagacaatgccaaagagtcatcactgcctgtcacctacgctggcccccccccctttcaaatcctcgcataatgacaaaaaggctgacgaagaaaagtttattgattcttcattgcaccattatgttattttctctaataatgtgcttgcagcttcagtagttatcaactcaactgtatttcatgcgaaagaaagttcgaatctggtttttcatgttttgactgatggagaaaattattatgcaatcaaactctggttcttgagaaatcattataaggaagctgctgttcaagtgctaaatgttgagctggacagccaaaaggaaaatccattgcttctatccttgcctgaggagttccgcatttcatttcgtgataatccatccaggaaccggattagaacggaatacctttcaattttttctgattcacactatttacttcctcatttattcagcaatttgaataaagttgtggttctggatgatgatgttgttatccaacaagacttatctgccttgtggaatatagatttgggacacaaagttaatggtgcagtgcagttctgctcagtaaagctgggtaaactgaaaagttatctgggtgagaaaggtttcagtcagaattcctgtgcttggatgtcagggttgaacataattgacctggtgaggtggagagagcttggtcttactcaaacttacagaaagttgataaaagagtttaccatgcaggaaggatctgttgagggtattgcatggcgggcaagcttgctcacctttgagaatgaaatatatccactcaatgagtcatgggttgtgtctggaatgggtcatgattatacaattggtactcaacccattaagactgcttcggtgctacactacaatgggaaaatgaaaccttggcttgatctgggaattcctcagtataaaagctattggaagaagtttctgaacaaagaagatcatctcttaagcgaatgcaatgtaaattcataataagttatagttcctgcataagcttgcatttttggaaaattgtagggttcagctcttaaacaagaggatgcctgtgctttgggtgctcaattttctactctagttttcgaaggggttttgtggaagaatcaatggtggaccggtggtgatgagtttaacacaccagttataaaaattaatcagtgaataaggaaccgggaaacttccctgcatttctggcaaaaggaccaagaagtctgagtagcctcacagttttcaagatagctaattggtgttgaggttttccccactatgccggtgggcactatgaagatttatacattagcaaggcagtggttcatgaaaaaataactcaatataaaagacagtaaaattgtttgtttcaagattttattatgctacatgatgtaaattattcgtagctgagaaacagttagagctattccttctagttctttccattcataatttgcccaaagtttgttcttatttgatgacaagaatgttgtccaacagctctataaatgaaaaaaaaagtaacaattttgtcctctagcaaaaaaaaaaaaaaaaaa

SEQ ID NO: 1064 - DNA, 1345 bp, Glycine max
tcagctacgtagccccccccccggttttgaatcgggccgaactaatacttcaactgatggtttgactgatgtttcagctgtaaatcttcattcttctgtttttactaatttccctgccaatgacactgaatctgccagttcattagtcaggaagcgacttttatctccactgagcagtatgctctccccaagtcatttcaaaggtgatcctcttgacattggctgcagaagtaatgagaccgaatcccttgttaagaatgataactttagaaattccatcgcacaggataataagaaggcaaatattggaagtaaaagcagttatacagtgtcttcttggtccttgacaagttgcttggaacaaagaaccgtgccacacagtactgaatccttttttcaaagtgatggtcctttgaaggaaaatagaggacttctgtctcagggtagtttacccactgctggaattgatcattttagtgaattgagtcaggttaggcctcaaagtggcataatatccatatctcctaaaactgtgagctctcctctgtccttgtcacctcttggtcgtaaattctctgaaagaataaaaactgctggaggatgtaggaatgttgttgaagagataaagaattgcaatataacttcaaggagtatagaacaatcacttgacaattccaattcacgtctcatgttaaattataaggatgatgattccagagttgcacgcaaatcttttgatgatgttgaattcttatgcaaagatttctgtccatcttctctggatgacattgccgacatgagttggccactatgtcaagaatcagctcccacttctcactcgatgagattcactagaagtttgagtgggctttcggtcaggaggtctttagttggttcatttgaggagtctcttttatctggccggttcttatctggaaacaatagcaagaaaattgatggttttcttgctgtgctaagcattactggggggaacttttctcctaaatctcagaagcttccattttctgttactagcgtggatggagattgctatctactgtattatccatcaatagatcttgcaggaaattcctcttcaaacaagtttagaggccaattgcttggataaatcgactcccaaattgtaaaaagccgattgcgtatacctatgaacccaccgattcaactggtgctaagcaatccagaaaagactcctcttcacactttcttttgcaactatgatttgagtgacatgccagttggtaccaaaacattcttgcgccagaaagtcacccttgaattgactggctctacttcccctcagttgaaacagagatcaacaggt

SEQ ID NO: 1065 - DNA, 1252 bp, Glycine max
tcagctacgtaggcccccccccctcttattatatgtagaaaattgatggttttcttgctgtgctaagcattactggggggaacttttctcctaaatctcagaagcttccattttctgttactagcgtggatggagattgctatctactgtattatgcatcaatagatcttgcaggaaattcctcttcaaacaagtttagaggccaattgcttggaaaaaatgattcccaaattgtaaaaagccgtttgcgtataccaatgaagggacggattcaactggtgctaagcaatccagaaaagactcctcttcacactttcttttgcaactatgatttgagtgacatgccagttggtaccaaaacattcttgcgccagaaagtcacccttgaattgactggctctacttcccctcagttgaaacagagatcaacaggtttaaacagtggaattgacaaggggattccatcaatgcaaaagaatcatgacatctcatgtgatggagaagtaatgcatacagatgcagctaatgttataaataaaacaaaatctacaaatcagggaaatggaaagggttctagcttgttgaatttaataaacaaagaggattcttcgaagcaatctttgaaaacaaaaatgctgggagtcccttcctcggtgaagcttgattatgaatgtattactgaaaaatgtgagaggaatgaaagaaaagagtgttgggataaaacatgtgatgaatcagggaaaccactaaattcgtgttcaaaggtgaaggacaattctagtagtggtggtcctcttcgttatgctctccacctacgctttatttgcccttttccaaagaagaccaacagatcaactcaaaaaagcaaaaataattctcttcaagaaaattctggattggacatggaaggggaacgaagattctacttatgtaatgatttgagggttgtgttccctcaacgtcattcagatgccgatgagggcaagttgaatgtggaataccatttccctgaagatccaagatactttgacatcaactgaaaattctagttttcctcctaaaaaaaaagcatgctgcttttgctgaccctcttgtacataatcacaagtttgtcttcacgagtcatgtcctctggaaaaatagcactaaccctttcctcatgtaaatacttaaacaatttcaataatttaatgggttactattttcaattgctgactaaaaaaaaaaaaaaaataaaaaaaaaaaaaaaaaa

SEQ ID NO: 1066 - DNA, 1525 bp, Glycine max
  misc_feature (1303)..(1303): n is a, c, g, or t
  misc_feature (1312)..(1312): n is a, c, g, or t
ccggccgacccacgcgtgcgttgaattcttatgcaaagatttctgtccatcttctctggatgatattgccgagatgagttggccactatgtcaagaatcagctcccacttctcactccatgagattcactagaagtttgagtgggctttcggtcaggaggtctttagttggttcatttgaggagtctcttttatctggccggttcttatctggaaacaatagcaagaaaatcgatggttttcttgctgtgctaagcattactggtgggaacttttctcctaaatctcagaagcttccattctctgttactagcgtggatggagattgctatctactgtattatgcatcaatagatcttgctggaaattcctcttcaaacaagttaagaggccaattgctgaaacgagggtttggaaaagatgattcccaaattgtaaaaagccgtctgcgtataccaatgaagggacggattcaactggtgctaagcaatccagaaaagactcctcttcacactttcttttgcaactatgatttgagtgacatgccgtttggtaccaaaacattcttgcgccagaaagtcactcttgaattgactggctctacttcccctcagttgagacagagatcaacaggtttaaacagtggtgacaaagggattccatcaatgcaaaaaaatcatgacatctcatgtgatggagaagtaatgcatacagatgcagctaatgttataaataaaacaaaatctacaaatcagggaaatggaaagggttctagcttgttgaatttaataaacaaagaggattctttgaagcaatctttgaaaacaaaaacactgggagccccttcctcagtgaagcttgattatgagtgtattactgataaatgtgagaggaatgaaagaaaggagtgttgggataaaacatgtcatgaatcagggaaaccactaaattcctgttcaaaggtgaaggacaattctagtagtgggggtcctcttcgttatgctctccacctacgctttatttgccctattcctaaaaagaccatcagatcagctcaaaaaagcaaaaataattcacttcaagaaaaatctagattggacatggaaggggaacgaagattctacttatgtaatgatttgagggttgtgttccctcaacgtcattctgatgccgatgagggcaaggtgcaggcagataagattgatgtcttggtttgtgtgtattgtgcaatttggaatctatttgttcgcatttcttggtcctcctagtctctgacaaaggtctattgtggtttgtttggcagnttgaacgtnggaataccatttccctgaagatccaagatactttgacatcaactgaaaattctagtttaacccctcaaaaaaaacatgctgcttttgctgaccctctagtacataatcacaagtttgtcctcatgactcatgtcctctggaaaaatagtactaccccttttcctgatgtaaatacttaaacaatttcaataatttaatgggttaactattttc

SEQ ID NO: 1067 - DNA, 1057 bp, Glycine max
gcacgagaagttatactctcacccctctctccctcactctctcttcctcctccgattgctttctttcagtttctgatttcaattcaccaagacctctgcgacagggggaaggcgacggatatccattgcaaggttatttgaagaatctgaaaggtactagctagctagctagtacttctacactgtgaggtagcatcatgaggaagcgccaagtagttgtgagaagagaggagcctcaaaggagcgctaggacggtgaaatacggcgagtgccagaagaatcacgccgcgaatgtgggagggtatgctgttgatggctgcagggagttcatggcgagtggcgccaccggagaaggaacaagtgctgctctcacttgtgccgcctgtggttgccacaggaacttccacaagagacaggaaaccgaagtggtgagtgagtgctcctcgcctacctccaatggaacttaatcagagctagcttcgtcataatgtttatacctcaacaattatgctgctacactccatatcatatcccttgtaatatattttgtggaatttgcttttgcttgttattaattaagaattggggttttaattaattaagcatactactgaactagtatgaatgaatattctagaattgttatatatagtaattctagagtggtaatgtatggtgatgattttgaggttgatgtgtgtaaagagaaaaagggcaatcacaagttgtttttgtgatgatgagtgtgcaaagttttgaccatcttctcttcttacatgtttggtttaattaacttgttttgaagaaataattgcttgttttttttgtaaaaagaaaaattaattatttctgagaaatagtgtttccaaacatgtaagtaattactcggttaaactaggcttttattgttgctttgtttatttatgagcttatgtatgtaagttgtgttatggattttgctttgtagctacacaatgtagcagttgtgatcagtttgaaatttgatgaggaaaattggtattggttttggttttgcctcaattaatttcaaaaaaaa

SEQ ID NO: 1068 - DNA, 1206 bp, Glycine max
caaaaaaagcagaacaacgttagtgaaccaacccaacacacaaagcaagagaaaaaagtatctcaatcaatcaacaaaagctcactttcataaagacacgcacacatattcttgttacacaaaatggaccaacaagagggtaacacgtggacaatgccaccgttctgggcggtggagcagcgaaaccgccgccgtcttcgccgctcttactctctgttgctcacctccacctccctcctcgtactcttcctcgtactcgtgctggtgttctcgctcatcgtggttccgacgttgcactcgttcgcttccaacatcttcaaacctcgtacagttaagaacagctgggactccctcaacctcgtactcgttctcttcgccattttttgcggcttcctcagcagaaacaacaacacctccgaaaccctaactccgcgctctcgcagaacgttctcgaacccttcaacgccaccatcagcatggtaccaaaacgattactctcagattcataatcgatcgtttaataggttgaggagctttaattcctaccccgatctgcggcaacagatcgccgccgatgaaaggttccggttttatgatgatacttaccttctccggcaccggaacatgagaactgagactgaagaagaagaagaaaaggaaataggaattgataatgttgccactgcgccgccgcaatcgccgccgcatcagcgacgggggccccccccccgaaatgtcaagcgagcatatcaagtggaaaccgtcgaggagcataaaaaggaagatttagatgcgcagatttcaccgccgccgccggcgacgagatcaaaaggtgttcgacggaatgtcaagcgaacatatcaagcggaagccgttgagaaacatgaaacaaatgattttcctgtgatggattcacgaccgccgccggtgacaataaccaaaggtgttcgacgaaatgcaaagcgaacatatcagccagaaaccatggagaaacgcgaaacaaacgattttgatgagcagaattcacaaacgctgccgtcacctccgccgccgccggtgacacgaaggagaggagttcgacgaaatgccaagccggaaggaaatgattccgttgtgaagagttcacccccacctccaccacctccgccgccgttgcctgcggaggaggcgaggacagtgtcgggtaagaaaaaaaaaaaaaaaaaa

SEQ ID NO: 1069 - DNA, 807 bp, Glycine max
cccacgcgtccgcccacgcgtccgtacggtcagctacgtaggcccccacgccagaactgagaaacgcaatgagttcgtcgaacctcagagatcttcaacgcgaattggagaacaaagccaatgatctcagcaagcttcaaaaggaaattgcgaagaatcaccaaatgagaaagaaatacacggtccagcttggcgagaacgagctcgtccttaaggaactggatttattgaaagacgacgcaaatgtttataagttgattgggccagtacttgttaagcaagatttggccgaggccaatgcaaatgtccgcaagagaatcgaatacatctcagctgaattgaagcgtctggatgccactgttcaagatttggaagagaagcaaaatagcaagaaagatacgatactaaaattgcaacaaaggattcaatcatttcaggctgggaaaggcaaggcgtagttttccctcacatattgttccaggcattgtgatttaaccgtgctactgctaaggttggatgtggatttgtattttgtgcctctttgttttggactgaagttgactcttaggaatctgttacgggaaacagcttggaaattagactgatattaatatattccctccgtccctgcctatttataagacatgttttttgtttaccttattataagatttttttaatctctcttgtgtattaattattttgactaaaatatcttgaattttctctttttctctcctatagagattggagaaaattaaaaaaaaaaaaaaaaaaaaaaaaaaaaataaaaaaaaaaaaaaaaaa

SEQ ID NO: 1070 - DNA, 916 bp, Glycine max
caactttcgatggttttatatttgcctaccatggcggtgacgggggtcggagaattagggcttttttcagttttcctcttctgaatccaccgccaccgcagcgtggacggaatcagagtgcagccatagcagcagcagcagcagcagcagcagcagtcattgaagtgctgctctagtttgaggcacaatgagattggagaaatgctggttttgctcttcaaccgtataccctggacatggaatccagtttgttcgtaatgatgcaaagatttttcggttttgtagatcaaaatgccacaagaactttaaaatgaagagaaatcctcgtaaggtaaagtggaccaaggcatatcgtcgagtgcatggaaaggatatgactcaggactcaacctttgagtttgagagaaaacgaaacaggcctgaaagatatgacaggaatcttgcggagaatgtcctgaaggccattcctaagattgataaaattagagtcaccagggaggagagacaccataagaacaggatgaaaggaaaaaaggaaaagctgctgaaggaggcagtgaaggagttggagcagggcatcagtttggtcaaagctccttctgtgcttcaacaggatccatctctcacattaccaaagatcaaagtcaaggtttcccaacagcaatcagaggagaatcatgccatggaagagtaattctaacaatgctgcacttaatttttgccgttttaatatttgttgctaaattagttgcctgtaaggtccagtttaccagtttcctcgtgatcattaatgtgaatgatgtgttcgtcaaacattcgatgtatttgtctcttaaaactatggttctctgagatagtcaactattataaaggaaatcggaaagttgttgctatagcctaaaaaaaaaaaaaaaaa

SEQ ID NO: 1071 - DNA, 1095 bp, Glycine max
  misc_feature (1094)..(1094): n is a, c, g, or t
tcagctacgtaggcccccccccccccccccccggcgcccggcctgcaaccctcgaaacgtgaatagccgtggcggccacctatttctctgtttaacgtcttcactcattctcattttcgcctcaaactacttcttccaccgatcactgttcagcagagaagtgttgccttggactcttgaggtgcaatgagattggagaagtgttggttctgttcttctaccatataccctggacatggaatccagtttgttcgtaatgatgcaaagatttttcggttttgtagatctaaatgccacaaaaactttaaaatgaagaggaaccctcggaaagtaaaatggacaaaggcatatagacgagtgcatggaaaggatatgacacaggactcgacctttgagtttgagagaaagcgaaacagacctgagagatatgacaggaatcttgctgagaatgtcctcaaggccattccaaagattgataaaatccgagtcgccagggaggagaaacaccataagaataggatgaaaggcaagaagcagaagctgcatatggaggcagctagggagttggaacagggcatcagtctggtcaaagctccatctgtgcttcaaaaggacccttttctcactttacccaagatcaaagttggggtttcccaacaacaacaatcagaggagaatcatcccatggaagagtgatgtcatgccaatgctgcactttcaaccccagttttgtgattatgtgtttcatatgtggattcagtgtccaaattacaatttggttcattgctgatccgacatgtgaatgatgcgattttgaaacaaaagttttggccgttgagaatatgttagtgatattgtttttggacaataataatactgtgtgatactgcactattatataaagcaaagcagaaagacgttgtccaacatgaagtctccttggacctattgtacctgtcactgtcaggagtattcaatctgttaatatcaagtcaaatgttaaattagtaggaaagtaaaagttctttatactaggtacttcagtcaagaacaaatttgattgttgaacgtccatttaggtagtgtttgcttang

SEQ ID NO: 1072 - DNA, 571 bp, Glycine max
atcaccacgaatcctcttacacttttttcctacttactgattccaaccatatactactaaaatggcttccttccgtgtgcatctcttatcattcttcttcattgctttgtcacttttatccattagcaatgtccaagccagtagaaaacttctggcacccacaatgcccaatatgggaaattatcctcctcgcgtgatatatcctccattccccccagtaacagactggccagagtataggttgccatcacccttaattcgcacacttccacccttctcaccacctcccaaccctaccaatccttgagtagtagcattatttgctacactccacagtagattaatgtagcgtaatcaatgttgctatatatgtgcagtcaaataaaggttcatcacgaacaagctttcaattcccatcatgtttatttactttgtttgctatgctttgattgagtggatatgccatgcaatggagcatcatatatatgtttcacttttgtctttgagcaaatatgcatgtatgttgcattgaagcataatgtatttttcctcaaaaaaaaaaaaaaaaaaa

SEQ ID NO: 1073 - DNA, 2412 bp, Glycine max
  misc_feature (2302)..(2303): n is a, c, g, or t
  misc_feature (2324)..(2326): n is a, c, g, or t
  misc_feature (2349)..(2349): n is a, c, g, or t
  misc_feature (2351)..(2354): n is a, c, g, or t
  misc_feature (2366)..(2366): n is a, c, g, or t
  misc_feature (2385)..(2386): n is a, c, g, or t
  misc_feature (2407)..(2408): n is a, c, g, or t
ccgcgcgtccgctcccgctgttgctgctggtttctccgttttgaaattcccatctgtttggatgcactaatcctgcatccctcgaagcgcgtttgatctaaaaccataaacctctgtctcgtcagatctccttcttccgttcagtaaacctgtccttcgatccgatctgatctattttccgaatccaaaatggcgacgatgacaagcttgatcggtctcatcaataagatccaacgagcctgcaccgttttgggcgatcacggtggcgagggcttgtcgctttgggaggctcttccctccgtcgccgtcgtcggtggacagagctcagggaaatcgtcggtgctagaaagtgtggtcggaagagattttctgcctcgtggatctggtattgttacacggaggccactagtgctgcaacttcacaagacggaagatgggacacaggagtatgctgagtttcttcacataccaagaaggagattcaccgactttgctgctgtgaggaaggaaatatcggatgaaacagatcgtataactgggaagacaaagcaaatttctaatattccaattcacctcagcatttattctccaaatgttgtgaacttaaccctcatagatcttcctgggttaacgaaggttgcagtagagggacaacaggagagtattgttcaagatattgaaaatatggtccgttcttatgttgagaagccaaactgcattatcttagctatctctcctgcaaatcaagatattgccacttcagatgccataaaaatcgccagagaagttgacccttcaggtgaaagaacatttggtgtcgttaccaaacttgatcttatggataaaggaactaatgcagttgatgttctcgagggaaggcaatacaggctgcagcatccatgggttggaattgtgaaccgttcacaagctgatattaatagaaacgtagacatgatcgctgctcgtaggaaggagcgggaatattttgagacaagtcctgaatatggacatttggcacataaaatgggctcagaatatcttgctaagcttctatcccagcatttggagcaagttatcaggcagaagatacctagtatcattgccttaataaataagactattgacgagcttaatgcagagttggaccgtattggcaggccaattgctgtggactcaggggcccaactttacactattttagagatgtgtcgtgcatttgacaaagtgtttagagaacacctggacggaggacgtcctggtggggaccggatatatggagtttttgatcaccaattaccggctgctttaaaaaagctccctttcgatcgccatctttccttaaaaaatgtccagagagttgtcactgaagctgatgggtatcagccccatctgattgctccagagcagggttatagaagactcattgaagggtctattggctatttcaaaggcccagctgaagcctctgtggatgctgtccactttgttttaaaagaacttgtgcggaagtcaatttcagaaactgaggtaagcaatgttttagttgatgcaacccttttctgacagatcatgattttaaaataaacatgggagttggatgtgactgtttgtattttacatctaattcatgcggccaaggtaattattagggttccttttcaaacattaactttagaatttgaagggaattagggtgaatttggatggggaaaaacactagggaagagagaattaaatcttacagttgttctacttgatgacatgtaggaactaaaaagatttccgacactttcaaatgatatagctactgctgcaaatgaagctctggaaaaattccgagaagaaagcaggaaaacagttttacggttggtcgatatggagtctagctatttaacagtggaattttccaggaagattcattttgacccagaaaagaatccaaacggaccaccaaatccaaatcggaatggtccccccaatatggatagttatactgacaatcacctgcgcaaaattggatcaaatgtaaattcctatatcggtatggtttgtgatacgcttaagaatactataccaaaggccgtggttcattgtcaagttagagaggctaagagatcattgctaaaccacttttatgttcatgttgggaggaaggagaaggagaaattgggtgctatgttggacgaagacccggcccttatggaaaggagaaatcaaatagctaaaaggcttgaattatacaagcaagctagggatgatatttactccgtggattggagataatgagttctcagggtttgannacagaagaaaagaagcgaacnnntcggccccagagtcaccatgggncnnnngtgcatcataantgcccgtaaaagtattcgnnagatttgcacgagatatttgnngtcg

SEQ ID NO: 1074 - DNA, 749 bp, Glycine max
gcacgagatgtagttctgtttttgtctgagataatgggaatgtattttgtatcttctatgcttcctcgcgccgaatgcggcgcgacgcttggcaggattattattacagaggtattgggtggtgatatccagtttgacttttatcaccgatggtttgatgcaatttttgtggctagtgcattcctttcactgcttttactttctgcacattatacatctcgccaaattgacaaacatccaattgattaacaggaaacatactccgtagatgcttgtatagtttttaatgcctcgggaggtttgatatcaggccagtgaacatatatgtttaaatcttccagatggatgcatttgaattcatttgatagctgatagaggtcgttcaatttttttatgtgccagtgaatagcttgttagaacatctgatgctactggagctaatcaccagtgagagggttgatattgttatagttaatatcaacagatgcgcattgtgcaaaatcttttagtatacccatttgtttttgttgattttctgagcagaaatattgttggacaatatgttgaatgtagatttgcttttgcattgttaagtatagaatgaattggatgagaatagtttttgcacatgggattggtacccataagaacagatgaatagttattggcgattggtaattttggattatcagtggtccaaattccccctctataaaaaaaaaaaaaaaaaaaaaaaaaaattgtaaaaa

SEQ ID NO: 1075 - DNA, 1479 bp, Glycine max
tcagctacgtaggccccccccccaactcaagccttgagatatttcccttttgaggtttgattagtgtggcctagttaatttgttttctcgatgagaatgagaaagcaatccactatgcaatgcgcactttttcgcttctgggttcccttgttactacttgccagcttcagttatgctccttctgttttggccacaactgaaatttcagggaatcaagtgaacatggatgggaaggttgtaaatgaagagttaggaaaacctaatctaaaaggacaagatgaagaagaaaaattcaaaggactttttccaaaaccaattccaattgttaaaccttttccaaagctcattcctataattaaacctattccaaagccaattccggttgttaaaccaattcctattccactttataagccttttccaaaatcaattcctattgttaagcctattccaaagccaatcccaaatggtaagccaattccaactgaagaagcaaaattcaaaggtttttttccaaaacctattcccatagttaagccaattccagttgccaagccaattcctattgttaagccttttccaaagctcattcctataattaaacctattccaaagccaattccgattgttaaaccaattcctattccagtttataagcctattccaaaatcaattcctattgttaagcctattccaaatggtaagccaattccaactgaagaagcaaaattcaaagggttttttctaaaacctattcccatagttaagccaattccagttgccaagtcaattcctattgttaagcctatccctatcacagtatataagcctattacaaaatcatttcccactgttaagcctataccaaagccaattcccattttaaagccaattccaaagccaatttccattgttaagcctatatcaaaaccatttatagtgcaaaaacccatccctgctgttgagccagagaaatttttaaaaccaaagcctttcttcaaaaagcctcttccaaaatttcctcttaatcccaaatttaagaaaccacttctaccaccatttccaattcacaaggcaattccaactccataaaatgataacactctaggtctacaagcaataaagtcattccttccatttctaataccttattatatgtagttttcccacacctcaacctcaatcatgatttagataataatccttctgtacccctcttgtgtactggattggaatatatgtagttaatgtgttctccttaatgaagatttcaatattagtttttataagattgattatattataagtatttacatttttcttttttagtagataatatttaattgtgtttgtgtgtagagagagagatatcattaaatcatatagctattcttctataagaggtgaatcttaactattaaatccttatatgtttagtgaaacaatattgtaatgaaatatcaatgttggaattttgat

SEQ ID NO: 1076 - DNA, 1250 bp, Glycine max
tcagctacgtaggcccccccaaagacacttgattagctgaggaggaagagagaaaaaccatggcaataacactcaacaatggcttcaagatgcctatcattggattgggcgtgtggcgcatggaaggaaacgaaatcagggacctaattctcaattccatcaaaattggttatcgccattttgattgtgctgctgactacaaaaacgaagcagaagttggagatgcgcttaaggaggcttttgatagtggccttgtgaagagagaggatctcttcattaccaccaagctttggaattctgatcaaggccacgttcttgaggcgtgtaaagacagtctcaagaagcttcagttaacgtatctagatttatatcttgttcactttcctgttgccgtaaggcatactggggttggtaatacttctagtcctttgggtgatgatggggtcctggacatagataccaccatatccctggaaacgacctggcatgcaatggaagatcttgtttcatcgggcttggttcgcagcatagggatcagcaactatgatatctttctgaccagagattgtttagcatattccaagataaagcctgctgtaaatcagattgaaactcatccatacttccagcgtgattctctagtcaaattttgtcagaagcatgggatttgtgtcactgcacacactccactaggaggtgctgcagcaaatgctgaatggtttggaacagtttcatgtttggatgaccaagttctcaaaggtctggctgaaaaatacaaaaagactgccgcccagatcagccttcgctggggaattcaaaggaacactgtggtcattcctaaatcgtcaaaactggagaggttgaaagagaactttcaggttttcgattttgagttgtctaaagaggacatggagctcattggaagtatagatagaaaatatcgaaccaatcaaccagctgtgttttggggcatagatttgtatgcgtgagaatgcccttcctaagtctgtatcatggctgtttgaccttgtgttaagattcagatttggtataagctgatctttcaggctccttagtagctcagtttatttgataatgtaaactttctttgttgatggttgaaaaatcatcttctcatcccatatccaatctcgtggactaaataagagagacttctgaatgttgttgcttaaaaaaaaaaaaaaaaaaaaaaaaaaaaaaaaaaaaaaaaagaaaaaaaaaaaaaaaac

SEQ ID NO: 1077 - DNA, 1077 bp, Glycine max
ccttagcttgacgcaacaaacttttaataaatatatttgataagcatctcatgaaaatgcttatgcagataaacagtgagtggaaatccagaagggaaaacacaactcaaccctccaaacatcttttttgaagattgccatcctggagcaacaagctaacagaagatgcgttctctcaagaatcagttctcatctccaccacaaagactgtttatcatttctgccatcttgctcatgacttgcttagttatcagaccatcaaaactagcataatcacaacacaaaatgtcatttcccttgctcaacagtctatttgccaaaccagtccactccatagaatatggattgattccaacttggcaactcaatttgtcccttttcttcataatgaatcgcacaaaattcaagaatttttgacgcaccaccagattaaattccataggaagtatggtgaagcagcgcgtcttgggtttatcaaaaattttgcgacggggaagtttttcatctttgggacattctatgccaaccaatgttggaacacacttttctagttcaacagtcaatttattgtatgcttcttcaacactggtgccaggaattagtgacatttcttcaccatctccagtgacaaatcttctcttgcctttttcaccatttttcctggacagaacatgaggaaaaccctctgaagtggcaagaggaatgcgttccatgtaatccaaaccttcaacaccattgagtgcagcactcaaagaaacttcttcaaatgtatcctcctcatcaacacaatcaaaccattcttcaaccatgtcttgtgcaactttggaaagaatctcctcatctagaggcatcatgggagttgcatatttttgaacaccaccaagaaatgggtcatatccttcatgctctgtgccaaccaatctctcatcagtaggggggggccctccggggctcttatcacaaggcaaatccaactgccattctttgggagtttccacaagattagtttttgtgggcaatggtacataaactccagatttgagttcaccaatggggggggggggcctacgtagctga

SEQ ID NO: 1078 - DNA, 1990 bp, Glycine max
agcaataagtcggcgaccgcccttacaccccttttttatatttaaacacacttattgcacatagtaatgcgctttatttaagtgaacaaaatattacaaactagttaacaaatgcgaaaggacactcatcaaccaaatatttaagactcttgcagttctcaagaagccttgtcaacattggatttgtggcattagaactcagaatttcgttcttaacaccaaaaagaacagctaacaaggccacaggaaaaggatcaactctagtcaaaaagacaattttcttacctttcccaagcgctgtccgaattttcttattgatatctgaggagcgattgttaactgcagaactaatccaagcagtagtaggcaaaccaccacgcccactcccacaaacaacattaacaatgacagcttctgcgggcaattgactcacagggtaaagacaattaacaaatattggtaaccaagaatctgttggaaaatttccatcaaaaaattcttgtgtatttgccaataccaatttatcattaaacacaatcttatttgggaaggccttgcctgcaccctgaagacccaacaaatcgatgctcaacaaaagatcaatattatcatttgaatcaggagcattcataatcctctgcattgaatgaaattcttcaatttgtgctatggtgggcacatcagctttttgcaaccactcaatacgagagagagcctttcttctcaattgacgagcttcttctggactgtgcaggtacaattcacgcaacacattaaccaagttaacaagataagcttcttgcatttccaaattgttacatgaaacataatgcaattgtgaccacaaactagctttgtcttcaggagctacccacaaaacattggacatttgcttaaaatttcttttaagaaaatcacactctgacaactttctaaactgtaaagttgcactagtcttatcaattccatcagtaatggtgatgttatgactagctaggaaacttttcaatttagaaccactaaaatatggcttaacatactcatgaacactaattaaattatcatctccataaacacacaaagaaataaaatttttaaaagactggagaaacatactaggagccttagcttgacgcagcaacttttcataactatatctgataagcatctcattgaaaatgctattgcagatgacagtgagtggaaatccagaagggataccacactcaactctccaaacatcttttttacagattgccatcctggagcaacaagctaacagcagatgcgttctctcacgcatcagtttctcatctccaccacaaagactgtttatcatttctgccatcttgctcatgacttgcttagttatcagaccatcaaaactagcataatcacaacacaaaatgtcatttcccttgctcaacagtctatttgccaaaccagtccactccatagaatatggattgattccaacttggcaactcaatttgtcccttttcttcataatgaatcgcacaaaattcaagaatttttgacgcaccaccagattaaattccataggaagtatggtgaagcagcgcgtcttgggtttatcaaaaattttgcgacggggaagtttttcatctttgggacattctatgccaaccaatgttggaacacacttttctagttcaacagtcaatttattgtatgcttcttcaacactggtgccaggaattagtgacatttcttcaccatctccagtgacaaatcttctcttgcctttttcaccatttttcctggacagaacatgaggaaaaccctctgaagtggcaagaggaatgcgttccatgtaatccaagccttcaacgccattgagtgcagcactcaaagaaacttcttcaaatgggggggggggcctacgtagctgaaaccattcttcaaccatgtcttgtgcaactttggaaagaatctcctcatctgggggggggggggcctacgtagctga

SEQ ID NO: 1079 - DNA, 1060 bp, Glycine max
  misc_feature (1)..(30): n is a, c, g, or t
  misc_feature (931)..(931): n is a, c, g, or t
  misc_feature (939)..(939): n is a, c, g, or t
  misc_feature (946)..(947): n is a, c, g, or t
  misc_feature (957)..(957): n is a, c, g, or t
  misc_feature (993)..(993): n is a, c, g, or t
  misc_feature (1016)..(1016): n is a, c, g, or t
  misc_feature (1018)..(1019): n is a, c, g, or t
  misc_feature (1026)..(1026): n is a, c, g, or t
  misc_feature (1040)..(1040): n is a, c, g, or t
  misc_feature (1042)..(1042): n is a, c, g, or t
  misc_feature (1044)..(1044): n is a, c, g, or t
  misc_feature (1053)..(1054): n is a, c, g, or t
  misc_feature (1056)..(1056): n is a, c, g, or t
nnnnnnnnnnnnnnnnnnnnnnnnnnnnnngagacccagcgctagttcgcgatcgtctgctgtttttttttttttttttttttatatttaaacacactcattgcacatagtaatgcgctttatttaagtgaataaaatattacatactagttcacaaatgcaaaaggacactcatcaaccagatatttgagactcttacagttctcaagaagtcgcgtcagcatagggttagtggcgttagaactcagaatttcattcttaacgccaaaaagaacagccagtaaagctactggaaaaggatcaactctagtaagaaaaacaattttcttacctttcccaagtgctgtgcgaatccttttgttgatatctgaggagcgattgttaactgcagaactaatccaagcagtggtgggtaaaccaccacgtccactaccacatgtaacatttacaacgacagcttctgaaggtaattgacttacaggataaagacaattcacaaaaattggtaaccaagaatccactggaaaatttccatcaaagaattcttgtgtgttagccaacacaagcttatcatcaaaaacaatcttgtttggaaaagctttacctgctccttgtaaacccaacaaatcaatgctcaacagtagatcaatattatcatttgaatcaggagcattcatcatcctctgcatcgaatggaactcttcaatctgtgctatggtaggcacatcagctttttgcagccattcaatacgagagagagctttccttctcaattggcgagcttcctctggactgtgcaaatacaattctcgtaacacatttacgagattgacaagataagcttcttgcatttccagattattacacgaaacataatgaagttgtgaccataaacttgccttgtcctcaggagccacccacaaaacattanacatttgnttaaaanntccttttaanaaaatcacaaatctggttaactttctaattggaaanttgccttattttgcaataccctngnnattgggngattttatgaccancntnaaaactttnnanttat

SEQ ID NO: 1080 - DNA, 2524 bp, Glycine max
gttccctaagtcttcgtattgctccatagtctagtcgtctctgaagactgaagctctcacaaaaaaaaacaaaaaaggcttaccttagcgtgttatttgtttgacccggtgaattccttcagctacgtaggcccccccccccaattcatgaaacacgctctcttttttcccatcatcattatttctttgtgattctctctctctacactatccttgctctagtcttccttttctatgccttgccctttcttcgggcaaagttgtgtttccattttgtttccgagttgacttgctcaatatcccaggataagtgtgtgttcttatgaaggttgcagtgctatggagtctatagatttcatgctgcagcttcattagataccaattttggtgaatcatcttgatagcttgttcttggatttttgttttggggtgttgatgaagatgtttatgggtggccaaattttcggtgctggtgttattattgttagtttctttctgctgatcctctgtggcatggtttgtgggactgacagtgatatattctgcttgaaaagtgtaaagagaacacttgacgacccctacaattatttgcaatcctggaatttcaataacaatacagaagggtatatatgcaagtttactggggttgagtgttggcaccctgatgaaaacaaggtcttgaatctcaaactgtcaaacatgggactcaagggccccttccctcgcggcattcagaattgttcaagcatgacaggattagatttttcgcttaacagactctctaaaaccattccggccgatatatccacacttcttacatttgtgacaacccttgatctttcttcaaatgattttacaggggagatacctgcatccctttcaaattgtacctatcttaatacaattagacttgaccaaaaccaactcactggtcaaattcctgctaacttgagtcagctcccgcggcttaagttgtttagtgttgccaataatcttttgacagggcaagttccaatctttgcaaatggtgtagctagtgccaatagttatgcaaataattcaggtctgtgtggtaaacccttattggatgcttgccaggccaaggcttcgaagagtaacacagctgttatagctggagcagctgttggtggtgtgactgttgcagcattaggtttgggcattggaatgttcttctacgtgcgccgtatttcttataggaagaaggaagaggaccctgaaggaaacaagtgggcaagaagtctaaagggaactaaaacaataaaggtttctatgtttgagaagtcaatttcaaaaatgaacttgaatgatctcatgaaggctactgataacttcggcaaaagcaatattattgggactggaagatcaggaactgtttacaaagctgtccttcatgatggcacatcactcatggtcaagagattgcaggaatctcaatattcagagaaagaatttctgtctgagatgaatatactagggtctgtcaaacatcgtaacttggttcctcttttaggtttttgtgtggctaaaaaggagaggcttttggtctataaaaatatgccaaatggtaccctccatgatcaactacatcctgatgctggtgcatgcaccatggattggcctctaaggctcaaaattgcaattggagcggccaaaggattagcatggcttcatcatagctgcaatccccgcattatccaccgaaacataagctctaagtgcatcttgttggatgctgattttgagcccacaatttctgattttggccttgctagattgatgaacccgattgatacacatttgagtacttttgtgaatggggagtttggggatttaggttatgttgctcctgaatatacaaaaactttggtggctactcctaaaggggatatttatagcttcgggaccgtgcttcttgaattggtgacaggtgaaagacctacccatgtggctaaagctccagaaacttttaaaggaaatttggtagagtggattcaacagcaatctagcaatgcaaaactccatgaagtcattgatgaatcactagttgggaagggtgtagaccaggagcttttccaatttctgaaggttgcaagcaactgtgttacagcaatgccaaaggagaggcctaccatgtttgaagtataccagcttctaagagccattgggattaattataatttcacaactgaggatgagatcatgttgcctatggacactggtgatgctgataacttagaagaacttattgtagctcgagagggacatgattgaaaaggtatgtgagatataattagggtatgtaatcaattttaatatgtaagtatctcttgccttgtggtcctaaaataaatgttagtgctatataaggttttatggtttagatccatttgtgtgctatcaatattgaaacatcaatttaatatcatcaaccatgaatgccattatatataggtgactttgttataatccatattttgctctaatttccttgttctctcccttg

SEQ ID NO: 1081 - DNA, 1775 bp, Glycine max
atctagtcaattgattacatttcctacagtgtccattttttgtatttcttctctctctttaacagtttaactaacaataactgcctacctggtgaccctctcttgtcaaacaagcaaaccaaaaaagaatcagttttctccgaagagaagatattttggtggaaaaacgctgaatcaacggtcaaacaataaatacccatgattgaagttggagtctttgtgcaagaggaacaaccatggagcagagttggtgggccaatatgcctcgcgagcttctcagagaggtcctcctccgaattgagtcgtcggaggccacgtggccgtcgcggaggagcgtggtggcttgtggcggagtgtgtcgcacctggaggctcattgtcaaggagattgtcaagccacctcaactctcttccaacataaccttccccatctctctcaaacagcctggcccgagggaacatctacttcagtgcttcattaggcgcaacagtgcctcacagacatattatctgtttctcagtttatctagtgccctagtagctgatgatggcaagttccttctggctgcacgcaagttcagacgccctacctgcacagattatattatctcccttgatgcagatgatatgtccagagaaagcaatgcctatgttgggaaattgagatcaaattttttgggaaccaagtttacaatctacgatagaaaaagttgttccactgagctggtggtgaattcaaaacaagtttcacctaggcccagggtcccaacaggcaactatccagttgctcacatctcatatgaactgaatgtactaggctccaggggcccaaggagaatgcactgtgtcatggataccattcctgcttctgctattgaaccaggaggggtagccgtagcagccccatcacagactgatttttctgttagtaacagagatacttcattcccattttttcagacaaactcaactagtctggaaaactccatatctggagaccagagcaataaaaaagatgatgtgctagtgttgagaaacaaggctgccaggtggcatgagcagctgcagtgttggtgcttaaactttcatgggcgagtaacaattgcttcagttaaaaactttcagctggctgtttcaccagaaaatggacatgctggactgcaagaggatgaggtcatcctccaatttggaaaaattgggaaggatttgtttacaatggattaccggtaccctatctcagcatttcaagcatttgcaatctgcctcagcagcttcgctaccacagttgcttgcgaatgatgcatgtttgaacagcgtggcctttagcagtatggtttgatgtgatgatgacttggtgggaagaatctaaccaaaatcgtttcctaaggtaattggaaatttggataatcgtcatctgaattagaaggacggtgctgcggatatgtgggggttctgtttgtttttctgagatcatttttgacttctgggaatatcacacgaaagtggaatgtaacctgcaaagcaacttctgttacatctccttatatttgtatctagcactctattgtgtgcgtatatatattttattctttcatagctttgctttgtttttcatttgtgtctagtttcccatatacagctacaagttccaaagacatgttattcttaacgtgatgaggccacgttatcaataacggaattaatgtttacacaaacattttattgaatcctcacaaaatccaggcatgcatctataatcaatgctattcttgtcta

SEQ ID NO: 1082 - DNA, 1258 bp, Glycine max
tcagctacgtaggcccccccccccccaaaccaagagaaattatataattaaacaacacaatgaatgcaagattggttggttggttcttgtcccaattgaaggcttcgtgaggaggtttttttagtttgtggttgtgagagctttgtgctcaagtgcttcttgtaagtacaacgagagagtgttgaagaatttttgaagtctcttccatttactattgagtgcaagtaaaggaaaggcccggtcacaactaagctttggatttttagaggatttagtaaattcagccaccactgctgtgtgcatgtttcaagtgtgtaaagaaagcatattctacaatctgtctctgccaatgtttttctagtagtgttggaatgaagcttcacttttttcctcatacagagaacctcgaggctttgcctttgtgcagtttgtggatccttatgatgcctcagaggcacagtaccatatgaacagacagatttttgctggaagggaaatatctgtagttgtggctgaagagacgagaaaaagaccagaggagatgcgccacaggactagtaggttaagaggaccagcgggctatggagggcaaaggtcttctcgttacgggcgttctcgatctcgctcagttaccagatcacgctcaccaccttatcactctggttctaggaatcgatatcgctcaaggtcctattcgcctgctccaagacggcaaagtgattactctgtttcccctaggaggcaagctgagcaccccagatcaccaagaggtcctcccagggagagggatggtgaacagaagcgtaggtcttattctcctgcttatggcaatggtattgaacagaatcaaagcaatggatatgctgagaaatctatgtacaagtctgatgctgatcgtggtcagtggaagtcgtcgagatcaccacctggatctagatcaagatctgctgaattgtcaccaaggcgtggaagatgaggttgcaggtcgctggcaatgtgctgttaggcttctgtacatttcctgtaacttatcgtgacatttgcaaaatcctgtattttgcttgaagtttgcgaatatgatggatgaatgtataataattgatttgatgtgcgggttttatatttggatattttgaacttctagaacttaccgtgaatgatgaattgttgagtttgttttatgacaatatgttttcaatttgattgctgctgttgtatgagcttgtcacagaaaaaaaaaaaaaaagggcggccgaag

SEQ ID NO: 1083 - DNA, 1341 bp, Glycine max
aattcggcaccaggagatgcaaacacgaataaacaagaagacattaaaatggtgtgttggtcctagggtttaaaatcgggttgctctccgaagacaagaaacgaatcgaagtctttttcttcttcttcctcctcttacgaactcgcgagatttctttgtcctcactcaagggttagggatgcggcggaacagtccagcatactacagtcctccgcggcgaggatacggtggcggtggccgaggaggagggtccggcaggaggggattcggtggaggcaggcgcagggacagcaatgggagcctcttggttcgtaacattcccctcgattgcagacccgaggagcttcgcgtccctttcgaacgattcgggcctgttcgtgatgtttacatacccaaggattattattctggagaacctcgaggctttgcatttgtgcagtttgtggatccttatgatgcctcagaggcacagtaccatatgaacagacagatttttgctggaagggaaatatctgtagttgtggctgaagagacaagaaaaagaccagaggagatgcgccacaggactagtaggttcagaggaccagcaagctatggaggccgaaggtcttctcattacgggcgttctcgatctcgctcaattaccagatcacgctcgccaccttatcactctggttctagaaatcgatatcgctcaaggtcctattctcctgctccaagacgacaaagcgattactctgtttcccctgggaggcaagctgagcaccccagatcaccaagaggtcctcccagggagaaggatggtgatcaaaagcgtaggtcttattctcctgcttatggcaatggtatcgaacagaatcaaagcaatggatatgctgagaaatctatgtacaagtctgaggctgatgctgatcgtagccagtggaagtcatcgagatcacaccctggatctagatcaagatctgctgaattgtcaccaaggcgtggaagatgaggttgcaggtagctggcaatgtgctgctggggcttctgtacatttcctgcaacttatcgcaacatttgcaaaatcctgtattttgccttgaagtttgcgaatatgatggatgaatgtataataattgacttgatgtgcgggttttatatttggatattttgaactttcataactaaccgtgaatgatgaattgttgagtttgttttatgaccctatgttttcaagttgactgttgctgttgtattagcttgtcaccaagtacaaattgcaaactaaattgttatctggtaacaaaaataaaattctacacgtagaaggaatttgaaagtgaaaaaaaaaaaaaaaaa

SEQ ID NO: 1084 - DNA, 1566 bp, Glycine max
aaagttatgcatattagccttttcaagcaataaggatagggggcatcgcaggcgcaacaaaatgggaagctgcagtgtggataggcttgaggtgttcgaagttggaccatgcaaagatggttaccaaatgggtcttaatcggccaaagattctccgaaaccataaggagtagagtggcctcagacctcattctacaaaaccagcttcgaccctttgcccactcccctcattcacagtcacttctcaaaccacttttttataacaatcaaaccaaattcccaaggtattgggatgaacttttggggacagcagcaggaagcggtgtgccatttcttgatatattgcttatcaacttaaggaaggagattctggcgtttattcaaaaagaaggagcaaaaagtgccaactccgatacctcggatgattgctccgatgttcttgttgtcagtgaatctatggctattgcggcgcacaacgaagatgcaaatgttgcccttgttggccacacctacataatcaaaggaatcttgccggatggactcttctttgtaggttatacatatgccggggagcttccaagctgtgcatttgggttcaatagccatggactggcattcactctggattctgtacccccggctgaagatgagattgtggctggtggcattgggcgcaacttcatttcgcgagaccttcttgaagctacaagcatggatgatgcaatgaataggatcaaatcgtcagaaatttctgtggggcattcttataacttgtttgaaacaagcacgcgcaggattgttaatgttgaaaccgcatctaggaagcggatttcagtttatgaagtggggaatacacctttcttccatgcaaacatgtacctccacctaccgattaatcaggtacaagatgagagttcaatcagcagacataaaagggcagctgtcttgacaaaagaatcaaaaggggatttcctgtcacttctaggagatatggatgacaaaaaacaccctatctacatgactggtccattacttcacaccctttgtactgcccttatcgatctggacaaacagacactatcaattattgaagggaatccaaaaaaaggagatgtttcacattttttctctatcgcccctcaaaagtcaccatgattctaaagcagcctaaagtcattataattgcaaaagaacctgttactgcagttccttttttatgctggtttatagaggcccaagatatgcccatcaatacaccgcatagctgcaacctgatcacaaagggaccttatccatttggtatcaaaagctttcataacaagtagttttgaatgtttaattaaatgaattgttacctttccatggatctcacattttataggactatccagttgagctcctaatgcctttaatttggtaactgtgctattgatgtcagtcaccgtaaatgatagaagtgaggagtattccttctgcatgactctgaaattaaataagttatctttacccttttaaaaagagagtaaaaaaaaaaaaaaaaaaaaaaaaaaaaaaaaaaaaaaaaaaa

SEQ ID NO: 1085 - DNA, 1354 bp, Glycine max
  misc_feature (1335)..(1335): n is a, c, g, or t
tcagctacgtaggccccccccccgactgctgaaattgatgagaaagttcccatcccaattcggtggtttatcgcgttaagcaaaaaacccaatcaaaattcaaagtctctttgtttaccttgtttccctcattgctttgctcacattcaatttcgaaggcgtagagtgagatccgaacgatgaagagagtattcggcgtcaagaagaacaaggatccacccccttccattcaggatgcttccgaaaggattacaaaacgaggtgacacggtggatgacaagattaagaagcttgatgccgagcttagtagatataaagagcagattaagaaaactagacctggtcctgcccaggaagctgttaaagctagagccatgagagttcttaagcaaaaacgaatgtatgaaggccagcgtgacatgctgtacaatcagacgttcaatctcgatcaagttcaatttgctgctgagggcattaaagatgctcaacaaactggaaagttatgattcttgttttatgatttaccctggggatgagctttggcataaaggtactgccttgtgagttgtgaccatgttttagtcaggaaaacagcctctccactagctagatgacagctttgaagtctgccaacaaggagttgaagggaatgatgaaaactgtgaagatccaagacattgataacttgcaagatgagatgatggacctcatggatgtaagtaatgaaatccaagagactttgggtagaagctataatgtgcctgatgacattgatgaggatgaccttatgggtgaacttgatgcattggaattagacatgggaaatgagactgaagctgatggggtcccatcctacctccaacctgataaagaacctgatttggatgcagaacttaacttacctccagctccaacaggacaaacagctgtgccacctggcagatccaatgcgcagactgaggatgagctgggtttacctgctgtccctcaggcatccatacgtggttaaagaatgctttctatatcttggcgtagctagtgcagtcacgagcatgcccttgtaaagatgtgcagatctggagaacattgattgatacagtgatttaattggtctggtgttgacattatagacttagtgccgtttgttttcccttgtaataaaccatgtggaagcatctttgttatttgtatgaagcttatggcgcggaaaaaaaaaaggaaaaaatatcactggagtttgtcaaaagcttggatcctgcaagttacacgtttaaatgaaatttatatatacacatttgttatccaaaaaaaaaaaaaaaaaaaaaaaaaaaaaangaaaaaaaaaaaaaaaaaa

SEQ ID NO: 1086 - DNA, 1252 bp, Glycine max
aatatttgggtggaagcttctattctatcactgcagaaattgatgagaaagttcccatcccaattcggtggtttatcgcgttaagcaaaaaacccaatcaaaattctaagtctctttgtttacgttgttcgtttccctcattgctttgttctcttctctcttctctctcacattcaacttcaaaggcgtagagtgagatccgaacgatgaagagagtattcggcgtcaagaagaacaaggatcctcctccttccattcaggatgcttccgataggattactaaacgaggtgactcggtggatgacaagattaagaagcttgatgccgagcttagtagatataaggagcagattaagaaaactagacctggtcctgcccaggaagctgttaaagctagagccatgagagttcttaagcaaaaacgaatgtatgaaggccagcgtgacatgctgtacaatcagacattcaatctcgatcaagttcaatttgcagctgaaggcattaaagatgctcaacaaactatgacagctttgaagtctgccaacaaggagttgaagggaatgatgaaaactgtgaagatccaagacattgataacttgcaagatgagatgatggacctcatggatgtaagtaatgaaattcaagagactttgggtagaagctataatgtgcctgatgacattgacgaggatgatcttatgggtgaacctgacgcattggaattagacatgggaaatgagactgaagctgatggggtcccatcctatctccaacctgataaagaacctgatttggatgcagaacttaacttacctccagctccaacaggacaaacggcagtgccacctggcagattcaatgcccagactgaggacgaactgggtttacctgctgtccctcgggcatccatacgcggttaaagaatgtttttttatatcttggcatagctagtgaagtcacgagcaagcccttgtaaagatgtgcagatcttgagaatattgattgatacagtgatttaattggtctggtgtttccattatagacttagtgccttttattttcccttgtaataaaccatgtggaagcatctttgttttttgtatgaagcttttggctcgggaaaaaaagggaaaaaatgtttgtcgaaagcttggaacctgcaagtaatgtttataaaggaaatttatgcatacacatttgttatgcaaaaaaaaaaaaaaaaaaaaaaaaaaaaaaaaaaaaaaaaaaaaaa

SEQ ID NO: 1087 - DNA, 2523 bp, Glycine max
  misc_feature (2323)..(2323): n is a, c, g, or t
  misc_feature (2330)..(2331): n is a, c, g, or t
  misc_feature (2343)..(2343): n is a, c, g, or t
  misc_feature (2356)..(2356): n is a, c, g, or t
  misc_feature (2365)..(2365): n is a, c, g, or t
  misc_feature (2372)..(2372): n is a, c, g, or t
  misc_feature (2379)..(2379): n is a, c, g, or t
  misc_feature (2381)..(2381): n is a, c, g, or t
  misc_feature (2384)..(2384): n is a, c, g, or t
  misc_feature (2389)..(2389): n is a, c, g, or t
  misc_feature (2396)..(2397): n is a, c, g, or t
  misc_feature (2399)..(2400): n is a, c, g, or t
  misc_feature (2402)..(2402): n is a, c, g, or t
  misc_feature (2404)..(2404): n is a, c, g, or t
  misc_feature (2409)..(2409): n is a, c, g, or t
  misc_feature (2414)..(2414): n is a, c, g, or t
  misc_feature (2424)..(2425): n is a, c, g, or t
  misc_feature (2427)..(2427): n is a, c, g, or t
  misc_feature (2430)..(2430): n is a, c, g, or t
  misc_feature (2438)..(2438): n is a, c, g, or t
  misc_feature (2446)..(2448): n is a, c, g, or t
  misc_feature (2450)..(2450): n is a, c, g, or t
  misc_feature (2452)..(2452): n is a, c, g, or t
  misc_feature (2461)..(2461): n is a, c, g, or t
  misc_feature (2469)..(2470): n is a, c, g, or t
  misc_feature (2481)..(2481): n is a, c, g, or t
  misc_feature (2487)..(2487): n is a, c, g, or t
  misc_feature (2495)..(2496): n is a, c, g, or t
  misc_feature (2501)..(2501): n is a, c, g, or t
  misc_feature (2504)..(2505): n is a, c, g, or t
  misc_feature (2507)..(2507): n is a, c, g, or t
  misc_feature (2511)..(2511): n is a, c, g, or t
  misc_feature (2514)..(2518): n is a, c, g, or t
  misc_feature (2520)..(2520): n is a, c, g, or t
  misc_feature (2522)..(2522): n is a, c, g, or t
agagaaaaatggggtggcaaagggacctactaagtcgggaatatccgctattctagttgctgcttctgtctgtaacacaatacaatcatcattcatcaaatcactgaaaccaaagccacaagctgcgacatcagaagaatggaagacggtgttgaccacttggctttcgagaggaacaaggcgcagttcgatgttgaggacatgaaaatcatttgggccggttctcgtcaagactttgagctttcggatcgaatttctcgccttgttgccagcgatccggcgttcagaaaggatgatagaacacgcttgataggaagattgtttaaaaacaccttgagaaaagcagcttatgcatggaaaaggatcaacgagctccgtcttaatgaacaggaagcttataagctcagatcttttgtggatcaacctgcatttacggatcttcattggggaatgtttgtgcctgctatccaaggacaaggcactgacgaacagcagcagaagtggttgcctctagcttatgggatgcaaataattggttgctatgcccaaactgaactgggtcatgggtccaatgttcaagggctagaaacaactgcaacgtttgatcccaaaacagacgaatttgttatccatagccccacattgacttccagcaaatggtggcctggtggattgggtaaaatatccacccatgctgttgcttatgcccgtctaattattggtggtgaagaccatggagtgcatggtttcatcgtccagctgcggagcttggatgatcacttgcctcttccaggcataactattggtgatattgggatgaaatttggaaatgcagcttataacaccatggacaatggagttctaagatttgaccatgtacgaattccaaggaatcaaatgttaatgagggtttcacaggttaccagagaaggaagatatgtaagctcaaatgttccaagacaattagtttatggtactatggtaaatgtgagacagaaaatcgtagctgatgcatcagttgctttgtctcgagcagtttgcattgctacaagatatagtgctgttagaagacagtttggatcacataatggaggtctagaaacacaggtgattgattacaaaacacagcaggctaggctcttcccattgctggcttctgcttatgctttcagatttgtgggtgggtggctgaaatggctttatatggatgtgacggaaagattgcaagctaatgatttttcaacattgcctgaggctcatgcatgcactgctggattgaaatccttgactactacagcaactgctgatggaattgaagaatgccgtaaactatgtggtggtcatggttacctttgtagcagtggtctccctgagttatttgctgtttatgttcctgcctgcacgtatgaaggagacaatgttgtgcttctgttacaggtggcaaggcatctcatgaagactgtttctcagctgggctctggaaataagcccgttggtactacagcttatatggctcgagtggaacaactgatgcaatatcactctgatgttgaaaaggctgaggattggttgaagcctaatgtagtgttggaagcatttgaagctagggcttctaggatgtcagttgcttgtgctcaaaatcttagcaagtttgctaaccctgaagagggttttcaagaactagctgctgatttagttgatgccgcggttgctcattgccagttaattgttgtttccaaatttattgagaagttgcagcaagatatacctggaaagggagtaaaaaagcaattagaagttctttgcagcatttatgctttgtttctacttcataagcatctgggtgattttctttccactggctgcattaacccaaaacaaggatcacttgccagtgagcagctgagaaacttgtattcacaggttcgtcctaatgcaattgcgcttgttgatgcatttaactacactgatcactaccttggttcaattcttggacgttacgatggaaatgtgtatccgaagttgtacgaggaggcatggaaggatcctttgaatgattcagttgttcctgatggctttaaagagtatattcaaccgatgcttaagcagcaactacgtaatgctaggctgtagttaattttgtggcaatgatgcttttggcatctaagaaatttacccagactattctgatttacaactcttaataaagttgtgtttgccagctagtaattaccatcgcaattaggtgtatctggaactggaactggaacaaactcatttatttattacattaacgatacttgatgtctaaaaaaaaaaaaanattccgnncccgggaccctntttaaacggcgcnccggggacnccctttntccttangnggnatttnactgcgnntnntntnttgtnctggnaaaggttccnncnatnccaaaatnaaccgaannntngnaacggggcnagggggtnnccctattgggnccctgnccttcatnnactgntcnntntaanttnnnnngnang

SEQ ID NO: 1088 - DNA, 1440 bp, Glycine max
aaaaaacttgagagagagaaaatagagaaagaggctaggtagaaactagaacccgggtcctcttactacactcacccccaatttcccgagcctcagcttcgggacacccgaacctcattactcgggacgcgaataaaagccacactgggattcacacgccccagttccaaccctactctcacacacactgcaacaacgaaaaccaaagaagaaaaaagagtttcttctttccgaaatccaagcagtagggttagggttttttccgatctcaatggcggaggaaccggagagcaccgtcaccaccggcgcccccgacgaatcgctgctcgataagatcaccgagaagcttcacggccacgattcttcctcttcttcctcttcggattccgattccgaaaaaaccgttacttcgtccgttaaggatagggtttttcgcctcttcggaagggagagacccgttcactccgttttcggcgccggaaaacctgctgatgtgttattgtggaggaacaagaaaatatctgctggcgtgcttggcggagccactgctgtttgggtcctttttgagttgcttgagtatcaccttcttactctggtgtgtcacattctgatactgttgctcgcagttctgttcttgtggtctaatgcccatacttttatccacaaatctccgcctcgcattccggaagttcatcttcctgaggagccattccagcaagttgcgtctgcattgagaattgaaatcaaccggggatttgctattttgcatagtattggctctggaagggacttaaagaaattcctagtgattattgctggcgtatggattctgtcaattgtggggaactggtgcaatttcttgaccctgttctacataacttttgtcttgtcgcacacggttcctgtgctctatgagaagtacgaggataagatagatccacttgcagagaaggcagttattgagattaaaaagcaatatgtcgtgtttgatgctaaggtcttgagtaagatcccattgggtccattgaaagccaagttatcttagttgttaatctttgtaacatctgaaagaaagagctccacttgtttgctcaaggaagttgccagggccagtgtcttttattgaatgtcgatctttgctatgtttgggttggttttaggctgtggtatggtgtcaatggcaatgggtttggtttatcttcaaatagtagtttctaactgttcaagcatatggattttactggtttttttttaaggtttgtatgagttgttcaatcaaataattgttgttgtatgataaaatacttgcgtctttttttttttttcttttaatttttcggtagcattcgttaccgtctgtgttttagtgttaggttcataggcttgtaaatgtagatcaatgtttaaaatatcggtttggttatgaaaataactaaaaaa

SEQ ID NO: 1089 - DNA, 1532 bp, Glycine max
tacggctgcgagtcacctccgtaggcggtcccaaccctactctcacacacactgcagcgagaaccaaagaaaaaaaaagcttcttccattttccgaaatcgaagcattagggttagggttttttccgatctgagaaattcgcggcccaatggcggaggaaccggagagcaccgtcaccaccggcgccgccgacgaatcgctgctcgataagatcaccgagaagcttcacggccacgattcttcgtcctcttcatcttccgactccgactccgactccgaaaaaaccgttacttcctccgttaaggataaggtttttcgcctcttcggaagggagagacccgttcactccgttttcggcgccggaaaacctgctgatgtgttattgtggaggaacaagaaaatttctgctggcatgcttggcggagccactgctgtttgggttctttttgagttgcttgagtatcaccttcttactctggtgtgtcacattttgatactgttgcttgcagttctgttcttgtggtccaatgcccatactttcatccacaaatctccacctcgcattccggaatttcatcttccagaggagccattcctgcaagttgcgtctgcattgagaattgaagtcaaccggggatttgctgttttgcatagtattggctctggaagggacttgaagaaattcctagtggttattgctagcgtatggattctgtcaattgtggggaactggtgcaatttcttgaccctgttctacataacttttatcttgttgcacacggttcctgtgctatatgagaagtacgatgataagatagatccacttgcagagaaggcagttattgagattaaaaagcagtatgctgtgtttgatgctaaggtcttgagtaagatcccattgggtccattgaaagccaagttatcttagttgttaatctttgtaacatcagaaagaaagagctccacttgtttgctcaaggaagttgccaaggccagtgtcttttatcgaatgtcgatcttcgctatgtttgggttggttttaggctgggtatggtgtcaatggcaatcagtttggattatcttcaaatagtaatttctcagtagtttctaactgtgcaagcatatgggttttactggtttcttttgaaggtttgtatgagttcaatcaaattgttcttgtaagataaaaatacttgcatgcttctttttatttttatttatttatttatttttatttttaagtagcattcgttaccgtctgtgttttggtgttgggttcattatgtagaacaatgttcaaaatatcggtttggttatgaaattttgccaaaaaacacggttcctgtggttgaaccggtaaatatcaggatgtttgcaagaattcatttacagttttttaagacccatgggatgattattttacggttaactattttatattatttgtacccagtatttgggaggatttatgataatttattaagttaataagattcccgtcagggacatccgataaaaaaaaaaaaaaaaaa

SEQ ID NO: 1090 - DNA, 2216 bp, Glycine max
ccagcgtcgccagctcgacggagacacgagggggggtagaagaaacaagatggaaaccgggctcggaaaatccaaaggccaattttgaaattacctaacgtgtgttggcgttctgggttgacccaccctccttttcgttttcagcataatttctagggtttctatcttcgctcattcgccaatttacaattgaaatcgcaattacacaatctctctctctgctcgtgagctttctacggtttcgattcgatcattcccctcttgttttatggaggtataggtagatgatgggaaaacgtgtctcaagagagcactttcaacccaggccgtgttctgggaagacagagaatttaaaaaacaccgtgtttattgatgtagatgatcaagttgatgatgtggatgtggtgatcatagattacaaagagttcatgtctaaatcacatggatctggtgcgtcgagtcggctccgggggcccccccccccccctgttattagcattgatgatgacgatgacgaggaaagtgatgatgcggagtttcccggaggtgttgctggaggtgttggggaattggatagcgatgcctgctctagtaaaaggtctcctccagacccaagtggcttgcggaattctgtacacatagatgttgttgatgatagtggtgtttgtggaaaggagtctgaatctgatgagctaaaatgtaggaaagcatgctctacaaatggtactggcggatgtcgctatggtgtcgattggggtgacagtgagtcagagagtgattgctctgattgtgaactcatggatcgtgaacagtgggaaaagatttctcttaagagaaagcgcagtgtgtttaatgaccaatcttgttatgatgagcatgccagttcttctggattacattgtaataataatgtataccttgatgttgacgaggaaaatatgaccaaagagaatgctagaggcaccgcatattctggtcccaccaatggtgaatatgttaaggagaatcaatcttccttttctgttaagggtgatagtcaagtagatgggatttgttttaataatggggcaaaaaattctttcaaggattctgatgagaaagttgagtgggagacttttaaatcttctttgtttgaatccacagaggaaatgcaatcattgcatcaaagttctgatattgagcatggaaaaagtacaagaaacaaagatttctctccctgcacccagtataataataactacaatttctgtagtgatgttactggtgtttcaaggagccaagaagcatgtagaaggcagcttagcaatactggatctacactgaagagtaaagatggcaatttatttgatttgaattatgaaagtgcctatgttgatgaaggacaagttgattgtgatgggcttgcttcaaatgatcaagattgtggtcttactgcttcaaatgagaaagatataattaatgaaagagaaaagcttaaggagactgatgaatataaacaagcaatggaagaggaatgggcatctaggcagcggcaattgcaaattcaggcagaggaagtacaaagattacgcaaaagaagaaaggctgaaaagcgcttactggatatgcaaagaaggcaaaaagaacgtattgaagaagtgagagagacacagaagaaggatgaagaagttatgaacctgaaggagcaattgcgggttgaaatacagaaggggcttaatcaattggagatgcgatgccatgatatgccctcactgcttcgtggcttaggaatacaagtgggaggaagctttatccctttgccaaatgaggtgcatgcagcctataaacgtgcgttgcttaagtttcatccagaccgtgcatcaaaaactgacgttcgtgctcaggttgaggctgaggagaagttcaagctcatctctcgtttgaaggaaaagtttgggatgacttcatgtcactaaatgctaacaactgataaatttggttgttggtattttgtgttttaactgaagtgcttttacctcataatagctcatttgttggtattcttatcttaactgtatctattagtctcccctccttttctcccaaaatttacagcagataataggttaatggactagaatatgtgaaggattttatttcttataaaaatggattttttggacggacagttaaattgatattactgtcctcatcttgacaaaaaaaaaaaaaaaaaa

SEQ ID NO: 1091 - DNA, 1955 bp, Glycine max
  misc_feature (6)..(6): n is a, c, g, or t
cccggngtcgacccacgcgtccgcggacgcgtgggggcggttaagagatataagaagaagaagctagattatgttccattcactcacataataatccgtgacccatttcagatttcgtcttaacgcacataaattcccgcgcgtccgctcacctttgttgattttggcgaggattttgagaatggttgtggctgggggtgctaagttcaatttgagaagaggcaatggttcttctcataatgttgtcaatggctatagcagtgatggagatctttgcagaattagcaaaagtgggtgtttttcgtcggtggctgaggtggatagagacccttcttgcgtttcattcaccactttcaacattctggctccgatttacaaacggattgacccacagaaccagggcctgcgagaaagtgacttcagagcattctggttggccaggaatgagaggattcttgattgcttgctttctgaatcatcttccattatgtgccttcaggagttttgggttggaaatgaagaacttgttaacatgtatgaggagagacttggggatgctggctacaatctcttcaagctcgcgcgaaccaacaatcgcggagatggtctgctgactgctatacgtaaagaatgtctaagagttatggattataaagagttgcttttaaacgattgtggcgatcgcgttgctcagttgttacatgttcagtcagctaccccctttgtacaaaacccaaaaggcagtgttcctcaagagtttctgattgtgaacacccacctgttatttcctcatgattcaagtctttgtgtagtgagattgaatcaggtttaccaaatattgcaatatgtggaattgtatcagagagaaaacaggctcaaacccatgcctattatactctgtggtgactggaatggaagcaagcgtgggcatgtttacaagttcctaaggtcacaggggtttgtatcatcatatgacattgctaatcaatacagtgacagttatgcagattctcacaagtgggttagtcaccgaaatcataggggaaatatctgtggtgttgacttcatttggctttgcaatcccaaccaagcacgtaaacctttaaagacaagttgggctgaagctgtatttagtatactaaaattccagttacgaaaagcatcgttatctgaagatgatgcatttgcctttctgaagggtgacaactatgctgattctgtgacatattttagcttctccgaagcacttcggcaggtgaagttaattggtgtgccttatggactacgttttcaacagttgcaagatctatggaatcaagcagatgctgatggaaatggtgtcatagactttgaagaattcaagcagaaaatatggaattctacatgtccagagcatgtgttggaaaatctgaatggttgcacggaagattgtaacacagaacaggagcaagaagctattggttttaaggtgaagaatgcaatgctgtatccgcgtgaagtggagaaaggactatggccagaagattattctctttctgatcatgctagactcacagctgtgttttcaccagcaaggatgagatgttctgcctcacaaaactgaatgtacttcatggcactaatagtcttagcccacagaaaaatattcaattttgggaccagtttggtgtaggggtaaactgaagtgatactttttttcactttcatttttagtcccctaccaaacatgtcatgccataattagtgattagtctgtcttgtatatgtgtttggagtcaaattaaagtagtgttgtgctgtaatcagttttggtaagccctggccatgtttttttctctggtaatgggataacaatgtaaagatatttttgcaatgtagaagtggatgtgcatattatgtatttccttctcactgtttgaatccattgattttttgctaaaaaaaaaaaaaaaaaa

SEQ ID NO: 1092 - DNA, 1349 bp, Glycine max
tcagctacgtaggccccccccccgaaccgcgcaaggtaacgaacgtagctgagcaataacaatgccactgccaacggtcgtttccccattttcttcttcctcaggcaccttcttatccacagttaccgcgcgctcttcaatccctccaaaacgcaacgtctccccttccccttcccccttctccactctctctcgcagagacattgctctgctttccttcttctccctctccctctcagcaccatcctccgccatcgacattggcatctgtacgcgccactcttcttctatttcctttcccccaactgcagtattatctttgttatcgttgctgtatttgcgaaaaccctaattcctgattatggttgcgcagcaggaccgaaggattggctgaaagagcaaaaaaagaaggcctccaagtacctattggcccccgtcgatgcctcccgccaaatccttcgctctgcctatctcacgctcagtatatctttttctcgctacgttctcgcgcacatggcttcttatcttaattaggttttgattcggttccatttgcagcggaaactgacgctgcttatacggatgaggatttggagaagatgcagcagctctttatatctgctgccagggattgcgtcccacaggaccggaattctttcgtcactctccaagccaacaccggagtagaggtgtgcacctttcgattgattgtgaagaatgcagcttcgttgcttggaaataaggatcctgtaaagttgaaagccgaagctttgctagataatcttataagatctttcacctctgtcagtgggctggcaagcgaaaccaacattcaacttgcatcagataggaaaaagatagctgatgctgtatcagataccatatctgatcttgacaaatttgagcagggaatcagggattgccttgaaacctaactctaaaggatagcctagcctacttttttatgtggaaagttggccattaaatatcatgcaaggaatctattggtttaatcaccaattttctgttatcaccggtgtgctgtctgccaggaatatcaaaatgcttttgccctacttaaattacttcttattagttctctcaatctaaaatctgtgaggactctgtcaatatgtatctgatactctttttcaatgcattcaatcctatggatcatttcatagaggaaatgcacaggctcttgatagctttatacttttgatattacggggtgtgttcataatttgcacatactgaatatgtaataactaataaactttggtaatttcttaaacaaaggtaaatgctaggatgttctgaaatgatttcttaaaaaaaaaaaaaaaaaa

SEQ ID NO: 1093 - DNA, 1267 bp, Glycine max
gaaaattgtaagtacgcggacgaactgcgcaaggtaacgaacgtagctgagcaataacaatgccactgccaacggtcgtttccccattttcttcttcctcaggcaccttcttatccacagttaccgcgcgctcttcactccctccaaaacgcaacgtctccccttccccttcccccttctccactctctctcgcagagacattgctctgctttccttcttctccctctccctctcagcaccatcctccgccatcgacattggcatctcaggaccgaaggattggctgaaagagcaaaaaaagaaggcctccaagtacctattggcccccgtcgatgcctcccgccaaatccttcgctctgcctatctcacgctcacggaaactgacgctgcttatacggatgaggatttggagaagatgcagcagctctttatatctgctgccagggattgcgtcccacaggaccggaattctttcgtcactctccaagccaacaccggagtagaggtgtgcacctttcgattgattgtgaagaatgcagcttcgttgcttggaaataaggatcctgtaaagttgaaagccgaagctttgctagataatcttataagatctttcacctctgtcagtgggctggcaagtaaaaccaacattcaacttgcatcagataggaaaaagatagctgatgctgtatcagataccatatctgatcttgacaaatttgagctgggaatcagggattgccttgaaacctaactgtaaaggataacctagcttactttttgatgtggaaagttgatcattaaaaatcatgcaaggaatctattggtgtaatcacaaattttctgttatcaccagtgtgctgtctgccgggaatatcaaactatgcttttgccttacttaaattacttcttattagttatctcaatctaaaatctgtaagtactctgtcaatatgtatctgatattctttttcaatgcattcaatcctctgaatcatttcacagaggaattgaacaggctcttgatagctgtatccttttgatattacagggtgtgttcataatttgcacatactgaatatgtaataactaataaactttggtaatttcttaaacaaaggtaaatgctaggatgttctggaatgatttcttaaaatcagccaaaaaatatatgtatttttacattctccttaaattatgactgtttccctatttgtttggaaatgtatgaggaatttcctgttgtcaacaaaagggatcaaacaaatg

SEQ ID NO: 1094 - DNA, 3154 bp, Glycine max
gctcactctctctctcgcaattcccaaaccaaacacggaaaatcccccctcctcttcccaacgacgccgtcgcctcgagagaacactattttgtctatttaacactaaaaaacgccgtcgttttgtccttaaaacccgatccggtagacacgtactcccatagctaattgtgagaatttcggtcacctgttttatttttttattttgcctttttcggttgccctctctttaaatgctccctcctattttttttgttctctctctcgttttttgaagacgaacattaaacaaccgtgaagaagcagttaaagcaaactgcgaaacgctgaacatttgaagcaaattaaaaaaaataaaagagaagaaatcatcgttgttgtggacattgtgtttgttttctaagaagaatggaaactgtgtgtttaaaatctgggatggttcccacgatctctattagtgggtcgctggatgcacgtgccaatccttctcaggtgagcacggtggggcgcgccgccggggataaaccgccgcagaggtcggtgttttcgaggttttccttttggtaccctttggaatctctctggcctcgggggaacaacagcaggtacaaagggctggccctcgacgacgccgttttggcggacaacaacgccgaagcgaaggccgttagagatgacggccagggtgacggaacggaaaggcagaccggaaactgggttttgaagattctgcatgtgaagtccgtgtgggaagggaaacagcgcaatgaagaggatggtacggttcatgatcaaactcaaaccaatttcgacgaggaggaggtgtgtgaatgtgatgcttgcggggttgatgaagatgacggctactgtgaagaagaagaggctgaattcgatagaggctcgttttcgagaatgcttcggagggtatcgttaggcgaagctagattgtacgctcagatgtcacacttggggaacttggcttacgatatacctagaatcaagccagggaaactcttgaaacatcatggtctgcgctttgtaatttcatcgatagagaagaaggaattggcagtggcagcaacagctgaaaaggatccccagaaagttggatcttcaatagagaagaaggaatttgcagcaattgctgaaaaggatccccagaaagttggatcttcaacagagaagaaggaatttgcaccaattgctgaaaaggatccccagaaagttgaaactgatgagaaggtagaagaaaaagaagaaacaaaggatccaaagaatgctggatacaagataagtgcaactgctgcttataatattgctgcctctgctgccacttatctgcattctcagactagtagcatatttccattcaaatcctcaaatgctgtgactggtgaaggttcacttgaaggaagcaatgaaagccttgacactgttaacatgctaaacacagaggtggcatctttgatggcaactactgattcagtgacagcagtggttgcagcaaaggaggaagtaaagcaggctgttgcagatgatctgaactctgcacattcaacaccctgtgaatggtttgtctgtgatgatgaccagagtgctacaaggtttttcgttattcagggttctgagacgttggcttcatggcaagcaaacctactctttgagccaattaaatttgagggtttagatgtacttgtgcacagaggtatatatgaggctgctaaagggatatatcaacagatgttgccagaagtacgtgctcacctaaaatctcgaggttctcgtgcaacttttcgtttcacaggccattctcttggtggaagcttggcattacttgtgaatctcatgctattgataaggaatgaagtgccggtctcctctctacttcctgtgataacatttggttccccatccatcatgtgtggaggtgatagtctgctaaaaaaattaggtttgcctaggagccatgttcaagcaatcacaatgcacagagacatagtaccacgagcattttcttgcaattaccctaatcatgttgcagaactattgaaggctgtcaatgggaactccgtagtcatcccttgtctcaataaacaggtaaagttctggttttcaaaaagttttgaagtagatgaagaaatttctttcatataaatctctgaagtagttttatttgtgaatttttactgcagaagctactatatgcaccaatgggtaatcggctgattctgcagcctgatgagaagttttcaccaagccatcatctcctgccatcaggcagtggtctatatcttttgtgttgtcctttatcagaatccaatgacacagagaagcagctccgagctgctcagatggtcttcttgaactcacctcatccacttgagatattaagtgaccgatctgcttatggatctggaggaagtgtacaaagagatcatgacatgaattcctacttaaaatctgtgagaactgtgatccgccaagaacttaaccagatccgtaaagccaagagagagcaacggcgcaaggtgtggtggcctcttttattacctcgtggagttgataccagcattgttgctgggaggtccatgatatcaatcaatgtgggtcaacgccagtcacccttctccggcgtgatacaaacagggagagaatccctgaaaaggttcagtagggttgttacatcccaacatatgcatttgtttgtgttgcttttgttccctgctcggttgttactcttgggaacatatagcgtaattaacctcaaatgagtatataagatgattcattattaagcatgagggacaattgtatagggcgagggcacatgctttgtaggacattacacatttagacgattctttattcattgatttcaaaattgaaatattgcgttcttacgagtccttgcttgcagaggaatattactctaaaatagtaattaatatttaaaaatttaattgtattttaattcaagttatatgcttatattggtcccatgttgagtgtttggttggactaacaaggaatgggttagacttattatgtaaatatttctccaattctcaaggttgcttgcgctttgtaagtaagatattaaattcgtcatttgtggaccacagttagctgaatctcatcgataaacgttttgatca

SEQ ID NO: 1095 - DNA, 1170 bp, Glycine max
ctcgagccgcggctcgagcggctcgagacggctgcgagaagactacagaagggggttcttagaccgggcatttcgccaacttgggagagaacatcctttctcttaggaagtaaaagttattaataaaaagaaaaaataattaatatgaaaattaaaagttaaaacaatcaaaagcagcaatatacttactaacaggagtggattgaggagaagtgagcctgtggagtgttttcttctgatttcatctggatctgcgagagatgacggtctttcatttcttcaattgcgcgattctcaccttcggcccccacgccgtctactattctgccacgcccttatctgagtatgatacactcggcacctctatcaaagccgctgttgtttatcttgcaacggcattagtgaagcttatttgtctagctacttttctcaaggtatcagagagcgatagctttgatccgtatcaggagtttttgaaggcgttaataggttttatagatgttgctgggctttattttgccttgacccagttgactcacaggaacatctctcagaatcataaatttcaagcagttggacttggctgggcatttgctgactctgtgctgcatcggttggctccactttgggttggtgccagaggattagaatttacttgggattacattcttcagggccttgaggctaatgcaaatttggtgttgagcatatcccttgctgcacttggatctttgatgtggcttcgaaaaaataaacccaagaccctcatccctattatatatttgagtgcagggattgtagcaaccatgccatctatcccaagctattttaggggtggattggggtggccctttcccaaaatggtcgggtttgagctcttcacaaccctggtgatgggttttataaactggcaactgttttttgtatgtcaaaaaccttcagtgtgagaaagctcattacaaactgatcgaatcctggttaactattttctggctagagttttgatccagggtcatctgctttttggcagctccaaagctgtttctttaattcccaaaaagggttttaccaattttagttttttttttttaccggttggatttaattaatttacccggtttccttcgggaaaaaggtgggcgccaatccataaaaaattgggttttttcc

SEQ ID NO: 1096 - DNA, 1840 bp, Glycine max
  misc_feature (824)..(825): n is a, c, g, or t
tcgagtcagctacgtagggcccccccccctatttttacttttccttttaactttttcaccgatacaaattgaaataccataaatcttagcatctacgatgactatgttcacttctaaaacatgaattctctcttgtaatttaagatctttattttacggtcatttcatattaattttatatgtttattatagctgtgtcgtatcctgtgatttttaaaaattttctatatcctgtatctgtgtttcctacctaacagaactatttttatgtcaacttttgctcagttcatagttttatcttaaattctaaggtggactgttgagagttgagacagtgaagtttgatctcttatgtgccattggaagttgcccattacttgctagaacagccaaattttataaacaaactgtgtttctgtaaaaattaaataaataaatcaactctcagtattatgtttggattctgtcgtctatttctttgttttttgattgctgacactccttccaccaatatactactttgtgttttctccgttgagatggagttagtgatagtgaattggctgtgcattccatgtgttgaactatgtacatacatgaacatggagggtacaggttacagttgcatatattgataaagaaagagaatggtatgcaaaaatgagaactgggcaggtgtttttaatattcagactgagttatcagaagaaataagttcatgtttattacaatggatttttcctatatcaagatgagaattggagtgtgaatggaaaggaatgagcattcccccttattgttgccatcctttcttttcatttctnntgtgttgcttatgttttgaggaattacagaggtcttcttctgtattagacgataaaaaattagacacataacaaattaacaatagatggctgtgaatttataatacaatgcccttggatgttctcaatggctatttatagttcttgttattacgcttattgtcttgaatgataacaaatggctttattcttcaggagtttttgaaggcgttaataggttttatagatgttgctgggctttattttgccttgacccagttgactcacaggaacatctctcagaatcataaatttcaagcagttggacttggctgggcatttgctgactctgtgctgcatcggttggctccactttgggttggtgccagaggattagaatttacttgggattacattcttcagggccttgaggctaatgcaaatttggtgttgagcatatcccttgctgcacttggatctttgatgtggcttcgaaaaaataaacccaagaccctcatccctattatatatttgagtgcagggattgtagcaaccatgccatctatcacaagctatctgaggcgtggattggggtggcactttcccaaagtggtcggttttgagctcttcacatccctggtgatggcttttataagctggcaactgttttctgtatgtcagagaccttcagtgtgagaaagctcattacatactgatcgaatcctgcttaactattttctggctagagttttgatccagggtcatctgcttttttggcagctgcaatgctgtttctttaaattccataaatgtttttatcaattttagtttctttttcttaccagtttgatttaattaatttaacacgctttcttgcggtagaatgttggctgcaattcattagaaatttggtttattcagaaaattagagacatcgttaaccccatacatctgggattgataggttgcaaacactttctcttttttgaaaccccgttggatatctcgttaatccatgtcccttccattattaaccc

SEQ ID NO: 1097 - DNA, 1423 bp, Glycine max
  misc_feature (1190)..(1214): n is a, c, g, or t
aaaaccaaacaatcggcgtcgttggccccccccccccagcaaatattactatactaaaatactagtaggagtggattgaggagagaacgagaagaaggtgaagtcgaagaagtgaaggtgttgagtgttttcttcttgtttggatctgagagagaagagcgagcgatgacggtctttcatttcttcaactgcgccattctcaccttcggcccccacgccgtctactattctgccacgcccttatctgagtatgatacactcggaacctctatcaaagccgctgttgtttatcttgcaacggcattagtgaagcttatttgtctagctacttttctcaaggtttcggagagtgatagctttgatccgtatcaggagtttttgaaggcattaataggctttatagatgttgctgggctttattttgccttgacccagttgactcacaggaacatctctcagaatcataaatttcaagctgttggacttggctgggcgtttgctgattctgtactgcatcgattggctcctctttgggttggtgccagaggattagaatttacttgggattacattcttcagggccttgaagctaatgcaaatttggtgttgagcatatccctcgctgcacttggatctttgatgtggcttcgaaaaaataaacccaagaccctcatccctattatatatttgagtgcagggattgtagcaactatgccatctatcacaagctatctgaggcgtggattggggtggcactttcccaaagtggtaggttttgagctcttcacatccctggtgatggcttttataagctggcaactgtttgctgcatgtcagagaccttcagtgtgagaaacctcattacataatgatcgaatcctgcttaactattttctggctagagttttgatccagggtcatctgtttctttttgctgctgcaatgctgtttctttaaatttcaagaatgttttcttgcggtagaatgttggctgcaattcattagaaatttttgtttattcagaaaattagagatatttaccccgaacatctgggattgataggttgcaaacactttctctttgaaaccccgttggatatctcattaatccacgtcccttccattattaaccaaaaaaaaaaaaaacattgcaaactagattattcattctttagaatgctggctgcaannnnnnnnnnnnnnnnnnnnnnnnnttcacattaaccagcgtgcagttgctggccctttacgtatgcgcacacacgtcgcacaaattcactgaggagtgagtcaagacttcatgtttcgctggttttggtaactcgggagtgctgcaagcacttttctacttatcatttcacatgaatatggcttttagtattttgatttaacttgtctcactaaatttctatacatccctacg

SEQ ID NO: 1098 - DNA, 1107 bp, Glycine max
ggcttgtctgcgtagacccacgcatcagcagagaagcaaggagtaggaggtggagtgcgggcgagggtaacttaccaaccctaaggagttgttgagtttggtacatgggcggagaagtgttgacgatggcggacgtcacggccaacttgcaagcagcaaccaccgcatccaccccttacgcgcttcccaccaatctccctctcctctccgcttttctctccttcgctctcgctcagttcctcaagatcttcacctcctggtataaggagaagagatgggattctaaaaggttgcttgattcgggtggaatgccttcgtcacattctgcaacggtctcggctctggctgttgctatatgtctccaagaaggggcagggtcacccgcctttgctattgcagtggtcttggcatgtattgtgatgtatgatgccacgggagttagacttcatgcaggtagacaagcagaattgcttaatcaaattgtgtgcgaacttcctccagaacatccttgttccaatgttagacctctgcgtgattcacttggtcatactccacttcaggttgttgccggtggcacattgggatgcattatagcatttttgatgagaagatcaagttaagatgctatgtgatgtgactgatactaatcctctaccttgtaaaaattgtcggtacatggctgaaatgagatcatcatggaaagggcataaaagccttctgttgcaagtgagtaaagtgcgttgaaggctcaccttgaagatcctgtgtcctgacttatggacattcagacttctcttgtacacagtaattaattggtttgttaattctgtcttaattgatcgttcaacacattttgagatcacacttttgacttattttttcacctattgttgcaaatcgaaacttggaaggcaattgacacttgaatggaggttgcatttttgtgtttcatcctcaagtagattaagaagattcttgtttctccatggttataacagtttgactttcgagctttttaattatacttgtttgagtttgattctcacccgttgtacgtgatttagtggattagtagtgttaaagcctgtttggttttgtgtccggttc

SEQ ID NO: 1099 - DNA, 2377 bp, Glycine max
tggatggcattcgaagagaggtgcagaccatgaacttgattgatcatccgaatgttttacgggcacattgttcttttactgctggacacaatctatgggttgtgatgccatacatggcaggggggtcttgccttcatataatgaaatctaactctcctccgcgtgcccccccccccgttattgctactttattgcatgaagttctcaaagctcttgtctatcttcatgctcatggtcacatacatagagatgtaaagtctgggaatattctgcttgattctaatggtgcggttaaactagctgactttggagtgtcagcatgtatgtttgatgctggagataggcaacgttcaagaaacacttttgttggaacaccttgctggatggctcctgaagttatgcagcaattacatggatatgattttaaagcagatatatggtcatttggtataacggcacttgaacttgctcatggtcatgccccattttccaagtatccacctatgaaagttttgcttatgactttacaaaatgcccctcctggtcttgattatgaaagagacaagagattttcaaaggctttcaaagagttggttgccacctgcttagtaaaagatccaaaaaagcgtccaagttcagaaaagcttttaaaacaccacttctttaaacaagcacgtgccagcaaatatctagctcgcaccattttagaaggccttgctcctttaggagatcgttttagattgctgaaggctaaacaggcagatttattggtgcagaccacggctctttacgaggataaggatcaattatctcagaaagactatattcgagcgattagtgcctggacttttaacctggaggatttgaaaagtcaagccgccctcgttcgccccccccccatacctaatgcagaagagtcacaaagggataagaagcaaaaagacagattggacgacttcaaagtttctgcagagaggctatcacctggagcagctaatcattcagatgatgcaccaacgcaggacaaggaggatggattcaacaatcttccggatttggagagctcacttgcttcatttcctagtaaacctcttcaagcacttaaaggatgctttgatatgtgtgaggatgacgtcaacaacagcagtccaagaaatttggatcatgatggaagaattgacaatgaaagttctgggacaagtacttcattacaacaaaatgctaccagtcatcaaaaaaagtttccaagtggttctttactacctgataattttctttttcccaaaaagattgttactgatggggacagggattatctacaaacaaagtattcttcagacaggaatcacagtggtccgttgcaatatcggcagaagagagacaccaacaaccttccattggttgatgacacatcggatggagcatttgtccagtttagggggcggtttaaggtcacgccggcagatctcagtccaatgggtccttcaaacagcacatctggcccacttgttagtcctaccagtccaccaaatccaaatttcctgtctgtagctattcttccatcactgcagtgcatcttgcaacagaacggtttgcagagggaagagattattaaattaataaaatatgcagagcaatcttctggcaagaatacagaatcaatggaggcagggatagttgatattttgcaggcaccacctgcaacaactagggagcgagagctgcattttcaggtgattcaactccagcagagcaatggaatcctttttgaggaattgcaaaaacaaaagatgaaaaatgttcagttggaaaaacagttgagcagtatgattaacaaagtggaaaagtgaacaagacatgaatgttgtcatgatttgactgatattgaacaacacccgacagatgttcagatacaacacccgacagatgttcagtggtaatattcaatgatggtttgagacatacttgagggatgggaacggctcattgcgacgtacactaatctttgatatgctattccttgagttacatgtaaaatgtaatttattgagataatgagatcatgtaatttaaactcatctttctctcttatatcctacctaaaaattacccttcagacttcatattaatgcaataactacatagcttagcttagtgatgctgcaagcctgtcttctgtgtttcaataaattcatatcacccggcaaccaaatccttcacatacatagaatgttgactggaatggctagtgttgaagtgtatttaacggttgatgcaaattctgacaataaatttccccagtgtattgtatttattcatctcatggttgaaatttatgatttttttgaatgttggcccaaaaaaaaaaaaaaaaaaa

SEQ ID NO: 1100 - DNA, 1723 bp, Glycine max
ggtcatttggtataacggcacttgaacttgctcatggtcatgccccacgcgcccggtatccacctatgaaggttttgctcatgactttacaaaatgcccctcctggtcttgactatgaaagagacaagacattttcaaaggctttcaaagagttggttgccacctgcttagtaaaagatccaaaaaagcgtccaagttcagaaaagcttttaaaacaccacttctttaaacaagcacgtgccagcaaatatctagctcgcaccattttagaaggccttgctcctttaggagatcgttttagattgctgaaggctaaacaggcagatttattggtgcagaacaaggctctttacgaggataaggatcaattatctcagaaagaatatattcgaggaattagtgcctggaattttaacctggaggatttgaaaagtcaagctgctcttattcaagatgatgacatacctaatgcagaagagtcacaaagggataagaagcaaaaagacagattggacgacttcaaagtttctgcagagaggctatcacctggagcagctaatcattcagatgatgcacccacgcaggacaaggaggatggattcaacaatcttccggatttggagggttcacttgtttcatttcctactaaacctcttcaagcacttaaagggtgctttgatatgtgtgaagatgacattaataacagcagtccaagagatttggatcatgatggaagaattgacaatgaaagctctaggccaagtacttcattacaacaaaatactaccagtcagcaaaaaaagtttccaagtggttctttactacctgataattttctttttcccaaaatggttgttactgatggggacagggattatctacaaacaaagtattcttcagagaggaatcacagtggtccattgcaatatcggcagaaaagagacaccaacaaccttccactggttgatgacacatcggatggagcatttttccggcgtagggggcggttcacattgacagatctcagtccaatgggtccttcaaacagcacatctggcccagttgttagtcctaccagtccaccaaatcaaaatttcatgtctaccgctattcttccatcactgcagtgcatcttgcaacataatggtttgcagagggaagagattattaaattaataaagtatgccgaacaatcttctggcaagaatacagaatcagtagaggcagggacaggtgatatgttgcaggcaccacctgcaacaactagggagcgagagctgcattttcaggtgattcaactccaacagagcattggaagccttgttgaggaattgcaaagacaaaagatgaaaaatgttcagttggaaaaacagttgaacagtatggctaacagagtggaaaagtgaacaagaagatatgaactttatcatggtttgactgatattgaaacacccgacgttcagtggtaacattcaatgatggtttgagacatacttgagggatgggggaacgtttcaattgtagttgtattaccatatgtgaacttttgtttgcggcagacactactactaatttttgagatgctattccttgagttacatgtaaaaagtaatttattgagataatgagatcttgtaatttaaacacctctttctcttttatatcctacctaaaagttacccttccaagggggggggggggggggggggggggggggggaggg

SEQ ID NO: 1101 - DNA, 998 bp, Glycine max
  misc_feature (6)..(7): n is a, c, g, or t
tcgagnnacccacgcctcccccccccactcaccagtcaccacctctgaactctctctctcatctataagtcaacatggctcatcatgaagattcaagtgcatggaattcgagtaaacctcaccctaagctcaatgaaagaattctgtcttctctgtcacggagaactgttgctgctcacccctggcacgacttagagattgggccaggagctccagcagttttcaactgtgtggttgaaattggcaaaggaagtaaggttaagtatgagctggacaagacaagtggacttataaaggttgatcgtattctttactcatcagtagtctacccacacaactatggttttatcccaagaaccatttgtgaagacagtgatcctatggacgtgctggttctaatgcaggaacccgtgcttcctggttccttccttcgtgctcgtgctattggactaatgcctatgattgaccagggtgagagggatgacaagatcatagcagtttgtgctgatgaccctgagttccgccattacacagacatcaaggagcttcctccacatcggcttgctgaaatcagaagattctttgaggactacaagaagaatgagaacaaaatagttgatgttgaagactttctaccagctgaagctgccattgatgccatcaagtactccatggacttgtatgctgcttacatagttgagagcttaaggcactaacttctttagaaactgaatagccaattccaattatgtaaaatgtgaatgaaactccataaacattctgatttccgtgccgttctgttatggcactactgctgcctcggttcttgacacaacagtgtcaaaaactttctgctttgggatgcggctgtactgctactcaataatgagttcatttctagtattgaagagtcctttgtttggtattggagaaatggtaacacatgaatgaattttcagttaagccaattcctccagttttacttttgataaagttac

SEQ ID NO: 1102 - DNA, 1039 bp, Glycine max
  misc_feature (1034)..(1038): n is a, c, g, or t
ttaagtggggtaaccccagggttttccccgtcacgacgttgttaaacggcggccagggaattgtaattcgactccctatagggggaattgggttccgggccccccctcgagtcagcttctaggcccccccccccccccttttgatgtaccgaggagatgcttgaacaccaaggaaactaggggtggagaaggccacaaagaagaatcattctatttaaagtcagcctatcagtcaggttagttgatgcctggtcctcaaaggttcaaaacattcctttgggggtagctgatgggtgtctccttacaaattctcagcgtttaaagggaggcatagctgaggtgtatacccgtcgaaggtttatgaagagcttgagatgtattgcctcaggactgtgataaggttgcggagttttgatactctgctcaaagataatcaaactcagtagtttttcagagttggcctggatttgcgatttagatgtaataggagaacatgggatccatcgctctccaattggctattttattttttgtagccacttggtttctgtaacctcacttgttgagcatcacctatagagcattatgaaacataaagcggatgggtcggtcatatcatgactcaaggtttagctgcttattgttcgtgacgaaggtgttgctgatatgtctttcattgtgatattggtatttgttcaactgttaaagctttagctgttggggcctgtagcatggtgtaaagctcttttattatttaaatgttaccgacgtcttggttgaaatggattctgaagttgctttgaacttggcctggtggggatgtaaatttttttcaccattgcttttctcttgtctggagcatcagggagctagttggcacatcattttcttgctaagtatggtcattctgtagactttgatgttcaggttttttcctgtccccttgccccctttgctcccatccctcggggaagaatcttagcgaattcccttccctgctatgaatgtgtaatctgttttgttgggctttgccnnnnnt

SEQ ID NO: 1103 - DNA, 2368 bp, Glycine max
tcagctacgtagtcagctacgtaggccacactagggtaaccaaagttccaaaccctaaacgctacgattttaattttctggttttctctttttcaatcggtgcttcctccggcggcgcgtgggagtgtctttggcgcgtgattcctagttccccgcttacctatgcttcgctcgacccgcattgtagagttcacgccggagagacggcggaatctcaccggacgatcgtgatttcgcatcttcatggcttccgcctaccggaacgaacctaattggccacggcatagaagcggtggagctggattcatgggaaaagtacctttctctaaccctaaccctaaccctaattctaaccctaaattagcgaatggcaagaagacccaatcggcgtccgatgatgcttcctctatcaaccggagatcgaacgacgccgcaactcactcccagtatgtgaccttcaacgtcgcttcgtgcaccaagaaggagctcaacgacttcaagaatcgcctcgtctcggagctcgaacaaattcagaagctaaggaatcaaatcgggtccagcgagtttcaacccgggcagagcctcaacggacatccaaagaaaccgtcaggcaagaaaatttccggcaacaagcgacccttgccatctaattccgcaaaggatttgaaacggtcgcattcggaggttggaaacttgatgaagtgttgctcgcaagttttgcagaagctgatcaaacacaaacatgggtgggtcttcaaagcccccgtcgatgtagttggactgaaactccacgattactgcgatataattaagcagcccatggatctgggtactgtgaagtccaatctctctaagaacgtgtacgccacgcctgcagatttcgcctctgatgtgagattgacgttcaacaatgcactggcttataaccctaagggtcacgacgtgtacaccatggcggaacagcttctggctaggtttgaggaactatatcgaccggtgcatgagaaattcgaaggtagcatagttcatgatcgcgaatctgaggaggaattgcaagccagttcgtggagccaagttgagccagagagggtgaagaaaaaggagaatccgatccctcctgcaaaattgcataaagaacctccaccgcagcaccctgcaagttcttcaaatcctccattggtgcagtctccggtgcgcacaccatccccaatgcgagctcctcctgtgaagcctttgaagcaaccaaagccgaaggctaaggaccccaacaagagggatatgagtcttgaagagaaacacaagttggggttagggttgcagagtttgccgccagagaaaatggaacaggtggtgcagatcataaggaggaggaatggacatttgaagcaggatggggatgagatcgagctagacattgaggctgttgacacagagacactttgggaacttgatcgattggtgactaattacaagaagatggttagcaagattaagaggcaggcattgatgggcaacattgacaacaacaacaacgatgtgcagtctaacaaaggcaacggggaattgccttctagcgagaaggttgatggggggccagttgaagtgaagaagccaaagaaagtagaagcaggggacgaggatattgacattggggatgagatgccaacgagtatgttcccccctgtggagattgagaaagataaagatgttgttggaggccatgcaagtagtagttctagtagctctggcagttcaagcagtgattcgtcttcgtcaagcgattcggattcggggagttcctcagggagtgattctgaagcagacaacgggcactcgtagtagtcagtgggtttttggaactaatggtcatgtagatgaagaaaatgcttttgcttcattggcttcctttgagggcgtggctcgaatacatggacgagggattgtgaccgttgtttgttggttcgttttgggagtagcggtttgcattgtggcgctgtccactccaggatttgtggtgtgacatatttgtacaaacaatttcgggaaccgaagtaatcatcaaaacaatttgtaggccagaaagtagtagacttaaatgtggtgaaaattctaggatagaatcgttaaaaattaggaatagaactgagagttagtgtttttgagtttaccttgtacacattacaacagtaaatagatggaagatccttgaaaatttgcctttttttgtggattgtgcatcggaaattttgggatcgttaattacttgaaaagatcaatcatctttcattttgtatgttgtgtgccaagcacatgcttgaacaccaaggaaaaactacaatgggaataaaggcttcatgacaatcaataa

SEQ ID NO: 1104 - DNA, 1360 bp, Glycine max
cccgcgtccgtatcgattcagttaaaacacgtcgtgtcctaagactactggtactaactaggtaggttgtacagattacattacacttctcttcatctggagaaacaaatggctaggtctgcgaaagggcatcaagatgaattcgacgacgatgatgaagaagaactcttaactgctaataacacctcttccaaagtgaaggtggatgaacccagcacggggaagagggtgaacccacagcgttcaaagcattcagaaaccgagcaacgtagaaggagcaagattaacgaaaggtttcaggttctgagagatctcatacctcaaaatgatcaaaaaagagataaggcatccttcttgttggaggtcattgagtatattcagttcctacaggaaaaattacaaatttatgaacagacttatgaaggatggaatcaggagcccacgaaattaactccatggagaaataatcacgggcctgcagaaaatactacagatccttctcaagctactcaaaatgggtctgttgatgagaaaaataacaatgtctctccattgttgcccaaaaatgtacagaacccgatagagtctgacttctcaatgacaactattcagaagggcaacatccctggttcaactacagaaaagcagttcccgcttcccatgcaaatgcgattggacatggtttgatccaattgttagcagtggtatggcaacccaacatctgcaggaacctgtatctaatgttaacatgccttcccatacccagcctcaattgtggcttaataaacaaagcaagggcaactatattgttccccatagtgatacaatgaaggaacaggaggagctggtgattgaaagtggatcagatagcatctcaagtgcctattctcagggaattttagattctctcacgcaagcattgcactcttcgggcgtagatatgtcccagactaatgtctcagtgcaaattgatgtggggagacgagcaaattctgggttgatcccctctgcatatacttcaaagggccatgaaaaccaatttgtgagcaacccagcaatagcacgttccggggttgattactgcaatattgattctgaacaaagttcaaagcggctcagacaagaagcaagctagagattcctctcgtgttcattttgtcaggagtttcttctttctttctttttttgtcttcggatgagagtaagagcctaagagggattgggtggaccggttcatttttgccatgctggttagagccagataaaatgtaaatttcacgattctggttttgggactaagacattctgaaataaaatgttacatatgcttatgcctgcttctacttcaatcttccattcc

SEQ ID NO: 1105 - DNA, 1707 bp, Glycine max
  misc_feature (302)..(303): n is a, c, g, or t
  misc_feature (1688)..(1688): n is a, c, g, or t
  misc_feature (1707)..(1707): n is a, c, g, or t
tacggctgcgagaagacgacagaagggggtaggaaagagagtatgagtgagagtgtaggaaagagagtatgagtgagagtgtggctaacatttgtcttcatgttatgagggtatcctatattcctattttttatgatactggacacctagtatctatatacacctatagagagaaatgtaaatgtcacaggtctggtccatttggagatgaagtttccagagtgtttggtggtggtcttgtaccaggctcattgactttaattggtggtgatcctggtgtttcgagtcagctacgtaggccnncggccagagtactttgttgttgcagatagctgcaattattgcaaaaggtgacagtgatggtgaagcatgtccagttgtatatgtctctggtgaagagagtgttgagcaaattggtaacatcagctacgtaggccccccccccccagatatttatttatattcaagtaatgatgttgaggacatactgaagaaagtacagtatctctcccctggggctcttattgttgattcgatacaaactgtttatttaaaaggaataatgggaagtcctggagggattatgcaggtgaaagaatgtacttcagctttactgcgatttgcgaagaagacaaacatcccagttcttttgattggacatgtgacaaaatctggagacattgcaggacctcgtgtcttggagcatattgttgatgttgttttgtatatggaaggtgagaagtactcttctcatcgtatgcttcgagctgtgaaaaaccgatttggatctgctgatgagcttggggtttttgagatgtcacattcaggacttcaggctgtttcaaatgccagtgaaatgtttctcagtgaacagctcctggattcagaaatattagctggactagctgttgctgtaatcatggatgggtcccggacattccttattgaaattcaggcactttgtctttctggttcaacaggttcaaggcaagttaatgggatccaacaaaaaagagctgatatgatcatatctgttcttataaagcaagcaggtcttcgtctccaagaacatgctgtatttttgaatgttgttagtggattggcactgactgagactgcaggagatctagctatagcagcagcaatttgcagcagttgcttggaaatccctattccaaatgacattgcattcattggtgaaattggccttggtggtgagcttcgcatggttcctagaatggagaaaagggtatataccgttgcgaaattgggttacagaatgtgtatagtacccaaggtggctgaaaaagctttgggaaccgaaggtttagaaaagatggaagttgttggttgcaggaatctgaaagaggttattaacactgtattccttaatataatgaggaggtagtaattgctcagataacatatttgcgtcacgtaaagtatgactagttattttgtatatgtaaaaaatatataaaatatgtaatatatttaaattaacttttgttagaggctgagttcagtttcctttcttgtttctttttcccatgtaaatatattgaagagtagtcctcttcagtcttcacagaactatttgctctatgtgcttattaataataaataaaaaatgtagtgtgctttcaggctttcagctttaaaaaaaaaaaaaaaaaaaaaaaaaaaantaaaaaaaaaaaaaaaaan

SEQ ID NO: 1106 - DNA, 2085 bp, Glycine max
ttgattctcttctcgcccccgctgccgctctggtagtaatgcttttggtgagctctcaaatgaaaattctgcacgtgctgaaaagacgaaatattcatttatttgcgaatgcttctttatgaccgcaagagtgctcaacttgggccttttaaaagcattttctgacttcaaacacttagttcaggatatttctcggtgtgaagatgctctctgccacacttaaagccatgcaggagcggacacccacccctcaggcagaattggatataaatcggcttgagaaagaaatggagttgtactcacaggaaaaactttgttatgaggctcagatattgagggataacactcttattcaaaatgcgctttccttctaccgcttgatgattgtttggttggttggcttgctgggtggatttaagatgcctctaccaccaacttgcccaatggaatttgctaccatgcctgaacattttgtggaagatgccatggaacttttaatattttcagctacgtaggccaacgccctagatggagttgtgctggaagaatttatgaactttataattatgttcatggccagccctgaatttatcaaaaacccatatcttagagcaaagatggttgaagtattgaactgctggatgccccgcaggagcggctcaactgctacagccactctatttgaaggccaccaactctctcttgagtatcttgtgaggaatcttctgaaactctacgttgacattgagttcactggttctcacacacagttctatgacaagtttaacatccgccataatattgctgaactccttgaatacctgtggcaagtccctagtcatcgtaatgcttggagacagattgctaaagaggaggaaaagggtgtctatctgaatttcttaaactttctgattaatgatagtatttatcttcttgatgaaagtctgaacaaaattcttgagctaaaagaattggaggctgagatgtcaaatacggtcgagtgggagcgacgaccagttcaagagaggcaggagaggacccggttattccattctcaagaaaatattattcggatagatatgaagttggcaaacgaagatgtcagtatgcttgcatttacttcagagcagattactgctccattcctacttcccgagatggttgaaagagtggctagcatgctcaattactttctgctgcaattggtgggtcctcaaagaaaatcgcttagtctgaaggatcctgagaaatatgaatttcgtcctaagcatttgctaaaacagattgtgcacatatatgttcatctagctaggggtgacacgaattccatcttcccagctgccatctcaaaggatggccggtcatacaatgatcagttgtttagtgctggggcagatgtccttcacagaattggggaggatgggagaattatacaggaatttattcaacttggtgctaaagctaaagttgctgcttcagaggcaatggatgctgaagctactctaggggagataccagatgaattcctggatccaattcaatacactttgatgaaggatccagttatcttgccttcttcaaggatcacggttgatcgtcctgtcattcagaggcatcttcttagtgatagtactgacccattcaaccgttctcatcttactgcggatatgttgattcccgatgatgcgctaaaagctagaattgaggagtttgtcaggtctcaggaaatgaagaaacacttgagcctacagagtaccaaggccacaattcagactacaaatggggaaacaatgttggttgattaggaaaatatcttgagttccctaagttgtcgaatgaaatatggatttgtgccgtgtgcataaagttagatgttgaaccttaatttaatattttattcaatcatttttggaaaaaattgaagctatcattagaagtttaaggctgtaagatattcggaacagttaatgtaaagaagtcatcccattgaattctaccatatatatcttattctatacacagatatggaacaatcttgattttataatctatataacaagctattcacgctaaaaaaaaaaaaaa

SEQ ID NO: 1107 - DNA, 909 bp, Glycine max
gtggctagcatgctcaattactttctgctgcaattggtgggtcctcaaagaaaatcgcttagtctgaaggatcctgagaagtatgaatttcgtccaaagcatttgctaaaacagattgtgcacatatatgttcatctagccaggggtgacacgaattccatcttcccagctgccatctcaaaggatggtcgatcatccaatgatcagttgtttagtgctggggctgatgttcttcacagaattggcgaggatgggagaattatacaggaatttattcaacttggcgcaaaagctaaagttgctgcttcagaggccatggatactgaagccactctaggggagataccagatgaattccttgatccaattcaatacacattgatgaaggatccagttatcttgccttcttcaaggatcacggttgatcgtcctgtcattcagaggcatcttcttagtgatagtactaatccattcaaccgttctcatcttaccgcggatatgttgattcccgacgatgagctaaaagcaagaattgaggagtttgtcaggtctcaggaaatgaagaaacacttaagcctacagagcaccaaggccacaattcagactacaaatggggaaacaatgttgattgattaggaaaatatcttgagtttcctaagttgtcgaatgaaatatggattcgggccatgcgcataaagttagatgttgaaccttaacttaatcttattcaatcatttttggaaaaaattgaagctatcattagaattttaaggctgtaaagatatttggaacagttaatgtaaagaagtcatccattgaatactacgatatatcttattttatacagatatggaacaatcttgactcattaatgcccttaataccatgaacttaaaaattcatcttgac

SEQ ID NO: 1108 - DNA, 1517 bp, Glycine max
aaccgtcaaacccttaacctgaaacatagctttaagcttttaacagtcaaaacttactacaacccagatcaattgcagggactaatatggggataacaaaaattttaatcagttataatttttctgttcttgaaaggtaaagtaggacagtggtgtgaaattggtggaaagaaaaaacatcagtgatcttgagtaactaacaatccatccgtgtaaaacgtgattggatttgggtcagtaatttaatgtacgaattactcagctacgtaggccccccccccggaatggtgtggaacatagaagcacgttggcgtgaacacgatgatgaggtcaaagatagtgttgtttggagactccataacggagcaatcgatccgagagaatggatggggtgttcctcttgccaatgcctattctcgcagggctgatatacttgttcgtggttatggtggatacaacactaggtgggctatgttcttactgggccatctcttccctctggactcaactaaaccacctactgctaccacaattttctttggcgctaatgatgcagctttgttaggaagaaccagtgaaaggcaacatgtacctattgaagaattcaaagagaacctcagaaaatttgttcgacacttaaaggattgctcaccaactatggtaattgtgcttattactccacctccacttagcgaggaaggacgcctggcttacgcaagatccgtaaatggtgagaatgctaccaaaatacctgaaagaacaaatgaagtaactggtcaatatgcaaacgcctgtgttgaggtagcaaaggaaatgggcgtgtggtatatcaatctatggtccaaaatgcaagaaacggatggctggcaaacaaaatttttgagggatgggttgcacctgacaacagaaggaaatgcagtagtctacgaagaattgataaaggtgttcgatgaagcaggactttctgctgttaacatgccaatggatttccctcaccactcaaaaattgattccaaacatccagagagagctttccagcagcatgtgtgatatcccattgtaactgatacaggggatcaatcactgcaaaccaatataaggacagcaacacaaactcaagcaacaacacagactcaagctaccacaatggcagcaactcagactcaagagcaggatgaatatacagagactacaacagagcagagggtgcaattagtagctaggcccaagagagcagtcatcaaaccatcttacctgaaagactacgtctgagggtgagatgggaatttagctttgtaattttagctttgtaattttccttgcttgatgcttgtctggtagtgggagacaagccgaactttgattcccttatttcccttgcaagcaaaatatcccaattctgttagagacacttagtacaaatagctatgtggaataaatcaagcaaggcatgaatgagaattagctttccttgagttcttttaaaaaaaaaaaaaaaaaaaaaaaaaaaaaaaaaa

SEQ ID NO: 1109 - DNA, 1016 bp, Glycine max
ccacgcgtccgcggacgcgtgggcggacgcgtgggcgcgaacacgatgatgaggtcaaagatagtgttgtttggagactccatcacggagcaatcgatccgagagaatggatggggtgttcctcttgccaatgcctattctcgcagggctgatgtacttgttcgtggttatggtggatacaacactaggtgggctatgttcttactgggccatctcttccctctggactcaactaaaccacctactgctaccacaattttctttggcgctaatgatgcagctttgttaggaagaaccagtgaaaggcaacatgtacctattgaagaattcaaagagaacctcagaaaatttgttcgacacttaaaggattgctcaccaactatggtaattgtgcttattactccacctccacttagtgaggaaggacgcctggcatacgcaagatccgtatatggtgagaatgctactaaaatacctgaaagaacaaatgaagtaactggtcaatatgcaaatgcctgtgttgaggtagcaaaggaaatgggcgtgtggtatatcaatctatggtccaaaatgcaagaaaccgatggctggcaaacaaaatttttgtgggatggattgcacctgacaacagaaggaaatgcagtagtctacgaagaagtgataaatgtgttcaatgaagcagggctttctgctgataacatgccaatggatttccctcaccactcaaaaattgattccaaacatcctgagagagctttccagcagaatgtttgtgatatcccattgtgacactgctttggtctagtctagcaattttataccacgttctatttgatgatctagattttcttccagaactatattcgagtttaatgctttgatgaaaccacggtgaagaatattttttgtaatgacgtctgattcatgtagttcatctcatataataatggaataaaactattgttgttgtaatgctttaaaaaaaaaaaaaaaaaagaaaaaaaaaaaaaagaaag

SEQ ID NO: 1110 - DNA, 1974 bp, Glycine max
tttccggtccggattcccgggtcgacccacgcgtccgctcaaccactccatcactacaagaataacataacaagtcaccacataaaggagtcatctagagtcatattagaccataagacgataggagtttgacactagctttgaaagagtggaaagaaagtgaaagtggtccaagctagttagacaacaaaaaatggcatcggataaggtggtggaaacggtcatagcagggaactacgtggaaatggaaactgaagggaagcccaaggacgtaaaaaccaagctatcaagcttgttgtggcatggaggttctgtttatgatgcttggtttagctgtgcttctaaccaggtggcccaagtgctgcttacgttgccatactcattctcccaactgggaatgctttctggcatacttttccaaatcttctatggtttactcggaagttggacagcttacctcattagcattctctacgttgaatacagaacaagaaaagagagagaaaaagttaacttcagaaaccatgtcatccagtggtttgaagttcttgatggactcctcgggaagcactggagaaacgtgggtttggcctttaactgcacatttcttctgtttggatctgttatacaattgatagcttgtgcaagcaacatatattacataaatgacaacctggacaagaggacttggacttacatcttcggagcttgctgtgccaccactgtctttattccttcctttcacaactacagaatctggtcctttttgggcctccttatgaccacttacactgcttggtatctcacagttgcctctctccttcacggtcagatggaaggagttaagcattcgggtccgaccaaattggttctatattttacgggggccacaaacattctctacacattcgggggacatgctgttactgtggagataatgcacgcgatgtggaagcctcaaaagttcaaggccttatacttactggcaaccctgtatgtgctgacactgacgcttccatcggcagcagcagtgtattgggcatttggagacatgcttctaaatcactccaatgcttttgctctccttccaaaatcacccttccgtgacatggctgtcattttaatgctcatccaccagtttataacattcgggtttgcatgcaccccattatacttcgtgtgggagaaagcaatagggatgcacgagtgcaagagcctatgcaagcgtgcattggtgagattaccagtggtgatccccatatggttcttggccatcatattccccttctttggtcccatcaactccaccgttggctctctccttgtcagcttcaccgtttacatcatccccgccctcgcccacatcttcaccttcagatcaccctcttccagacagaatgcagtggaacaacctcccaaatttgttggaagatgggtgggaacctttattatcaacacttttgtggtggtgtgggtcctagtcgtaggatttggatttggagggtgggccagcatggtgaacttcatacgccagattgacacatttggactcttcacaaagtgttaccaatgccctccaccgcttctaccacctatgccgccgcatcagctcaacgccaccgcgccttccccacttcaccaccctcatcatgcacactaaggattgcactctttaaagttcaaattgagacccatctatgaagcggcaccctaggctctttggtgaaattattaacggtgcaatacatgtcattgttacgttgagaatgataaatttgtaatgtattggccgtgtcataattaaacatataatgtattcttcaattatccttctctttatagccttaaggtagttttgagcactttgtcatggtcagttatcataagaagaaaaaagaaaataaaacgataaggtttatgatgaaaaaaaaaaaaaaaaaaaaaaaaaaaaaccaattaattcaacatatttat

SEQ ID NO: 1111 - DNA, 1052 bp, Glycine max
  misc_feature (1047)..(1048): n is a, c, g, or t
gctgaagcggcaatggctgcgtcaaaatccagtcccctgccttggccgaccccccccccggtgaagcgtctcatctacaccgcgtctgttgtttctgcttcttctttgaaagaagatgggagtggtttcaaagatgcaatggatgaaacttgctggacccctctaaatgattccttggcatatgtatacccagatgatcctttttataaggactatacttattcaaagacactgtcggagaaacatgtgttgagctacgggaacgatgaaaatggtggaggattggaggtggtaacactcccttgtgggctagtgggaggcgacacccttcaatcttctacacccgttagcggagtagtttgtatcgcacagatcatgcaagatgcaagggcgtacatatcactcaagttcctaaagaaattgctggggaaaattcctcttgtacacattgatgatgtctgtgaagctcatattttctgcatggaaagtacctcgatcagtggaagattcttgtgtgcaagttcatatatttcattagaagagatggctaatcatttcgctcttcattatccagaattcaatgtgaaacaagaatatgaagatgagctgaagaaggatatcaagtgggcctcaacaaagctgtgtgacaaaggatttgtatacaaatatgacgccaagatgatattagatgattgtatcaaatgtgcaagaaggatgggtgatctctagtctccatctacacccatgcttgccatatctgcttgtaatacgatatatagcaggcgtctgcctcatttcttctcgttccctatccaaatgttattaccattgtttttgtcattttgttaaaaaataaactcagtttcaaatcaattagaaaagtgaattaactgagactaaaaaaaaaaaaagtagaaaaaagaaaaaggaaattgagcagggttgaaaacctggatcataatggtctaagactcagtttgatggaatttggctatgctaaacagatgaatcacaaaaacacttgttttgactcaaaaaaaaaaaaannaaag

SEQ ID NO: 1112 - DNA, 1405 bp, Glycine max
ggctcgaggggataaggacctatatactgctgcgagaagacgacagaaggggaaatctatttcagtttgaattttgaaagtgagtgtggcgtaccgtgtacgtatctgcagaaagtgaatgaatggtaatgggggaagaagggtgcaaggtatgtgttacaggaggcagtggttacattggttcctggctcatcaagaagctactggccaagggctacacagttcatgcaactctcagagacttgaagaatgagtcaaaggttggcctcttaaagagccttccacaatcagaaggaaaactggtgctgtttgaagctgatatttacaacccaaatgattttgaccttgcaattgaaggctgcaagtttgtgtttcatgttgctactcccatgatccatgaacctggctcccagtacaaggatactagtgaagcggcagttgctggaacaaaaagcattttcctgtcttgtgtgagagcagggacggtgaagcgtctcatctacaccgcgtctgttgtttctgcttctccattgaaagaagatgggagcggtttcaaagatgcaatggatgaaaattgctggacccctctcaatgattccttggcatatatataccgtgatgatccttttcttaagggctatacttattcaaagacactgtcggagagacatgtgctgagctacgggaacgaagaaaatggtggaggaatggaggtggtaacactcacttgtggactagtgggaggtgacacccttctatcttctacacccgctagcggagtagtttgtatcgctcagatcatgcagaatgaaagggcgtacatatcactcaagttcctaaaggaattgttggggaaaattcctcttgtacacgttgatgatgtctgtgaagctcatattttctgcatggaaagcacctcgatcagtggaagattcttgtgtgcaagttcatatatttcattagaagagatggctaatcattacgctcttcattatccagaattcaatgtgaaacaagaatatgaagatgggctgaagaaggatatcaagtgggcctcaacaaagctgtgtgacaaaggctttgtatacaaatatgacgccaagatgctattggatgattgtatcaaatgtgcaagaaggatgggtgatatctagtctccatctacacccttgattgctatatctgcttgtaatacaatatgcaccaggcgtctgcctcaatgtcgtcagggaaatccgtgtcaaaatcccccttatcaagtaagatatccaaatccaggattggggagttggtgactgaagttggggctgaaactatctcagtgatatcagattctgaggtttgtatgtttcggcataatagtccagtgctgtccaagtcgtatgctgacaaacagaaagggttt

SEQ ID NO: 1113 - DNA, 1153 bp, Glycine max
tgacatttgatcaacacccagattatggatacctgaagcgcttgttccgtgatttgttcaaaagagaaggatatgattccgactttatatttgactggaccatcctaaaatatcagcaggtgcaacagacaaataaacaaaatcaatcatctccttcaacagcagtgcctagcagtctagaaccagtagttatggaaaagcataaaggagtaaatgattcagctcatgttactgtaacaaaaatgttggccaatctcgaacgtccaagtgcacgtgcacgtgtgcagcctaagccatctaatgttcggaatctggatgccaagaatcatactgagaaacatggtgtgaacaatagtccatctacttcctctgccactcccaaatcctctacagtaaatgcctcgaaaccagaaaggcccgcaggaacctcaaaccttggtcgtgtatttgggagtaatgcccgtgtttcaagcagctggattccttcactacgccgaatttcttctgccaaatagtagaggaacattagactgtaatgaaaagcaagatacactgacatgacaagcttcctgcacatgacactattaccaaatgtattggcagatacattgttgtggagtgaggtggatgctctcaattttaagatttggaaagagggaaagtaagggagtatgaacgattttgaagaacgaggtatgctgtggatgtctacacacgaggttcagggtaatttggttggtgggccttaaaatgtgagagtttggcaggttttttctctcctaataatgatgaatcaaacatgtatgagtgaggggaagccacaatcattcttattgtacccgtctttttttttcctattcatcttttgtttttcaaacattcagtatacaaattcggttcttttcctttgtacagtttgttttgcatacaatataatcacattgtaccccaatcccaacaagggaattattcacaagtcaatcctattcatagctatttgaaactaatcggaaaaaaaaaaaaacttgttgaaaaaaaaaaaaaaaaaaaaataaaaaaaaaaacaaaaaaaaaaaaaaaaaacgaaaaataataaaaaaaaaaagaaaaaattaaaaaaaggggcgcccccccattagggggctgccccccc

SEQ ID NO: 1114 - DNA, 2064 bp, Glycine max
agcaacctacttttaaaaacaaaagggattccccgagccctcccttccatccttaatcatacatctattcctcgtctccatcattttgtgttgtgctcgctctgtctctctgtctctgtaaagcgcgtttcagcacccgttaccggcgaacatggagagggttatcggcgggaagtttaagattggtcggaaaatcggaagcggttcgttcggagaaatttatattgcatcaaatatggatacctctgagattgtcgccatcaagatggaaagcaagaagaccaaacatccacagctattgtatgaagcaaagttatatagtattcttcaaggagaaagtggtattccaagtatgaagtggtgtggcactgatggagacaataatgttctagttattgatcttctgggacggagtcttgaagacttttttgtctactgcgggaggaagttttcattaaaaacagttttgatgttggccgatcagatgctgacaagaatagagtgcatgcattccaagggatttttgcatagagacataaaaccagataacttccttatgggtcttgggaggaaatcaaatcaggtttatattattgatttcggactagcaaaaagatatagggaccctaacacaaacaaacatattccttacagagagaataaaagcttaacaggaactgcacgttatgcaagttgcaacactcacatgggaattgagcaaagtcgtcgggatgatttggagtctcttggctatgttcttatgtactttttaagaggaagccttccttggcagggtttgaaagctgctaccaaaaaggaaaaatatgacaatatctgtgagaagaaattatcaactcccattgggatgctttgcaagtcatatcctgcggagtttgctagttactttcactattgccaatctttaacatttgatcaacacccagattatggatacttgaagcgcttgttccgtgatttgttcaaaagagaaggatatgattctgactatatatttgactggaccatcctaaaatatcagcaggcgcaacagacaaagaaacaaaatcaatcatctccttcaactgcagtgcctagcagtctagagccagtagttgtggaaaaacataaaggagtcaatgattcagctcatgttactgtaacaaaaatgttggccaatctcgaacgtccaagtgcaccacgtgtgcagcctaagccatctaatgttcagaatctggatgccaagaatcatattgagaaacatggtgtgaacaatagtccatctacttcctctgccattcccaaatcctctacagaaaatgtctcaaaaccagaaaggcccacaggaacctcaaaccttggtcgtgtatttgggagtaatgctcgtgtttcaagcagctggattccttcgctacgccgaatttcttctgccaaatagtagaatatttggctgtgccactgccttggtgtgtttctcaaggcgtcacttagagctctttttctcttttgcaaatgtcatgtacatatgtaactccaccagaggaacattacactgacatgacaagcaagatacactgacatgacaagcttcctgcacatgacactattaccaaatgtattggcagatacattcttgttgagtgaggtggatgctctcattttttaagagttggaaagagggaaagggagtgtgaacgattttgaagatcgaggtatgctggtggatgtccacacgaggctcagggtaattggttggtgggccttaaaatgcgagagtttggcagggttacattttatttttatttttctaatgatgatgaatctaacatgtatgagtgaggggaagcattcttattgtacccgtcttttttttctattcatcttttgttttttcaaacattcactatacaaatttggttatcttttcctttgtacagttattttgtcagcattataatcacattgtaccccaatcccaacaagggaattattcacaagtcaatcccattcatagttatttgatactaaaaaaaaaaaaaaaaaaaaagggcggcccggacgcgtggg

SEQ ID NO: 1115 - DNA, 1575 bp, Glycine max
  misc_feature (1536)..(1536): n is a, c, g, or t
cgattgggtaccgggccccccctcgagtcagccacccacgcccccccccccccccctagaaaatgttaaggaaaccttgaaggaattagtcatgcttcctcttcagaggcctgaattgtttggcaaaggacagctggctaagccttgcaaaggaatattgctttttggccctcctggcacaggaaaaacaatgcttgcaaaggctgtagcaactgaagctggagcaaattttattaacatttcaatgtccagcattacgtccaagtggtttggtgaaggagaaaaatatgtcaaagcagtcttttctctggccagcaaaattgctccaagtgttatttttgttgatgaggttgatagtatgttaggaagacgtgaaaatcctggtgagcatgaggctatgcgtaaaatgaagaatgaattcatggttaattgggatggtttgcgaacaaaagataaagagcgtatacttgttcttgcggctacaaatagaccttttgatcttgatgaggctgttattaggagacttccacgaagattgatggttaatttgcccgatgctccaaacagagaaaaaattgttagtgttattttagcaaaagaagaattggcacctgatgttgatttcgaagcaatagcaaatatgactgatggatattctgggagtgacctaaagaatctatgtgtcacagcagctcactgtccaataagagagatcttggagaaggaaaagaaggagagaagcttagcattgactgagaaccaaccattacctcagttgtgtagcagtaccgacattcgtcccttaaagatggaagattttatatatgcacatgagcaggtttgtgttagtgtatcatcggagtcaacaaacatgaatgaactactccaatggaacgacctttacggagaaggtggatcaagaaaaatgagatctttgagctatttcatgtaaagcttcctgtatagcatttattggttaggcaattcttctatcacctaaatggtgtgtgtaacaaggtcagaagtgaccaattgatgtgaaaatcccatcattggcaatgcctttattgtgtcgtaggttttccctttttcccctccctccaaccctcacgatctgcctccaatttttttcaaagtataatttgtttgacaaattcactgaggtcaagcttaacgttaggtccccttctgacccaactctgctctcggcttgtaaatacccagttaatttttaaaaacaagtataatttttgctaattccactaacaaatcgtatgacattgtatttgtgctttgcagtgtaaaacccccatccctgggtaaaaaagtgtatatctgaaaattatatgcacacttttctgcacatccatcatggaaagtgaatatgctgtctttgttcaatttgattttaaattaccttgatcattgcttttctattgtcttctggaaatggaaagtttagttatactagagttcgttgattgagttcatggccgaatatcctactcttattagaaatgatcactttcccgcagnggggtctgttctgtctgtccatgaaattatcattgatga

SEQ ID NO: 1116 - DNA, 1618 bp, Glycine max
gtgtttgtcatttttgggcatgtcgataatcgcaaccctaaaatttaagcaatgaaatatatagtgccctatgcgcaattcggctcgagattcatctgaagcttctatcaaagattccaagcttgtgatatctgcaaaaagcattaattatgggcttaacattctacagggcattcaaaatgagaacaaaaacttaaaaaaatcactgaaggatgtggttactgagaatgaatttgagaaaaaacttcttgctgatgttattccgccaaccgatattggggtcacatttgatgatattggagctttagaaaatgtgaaggacaccttgaaggaattggttatgcttcctcttcagaggcctgagttgttttgcaaaggacagctggccaagccttgcaagggaatattgctttttgggccccctggcacaggaaaaacaatgcttgcaaaggctgtagcaactgaagctggagcaaatttcattaacatttcaatgtccagcattacttcaaagtggtttggtgaaggagagaagtatgtcaaagctgtcttttctctagccagcaaaattgctccaagtgttatttttgttgacgaggttgatagtatgctagggagacgtgaaaaccctagtgagcatgaggctatgcgaaaaatgaaaaatgagtttatggtaaattgggatggtctgcgtacaaaagataaagagcgtgtacttgttcttgctgctacaaacaggccttttgatcttgatgaggctgttattaggaggcttcctcgacgattgatggttaatttgccagatgctccaaacagagaaaaaattctcagagtcattttagtgaaagaagatttggcacctgacgttgattttgaagcaatagctaatatgactgatggatattctgggagtgacctaaagaatctgtgtgtcacagcagctcactgtccaatacgagagatcttggagaaggaaaagaaggagagaagcttagctttgtctgagagcaaacctttacctggattgtgtggcagtggtgacattcgtcccttaaagatggatgattttagatatgcacatgagcaggtgtgtgcaagcgtgtcatcagagtcaacaaatatgaatgagctactccaatggaatgacctctatggagaaggaggatcaagaaaaatgagatctctgagctatttcatgtaaagctctctctctgtatagcatttcttgcttaggctattcttatatcaccaactattgatgtggaaatcccatcattggttctgcctctctctattgtattatatcatcataggttttctttcccctttttccaaccctcaccatcctctccaaattttttcacatattagtagaatttgttgacaatttcacttgagataaaaaaaagtttaatttaggttccctactgatccaactctccctccccttattcttgcttgtatatatcaagttttttttctcgtaaaaataaaataaatatttatttttattaatttcttgtgtaacctgtggctgaatggcattgtatttctgattttcagtttgtggtgtgtatgaatatatatgaacgctactcaatttttctaattgtattgt

SEQ ID NO: 1117 - DNA, 1310 bp, Glycine max
  misc_feature (1092)..(1092): n is a, c, g, or t
  misc_feature (1107)..(1107): n is a, c, g, or t
  misc_feature (1114)..(1114): n is a, c, g, or t
  misc_feature (1116)..(1116): n is a, c, g, or t
  misc_feature (1118)..(1118): n is a, c, g, or t
  misc_feature (1121)..(1121): n is a, c, g, or t
  misc_feature (1138)..(1138): n is a, c, g, or t
  misc_feature (1152)..(1152): n is a, c, g, or t
ctcgagccgaatcggctcgagcaaaagttatgaagcaacttagtcgcctttttccaaacaaagtgaccatacagttgcctcaggacgaggctttactctctgactggaagcagcagttagattgtgacattgaaactatgaaagctcagtccaatgttgtcagcattcgcttagttcttggcagaattggattggattgccctgaccttgagactctctgcatcaaagaccacaccctaacgactgagagtgtggagaagatcattggatgggctataagttaccattttatgcattcatctgaagcttcaatcagagattctaagcttgtaatatctgcagaaagcattaagtatggacataatattctacagggcattcaaaatgagaacaagaacatgaaaaaatcacttaaggacgtggttactgagaatgaatttgagaaaaaactacttactgatgttattccaccgactgatattggggtcacatttgacgatattggagctttagaaaatgttaaggaaaccttgaaggaattggtcatgcttcctcttcaaaggcctgaattgtttggcaaaggacagctggccaagccttgcaagggaatattgctttttggcccccctggcacaggaaaaacaatgcttgcaaaggctgtggcaactgaagctggagcaaattttattaacatttcaatgtccagcattacatccaagtggtttggtgaaggagaaaaatatgtcaaagcagtcttttctctggccagcaaaattgctccaagtgttatttttgttgatgaggttgatagtatgttaggaagacgtgaaaatcctggtgaacatgaggctatgcgtaaaatgaagaatgaattcatggttaattgggatggtttgagaacaaaagataaagagcgtatacttgttcttgctgctacaaatagaccttttgatcttgatgaggctgttattaggagacttccacgaagattgatggtttattttgccagatgcttccaaatggagagaaaaatggccagagttttttttgccaaagaagatttggcacctgatgttgattttgaagcaattnagcaaatattgaacnttggaantngnggnattaatttttttccaangggggaaaaaaggntttggaaaccccccttttaaaaaaaaggaaaaaattttccctttccttttggtttgggttttcccaaatccaaaaagggccccaagggcccctttttcccaaaaaaatttgtgggtttttccccccccccacaaaaaatttttttaaaaaaaaagggg

SEQ ID NO: 1118 - DNA, 1249 bp, Glycine max
ccacgcgtccgaaaaaaagcaaactcatttatttttcttttttagccctattggtacccacgcgtccgtacggctgcgagaagacgacagaagggggaaaaaaggaagaggaacgaagcaatcgcaagtcgtctgttctgtcccgcgggagcagacgacctgtcttcatcgccaaacaacctcaaaaacattcatcaacgttcactattaatccatccatcattaagtaagaaaataaggttcgatttttttatctttgttttgcttctgatccatcatggaggtgccgagttcctgggatgcccttcgcaaacaggcaagaaaacttgaagctcagttggatgagcagatgaattcttatcgtaaattggtttctaataatgtttctacaaaagctgacgctgcagagagtgatctagagtcttggattgagcgtttactaaaacaactccaacaagtaaacacacagatgcaagcttgggtatcatctggtggttcagaaatggtttctcatactttgactagacaccaagaaattcttcaagatctcacccaggagttttatcgtcttcgctcaagtcttaaagctaagcaagaacatgcttcactgctagaagattttaaagaatttgatcgaacaagattagatttggaacaagtagactctgaacagcatgcactcctaaaagaacgcacatctatcagccgaaatacaggacatatggacaatgtaatttcacaagcacaagcaacactaggagcacttgtcttccaacgttcgacatttggtggtatcaattcaaagctcggcaatgtgagcagtcgcctcccaacggtaaatagcatactttcagcaataaagagaaaaaagtcaatggataccatcatactttcccttgttgcagccgtatgcacatttctcattttcatctactggctatccaagtgaagaagttgttgtttttgttgggtgctccaacttttgtatgttgtctattgagcttagtagctcgtgccgtgccgaaacacattttgcaagtagtatgttttttaatccattgtttatccatgtaacagaaagcaataccgagtaaagatcagaaattacgtagttccatttcttggttccggtttcatatatcataacttgtagtgagtgaaaagaatatatatattttttacggtgtgtttgactcaatttattttgaagaattatttttatatcagtttgttgaagtagtttttgacc

SEQ ID NO: 1119 - DNA, 946 bp, Glycine max
aaagaaaaaagtagggccaagaattggtttgtagttttcatcattactccgatgaaataaagttactcatataccattagactggtcaaagctcgtgagtcacttgtctttgtttcttgttgagtaacaactcaacctgtgacagtttcaaatgagtgaagcaacggcaagattcgaacggcgggtcctggtggcggtggacgaaggcgaggagagcatgtacgctctttcttggagcctcaggaacgtaattttccaaaattccagagatacccttatccttctttacgtcaagccccctcatgccgtttattcccccttagattccactggcaggatagatgatcctgaaactccaggatatttgttttcgccggacataagtgcggccatcgagaagtacagccaagaagtggcagattgcgtgttagagaaagccaagaaattgtgtaaagatctccaaaacgtcatggtggaaacgcgggtagaaagtggagacccaagggatgtgatctgtgatatgtctcaaaagttaggtgctgacttgttaatcatgggtagccacggctatggagttgtaaagagggctttccttggaagtgtgagcaattactgctcacagaacgtgaagtgcccagttttgatagtcaagaagccaaaaccatctgctggtgctggaaaatgatctgccacttttgttctgtttttgggctttctatgtagaattttgttttgggtatgtgttgtttttccctatggcgtagctagttcttctaggaggatcttgtcatgtggttgatattaacgcaggaagtacaggctttcttttcattgtggatgtccaagtgcatagagttaaactaagcctaatgcagtttgagttagaaaattattgaggtaacttcagataaataaataagcatattaactcgtacgtaaaaaaaaa

SEQ ID NO: 1120 - DNA, 1545 bp, Glycine max
  misc_feature (1502)..(1503): n is a, c, g, or t
tcgagtcagctacgtaggccccccccccccccatatatgcatgactagtcctagaaagatttgaagtacggttattacttgttgatgtgcaatctaaaataatttcaatgtttctggttatttgaaatggtgaaggttcacacctgcgttcttaggtaacataattatataaattagttgcatcttttcctgcatttgtacttcttagttatcactggttattatccagaaaatactaaaatgaagaggattgattggttatttttctgaagccagtttctacgtaggagcaccactatcgctgtgtggtggttgtgcagtagaggtgtttaacttcctagcaaatctagtgactgagttcattgtcaagggcaagaatcagatgcaagtaacagagttagaattctggcaagttgtgaatcctctcttcaagcttgggtggaagcattggattggtgctgctgttttcttatggggttggattcatcaacaccagtgccataagattcttgtatgcatcattttcttgattgacatctaaatctttggttttggtcagtgaaacgtgaatatcaaatggtttgagaccatgacttcataatttatagttgctacctctttttatcttcacagtttctaattgttatatattttcatctgactgatattatattatactaatggtaccaagtcacaatagatggtgaatttgctcacaaaaattaaatgcatatgattttctgcatttactttgcatgtggaactttgtttgacattttgtaaatatatatatctacatgcagtgattctttaaaatgaaatgttgaagtttaaagcaaatatgtcatttttgtaatgaggtggattaggttatcttaacatttttgcaatcaattatcgtgagactgtcttgagttttataattttggcagggttctctacgacattcaagacaagcagatgaatatgtaattcctcatggtgattggtttgaaattgtctcctctccacattatctgtctgaaatcgttatatacgctagttttgtggtagctactggaggatccaacctaacaatctggctgctttttgtttttgtggtggcaaatctgtcatttgcagctgtggaaacacatggctggtatcgtcagaaatttgaagattatccaagtagtcgctttgctataattccatttattctgtgagattgtgaagcaatgtgtaattatcacaattgatcacggcaaagaacttcattatttcccaaggtgtacttgtttagattaagctattttagtttagagaatcttatacttcaaatacctaaacctaaataatatttggctttgtttttggtgtaaaaatccaaacattcagagtcagtcgtgtattatttacccacctaaataatacctaaaatagttatgattgcattcattatggagattactgtcgtgtattatttacccaccaaaataatacctaaaatagttatgattgcnnaaaaaaaaaaaaaaaaaaaaaaaaaaaaaaaaaaaaaaaaaa

SEQ ID NO: 1121 - DNA, 1232 bp, Glycine max
  misc_feature (1)..(3): n is a, c, g, or t
nnnttggtagtgtctccttccggcctcaggatgatcgtttcatgatcaagacactgcgaagatctgaagtcaaggtccttctaagaatgcttccagactatcatcatcatgtgaagtcatatgaaaatacacttatcacaaaattttttggtctgcacaggattaaaccttcaagtggtcaaaagtttcgctttgttgtaatgggaaatatgttctgcacagacttaaggatccatcggaggtttgatttaaaaggttcttcccttggaagatcatcagacaagatagaaattgatgagagtactacgctcaaagatttggatctgaactacagcttctacctggaaccatcttggcgagagtctttactaaagcagattgaaatagacagcaaatttttggaagcacagcacattatggattacagccttcttctaggtgttcactatagagctccccagcatctacgttctcacgtttcatacaaccaaagtagaagtgtggatggattagcaatgcttgcagaggaagatcctctagaggatgaagtattctatccgcaaggccttgttctagttcctcgaggaggagatgatgacagtgttgttgttggctcacacatgaggggtagccggttgcgagcttcatctgctggtgatgaggaggtggatctacttctacctggtacagcaagactccaaatacagcttggtgtgaacatgccatcaagggcagaacagatttcaggaaaacaaaaacaagaaaagcaaatgtttcatgaagtgtacgatgtggtgctgtaccttggtatcattgacatattgcaggactacaacatgactaagaggattgaacatgcttataaatctcttcagtttgattcattgtctatctcagctgtggaccctacgttctattcgcatcgcttcctggaatttattcagaaggtgtttccaccaaatgcaacgacaggttaatcaagataattttggggttatatttaaccagtaagtttatttagaaagtgtgaatattgcacttttcatgcttgctccagaatttttatagtaggtggccacgtgggcaccttgttgatggtggtaataggaatcaagtgaataatgaggtaaatagatttatctcatgtaaagtgagtaaatatataataaaaaaaaagtgttatatttataattgacttaagttaaagtttttaataatcttaaccaattttc

SEQ ID NO: 1122 - DNA, 2774 bp, Glycine max
ttcactttcaactttcaagtcaaaaggacaatagtttcaaggatcaaactcttggtaagatttcctatatgtaacccttcttgtcttctagctgttgagaatttgggatagttataactctataaggaaatactccctttgatcattatgcatgtctggccctgtggccacagttgataatttggatggagcactttcttgtgcagagagaacaaaatctcttgatgccatttctgaaatagactgtttatctatatttacaatcggtgaagctgctcattcctctgaagttgctggatttagagtaggggaactctcacttcctaatggagaatcatattctgggtcctttcttggtaacattccagagggtcagggtaagtatgtatggtcagatggttgtgtatatgagggtgagtggagacgagggatgagaaatggatatgggaaaatacaatggccttctggagtaatgtatgagggcgagttctcaggtggctatatccatggtacaggagcatatattggccctgatagtctgacctacaaaggccggtggcgattaaatcttaaacatgggtttgggttatcaagtttatccaaatggagatatctttgaaggctcttggattcaaggaacacctgaggggccaggcaagtatacctgggccaacggaaatgtatatttgggaaatatgaaaggtgggagaatgtcaggaaaaggaactctcacctgggttagtggggactcatttgaaggaagctggttaaatggcatgatgcatgggcttggggcatatacatggagtgatggaggctgctatgttgggacttggacacggggtctaaaagatggcaaaggaaccttctatccgagaggtagctgtcttccatctgcacaagaaatatatctcaatgcattgagaaaaagagggctgttgccagatttgagaaaacagaaacagatacatattcatcatgctgcttcagttgatatgggagatgtcaaggttggtgaaagtcagagatcaaatcgtgtttcatctgataagctcgccaaaggaaacttgttaaatctggaacaatctcgtagcaaaaatatttctctcgaaaggcgctggagtcttgaggtatctattgagaaagtgattgggcatgattcaagattaggatcaacagattctgtagcagaaaatggagataaagtcccaattttggaacgcgagtatatgcaaggtgtgttaataagtgaattagttttaaataatagtttttcatcaatgtctagaagggcaaaacagctccaaaaaaaacttgccaaagaaattaaaagacctggtgaagcaatcattaaaggtcaccggagctatgatctgatgcttagtttgcagctcggaattcggcttcctgggccccccccccccccaatacagagacgagaagttcgagcatcagattttggtcctagagcaagcttttggatgaattttcctaaagaaggttctcaattgacacctcctcatcaatcagagggttttaaatggaaagattactgccctatggtgttcagaaatttgagagagttgttcaagattgatgctgctgactatatgatgtccatttgtggaaatgatgctctgagggaactttcttctccagggaaaagtggtagtgtctttttcctgtctcaagatgatcgattcatgattaagacactgcgaagatctgaagtgaaggttcttctaagaatgcttccagactatcatcaccatgtgaagacatatgataatacacttatcacaaaattttttggtctgcacaggattattccttcgagtggtcaaaagtttcgctttgtcgtgatgggaaatatgttctgcacagaattaaggatccataggagatatgatttgaaaggttcatctcttggacgttcttcggacaagatagaaattgatgaaaacaccactcttaaagatttggatctgaactactgcttttacttggaaccatcttggcgggagtctttattgaagcagattgagattgacagcaagttcttggaattacaacagataatggattacagcctccttctaggtgttcattatcgagctccccagcagttgcatccatacaaccaaagtagaaatgcagatggattggcaattcttgcagaggaagaccctctagaggatgaaggatccaactatccacaaggccttgttctggtccctcgaggtggggatgatgatagtgttgttgtagggtcacacattaggggtagcagattgcgagctgctggggatgaggaggtggatctacttctacccggtacagcaagactacaaatccagctaggtgtgaacatgcctgctagggcagagcagattcctggaaaagaggaagttcaaatgttccatgaggcttacgatgttgtactttaccttggtataattgacatattgcaagagtacaacatgactaagaagattgaacatgcatacaaatctattcagtttgattcattatctatctcggcggtggacccaacattctactcgcgtcgcttcctggattttattcagaaaatgttcccaccacatgaaatggcaagataaggtttgggggttaaattcaaccagttggtttattcagaaagtgtgtacattgtcacattgcctccttttgtgcatgctgtataattgacttgaatatgtttagattttatataaatatgctaaatggtcttttctattttcaaaaaaaaaaaa

SEQ ID NO: 1123 - DNA, 2352 bp, Glycine max
  misc_feature (2334)..(2335): n is a, c, g, or t
gctagcaattacatttggcggctcgggcagataaaaagcagagtgggatcagcaaatccatgtttcattcactcttctaaccaaacccgaaaacagagtacaagatttaaacacgcgaacaccgtgtttgaaaatcgaacataagagaagagggcgcaatcgttagggtttccaagatggaaggcatggttgatcacctggctttcgagcggaacaattcgcagttcgatgtcgacgagatgaagatcgtttgggccggttctcgtcacgcttttgaagtatctgacaaaatggctcgcctcgttgccagcgatccggcattcagaaaggatgatagagttgtgcttgataggaaggctttatttaagaacactttgaggaaagcagcttatgcatggaaaaggattattgagctccgtctcagtgaagaggaagctgctatgctcagatcctttgtggaccaacctgcttttacggatctacattggggaatgtttgttcctgctatcaaaggacaaggaactgaggaacagcagaagaagtggttgcctttggctcataagatgcaaataattggttgttatgcccaaactgaacttggccatggatctaatgttcaagggcttgaaacaactgcaacctttgatcccagaacagacgagtttgtaattcatagccccacattgacttcaagcaaatggtggcctggtggattgggtaaagtgtcaacacatgccgtggtttatgcccgactaattactgatggccaagatcatggagtgcatggtttcattgtccagctgcggagcctggatgatcacttacctcttccaggcataactgttggtgatattggaatgaaatttggaaatggagcatataactccatggataatgggatgctaaggtttgaccatgtacggattccaagaaatcaaatgttaatgagggtttcacaggtaacaagggaaggaaaatatgtacaatccagtgttccacgacaattagtctatggtactatggtatatgtaagacaaacaattgtatctgatgcgtcagttgctttgtcgcgagcagtttgcattgctacaagatatagtgctgttcgaagacagtttgggtcaaaagagggaggtcttgagacacaggtgattgattataaaacgcagcaagctaggctcttccctttgttagcttctgcctatgccttcagatttgttggtgaatggttgaaatggctttatatggatgtgatgaaaagattgcaagccagtgatttttcaaccttacctgaggctcatgcgtgcactgcagggttgaagtccttgactacttcagcaactgctgatggaattgaggaatgccgcaaactatgtggtggccatggttacctttgcagcagtggtctccctgagttatttgcagtctacattcctacctgcacatatgaaggagacaacactgtgctgcttttacaggtggctaggcatctcatcaagactatttctcagttgggctccagaaacaagcctgttggtacaacatcttacattggacgagtggaacagcttatgcaatatcgttctgatgttcagaaagtggaggattggctgaagcctaatgcagtgttgggagcatttgaagctagggctgctaagaaggtggttgcttgtgctcaaaatctcagcaagtttaccaatcccgaagaaggtttccaagaactctcagtcgatctagttgaggcagctgttgctcattgccagttaattgttgtttccaaatttattgagaagttgcagcaagatatccctggaaagggagtgaaacagcaattagaacttctttgtagcatttacgctttgtttcttcttcacaagcatttgggtgattttcttgcaactggctgcatcactcccaaacagggttcccttgcaaatgagctgctgaggtccttgtattcacaggttcgtcctaatgcaattgcacttgttgatgcgtttaactacactgatcactaccttggttcggttcttggtcgctatgatggagatgtgtatccaaagctgtacgaggaggcatggaaggatccattgaatgattcagttgtgccagatggcttccaagaatatattcgaccaatgctaaagcaacaacttcgtaatgctagactctaaattacttttttataactgcactgttgatactggagaaagttatgtattgctttcaatttaaaagacagtaataaagttctacgaaagggaaacaaatttgacatcaactttgacaaaattgattatgaatagaattgattttggttaaagttgattttannaaaaaaaaaaaaaaaaa

SEQ ID NO: 1124 - DNA, 952 bp, Glycine max
  misc_feature (21)..(21): n is a, c, g, or t
ccacgcgtccgatgacatccncacactggatcgaagagaataattgaaagcacgggagcagcggaacacaggaataatggccacgcgtagattgaggcattgatgacacacagctgtaaaccagctttggcgcatgtgagcctctgtcctctgtcccctgcccccaacacccaacaacaaataaaactcatactcactctctctactctattcccatggcttctcttctcaccctcgctctgttactcttctgcattgcctttacctcccacgttgccgtgcaggcgcacatggaggacacggccttcaacctcatgtcggacgccttggagtggcccaccacaatgtcgctctacgacgaagacgacgcccaagaggatgtcgagaacgcttacagtcggagatcgttgttctggcggcggatgaagtactacatctcctacggtgctctttctgctaaccgaattccttgcccgcctcgttctggtagatcttactacacccacaactgctacagggcacgaggccccgttcacccttactccagaggatgctctgccatcacgcgctgccggagatgagtttgatgtgagttccgatctgatcacacgcttcagatcggagatggaaataaaaaaaccgagtaccgtttatggtggttttgttttgttttgttttattggtgtactagatttatattgtggatttaaggcgtcgttagttgtgctaagcaagtcaagtcaagtgaaagtgtcgtgtttgagttaacggtttttggggattcttcacttgcatcgactcgttgcgctgcgcaaatgaatctgcttgctttttgtgttacttcgtcatttattcgtttgtataaacccaacggtttctttttcttggtgttcagagcactttcagtttcaaaaaaaaaaaaaaaaaaaattttaaaaatattgttgtaaaa

SEQ ID NO: 1125 - DNA, 825 bp, Glycine max
gcgcatgtgaccccctgtcccctgtcccctgtcccaactcccgctgcgacacgacgactggagcgcatacctgtgaccgtgttgattaacttcacacttcactctctagtcatggcttcttctcttcctcttctcaaccttcttaccctcgctctgtcactactcttctgcattgccttaacttccgaggttggcgtgcaggcgcagatggaggagacaggcttgaacctcatgtcggaggcgttggagtggccaaccgcaatgtcgctctacgacgaagacagcgaagaagaggatgtccagaacggttacagtcggagatcgttgttctggcggaggatgaagtactacatctcctacggcgctctttccgcgaaccgaatcccgtgcccacctcgttctggtagatcttactacacccacaactgctacagggcccgaggccccgttcacccttactccagaggctgctctgtcatcacgcgctgccggagatgagtgagttcggatctgatcacacgcgcgcctcacgcttcagatcgcaaataaaaaaaaccaccgtctagggtcttgttttgttagtgtactagatttattgtctatttaagcaagtcaaaagtgtcgtgtttcagtaacggttctcgttgcgctgcgctattttcatgaaccatctgtttgcttgctttgtgtgttactttatcatattcattcctttgtataaactcgaatgaactctatacgtggatgcgcaaatctgcttcctatctttgtattcccatcgcttaaaaaaaaagacgttgcaaattatgtatcctatctcatttc

SEQ ID NO: 1126 - DNA, 2580 bp, Glycine max
tcgtacgtcagctcggaattcggctcgcggttcatatttcaccagaacaggcagaagctctaagacatgctcctggagtgaaatctgttgagagggactggaaagtgaggagacttacaacacataccccacaatttttagggcttccaactggggtttggccaacaggaggtggctttgatcgggctggagaagacattgtgattggacttgtggacacagggatctatcctcagcacccaagttttgcaactcataattctgagccatatgggccagttccaaagctacagagggaaaatgtgaagctgatccagaaactaaaagaagttactgtaatgggaagattgttggagcacaacactttgctcatgctgcaatagctgctgggtcatttaacccttcaattgactttgcttctcctcttgatggagatggacatggaagtcatacagcctctattgcggccggaaataatggaattcctgtgaggatgaatggccatgaattcgggagagcgagtgggatggctcctcgtgctaggattgctgtctacaaggcaatttatagactgtttggagggtttgttgcagatgtagttgctgcaattgatcaggctgtatatgatggagtggatatactcaacctttcagttggacccgacagtcctccagcagccaccaaaactacatttttgaacccttttgatgccacacttcttggagccgtgaaagctggtgtatttgttgcacaggctgctggaaatcatggtcctcttcctaagacattggtttcatatagtccatggatagcatctgtagcagctgcaattgatgatcgtagatataaaaatcatttgatccttggaaatggaaaaaccttagcaggaattgggttatcaccttccacacatttaaacgaaacatacacattggttgccgcaaatgatgtgttgctagattcttcacttatgaagtatagccccacggattgccagagaccagaacttttaaataagaatttaataaagggaaatattcttctctgtggatattccttcaactttgttgttggcactgcatcgatcaagaaagtctcagaaacagcaaaggcccttggtgcagttggatttgttctttgtgttgaaaacatttccctaggaacaaaatttaatccagttcctgttggccttcctgggattctcatcatagatgtcagcaattcaaaggaactgatagattattataatatcactacaccaagagactggactgggcgtgtaaagagtttcgaaggtaaaggtaaaatcggtgatggtttgatgcctattctgcataaatctgcaccacaggtagcattattctctgctcgagggccaaatataaaggacttcagcttccaagaggcagatcttctcaaaccagatatattagctcctggttcattgatttgggctgcttggtgtccaaatggaactgatgagccaaattatgttggtgaagcgtttgccatgatatctggaaccagcatggctgcaccacatatagctggaattgctgctcttataaagcagaagcatcctcattggagccctgcagccattaaatcagctttgatgactacatcaacgactctagacagagcaggggatcctcttctagcccagcaaacttctgaatcagaagctatgaggctggtcaaagctactccttttgattatgggagtggtcatgttgatccaactgctgcattggaccctgggctcatctttgatgcagggtacgaggattatataggcttcttgtgcacaacacctagcattgatgttcatgagataaggaactacactcacaccccatgtaacacctccatgggcaaaccatcaaatttaaacaccccatcaataacaatttcccatcttgtgagaactcaagttgtcacgcgcacggtcacaaatgttgccgaggaagaaacctatgtgatcacagccagaatggaaccggctgttgccattgaagtcaaccctccagcaatgactatcaaagcaggcgcatcgcgccagtttttggtgtcacttacagtgcgctcggtgacaggaaggtatagttttggagaggttttgatgaaagggagcagagggcacaaggtgaggattcctgttctggccaacggataccgacgatagatagcatagtgaagtttggtcagcaaaggaaaggaaagcaagtgctgcttgtaatattctttgtaacctgtggggaataaggtatggcgctacatttattcgtctaaatatataaatatgtaatgttaaattatgaataggtgtaaaggtaagcaggtgtaaggggtcactcctagtttcttccacatatagttttgcttatattgtctagtaattttgttggaatgcttcatcacaagttttaacctgtatctgccccattccccaaaagttcgttgcttacagcatgtgtaatacatgaaataatttgtataacataaggtatcaatggcacagcgtaaatcctaccaaagctattggctagttactcgagactagttctctcaaaaaaaaaa

SEQ ID NO: 1127 - DNA, 2365 bp, Glycine max
  misc_feature (644)..(644): n is a, c, g, or t
cagaaactcttagacatgctcctggggtgaaatctgttgagagggactggaaagtgaagaggctcacaacacacaccccacaatttttggggcttccaactggggtgtggccaacaggaggtggctatgagagggctggagaagacattgtgattggatttgtggactctgggatctaccctcaccatccaagttttactactcataatactgaaccgtatggtccagtttcgaggtatagaggaaaatgtgaagttgatcctgacactaaaagaagtttctgtaatgggaaaattattggagcacaacattttgctcaagctgcaatagctgctggggcattcaacccttcaatgattttgattcacctcttgatggagatgggcatgggagtcatacagcctctattgcagctggaagaaatggaattcctgtgaggatgcatggacatgaatttgggaaagcaagtggaatggctccccgtgccaggattgcagtgtacaaagcactctatagactctttggaggatttattgcagatgtagttgctgcaattgatcaggctgtgcatgatggggtggatatactcagcctttcagttggaccaaatagtcctccatcaaacaccaaaactacatttttgnaatccttttgatgctacactccctggggcagtcggccctgcggccggggttgcacaggctgcgggaaatggtggtccttttcctaagtcattagtttcatatagtccatggatagcaactgtagcagcagcaattgatgatcgtagatataaaaaccatctgatcctcggaaatggaaaaatcttagccggacttggattgtcaccttctacacgtttaaaccaaacatacacattggttgctgcaactgatgtgcttctagattcttcagttacgaagtacagccccactgattgccagagaccacaacttttaaataagaacttgataaagggaaatattcttctctgtggctattctttcaattttgttattggttctgcatcaataaagcaagtctcagaaacagcaaaggcccttggagcagttggatttgttctttgtgttgaaaatgtttcccctggaacaaaatttgatcccgtccctgttggcattcctgggattcttatcacagatgccagcaaatcaaaggaactgatagattattataatatctccacaccaagagactggactggaagggtgaagactttcgaaggtacaggtaaaattgaggacggtttgatgcctattctccataaatctgcaccacaagtagcaatgttttcggctagaggaccaaatataaaggactttagcttccaagaggcagatcttctcaaaccagatatattagctcctggttcattgatttgggctgcttggtctctaaatggaaccgatgagccaaattatgttggagaggggtttgcgatgatatctgggactagtatggctgcaccacatatagctggaattgctgctctgataaagcagaaacatccacattggagccctgctgccattaaatcagccttgatgacaacatcgaccactctagacagagcaggaaatcctattctagcacagctatattctgaaacagaagctatgaagctggtcaaagccactccttttgattatgggagtggacacgttaatcccagagctgccttggaccctggcctcatctttgatgcaggatacgaggattatctagggttcttgtgcacaacacctggcattgatgttcatgagataaagaactacacaaactccccatgtaacaacaccatgggccacccatcaaatctaaacactccctccattacaatttcccatctagtaagaagtcaaattgtcacacgcactgtgacaaatgttgctgatgaggaagaaacctacgtgatcacagccaggatgcaaccagcagttgccattgacgtgaaccctccagcaatgaccatcaaagccagtgcatcgcgtaggtttactgtgacactcactgttcgctcagtgacaggaacctatagttttggagaggtgctaatgaagggaagcagagggcacaaggtgaggatccctgttctggccaatggatactcaagatagctttagtttggtctgcaaagaaaagttctgtaatattctttgtaacttgtgataataaggaaggtacagtgttagatttattcatgaaaatataatgtatggtgttgaatagatgtaaaggtaagaagcaggtgtaaggaggagactccttgtttattttattccgcatataaagttttgctaataacatcttgttatttattgaaatgcttcttcttctaaaaaaaaaa

SEQ ID NO: 1128 - DNA, 1270 bp, Glycine max
  misc_feature (1217)..(1218): n is a, c, g, or t
cccacgcgtccgtacggctgcgagaagacgacagaaggggactcgcagttgtattgttgaacaagggtttctctgtctgcttcttcactttctctcgtttcaatcgaaaccaaaacaaaaacatgggcagaaaattcttcgtcggtggcaactggaaatgcaatgggaccactgaggaggtaaagaagattgttactactttgaatgaggctaaagtccctggagaagatgtcgtagaagttgttgtgagccctccttttgtgttccttcctgttgtaaaaagtttgctgcgccctgatttccatgtttcggcacaaaactgttgggttcgcaaaggtggtgcttataccggtgaggttagtgctgaaatgcttgttaatttgggaattccttgggttattattggtcactctgaacggaggcagcttttaaatgaatcaaacgagtttgtgggagataaagttgcctatgcacttcaacaaggtctaaaagttattgcatgcattggggagactctcgaacagcgtgaagctggtacaacaacggctgttgtttctgagcaaacaaaagcaattgcagctaaaatatcaaattgggacaatgttgttttggcctacgagccagtttgggccattggaacaggaaaggttgctactcctgctcaggctcaagaggtccatgctgatttgaggaaatgggttcatgacaatgtgagtgctgaagttgctgcatctgtaagaattatctatggaggttctgtaaatggaggaaactgcaaagaattggccgcacagcccgatgttgatggatttttggttggtggtgcctccctgaagccggagttcgtggacatcataaatgctgccactgtgaagaagaattgaaattcgtagttaggaactgatataatgctgcctttcaagctgcttcggaaattgctgtttttgagttttggatctgtgctttgtggccaatgttttgaactctgtttagtactgaataaacacgctttcctttgagatctcatccataggcgatcaattggattttgattaaatttctgaatgcaaaaatagtgtaactaccataacatttggtgggtaaataatgttgaacgcctagttgactgtacttaatcgtcacgttctttactactgtttatgcacgtatcacttagatcatgtttaatttttgttgggatgcattttgtacagtannaaaaaaaaaaaaaaaaaaaaaaaaaaaaaaaaaaaaaaaaaaaaaaaaaaaa

SEQ ID NO: 1129 - DNA, 1318 bp, Glycine max
aatattcggtttatccgcattattgtaaagggtgataaggctgtttggacggtcacacgcagttgtattgtagaactgaacaagggtttctctttctctttctctgtctgcttcttcactttctctcgtttcaatcgaaaaaaatcatgggcagaaaattcttcgtcggtggcaactggaaatgcaatgggaccactgaggaggtgaagaagattgttactactttaaatgaagctaaagtccctggagaagatgttgtagaagttgttgtgagccctccttttgtgttccttccttttgtaaaaagtttgctgcgccctgatttccatgtctcggcccaaaattgttgggttcgcaaaggtggtgcttatactggagaggttagtgctgaaatgcttgttaatttgggaattccttgggttattattggtcactctgaacggaggcagcttttgaatgaatcaaatgagtttgtgggagataaagttgcctatgcacttcaacaaggtctgaaagttatagcatgcattggggaaactcttgaacagcgtgaagctggtacaacaacggctgttgttgctgagcaaacaaaagcaattgcagctaaaatatcaaattgggacaatgtcgttttggcctatgagccagtttgggccattggaacaggaaaggttgcaactcctgctcaggctcaagaggttcatgctgatttaaggaaatgggttcatgacaatgtgagtgctgaagttgctgcatctgtaagaattatctatggaggctctgtaaatggaggaaactgcaaagaattggcagcacagcccgatgttgatggatttttggttggtggtgcatccctcaaggcggaatttgtggacatcataaacgctgctactgtgaagaagaattgaaattcgtagttaggaactgataatgctgcctttcaagctgcttcggaaattgctgtttttgagttttggttctgtgctttgtggccaatgtattgaactctgtttagtacctgaataaacatgctttcctttgatctcatccataggcgatcaattggattttgattaaatttctgattgcaaaaatagtgtaactaccataacatttggtgggtaaataatgttgaacttgactgtacttttaatcgtcactttctttattactgtttatgcacgcatcatttagatatagaggctctttgttagtggccaaagaaggtgaaaaagaagtgaaataaacagtaaaattttgtgggatttacacctttactttctacttcaattcaaaattttcatcgcttttccttttc

SEQ ID NO: 1130 - DNA, 1552 bp, Glycine max
tcgcggctgcgtcgcccccccccccggagagagaaaacaacaacaaacctcatcaccacacagagtagtagagagagagagaaaaaaaaaaagagagtccgttagttaatttcagtttatttattttatatttttaaaaagaagagaaaaagcaatggtgacagaggaagaaatatctgaagcggttcagtctctgctgcgggaatcaaaccctagtagattcacgacgctaaaccaggtggtggaggagctccaggccaagctcggccacgacctcactcacaaaatcgatttcatcaccgcgcagatcaacctcctcttcggatcccgacaaccgccgcaaaacccgcataggcagttacaacagcctaaggaccattttgcccctccgccaaaccctaattttcactctgcccctgtcagtgttggctttcagttgcagaatttctcttcttctaacgctgttgtcgctgctgctactgctgctgatgcttcgcgcattgaagctccttccgctcctgttgttgttgaaggcaaccaggttcccaaggaaagtactcaaactaaggtgaagagaagaggtggcccaggaggtctcaccaaaatctgtggtgtttcgcctgaacttcaggtcattgttggccagccagcattgtcgaggactgagattgtgaagcaactgtgggcttacataaggaagaacaatctccaagatcccagcaacaaaaggaaaataatttgcaatgatgaactgcgtgtggtgtttgagacggattgtactgatatgttcaagatgaataagttgctatctaagcacattatcccccttgaaccaaccaaaaagcctgttccaaagaaacagaaggtagatgtggagtcaggaacaagaagtgctgaacctactccttctgtaataatatctgatgcacttgctaactttttcggcattactggaagggagatgctgcagtctgaggttctgaggcgtatctgggagtacattaaagtcaaccagctagaggatcctgcgaatcctatggctatagtgtgtgatgggaagcttcaggagatctttggctgtgaaagcatttcggcattggggatacctgaagttctgggccgtcatcatatttttaggagttcatgatgctgacagcattctatgtgacagattgcatggtgttaattccagtatagttggaactgatcttgaccacatgttgataaggttctgtaacttgactgataagatttgtgttcttagttcttgttgataagctattagcagagaatgaagatgatgtaatagagacaactattagtttgtttgggagtggcgatgtgtttctaggtcctgcagttgttgtttgtctaactaggcacttaggttagaatgacctgtggctgtgggtattctgacacctgtaaaattctgacaataggaaagaaaatgatgtacaaggtatcttccttcaaacatgactaatgctattttatgtgtagttaatgaaatgcagtttgccggatgtacaaaaaaaaaaaaaaagaaagg

SEQ ID NO: 1131 - DNA, 1560 bp, Glycine max
ccacgcgtccgactgacaaatggaggacttgagttcaaagacagaaacccccgaatatgtgatgtgaaccacactattcctagtttccaaattccacccacattataattccaccgccaccctcgccccccccccaaccattgatcaaccttccttcccttaagtagttaacaatttctcccaccttcccttctcagtttctctcacaaatttgcatttttatgttctctttgcacttttctcccatatggggctcaaaatcttcatggcctccttcatgatgacctcaatcttgttctttctcctcttcatccccacaagattgaccgtacaattctccaccctgaggccacctgtaaactacttcagtgtcccccccaagagcagcaaggcctatccagttacttttgcatacttgatctctgcatcaaagggagatgttgtgaagctcaagaggctgatgaaggtgctgtaccatccagggaactactatctgatccatgtggattatggtgctccacaggctgagcatagagcagtggcagaatttgtggctagtgatcctgtttttggccaagtggggaatgtttgggttgtggggaagcctaatttggtcacatatagaggaccaactatgcttgctaccactctccatgctatggcaatgcttctcaggacctgccaatgggattggtttattaatcttagtgcttctgattatcccttggttacacaagatggtatgatctgatccaagcgttttctgggttgccaagaagtaccaatttcatacagcatagcagtcaattgggttggaaattcaataggagagggaagccaataatcatagatccggggctttatagccttaataaatcagaaatttggtgggtcattaagcaaaggagcctgccaacatcttttaagctgtacacaggttcggcttggacaatactatcaagatcttttgcagaatattgcatagtggggtgggaaaatttgccaaggaccctcctcctctactacaccaactttgtgtcatccccagaaggatatttccaaacagttatatgcaactctgaagattacaagaacaccactgttaaccatgatcttcactacattacttgggacaaccctccaaaacaacaccctaggtctctaggacttaaggattataggagaatggttcttactagccgcccgttcgccagaaaattcaagagaaatgatccagtgcttgataaaattgatagagaccttctgaaaaggtatcatgggaaattttcttatgggggatggtgctctcagggtggaaaatacaaagcatgttcaggtttgagaactgagaattatggtgtgcttaggcctggtccatcctcaagaaggctgaaaaatctgctaacaaaacttctctctgataaattttttcacaaacaacagtgcaggtaataaccttctgatttctccattgaattggtggtcacttgtaaagactctactgaaattttggttataatataataattatcatttttttttaaaaaaaaaaaaaaaaaa

SEQ ID NO: 1132 - DNA, 725 bp, Glycine max
agctaaaaagaagccggccggaagtactcttgtttggaattagaattaagagaacagacacagaagtcactaattaactctacaaagtacaaacaccaaatcacatttattcaaccatacatcatataacaacaacaacaacaatactagaactagaagtgagaaattcaagacttttttttttccattttctttttttacaataacaagatttaaatctatgatctggtgcatattacccaaaccccactactagaccgagaataaggactcaattaaggtcttatttagttgctttgtaactactttttgaagaagcctccagccaagtttgcaagaccacctaacccaccaccactttcttcacctttagactctgcaggctgtgaaggagcagtggtattatcaccctggtaattatgcagataatcagcagccttgtcaacatattgccctatgccttgtttgtcatcaagttttccatacttccccgccgcgtcgagaagatcgccggcagcgtcagccaccttggccttgtccactttgtcgctgtcgctcttcagagccgactgcgccgcctccgccaccagcttcgcgctcgtgatgagttcggtagtggactgctcgctggggggcttgttctgggattcttcggaagccattgatacttacttattgaagcttcccccgcccccttttcccggctcctgccgtacggcgcgggg

SEQ ID NO: 1133 - DNA, 2463 bp, Glycine max
cctttgtaaggtcgaccatgcataggagcctcttgtacctgttttcagctattcataccaaattatgcgtagtcttcaaaggaacatgtgtgataatgagacaggccatgttctttatgagaccatgtttgtttggaatgagttcttaactcgaggaattaggaatcacctccagaatactatttggacagttgcgctagtgtatggattttttaaacaggaaatgctaatgatatccagacgggagttcacacttacgctcattgcaagacgatcacgtcattatgctggcactaggtatttgaggcgtggtgttaatgagaaaggaagagtagcaaatgacgttgagacagaacaaatagtctttgaggatgttgcagaaggtcttcccatccaaataagctctatcatccagaaccgtggttcaatccctcttttctggtcacaggaaacttcaaaactaaatattaaaccagatattatattgtcaaaaaaggatcagagttatcaagccactagatatcactttgaaaaccttgtcaaaagatatggaaatcccataattattttgaatttaataaagacccatgagaagaagcctcgcgagtccatacttcgtcaagagtttgctaatgccatagatttcattaataaagatttatcggacgaaaacaggcttaggttccttcattgggatctgcacaaacattttcagagcaaagctacaaatgtcttgcagcttctcggcaaagtggctgcatatgcattgacattaacagggtttttctattgccaaacaacaccaaccttgagaccagaagaatgtctgaaatggccaagtaccaaggttgacaacagggatgcagatgaaaattattctgtcaaaccacccatgttgcagaggggggtgctcaggaccaactgcatagactgcttggatcgcacaaatgttgcacaatatgcatatgggttggctgctcttggccaccagctccatgctctgggggttattgaccacccaaaaattgatcttgatgagcctgtagcagatgatttgatggggttttatgagcggatgggtgatacacttgcacatcagtatggtggttctgctgcacacaacaagattttctctgagaggaggggccagtggagagctgcaacacagtctcaggagttttttaggactcttcaacgctattatagcaatgcatacatggatgctatgaaacaggatgcaatcaatgtattcctggggcattttcagccacaacagggtaagcctgctctatgggagttgggttcagatcagctctatgatgcaggaagacatggagatgacgatgctaggtcatttttcaaaagatccttctcagatggaaacattcttaatgaaagttctacaccgatgtcagccccaaaggccaagcatgaaaaattcccaagccaaggcggcttaccagatcgatcagaagaaggaagcaagggactctgtgagtcatcaccagaaatatctactactgagagtgacatctcattttcaaggtacactccctcaatgcctcggagacagctctttggagatatgcaaagagagcgctgccttgaaagtgaacatatttactattctgatcacggggattccttcagctgctccaactttgttgacctggattggctatcttcttcaggaaattcatgtgaagaagagccatttgagaggtcatcaattaccaactctccaattgctggagtttcttcagaaaatgttgtcaatggaataatggtaggtgaggcaactgcctccactagtgattggggggcctccagcctaaagggaagggaacaaactgaatccgagttatcctacggtgatgcacggtccaacacaccagaggaatttccagatacttttgtgaactgggtgacttatggacagacactttgccattgaactttgcatatgatctcttgcactaatgtataattgatatttttttggcttggtctaaagatgcttattagaagaaactagagagaaggaagcggcgaaagaaaaagaatcaggcatttgggtaggcttctgtttgtgtttatgtggtggtgctaatctaagaatcatcctgaggccaatcttggtattgacatgcagcattaattctgttgtgaagatctcaatcaaatcctcaaggcatagtagaaaatagtgcatagcaaagcaagtgcttgtaaaattgtttgttgtcttttcctttcttttattattttattattattattattttctgttgttattgtcttcttggagttcagtgttttcatttttctttcagcagttataataggtgcactttttgtaaatattattaccctacttgtgggagcttcacttttagaattgtagataattgattcttttaaatgactttgcttgttgtaatgtataatttagaactcatgcaa

SEQ ID NO: 1134 - DNA, 1551 bp, Glycine max
  misc_feature (415)..(415): n is a, c, g, or t
ccaagatctaaaagatactctttggtttcttttcaattggctgtatgtgatgtctccatatattatatgcctcctactgcaggttaaatgttacatacatcaactgctatcaggacttgagcactgtcatagtcgaaacgtacttcaccgtgatattaaaggatcaaaccttcttattgacaatgaaggaatacttaaaattgctgacttcggacttgcatctttctttgatccaaatcgccggcaacccatgactaatcgtgtggttaccctttggtaccgacctcttgagttgcttcttggtgccacagaatatggtgcggccatcgacctttggagtgttggttgcattgtggcagcgtcgttggccgcccccccccttttgcctggtcgtacggaggtggaacaactgcantaagatatacaaactttgtggttcgccttctgatgagtattggaagaagtcaaagatgcctaatgctaccttgtttaaacctcgacatccatacaagagatgcataacagagacatttaaagattttccaccttcagcgctgccccttattgacactcttcttgcaattgatcctgcagaacggaagagtgccacagatgctctaagaagtgagttctttaccacagaaccttatgcttgtgatccttctagtcttccaaaatatcccccaaccaaggaaatggatgctaaacgacgggatgatgaagcaaggagatcaagagctgctggcaaagctcacgttgatggtgcaaagaagcatcgtacgcgtgatcgcgctgcaaaagctgctcctgctcctgaaggcaatgctgagcttcaatccaacattgatagaaggcgtttaatcactcatgcaaatgctaagagcaagagtgaaaagttccctccaccacatgaagatggacagcttggctttcctttgggatcttctaatcatattgatccagatattgttccttctgatgtttctttcggttcaacctcatacaccttttcaaaggaaccattccaagcttggtcaggtcccattggtaatactgctagcattagtgtcacaaagcggaagaaacacactgcaggtgatgcactggatttatcaaaaccatataaaggtgccctcaaggataaggttaaaggaaagaaaatcatagcttagatatttagtacattcttgtagagtcaaatgaagaaagaacctgtccctgctgcctcattttttggtgttggagtccaactgcttaaaaatatgtcatgctacatgcttgcttcttaaagttaactcctttcttatcaaggggtagaaccatttccccccattttaaaaccttcatttttgtttcatagttttgatctatttattggatttcatatagatagaggtttctctaggggggggcttgttaagtctgttgctattatagagaattactgtggtgtacatcatgattttttgttttcatactcgtgtcaatatctgaattctttttaatatgttgagaattgcaataaaatttgagttgttttttagtcctcaa

SEQ ID NO: 1135 - DNA, 1550 bp, Glycine max
aggacaaaactcaaagcataaaactcaaacacaactcaccaacacagttgttgcattatttcttttttccagatccaacttcaaaattgcaatgggagtggaagatacagatatttgtatcatcaaggagccagatcatgttgtagtctattcagatggcatttctcatgattcgggtcatgaagctggaagtggtcatcacaatattacagagtcgtatgaacaaatcaatgagactactgaacatcatagttcagaggatagtgcaaaggaatatgaggtgaaggaatgcacaacagaagtttctgttaaggtctctgatgtctctaatgttaaaaaatgtgaggataagttaacctcagattctgagggtgtcgtcagtgagaaaagttttaaatctaacaaaacaaggggtaagcataagccacgagataccgggaagaatggaacaagacctcctgttacaggcagtgcccaaatcaagcccacagttccacaaccgttttccctagcaactgaaaagcgtgcttcggttgcaactcgtcctgcttttgaagaagacaacaagggcagtaacaagagaaaatctttaaacaaaaaaaatgtgctatcttccaatatgtttaaacagaatcagttgaaatctcctgtagtttcaagaaagccattgcaacctgataacaagaagcatcctgatgatgatgattcttgttcagttgcttcaataactgcagcttctgtgcgatcaatcaagtccaggacaactgttgcttctgctcctgtgtttcggtccagtcaacgtgcagaaaaacggaaggagttttatacaaaattagaggaaaagcagcaagcaatggaagctgagaagaatcaaagtgaagctaggaccaaggaagagatggaggaagctatcaagcagctaaggaagagtctaacttttaaagcaagccctatgccaagcttttaccatgaagggccccctcctaaggttgaattgaagaagctaccagcaacgcgagcaaaatctccaaagctgggccggcgaaagagcaacaatggtgcagttaatttatctgaaggggacaaggagaaaggagctggaatcaggagaaagcatcacacacttaagacagacaactatggtgataagagtgatgtaaatggcttatctgacctcaaaaacaagaccaagcatattgaagaaattgatgcgaccgaggtaactggacaagcagacttggagattggcagccagtgcagttttcagtgagattagattctcatttttctaatttatatgtatccggggactgtggacttgtttcttgcaacaagcatcttcactttgtttttccttttaacttatgagcacttgctgctgtgtgcattgtgtaagtagtgaaaaatgtttatttgtaatttatttcaaattatttgtaaaaattcaatcctgttgctcataagagcatttgagccatttgtttgtctgcctgaagtccaggatcagattgtttgaagtgaccattaaataatgctgttcgattaacaat

SEQ ID NO: 1136 - DNA, 1617 bp, Glycine max
tcgagtcagctacgtaggcccccccccccgaggacaaaactcgaagcagaaactcaactcaccaacacagttgcattattttctttccagatccaactcaaaattgcaatgggagtagaagatacagatatttgtatcatcaaggagccagatcatgttgtagtctattcagatggcatttcccatgattcaggtcatgaagctggaagtgatcatcacaatattacagagtcttatgaacaaatcaatgagactactgaacatcatagttcagaggagagtgcaaaggaatatgaggtgaaggaatgtacaacagaaatttctgttaaggtctctgatgtctctaatgttaaaaaatgtgaggataagttaacctcagattctgagggtgtcctcagtgagaaaagttttaaatctcacaaaacaaggtgtaaacataagccacgagataccgggaagaatggatcaagacctcctgttacaggcagtgcccaaatcaggcccacagttccacaaccgttttccctagcaactgagaagcgtgcttcgatcgcaactcgtcctgcttttgaagaagacaacaagggcagtaacgagagaaaatctttgaacaaaaaaaatgtgctatctcccaatctgtttaaacagaatcagttgaaatctcctgtagtttcaagaatgccattgcaacctgataacaagaagcatcctgatgatgatgattcttgttcagttgcttcaataactgcagcttctgtgagatcaatcaagtccaggacaactgttgcttctgctcccgtgtttcggtctactcaacgtgcagaaaaacggaaggagttttattcaaaattagaggaaaagcagcaagcaatggaagctgagaagaatcaaagtgaagctaggaccaaggaagagatggaggaagctatcaagcagctaaggaagagtctaacttttaaagcaagccctatgccaagcttttaccatgaagggccccctcctaaggttgaattgaagaagctaccagcaacgcgagcaaaatctccaaagctgggccggcgaaagagcaacaatggtgcagttaatttatctgaaggggacaaggagaaaggagctggaatcaggagaaagcatcacacacttaagacagacaactatggtgataagagtgatgtaaatggcttatctgacctcaaaaacaagaccaagcatattgaagaaattgatgcgaccgaggtaactggacaagcagacttggagattggcagccagtgcagttttcagtgagattagattctcatttttctaatttatatgtatccggggactgtggacttgtttcttgcaacaagcatcttcactttgtttttccttttaacttatgagcacttgctgctgtgtgcattgtgtaagtagtgaaaaatgtttatttgtaatttatttcaaattatttgtaaaaattcaatcctgttgctcataagagcaatttgagcatttgtttgtctgcctgaagtccaggatcagattgtttgaagtgaccattaaataatgctgttcgattaacaataaaaaaaaaaaaaaaaaaaaaaaaaaaaaaaaactaaaaaaaaaaaaaaa

SEQ ID NO: 1137 - DNA, 1383 bp, Glycine max
tttttttttttttttttttttttttttttttttttttttttttggtgtgtgtgtgtttttgtctgccttttttttttttttttttttatgataaactagtagattaatcataggtagcatgcagaatgaggtttcaattgcggttttaagtcaacaaaagaacccataaaagcaagaaaacaagttgatgactggtactgatacaaaacgcacaatgataaaatgcgagacaacttattcatacaaaagcagcaggactacttatttcatataaagcttgctcttcacttcagttcttccaagaaatcaacgttgtcaaccaagacagttttccatccatctggatctaaaaacgaagtggtttttgtattaaggccaggaattggccctggttgccgagtaatcttccctccaacctcttttatgacttggttaactacctcagcactcttatatacatcatcagtaccaatggcaatctgtgcataagcatttcccttagagtattcagtcacaccatagttatatgtcaactccaacacagttgtctcgtgctcctctccatacccgagcatagctatagtgtacttgtactcaggcttatcaaccttcctcaccaccttcatgcccaaagccttttcataaaacttaattgagcgctctaaatcaccaacacgaagcattacttgacaaaatgggtcatggactgtaggtctttggataagtccaaaagtataaccatcaggatccttaacaaaggcgataacagtagttccaccttgaactggaccaggttcccttgtgatgtttccacccttggccctgatgtgctcaaccaatttataaatgtcctgagttgcaattgcaaaatgtccaaagccatcgccaatgtcatacgaggtaaccccataattatatgttaattcaacaacaaaatgggattcttcagggccaaatccaagaaaagcattagcatatttctcctctgggatatctctttgcctcaaaagcttcattcctaaacattctgtgtaaaatttgatggtgcgatcaaggtcaccaacacggtagacgacatgaagcattcgtttcttatcttgctttgaccattccaacaagtcagccatatttagttcctgcttcggaagacagatctgtgtcggtgtctgtgactagagcatgcgaaacgcgtgtcgggggggaggccaaaggttcgttaccatcatccagtccacgcccaaaaacacgtccaggttcaatgaacctcagtggccgcctctcaaattgttttttgtttggtatcctcctttttcccgtttatatatagcaacacaactctcctttctctttcttcaatcatggggggggggcctacgtagctga

SEQ ID NO: 1138 - DNA, 1841 bp, Glycine max
cccacgcgtcctattgaccctggaattgctgttaacaccagttatggtgtatatcaaaggggtgtagctaatgatgtttttatcaagtatgttggtgaacccttcttggctcaagtttggcctggggcagtgaactttcctgattttctcaatccaaagacggtttcatggtgggttgatgagattcaccgcttccatgaacttgttcctgttgatggcctgcgagaagacgacagacggggattgacatgcatgcagtttcaaatttctgttctggaaagtgcaaaattcccgagggacagtgcccgactggaacaggacctggatggatatgctgcttggattgcaagaacatcaccaaaacacggtgggatgatcctccatacaaaattaatgcctcaggaataaaagctcctattggcttcaaaacaatagccactagtgcataccactataacggcgtcttggagtatgatgctcacagtctttatggcttctctcaatccgttgcaactcacaagggccttcaagggcttcaaggcaaaagaccctttattttgtcccgctccacttatgtcggttcaggcaaatatgccgcacattggactggtgacaatcagggcacatgggagaacttgaggtactcaatatccacaatgctcaattttggcatatttggggtgccaatggtgggttcagatatatgtggcttctatccacagcccactgaagagctatgcaatagatggattgaagtaggggctttctaccccttttcaagggaccatgcaaactactactcccctagacaggagctttaccaatggcagtcagtagccgagtctgcgagaaatgctttgggtataaggtataagctactcccattcctttacaccctgaactatgaagctcatgtcagtggagccccaattgccagacctcttttcttctcatttccaacttacaccgaatgctacggcctaagcacccagttcttgctaggaagcagtctcatggtttctccagtgcttgagcagggaaaaacacaagtgaaagcactctttccacctggtagctggtacagtttgcttgattggacacacaccattacatcaaaggacggagtctatattaccctcgacgctcctcttcatgttgtcaatgtgcatttgtatcagaacaccattcttcctatgcagcagggcggaatggtctctaaggaagctagagcgacacccttcaccctcatcgtaaccttcccatcggacgccacccaaggagaggctaaggggaaccttttcctcgacaacgatgagttgcctgacatgaaccttggaaatggctattcaacctatgttgatctccatgcaactgtggaccaaggagctgtgaaagtttggtcagaagtccaagagggcaagtttgccttggacaagggttggattattgattctatatctgtgctgggattagaaggaagtggagcagtgtcttcacttgagatagatggaaagcctctaatgggtggctcgaatgtgaatgttactacatcagcacatgagcacttgaacagtgagggagaaggagaaaagaagactgtgatggttgctttgaggggcttgagcatccctgtgggtaaaaactttgccatgacatggaaaatggggtgataggttgagtggtctcatatctgatttatcattttgaaactttgttatgttcttttttctttgctacaattcttgtaggcgttgtgagggagaagagatgtgctagaattatgctcgtccttttccaatttaacaagccaaggcaacaatggcgtatgggttgaaatctta

SEQ ID NO: 1139 - DNA, 804 bp, Glycine max
gcgtgaaaaacttttgttctcttctcttcgttttctccttaaccatgaagaagctctaccgtaaaggaaccgtccacccctctccctcgccgtctccgccaaccatctccgaccacctctccttcctccccgccgccatcctcaccctcactctttccctctcttcggaggacagagaagtccttgcatacctcatctcatgctcatccaacaacaacttttccggcaaccctcgccggaaacctaaggttgtcgcggacggcgatcaccctcctctcttcaactgcagttgcttccggtgctacatgagctactgggtccgctggaactcctctcccaaccaccaactcatacacgaaatcatcgacgccttcgaagactctctcacccacaccgcaaagccttctagaaaggacaagagaaacaagaggggttcaaaacccaagcctcccgagatgactcgctccgagtttccctcttcgccgccggaatcgttgccggagagtagcagtagcggcgctggtgccggcgaggttgaggctggtcaaggcggtgacgatgaggagaaagggtcggtgagaaggtttgtgagtttcattggagaaaggatttggggcgcttggggtcagtgaatgaattttcaaggggaaaggtgggtttaatcttcaccctttctttctctcttttgtttcttcttttcttttattatttataaactttttttttttgctttttgtacattaatcacttctctgcaatgtataaaaggaaagtggcagcttcgtttttttgtgttaaaaaaaa

SEQ ID NO: 1140 - DNA, 1217 bp, Glycine max
ttgcttccgggggttctcatttcaaatgtaactttcatgaattcaccattttggactattcaccctgtatactgcagccatgtaacaattcagaacgtcacaatcattgctcctcttagttcaccaaatacagatggcattaatccagattcttcagacaatgtatgcattgaagactgttatataagcaccggtgatgatttaatttccatcaaaagtggatgggatggatatggcatttcatttggtcgacccagtacaaatattaacatccgcaggctcattgggaagacaacgagcgcagggattgctatcggaagtgagatgtctggaggagtatcagaagttcatgcagaagatatttacatttttgattcacatagcgcaattagaataaaaacttctcctggcaggggtggttatgttagaaatgtctatatctctaacatgatcttggttaatgtagatattgctattaggttcactggtttatatggagaacatccagatgacacttatgacccagatgctctaccggtaatagaaaggattactatcaaggatgtgataggggaaaaagtcaaacgtgccggccttatacagggtattaaaggtgacaactttgtcaatatctgcctatcaaacatcacccttaatgtgagcaaaaaattgccatggaactgctcttacgtaaaaggatactctgacttggtttcaccagaagcgtgcgagcctctcagagaaagaatattccctgagcattgttcagactgttactatttgccaaaccacttgaagagtttgagtaatcaaaactggggtgcttggttactgtcttagtaaattatggagtttagatattcaagcaaccaaacttatagctgcaatttgattggtggattttttcaacaggacaaaatttacccgacggaagttgaatggtgttgctgatctgcagaatgataccgagagataattgtttcttgtaactggtgtgcagtagcaaataattgagtgatttatcagaaatatgaatatgaatgatttcatgtcttgctttcctaggtacttgttattttggagaagtaaaatgaaaatatgaaaattgtttccattgattgaaaacaaataaagacaaaaatgtcattgattgttgatagagctgaggttactcgtatattattacattgaataaggaattaaaaaatgtcagcatg

SEQ ID NO: 1141 - DNA, 1249 bp, Glycine max
cggacgcgtgggcacctacgcgggcccccccagcgatcaagctccaatcaactcttcaaaagggagaagaaaaggaaagaaaactctcaaaaaactattatagcaatggcagaacaaaaccaaaaccaaacaactgaagctggaaggcaccaagaggttggtcacaagagccttctccagagtgatgctctttaccagtatattctggagacaagtgtctacccaagagaacctgaatccatgaaagaactgagagagttgacagcaaaacacccatggaacatcatgacaacctctgcagacgaagggcagttcttgaacatgctccttaagctcatcaatgccaagaacaccatggaaattggtgtctacactgggtattcacttcttgccaccgctctcgctcttcctgaagatggaaagatcttggccatggacattaacagggagaattatgaattgggtttgcctgtaattaaaaaagctggtgttgaccacaaaattgaattcagagaaggtcctgctctaccagttcttgatgaaatgattaaagatgagaagaaccatggaagctatgacttcatctttgttgatgcggacaaggacaactacctcaactaccacaagaggttgatagagcttgtaaaagttgggggcgtgatcgggtacgacaacaccctatggaacggatctgtggtggcaccccctgatgctcctcttaggaagtatgttaggtactacagggacttcgtgctggagctcaacaaagccctcgctgtggaccccaggatcgagatttgcatgctcccggttggtgatggaatcactatctgccgtcggatcaagtgatttctgatcatcataatcgtggaccaccgttgcttcttctgcacaccctatagtgatgactggtcatcattgagtggcacctgctaatgcatttaaaagcaatcaatacttttctttcaaaaaaaaatatgtgtctgtacttttctctattactcgtgtggaaaactgtggacaattaaacgttctatatgcaagtgacttttttcttatgtgatttacttccacaactcttggttaattagaaagaggatatatgtgtgctttatcaggagggtggatgaaaaggagagaatttctcactattaaattttttattttttaattgagggttaaaaaattttcttcttttttcaaaaaaaaaaaaaaaaaaaaaaaaagggcggccgctcagaggatcaag

SEQ ID NO: 1142 - DNA, 1309 bp, Glycine max
tccggtcagctacgtaggccccccccccgaagcaaacaagagcatatggatctgtggagcctaaatgcctaaaccatgctgctcaatgcacaagcattactataagacaaacctcgccaaccccggaccggacgccaaccggtccaaccaaacatcacaccggttcgaaccggccttttccttccttatatcaatcactctcctacatccccccacttcatcaagctccaattatcaactctttcaaaagggagaagaaaaggaaaggaaacaaaacgcacaaaggattattatagcaatggcagaacaaaaccaaaaccagacaactgaagctggaaggcaccaagaggttggccacaagagccttctccagagtgatgctctttaccagtatattctggagaccagtgtctacccaagagaacctgaatccatgaaagaactgagagagttgacagcaaaacacccatggaacatcatgacaacctctgcagacgaagggcaattcttgaacatgctccttaagctcatcaatgccaagaacaccatggaaattggtgtctacactggatattcacttcttgccaccgctctcgctcttcctgaagatggaaagatcttggccatggatattaacagggagaattatgaattgggtttgccagtaattaagaaagctggtgttgaccacaaaattgaattcagagaaggtcctgctctcccagttcttgatgaaatggttaaagatgagaagaaccatgggagctatgacttcatctttgtggacgcagacaaggacaactacctcaactaccacaagaggttgatagagcttgtcaaagttgggggagtgatcgggtacgacaacaccctatggaacggctctgtggtggcacccccagatgctcctctcaggaagtacgttagatactacagggacttcgtgctcgagctcaacaaggcactcgctgtggaccccaggatcgagatttgcatgctcccggttggtgatggaatcactatatgccgtcggatcaagtgattctgattttctgataatcacacaatcgtggaccaagaccaccgttgcttcttctgcaccctagtgatgattggtcatcattgagtggcacctgctaatgcatttaaaagcaatcgatattttccttttatttttttttcttcaaaatatttgtgtttgtacttttcttttctctattattcatgtggaaaacggtggacaattaattatatgcaaatgactttttttcttataaaaaaaaaaaaaaaaaaaaaaaaaaaggaaaag

SEQ ID NO: 1143 - DNA, 1238 bp, Glycine max
  misc_feature (31)..(31): n is a, c, g, or t
ttatggcaaagtggctctttatcgaagtagngttgatggatagcattatgcaattaagtcctttcacaagtctcacttacaaaagcttcgagttgcaccatctgagactgccatgactgatgttctacgtgaggtattgattatgaaaatggtggaacatcctaatatagtcaatctcattgaggtgattgatgatccagagtcggatgacttctacatggtacttgaatatgtggaaagcaaatgggtgtgcgagggtacaggtcatccttgtgcattaggtgaagagactgctaggaaatacttgcgtgatatagtctcaggattaacatatctccatgctcataatatagtgcatggggatataaaacctgataatctgttgattactcgtcatggcactgtaaaaataggggattttagtgtcagccaggcatttgaggatggcaatgacgaacttcgtcgatcacctggcactccagttttcactgcaccagaatgttgtttaggtcttacttatcatggtaaagcttctgacacgtgggcagtaggagttactttgtactgtatgattttgggtgaatacccatttcttggagacacacttcaagacacatatgacaaaatagtcaatgatcctttagttctgccagaggacattaacccccagttaaagaatttaatagaaggattactatgcaaagacccagaactaaggatgacattgggcgatgttgctgagcatatctgggttattggagacgatgggccaattcccgggtacttatgttggtgcaaacgtaagagcatggttactgaagattctgatgggagcgatatacttgattgacccacactgattctaagttggatttcttatgtacagtgaaaaggcccattaatttttccccacggagacatgttatgattgtagagggagtctccaaagaatccttgggaattaagaaaatacagctcatgttgccaacgataagtagtcaactaagtcatgtttatttttgtgttgaggagcattttgtgtcttctacggacttagaggtcttgtatatacagctctttcgcatagaatgagttttttttgtttgttttttttatttctcaaacacgtgccgaattgtgttcagttcatactctttatacattccttggagtgtttttgttagctttgctttaacattcaaagaatttgattattcaacaaaaaaaaaaaaaaaaaa

SEQ ID NO: 1144 - DNA, 1050 bp, Glycine max
aagaaaactccagaacaagcctccattgatgaggaagccaaaactgagctaaaagaagaaagagagatttctgttcctgctgctgtggaggaaaaggttgctgttgctgcaattgatgatgttgacaagaaggaacctgaagcacctaatgtttcccctgaatcctcacaagaagaagagtttgaaagcaaaagggttgaggaacagaatgaggcaaaggcagctacaactgaaacagtagagagtgtgaaagttgataatgatagctcaatagttgatgacaagaaggaagagaaaactgactcaaaggtggaagaaatctctagagctattaatgaacctgttagagaaacattggcatctaaatttgaagaggaaactgttgaacctggagcggataaggtagagaaagaacaaactgtggagcctgagaaaactgaggaggttcaagccaccaaggaaagtgatgcaacaaaaacatccaaggaccttccaaaagaaactccagcaaaaccagctcaaaagcaatcaaataacatcatatcaaaggttaagcagtcactagtgaaagcaaagaaagctatcactgggaaatctccatcctccaaaaacctttcctcggatgctaagggcgatattaaagtcaaataatggaactgagtgaacaagtttgcagcatttacgtatttgctttctttcttttttttcgttgtcgtggtgcatagcattatagcatatttgttggtttttatacattgtaatttttctcttgaatttgtttgaatgcaaaagggtgtgcagagtgtagtgtatatagaagatgaactaggccatgcattaggcagtgctgtaaaatttgattgttttgttctgttttattcttttggataatatgcattgtgctttttgtttgttgttgataaacgagaaaggcaattttaacttgtgtatagtttacttgtttgaacgttctgtaaaaagacctcataatgatctagtattgattgtttactacaaaactgtttcaatccttatgcatccatttttctg

SEQ ID NO: 1145 - DNA, 1701 bp, Glycine max
ttgttgggttggctacaccggagggttatcgagtcggcctcgctgaccccccccccccggttgatgctggagcagatctgattgtcacccaattattttatgatacggatatattcctcaaatttgtgaacgactgtcgccaaattggaataacgtgtcctattgtacctggaattatgcccattaataattacaagggctttatccgcatgactgggttttgcaaaacaaagataccagctgacattatggctgctttagagcctatcaaggacaatgaagaagctgtcaaggcttatggaattcacctgggaactgaaatgtgcaaaaagattttagctcatggaattaagacattgcatctttatacactaaatatggagaaatctgcattggcaatactaatgaaccttggcctaattgaagagtccaaagtttctaggtccttaccttggagacgccctgcaaatgttttccgtgttaaagaagatgtccgtccaatcttttgggcaaatcgaccaaaaagctacatatcaaggaccataggatgggatcaatacccacatgggcgttggggtgattcctgtaatccatcatatggtgcattatctgattatcagttcatgcggccacgtgcacgggacaagaagcttgttgaagaatgggcagttcccttgaaaagcgttgaagatatatatgagaggtttagactgtattgccttggaaagttgagaagcaatccttggtcagaacttgatggtcttcagcctgagacaaagatcataaatgagcagctggagaagattaacacaaagggcttcctcaccatcaatagccagccagctgtcaatggggaaaagtcagattctcctactgtaggctggggtggacctggtgggtatgtttatcagaaggcatatgtagagttcttctgctctaaggaaaagctggatgcacttgttgataaatgcaaggatcgaacatctttaacttatatggctgtgaataaagatgggagctggaaatctaatgtgggtcaaactgacgttaatgctgtgacatggggtgtcttcccagctaaggagataattcaaccaaccattgtagatcctgtcagcttcaatgtatggaaggatgaggcatttgaaatttggtcaagaggatgggcaagcttgtaccctgaggatgaggcatccaggaaattggttgaagaggttgggggcagtcacttcttggttagtttggtcgacaatgattacatcaatggtgatctttttgccgtctttgcagatttctgacatgagcttattatttattagtactttagctatgtcacttctgttggttgtcatgttcttttcctttcttttgttttcttctcagtatgatgattcatattacacatggttctaagttgaagtgccaaattatttttctgggctatgtccctaacgtctttatattttcattcttcaaagtcgcatgggtaacctgtacgttgacataaggacaagttactccttcctctgaattggatgtttcttaatatatataatgagtgaactgtgaaagcagaatattgaagtcttgtgccttgtattttgcttttatttctttatcaccagtttctttttctctgagaaccttatcctatattgacatttgagaaaaaaaaatcatgtatattgcaattgctaaaaa

SEQ ID NO: 1146 - DNA, 2260 bp, Glycine max
cacgcgtccgcggcgtgtatctctgtctaccttaccttacctcacctcacaagggacaaagataaaaaatgaagatcattgagaaaattcacgcagcctcggctgatccaaacagggtggtgttctcatttgagttcttcccgcccaagactgaggatggggtggacaatctgtttgagaggatggaccgcatggtggtgcacaacccctcgttttgcgacatcacttggggtgctggagggacaacggctgatcttacattggaaattgccaacaagatgcagaacattgtctgtgtggagaccatgatgcacctcacctgcaccaacatgcctgttgagaagattgaccatgctctccacaccatcaagtccaatggcctccaaaatgtgcttgcacttcgaggtgatccaccgcatggtcaggacaaattcgtccaggtcgaaggcggctttgcctgtgcacgcgacttggtgcaacatatcagagctaaatatggtgactactttggcattacagtcgctggttatccagaggcacatccggatgttatagaaagtgatgggttggctacatcagagggttatcaaaatgatcttgcttacttgaagagcaaggttgatgctggagcagatctgattgtcactcagttattttatgatacggatatattcctcaaatttgtgaacgactgtcgccaaattggaataacgtgccctattgtacctggaattatgcccattaataattacaagggctttatccgcatgactgggttttgcaaaacaaagataccagctgacattatggctgctttagagcctatcaaggacaacgaagaagctgtcaaggcttatggaattcacctgggaactgaaatgtgcaaaaagattttagctcatggaattaatacattgcatctttatacactaaatatggagaaatcggcattagcgatactaatgaaccttggcctaattgaagagaccaaagtttctaggtccttaccttggagacgccctgcaaatgttttccgtgttaaagaagatgtccgtccaatcttttgggcaaatcgtccaaaaagctacatatcaaggacaataggatgggatcaatacccacacgggcgttggggtgattcctgtaatccatcatatggtgcattatctgattatcagttcatgcggccacgtgcacgggacaagaagcttgttgaagaatgggcagttcccttgaaaagcattgaagatatatatgagaggtttagactgtattgtcttggaaagttgagaagcaatccttggtcagaactagatggtcttcagccagagacaaagataataaatgagctgctggaaaagattaacacaaagggcttcctcaccatcaatagccagccagctgtcaatggggaaaagtcagattctcctactgttggctggggtggaccaggcgggtatgtttaccagaaggcatatgtagagttcttctgctctaaggaaaagctggatgcacttgttgataaatgcaaggatcgaacatctttaacttatatggctgtgaataaagacgggagctggaaatctaatgtgggtcaaactgatgttaatgctgtgacatggggtgtcttcccagctaaggagataattcaaccaaccattgttgatcctgtcagcttcaatgtatggaaggatgaggcatttgaaatttggtcaagaggatgggcaagcttgtaccctgagggtgatgcatccaggaaattggttgaagaggttgggggcagctacttcttggtgagtttggtcgacaatgattacatcaatggtgatcttttcaccgtctttgcagatttctgacatgagcttattatttattagttctttagttatgtcacttctgttcgttgtcatgttcctttcctttcttttgttttcttctcagtaggatggttcatattacacgtggttctaagttgaagtaccaaattatttttctgggctttgtcccaaacatctttattttttcattcttctgagtcgcatgagtaacctgtacgttgacttaaggacaagttactccttcctttgaattcgatgtttcttaactgtgaaagtagaatatcgaagtcttgtgtgttatattttgcttttatttcttttctctgagaaccttgtcatcattggcatttgagaaaaaaaaatcatgtatattaccatctctctctctctatatatataacacaatagttgcaaccgtgttt

SEQ ID NO: 1147 - DNA, 3450 bp, Glycine max
  misc_feature (205)..(209): n is a, c, g, or t
  misc_feature (240)..(244): n is a, c, g, or t
  misc_feature (271)..(275): n is a, c, g, or t
attaacttggagttttggtggagaagtagttgtgcaaagtttcttaaaattggatattccgggttggcttcattatgctacaattagagtaattgctgttctgcctgccctttattgtgtttggagttcaggagctgaagggatgtatcaactacttatattcactcagattgttgtagctctgcaacttccatcttctgtgatnnnnnttttcggatcgcctcatctagatcaataatnnnnntacacaagatccctcaatttgtggaannnnnggcattgatcatattcattgggatgcttggcttgaatattgtctttgttgtagaaatggtatttggcagtagtgattgggtgggcaatttgagatggaatgtggagactggtgtgtctctctcttatttggtccttctgtgcactgcgtttgcatctttctgtctgatgctttggttagctgccacacctttaaagtctgctagtgttcaattggatgatcagccatggaactgggacatgccacaggccgtaccaaagtcacggattgataacgaggaaacagatttaaaagaaacaagatatcatggagatgcatcagttcaggggaaggaaccatcaccagctctagcaaggaccctggaatactcagatgtaccagttgcaagttttcatcttgatctacctgaaactatcatggagcctgatgttcctgtgactactgtaagggagactcatccatttacatcatttccttgctccccaacttctgttaaggaatcagcttccacttcagaatcagaggcagtaccagctgtaagtaatgagacttctgatattatattgggagattccaaaactttgaaaacagaaactactgcccctgttgagaaaactgtagaagttgagggagattcaaatgccgaaagggatgatgattatggagattcatgggaaactgaagaaataccaaaagtggtctcactagccccatcttcagcatcagatggcccagcatcattcaggagccttagtgggaaaagtgatgatggagggaatagcattggaagtctttcaagattagcaggtttagggcgcggtgcaagacgtcaactagctgctattcttgatgaattctggggacaactttttcatttccatggtcaatttacccaggaagctaaggccaagaaacttgatgttttactgggagtagattcaacactcactggttctttgcaaaaaatggattcatgtaaggcatgttatgaatacttcaaatctgtaggaagtagagctccagatactttaatgaactctgctccatatgaatctcccaggctgaataggatgcaaagtaatttagaggcttcctttgggcctcaaaggagttcttcctcactgcaggcaaatcctgtccagtttatggatgaatatgttcagacctccagccgcaatctccttgatgctggtgaaaggcgctattttagtgtgcacaatctacctacatctgcagcctgggattatcagccagctaccatacatggttatcaggtttcatcatatattaatcaagttggtaaagacacaaattctgataaattaaatggtctgagggaatccccttccatgggtaatacaaacaactacaggaattctattgcatttgctttgggtaaaaagttgcaaaacggttctggtttaagccaacccccaggattcccgaacattgctgtctctaagaatagccaattgccatctgagaggtcctattatgattctcgcccttccggacctgtggatagtacagtcagttcagtctatgctaagaagttccacagcttgccagacatttcaggatatgccatccctcacagggatgtttacctgtctgataaaagtgctccatgggatgattctgttggtggatatagatcttctgcaagtaggactcattatgaaccgtcattatattcaaattctggatcaagtacaggagctcctttagcctttgatgtactctctccatcaaaagtctacggtggtgtactttcttctcagttgagttctggttttggcactggatccctctggtccagacagccttttgagcagtttggggtggatgataaaattcataatgctgcaacagaagatgttggaaataggcctagtgcaactactcatgaaattacttcagttgtggatattgatggcaagcttcttcaatcttttagacaatgtattttgaaactcttaaaattggaagggtctgattggttgtttaaacagaatgatggggctgatgaagatctgattgaccgtgttgctgcaagggagaaatttgtttatgaaattgaaaccacagagatgaaccgcaatcatatgggagaaactcgatatctttcttctgatgggaaggcttgttcttcaatgaagaataatgaggcaaattggtctagtttttctgtaacctcaatccctaactgtggggatggatgtgtttggagagcagacataataataagctttggggtgtggtgtatcaaacgtgttcttgacctctcattaatggagagccggccagagctgtgggggaagtacacttatgtactcaatcgcctccagggcatcattgatctggctttctccaagcctcgtagtcccatgaccccatgcttttgccttcaagttcccatgacttaccagcagaagtcaggctcgcctccttccaatgggatgctgccccctgcgtcaaaaccgggccgtggaaaatgcacaactgcatcagtggtgtttgagatggtcaaggatgtggagatagcaatctccagccggaaaggtcgcacaggaaccgctgctggtgacgtagccttcccaaagggaaaggagaatttggcatctgttctcaaacggtataagcgtagattatccaacaaaccagttggcactactcaagaagggattcgcaagatatacttgtagcattttgcctttcactatgcattaacataagcagtgttccttgggctgttttgatttgtgaagcagttcatgctgtagatcaaaggattaccataggaagttcctcgccacaagactgctgtctccgtgtaccaatcctcgctgcagattttatttccttgtaatgttatatacacatagggttagagttactatatgtaattgcaacaaaaaatcaaaggaaaaagatggttagatggaaactgacttctaccattttggcttatttttcattacttcactcgctactgcatgcaaggtggggaaacaaaatgggaagaaaattgtccccctcttgtcatcttaacagggaaaaaaattatcgatgtgtttttaatttttgttttttttattaaggtacctgttatggttgccaaattttcgttttcatcaagtctttcaagcgttaaaatgatggaagtggttacgttt

SEQ ID NO: 1148 - DNA, 840 bp, Glycine max
attttctgatcatcctaagagacctaggtgatgaggaccctccaccaccttataacatgctaagaaatgtgctagacatgaatgctcatgttggtggttttaattctgcaatgttgcaagctggaaaatccatatgggtaatgaatgtggtccctctgagtggactcaactatcttcccttgatccaggatcgaggttatgttggtgttttgcacgattggtgtgaggccttcccaacgtaccctagaacctatgacttggtccatgcagcaggacttttatcccttgaatttgctcagcagcgcagctgtaccatgcttgacatgttcattgaaattgacaggttacttcgtccagagggttggattataattcgtgacacagttcctttaatagagtcagcaagagctctaacaacaaggctaaagtgggatgcgcgagttgtagaaattgaaagtgacagcgatcagagactcctgatctgtcaaaaacctttctttaagagacaggcaaattaattcattcatgcccagaagaaattagaccataatattcatatattcatttttcataatgttcatttattatcataatgctccgccatagaaagtggggattgaaaattttggacagaaaagaaagccgaaaaaaaaaaaaaaaaaaagaaagagtgcattctcgtcaatgataccaccacaactcctatgtagccgtaaggcatatacatgggacctttgaattatcaaacgaggagcagagcagagcaaagcagaggaagaagtttactggtagatttgatttttcatgtgatgtctgattacaggtacccagacacatgat

SEQ ID NO: 1149 - DNA, 1849 bp, Glycine max
  misc_feature (1835)..(1835): n is a, c, g, or t
gtctttaatcgagtcgaattggatcttgtgatttacttagccgacttcacttagtgcagtgggattagagttaagacatttgttgttgtagtatttattggtttttgggtgggtttataatatattaccagggttaacataagaacatttattcatagttgaacttgtgttgtgctactgttgtggttggtcagagaatgtctaggcctctgcaaagaggtgtgtcaggtggggttagggtccctgagagtggccatgatgacttgtgggactcccaatctaaagataaaacggaaaaggaagatttggatacgaggggttcttcagatcacagcccttttactttgaggtttcctctgagggttcttttgggaaataattctgattcaaaatatggcaatggcatagctgagaatggttttgcttctgatcccttcatggttggcaccccacgaagccggcttaagttaatgttgctttctttgaagttcagcttatttgtttatagttgttctggctcttactggatctttttggtggactttgtcgattttatcctcatcaagaggtcacatttaccatggttatagaaggcttcaagagaagcttgtctcagaccttttggatattggcgagttttctcgtggtccgttgaggttgaaggagtcggaattctgttctgaggagtttgaaaactttgttccttgctacaatgtttctgagaatgtggaattgggagtttccgatggcaatgaagttgaccggcaatgcggccgtgagcttaggcagaattgtttagttctgccaccagtgaattacaaaattcccttaaggtggcctactggaaaagatgttatctgggttgctaatgtgaagatctcagctcaggaggttctttcttctggaagcttgacaaagaggatgatgatgctggatgaagaacaaatttcatttcgttcagcttctcatatgtttgatggtattgaagacctctcgcatcaaatcgctgaaatgattggacttagaaatgaatcttacctcattcaagctggggttcgaactatactagacataggttgtggctatggtagctttggagcacacctcttcgacagtcagcttttaactatgtgcattgcaaactatgaaccttctggcagtcaagttcagctcactctggaaaggggtcttcctgctatgattgcttctttcacttcaaagcagttgccatatccatctctatcctttgatatgttacattgtgcaagatgtggcattgattgggaccagaaagatggccttctcctgattgaagccgatagactcttaaaaccgggtggatactttgtttggacatcaccactcacaaatgctcgtaacaaagagaatcagaaaaggtggaagtttatacaggattttacattaacactttgctgggagcttctgtcacagcaagatgaaactgtcgtatggaagaaaactagtaaaaaaagttgctatgcatcaagaaagtctggttctggcccttctttgtgtggtagaggtattgatgtggagactccctattatcgagaattgctaaactgcataggtggaacacagagcagccgttgggttccaattgaaaaaagggaaagatggccttcccgggctaacttgaacaacaacgagttggcaatctacgtcttgcagcctgatgaacttaccgaggactctgacagctggaaaatagcagtccagaattattggtcactcatgtcacctttaatattttctgatcatccgaagaggcccggtgatgaggacccttcaccgccttacaacatgttcagaantgtgctagacatga

SEQ ID NO: 1150 - DNA, 1616 bp, Glycine max
tcgagtcagctacgtagggccccccccgtttatagttattcttgctcttggctggatctttttggtggacaatctcaatttcaactgcatcaagaggtcacatttaccatggttatagaagactccaagagaatcttgtatctgacctgttggatattggggagatttcttatgctccctcaaggctgaaagaattggaattctgttctgaggagtttgaaaattatgttccttgctttaatgtttctgacaatctagctcttggtttttctgatggaaatgagtttgaccggcaatgtcgccatgagctcaggcctaattgtttagttctctctccaccaaattacaagattcctcttaggtggcctactggaagggatattatctggattgctaatgctaaaataactgcacaggaggttctttcttctggaagctttaccaaaaggatgatgatgcttgatgaagagcaaatttcctttcgttcagcctctcttatgtttgatggtgttgaagactactcacatcaaatcgcagaaatgattggactcagaaatgaatctagcttcatacaagctggggttagaaccatactggacattgtcagctacgtaggccccccccccccacacctctttcagagtcagcttttaactatgtgcattgcaagctatgagccttctggcagtcaagttcagcttacacttgagaggggtcttcctgctatggttgcttctttcacttctaaacaattgccatatccatctctctcctttgacatgttgcattgtgcaagatgtggcattgattgggaccgaaaagatggcattctcatgattgaagctgatagacttttaagaccggggggctactttgtctggacttcaccacttacaaatgctcgtgacaaagacagtcagaaaagatggaagatcatacaaagttttgctgaaaacctttgctgggatatgctgtctcagcaagatgaaactgttgtatggaagaaaactattaaaaggaattgctatagttcaagaaagaatagttctccccctcctttatgtggcagaggctatgatgtggagtctccgtattatcgagaactgcaaaactgcataggaggaacacatagcagccgctggatttctgtccaagagaggcaaacttggccttccagagatcacttgaacaagaaggagcttgcaatctttgggttgcaatctgatgaatttgctgaagactctgaaagctggaaagcagcagttcgtaattattggtctcttctgtcacctttaatattttctgatcatcctaagagacctggtgatgaggaccctccaccaccttataacatgctaagaaatgtactagacatgaatgctcatgtcggtggttttaattctgcattggtgcaagctggaaaatccttatgggtaatgaatgtggtccctctgagtggactcaactatcttcccttgatccatgacccagggtatgttagcgttcttcacctatagtgtgatgcccttccgaacgatcctaaaacctatgacttggtacatgccactggacttttatcccttgaatttgctcaacagcccaaagtcccatgcttg

SEQ ID NO: 1151 - DNA, 1628 bp, Glycine max
ggacttttaaaacctggtggatacttcggctgcgcagcccccccccccaatgctcgtaacaaagaaaatcagaaaaggtggaagtttatgcaagattttacattaactctttgctgggaactgctgtcacagcaagatgaaactgttgtatggaagaaaactagtaaaaaaagttgctatgcatcaagaaagtctggttctggcccttctttgtgtggtagaggtattgatgtggagactccatattatcgagaactgcaaaactgcataggtggaatacagagcagtcgttgggttccaattgaaaaaagggaaagatggccttcccgagctaacttaaacaacaacaacttggcaatctacggcttgcagcccgatgaacttaccgaggactctgacagctggaaaacagcactccagaattattggtcactcatgtcacctttaatattttctgatcatccgaagaggcctggtgatgaggacccttcgcctccttacaacatgttcagaaatgtgctagacatgaatgctcattttggtggctttaattctgcattgttgcaggctagaaagtctgcgtgggtgatgaatgtggtcccaataagtggacccaattatcttcccttgatccaggacagaggatatgttggtgttttgcatgattggtgtgaggcttttccaacgtaccccagaacctatgacttggtgcatgctgcaggacttctatcccttgaaactgagcagcacagatgctccatgcttgacctgttcattgaaattgacaggatacttcgcccagagggttgggtaataattcgcgacacagttcccttaatagaatcagctagacctctaacagcacagctgaagtgggatgcaagagtgatagaaattgaaagtgacagtgatcagagactcctgatctgccagaaacctttcttcaagagacaggcaagctaaaaagaattgatggcctgaagaaactagaccattatatacatatattcattttccataaagttcatttattaccatagagctccaaaagcgggggttgaaaattttggacataaaaagaaaacaacatatagaggaaaaagtgtatccttgtcaatgataccaccacatcatctatgtagccgtaaggtgtacatagggccatgtaattaccaaacaagccacagagcagatgagaaactagtatactggtaggttaatttacttttccatgtgatacacagaaacaatattaagattgggaacatggtgataagttattgttgtaaaacgctccgtggttgattcccccttgtagaattattttttctgctatctttctataggttcttagatgtttcttgtataagcttggcaaaactgtactttatagtttgtcaatgtttataatgtgaaatcaaaatcatattattcatcattgtgactatgacttctggttggatagtcactggtaaattggaaccagcaggagcaagttacatgccaagaccatgacaatgtgacatttttcttcctgatgtaaatcaaggtagtagaactatcaagatttaaatgatagtaactcatgatgttcttggttttttaaattgaaactaatgattaagcct

SEQ ID NO: 1152 - DNA, 1958 bp, Glycine max
aaaaaaaaagttgggctgattgaagtgtaaaaacacaacacaacgcagcctttgtgttcgcgtctttcactttctctctcttgtctctttgtatcgtgcgtgtgtgtttagcattcacaatgaacagcatctcatcactgacccttgattctcacgcaatatgcaacactcagcgccccatctccctccgccaagttcgccccactcgaaacgtcgtcgtatgctccgcgaagcccgtcgcgcctccccccaccaagctcgctgctgccgacacctccggcagccgcatcggggcgctgagccaggtctccggcgtgctaggttgccagtggggcgacgagggcaaagggaaactcgtcgacatattggcccagcacttcgaaatcgttgctcgctgccagggtggagctaatgctgggcatactatctataatgcagaagggaaaaagtttgccctacatcttgttccttctggtattctcaatgaggatactctctgtgttattgggaatggggttgtagtgcacctgccggggttgtttaaagagattgacggtcttgaatcaaatggggtctcttgcaagggaaggatattgatatctgatcgcgctcacctgttgtttgattttcatcaagtagtggatgggctaagagaagccgagcttgctaaatctttcattggcaccaccaagagaggcattggaccctgctactccagcaaggttaaccgtaatggcatccgagtgggtgatttgaggcacatggatactttccctcagaagcttgatcttatattgtcagatgcagcattgaggttcaaagattttaactatggtccagatgtgctcagggaagaagttgaaaaatacaagaggtatgccgagaggttggagccctttattgctgatactgtgcttgtcatgaatgatgccatagaacaaaagaagaagattttggttgaaggaggacaagctaccatgttggacattgatttcggaacttatccctttgttacttcttctagcccatcagcaggcgggatatgcactggtcttggtattgctccaagggtagttggtgatttaataggagtggtgaaggcgtacacaacaagagttggttctggtccttttccaactgaaattttgggttcaggaggtgatctcctcagatttgctgggcaggagtttggcacaactactggccgtcctcgacggtgtggctggctcgatatagttgctctgaaatactcatgtcagatcaatggtttctcatcgttgaatcttaccaagctggatgttttatcagatcttgaagaaatacagttgggtgtctcttacaaacttgctgatggcaccccaatcaaatcattcccttcagatctccgtcttcttgagcaactgaaggtggaatatgaagtacttcctggatggaaatatgatatttcttccataagaaactattctgaccttccaaaagctgctaggctgtatgtggaaaggatagaagaacttgtgggggtccctattcactacattggtattgggccaggacgtgatgctctcatatacaaatgagttcacattggatttgcatgcctctgtaggtaagttgaggctttttgcggtagaggtgtcgattcccgctaagtttcagtttttttgggatataaacacatttttagtgactagtgaggatcagctacatgatgtattattatgttgttagccatcatcattggcattttgggtttttatatgaatttgatacaaggtgtttgcagtctagttatgcaatacttgtcggaatgatgagtatgaattagatgtatgatgctaacatctgcccttgtcgtggtggtattcatgtagcggaaaataatgttgtactagtaacccacccaaatgcttttagctttcaactatctacaaaattgcatcatggttttgttgcccccc

SEQ ID NO: 1153 - DNA, 788 bp, Glycine max
  misc_feature (2)..(3): n is a, c, g, or t
  misc_feature (722)..(722): n is a, c, g, or t
  misc_feature (737)..(737): n is a, c, g, or t
  misc_feature (753)..(753): n is a, c, g, or t
  misc_feature (762)..(762): n is a, c, g, or t
  misc_feature (767)..(767): n is a, c, g, or t
  misc_feature (775)..(775): n is a, c, g, or t
  misc_feature (777)..(777): n is a, c, g, or t
  misc_feature (784)..(784): n is a, c, g, or t
tnnggtccgggccccccctcgagtcagctcgtaggccccccccccgctctggcaaaagtagtgacacccgaatgttatgagggagatatcatatcaaacccattaggttttgctgctcaaaagataagggaagcagctcaaatggttacggatgagtctataaggtcacaactacatgctagtttaggccaagggcaactgaatcacataagggcttttttcacgggacatgcacacagtattaatattccttttgatgtgaatcatagcattttcctcacaagctggatgaacatgccagtgtatgaatcagattttggttgggaaaagcctttgcattttggtatagtaagtcgggctcaagtagatagggcaaccattcttccaagccctgatggggatggtgttgttatcactatatttttccagacagcacttatggagcttttcttaaagttcttcttcgaggatatggataatatggagatatgaaatatcctgtgtttgggatatgcttttgaacatttcaaattctgttttgttgttttttagagttggtaatgttaatatttattttaagaataaaggacatgatcttggtgatctgttatgtgagtaagggaaatacttgtttttatatataggaaccctacgttatgtagtaccgctaataatttcatgtctagactgttatttaaatctatgtttacacagtcagaccntatttaaacggcgcncgggggactccctttntccttatanggtanttcactgngnactggcnactt

SEQ ID NO: 1154 - DNA, 1281 bp, Glycine max
aagagaagaaagggtgtttacacttgacttgagtgagacggagagagagtgcgagtgcttgatgttctcaattaattaaatctcacagagaaagtctctctctctctgtttttgttgtgttctctttactacctcttgaaaccaaaagggtcactctgtgctgtggcctctgttttcaaaggaaacccttgttcttttccttgcctttctttcctagcactgtcttctaacttccaactcatataattcattttccctagtcttctttgttttcaccctttccttgtgaaatctgcaaaaccagctattcagtttggctatcaaaccaagccaaagctcttatattattttttatatataaataggcaccaaatacacatttatgatacaccaatttgaagcttgtccacacaagacaagattatcaccagcccctttccattcacaaacctgagagtaagaagcacttgtcagtgaccaacaaaccaaccaaccaaccatgatgcctgctcatggcctcatcatctctctcatttttgtgtccattttagccaatgaggcaagcttggtccatgaggcaaatgggtcatttccaatggtgcccttggtggaggctgggaagatggagatgatgatggtgatgaatgagagcagaaggaaacttggaagcttccagatatgtgccttgtgcacctgctgtggtggagcaaaagggatgtgcttgccctctccttgttgctatgccatcaattgcaacattcctcatagaccttttggcttttgctcattcacaccaaagacctgtaattgctttggatgccatctttagtcccctctccccctattatagtcttataataataattgaaaaaaaattgagggttatttttagttaattatgttgcaagtgtgaatgggaagtgaagtgaagaatatctgctcttggttagtctgtttattaattactattagttattattattatttggggattgttatttccaggaattattttttctttctgcagtgcttactgggatttgttaggggtgcctggagatatagcacattgtctgatttgtcagaatagcaatatatgatataattatatgtagtacatggggaatcaagaaaacgttgtccctttatgtggagatactggggttcatgataatttttcacttttttgaatgattatagtaatgcaagtgctcagtgagcctgtcgtttggcctggaccatgattcaactttacaacttattctcattttgttaaggcga

SEQ ID NO: 1155 - DNA, 2439 bp, Glycine max
atttaattgcccgcaagcctttgtttgactgccacaacagtgtgaagatgtacatgaataccttgacttacttatccagtgacgcattctcatctatcccatcagaactggttcctgacttgcaaaggatgctttctccaaatgagtcttcaaggccaacagcaatggattttacaggctcaccattttttaggcatgacactaggctgcgtgctctacgcttccttgatcacatgcttgaaagagataacatgcagaactcagagttcttaaaagcattgtcagatatgtggaaagattttgattcgcgcgtattgcgatataaggtccttccaccactttgtgcagagcttaggaatgtggtgatacagccaatgattttaccaatggttctaaccattgcagagtctcaggacacgaatgattttgagcaatcaacacttccagcccttgtccctgtccttagttctgctgctggtgagacactattactgcttgtgaagcatgctgagcttataataaacaagactagtcaagaacatttagtttcacatgttcttccaatgattgttcgggcctatgatgatactgatgctcgtttgcaagaagaggtcctgaaaaaatctgtatcccttgtcaaacaactagatgcccagctcgtgaaacaagtggttttgccccgtgttcatggattagcacttaaaacaacagttgcgacggttagagtcaatgcgctgttgtgcctaggagacatggttaatcaacttgataaacatgctgtcttggacatcttgcaaactattcaacgctgtactgtcagctacgtaggcccccccccccctatgtgtaccctaggggttgcaaattctattttcaagcagtatggagtagaatttgtagctgagcatgttcttccattgcttatacccctgctgactgctcaacaattgaatgttcaacagtttgccaaatatatgctctttgtcaaggatatgctccacaaaatagaagagaagcgaggagtggctgtgactgattctggaacgccagagataaaactatctcccgtggttaatggccttcaatctgaagccacgcggacaagcagcagctctgtacctgcttcaacaaaaaacagctcttgggatgaagattggggtcccaaaccaaagggcactgcctcttcgatccagaattctattgatgcaaccagtcaatctatggcaggcaaccctgtggatcaagtaacatctttacaaaagcatttgtccttagcggctttatctgctaagcaaacagccaagtcatgtccgtcagtggatgtagaatggccacctcgtgcatcttctggtgttaccccacaatttggtgatactgaaaggcagacaatagcagcaggaacttcatccacatctaatcttgaatctgatgatccttttgctgattggcctccgcatcctaatggctcagtatcaggtggatctggaatatccaacaatggtactttaggaatgccactaaacaaagttgggtttaattcaatgacaagcacttcaagcaatatggctccccaaactagcaacagttggcctgttaattcccaaagttctgccgagtccattagtttgaactcaaggagtgctagttcaacaacgggtagcctgaatactggtggccttggacaacagaaatctcttgggttcctaaaacaaagccaagcttttccagcatcgaatgtttcatataataatgttcagtcaacagcaacagatcttggatcaatattttcttccaacaagaatgaacaaattgcacctaaacttgcaccacccccttcaaccactgtgggtagaggacgaggaagagggaggggagctgcttcaaccactcggtcctctcataccaagtcacatgctgagcagccaccccttttggatttgttgtgatagcttgcatctattgttgttcatgtattagggtgagttactgttgagattgtacattttatgcaacatcctgtgttgagtgcttgtgaagggagatttcaaaaaatcttgccaggcaacatgttttaagggacggctactctttgtaaaggttttgttgtatgttgcttagtctatagtgattttgcaaaatttggattaatatttttgatttttttgtcctcgcatcatacttcattcttagggcatcaggcaaagtgtattcagaaaagtcctgattactgtgactgggttgaaaataataaaggctgtcatgaagtaacttctgtaccaaggatttgaattccactatgtacgactagcataatagaaattgtttgtgggtgaagtaacgatctctacccatatcttgctcttaagatctcatctactggagaactgagacgcataaaaaaaaaaaaaaaaaaaaaaaaactcgagactagttctctcc

SEQ ID NO: 1156 - DNA, 1641 bp, Glycine max
attacgtcagattgtggagcagtctctatcattcacgatgagcaaggttatgcaaaaactgcagaggacgctatagccgaaaactcatttgcagggatggatgtggagtgtggtgattacataaccaagcatggaaaatcagcagtgtcccagaaaaaactgcccatatctcaaatcgatcgtgcccttcaaaacctcttctccattagaataagactaggcctattagatggaaaccccaccaagcttccatttggcacaattggtcccgatcaagtgtgctccaaacaaagcctccaactagccctcgaggcagcaagggatggcatagtccttctaaagaacacaaactcactcctcccactcccaaaaacaaaccccactattgccttaataggccccaatgccaatgcctcatcaaaagttttcctaggaaactattatgggcgtccttgcaatttggtgacactcttgcaaggctttgagggctatgctaaggacacggtttaccacccggggtgtgatgatggcccacaatgtgcttatgctcaaatagaaggggcagtggaagttgcaaaaaaggttgattatgtggtgttggtcatggggttggatcagagtcaagagagggagtcacatgatagagagtacttagggctgccagggaagcaagaagagctcattaagagtgtggctagggcttcaaagagacctgttgttttggtgctcttgtgtggaggcccggttgatatcacttcggctaagtttgatgataaggttggagggatcttgtgggctgggtacccgggtgaacttggaggagtggcactggcccaggttgtctttggtgatcataacccaggtggaaaactaccaattacttggtacccaaaagatttcatcaaagtaccaatgacagacatgaggatgagagcagatccagcatcaggctaccctgggagaacctacagattctacactggtccaaaggtgtatgaatttggctacggcctaagctacacaaaatattcctacaagctcctctctctctcacacaacaccctccacatcaaccaatcatccacacatttaacgactcaaaattctgaaaccatacgctacaagctggtttcggagttggcagaagaaacatgccaaaccatgttgttgtcgatcgcattgggagtcacgaatcacggtaacatggcggggaagcatcccgtgttgctgtttgtgaggcagggaaaggttagaaacaatgggaatccggtgaaacagttggtggggtttcaaagtgtgaagttgaatgcaggggaaacggttcaagtggggtttgagctaagcccttgtgagcatcttagcgtggcgaatgaggctggttcgatggtgattgaagaaggatcttatttgttgcttgttggggaccaagagtacccaattgaaatcactgtttgatcatgcaacaattggagtgttcaatcaatcaagtaatgcattaaaggaataaaaactattttgcagcttctttatgaccattctgtatgttatatatccgaatcctctgtatttcaaaacaataggttgttttacatgcatcaagaaaaaaataataaatagataaaaaaaacaattttataaaaa

SEQ ID NO: 1157 - DNA, 1359 bp, Glycine max
agtttatcaagaactcttgttccaccaaccccaaaattgtgaacctttcaaagagacgaagccttcgaatctctctgaaacttttctcttctctttgattcttctctatcagttaaacattagaatgagccgttcacaggatccacacccttcccgatctttcttcccttttggaaatccttttcggatgatatcacctaaaggctctcgcatgtctccacaacttcttgcagtgttgcaagcttttgaggcaacattggcagagaggctgaaaaatcttatgcctaaaagcaaggatgaaatcctcaccttgtcttggatgactttagctatgaagtcactttgtgaaagtcacaatgacatacggacccttatgactgcccttgagcttcctgtgagtgattgggaggacaaatggattgatgtgtacttggacataagttcaaagttgctagacatttgcaatgcattcagctctgagctttcacgtctgaaccagggaaaccttcctcttaagtgtgcactgcacaatttagactctgcctcttcaaagcagtatcttcgggcatgttccctacttgatgattggaggcagcatgttagttctaggaaccctagaattgagaaatgtagttctatgttagataatcttgtgggctcacttgatcttcctaaggttaaaaattctgccaaaggaaaggttttgatgcaagctatgtatggagttaaggtggagactgtatttatttgcagggtgtttactgcagcattctctggctcgtcaaagaagttatcagacttgaatgtggccgacatacattcatgggctccagattttagaaggttgcaggatcttgtaaatgaggaaattagagttagattttctggtggtaaatttactgtattgaatgagttggaagcggttgatgcctctgtgaagatattatatcctactatccaagctggtgtagataccgttgagacagaatggcttgtgaagactgttgaggaattacgtgcgggtgctgagaagctttcacaaggaattgatcttcttgcaaagggagtagatgggttttttcaagccgttatgactagtcgcgatactttgctcagctctgtgaggtttgataaaactgtaaatgatcgttccccaggccgtaacagagacatgcaggtagttcactaattatgcagtagcctaactctggtaggttttgggggggtgttcctttgtaggattagtagtattttcggtctttagtagtatttagccgaaatgtatatgagtggggatgttatgtgtaatgtcaaacaattacaaaatgcagatctttgttaacgctggtgtgtgcaaaa

SEQ ID NO: 1158 - DNA, 828 bp, Glycine max
accccccacacaacacaacaacaacattaacaacaacacactaattagtctctcagtggtcactactttgcagcacactcttgagttttgagtctccctccctggcagtttcatggcttcttcagtgaccagatcaacctcaggcttcagcttctcagagatctggctcttggtggcagccacagcactcatctgtggctttctggggtacatagtttatgatgcaatcatggccactgcttctgagttgctgcaacgtttgctggtaatttctccactgttcttgatcatcattgttcactggctctccactgcaagccaaataagcttccccatgccaggatctgagcctagtgccatccacagagctggtggttccccttggggtgttgcatttgttcttcttctgcttttccttctcatttcttaccaaccttccctgcatgaccttatttcttagctagcatgtgctatatagtttatcaggctatgaaaatttagtgcatgtcacttatgtggggtgcctgttcttttttttttttaacataaatgttaattattacgttgttagtttttattactagttgttagtttttattactagaaaaatctaaggtagtatctttccttcttttctcaccctactaatcttatatctccgggtgtggtacttgtaattttagagttactgtagctcataatgaaccttttaatttctatgtgaatttgggtgtaaaaactattgcagtgtctctctctgcctctaaaagagtcttgcttttcctctgtccaaaaaaaaaaaaaaaaataataaaataaaagcgtccg

SEQ ID NO: 1159 - DNA, 2062 bp, Glycine max
tacggctgcgagaagacgacagaagggggggaattcgcattttgtaaatgatatagtcaaaactaatttacacttaccatttgctatttgctaagttcagctacgtaggccccccccccgtttttggtctagcaggaaatacagctgacatggggatagaacaagtgatttaatgttgtctttgaaaaattaatcgatgttttcccttaggaattagcagttcattcatagattctgtaaaatttggggatgtttcttaaactctagcttcttaatgtgttttttaatcattggtctaccccatttatacagtttgcagatcacagtgaccatttgtgtatgaatttctaaggtcttgtcatggagtgtaatgcaaaatctctcgggcaatgggactgggagcacttattcttcttcaatacaaaagcagctgaaaatccaaggttacaaccaactgattgtagcagtgaagcagatcgggaaatcaacgttggaatgttgcatccatcaggtggtagtgcttgttctggctctgaactaatacatgcttcttcatcaaggagctcaaaatcagcttccaacaattcatcatcaaatggggatagcaaggcatctatattgactctggaaggttctcatgatgattccactgggaagaaagaattgtgcaatggagagccaattgaaacttctcctgcagcagtgccctctcctgtctctggtgaaccgttgctcactctaaagcttggtaaacgattgtactttgaggatgtctgtaccggaagtgattccaagaaaccatcttcctttgacattcccatttcatcaggaaagaaacataaaaccagtagtcagactttacagcatccaagctgccaggtggaaggctgtggccttgacctctcatctgctaaagattaccatcgcaaacaccgagtttgtgaagctcattccaaatcccctaaggtggttataactggtttggaacgccgattttgccagcaatgtagcaggttccatgctctgtcagagtttgatgacaaaaaaagaagctgtaggcgacgtctttcagatcacaatgcaaggcgccgcaaacctcagcctgactcaatccaattaaatccatcagctttgtcttcatcaccctatgatgggaggcaaatagtgagtccatttgcattttcaaggactgccacaaatttagcttggcaagatatgcacccccagacaaaagaatttctcccgaagcctgcaaaagccttcaataagataccgagtattgtctccatgctttctgatgattccagtggccttctaacatctagaggcatagcaacgaagagtactgttccaggtatggaagatcccattaggttgtctgatccaaacggtacacaagatgttaaccgtgctctctctcttctgtcaacgaattcttcatcttcatggggtgcatatgagactaagtccctttctttggaacactccactcgggcaacacactcaatcactcagcatcacttaccacttccttcctcggcagagtattggcacactgatcatcaacaacattcaagcatgtgtatctcattcacggattgcgatagcagcaatcgctttcaagactttcagctgttgagctcaccctatgaatcaccttttccttgcaaccaactggattaacaacactatgcttctactacaacaagatttctagtctgcatgttatttttaaatggagattaactaaaactgcatggaactcgctccatttcccgaatggtgtttgtaccagactgcgctcatttagtttctacataaccaacctaccatgtctccactggcaacaacttttaataccttagcttcttactattgttacgcacatctccatgcttcatcatactactatttaccttgcaggcttataataaataaataacttgtaaaaaaaaggctgttagaaacacatcccatatcattcgtttccggagtttggaagctttacatgtttctactttctatcttcattatattattggttaaattaaaaaaaaaaaaa

SEQ ID NO: 1160 - DNA, 1476 bp, Glycine max
cccgcgtccggttgttgtgcataagagatgccgtggtattgattggattatggtttcgcatcagaaagcaacctcagtgatcgaaacagtgacgtttttttttgcaacttccacctaatatcaatcatccacttcgactttaagatactaagaaggaaggaaggcggggaagtgagaagtgtaatggcttctgagagggaatgttttgacctctctggacccttacatttaacttatgttgactgggataatgcatatcatcgaaagtcggttgctgctagtttggtccaaggtgtttatgttctagagaaggacaggcaagaacggcgtgaaggtcctgatgctcttgcactgccttggtgggcgttcttccactttaagttgttttgttcgcttgtcgatgatgttgattcttccatctttggtgctatttatgagttcaagcctccatcatctatgtgcaatgacaccttacatagaagtccacgttatgtaattgccttccgagggactataaccaaggcagactcagtttcccgtgatatcaagttgggtatccattttgtgcgaaatgggcttcatcaaacttcacgtgctgagatagccatccaagctgttcgaaacatggtggctactgtgggtgcttccaatatctggttagctggccactcgctaggatcagcaatggcaatgctaaccgggaaaaccatggccaagactggcatatttattgagtcttttctcttcaaccctccatatgtatctgctcctattgagagaattaaggacaaaaaattgaaacatgggcttagatttgctggcagtgtagtaacagctggacttgccattgctatgaaggataagcagaagaagagtttgtcctttgatccatttgctgctttgtctgcctgggttccatccttatttgtgaatccatctgaccatatctgctctgagtatgttggatactttgagcacagaagaaaaatggaggagattggtgcaggaaacattgaaaagttagccactcaaacttcccttaattgtctactgatgggtgtgttggggaaggaatctgatgaacccctgcacctcattccttcagcttctctgacagttaatcatactccttcaaaggatttcaaagaagctcatgggattcaccaatggtggaaacctgacttacgcctagaatccaagctctaccgatactaataattcttgtagttgttgtagtgtgtgtctggaatactagcacaataaggttggattgattttttctttttcccattgaaagcaaaacaactcattgttgctttcagattttcatgtattttgcgtgatttttgggtactcactgttaatccaaacacgctgatattatgttggtggatgtataattgtatattgacttgaattatgctgtatctggttttccatgtgaagttaattttgtaaatgaacagttcatgttat

SEQ ID NO: 1161 - DNA, 1481 bp, Glycine max
agccttgacaaacctcagtaccaagaaccccggtttgttcgcacttcaatctccaagtcataagtacactcttctctccccattcactggcattggcttttggtagttgaagtcttcctttgttgtcaaattcagccccgtaggccccccccccatttgaaaaataaacaagaagagcaagagagtaaagcagcagaaggggtgaagatagggatggcgggcatgtctggatgtagttgccgttggcagtgggcggaggcgaaatccatgggagtgggctgttggttcccttcctcaactaccaaaaggagtttccggcctgtgattgtttctgtttctgctatctccgataataactctcactcttacactagcagcggaagaaagctagaagaagaaggcatcaaagggtcaggaactaccgccagagatcgcaggttgcttagaattcgccaagagaaacgacagcgggaatacgacctccttaacaactaccctgcttgggcaaaagtcctggaaaacgcttgcaaagacgatgctgaactccgtgccgttctcggagatagcattggcaaccccgaactcatgaggaaacgagtcgaagatagggtgagaaagaagggtagagactttcaaaagtctaaaacaggatccgtccttgctttcaaagtcaccttcagagacttcaatccacttgattcatatatctggtttgaattgtttggatcaccatcagatcgggatgttaatctaattggtaatgttattcaatcatggtatgtcatgggtcgtcttggtgcctttaattcttcaaatttgcagctggctaattcatcagtggagtatgatcctttatatgatgcagataaaggtttcaaagtgatgccgtcatctttccatgatatcagtgatattgagttccaggaaaattggggacgtgtttgggtggacttgggtacatctgattattttgcaattgatgtgctcctcaactgcctaactgccctgagctcggaatatcttggaatccaacaaattgtttttggtggtcgccgcatgggtgattgggaagaggggatgacaagccctgagtatggttacaaatatttcaagatttaaactgggacttgttgcagctgatttcatttcatgcattgtactttccattttgttcaaaaagggttgtagtgcatttgtgcatacgaaaaggtaaactttttgggccatggccattccttttatttcgtattgttgtcatttggagaaaaaattgtaggaaggaataaaaattgcataaatagaacagaaacctataaatcgaaatcaaaagtaaatggcaagaatataaaggacttgactgtggatgaaaaaaaaaaaaaaaacaaacaaaacaaaaatcaaataaaaaatcaaaataaacagtaaattaaaaaaaaatatactaaaaactaatactttaaaacataatcatctaaattatc

SEQ ID NO: 1162 - DNA, 879 bp, Glycine max
tatgctcggggagagagccaaatcgaaccgaaaagtttcgaaattacatacataaagagggagagagaggggatgcaaattccatgagagcagaagaggtgcctcttactccgttacgagttcgacccctcctctcgctcttctcttctcttctcttctcttcatagcaaagcaataatcctattagaatatggaagagagcttcgttttccagtggagcgttatcagatctctcttgtccatccttcagtggtgggccttcaatgtcactgtcatcatcgtcaacaagtggatctttcagaaattggatttcaagtttcccttatcagtttcctgtgtccactttatctgttcatccattggagcatatgtggtaattaagttgctgaagcttaaaccactgataactgttgaccctgaagatcgctggagaagaatctttccaatgtcatttgtgttctgtattaacattgttctggggaatgtgagcctacgatacattccagtttcttttatgcagacaataaagtcattcacacctgccaccacagttgttttgcaatggctagtgtggaggaagtattttgactggcgtatttgggcttctcttatacccattgttggagggattcttctcacatctgtaacagagctttagttttaaaaggttgggatttcggggtgccctttttggggtggtgggctaactccaaaaaaactattttttggaaaatctcttttggtgggaaaaaattttgaacgcataaaccccggttttttaatgtggcccttttttgaaccatgattgttggggtttcccccgctggttttttaaggggagggggaacccttggaggggcaaatacacctccccgattg

SEQ ID NO: 1163 - DNA, 2404 bp, Glycine max
  misc_feature (14)..(14): n is a, c, g, or t
cgtttccggtccgnattcccgggtcgacccacgcgtccggagaagaaggcttaaaaccccagcagagtcctcgcaccgcactcccccgcccgccacccctctcctctcagctcaggagtgtataatctgagcgatgtcagatcttgaggctcccttgcgccctaagaggaagaaggtttgggtggactatttcgttcagtttcgatggatccttgttatttttgtggtccttcccatctccttcaccatttatttccttacataccttggggatgtaagatctgagtggaagtcctataagacgcgtcagaaggaacatgatgagaatgtgaagaaggttatcaaacgtctcaaacagaggaatccatcaaaagatggtcttgtctgtaccgctcgtaagccctggattgctgttgggatgcggaacgttgactataagagagcccgtcattttgaagttgatttgtctgctttccggaatgtacttgagatcgacaaagaacggatgattgcaagagttgagcccctagtcaacatgggtcagatcagcagggtgactgtacccatgaatctttcccttgctgtagttgcagagcttgatgatctaactgtcggtggtctcattaacggctatggtatagaaggaagctcccacaaatatggtttgttcgctgatactgttgtggcctatgaaattattttggctgatggcactcttgtgagagccaccaaggacaatgagtactctgatctatactatgccattccgtggtctcagggaacactcggccttcttgttgctgctgagatcaggcttatacccgttaaggagtacatgaagctaacctataaacctgttgttggcaccctgcaagatcttgctcaggcatattgtgattcttttgctcccagagatggagaccaggataatgaggagaaggttccagactttgttgaaggaatgatttatacaccaacagaaggtgtgatgatgacaggaagatatgcttcaaaggaagaggccaagaagaaggggaataagatcaacagtgtaggatggtggtttaaaccctggttctatcagcatgcacagacggcactgaagaaaggagagtttgtagaatacattcctaccagagaatattatcacaggcacacgagatgcttgtactgggagggaaagcttatcctcccatttgctgatcaattttggtttaggtatctgtttggctggttgatgccacccaaggtttctctcctcaaggcaactcaaggtgatgctataagaaactattaccatgaaatgcatgtcatccaggacatgcttgttcctttgtacaaggtgggagatgctttagaatgggttcaccgtgagatggaggtataccccatttggctctgcccacacaaattgttcaagctgcctgtcaaaactatgatttaccccgagccaggattcgaactacaccgcaggcaaggagacacccaaactgctcaaatgtacacagatgttggagtttattatgcaccaggtcctgttcttaggggtgaggtatttgatggggcagaagcagtgcgtaaaatggagaactggttgattgaaaatcatggttttcagccacagtatgctgtgtcagagctgtccgagaaaaacttctggaggatgtttgatgctggtttatatgagcatactaggaggaagtatggagctgttgggacctttatgagtgtatactacaaatcaaagaagggcaggaaaactgagaaggaggtacaagaagcagagcaagcgcaccttgaaactgcatatgcagaagttgatcaaccagtagactgattttggattttgattcatctcatggtagtagaattttattgcatctcgtttcccacatatgcaggagttgatcaacgggtagactgattttgaattttgattcatcatatgatagaattttattgcatattcattccgtatttatcgttttgccttttgtaattttggatctctggcttcggatagcctcagttgctgatactcttttgccgtttccaatgtctttaatgaattatgtggacttaacttttcaagtgctcaagactgaaatggctgtgtgctcgagtgtatctttaattcttaggtacaaataaaatgcatctgcagacgtgcaacgtcctaatcaaatcctttcacgggttgttgctcgtacatatgtacatgatacattgtgtatcccagtgacctggtcctaccacatttggatccttgaaaatttacatggcttgtaatttaaactatgtgattcagtctaaaaattacttgaaactctattcgttaaaaatatggttgacatgaatgtgaaacaagttcgattaattcaaaaaaaaaaaaaaaaaactcgac

SEQ ID NO: 1164 - DNA, 2327 bp, Glycine max
cacgcgtccggtcaccccaccagggcccccccctctcactctcactctcgcaactgctgcctcactctctcactctctcagcaggagtatataatctgagcgatgtcagatctcgaggctcccttgcgccctaagaggaagaaggtttgggtggactattttgttcagtttcgatggatccttgttatttttgtggtccttcccatctccttcaccatttatttccttacataccttggggatgtaagatccgagtggaagtcctataagacgcgtcagaaggaacatgatgagaatgtgaagaaggttatcaaacgtctcaaacagaggaatccatcaaaagatggtcttgtctgtactgctcgtaagccctggattgctgttgggatgcgaaatgttgactataagagagcccgtcatttcgaagttgatttgtctgctttccggaatgtacttgagatcgacaaagaacggatgattgcaagagttgagcccctagtcaacatgggtcagatcagcagggtgactgtacccatgaatcttgcccttgctgtagttgcagagcttgatgatctaactgttggtggtctcattaacggctatggtatagaaggaagctcccacaaatatggcttgttcgctgatactgttgtggcctatgaaattattttggctgatggcactcttgttagagccaccaaggacaatgagtacactgatctatactatgccattccgtggtctcagggaacacttggccttcttgttgctgctgagatcaagcttatacctgttaaggagtacatgaagctagcctacaaacctgttgttggcaccctgcaagatcttgcacaggcatattgtgattcttttgctcccagagatggagaccaggataacgaggagaaggttccagactttgttgaaggaatgatttatacaccaacagaaggtgtgatgatgacaggaagatatgcttcaaaggaagaggccaagaagaaggggaataagatcaatagtgtaggatggtggtttaaaccatggttctatcagcatgcacagacggcactgaagaaaggagagtttgtagaatacattcctaccagagaatattatcacaggcacacaagatgcttgtactgggagggaaagcttatcctcccatttgctgatcaattttggtttaggtatctgtttggctggttgatgccacccaaggtttctctcctcaaggcaactcaaggtgatgctataagaaactattaccatgaaatgcatgtcatccaggacatgcttgttcctttgtacaaggtgggagaggctttagaatgggttcaccgtgagatggaggtataccccatttggctctgcccacacaaattgttcaagctgcctgtcaaaactatgatttacccagagccagggttcgaactacatcgcaggcaaggagacacccaaactgctcaaatgtacacagatgttggagtttactatgcaccaggtcctgtttttaggggtgaggtatttgatggggcagaagcagtgcgtaaaatggagaactggttgattgaaaatcatggttttcagccacagtatgctgtgtctgagctgtctgagaaaaacttctggaggatgtttgatgctggtttgtatgagcatactaggaggaagtatggagctgttgggacctttatgagtgtatactacaaatcaaagaagggcaggaaaactgagaaggaggtacaagaagcagagcaagcgcaccttgaaactgcatacgcagaagctgatcaaccagtagactgattttggatttttattcatctgatggtagtagaattttattgcaactcgtttcccacatatgcaggagttgatcaacgggtagactgattttgaattttgattcatctgatggtagaattttattgcttcttgattccgtattttatcattttgcctttgtaattttggatctctggctttggatagcctcagttgctgataccgttttggtgtttccaatgtctttaatgaatttatgtggacttaacatgatgttttcaagtgctcaagactgaaataaatagctgtgtactcgagtgtattattcttaggtacaaataaaatgcatctgctgacgtgcaacgacctaggcaaaatcctttcacgggatgttgcacgtacatatatatatgatgcattgtgtatcccagtgacctggtcctaccacatttggatccttgaaaatttacctggcttgtaatctactctttggtttggattatttgattcagtccgaaaattacttgaaattctactcgtca

SEQ ID NO: 1165 - DNA, 1659 bp, Glycine max
  misc_feature (1657)..(1658): n is a, c, g, or t
cttatatattctggcaaaatataaggcgtctcaccgtcgttgccccccccccccagacacactcccatcttcgttaccatcgccctctcactaacaacattcacactctgcggagctcccaaagcactaatctaacaaacgcaatttaaaaaccgcaacaaactttctctcttgcgttcacacttattctctggcttcttcttccattttcgcttctcgtagcgttttcggaacagttatggcttccattgccggatccaactgcgtcgctctccgaaccgccaacttcggcgcctccggtaaccggaaaatcggccagatccgccaatggtctccgattctcacgaatctccgtcccgtttccggtcttcgtcaccgatcgaatactccgtttagctcctccggtgtgagagcacaggttgctactctggaggaagcaggaaccggagcaactcagaaagtggaagcgccggttgcagtggtgaccggagcttccagaggcattggcaaagcgattgcactgtcattaggtaaagcaggttgcaaggttctggtcaactatgcaaggtcatccaaggaagctgaggaggtttccaaggagattgaggagtttggtggtcaagctcttacatttggtggagatgtttctaacgaggctgatgtggagtctatgattaaaactgcagttgatgcttggggaacagttgatgtattaataaacaatgcaggaataacaagagatggtttattaatgagaatgaagaaatctcaatggcaggatgttattgatctaaatctcactggtgtttttctttgcacacaggctgctgctaagattatgatgaagaaaaagaagggaaggatcgtcaatattgcatcagttgttggtttggttggcaatgttggacaagccaattatagtgctgcaaaagcaggagtaattggcctgacaaaaactgttgcgaaggaatatgctagtagaaacatcactgttaatgcagttgctccagggtttattgcatctgacatgactgccaagctaggacaagacattgagaaaaagattttggagacaatcccattaggaagatatggccagccagaggaagttgctggactggttgaattcttggctcttaatcaagctgccagttacatcactgggcaggttttcaccattgatggaggtatggtgatgtaaattagcaatccttttaccttgcaacatgagcttttgcacttttaaactacttctgtacggtgatagtttgttctttgctgagttttgtttaagctagttttaccctgtgatttatcgtagaatattagttgaaatgcaattcagtcacttttggcactagctctgaattgcttactgatgaaatgcaatgtgtccagcatcttgtaccattttggtttttatggtcatgtcagcagaataggcataattcttatatgcaattcagtcacttttggcactagcttttccttcttggatgttctttcagggaactgtctcatttaagcaagcattattatgtttattttctggtttcccgaaaaggggtatgcttttaggcttcctatccgaattactattttccatttccatttgcaatcgtgcacaattgtacccatgatttttcctcattcaagnng

SEQ ID NO: 1166 - DNA, 2199 bp, Glycine max
ccggcccgggggcccgcgccggcccaccgttccgtatacactcttctcctctatctaacaacacccaacaaaaataaaaaataaaaaaaattagggttttcaatttggggaaataaaaatagggggaaacattctagagagagtgtgtagaaaatatggttgtcgatgatatgacgctgtgcatcatcgtcggctatggaggttcctcttcttctcgtttctccgatgcttatcccaaaaggggtttgatggaggggagatatagtggggattgatatgatgaaggtgtttataaggttgttttgttgaaattgtgtttttgggatggcaatattgtacgaaccagcaataaaactcatcgaccagatgagctagcatgggcgattcttgtcttacttctttgtcaatggagaatcatcacccttccacgctcttgtcaatggactcaagtgcatcttctcacgaggaactggatttggagatgaatcgccaaatcatactcacccgtccgccggatattaatcttcccctctccgccgagcgcagcccaccgccacagccgtggaattctgagccctgtgatattctagatgttggtcttggtactcaaggctatgagactgagagttttctcaatctgcccaaagctggtaggaagtgcgcgaagcgtgttgatagcatatggggtgcttggtttttcttcagtttttactttaagcctgctttgaatgacaagtccaaggccaagattgtcagggacagcaacggtgtctcagggttcgataagtctgatctgaagctggatgttttcatggttcagcacgacatggaaaacatgtacatgtgggttttcaaggagaggccggagaacgcgctgggtaagatgcagctgaggagttacatgaatgggcattctcgccaaggggagcgcccgtttccgtttagtgctgacaagggttttgctcggtcccacaggatgcaacgaaagcattatagaggactatcaaaccctcaatgcgtgcatggcgttgaggttgtttccacacccaatctgatgaccctggatgaggatgatcgaaaaaggtggatagaactcactggccgagacttgaattttacaattccaactgaagcaagtgatttcagttcatggagaaatcttcccaacacggactttgagcttgagaggccacctcccccaatcaagaatggtcctaatgcacacccgaagaagctgcttaatggatctggacttaacggatctggtcttaacggatctggtcttaatggatctggacttcacctatctaaccacagtaatggtgatgggttggacctctctcctgtcagcagcaaaaagaggaaggactttttccctcatgggaatgaagaagaatgttacttggctgttaatcctccatccgatcgtattccagatatagaaatgcacccaactgagccacactggttgaatgacttcagcggggtgataaaaagtgtttatggacctgttacagctgcaaaaactatttatgaggatgaacaaggttacttgattattatcagtctgccctttgtagatcttccaagtgtgaaagtttcatggaggaacactctgactcacggtatcataaaggtttcttgtatgagcacatctcgaaagcctctcatcaagagacatgataggacattcaagcttacagatccatcgtcagagcactgccctcctggagagttcgtccgagaaatccctctttcaacccgaattcctgaagacgccaacatagaagcatactacgatgggccaggatctgtgcttgagatcctggtgccaaaacatcgcgtgggacctgaagagcatgaagtccgtgtttgcctccgccctcatctgggagggaatgatcttaagttaacttgagataataggcacttaaaaaaattgttaggcattccagtatggttcgtatgtcattgtttttctaaccttgtaccatacactgttatttgcaatagaattgtgtgtcttatgtttgtctctagcaattttagctcactgactgccctggttctttttgttccggtgcatctgtatgcttctgattgtaagcagtattgaacagctaattctcatgatttataagaatttaccaaatcatacctttgaaataaaaaaaaaaaaaatttcaaaaaaagggcggc

SEQ ID NO: 1167 - DNA, 1953 bp, Glycine max
  misc_feature (637)..(637): n is a, c, g, or t
tttttttaacgggtcgaacctcacaacaacaacaacaatcaggggttttatttattttgtttcggtcaaaaaaggagaaaggaaaggtttcatagattaatatatgttatgggcaccatcgcctctccagcttcttcttcttctccgttttctgatgctttttctcaaagcaatacaagtcatgaaggagatgagctaaaataatgggtgattcttctcttctcacttgtttgtcaatggagaatcaccacccatccacgctcttgtccatggattctagtgcttcttcacatgaggaactggatttggagatgaacacacagatcatactttcgcgtccccccgatatcaatttgcccctttcagcagagcgcagccctcctccacagccatggaattctgatccttgtgatattttggatgttggtcttggtactcaaggctatgagactgagacttttctcaacattcccaaagctggaaggaaatgcaccaagcgcgttgatagcattttggggcgcttggtttttcttccggttttacttcaagcccgtgttgcatgagaaatctaaggccaaggttatcagggacagcactggttttttcggggtttgacaagaaccgatctccaccttgnatgttttcatggttcagcatgacatggaagaacatgtacatgtgggttttcaaggggaggccggagaatgcattgggcaagatgcagctcaggagttacatgaacgggcactctcgccaaggggagcgcccgtttccgtttagtgccgagaagggctttgttcgatcccacaggatgcagcggaagcactatagaggcctgtcaaatccccaatgtgtgcatggcattgaggttgttccgtcacccaatctaatgggtctcgataaggatgagcagaagaggtggatggaactcactggccgagacttgaatttcacaatccctcctgaagcaagcgatttcagttcgtggagaaaccttcctaacaccgactttgagcttgaaaggccgcctgcacccaatcaagagtgctcctaattctcatcctaaaaaactgcttaatggaactgtgctgaatctgtctaaccatagcaatggtgatgccattgatctatctcctgtaaatggcaagaagaggaaagagttatttcttaatgatgaagactattacttgtctgttaatgctccttctgatcgggttccagatatagacatgcaaccaaccgagcatccctggttgaatgactttagtggggtgatgaagaatgtccgtggccctgttactgctgcaaaaactatttatgaggatgaagaaggttacatgattgttataagtcttccgtgtgtggatctttcaagtgtgaaagtttcttggaggaatactctcactcatggtatcattaaggtttcttgtgtgagcacatctgggaagccatatatcaagagacatgacaggacattcaaacttacagatccgtcatccgaacactgcccacctggtgagtttgttcgtgaaatccctctttcagctcgaattcctgaagatgccaatatagaagcatactatgatgggccaggatcagtgcttgagatcatggtgccaaaacttcgtgtgggatcagaagagcatgaagttcgtgtttgccttcgccctcatcttggagggaatgatcttatgttgacttgagttttaggctcttattaaaattgttggggttgcaagcatggtccgaaaatcattgttttactaactttgtgcctgtgttatctacaatacaaaaaagtgcatctcacaattatctccattttttcttattaattgcgatggtttttttggggtccataaatctattagcgtttgattgtaatcattctttatcttttaacatccatccctaatcatttatatgaaattattaaatctgaccttatgtata

SEQ ID NO: 1168 - DNA, 2119 bp, Glycine max
ccacactcttctcctctatttaaccacgcccgccccccccccccggttttcaatttggggaaataaaaatagggggaaatattctggagagagtgtgtagaaaatatggttgtcgatgatatgacgctgtgcatcatcgtcggctatggaggttcctcttcttctcgtttctccgatgcttatcccaaaaggggtttgatggaggggagatatagtggggattgatatgatgaaggtgtttataaggttgttttgttgaattgtgtttttgggatggcaatattgtacgaaccagcaataaaactcatccaccagatgagctagcatgggcgattcttgtcttacttctatgtcaatggagaatcaccacccctccacgctcttgtcaatggactcaagtgcatcttctcacgaggaactggatttggagatgaatcgccaaatcatactcactcgtccgcccgatattaacctgcccctctccgccgagcgcagcccgccgccacagccgtggaattctgagccctgtgatattctggatgttggtcttggtactcaaggctacgagactgagagttttcttaatctgcccaaagctggtaggaagtgcgcgaagcgtgttgatagcatatggggtgcttggtttttcttcagtttttactttaaacctgctttgaacgataagtccaaggccaagattgtcagggacagcaatggtgtctcagggttcgataagtctgatctgaagctggatgttttcatggttcagcacgacatggaaaacatgtacatgtgggttttcaaggagaggccggagaacgcacttggtaagatgcagctgaggagttacatgaatgggcattctcgccaaggggagcgcccgtttccgttcagtgttgacaagggttttgctcggtcccacaggatgcagcgaaagcattatagaggactatcaaaccctcagtgcgtgcatggtgttgaggttgtttccgcacccagtctgatgaccctggatgaggatgatcgaaaaaggtggatagaactcactggccgggatttgaatttcacaatcccacctgaagcaagtgatttcagttcatggagaaatcttcccaacacggactttgagcttgagagaccacctcccccaatcaagagtggtcctaatgcacacccgaagaagctgcttaatggatccggacttaatggatctggacttcatctatctaaccacagtaatggtgatgggttggacctctctcctgtcagcagcaaaaaaaggaaggactttttccctcatggaaatgaagaagaatgttacttggctgttaatcctccatctgatcgtataccagatatagaaatgcacccaaccgagccacactggttgaatgacttcagcggggtgataaagagtgtttatggacctgttacagctgcaaaaactatttatgaggatgaacaaggttacttgattattatcagtctgccctttgtagatcttccaagtgtgaaagtttcatggaggaacactctgactcacggtatcataaaggtttcttgtatgagcacatctcggaagcctctcatcaagagacatgataggacattcaagcttacagatccatcgtcagagcactgcccccctggagagttcgtccgagaaatccctctttcaactcgaattcctgaagatgccaacatagaagcatactacgatgggccaggatcagtgcttgagatcctggtgccaaaacatcgcgtgggaccagaagagcatgaagtccgggtttgcctccgccctcatctgggagggaatgatctcaagttaacttgagataggcacttaaaaaaatttgttagggattccggtatggttcgtatgtcattgtttttctaactttgtaccatacagtgttatttgcaatagaattgtgtctcttatgtttgtctctagcaattttagctcactgactgccctggttctttttgttccggtgcatctgtattatgcttttgattgtaagcagtattgaacagctagttctcataatttataagaaattaccaaatcatacctttggaataaaaaaaaataaaaatccacactagttctctc

SEQ ID NO: 1169 - DNA, 1246 bp, Glycine max
ttcagctacgtaggcccccccccccctttttatattcttttcttcatactgaatgcttttgtgtcttgtttaggatgctaaagtaacaatgcttggtgttattccaagtattgtacggagttggagaagtacaaattccacatctggctatgattggtcttctatccgttgctttggctccactggtgaagcatctaatgtggatgaatacctttggctgatggggagagctctctacaagcctatcattgaatattgtggtggtacagaaattgggggtggatttgtttgcggatcactactacaggctcagtcattagctgcttttagcacaccagctatgtgctgcagtttgtttattcttgatgatgaaggccttcctattccacaaaatgttccaggaataggtgagttggctcttggtccgctcatgcttggggcttcaaatacactgcttaacgctgatcattacggtgtctatttcaaaggaatgcctctcttgaatggaaaggtattacggaggcatggagatgtatttgagcgtactgctaaaggatactatcatgcccatggtcgttcggatgatacgatgaaccttgggggaatcaaggtgagttcagttgagattgaacgcatatgcaatggagtagatagcagcattctggaaacagctgcaataggggtaccaccttctggtggtgggcctgagttgttgactatagctgttgtattcaaggattcaaatagcacaaatcaagatttacaccaattgaggatgtcttttaattcagctctccaaaagaaactaaatccactgttcagggtttctcaagtagtcacactgccatctcttccaaggacggcatccaacaaggttatgagaagggttttgcgacagcaacttagcgaaactaaccaaaattctaaaatataatacaatcatgtaatctaatattgaagattggatatcctggaccaggagcgatcatggtacacatttaaaagtattgttctttttggtactagaaaataataatattacggtaattacaatataatgtacaaatggtataaataattcccatttgtaacaatagaaataaaacagaagaataggagtttgaattgtatttgaaatcatttttgaaaacctgttgggttgatcaaaaccttttattaagaggcttggtaaaaagcgtaacagcaaaaagagtattgcaagcagaagttaaatatcattttatgg

SEQ ID NO: 1170 - DNA, 1925 bp, Glycine max
tcagctacgtaggccccccccccaaggcaatggcaaagccaagaagatcaaagatgatgtctttgaaactccctttcctgttgaccttgttcctcgcactctcccaagctcaaccgcattccgatgatccaccgccgccaccctcctccaacgtctgcgtcatcggcgctggcatcggtggctcctccgtcgctcacttcctccgcaaatactcgccgtcctccactccctccaccaaaatccgagtgttcgagcgcaacggccgcgtcgggggacgcatcgccaccgtgacggtggcgggcgagaccttcgaggccggagcgtccattctccatccaaagaacctgcacacagtggattacgttaagatcctgaagctgaaggtcaaagagccgaccgcgtcggaggattccctctctctcggcatttgggatgggaacaagttcgttttcaaaacggtgtcgccgcttagttccactgttcccctcatcgataagcttctcaaacttccgtttgttaatactctcgtatcgttcgttaattccgcactcatgttcgttcgctacggcttctcgctctttaagatgcagaacttcgttgagattgctgtggataaattcgtaaagtactatgaagatcctggttcaagacctatttttgagactgtggatgagatgctgcagtgggctggtctgtataatcttactaccaggactttgcgggatgaattggtggatgctgggttgtctacctcgttgatcaatgaacttgttactgtcatcacacgcattaattatggccagagtgtctccatgagtgggttgggtggtgtggtttctcttccgcgacctgggccccccccccggtccatcgaaggaggcaactggcaaatggctgctggactgattaatcagtcagatgtggcattacacctgcatgaagaaataaaatctgttgctgaccttggagattactacgaactcaactcaacaaaaggaaacagttacagatgtgaagttgctgtggttgctacaccactggatgagttagatattcaatttattcctccaatttcaatttctgagagaaaattacagcacacatttacaacttttgtcaggggccttctaaaccctgcatattttggtctgaaggctgtgacaaaaattccagatcttgtgggcacaatagaggaccctgagcttccattttcatgcattgcagttctcaagaagcacaatgaaaaagaatctacttataaattattttctcgtcaaccaatggcagacacattactggatagcatcttcagtgtgaggaaggagaccattcggataaactgggctgcatatcctcattaccacgccccagaagtatttgcaccatttatattggacgggcgacatctatactacgttaatgcatttgaaaatgcagctagcaccatggagacaagtgctgtggcagctgagaatattgcccgactcatactgtcaagatattttggccaagtaattgtgcattcatctaatttgtctgcaagttctcaaggagagggtactcatttagatttgtgagacagtgatcgtaagatattgttagtttggatgatggtagattttatataaattgcatctgaattctgaaaatttggaaaatcatacaatgtataaacactgggtcaataaatgattactctctccacccataaagccgatacattgcctgtttataaaaaagaatgttgcgagaggtaaaactgataatgtttatactttgaagggattagcctctcactgttgactagagatacccttgatgcatacgacatataggcaaaaaagccctctcccttgtatcttctccttctgtattctattaatggacagtgtgtgtgaaatgtgaatgttaagattgcaaaaaaa

SEQ ID NO: 1171 - DNA, 1721 bp, Glycine max
ttctgaaactgatagaaaaactgtcaaagaatctggtcctacaaatgctgaagatagtgatttgtatggggatgcttttgtaacaaacaaacagtctgaagataggcgtttaccaaatgctattctaccactcctgcgctatagccagtatgaaagctctgaatcttcctgcagttttcagggttctccttgtgatgacagaaattttaggagtgatgctgatgatactgagacagaagatgcttcattctctggccaagaggatttaaatgacctaaatgatattcttgaatgggcgaaggcaaataactgtggaccattacagattataagtgagtattattgcttagctcgccctgcaagggactcagcacttaggtttcatcctttggaacacctgcatcccttggaatatcacagaccagatgagacaattctacatcttgccggttcaactgttgacttgaaatccggcagtaccggtcgacccacgcgtccgctggtttttgcagaggcacataattctcttttggctgaggaggaggcaactgcattatctatatgggctgtagcatgcatgtgtggtaccttgagacttgaaaatgtgttaacattctttgcaggagctctactggagaagcagattgtttttgtctgttctaatttgggaatcctatctgcttcagttttatcagttattccactaatccggccctaccaatggcaaagcttgcttatgccggttttaccaaatggcatgctcgagtttctagatgcacctgtcccctacatagttggcatcaagaacaagaccaatgaagttcagtcaaagttaactaataatgttatcctgattgacgtcagcagaaaccaggtgaagtcatcaacagtacctcaactgccaaggcagaaagagttaatctcttctttacgtccttatcatgaaactcttgtgggagaaagttacttgggtaggagaaggccagtgtatgaatgcacggaagtgcagacagaagctgctaaggggttcctatcggagttaaggtcttatttggattctctttgctataacattcgttctcatacaataaccaatgtacaatccaatgatgataaggtatccttgcttttgaaggagagtttcattgactcgtttccttatcgtgatcagcctttcatgaagcttttcgtggatacacagctcttctctgttcatacagatattgttctctctttcttccaaaaggaataacgctatttgggaatattactgccttgcaaagcttgaacgcaagttcagtgctgtattcttaaattatgtatgagctaaaattttctccctacacgtgacgcctaatgttaccagcttaggcttgccgcaacacctgtatataattagttagatagtatatttaatcttaataagtgctgttaaggtttcattctatgtaaatgacattttttcatacaccaaaggtaaaagttatgctttatgctcacaaaatactgtgaacgctaacacctgaaccctccggccgctctcgcgggtcttcgatatgacctagtatgtttaaatggtctttaaatatgatgcagaacttgctagcaaaaaagccaagtacgttttgtaaatcctcgtaaacatatggaaggaatcatggatattcattcattatgaagaccaactggacgcttgaatatttgtaataatgttccccccc

SEQ ID NO: 1172 - DNA, 1245 bp, Glycine max
gcaagaacggctagagcggttgacgagaattggtggagatttaaatttagaatatgctgaagatagctgcgaggaagaaaatttggaggaaaaatctgagtgcatgttggtgaatgatagattagaagatagacatgatgacaatccaatgatttctcaatcaagcctaagaaattcctcacctgaaaacattgagaatgatagtaattatcccaagaaacaaatggttaacggggatctgcatacctttaaggagagagtcaatgatgacaatgctgtgcctagtgatcctgaaactgatagaaaaactgtcagagaagaatctggccctaccaatgctgaagaaagcgatttgtatggagatgcttttgtaacaaacaaacagtcagctacgtaggcccccccccccccaatgccattctaccactcctgcgctattgccagtatgaaagctctgaatcttcttgcagttttcagggttctccttgtgatgacagaaattttaggagtgatgctgatgatactgagacagaagatgcttcattctctggccaagaggatttaaatgacctacaggatattcttgaatgggcgaaggcaaataactgtggaccattacagattataagtgagtattatcgcttaacttgccctgcaaggggctcagcacttaggtttcatcctttggaacacctgcatcccttggaatatcacagaccagatgagacaattctacatcttgctggttcaactgttgacttgaaatcttgcagtacgggtctggaatttgcagaggcacataattctcttttggctgaggaggaggcaactgcattatctatatgggctgtagcttgcatgtgtggtaccttgaggcttgaaaatgtgttggcattctttgctggagctctactggagaagcagattgtttttgtctgttctaatttgggaatcctatctgcttcagttttatcagttattccactaatccggccctaccaatggcaaagcttgcttatgccggttttaccaaatggcatgctcgagtttctagatgcacctgtcccctacatagttggcatcaagaacaagaccaatgaagttcagtcaaagttaactaataatgttatcctgattgacgccaacagaaaccaggtgaagtcatcaacagtacctcaactgccaaggcagaaagagttaatgtcttctttacgtccttatcatgaaactcttgtgggagaaagt

SEQ ID NO: 1173 - DNA, 1394 bp, Glycine max
ctcgagccgaatccgcccgagcggctcgagtacggctgcgagaagacgacagaagggggcacaaaaatacaatacaaaacaaaacagagcaaagagagagtgtgtgaaaagtgaaacaaaaaacagaacaacaatggcgacacttaaggttcctcagcctcttccccccgttgcagatgattgtgagcagctccgaaaagccttctcaggttggggaactaacgaggagctgattgtatcgatcttggctcataggaatgctgctcagaggaagcttatcagagaaacttatgcccagacctatggagaagatctcctcaaggccttggacaaagaactcacgagtgattttgagaggctggttcatctttggacacttgattctgctgaacgtgatgcatttttggcaaacgaggcgactaaaaaatggacttcaagcaatcaggttctggtggaaatagcctgcactaggtcctctgaacaattgtttgctgcgaggaaggcttaccatgttctttataagaagtctctggaggaggatgttgctcatcacacaacaggagacttccgtaagctcatactacctctggttagttcttatcgatatgaaggagatgaggtcaacttgaccctggcaaaaactgaggcaaaattgctgcatgagaagatttcaaacaaggcttataatgatgacgacttcatcaggattttggccacaaggagcagagcacagattaatgctactttgaatcactacaaagatgcatttggacaagatatcaacaaggacctgaaggctgatccaaaggacgagttcctgtctttactaagagcaactgtgaagtgcttgatccgtcccgagaagtacttcgagaaggttgttcgcttggcgatcaacaagcgaggaaccgatgaaggagcccttacaagagtggtggccacaagggctgaggttgatttgaaaaacatagcagatgagtatcaaaggaggagcagtgtccctcttgaacgtgctattgttaaggacaccaccggtgactatgagaaaatgcttgtggcgcttttaggacatgatgatgcttgacatactcctttgtgtttgtgtgtgtgtacttgtggcagagttactatatagtgtgcagtgtactgctttgtggttccatgttgttgtgttttctggccattattgtcttcctttgttgaataaaatgaaccactttggcacactttggtgggtttttgaagcccctagaattgattgagtgtcaaacataaatggaatcctgcaatatatatgtggttcagattttgtaaatcactagtgactttagggtcacttttctgaagttaaatatatatagagagacaactaagtttggttcgcttcttaaaaa

SEQ ID NO: 1174 - DNA, 1946 bp, Glycine max
  misc_feature (1902)..(1902): n is a, c, g, or t
  misc_feature (1913)..(1913): n is a, c, g, or t
  misc_feature (1919)..(1919): n is a, c, g, or t
  misc_feature (1926)..(1926): n is a, c, g, or t
  misc_feature (1939)..(1940): n is a, c, g, or t
tcagctacgtaggccccccccccccaagttactgcctctttttgaatgcttttctgtgcccgaagcatcactcagtaacattcctcaacttgcctaggagtgttatcactcttaacagcacatgctccttgtttgcaagccatggttgcagatggatctagtcttctgcttttattacaaatgcttcactcatccccaagttgtcgtgaagggtctctccatgttctctacgcattggcaagcacaccagagctagcctgggctgctgccaaacatgggggtgttgtctacattcttgaattgctcttgcctttgaaggaagaaattccactccagcaaagagctatggcggcctccttgttggggaagcttgttagccaaccaatgcacggaccaagagtttctatcacacttgcaaggtttctccctgatggccttgtgtcagtaattagggatggacctggtgaagctgttgtagttgcccttgagcagactacagagacaccagaacttgtatggacgccagcgatggcagacttccttatctgcacaaatttccactatggcatcagagctataccgtgagcagatgaaagggcgtgttgttgattgggatgtgcctgagcaggcatctggccagcaggaaatgagagatgagccacaggttggtggcatctatgttaggttgtttctgaaagatcccaaattccctcttagaaaccctaaaaggttcttggaaggtctactagatcagtatttgtcatccattgctgcaacccattatgaggcacaggttgttgatccagagcttcctttgctcctgtcagctgctctagtttccttactgcgtgtgcaccctgcactagcagatcatgttgggtatcttggatatgtacccaaactagttgctgctgttgcatttgaggggaggcgagaaacaatgtcatcgggtgaggtaaacaatgggagacgtgcagaacaagcatatgacccggataatgaatcagcagagaacgcacaaactcctcaagaacgtgtgcgtctgagttgtttgcgtgtcttgcatcaacttgcagctagtaccacatgtgctgaagccatggcagcaaccagtgttggaacacctcaggttgttccactgctaatgaaagctatagggtggcaaggtggaagcattttagctcttgagactctaaaacgtgttgtggttgcaggaaaccgagccagggatgctcttgttgcgcagggacttaaagttggtcttgttgaagttcttcttggtcttcttgattggagggctggcggaaggaatggcttttgttctcagatgaagtggaatgaatctgaagcgtctattggcagggtgcttgcaattgaggtcttgcatgcctttgctactgaaggagcccattgcactaaagtgcgagagctattgaataattctgatgtttggagtgcttacaaagaccagaggcatgatctcttcctcccttcaaatgctcaatctgcagctgctggcattgctggtctcattgagaattcatcatcgtcgagactcacttatgctcttactgctccaccacaatctactgcttctagaactcctccaccatcctctccggacttcaatggaaagcaggatcaacctttacagtaaaaaaataataataatggagatatacccaagcctatacttgtaactcacctgtatagtacactgtacagttttgttatctacttgctcctgggtagcaactgggaagcatgtgcaattttctctagagttattcgtttgtgtaaagagggggatcttcaccttcccttccttttttccttgtaaattggatgatgtatttactattgctgaaaatagtgaggtcattttgcgcatttcgtgaaaanaaaaaaaaaanaaaaanaaaaaanaaaaaaaaaaaannaaaaag

SEQ ID NO: 1175 - DNA, 846 bp, Glycine max
agcaattaaggcattccgatcttaacccctaagaaaagaatcgaaaaaacaaaatcttgactgcaagaaaacaataaagactcataaattcataatcatcccccagcaagaaaaaaagaaaatcgcaaaggcagagcaagaacacaacacaagacatcgaagcagaagaagacatggggttgcagtggctgattctcacctacgtggtcgcagccgaagctgcggtggcaattctgctaacccttcccacgcccaaactcctgaggaaccgtttcgcctctctcgtttccctcattcttcaacccgcgcttttcattgtaccctttgcagggttccacctcttagatttatactggaaaaatgagcatcgcttgatgtgtacctctgaagtttgtactgctgcagagagagatcgatatgagaaatctatatacaaagctcagaggaatgtaatactgtgtgttacagcatgtcttctctactggtctatcagccgcatttgcaagtatcagaaggaaatccagagtctggaggaagtggagaagagaatcaaggcccagtagattcttttagtcatgattagtggattgaggctactttagttgagtctagtagggacatgccaacatgatgtaccaaattatagagtgtgatatactcatgtgattcagttctagactttcaaattccaatctttctttatcatactgtttggatctgctcttgacttgtatgttgtttaatggcttttagcctatatcagtgaaatatttttcttttttatatctaaaaaaaaaaaagcttatcgaccccgcacaaaaaaaaaaaaaataaaaaaaggggggg

SEQ ID NO: 1176 - DNA, 1434 bp, Glycine max
  misc_feature (963)..(963): n is a, c, g, or t
ctcaagaatagtgaatctcctggcaacagcagcaacaatctaccacttagcatgaatcggagcccctcaacttccgttactcctatccctgataagtactgttgtctctctagagaagatgtgctccgtttcatcatcggttgtcttggcgcattggctccccttcctctcacttccattgctgctcttgaagcaattaattcaaactacaactatattgaatcttctactccagccattgaagccactcaaaagcttcctcaagatccaagtgcagttgctgtaatagaaagcacgtcagatggtcagtgcaagatcattggagaaatttctgcatgtaagttatggaaatgtgattacttatccgcagcatgggctttagcaaatctctctgccgggcagtttgttatgggagttgaagataatgtcaccccaaggtcactgcctcagttcagtttagatttagcatctggagaaaatgatttagctaatggtgggggttcaaggaaaccaaggaagtttagtagcaggagtgttgggttcttcagcaatactgcgagccatagctttggttctaggagcatgtataggggtaggagtgcacccctgacatgtaaaattactagttcattggctgcagtcttggctcagatgctatcccacagggcaactcatgtctgggtgaccgaggacgagaatgacgaagttttggtcggtgttgtcggatatgctgatattttagctgctgtaaccaaaccacctacagccttcattcctgctaatagatctacagaggggtttggaaacgaaattcagtgttgaattttttgcttcaactttttcaatgtgtactcttagaagtttgtttctttggtgttcaatcatctcatattatactacagatgaaaaatgagtttgggttgttggtttgtacaagattgtgttaatttataataataatanataataatattaataataataataatgagtaatgttttcatgaagtgaatagctactatcaaaggtatagtatgtaatgagctaaagaaatcggttcatccaatgcgatcttggcattgtaccaatagcttactttaggggtatagttgcagttttgtccaaacattaagtgaaggtatataggagataccttattgagtagaatattagattcgagtcttgtcgaagagttttgtcaccttaattaactctactaatcaattaatcggagtttaaagtggcttcttgagagctttacaaatgaacaagtttatagtagttaattgagcggttttcaatctgtcaaaaaaaaaaaaaaagcggtaaattatctttttcattatattggattagattttgaatttaaactttagtttaattactcatttgatccatataatttcatggttatatagtttcattatttataca

SEQ ID NO: 1177 - DNA, 1248 bp, Glycine max
tcagctacgtaggcccccccccgaaaaaggcccttgtgtgatgtggcaatggtcgattggtgcatagacgtggaagctgtgacattcggtgtgcgatctcggttcgaagttgtaagcgttcaacgataaggagccgtcgtcggaactcggaagtgggtttgcgtcgttgtgaggtttaacgagacgatgagggcgctgtttctgttcttcgttctcttctctttcagctatgccaccgaacaaatctttcctgctcatatcggtagcattttcggtggtggcggtggtggccgctctcgcgaacccaaatacaagatcgaatttcatcccgaagattccccttttcaccctgatgatgatcaggaatctatagtcatgccggataaaactggacagaaatatatatgttacttacctaaagtggaaaaggaaaaaagtggaaagcctgttatccaacacaatattagcagcatgattgtggaaactgagaaaaggattaagcagaagacaccagatgaactgctagaagtattaaggggtccatgttttctcagacaagaaggttggtggtcatatgaattttgctatcaaaagaagttgaggcaactacatctggaggatgataaggttgtccaggagtttgtcttgggagtgtatgatccggaggctacagctgcatttaacgaaaatctgtccgacatttctacattgaaggatccccggtcaaaagatgcatctcaaaggtatcatgctcatcaatatactaatggcaccgtatgtgatcttacaaataagccacgagagaccgaggtgaggtttgtatgctctgaaccgagagcaatgattagttcaatcacagagatttccacttgcaagtatgcacttacagtgcaatgtccgcagctatgcaagcacccattatttcaagaggagagaccagtatggcacaccatcgactgtaatgtgcttccaaaagatcacgtggatgccaaagtgagacgacaaaacgaaaatacggagattgttatagtgaaagacttcgaaaatagtgacttagagtcagaacaatgatgtaaatatacataatgagaatagctaaagttgccatcatgtaatttctacggtgaaagaaaacatgtatcttctactaatcctctttcctgacagtgctaagccacagtgctttttaactttagaaagatcagatttatataattcatcttgaagaagtccttgaagctcaaacga

SEQ ID NO: 1178 - DNA, 2096 bp, Glycine max
tcagctacgtaggccccccccccaaactgtctttgcacaaaacttttgtgtaagacaaccctttgcagcaaagaaaattagtgtaattaaattctcagtcttctttacattttctatgtcagtgtagcacgtgactccgcagtgaaaccttcactccatggcttcctcattgccctttgaagcttgaacttcgataaagatcgtgactttggctgattctggaaatgagttctcgtattcggcttctgggtatttgcttgtggctgcacctgacatgcttcaccttcatttttggcaacatagtgagtgtaagaggagatgcaactttgcaagggactgttgccattgatgacaaggttgtgattggaaccattgatgatgattttgtttgtgcaactttggattggtggcctcctgagaaatgtgactatggaagatgcagttggggacttgcttctcttctcaatctggacctcaacaacaagatattcttaaatgcagtgaaagccttttcacctttgaaacttagactaggtggaagtttgcaagacaaggtaatatatggcactgaagataaccaccaaccttgtacaccttttgttaagaacccttctgagatgtttggtttcactcaagggtgcctcccaatggatagatgggatgaacttaactacttttttgaaaaagctggagctaagattatctttggattaaatgctcttgctggaaaatcaatacacagtggttctgcaaaaggaccttggaactacaccaatgccgagtcctttattcgatatactgttggaaatggctacagcatttatggatgggaacttggcaatgaattgagtgggagtggagttggaacaagcattacagcagaccaatatgctttggatgttgctgctttacacgatgtagtttacaatgcatacaaaaagattgagcctaagccactagtcattgcaccaggaggtttctttgatgcaaactggttcaacatatttataagcaaatcaggaaaatctattgatgtggtcactcaccacatttataaccttggaccaggagttgatgagcacctggtggaaagaattctggacccttcctatcttgataaagaggctagcacattcaatggcctaaaaaatatacttgcaagtacaggtacctcagcaacagcatgggttggtgagtctggaggtgcctacaatagtggccatcatcttgtatccgatgcatttgtttacagtttctggtatttggatcagcttggcatgtcagctgcttatgacactaaaacatattgcagacagactttgataggaggaaactatggtttactcaatactacgaattttctgccaaatccagattactatagtgctcttctttggcgccgactcatgggaagacatgtcctctcaactaccttctctgggacaaacaagataagagcttatgcacactgtgcaaagcaatccaaaggaatcacagtactattgatcaacctggacagcaacacaactgttgaagcagaagtgaccttcaacaacgccgccaagagtttgaggcacagaaagatgtctactcattcaaaagtgatggaactacctcttgcaagtgaaacagcaagagaagagtaccatctaactccacaggatggggatatacatagccaaatcatggtactaaatggaaaccctctgagtgtaagctcagatggtgatattcctcctttggagcctataaatgtgaattcatcagagccaataagggttgctcctttctctattgtatttgctcatttacctgatgctgttgtttcagcttgcggctaagtactaagtggcactaggggagaccaaaaaaattggtttcactaggtggtttggcaaattacatggaaaataaaatgtgttagtttccataagagaatgccaattatttagtttgagaactaggatgttggtggttttattatatgcttttactagtgcatgttcccgtgcatcaggagcaaattatgtgtgaggagtattattttttctatttaaaactaaataaatttaaaacatcagaagaggaagaatgtt

SEQ ID NO: 1179 - DNA, 768 bp, Glycine max
aattgttgttccatcaaagctttggcaaaatttccatggcagaggaggagagtccaagtgtgatgccaaaagtgatcaccttcctctcctctcttcttgaaagggtggctgagtcaaatgatcacaaccaacagcaccagaagatctcagtgttccatggcttgacaaggccaaacatctcaattcatagctaccttgagagaatcttcaagtacgccaactgcagcccctcgtgcttcgtcgtcgcctacgtctacctcgaccgattcactcagagacaaccctcccttcccatcaacaccttcaacgtgcaccgtttgctgatcactagtgtcatggtagctgccaagttcatggatgacatgtactacaacaatgcttactatgcaaaagttgggggaatcaccaaaatagagatgaattttcttgagttggatttcctctttggtttgggtttccatttaaatgtgaccccaggcaccttccaagcctattgtgtccatctccaaagagaaatgttgttgatccaacctctaaatttttcagattccaccctaaatttaggacaatcactaaaggctcacttgtgcttcaatgaggatgaatgttctcatcaaaagcagaaacaacaacaacagctagctgtttgattccttgcattttctcagtgcatgtgtagtatggttgactagttgtaaatgtagtgattctattacagactggcaagtaaactacttttccttgtgcaaattaattaattatttttta

SEQ ID NO: 1180 - DNA, 961 bp, Glycine max
tacggctgcgagaagacgacagatgaatagagaaagcgaagggaaggcccgtgagttttgcgcgtgcgagagagacagtggaaagaaaggaaagggatgacgctgggtctgatcaatgcgaatcctgtggttcacgccaagaaagagcgaatcgctcgttctgatgatcctcacgccgatgacgccgttgatcctctcgacatctatgatttcgtgagggatattcgggatcccgaacatccttattccctggaacagctcagtgttctctccgaggaatctatctccgttgacgacaaattaggccgaattctgataacttttacgccgaccgtacagcactgtagcatggccacggttattggactttgtctcagagttaaactgaagcactacttccctcctcattacaaagtggacatcaaggtttctcctggatctcatgccaacgaagaatcagtcaataagcagttgaatgataaagaaagagtcgctgctgccttggagaatcctaacctccgccagcttgtggacgagtgcctctactccaatgaactgtgaactagcagatatgccatcataataactattgtacagggcatttaccacttatgatgttataaaaagtagtcaatgtgtatggaaattagttggacggatttacctttggagaagctttatctctttgaagctatttgattttcagaggatgcatcttccctcttcttacccacttcacgttgtgtttagcatgtggtatgtatgtaaatcaagtaagacatcacgatgtcatatttttgcacctttcactacagaatgtgctgaatcagtctgtttaggggtaaaaaaaaaaaaaaaatgacccggtccttatgctcatagttcatgccatcccttttaataagtttaggtggaaagtaagcatcatttcttgtgtgtgacaaatgataattatatttgc

SEQ ID NO: 1181 - DNA, 1837 bp, Glycine max
aagtaggaagagagtttagttaacagcaagtggcaaatggcatgcatatccgcaacggaggcagagattgagcgtatgatatgagagagaagacggaacaaaatcaagggcggagaatgccccatggctgacatcatgtcggttaacactttattcagacaacactatactcattaatcaaaatcaaatgacctaaccactctctctttttcccaattttcgaatctctctcctccatggacccaacttcgatccctccccctccggccaccaccgtccccttcactgtcgaacccagcaatcacgtgacccccgccgacaacaccaacaccaaccaccctccttacgatgagatgatatacacagcaatcggggctctgaaggagaaagatggttcgagcaagcgagccataggaaagtacatggaacaagtgtacaaggaccttccacccacccactctgctttgttgactcaccatctcaaccgattgaaatccgctggtcttctcatcctcgtcaaaaaatcctacaagctccccggatctgatcctcttcccgtgctccaggcccaaaagccccgcggtcgccccccaaagctcaaatcccagcccaacactgagctcacatggcctgcgctagccctcaacgacaaccctgctcttcaatccgcaaaaagaggcccgggtcgtcccaaaaagattgcaggacccgtaggtgtgagcccgggcccgatggtgccgggcagaaggggtcgtccacctgggaccgggagatctaagctgcccaagaggcctggccgtcctcccaagcccaaatccgtgtcggcgatctccagtgggctcaaacgacgtccgggccgcccacccaaagccgaatccaacgtaaacgtcatccccttcgcagcccctgttgctcccggcctgcccacagtgcagcccatcgttcctactgcttccgtgcccaatggatctcccaggcccagaggaaggcccaaaaagattgttgccggtgcgggggctccggcgctctcttccgttggtggtgcaccacgtggccgcggacggccccgtggggtcttgccgttggtgaggccgggccgccctcagaagctcgccgttggaaggcccaagaatcctgcaagaaggcccgtgggccgccccaagggatcgacagctgctgcaatcacagcacataaggctgctaatgatgatctaagaaggaagcttgaacacttccaatcaaaagtgaaggagtctcttggcacgcttaagccttattttaaccatgaaagtccagtcactgcaattgcggcaattcaagagttggaagtactgtcaactttggaccttaaagcaccattgagggatgagacccatcaacagccacagccacagccacaggtgtatgaacagcaatatccccagccacagccactgctgcagcaattttttcaaccacatacatcagccccaagctaggcctgaacttgatgaaggacaacttgtacaagtgtttttaacaagacacaagagataaaagatctgtaaagcggttaggaagtagtggtactgatttttctgagggtgaagtgactctgtctattttagtttgttgttgtgcaacatttagtttgacccctgaagtaattagcgggtactgttgattctgttgttatttatttgacttttacagtttactttagtcacattaatgtgtatgtttggttcagcctcctttgttgttttatatttttaatggttactgcttgctatttctcatttcccattaaaaaaaaaaaaaaagctgtgtgaaaaaaaaaaaaaaaaaaaaaaaaaaa

SEQ ID NO: 1182 - DNA, 844 bp, Glycine max
acattcatcgtgaaccatcgcgaacatcccaatgaccaaaaatcctccaatatatatatataacttccccgttctctcacactcaacagaaaattgaaaaccaacataacaatgtcgttgattccaagtttcttcggcaccgggcgaagaaccaacgtcttcgaccccttctccctcgacgtgtgggacccattccatggcttccccggcaccaccgccctctccgctccgcgctccgagacggcggccttcgccaacacgcgcatcgactggaaggagacggcggaggcgcacgtgttcaaggcagacctgccggggctgaagaaggaagaggtgaaggtggagatcgaggaggagggaagggtgctgcagataagcggacagagaacaaaggagaaggaggacaagaacgacacgtggcaccgcctcgaacgctccagcggcagctttctccgccgcttccgcctgccggagaacgcgaaactcgatcaggtgaaggccggcatggagaacggagtgctcactgtcactgttcccaaggtggatgtcaagaagcccgatgtcaagcccgttcagatcactgaaggctaagttgtgttctcaatcaatcaaaattcatgtgtctcaataattgagtttgaggtgtgttgtgtgagatattattaccatgtattgttatagtgtggtgttatagtgtggtgaattgttggtcgtgttgtgtaactttttttaataataaagaatattgatatatgaatatttttattttaaatactctaaaaaaaaaaaaaaaaaaaaaaaaaaaaaaaaaaaaaaaaaaaaaaaaaaaaaaaaaaaaaaaaaa

SEQ ID NO: 1183 - DNA, 1913 bp, Glycine max
  misc_feature (329)..(329): n is a, c, g, or t
gggcgggaaaagcgtgctgctgagttggtaaaaaaggataatgaagtaattgtaaaactcgaaaatacagctattgaacgctcaaaatctgttgagtcagccattctaggtaaatacaacatttggaggaaagaaattgagaatgaaaatgtcgattctactgttcggttgatgcgggaccagatcattatggcaagggtatatttaagcattgcaaagatgaagaacaaggtcgaactgtacgaagaactaatttaccggctcaaagagagtcaacatgctttaggtgatgcagtttctgatgcggatctacatcgcagtacacatgnggaaaataaaggctatgggtcaagttctatcaaaagcaagagagcaattgtatgactgcaactcggtcactggaaaactaacagcattgctacagacagctgatgatcaagttaggagtttgaagaaacagagcacattcctcagtcagttggctgccaagaccataccaaatggaattcattgtttatctacccgcccgtccgcccacgcctatctccttcctcctgaaaagagaaagttccctgggagtgagaatttggagaatcccagtctttatcactacgcactgttctcagacaatgtcttggctgcatctgttgttgtcaactcaactattatgaatgctaaggatccatcgaagaatgtttttcaccttgttactgataaactaaattttggagccatgagcatgtggtttcttttaaaccctcctggaaaagctacaatccatgttgaaaacgttgatgattataagtggttgaactcatcctactgccctgtcttgcggcagcttgaatctgctacattgaaagagttttatttcaaggcaggccatccaaactcactttcttccggggcttccaatctgaagtatagaaatccgaaatatctctcaatgctcaaccatctgagattctatcttccacaggtttatccaaaattggataaaatcctatttcttgatgatgacattgttgttcagaaggatttgactggattatgggctgtggatcttaatgggaaagtaaatggtgctgttgaaacttgtggtcaaagctttcaccgatttgacaagtaccttaacttttcaaatcctcacatcgcaagaaattttgatccaaatgcttgtggttgggcatacgggatgaacatgtttgatctgaaggtgtggaaaaagaaggatatcaccggcatatatcacaagtggcagaatatgaatgaagacagggtgctgtggaagctggggacgttacctccggggctaataacgttctatgggttgacacatccactagataaatcatggcatgtacttggtttgggttataatccaagtttggatcgatcagagattgagaatgcagcagttgtacactacaatggtaatatgaagccatggttagaaattgccatgacaaagtatcggtcttactggaccaagtatgtcaagtacaatcatccctatcttcaaaactgtaagctaaatgaatagtaccgataatttggtcccaagtacagagaagaattctctgatattttctatcacctttctggcttttggttatttcaaccacagcgtcttttgctagaatgatgatcattgtcttaaagcttagaagggatagggtaagggcgtgttctatatttgtctccaacatcatctctttcccacctcgatttttgctttcaattcatttaatttgttcactacaccactcacccatttgaaacaaggtacaaaagtagtgtaccttgtttagtaccataaaatctcctcattgtacaatactctgatctgatactcggacagaactagaaattaaatatcatatttctgtattctttgataagttatttattca

SEQ ID NO: 1184 - DNA, 2126 bp, Glycine max
atgaaggagcatgtcatcatcaccatcttcgctaactgtggtgtctcctttggaggaggcgatgcttactccattggtgccattactgtcatgaaggcttactacaaacagagtttgagctttctctgtgccctcttcatcgtcttaactacgcagatgctgccgcgcggccgggctgggattctgaggaggtatctggttgatcccgttgaaatgtggtggccagcaaaccttgctcaagtgtcgctctttagggcactccatgaaaaggagccgaaatcaaaaggtttaacgaggatgcagtttttccttattgccatgggtgcaagcttcttgtattatgcactccccggctatctcttcatggtcttaacattcttctcatggatctgctgggcatggccacataacatcactgcacagcaaattggatcaggttatcatggactcgggattggtgccttcacacttgattgggcagggatttcagcttatcatggcagtccccttgtttcaccatggtcttccattgttaatgtgggaattggatttatcatgttcatctacatcattgtacctgtgtgttactggaagttcaacacttttgatgcccacaagtttcctatattctctaaccagttgttcacggccagtggacataaatatgacaccaccaagatcttaaccccagagtatgaccttaatgttgatgcatacaacaaatacagcaagttatacctcagccctctgtttgcattatctattggatcaggttttgcaagatttacggcaaccctcactcatgtagcactgttttatggaagagacatttggagacagagtagatcggcaatgagtaacgcaaaattggatatccatggtagactgatgaaagcttataagcaagtacctgaatggtggttcctcagtatattgtttgggagcatggcgctatccctgctaatggcttttgtgtggaaaacggatgtgcaactgccatggtggggtatgctctttgcttttggtttggcttttattgtaacccttcctattggtgtcattcaagcaactaccaaccagcaacctggatatgacattatagcacagttcatgattgggtatgtccttcctggacaaccaattgcaaacttgctcttcaagatttacgggagaatcagcaccgtccatgctctctctttcttgtcagatctcaaacttggccactacatgaaaattcctccacggtgcatgtacaccgctcagctggtgggaactctagttgctggtgtagtgaacctggcagtggcttggtggatgttggatagcattaaggacatctgcatggatgataaagtgcaccatgacagtccttggacatgccctaagtacagagtgacctttgatgcatcagttatatggggtctgattggaccaaagaggctatttggacctggtgggctgtacaggaaccttgtgtggttattcctgattggagcagtgctgccagttcccatttgggtgttgagcaaaatcttccctgagaagaaatggataccactgatcaacataccagttataacctacggctttgctggaatgccaccagcaactccagccaatattgcaagctggctagtgactggaatgatcttcaattactttgtgttccgctacaacaaacgctggtggcagaagtacaattatgtactatcagcagcactggatgcaggcacagcttttatgggtgttttaatattctttgccctgcaaaatgctggccataatctcaaatggtggggaagtgaattggaccattgcccattggccacttgcccaactgcaccaggaattgaggttgagggctgtccagtattcaaatagacaagaaccataatgataatgggtttagctttttctttcttttttgtatgttttggggggaccaagttaggctgagagtatagctatagggtgaaaggaataaccaattgttcagcaattctgtaaatgactaaatgcttgcttgtcattgtggagggttttcgtttttttaacctgtgtcatatatgcctcataacaaatatgcggttcgttagtaatggaacaaagtatgacttgtgataaaa

SEQ ID NO: 1185 - DNA, 2930 bp, Glycine max
ccacgcgtccgcaaattgttatgtagaatgttaatgttttttgagttgatattccatttcaatttctttggctttactccttgacttgtttcggctccaggtggtccgggttataaacatttggaaccgggtgatgtacttgttcgtgtcaatggagaagtcattactcaattcctgaaactggagactctacttgatgacagtgtaaataagaatattgaattacaaattgaaaggggtggcacatcaaaaagtttaactttgttggtgcaagatttgcactcaataacgcctgattatttcttagaagttagtggggcagtaatacatcctctttcttatcagcaggctagaaacttccgtttccattgtgggcttgtttatgtggccgaaccaggatatatgctcttcagagcaggagttcctcgccatgcaataattaagaaatttgctggtgaagaaatatcatgtcttgacgaactgatatcagttctttctaagctatccaggggtgctcgagtaccattggaatatataagctacatggatcgtcatcgaaggaagtctgtgttagtgacggttgatcggcatgaatggtatgcaccacctcagatatacactcgtgatgacagtactggtctttggaatgctaagcctgcttttaagcttgattcccccttcctatcattgggtgctaaagatgttgaaaatctatctagacagtcagtttcactaactggtgagcatgcttgtgggggacatgtgtgtggagataacagtcaggagttggttgatggtgtcactagcatggaaaccaattgtgaagatccctcagagtgtgtatctcaccacaatgcatctgatggtgtggtgaaaaaacgaaaagtggatgaagatttatcagctgatggaaatgttgttgctgatttttccttaaatgactacaagggaaactaagctagaaaaatcaagtattatacaggatgacatgttaatggactatcagggtgcaactgcagctacagcaaatgcatcagttgctgaacgtgtgatcgagcctacacttgtgatgtttgaggttcatgttcccccatcttgtatgcttgatggtgttcattcacagcacttttttggaactggtgtcataatttatcattcccaagatatgggattagttgcagttgacaagaatacagttgcaatatctgcttctgatgtaatgctatctttcgccgccttcccagttgaaattccaggagaggtggtatttctccatcctgttcacaattatgcccttatatcatatgatccctctgcattgggacctgttgggggttcagttgttcgtgctgcagagttacttccagagccagcattacgccggggggattctgtttatcttgtggggttgagtagaagtctgcaagcaacttctaggaaatcagttgttaccaatccttgtgctgcattaaatataggatctgctgattcccctcgctatagagcaaccaatatggaagtaattgagcttgatacagattttggcagtacattttcgggtgtgctaacagacgaacaaggaagggtccaagctatatggggaagcttctcaactcagctgaaatttggttgcagcacctcagaagatcatcaatttgtgaggggtattccaatttatgcaataagtcaggttcttgacaagattatatcaggtgcaaatgggtcacctcttcttataaatggtgtcgaaaggcctatgccacttgtgagaattctagaggttgaactttatccaacattgctttcaaaggctcggagttttggattaagtgatgattggattcaagcacttgttaagaaagatccagtaagacgtcaggttttacgtgttaaaggttgtttggctggatcaaaggctgagaatcttttagaacaaggggatatggttttagcaatcaacaaagaaccagtcacatgcttccgtgacattgaaaatgcttgccaagctttagacaaatccgacgccaatgatgggaagcttcacttgactattttccggcagggacaagaggttgaactttttgtgggaacagatgttagggatggaaatggcactgctcgtgcaattaattggtgtggttgtattgtccaagatccacatccagcagtgcgtgctcttggatttcttcccgaagaaggtcatggtgtatatgtggcaaggtggtgccatgggagtcctgtacataggtatggtctatatgctcttcagtggatagtcgaaattaatggaaaaccaactccaaatatagattctttcgttaaagtgacaaaggaactagaacatggcgagtttgttcgtgtaaggacaattcacctcaatgggaagccacgagtcctaacattgaagcaagatttgcattactggccaacgtgggaattgagatttaatcctaatagtgcgatgtggcatcgcaatataatcaagggattgaactgcagttctgtatgaaatatgaatgatcagaccatgtaattctttctaattcctatgtacgcagctacacgggagtatagaaaaatctcgtggaaggcatcttccaggttcagaattatggtttaccagtgccctcgttgcaaatttgaggcaaatttgatgctttgccgttaaggggtctacttcaattggttgaacagatggagagagatactataaaacattttgtccaaacatattgtattgcattgccatgattgataagttatgaggcgttcgattcaggctggcaattatttattcggatctgtaccgcaacatataacagtaggctaattatattggatcctggaaaggttggataataaaagaaaaatgaaaaatatttatagtttatgtattgaaggaaaaaaaaaaacacaccttttctttggtt

SEQ ID NO: 1186 - DNA, 2457 bp, Glycine max
cggaattcggctcgagacggctgcgagaagacgacagaaggggttgaccaatatggatgataaatatgatgtctatagaggtgagaggggtggtttggcaggactgcagaacttggggaatacctgcttcatgaacagttctattcaatgtttagtccacactccaccactttctgaatatttcttacaagattacagtgatgaaatcaacatggacaatcctttaggaatgcgtggtgagttagcacttgcatttggtgacttgttgaggaaactgtggtcttcagggcgaactgctattgcgccccgtgcattcaagagcaaattggcccgatttgctccacaattcagtggctataaccagcatgattctcaggaattgcttgcttttttattggatggattgcatgaagatttgaatcgtgtcaaacaaaagccttacattgaaatgaaggactcggatggtaggccagatgaggaagttgcatctgagtgctggaaaaatcatatggctcgaaatgattcattgattgttgatgtatgccagggtcaatacaagtcaacattggttcgtccagtatgtggcaaaatttcaatcactttcgatccattcatgtacttatcattaccactgccttccactgtcactcgcacaatgacagtaactgtcttttattctgatgggagtggtcttcccatgccatacactgtgacagttctgaagcatggtagctgtagagatctttgccaagcattaggcactgcatgctgcttgccccccccccaaatgcttttgcttgcagaggtttatgagcataaaatttatcgatatctagagaatccgatggaaccattaaattcaataaaggatgatgaacatattgtggcctatcgaatcaaaagtggagccaggaaaacgaaagttgaaataatgcatcgatggctggataatatgaagggtggagacaggaagctctttgggaccccgttggttacttgtttggtagaagatcctcaatttggagccaacattgaggcatctgtacataaaatgttggcacctttaagaaaaacatattcttcgagtaagtctcatgatgggaaggaaaatggtttcatctcagctgacagtgatgagcaatcaaacatctccaatactgaatctgaatctctgagtctaacaactggcaacaaagaacaagagggaacatcctgtggggagtcatctttacaacttgttttaactaacgaaagctgtttgagttgtgaacccatcgagaaggcttctcttataaaacccaaccaagttgtaagagtctttcttgactggactgacaaagaacatgaattatatgatgctagctacctgagggatctcccggaagttcacaaaactggattcactgtgaaaaaaacccggcaagaagctatttctttgttttcttgcttggaggcattcttgactgaagaacctcttggaccagatgacatgtggtactgccctagatgcaaggaacacagacaagctacaaagaagcttgacttgtggaaattgccggagattcttgtttttcacttgaaacggttctcatacagtagatacctgaaaaacaaacttgacacttttgtgaattttcccattcacaatctggatttaactaaatatgtgaaaagcaaggatggaccgtcttatgtgtatgacctttatgcaatcagcaaccattatggtggtctaggtggtgggcattacactgcgtattgtaagttgatcgatgaaaataaatggttccatttcgacgatagtcatgtctcttctgttactgaagctgaaattaaatcttcagctgcatatgtgttattttatcagagaaatagaattaaaggccagatggaaggggagacatctcaggttcatacagtatagatcatgatggggcattttgttgcttgatgcctattttacatgcttagcagttagcacaaagcggagcttttgtcctggatagttattttacttcgcagtgcaagactgccaggtaaaatatgagacaaaatgttccggtagtgaaaagagcaattaaacaaaaatgtttaggtgaggctctggtagttttcagttcttaatcactacatgaatgatatcattttttgatagagaaattttggcagtctatgaacttgagatatttctgttatttcatttcattggaggttaaaacagatcatcatgaattcaccataattgctgtttgacagttgtatgtattggtgtcgtgctaatagggcgacgcttgtgtttgtgaaaggaatcgtgccctcctgttattatgttgttaggattccagtacccagtatcatgtggaaaagatgattagcacctgactatttgtttattttttaaaataatagactgcccactttctcttgtattgtctttacttcaaaaaaaagaaaatt

SEQ ID NO: 1187 - DNA, 769 bp, Glycine max
ctcacacacacacccccctcctccgtttcccgtttcccgtttctgtctaccctgtataaaaaagtcagctacgtaggcccccccccccccggctcagcgattcattctcagagtcacacacactttcttcatcttcatacatcactgtctcattatcttctcttccttgttctggtggcgcttttcattttcagatgacaacaactgggtgaaacgtgaacgccaccaccgatcggggtttgccaaaaaaaccttacaatggaggttgaaagggtgagacagttgatgctcatgtggtgcagaatacgaagcaaccgtgtcgctcttgtgggtggaaaccataccgcagccaggttttgcagtcgctgaaattctcccctccctagatcgctggctttgtttgttttcttttctctcttccaactttactcaattaccattaatcctcgatctcggtgtttctcaaaaggatctcatcttatcgatggaatttagcacgatgaagaagaagaagaagaagcatttgcacgatggaagaacaattgctctcaaccccgaaactgaaactttcctcgttatcaggattcccgatgcgcttgttttgcgcattgtgtctcgctcgttgatcgtggccatggttctcgcagccttgcctttcttgggaactgttctcgaaggattctatttctcgtccagtttttgttcccaatctcgacactgggtctctcgacgtgggactattgaattccattctccatgatttcgctga

SEQ ID NO: 1188 - DNA, 562 bp, Glycine max
ctcacgcgtccgcccacgcgtccgcgcgcccgtgggtttgagcgctaaaatgcaagagactcacattgttctcgggattgcctcggtgtgctctctgttggctatcatcgccacagtcgtcactctgccatctctgtactcggagatgagccaaatgaacagcaaagtgcgcgacggagttgaggccttccgcgtcaacaccgactcggcctggactgacttgatggacgtgcaagtggtcgtgacgccgccgtcgaagccccgtgataaccccttcaactccatcttccgtgccaaacgtcaactgcccggacactgccagtgcgctggcctccaacagccaagctgtccccctggtccgcccggcccgtccggaccgcctggacagcctggacagcctggaggcgcaggacagcccggacagcctggacagcctggccaacccgctcctccttgcccgccccagaacatcccctgcccacgctgccctgctggcccgcccggtcgccccggaggacagggacccgccggacagcaaggagcccctggacaacctggtacg

SEQ ID NO: 1189 - DNA, 886 bp, Glycine max
  misc_feature (850)..(851): n is a, c, g, or t
ctcgtgccggattccctcgcccccaacccaaccgttgtccctccccttccgccgaggaacacaaacaacaacctcaacttaacgcattgtgtgcatgatggaggagatgaaagtttctcggcgggtggagtggtggcagaacatgatgttccccgttcggagggtttggtttgtcgttgccaagcgcctcggcattcgcaaaactgggttactgaagctaagtaatgatgtgagggcatgcgaatatgaggacattcaagtgatgtgggagatactaaacagaaacgaatcagagtttggtcgttcttctagcactaggaaaggcaacaacaagaaggggcattgctggaaattattgaggtgggcaaggtgtgctccatgcatgtgccgcacatgatcatgattgctgtgtacgtgagaagaaaaaaatccaacctatgtgttggtgtggtttttcctgcttcaatcatgaataaaaaaagggttctgaagggtttgtgtagaacacggttcttctttccttttgaatcaaccaactcaaccatatgtaaatatcaactgcatccaccaagttcgatgtgtgtgaccatctcatactccatccatgtgcttaattagtgtggtatcgaaattgttgtatgtgtagtttctgctgtgtttcatcatcatcatcatcttggtatgtgttcaaccagacgttcatgtattgcttttagagatccatgaatcgtgtctatctcaggcttaattccagcttggtttttgtatcagaaaactatatatctgcattctgcagaagaaggtatataaatatgtgtagttattataaataaaaagaatctcatgtgcnnaaaaaaaaaaaaaaaaaaaaaaaaaaaaaaaaaaa

SEQ ID NO: 1190 - DNA, 2282 bp, Glycine max
gtagatcgcaaagagcaacagatttttctagatttggcatgtttctttcttagaacgcatacaacggtaaatgtgagcaatctaaaatctttactgaaaggcaatgaaagccaggaaacagtgacttttaggttaggaaggttgaaagacaaagctcttataacttattccgacgataatgttatagctatgcatgatagtttacaagaaatggctttggagattgttcgtcgagagtctagtgaagaccctggaagccgcagtcggttgtgggatccaaatgacatttttgaggcgttgaaaaatgtcaagagtactaaggccattagaagcatattgattcacttgccaacattcatgaagcaagagttagaccctcacatatttggaaagatgaacagactacaatttctggaaatttctgggaaatgtgaaaaagatatctttgatgaacataatattcttgcaaaatggcttcaattttcggcaagtgaactcagatttctttgttggtatcgttaccctctaaaatccttgccagaggatttttctgctgaaaaacttgttatattgaaattgccaaagggcgaaataaaatacctttggcatggagtgaagaatctgatgaatttaaaagaacttcacctcactgactccaagatgttagaggagctgccagatttatcgaatgccacaaatcttgaagtactggttctccagggttgttctattcagctacgtaggcccccccccattttctctctgggaaaacttgagaaattgaaccttcaagactgcacgtccctcaccacactcgcaagcaattcccatttatgcagcctgagttatctcaaccttgataaatgtgagaaacttaggaaactctcactgataacagagaatattaaagaactgagattaagatggacgaaagtcaaagcattttcatttacatttggagatgaaagcaagcttcaattgctacttctcgaaggaagtgtcattaagaaactaccttcatctataaaggatctaatgcaactgtcacatctaaatgttagctattgctcgaagctccaggaaataccaaagcttcccccatcccttaaaattctagatgccagatattgctcttcacttcagactctagaggagcttccttcttcccttaaaattctaaaagtgggaaactgcaaatcacttcagatactacaaaagcctccccgtttcctcaaatctctaatagcccaagactgcacatcattgaagactgtagtgtttccttcaacggctactgaacaactaaaggaaaacaggaaagaggttctgttctggaattgcttgaagttgaatcaacaatctcttgaggccattgcattgaatgcacagatcaatgtgatgaaatttgcaaaccgacgcctctctgcatcaaatcacgatgatgttgaaaattacaatgattatgataaaaaatatcatttttatcaagttgtttacgtgtatccaggaagtagtgttctagagtggttggagtataagacaagaaataattatataattattgatatgtcttcagctccaccttctctcccagtgggcttcattttctgcttcgcccttggtatgtatggagacacatccctggaaagaattgaagctaacattactataagtgatcgtgagggtgaaggtaagaaggacagtgttggaatgtacataggtcttcggaatggcacaattgaatcagatcacctatgtgtgatgtacgaccaaagatgttctgccttcctatatagcagagccaaaaatcaaaaagagtttaaaatcgaggtttcaatggtgttacgatcctcatccaaagaaattttgacactgccgcagcagatgtttaaaggattcgggatcagcctaatagacaccttgggatttagcagtttcaaacaacaaatggaattgcatgactcgctccatgtttaaatttcattaaacaaatggaattaggttgtgcttcgtatcatcccagtttcagggtgaacatctcactaaagcagatattagggactctaggggttattttgccaaccacttcagaagatggcaccttgactcctcttcagcttaccactgacttgaagccaaccattgtctttattgcaaaaatactcgggcaatatttatttgcatgtacacttgggattctctgtgctttagtcttggactgtatttgcatgttgtttgttgaaacattttacagtatgaatttgtttccaacgaaactacag

SEQ ID NO: 1191 - DNA, 1129 bp, Glycine max
cctcgtgcccaatcggcacgaggaaagaagggagctgattcgctggaacactggttgtgtcttaatggttttcctgcaactactattcatggtgacaggtcacagcaggaaagagaattagccttgaggtcatttaaaagtggtaacacccccatattggttgccaccgatgttgctgcacgtggtcttgatattccccatgttgctcatgtggtcaactttgacctgccaaatgacattgatgattatgtacaccgaattggaagaacagggcgagctggaaagaaaggtcttgcaactgcattctttaatgacaacaattcatcactagctagagctttatcagaactgatgcaagaagcaaatcaagaagtacctgcttggctctcacggtttgctgctcgatcttcttttggtggaggcaggaaccgccgatcaggcggtcgatttggtggtcgtgacttccgaagagatggctctttcagtagaggttcttcagattactacagtgcaggaaacggcagtggtggtggatatggaggctcgggtgggtatgctggtggagggtatggtcctggggtcacgagtgcttgggattgactttcttcttttcatagcattacataccatcttaggtataggtgtggatgcgcctacaggatgatttttctccccccagtgtttttatgatcttcaatttacttgtgtttcaagccatcatcattttgtactattttacagtgctaatcattgtggggaatgggttgtgtatgtggtctagtatccacatcaataaaggttgtgtaatgatggtaggtattggtgattactaacatattaggaatttcttgtcgacaactttttatacccttcattttgggtggtaattttggtgggagactggttgtagattatgcaaggggagaaatcgagctttttgttattgccgatcgtggttatctgacttatttctctcgaagcatactctttccagtgtcaaccaatttatgttggaatttaatatttccccactttgttgggctaaggtttttgtaatattacagtggtggttgaaatgaacaacaggttcccgccgatgatttcaatggaacaaaaaagaaaagaaaaa

SEQ ID NO: 1192 - DNA, 1763 bp, Glycine max
cgggccccccctcgagcagctacgtagacccccccccccctgtctcttcattctccaacatctacgttatctcctccaattccatcccgatctctttattgtcttcttcttctctcttcctggttttcgttggagaatcctgaaagccgtttgattttaatcaaagggtcatcaggattcggacaccaatatctcgaatcactcctctgttgtcttggaagaagaccaagcaaaggaaacgaagaaaaacatcaatttttgcaagcaacaatcttctttcttcttcttctgccccttttcttctcttctcttgtcttaaaacacacacacacacaacatagccacccatctgctgaggctgaagctgaagcgtcacaagtcacatacatatgattcgagtggccacaaattaagagtgagagagaatggaatcgagtagcattgagagcagcactgtgtcatcgatgactatgatggaagaggatgagcatccccatcatcagttttcttcaatctccaagcttcataacagtggccccaccactaccagtgtccatgaccttcttgaatgccccgtttgcaccaactctatgtaccctcctatccatcagtgccacaacggtcacacactttgctcaacttgcaagacaagggtacacaatcgatgcccaacttgccggcaggaactcggtgatataaggtgtttggcattagagaagatagcagaatcacttgaactgccttgcagatacatttctcttgggtgtccagagatatttccctattacagcaaacttaaacatgaggctatttgtaacttcagaccatacaactgcccttatgccgggtcagactgctcggtggttggggatattccatgccttgtcgctcatttaagggatgaccacagggttgatatgcattctggatgcacttttaaccatcgctatgtcaagtccaatcccatggaagtagaaaatgctacatggatgctaacggtatctataacaattatggacgtccttctttagggtgtaatgctatatgggatgaacttgatatgacattcattgctatgcattttcaggatattccttcatttcatgcacaagcacacacctacattttggacttcttcaaatcccatccaaattgttaacgcattcttgtttatgttaggttttccactgttttggtcagtatttttgcctccattttgaggccttccagcttggcatggctccggtttacatggcgttcctccgattcatgggggatgaaagagaggcgcggaactacagctacagcttggaggtgggaggaaatggacgtaaactaacttttgaggggagtccaaggagcattagagatagccataagaaggtcagagacagtcatgatggtctcatcatttaccgcaacatggcacttttcttctcaggtggagacaggaaagagttgaagctacgagtaacaggaaggatatggaaagaacagcaaaaccctgaaggtggagtgtgcatacccaacctgtgtagctaggttgattgcatattctcttgaattctatttcttgctgtagataatttgagaagtgttaatctttgaatggtgaatggttatggggatttaacttccaaaaaagaaaaaaaaaactgagttctaaccaagatactttatcagatatttggtctcctacttgtatcatattctaaatcacttgagattctcaaaaatatttaaaggggttgttacttttcagc

SEQ ID NO: 1193 - DNA, 1473 bp, Glycine max
acgtaggtccccccccccccacattttcttctctctcttcattctccaacctctacgttattctcctccatcccgatctctttattgtcttctttctctcttcctggttttcgttggagaatcctgaaaaccgcttgattttaatcaaagggtcatcaggattcgggcacccatatctcgtatcactccttctctcctctgttgtcttagaaagaagaccaagaaaagcatcaatttttgcaagcaatcttcttcttttgccctttctcttgtcttaaacacacacacacaacaacccagctgctgaagctgaagcatcacaactcacacatgattcgagtggccacaaattaagcgtgttggtgttatgagtgagagaatggaatcgagtagcattgagagcagcactgtatcatcgatgactatgatggaagaggatgagcatccccatcagttttcttcaatctcgaagcttcatagcaatggccccaccactaccagtgtccatgaccttcttgaatgccccgtttgcaccaactctatgtaccctcccatccatcagtgccacaacgggcacacactttgttcaacttgcaagacaagggtacacaaccgatgcccaacttgcaggcaggaacttggcgatataaggtgtttggcattagagaagatagcagaatcacttgaactgccttgcagatacatctctcttgggtgtccagagatatttccctattacagcaaactcaaacatgaggctatttgtaacttcagaccatacaactgcccttatgccgggtcagactgctcggtggttggggatattccatgccttgtcgctcatttaagggacgaccacagggttgatatgcattctggatgcacttttaaccatcgctatgtcaagtccaatcccatggaagtagaaaatgctacatggatgctaacggttttccactgttttggtcagtatttttgcctccattttgaggccttccagctgggcatggctccagtttacatggcattcctccgattcatgggtgatgaaagagaggcgcggaactacagctacagcttggaggtgggaggaaatggacgtaaactaacttttgaggggagtccaaggagcattagagatagccataagaaggtcagagacagtcatgatggtctcatcatttaccgcaacatggcacttttcttctcaggtggagacaggaaagagttgaagctacgagtaacaggaaggatatggaaagaacagcaaaaccctgaaggtggagtgtgcatacccaacctgtgtagctaggttgattgcatattctcttgaattctatttcttgctgtagataatttgagaagtgttaatctttgaatggtgaatggttatggggatttaacttccaaaaaagaaaaaaaaaactgagttctaaccaagatactttatcagatatttggtctcctacttgt

SEQ ID NO: 1194 - DNA, 765 bp, Glycine max
attcactcactcgctgtacatgttccggtaattggacttgcgcttttccttttcccgcattttcagatcaaaaccctattcctccattttcccgttttcagcctccaaaaccctatctctaacttcgtaacgcttttccccgttcaacaggaggagctgggtatagaagaaattccagctcaagatctcaagtaaattttgtgtctaatttctggatgttgggatagtctagccatcttttactcagaactgaagttgtctgaatactaggtagataacacaatgtcgctgaggcgtttcttaggctattctgatggtgaggtcatgaggtctgatgcaaaaccttgttccaggctaatgaggcacacagctgcaatctttagtgttggtggagcattaggattttgggtcctttgccgaatgcactatggtcctcgaattacaaatcctaggagtcttcgttgggcagcatgtggagctgtaactgcgagctctggcacggctttgctggttcgtttgtttagtcctgaatgtgagccccagaatatagctgcttatgacaataaaaactaactggtgttgtcaccccctttctttttcccctactgataacatcataatatacttgatgaggtaggttgcaattatctcgcatgtgtaagttttatggtatggatgacattttctggcacatcactaagggaaaatttggctaattaatccaactattcttagatgctaaaaaaaaaaaaaaaaaaaaaaaaa

SEQ ID NO: 1195 - DNA, 2024 bp, Glycine max
ctttatttgtttattttcctatctctctctctccacataccaaaccccaagatcacttataaatacacagaaagagagtgaggaagttgccccagttgagtctgtgatgataatgatgatgatgatgtgttccatgtggatgtgggttgtccttgtggccattgctggtgcccttttagtcctaagatctatcctcaagaatgtaaattggtggctctatgaatccaaattgggtgtgaagcagtactctttgccaccaggtgacatgggatggcccttcattggcaacatgtggtcctttctcagtgctttcaagtccaaggaccctgattccttcatctcctcctttgtctccagatttggaagaactggaatgtacaagaccatgatgtttggaaatccaagtataattgtgacaacacctgaaatatgcaaaagggtgcttacagatgacgataaattcacacctggttggcctcaatctactatagagctcattggaaagaggtcatttatttcaatgtcttatgaagaacataagcgccttaggcgtttgacatcctcttcaatcaatggcatggaagcactgtccctctacttgacatatattgaaaaaaatgtgaaatcttccttggagaaatgggccaacatgggacaaattgagttcttaactgagatcaggaagcttactttcaaaatcattatgcatattttccttagctcagagagtgaacatgttatggaggctttggagagggaatacacagcacttaatcatggagttagagccatgtgtattaatattcccggatttgcataccacaaagcattcaaggcaaggaaaaatctagtggccatatttcaatctattgtggacgagagaagaaacttaaggaagggctatctgcctggaaaagccaaagatatgatggatgctctgatagatcttgaagatgatgaaagaaagttgagtgatgaggacatcattgacatcatgttgatgtacttgaatgcgggccacgagtcttcaggacatattaccatgtgggcaacctttttcctgcagaagcacccagaatatctccaaaaggctaaggcagaacaagaagaaataataaggagaaggcctccaacacagaaagggttaacacttaaggaagtccgggagatggattttctttacaaggtgattgatgaaacattgcgtgtgattacattctcactagtggtctttcgggaggcaaaatctgatgtcaatatcaatggatacacaattccaaaaggttggaaagcgcttgtgtggttcagatcagttcaccttgatcctgaaatatatcctaatccaaaggaatttaacccttatagatggaataaagaacacaaggccggagaattccttccctttggaggaggaagtagattgtgtccggggaacgatcttgccaagatggaaatagcagtttttcttcaccatttccttctgaattaccgatttgaacagcataatcctaattgccctgtgagatacttaccacatacaaggcccatggacaattgcttgggaagggtcaggaaatgttcatctacaacaacctaagagcacatgtctatggctatttttaatttgaaaatccatctccatgttttccctcagctaaatgcttccaggtccactttgagctacgttggcatagcttcaacaaaatggacaaaaaaaggaaaaaaaaaagtttttcacagcacatacaaataagtataatttcgaaagctccatctaccaccctctttaagcactagctagtaagtcttccatctggtccatatgttctgaaaaatggacaaaaataactttgtttcattaggtatttgtttaaaggaaagaatctagtttctatttcttgtgcttcaggagaatttactaatgtgtgcgtctacagatcgggctaagtataattgctgtatataccgcacacagtttttgtgtattaaaccaattaaaattaaataattgtatgattggacgg

SEQ ID NO: 1196 - DNA, 1670 bp, Glycine max
  misc_feature (1660)..(1667): n is a, c, g, or t
gtagctcggagttcggctcgagctctcaaacccatcgccaccgttgcgtacacccttttttcttcacatcatttcccgcacctcttgtttttccccctctttctttgttctccttcggttgaatcaatgggtgcagaggttaagatctggaaccccgttgaagtcgcagagcaagctcgccatgactatgcttcgcagattcattcctcgcatctcaccattgacccctccctcgagcttcctctaatggcacctctcgtcctaaagttgtgcaaggatatgttcaaggcgtggtcaaatttggatgattctcgctttgttgttgagaaaatttccgggggcataacaaatttgttacttaaggtttcagttaagcaagaaaattgtatcgaggaaactataactgtcagattgtatggacccaacactgagtacattattgatcggcagcgggaattgcaggctaccaaatacatcacagctgcaggatttggtgctaagtggctcggcatatttggaaatggcatggtgcaatcttttataaatgcacaaactctatctccttcagatatgcgagagccaaagctggctgctaaaatagctaagcaacttcaaagatttcatcatgtggaaattccaggctcaaaggaacctcaattatggaatgatgtctggaagttctttgagaaagcatctgttcttgaatttgatgatagtaaaatgcagaagacttatgagacaatttcattcaaggaagtccatgatgaaattgttgagctcaagggattgtgtgatctactcaaatctcctgtaatttttgctcacaatgacttgctttctggaaatataatgatgaattgtgaagaagataaactttacttcattgattatgaatatgcatcgtacaactacagaggctatgatataggagaccactttgcagaatatgctggctttgaatgtgactacgacttgtacccaaatatgaatgaacaatatcatttcctcaggcattacttgaaacctgaaagaccccaagaggtgtctgagaaagatcttgaaactttgtatgttgaggcaaatacattttcccttgcttctcacattttctgggcattgtggggtctaattcaggcaaagatgtctgcaattgaatttgattatcttggttactttttccttcgataccacgagtacaaaaggcacaaagagaagtatttcttgctggcacagtcctacctttcaggatgcaagaatgagatgagtagatagatagattatacttatactcagtcattcgtgggatttttgtacgtcaagtttgtagcatgagtcccctgattcatgtagtttaatgtttgtgtaacatatcatttttagacgcttatcacaataatggctaattaggcgtttatgtttgagctacaggctcttctacattctatgttgtaatcctagtacataggctatataaattgatatatcattctttttcttgtattgttgtcatcataaattttggtctgataccaatagtttttgttatccctttcctttattgtttattccccgtcgattttgtactaggcgaaggatgagacttgagaagctgggcatatgtcctataaatagatttaacttgtataaacccccttgtggnnnnnnnnttt

SEQ ID NO: 1197 - DNA, 1007 bp, Glycine max
tcagctacgtaggcccccccccggattctttaaatgtttcccttttcttttcttcctaaaataggcattcacacgtgaagagagaatgcttagataaccaacttataaattcatttgagcttttcatcttcaatatgttctgacaattctccagataaactttacttcattgattatgaatatgcatcgtacaactacagaggctatgatataggaaaccactttgcagaatatgctggctttgaatgtgactatgacttgtacccaaatatgaatgaacaatatcattttctccggcattacttgaaacctgaaagaccccaagaggtttctgagaaagatcttgagactttgtatgttgaggcaaatacattttcccttgcttctcacgttttctgggctctgtggggtctaattcaggcaaagatgtctccaattgaatttgattatcttggttactttttccttcgataccacgagtacaaaaggcagaaagagaagtatttcttgttggcacggtcctacctttcaggatgcaagaatgagtagatagatagattatgcttactcagtcactcgtgtgtttttgtacgtcatgtttgcagcatgagtctcctgattcatgtagtttaatgtttgtgtaaaatatcatttttagacgctagtcacaataatggctaattaatcgtttagtttgagctacaggctcttctacattctatgttgtaatcctagaacataggctatataaattgatatatcattctttttcttgtattgtgatcatcataaattttgatctgttatcaatagtttttgttatctcttcctttcttgtttaattccccgtcgatgttgtaccaggggaaggatgagacttgagaagtagggcatgtttcctataaattagcagagatttaacttctataaaaaaaaaaaaaaaaaaaaaaaaaaaaaaaaaaaaaaaaaaaaaaaaaaaaaaaaaaaaaaaaaaaaaaaaaaaaaag

SEQ ID NO: 1198 - DNA, 1098 bp, Glycine max
cccgcgtccgataagaacacctctgagattccacgaaaaggcagattatgattgaaataaaaaatgaattagatttaaaaaatacttcatttttaattaattggtattgatcgtgtctgagtcgtatgtcgtttgagtcggggatggtcatggaggaacacgactcggagaaggtggagatcgtcctcaaaaccattggtcctgcacgaccctctcgcctcctcgttccttcttctatcaaggtgtgtgatttgaggagattaattgctaggaatgaaaatttgcaaatttacaacttgagtcttattttacgcggaagtgcactgtatgacacgaaaaatggagatgatgtatacatacaactcaatgatggagattgcttgattgttgctgtcaaaccaatgccaccagtgaaagatggatatgacaatgatgatgaggatgaagatctgaagtttcggcttcctcactcatcaagttggtggaagaagaggctgtactcttttctacatgataatttgaagcttccagatattcttttgatggtaattttcactctgagtctgaaggcatggcttctcataattttgtggtttatcctggctcctgttgcccatagatgggatctcggacctttgtatatacttgcaactggcttttgtctcattcttttcaatcttggaaagcgccaagctggtgacataagtgcatattccatctttaatgaagacttcagagagcttccagggacgctgaatgcagatcgacttgatagagatataagagcaggacagttttgagccctacttcactgcactctttccaatcatcccaacactactgatgtcaagtcacatgctatatatctgcacaatcacaaggagataattgactagccaaagagttaacaagtacagtgtcaatgaaaatgacaagttttctatgagaagctatgcccccttctgtgtatatatctctgtactaagatgtattgacatgattgagatgaacatatttcattgtggattactctgtctatgtctcttgtaccgaggttcctgtttatgaatttcagagtttacaaaaaaaaaaaaaaaa

SEQ ID NO: 1199 - DNA, 2071 bp, Glycine max
tacggctgcgagaagacgacagaaggggatttttgagtgtttgtgagtttgtctgtgacactctctctttctctctctctacgcttcacttttccgtaataaacccttcaaaagcgaaagcggtttctcgtttttggaccttatctctctttctaaggttcgattctgcgtactttgggaggaacagacacacatgaaggattcgaattcggatctgtttgacccggtcatggcgatggagtccgagtggtctcgcggcggcaccacctccgatgccgatttcgccttcgccttcaacgacagcaacttctccgacagggttctccggatcgagatcatgcacgaccccgtcgacgcccgccctgattccgacgcctgcgccaccattgccgactgggcccgccaccgcaagcgccgccgcgaggatatcaaaaaggataacggtgcggatcttgcttcggtgccagacgagcaagttttgaacgggcatcaatctgaagcggatgagtgtgagaatcaagatgaagaggctgatgcaatggttgaagaaccccattctggtgatgaagctacaaatagtaatgattcagactggagcatggactgctctgcaggtgcagttgttagagttaaaacgctgcatatcagttctcctatcttggctgcaaaaagtccttttttctattagcttttctcaaatgggatgaggggagtctgagcagagacatgtcaccctcagaattaacgcctctgaagaggctgctctcatggagctactggaatcttatgtacagcactaccttgaccactactacagcacctgcattgccagctactaggccccccccccataaatttgaagttgcttcatgcatgagatactgtagccggttattgcggaatatgcctatgacacctgactctgcattgctttatctggagcttccttctagtgtcttaatggctgatgcagtccaaccattgactgatgctgcgaagcagtatcttgctggtcgatacaaggatataaccaagttccaggaagaggttattgccttgcccctagctggagtagaggcaatactgtctagtgatgatctccaggtcgcatcagaagatgctgtatatgattttgtgttgaaatggtctcgacagcagtacactaaactggaagacaggcgagaagtcctgggtacccggcttgcacaattaattcgcttcccttacatgacctgccgaaagcttaagaaggtcttgacctgttctgactttgaccatgaagttgcatccaagcttgtacttgagggcctatttttcaaggccgaggctccacaccgccaacggtcgctggcagcagaagatactgcatcttcaaaccgtcgttttgtggagagagcatacaagtaccgcccagtgaaggtggtagaatttgaacttccccggcagcagtgtgtggtgtacttggatctgaagcgggaggagtgtaacaacctcttcccatccgggcgggtttattcccaggcgttccatttgggtggacaaggtttcttcctatcagcacattgcaacatggaccaacaaagctctttccattgctttgggctgtttttgggaatgcaggaaaagggctcagtgagctttgccgtcgactatgagtttgctgcgaggtctaggccgacagaggaatttgttagcaagtacaaaggcaactacgtgttcactgggggaaaggccgttggctatagaaacttgtttgccattccatggacttcgttcatggctgaggatagtctttactttatcaatggtgtccttcaccttagagctgagctcaccatcaaacactgacccccatttctagttgtaaactttctatctattccggttggtagccttgaccttttttttagatctcaaattctcattttctgttaacactagtaatctatcaaaagcttaaatatacagcatgtgcactaaagtggatagtgttgcatgtgattgagaagataaaaaaaaccctgatatattattacccgggattctaggttaagtgaacctgccttctccc

SEQ ID NO: 1200 - DNA, 2028 bp, Glycine max
ctcgagccgttcagctaacctcttatcaagttttgttcattactgactactgtgttctccaactgggtctgttttgttttcatcaatcaaaattcagaagctcggttctctcacttttctgtacaaaagccatagaaagactatttgggatggactggtactatggatgtgaaagtagtgatcttcttgtatcaaaagatcaagaaaatttgttggaaaggcatccttcaccagaaaattggtcagaatggggaataaatgcacctgaaggctttaattcaccccaggagtatttgatcatggacacagacgaaacagaagtagaattcaatttcattgatgaaagtttcagggatgttggcccgcgtggccctggtctctagcataaagatcagtctagcagttcaagtgcatgtggaggatttgctgagcaatcgtttcaacaaatggcacttacgtgtgatcaccagcttcaagaccgatcaactttcaaacacacggatgacattttcttgtacaagcgtaacttctgggactaagatacttggttttatgcctgtatgataatgaaatcatgtagcatctgaaatgctttaaccttgtagcaagtccagtacaaattgaatggctctgtggtgtttttgcataccaaaattcaccatatttatcataatgattggagccaatagagactaacacaatcctacttatttgttatcggaactctataagcgtgaacctgctattgcatgggattctgtacttgaagattttccatgtgttgaaaacctacacaaatcattctcttaccttgaaaaccaatgcagtaacacaactggtggggttcagaaagatattgcagcttcagggtttgttccatgcaactcggactccaaggattgcctggatatagaggatcatgcagtcaaagtcttggacacttttgagcagtccaatggagatgacaccatgcttgagcagttatctcttgaggaatatacactgcaggcttttgagatgttaattgcacagttcactgagaagactcgtatttctttccgagatgccctgtaccgccttgctagaaatacaaaacaacatgttatagaggaccttgatggaggtctttacatgccccaggaaatgccagactcagtttaccatgaaaccatgaggtctgaggacaataaaccaatggaatcagagagcaacagtgttgacagagcagttgcaaatctcatgttcaacaagatggaaattaacatactagatcttccccttacaacactagtaaacttgaagcaagaagtaattggaagtaaatgtctactaggaaaaagctcaaaatccttggatgtgacccaataatctcactctccacacccggaaaagttacccacctatgctgaggttccaaggtttgaaccagaggaccaacaagaagccacggaatcatatattgcctatggttgagtttggttaagtaatgttattgtgagctccttcctggtagctaaaccaaaaataagaaaaaatcaatttcctgtaattgtgcaaccctttaagataaaagaggtaaggatatctgacaattttggctcctgtgatcttacgtatatatatgcttttgtacttgaattatttgttctgtagcttctatccaaggtctagctgtatccatccagctacatcttgattttgattggaatgtaaatgattgaattgatcaactagaagttagcaaagatagggtcagttcaggattcttaggttttgtacactttgatatttttcttggagtgcaaatgatggaattgattaaaaaaaaaaaaaaaaaaagtagcaaaactggggtcacttcaggattcttgtgtgttgtacttgtacccttgatatgttccttggagtgcaaatgattgaattgatcaaccagcaatttgcagaggtagggtcacttcagcatttttaggtgttgtaccccttgatattttgcttggaatttaagtgtgaatttatcaactagctact

SEQ ID NO: 1201 - DNA, 1616 bp, Glycine max
ccacgcgtccggtctctgtgagctgaaggtagtgtgcagccaaaaagaattgaagcaaacactgcagaaggggagataaagaaacctttcctctccatcctgtaacaaacctacatagttgattcaaataagactagatgactgtggatgaagttggtagtagctcccagtggagcaaagaacaggataaagcatttgaaaatgccttggcaattcaccctgaggatgcttcagaccggtgggagaagattgcagctgatgtaccagggaaaaccttggaagagattaaacaccactatgagctcttggttgaagatgttagccagatcgaatccggttatgtgcctttaccatcttataattcttctccagagggctcaacaagccatgctagtgaagaaggagctggcaagaagggaggccactcttggaatagtaataacgaatctaatcatggaactaaggcttcaagatcagatcaggaacgacgaaagggtattgcatggacagaggatgaacacaggttattcctccttggcttggaaaagtatgggaaaggtgactggcgaagtatatcaaggaactttgtggtgacaagaacgcctacacaagtagcaagccatgcccaaaaatacttcattcgtctgaactcgatgaataaagacagaaggcgatccagcatacacgatatcaccagtgtcaacaatggagatgtttcagcacctcaaggaccaattactggtcaaacaaacggttctgcggataattctgctggaaaatcaaccaaaccagccccaccagccccaactgctgccttgggtgtaggaatatatgctggtcctaccattggacaacctataggaggacccctcgtatctgcagttggcaccccagtgatgaaccttcctcccccagcacacatggcatatggtctcggagcaccggttcctggggcagttgttcctggagcaccaatgaacttaggtcctgtgccataccctatgccacatacatctgctcgtagatgaagttatgttcagaggcctaatgtacaaaaagaaaacagcagattagaaggcttatgaatttaatgtaattctttacctattcctatagctgcttatgtgcaacagttttatgctccatcaattatttcaaataagggatactaagaagcattagaatgtatctacattggctgccatggatggaatatctgacagccttgacataccacagcgtgaaagtaatgttgtcgttagtcatataaagtggcccattctgtagatgaaggttctgtggcaggcttatgaatttaatgtaattctttacctattcctatagttgcttatgtgcaagagttttatgctccatcaatttcaaataagggatactaagaagcattagaatgtaattgcatcggcttccatggatggaatatctgacagccttgacataccacagcgtgaaagtaatgttgtagttagtcatataaagtggcccattctgtaaaggaaagttctgtggctttggtatgttattgttgtattttgatcacttggtttctgattttccgtagggtcttccaaattccccatctagcttccctttttatc

SEQ ID NO: 1202 - DNA, 1860 bp, Glycine max
aatcactttcacccctccctctcccccacccctcccagttcaaacacctaatcgaaaaattaatttctaggtttcatttcccttaaaccgtcatgtattgcatccatgattttatggttgtcagactgagatatttttccatgttctaattggacttctttgccttttcattcatcagcaagtcagaaattcacaagtgtctggttttctgaattttgaagtaaatcacctttgaaatttcacatacctcataagttttttgggaaaccattggtattgaactctgttcagcttcctgctattttctgcacatcaggctgcaccttggagtccaacacatctgctccctaagtttatagcatttagcatgctggcaaggttaatatttgtggtactcaccatagaacaaatcagagtttgtggcatataagatggccttaacctagatttagagcagttaggtagaaacttttcctctccttctaataaaactcggtagttgcttcaaacaagactagatgactgtggatgaagtggatagtagctctgagtggagcagagagcaggataaagcatttgaaaatgcattggcaactcatccggaagatgactcagatcgttgggagaagattgccgctgatgtgccggggaagactatagaagaaatcaaacagcattatgagctcttggttgaagatattaaccagattgaatccggttgcgtgcctcttccatcttataattcttcttcagagggctcaacaagccatgccagtgatgaaggagctggcaagaagggcagcggtcctgggcattatagcggtgagtctaatcatggaactaaggcttcaagatcagatcaggaacgacgaaaggggattgcttggactgaggatgaacacaggttatttcttctgggcttggataagtatggaaaaggagactggcgaagcatatcaaggaactttgtggtgacacgaactcctacacaagtagcaagccatgcccaaaaatacttcattcgtttgaactcaatgaacaaagatagaaggcgatccagcatacatgatatcaccagtgttaacaatggagatatttcagcacctcaagggccaataaccggtcaaacaaacggttctgctggaaattctactgccaaagcagccaaagcggccaccccggcctcaactggggtgccaggtgttggaatttatgcagctccaaccattggacaacctataggaggacccttagtatctgctgttggcaccacagtgaaccttcctgcacctgcacacatggcatatggggtccgagccccagtacccggtgcagttgtacctggtgcaccggtaaatatgggccctgtgacgtaccctatgcagcatacgtctgttcctcacaggtgaagtgctgtttagaggcctagtgtacaaaagaaacaagagactagtggtggcttctgcagtgaatgaaattcttttcttgacaattgctttttgcttattatatgcaacaatgagttatatgcataatctgtcatttcaaataagccatatgaggaagcaattgaatgtatccgtgtaggctgccatggaatgtttgacagccttgacataggagagcataaaagtacggttgttttgtagacatttgaactggctattattaaaccgtgctatagaggaaggttctatggatttcaagtgtaaattattgttgcactcttggtttttgtaggaaataaactcttcgcctatggtctaccttaactttatgtgtgtaagttactacaattgaattggcacgaattattaaggttatgcttggattaaagtttgggaaatacttttatgaaaa

SEQ ID NO: 1203 - DNA, 1155 bp, Glycine max
taggtccccccccttaatcgcgtcagctgcggtcgctcccccccccgatttgagaaaatttctggtcttaaaaacttgaagaggttaagcctggcttttaacaggatcacagatgcatgcttagttcatctgaaagatttaacaaatttggagtatttgaatctggattcttgcaggataggtgatggcgggctagctaatttgacaggcctcacactcttgaaaagtctggtgttgtctgacactgacattgggaacagtgggctgcgttatatatcaggtttaaaaaaactggaagatttaaatgtgtcattcaccacagtaactgataatggcctgaaaaggctgtcaggattgacacaacttaaatcacttaatctggatgcccgacagattaccgatgctggactagcaaatcttaccagtctgagtggattgataacattggatctctttggagcacgcatttcagacaatggaactacatttttacgatcgttcaagaacttgcaatcccttgaaatatgtggcggaggattaactgatgctggtgtaaaaaatataagagaaattgtctccctgacacagctaaacctgtcccagaattgtaatttgacggataaaactttggaattgatatctggaatgacagcactgaggtcgctaaatgtttcaaattctcgtataaccaatgaaggactacggcatttgaagcctttgaagaatttacgcactcttaccttggagtcttgcaaggttactgcttctggaattaagaagcttcagtcaactgatcttccaaatttgataagctttcggccagaatagaccaggagaatgagagaattctgttatgtgtctgttgaacaattatctgtacatatttatggctactgtctggatagttgaaaaatgtacataaaatgacatgcaagaatgtaattatgcctttattttgcatgtttgtatttccccgtctaagaaaaattgtacataaatctttctttccccctttctcctctgggtaaatatgcctggtgtggctatctaaagtctgcgcataatgtaatgtgtaataaagatgtttggaccagggtgatggtgctcattattatgttcgtatagtaatgaattgtatttgaccgagcagagagt

SEQ ID NO: 1204 - DNA, 2258 bp, Glycine max
ctccaccttttcttttttcatttctcgctttatccttagttttttttcttcaacggatgaaggaatcatcttgatcgtacggaacttgttctatctttccgtaatcgaacttggtggccactgtatataaataagttcagttcaacaacacaatcattttgtatatgatcaaattaagtgatggggggcatctgttctaggaagagagatgagcatgagcatgttgtggaagatgaattacacagaggagtctcggggaggtattgtaggagtggcagcacaaaatggatgagggccagaagtttacgtgctaagcccaatcattgtgccggagggggaacatgcccctccctcatggattcccgcgtcgacccgcgccgccgggattttcataagtacaattcattttcgattcttccaagagacataagccagcagatcttcaatgaattggttgattctcactgcctgacccaactgtcactcgaggcttttagagattgtgctcttcaggatattgatttaggcgaatatgtgggagtgagcgatgattggatggatgtcatctcttcacaagggttgtctttactttcagttgatgtctgctacgtaggccccccccccaacggactgcgattcctaaaggattgctcaaatcttcaagcattgactctcaatttttgtgaccaattttcagaatatgggcttaagcacattagtggtctttcaaacttgacttccttgagcatcaggaagagcagcactgtcaaacctgatggaatgcgtgctttctccaacttatttaatttggagaagttggaccttgagaggtgttcagatattcatggtggatttgttcatcttaaaggtttgaaaaagcttgagtatcttaatattggatgctgtaaatgtgttatggattcagacatgaagtctatctcagagcttataaatttgaaggagttacaaatttccaacagcagtattactgatattggaattacctatttaagaggtttgaagatgcttaccacattaaatgttgaaggatgcaatattactgctgcatgtttagagtttattcatgccttagcttccctggcatgcttaaatctcaacagatgtggtctctctgacgatggatttgagaaaatttctggacttaaaaacttgaagaggttgagcctggcttttaacaggatcacagacgcatgtttagttcatctgaaaggcttaacgaatttggagtatttgaatctggattattgcaggataggtgatgacgggcttgctaatttgacaggtctcactctcttgaaaagtctagtgttgtctgacactgacattgggaacagcgggctgcgtcatatatcaggtttaaaaaagctggaggatttaaatttgtcattcaccacagtaactgatcatggcctgaaaaggctgtcaggattgacacaacttaaatcacttaatctggatgcccgacagattaccgatgctggacttgcaaatcttactagtctgagtggattgatagcattggatctctttggagcacgcatttcagacaatggaactacatttttacgatcgttcaagatcttgcaatcccttgaaatatgtggcggaggattaactgatgccggtgtaaaaaatatcagagagattgtctccctgacacagctaaacctgtcccagaattgcaacttaacggataaaactttggaattgatatctggaatgacagcactgaggtcgctaaatgtttcaaattctcgtataaccaatgaaggactacggtatttgaagcctttgaagaatttacgcactcttaccttggagtcttgcaaggttactgcttctgaaattaagaagcttcagtcaactgatcttccaaatttgataagctttcggccagaataaatcaggagaataagagaattctgttatctgcctgttgaacaattctctgtacatatttatggctactgtttggataaaaaaatgtacataaaaatggcatgcaagaatgtaattatgctttattttgcatgtttgtatttccccgtctaagaaaaattgtacataaatctttttctttctccctttctcctctgggtaaatatgcctggtggggctatctatagtatgtgcataatgtaagtgtaataaagatgtttggaccagagtgatggtgctcattattatgttcgtatagtaatgaattgtatttgactgagaaaaaagttgttccaaaa

SEQ ID NO: 1205 - DNA, 1539 bp, Glycine max
ccacgcgtccgggatgactgaggagtgcgccggcaacctttggttctctctcatttctcgttcttcttctgccgtcatactcacaccactcttcttccattttcattttctctgcgaattcctattcccatacacaaaccaaatgggtattaagggtttaacaaagcttttggcggacaatgccccgaagtccatgaaggagaacaaattcgagagctacttcggtcgcaagatcgccattgacgctagcatgagcatttaccagttccttattgttgtgggaagaagcggaactgaaatgctcactaatgaggctggtgaagttaccagtcatttgcaagggatgttttcgcggacaatcagacttctagaagctgggataaaaccagtatatgtttttgatgggaagccaccagatttgaagaaacaagagctggccaaacgttactccaagagagctgaggctactgaagatttgtcagaagccttagagactgccaataaggaagacattgaaaaattcagtaaacgtacagtgaaggtgacaaaacagcataatgacgactgcaaaagacttttaaggctcatgggagtgcctgttgttgaggcaccctcagaagcagaggctcagtgtgctgccctttgcaaagctggaaaggtttatgctgtggcttctgaagacatggattccttaacatttggatctcctaaatttcttcgccacctaatggatccaagctcaaaaaaaattccagtgatggaattcgaagttgcaaagattttggaggagctaaatatgaccatggaccaatttattgacttatgcattctttctggctgtgattattgtgacagcattcgagggattgggggactgacagctttgaaactcatacgtcaacatggctctattgaaaatatactggagaacctaaacaaagagaggtaccagataccagataattggccatatcaggaggctcggcggctttttaaagaaccaatggtcataactgatgaaaaggaacttgatattaagtggtcttctccagatgaagaagggttaataacatttctggttaatgagaatggtttcaacagtgatagagtgactaaggcaatagaaaaaattaaagtggcaaagaacaagtcatcacaaggccgattggaatcattttttaagccaacagtaaatccatctgtacctatcaaacgcaaggaaacaccagtgaataatgctaaagaaactaacaaaaagaccaaggctggtggtggtaagaagaagaaatagttggctttgtgtcttgacaaggaggatggtttcgcaatactgatgcagtcttccaaattgtaaaatattaatatggggtagatttaatgaacttgactaatgtaagctagagttctctccttctcatggaaggacaaattgagatacggcacttcatttgatagagtcagagatactcaaaatcctccattcctgagtgtaatttaacttgtggtttcgtttcctgctgcaaaaaaaaaaaaaaaaaa

SEQ ID NO: 1206 - DNA, 1819 bp, Glycine max
tcagctacgtaggccccccccctctttgtgcgtagcgtagaaatgactccatctttgcgattctcaactttctctctctaaaaaacccatcagagcatgaggagagagaaacttccctgcccttccatttccctctcgattccttcgcctttgctttcgatcctttgctagaagagaaccttattcctctctgtctctcccccttcaaattcccttccttttcttccatattcactctctcttcctaaccgcccgatgcactttggttttgcaaactaattcgttggctaaattactccgattgtgaacttgtttaaattccaggttctgttggaatatccaaaatggcaaaaggtagcaggggaagacacaggattgcttctcgtcaattcagagtgactccatacccactggcttcttgcaaaagggacatttgtgaggacatgtgccaaaagaaatgttctaaggctttggaaaagaaagagttggaagatgttacgtgttctgtgtgcatggaatatccacacaatgctgttcttcttctttgttcttctcatgacaagggttgccgtccctatatgtgtggaactagctttcgtcattctaactgtcttgatcagtacaagaaagcttatactaaagtaatttcacctaataggcaacctatgcaaggcactccaggtgtgctacaagattcaaacttgcctcttgagaagagtgaagccacagagcttgcatgtcctctatgcaggggtcaggtgaaaggttggactgttgtggaacctgttcgggactatctgaatgcaaagaaaagaggctgcatgcaggatgactgcttgtatgttgggagctataaggagttgaagaagcatgtgcgggcagagcatccgtcggcacggccacggatggtggatcctgctgatgaacagaaatggagatggctcgagtgggagcgtgaaagagaagatgttatcagcacagttacatcagcaatgcctggggcagtagtttttggagattatgttatagaaggtcatcataatgactttgatacagatgaagaggagggttcaggtaatgcagaaagaaatggaagatttcagatgggtttagaggcaatgaatttcttcctcctgttgcatgcagttcggcaagggaatgagcttaacaaccttggtagacggctgaggcctgagctgacccacaacagggttgcaggtcagaatgcagctgccgtgctggatatctcagatgaagacaatgataatgatggcaggtacaatgaagataataatagcaggtacaatgaagatactgatggcggtgtatctttggttagccgtctccaccgccatggtggtggcagagttttattgggtcgttctggtaggaggcggagatgtagagaagcacgtgcaaggattggagatagttgaagatcgtgcatgaaacaggaggttggcaaaggacaagtttcgtaggcatatcagattagaaaattcagccccatgtagtggtggcttaataacatttgaagggctttctcccccaaaacaggaaaatcaaaagatgggcatttttatttttttaaaatcttgtaatttcgtttacatgtacatccctaccttcctcctattgcttttgcacattccaatgtgaattcacttgtgtaaacatttgatttttatgaaatctttgacaagaagttgattgtcatgtgactgtcccaggatcaagtggccttttatttagggtgtttggattgacggtgggaaaattgattttactgaattgattattattgaatttattttggtag

SEQ ID NO: 1207 - DNA, 1794 bp, Glycine max
  misc_feature (418)..(418): n is a, c, g, or t
atttttgtttctcctaggtttctttcttcccgatctgcatcttcacttcttactgcttattcttcttctttccgattcccatttattccttctttcttctcgatttcgtatatttgtattttctcctcttttttcttcccgcgaagaataaaaaaaacactggagaaatagatcgtgttgtgtgttgtattttagtgaaattgattgtgaagtgatggaatctatatttgaatgtttttattctaaaatcaaattaatgataaaattgagtagtgttatttatttagggcaaaaatactcaattgctcaaactcaaatcaattttggatctagaatcaattatgtagtattatgaatatttacctatgattacgtgtgacacacacttgtcacttaattatgaattgcgtaatattgngaaatttatcttgcagggttaagcggtgagattcgcgaatctgagaaatgtcggattcttctcgggaggagaatgtttacatggcgaaattggcggagcaggccgagcgttacgaggagatggttgagttcatggagaaggtagcaaagactgtggaggttgaggagttgacggtggaggagagaaatcttctctctgtggcttacaagaacgtgattggtgcgaggagggcttcgtggaggatcatatcctccattgagcagaaggaggagagcaggggcaatgaggaccatgtggccattataaaggagtacaggggcaaaattgaggctgaactcagcaagatctgtgacgggattttgaacctccttgagtccaacctcatcccatccgccgcatctcccgagagtaaagtgttttaccttaaaatgaagggtgattaccacaggtaccttgccgagttcaagactggggcagagaggaaagaggcagcagagagtactttgcttgcttacaaatctgctcaggatattgctcttgctgacttggcccccactcaccccattaggctgggacttgctctcaacttttctgtcttctattatgaaatccttaactcgccagatcgggcttgtaatcttgccaaacaggcatttgatgaggcaatttccgagcttgacacattgggtgaagagtcatacaaggatagtacgttgatcatgcaacttctccgtgacaatctgactttgtggacatcagacatcacggacgatgctggagatgagatcaaggaaacatctaagcaacaaccaggtgaataggcgatggcagtagttgatgggatatgtattaccgataatatacatccaatgtggcttgccatagtggaactgtgtattaatgagtttcgtgatttcaattgcgggttgcgcttgagatttacaatgtttcagtcgtgtatgtgttttattgacgagaacaatgtggcttggtggtttagtgatttataaattttttattgttgctatgtagttgcctcttttttattgacgagaacaacgttggattttttttttttttaagtcaatgactcgagttttttcttttcaaaaaaaaaaaaaaaaaaaaaaatttaactaccctcttgtttttctgtggttacctctttgtagtttaagctccactcacaatcaccatctccgtttcatttgttttttaatcaaacggaagccataagctgtgttcaaacgaaatctagactaacaactccattgtttcacttgcctgggatgcatcaatcagtaccattagtttgcgtttggttgcgaacaaaatgttgctgccggctcgcaggtggtctgctacaatggataaaa

SEQ ID NO: 1208 - DNA, 1221 bp, Glycine max
tttgaagaagaaaaaagaaaccatttaacacacaccatgctaaatattctagatggattcttacacgtagataccacatttttgttacctatataatattttccacaatataaccacaaatctaataaaaccaagacatgcataaagttggatctaaccggacagtactactacaacacaagtcatgtggtgcaataagaataacgttaaggccacatgctagtcatagagctcacagcattattactattgattccactattgaaatcgctgcaaggaatattatccaagtttccaagcccaccaagaggtgaattttgtccactaactgtaattccacctccatatgaagcatcatcattcccacggacggtgatggttggcgaaacatgtgtcatgcggtgtagattatttgtgttgagttgaggtggggtgtttagtgaactctgattttgaagaatctggttgttgataggggtgagtgtgccacgagtgaccatatcctcagctaatttcaccttagctctcaaagcttcgacatctgattttaggactcggttattcgtatcagcgtcacgaaattgttggctggcatctgtaagctgcttaaataggtttgcattttccagtctcagccgttcaacttgccactccaggtcagccaaatgggcttgttttcttctcctggacctccttgcagactctctattagaaaccttccttctaaggcgcttcatatcaatagcgtttgtgctttgttcacaaggacctgcttcatcatcctcatcagatggctcacgtgaggaaccacttgtagtggtggcgaccccttttacttgattatctctcacgtttggtttgttagcagacactgggctcccaacggtaccacaaaaggaagactgagaatcaatagttgcagaaatggtggattgaatgggagtgaggttttgggaacgaacaagggtatcatctgttactccaccacaagttgaaaatgcagttactgcatcctggttttggaaagctgcgtcggagaagggcttgacgtcgtcgtttccgggatcgaacatggaggcgatccacttgaagtcgtcgaaattcgccgccatgatgctggcgggggcgccaccccacttggactccatgtcaccggaaaatgagaaagagggggagagtagaaggagagagaaaaaagaataagagaagcctcctgcccga

SEQ ID NO: 1209 - DNA, 2064 bp, Glycine max
catcttcaaaatctctcctttctttaaatcccaatattttctgcgcgaattttgctagaaaccgttagtgggtatcctcaaaatactagattttcgattcgtttggtgaacggatttttaggtgtgattattacgttttttttttgttcaacaagctatggaggtttcggtgattggaagctcacaagcgaagctgggcgcgtctgaattggcttctagggaagttggattttgtaatctgaagaacaatttaagggttttgaatgatagagttagttttggtaggaataatatacggtgggagaaggctgggattagtttcactttgagggctcttcagactgaacctgttagagaggagaagaagccttctgggattggaacaagatccaaaacggtagatggtgtaagattatttgtggggcttcccctagatgcagtttcttatgactgcaagtcaataaaccatgctagagcaattgcagctggcctaaaagctttgaagctcttaggagttgaaggtgttgagctccctatttggtggggaattgttgagaaagatgccatgggacaatatgactggtcaggctatcttgctattgctgagatggtccagaaagttggtctcaagctccatgtttctctttgctttcatgggtctaagaaaccaaatatccctctacctaaatgggtatcccaaattggtgaatctcaacccagcattttcttcacagataagtcaggacagcattataaagaatgcttgtccctggcagttgataatcttcctgttcttgatgggaagactccagtccaagtgtaccagagtttctgtgagagcttcaagtcttcattctctccattcatgggctctacgatcatgagcatttccatgggtttaggaccggatggtgagctacgttatccatctcacccccagctgccgagtaatggaaaaactcaaggtgctggggaattccagtgttatgaccaaaacatgctcagctttctcaagcaacatgctgaagcatctggaaatcctctgtgggggcttggtggtcctcatgatgcacctacctatgaccagcccccatacaatggcttcttcaatgatggggcttcttgggagtccacatatggggacttcttcctctcttggtattccaatcagctcatagctcatggagattgcctcctttcattggcatcttcaacttttggtgactctggggtgacaatctatggaaaactcccacttatgcactcttggtatgggactcgatcccatccttcagagctaactgcagggttctataacacagctaacagggatggctatgaaccagttgcacagatgtttgctcggaactcgtgcaaaattatattacccggcatggacctttcggatgcaaaccaaccagaggaaaaccattcaagccctgagttgctacttgcacaagttatggcagcttgcaaaaagtatgaggtgaaggtttcaggtcaaaattcttctgagtctggtgttccaggtggttttgaacaaataaagaagaatctatctggagataatgtattggatttgttcacatatcatagaatgggagcatctttcttttctccagagcattttcctttgttcaccgagtttgtccggagccttaagcaacctgaactgcattcagatgatctaccggccaaggaggaagaaggcgccgaatctgccatggatatgagccatgaatcaagtgtgagcatgcaagcagcctaatggttgtaaattcgtaatgtatgataatcatgtagataacaattagttatacccttggatcagtgcatgggatgagattgagaacaggttattttgtaagcacaatatgagaatcttttttgccggtttatcctcaagcgtagaccttttagttatttcttattatgtagccagttgggtggcagattacctttttgtcatttgtgctcatgtggtgtacattccagccaatattacataataattgtgaaagttataaaataaaaaaaaaaataaggaaatttaaaaaaaaaaaa

SEQ ID NO: 1210 - DNA, 2080 bp, Glycine max
agtcagctacgtaggccccccccccccgatcttcaaaatctctcctttctttgaatcccattattttctgcgtcaattttgctgaaaaccttaagtgggtatcctgaaaacactagattttcgattcgtttggtaagcggatttttaggtttgattattacgtttttctgttcttgttggatatggaggtttcggtgattggaagctctcaagcgaatctgggagcgtcggaattggcatctagggaagttggattttgcaatcttaagaacaatttaagggctttgaatgatagagttagttttggtaggaataatatacggtgggagaaggctgggattagcttcactttgagggctcttcagactgaacccgttagagaggagaagaagccttctgggattggaacaagatccaaaatggcaaatggtttaagattatttgtggggcttcccctagatgcagtttcttatgcctgcaattcaataaaccatgctagagcaatttcagctggcctaaaagctttgaagctcttaggagttgaaggtgttgagctccctatttggtggggaattgttgagaaagatgccatgggacaatatgactggtcaggctatcttgctattgctgagatggtccagaaagtgggtctcaagcttcatgtgtctctttgctttcatgggtctaagaaaccaaatatccccctacctaaatgggtatctcagattggtgaatctcaacccagtattttcttcacagataggtcaggacagcattataaagaatgcctgtccatggcagttgataatcttcctgttcttgatgggaagactccagtccaagtgtaccagagtttctgtgagagcttcaagtcttcattctctccattcatgggctctacaatcacgagcatttccatgggtttaggaccagatggtgagctacgttatccatctcaccactggctgccgagtaatggtaaaactcaaggtgctggggaattccagtgttatgaccaaaacatgctcagctttctcaagcaacatgctgaagcatctggaaatcctctgtgggggcttggtggtcctcatgatgcacctatctatgaccagcccccatacaatggcttcttcaatgatggggcttcttgggagtctacttatggggacttcttcctctcttggtattccaatcagctcatagctcatggagactgcctcctttcattagcatcttcaacttttggtgactctggagtggcgatctatggaaaaatccctcttatgcactcttggtatggaactcgatcccatccttcagagctaacagcagggttctataacacagttaacagggatggctatggaccagttgcacagatgtttgctcggaactcgtgcaaaattatattacctggcatggacctttcggacgcgaaccaaccaaaggaaaaccattctagccctgagttgctacttgcacaaattatggaagcttgcaaaaagcatgaggttcaggtttcaggtcaaaattcgtctgaatctggtgttccaggggggtttgaacaaattaagaagaatttatctggagataatgtattggacttgttcacatatcatagaatgggagcatcattcttctctccagagcattttcctttgttcactgagtttgtccggagccttaagcaaccggaactgcattcagatgatctacctgctgaggaggaagtaggtgctgaatccgccgtggttatgagccgtgattcaactgtgagcatgcaagcagcctaatggttgtaaatttgtaatctatgataatcatgtatataacaattagttattattatactacccttgcatcagtgcatgggatgagattgaggacaggttattttgtaagcataatatgaggatcccttttccttgtttattctaagcagagaccttatagttattccttataatgtagccaggtgggtggcagattgcctttttgtcatttgtgctcatgtggtatacatttctggtcaatattacttagcttaataagcaccagttttaaaaaaaaaaaaaaaaaa

SEQ ID NO: 1211 - DNA, 2761 bp, Glycine max
cacccctccgcactctccccattaaataaacaaagaaagagagaaagaaactcaacctcgttcgtttcgttcctccatgaaataatggcttccgtttctactttctgtttcgttctcttcttcttcttcttcctcacacaatgctggttcttaacttcagcaaagaaaacctacatagttcacatgaaacaccacgaaaagccttcggtttaccccacacacactgactggtacagcgccagtcttcaacaatctctcactctcaccactgccgattcagattccgattccaatccgttactctattcctacaccaccgcctacaacggtttcgccgcgtccctcaacgacgaacaggcggaacagcttctcagatccgaggatgttctcggagtgtacgaggacacggtgtaccagttgcacaccacccgcactcctgagtttctagggttggaaaaggaaacagggctttgggagggtcacaccgcacaggatctcaaccaggcttccaatgacgtcatcattggggtcctcgacaccggagtgtggccggagtcgccgagcttcgacgacgcaggaatgccggagattccggcccggtggcgcggcgagtgcgagacgggtccagatttctcccccaaaatgtgtaacaggaaactcatcggcgctagaagcttctctaaaggtttccatatggcctcagggattggggtgagagagaaggagccagcgtcggcacgtgacagggatggtcacgggacccacacgtcgagcaccgccgcggggtcgcacgtgacgaacgcgagcttattaggttatgcgagcgggaccgcgcgtgggatggctcccaccgcacgtgtggctgcttataaggtttgctggaccgacggctgcttcgcctccgacattctcgccggaatgggccgtgccatcgaggacggcgtcgacgtcctctcgctctccctcggtggcggttccgcaccgtacttccgcgacacaatcgccatcggcgcgttcgccgccatggcgaaaggtatcttcgttgcatgctccgccgggaacagtgggccccagaaggcctcgcttgccaacggggcaccgtggataatgacggttggtgcaggaaccctagatcgtgatttccctgcctacgcttctctcggtaacaaaaaaagattctccggtgtttctctctatagtggaaaaggaatggggaacgaaccggttggtttggtttatgacaaaggcttgaaccagtcaggtagcatttgcttgcccggttcgcttgaaccgggtctggttcgtgggaaggtggttgtttgcgaccgtggaatcaacgcgcgggtggagaaaggtaaggtggtgcgtgatgccggtggtgttgggatgattctcgcgaacacagcagcgagtggggaggagttagttgcggatagtcacctgctaccggctgtggcagttggaagaatcgtgggggaccagatcagagcctatgcttcttccgatcctaatccaacggtgcatcttgatttccgtggaacagtattgaacgttaagccttcaccagtagtggcagcttttagttccagagggcccaatatggttaccagacagattctgaaaccggacgttattgggcctggggttaacatcttggccgggtggtccgaagcaattgggccatcagggttatccgatgacactcggaaaactcagttcaacatcatgtcaggtacatctatgtcttgtccacacataagtggattggctgccttgttgaaagctgcacatccgcaatggagttctagtgcgataaaatcagccctaatgacaacggcagatgtacacgacaacaccaagtcccaactccgggatgcggcagggggtgcattttccaacccatgggctcatggtgcgggccacgtgaacccacacaaggcactttcccctgggcttgtctatgatgccacaccaagtgactacattaagttcctatgttccttggagtacacacctgaacgcatacaactcattactaagcgttcaggtgttaattgtactaagaggttctctgaccctggccagttgaactacccttcattctctgttctctttggcggtaagagggtcgtgaggtacacacgagtcctgaccaacgtgggcgaggcaggctccgtctataacgtcaccgtggatgcaccttccacggtgacggtaacggtgaagcccgccgcgctcgtgtttggaaaagtaggggaaaggcaaaggtacacggcaacctttgtgtccaagaatggtgtcggggattccgttaggtatggatttggaagcattatgtggagcaatgcgcaacaccaagttaggagcccagttgctttttcttggactttgttgtgagattattgctttttttttttttaactgcacagccactattccaagcccaaccaaacatgccttttgcctggagctgattgaggcttttgttgatgtcagccaacactattattaacattatttagttggacatttagaaggttgtgtattttttttttaattgtgagaattgaagaaaaaaagagaggtgagattgagaagaagagcgaggagagatgcttgttttctttgtttattgtgtgtatccagtaaaaacaaatgttacaaaacaagggcgttgatggtatgtataaacgactggctctaattatccttaagaatgagatttcatttttctcctccccaaagcggccgctctagagga

SEQ ID NO: 1212 - DNA, 1190 bp, Glycine max
cggacgcgtgggcttacgcgtggtcggaccggggagcaccccatattgcaagggccatggagggggaaaacgctgtacataccagggtggtggagtatgcactaaaagtgtgcatggaggtaccaacttctgtgtggcacatgggggtggaaagaggtgtgctgtaccaggctgcacaaagagtgctagaggaaggactgatcattgtgtccgccatgggggaggcaagagatgtaagttcgaaggctgtggaaagagtgcacaaggcagcactgacttttgcaaagcacatgggggaggcaagagatgctcttggggccatccgggttcagaatatggcatccaacaggatggtccttgcaattcatttgcaagggggaaaacaggtctatgtgcacttcatagtgggctagtgcatgacaagagggttcatggaggcatctcactgggatctgttgttcaggatcctcattccagtaaaacagatgaactaaagcaggtactcgttgacaaaaacatgggtatagatatgatgaaaatagggagtagtctaggcactgcaacctgttccgacttcgaacagtttgaagctgcaactgctcatgtctcagccaaggaaggtagtcacttgccagtgtcagttgctgttcctgaaggcagggtgcatggtggtagcctgatggcaatgctaacggggagttctagccgtggctcaagcagcggcagaggtctagttggcgatccatctgaaccaatcaaaggttacgccatgccccagagttggatttaatgctagttatcgttttcattgtcatggtctccgtagttaacaagttttatcagcatgttacattattactccattctactttaggttgttgacgaattgagttattctgtcatccgttgaaattgtgttgagagaataaccaaatcgtttgacaatctggtggaggggagatatcaatttggaaaggaaaattgtactttgattaggttgttggtgatgttcttttaccattcttcctccttctgtaaatattacatctgatgaaacgtttagcagtttgtgaatacaggttgctacctgtaatgtaaggtctgtcagtgtgccatgtattctatttaataataaaacttcactgagattgtatttgttataatagtacttattttgaattcaatacaaa

SEQ ID NO: 1213 - DNA, 2351 bp, Glycine max
  misc_feature (2340)..(2340): n is a, c, g, or t
caagacacaaacataacaacataagaagagagagaaagagaaaacagagaaaaagaatgaatgaataaaataatcattcactctgtttctattcttctgtctaccatagcataactatgatatgaacaccatataataattaacaacaataatttaataatactctcttcattgtaaattccatcttcacttcacttctcttctctgttctgtggagtatttaatcatttcgtaacaacatacttttcttttcattctctcaaattttttttttttttgcttttcgtttgttttctttggtttttaattctccgttttccaaatccatgattgcttcttgctgccgagaaaccgttccgccgccgtccattcccgatctccggtaaccggaaaatgatccctttcgcgcatccgaatcccggcatggcaagccgcaacaactacaaccgcgccaccgccgagacggttttcgccgccgccaacgccatcgtcgccgccgaatccagagtccaacccaccgacgcgccggtaaaacgttggggaggctgctggagccaatattggtgttttggatcttgtaagagcagtaaaagcagcaagcgaattggccatgctgtccttgttccagaacctgctgctccaacaggtccagcagctgctgctgctgcaccaaatccttcagccgccattgtaatgccgttcattgcccctccatcttctcctgcatcttttcttcaatctgatccaccatctggtattcaatcaccgcctggattactttcactctctgctcttgcggccaatgcttactcttctggtggtcctgcatccatgttcaccattggtccatatgcctatgagacccagttagtttctccacctgtattttcagccttcacaactgaaccgtccactgctccttatactcccccaccagaatctgtgcagcaaacgacaccttcatcccctgacgttccatttgctcagttgttggcatcttcactggaccgggctcgtaaaagtaatgggaatcataagtttccattatacaattatgaatttcatccttatcaacaatatcctggaagcccaggtggccagctcatatcaccgggatcagcattttcaacttctggcacctcaaccccattccctgatagaccccctactcttgaattccccaaaggggaaacaccaaagatcttgggtgttgaacacttctccacccgaagatggggttctagactgggatctggatcattgacgccagacagtgcatggcaaggttcaagactaggttcgggatccttgactcctgatggtgttgggcttgcttcgcgattaggctctgggtgtgtgacacctgatggtctggggcaggaatccaggttaggttctggctgtttgacacctgacagtgctgggccaaccaatcaaaacaacatctctgtgcaaaaccagatttctaaggaagcaactcttgcagattcagacaatggacatccaagcaatgcaacattggttgatcacagagtttcatttgaattaaccggggaagatgttgcccggtgtcttgcaaataaaactggggtattgcttcgaaacatgtcagggtcttcacaaggtatactgaccaaagaccctgttgacagagaaagggtgcaaatagacaccaatagtagctgtaacgcgtgtacagagaaaactgacgataagcctgacaatcctgtaggaaaaggagagcaatgccttcacaagcaaaattctgtaaattcttccaaagaattcaattttgacaacaggaaaggtgatgtttctgttactactggcagtggctatgagtggtggactaacaggaaggttgctgggaaggaaggtagatcagccaacagctgggctttcttcccaatgttacagtcagaaatgaattgaggttttagtgtattgcaacatgacttaacctgtatggtataaaagcaaaaaggattttccatttctctgcagaacctttagtatactgaaatgtatatttgaatatttgaagaccttatcttgaatgctgctgttcatcatatacctttgaggaaattgtagtaaattgatgattggataagactcagatgaacccccagttgttatattccttgaggccctaaagtagaatgcaaggggagcatagtggtagtaggtagggcccaatagtgggttatattatatttatataattgtgaaccattacttcttgcatttcatcctttcaaatatacagaaatagcaaagtccaggtatttcgtgttgtggatttgtggttcctttcatatgcaataatgaaaaaaaatnttttttttttt

SEQ ID NO: 1214 - DNA, 2862 bp, Glycine max
tggaagctggtacacctctgacgggaatcctgatctcctttcatctaacgtggcagacataaagctccaatcatcaagtgcaccagcacaaccattagggtttcatggctatgttcttacagggaaactgaaatcgccaaagctttggtccgcagaaaaaccatacctctataccctagttgttgtcctgaaagatagatctggccgcattgttgactgtgaatcatgtccagtagggtttagaaaagtatctaaagcccacaaacaactgcttgttaatggacatgcagttgtaataagaggtgtgaacaggcatgaacatcatccacaagtggggaaggcaaacatagaatcctgcatgatcaaggatttggtcttaatgaagcaaaacaatattaatgctgtgaggaacagccattatccccaacatccacgttggtatgagctatgtgatttgtttggcatgtacatgatagatgaagccaatattgagacacatctttttgactattctaaacatctcaagcatcccactatggaaccaaagtgggcaacttcaatgctggatcgtgtgatcagcatggttgagagagataaaaatcacacatgtattatctcctggtctttagggaatgaatctggatttggaacaaatcattttgctttagctggttggattcggggaagagattcatctcgggtattgcattatgaagcagctgcgtccgcccccccccccactgatattgtgtgtcctatgtatatgcgtgtttgggacatggtgaaaatagccaatgatccaactgaaacacgtcctctgatactgtgcgagtattcacatgcaatgggaaacagtaatgggaatctacatatatattgggaagcaattgacaacacttttggactccaaggaggctttatttgggattgggttgatcaagccttggtgaaagtttatgaagatggtaccaagcattgggcatatggaggtgaatttggggatgttcccaatgacttgaatttctgtttgaatggcctcacatttcctgatcgaactcctcatcctgttttacatgaggttaagtacttataccaaccaatcaaggtggctttaaaggaaggaaaattggagataaaaaatactcatttttttcaaacaacagaaggattggagttcagctggtctatttctgcagatggatacaaccttggatctggtcttttgggccttgtccctataaagccccagagtagtcatgctgttgattggcaatcaggtccatggtattccctatgggcttcaacagatgaagaagaactattcctgactataacagctaaacttttgaactccacacgctgggttgaagctggtcatattgtttcatctgctcaagttcaattgcctaccaggagaaacattgcacctcatgttattgatattaatggtggcactctggttgctgaaacactaggagatacaatcgtagtcaaacagcaagatgcttgggatttgactttgaatactaaaacaggtttagttgaaagctggaaggttaaaggagtgcatgttatgaaaaagggcatcctcccatgtttctggcgagctcctatcgataatgacaaaggaggaggttcagccagttatttgtccaggtggaaagcagctggaatggactgcctccactttattactgagagctgttctgtgcaaaatattacggagaactcagttagaatattggtggtttttcttggtgttaccaagggcgaggatggttctctctccaaccaagacaagtcaaaggttttatttacaacagaaatggcatatacaatttatgcttctggggatgtcattatagaatgcaatgtgaaaccaaaccctgatcttcctcctttgccacgtgtgggaatcgagttaaatgtggaaaagtctttggatcaagtaacttggtatggaagaggaccatttgagtgttatccagatagaaaagctgcagccctggttgcagtctatgaacataatgttagtgagttgcatgttccttatattgttccgggggaatcttcaggtagggcagatgttagatgggcaacattcagaaacaaagatgcttttggaatatatgcttctaagtatggtagctctccacccatgcaaatgagtgcaagttactacagcacctcggaacttgaccgtgcgacacacaatgaagagctcattgaaggagatagcattgagattcatctagatcacaagcacatgggattgggtggagatgatagttggtcgccatgtgtccacgaacagtatttgattcctcctgtgccatactcattctctgttaggctgtgcccagtaaatccagccacttctggtcatgacatctacaaatcccagtttcaaaactcttgatttcttggatcacatgacttgttctattcaagaataaacatcttgtagaagaccgaagaccgaagaccaaagactggtgtgcttactaaggactacaaagaaacttggaagctattggtgtaaagatcccatgcaatcattttggttggaagcttgatttaataatgtggaaggtgaataatcttattgtacaaatttgttccattacccaaggaaccaagcagacaatttcacaacttgtttaataaatgtgctgtaactgtgatatgaataatttactgttcttatttgaagatcaagggcaatgaaatgaacaaaaaataatcctcgattgtgtaaatttgttcgggctcctttgaatttgcttgtgtggcatttatgtaagaaattgttataaattcagtatttcataaacattcttttcccttattatttttatcaac

SEQ ID NO: 1215 - DNA, 1501 bp, Glycine max
tcgagtcagctacgtagggcccccccccctaataccgctccgcctccccgggccgtccctcgcgtccccgaaggccaaagggccttcattgaagcagatgaggcgcagcaacttttaagtccattaaaggagcctggaaattctttcaccaaaatatgctttagcaacaggagctttgggttaggagcagcgcaagttgccgagcccattctcactgccatcaaggaccagttgaaggaagtagatctatcagattttattgcgggaagatcagaagtagaagctcttgatgtcatgaagatattctcaactgccctagaaggaagcgtcttgaggtctttaaacctttccgacaatgcattaggtgaaaaaggtgttagagcatttggagcacttttgaaatcgcagaaatgcttggaggagctttatctgatgaacgatggaatctcaaaggaagctgctcgagcagtttgcgagttgattcctttcacagagaaactcaaagttcttcattttcataataatatgactggagatgaaggggcactagctatagccgaggttgtgaagcgttctcctttgttggaggattttcgctgttcctccacaaggataggctctgaaggtggagttgccttgtctgatgctttagggagttgtgcccatctgaagaagcttgatttgcgagacaacatgttaggtgtggacggtggggtttctctgagtaaagctcttagcaagcatgcagaacttagagaggtatacctgagctacctgaacttggaagacgatggtgcaattgctattgttgatgctcttaaggaatcagctcctcaccttgaagttttggagatgagcggaaatgacagtacagctgatgctgctcctgcaatagcagcctgcctagaagcgaagcagtttctttccaagttgaacctctctgagaatgaactcaaggatgaaggtgccaagctgataactaaggccatagaaggccatgtccaattaaaggaaattgatctaagtaccaaccaaatacgcaaggatggggctcaacaactggctgtgactgtggtgcaaaaggctgatttcaaacttctgaacattaatgggaacttcatttctgatgaaggcattgatgagttgaaggatatatttaaaaaatctccagacatgcttggtccattagacgaaaatgaccctgatggagtagacgatgatgaagaatctgatgaagaaggtggtgcagatgaactcgaatccaaaatgaagaaccttgtagttgatgattgaactgaagcagttgtagtctactttcatgttctgctgcacaagtaactcttatgacagcagtagtaggtttttagaccattttattcctagtagttttatgtaactgttaagacgcatcaatttgacagcagtcaattattgaggggcataaaatgtctgcaatatttatcgaaatgttgttttcaatgtttcctttcgaaaaaaaaaa

SEQ ID NO: 1216 - DNA, 796 bp, Glycine max
gaggtatacctaagctacctgaacttggaagacgatggtgcaattgctattgttgatgctcttacggaagcagctcctcaccttgaagttttggagatgagcggaaatgatattacagctgatgctgctcctgcaatagcagcctgcctagcagcaaagcagtttctcactaagttgaacctctctgagaatgaactcaaggatgaaggggccaacctgataactaaggccattgaaggccatgtccaattaaaggaaattgatctaagtgccaaccaaataagcagggctggggctcaacaactggctgtgactgtggtgcaaaaggctgatttcaaacttctgaacattaatgggaacttcatttctgatgaaggcattgatgagttgaaggatatatttaaaaaatctccagacatgctcggtccattagacgaaaatgaccctgatggaatagacaatgatgaagaatctgatgaagaaggtggtgcagatgaactcgaatccaaaatgaagaaccttgtagttgatgattgactgaagcagttgcagtcttctttcatgttctgctgcgcaagtaactctcgtgacagtagagggtttttagaccattttattcgtagtagtttatgtaactattaagacgcatcaatttgacagcagtcaattattgaggggacataaaatgtctgcaatatttatcgaaatgttgttttcgatgtttcctttcaaagttccatttcacttggctagattatattattttcaattgcatcccccctgtccttagcgtatt

SEQ ID NO: 1217 - DNA, 2292 bp, Glycine max
ggctcgagaagacaaggtacagatatacacataacaataatctgataaagcctcagctacgtaggcccccccccatcgtgaatgttcacgttttttcacatacacaaaaacaccatcaaaagctgtatctataataagaaccgagagtaagaaccatcactaactgcatatgcacagagagtgtgtatgagaacataaagcaaagtcattttgtgaaggtgaattgctgaagagatagcagatttttgaaggaagatgaataactctgtttcagaaaacagtttcatcattgagagtgatgaagaagatgaggagaaggatttgaataaaggtggagttgatggaaacgattctgattcttccaattactcaaatgaaaaccctccacagcgaaagcccagttcttacaacatttcatggcctcagagttacaggcaatctattgatctatatagtagtgtgccatcaccaaacattggatatttgggcacaccttctctgtcaagactaagcagttcttttctttctacatcattgacaaggaggcacactcctgaagcacttccttcagtggcaaagcctctgatacaagacacagaagatgagcagcatcagagacgtagctctcacaccttgcttcctcctcttccttctagaaggtcttctttgattaagaaggattccaaggttattcatcatgaagttccctctggccactgctcttttggacaagctgtgcttaatggcataaatgttctttgtggtgttggaatcctttctacaccttatgctgccaaagtaggtggatggcttgggctttctatattggtcatttttgcaattatttcattttatactgggctgcttttgcgttcctgcttggacagtgaacctgagcttgagacataccctgatattggccaagctgcttttggtactactggacgtattgccatttcaatagtattatacgtggaattatatgcttgttgcattgaatatataattttggagggcgacaatttgtcttccttatttccaagtgcacacttaaatttgggtggaattgaactgaattcacatacattgtttgctgtgattactaccttggctgttcttcctactgtttggctccgtgacctaagtattctaagttacatatctgctggtggagttgttgcatcaattttagtggttctctgcctattatgggttggcatagaggacgtaggctttcatagcaaagggaccacactcaatcttgcaactcttcctgttgctgttggtctttatggttactgctactctggacatgctgtgttcccaaacatttatacatccatggcaaatccaaaccaattccctggagtcctcttagcatgttttggaatttgtaccttgttgtatgctggagctgctgtattgggatacacaatgtttggagaagctattctgtctcagttcactcttaacatgcctaaagaattggtagcaaccaagattgctgtctggactacggtggttaatccatttaccaagtatgcgttgactatatccccagtggcaatgagtctggaggagttgataccatcaaaccatgccaagtcttatctatattccatcttcatcagaacagggttggtactttctaccctggttattggtctctcagttcccttttttggtctggtgatgtcattgattggatcattactcacaatgcttgttactttgatactaccctgtgcttgtttcctaagaatcttgcggggcaaagtgacacgaacacaggcagcactttgcattacaattatcacagtaggtgttgtatgttctgcttttggatcatactccgcccttgccgagattgtgaagagtttgaggggatgaagttttgagactcaaatcctggaagattagatatgtgatatgtctgccgctatttagtctgtccagatattctatttagtttgattgcacatccacaattttgagtcaattttttgcttgccatgacttttccaatctgtttatttgtggtttttctgatcccctgtttccttaccataaaaagttttgctcatgtttgaaatattggtaatcatagagtgtggcagacaaaacacttaagagtttgtaagaagcgatcaaatgaacttgttgaagagattttttatttctatgttcaaagtgtctagtgcaatcttttgttgatgataaaggatatttataaccatttaatgcagcaaatgcaatatagagtacttagtcacccaaaaaaaaaaaaaaaaa

SEQ ID NO: 1218 - DNA, 797 bp, Glycine max
gtgattactaccttggctgttcttcctactgtttggctccgtgacctaagtattctaagttacatatctggtaagagcttatttttggtgcaagtaatgattagttatccattaattaaagttaaagcttggtcaaataaggttttatcatacttcatggtgtccttttctgtagtgggataagctttgttgttgttgttaaaggaaattataatacatgagattgatcataatgtatcaagttaccaaatatatttaatatttgtagcttctcaaatttcattcctctagctgttgtcattcataattggttactaattgcccatgaatttgtatgttttggcagtcagcaatggcatattacactatcatcattatttgaaaaagcttattataaccttttaccatgtttgttatagctggtggagttgttgcatcaattttagtggttctctgcctattatgggttggcatagaggacgtaggctttcatagcaaagggaccacactcaatcttgcaactcttcctgttgctgttggtctttatggttactgctactctggacatgctgtgttcccaaacatttatacatccatggcaaatccaaaccaattccctggagtcctcttagcatgttgcgcgatttgcaccttgttgttggctggagctgctgtattgggatacacaatgtttggagaagctattctgtctcagttcactcttaacatgcctaaagaattggtagcaaccaagattgctgtctggactacggtggttaatccatttaccaagtatg

SEQ ID NO: 1219 - DNA, 1531 bp, Glycine max
ttcggctgcgagaagacaactcgagccgacactccctttttaaaaccgttgtcttctcacttcgtcaaaaccaaccaaacccctccccaattctcaagccaaccatgtcttccttcaagagcaagtaccaagatgaactcattgccaatgctgcttacattggcaccccagggaagggtatccttgctgctgatgagtcaactggtacaattggcaagcgattggccagcattaatgtcgagaatgttgaagcaaataggcgtgctcttcgtgaactcctattcaccacacctggtgcttttgagtgcctcagtggtgtgatcttgtttgaggaaaccctataccaaaagacagcttcaggaaaacccttcgtagagttgatgaaggaaggaggagttctccctggtatcaaggttgacaagggcacagtagagcttgcaggaactaatggggagactactactcaaggtttggatggccttggcgcccgatgccagaagtactatgaagccggtgcccgttttgccaaatggcgtgctgtgctcaagatcggcccaaacgaaccatccgagctggctatccatgaaaatgcctacggtcttgcccgatatgccgtcatatgccaggagaatggtctggtacctattgtagagccagagatcctggtggatggacctcatgacatcaacaagtgtgctgaggtgaccgagcgcgttcttgcagcatgctacaaggctctaaatgatcaccatgttctgcttgagggcactctgttgaagcccaacatggtcacccctggttcagagtctaagaaggtcaccccagaggtgattgctcaatacactgttacagctttgcagcgaactgttcccgctgctgttccggccattgtcttcttgtctggtgggcagagcgaggaggaggcaaccctcaacctcaacgccatgaacaagtcccagggaaagaagccgtggtccctttctttctcttttggaagggcacttcagcaaagcactctcaaggcatggggtgggaaagatgaaaacattaagaaggctcaggatgctttatttgccaggtgcaatgcaaactcacatgcaactttgggaacttacaaaggtgatgctacccttgctgagggtgcctccgagtctctccatgtcaaggactacaaatactaactaaaggtgttgacttcttttaatttggagaatttttgcactattggctacaccattctcatgttctttccttcatagaagttagactcggccgatttgctttctgctctcggttataggatgtctacggattaaagaataatcgcatcaagctaaattggcttgctactgtactgttgctttacattttaatttctcttgtttttttctgaatgacttttactgtattattatggagaagttccattctatgtttcaatgctatttggatgtgaaagagcattttgatatcaaaaaaaaaaaaaaattttttttttataggggaaaaaatgcaaattattttgatatta

SEQ ID NO: 1220 - DNA, 1532 bp, Glycine max
gctgcgtggggccccccccctcgcacactccaaagtcaccctacaacaacaacacacacactcctcacacaataatggaagaagggcaaagaaaaacaacaacactacttctatgctcccacattgtggttcttcttttactctccctagtggccgagactagtgccaaggtttcagcagtgatcgtcttcggcgactcctccgtcgacgccggcaacaacaacttcatccccaccattgcacggagcaattttcagccatatgggcgtgactttgaaggtggaaaagccactgggaggttttgcaatgggagaataccgacggattttatatctgagtcttttgggctgaaaccttatgtgccagcatacttggatcctaagtataatatttcagattttgcaagtggggtcacttttgcttctgcagcaactggttatgataatgcaacctcggatgtgctgtctgtgataccactatggaagcaattagagtactacaagggataccaaaagaatttgagtgcatatcttggtgaaagcaaagcaaaggagaccgtagctgaagcattacacctcatgagtcttggaacaaatgacttcctagagaactactacaccatgcctggtagagcatctcaatacacaccccaacagtaccaaatttttctggctggcatagctgagaacttcataaggagcctctatggtcttggtgctaggaagatttccctaggagggttacctcccatgggatgcttgccacttgaaagaaccacaaatattgttggtgggaatgactgtgttgccagatacaataacatagcattggagttcaatgataagctcaagaatttgaccattaagctaaaccaagagctccctggactcaaattggtgttttctaatccttattacattatgttgaacatcataaaaagacctcaactttatggatttgaatcgacctcagtggcatgttgtgctactggaatgtttgagatgggttatgcatgcagcaggggccaaatgttcagttgcactgatgcttccaaatatgtgttttgggactcttttcatccaactgagatgacaaatagtatcgttgcaaagtacgtggtgctgcgtgttttatatcaattcttacaataaacaaatagctactagtgaaattttatttatgtacggctatctcttcatgtctgcacattcgccataaagtgccatttgggctttctatgaatgactgcatgtcgatgtgtacatatataaaaatgtcaatacagcacattcaccatataatgtgctgataattagaaataagtcgttttgtttagaacaatatatatatagtatttatactttttaggcactttactagattcggtgtcctccatatgtatgtcctattatgttgggtctatagtttgtaatatctatccatggtttggaaatgtcaaattccaagagagaattttctggtttttctttggttgcaaaaaaaaaaaaaaaaaaaaaaagggcgctcgagcc

SEQ ID NO: 1221 - DNA, 1607 bp, Glycine max
tcagctacgtaggccccccccccaaaatctgcggagcaagttttgttttgtttggtgttgtgttgcactgtcactgttacagttgttggtgtaaaggaacagcggtgggtgagtgagagagggaggaaacatggctacggcgtcggcgtcggcgtcgtgggaggaactgacgctgaaagtgaaatggagcggcaacgaatacaccgtccgcgtctgctgcgacgacaccgtgggcgaactcaaacgtcgaatctgcgagctaaccaacgtcttaccccttcgccagaagctcttgtaccctaaactcgcttccaaactcagcgacgactctctcttcctctcccagcttcccctcaactcctctctcaagatgaccatgatcggtactactgaagaggacttgctcgtggatcccgtggagtcccctgagatcctcgacgatttggagcttcccaaggatgaggctgttgacatcaaagatatggaagtcaacaagcagaaattgaatagacgcattcatcaattcaatattgagcttcaaaatccgtgtcgccaagggaagaaattgcttgttctggatattgattacactctcttcgatcaccgctccactgctgagaaccctcttcaactcatgagaccctaccttcacgagtttcttacttctgtttattcggagtatgacattatgatatggtctgcaaccagcatgaagtggattaaagtcaagatggaacaacttggggtgttgggcaatcctaactacaaaatcaccgcacttcttgaccacatggcaatgatcacggttcagacttcttctcgtggggtctttgattgcaagcctcttggtttgatctgggctaagttccctgagttctacaatgcttcaaatactatcatgtttgatgaccttagaagaaattttgtaatgaacccacagaatggtttgacaattaaaccattcaggaaggctcatgccaaccgagatagtgatcaagagcttgtgaaacttacccagtacttactagccattgcagagcttgatgacttgagcaaccttgatcataataattgggagttattcacagaggacaatgctaaaagacgtaggcacagataaatgataattgaatgcaataactggaatctggtaagcaagatgcagcttctagacttgtaaaaaattgcagctttataagagacattgttcagccagaggatttcagttttttatatcaagtatttatgtttggacgtggtgaatgacagaaaggaacggatttcttgtagcagctgtttggagtatctaagatgattaatattgcctatgcaatttctaagcaaaaaaaaaaaaaaaaaaatttgatttgatgcatgaaaaaaattctatcctttcataatttgttgggaaagggtataaagcatgcatgaattgcaaaatgtgaatgattagttgtgtgacacctacggctgcaactattctccaaagtgatcaattgattctaattatagacaatgtattacatggaagttcaaaaaaaaaaaaaaaaaaaaaaaaaaaaaacaaaaaaaaaaaaaaaaaaaaaaaactcgagactagttctctc

SEQ ID NO: 1222 - DNA, 1460 bp, Glycine max
cggacgcgttcagctacgtaggcccccccccccgagtgcagttagagtgaaacaataggcgatccgcaacttacgttgttgttgaacggagcacgctccctctctgtcctaactcctaatctctctcgcacacacacagtaactatttatttcctccaaatgcttttcttctttagttttaatcacaccctctttcaggttgtagctgctgactcattggatgaagaattcttgatcaaataacttgtcataattgatttcaaatgaagacaggctccatgattttttcattattccatgtacctagatgtagaatacaaagcttagctaattgctggggtgaaaccttccacggtttcagtacaacttgtggaaacaattctagcatcaggttgcttggttctagaatttatggtcttcagggaggacagagaaagaaatggacaagacctataactacaaatacagaaggcaaggggagcaccaaatccaaaagtatcaagcatgagattttgagtgaaaccattttagcaaatgctacagcaaatgtaaataaaacacagctagatcaatcccaagaaattcaggattgtgacatacaacaagagattgctgagaataaagacttgtccagctatactgttattgtttttgatatagagaccacagggtttagcagagagaatgaaagaatcattgaaattgcacttcgagatcttcagggtggcgagaacagcacttttcagactcttgtaaaccctcaatgtaaagttcctaattcacatattcatggcattactactcagatggtcaacaaacctgatgttccaaggatggaggacctaattcccattttattccaatacgttcgaagtcgtgagaagcctgggggagatgtgttatttgtagctcacaatgctcgctgttttgatgtgcccttcatcatctgtgagttacggcgttattccataaagattcctcctaattggttgtttttggacacccttcctttagcgcgggaactaatgaagtccggaggaacaacactttcttcatcatccctagctgcccttcgtgacctctacggaattaaggtggatggatcagctcacagggctatggtagatgtgaacacattgtccttgattctttccaggttgacctctgatctgaaattgaccctatctgaccttgtcgacaaatcattcacagaatcagatattatcaactctaagaagaagaagaagaattagactagttttctgactgtattttgcattgatgttgtgacaaatgaattattttgtaaccaaaaatcgaactctaaatttggagttgaagtagaaaagaaacgttgtttgtaattgctgacttattctcaataaaatcttactattatgtagtaaaaaaacaaaagaataaaaaaaaaaacaaccctggtaggtgaccctggggtgccc

SEQ ID NO: 1223 - DNA, 1993 bp, Glycine max
ctcgaggaatcggctcagtacggccgcctgcggacgcccccccccggaaaaaaaagagtgaagaaaagaacgcagaaactgaaataaaaaatggcagaacccaaggttaaatacgatcgtcaactcagaatatggggtgaacaaggacaggcagcccttgagaagtctagtatttgcttacttaactgtggtcctactggttctgaaacacttaagaatcttgttcttggtggggttggaagcatcactgtagttgatggatctaaagttgaagcgggagacctcggaaacaattttttggtggatgaagcaagtcttgggaagtcaaaggcaaaatgtgtatgctcatttcttcaagagctgaatgatgcagttaaagcaaaatttgtagaagagtctccagaaacattgattgagacaaatccatcattcttttctcaatttactttggttgttgccactcagctcatggaaaattcaatgataaagcttgaccaaatctgcagggaggtgaatgttatgttgatatttgctcgctcctatggccttacagggtttgttcgaattagtgtgaaggaacatgctgtgattgagtcaaagcctgaacattttttggatgatctccggttaaataatccttggcctaaactcaagagatttgcagatgatattgacttgaacgtgcaagatcctgtggctcataaacacataccgtatgttgtcattcttgtcaagatggctgatgagtgggcccaaagccatggcggtaggcttccattgaccagagaagaaaaaaaggagttcaaggagcttcttaaggctgggatggttgcacaagatgaagataattataaagaagctattgattcagcattcaaagtatttgctccccgaggaataagtttggagtcgcaacagatactaaatgatagttctgctgaagtggactctaattcttcagatttttgggtgttggtgacagctcttaaggatttcattgcaaatgaaggtggtggggaggcaccccttgaaggatctataccagacatgacttcttctactgagcaatatgtgaatttgcagaatatctatcacgctaaagctgaggctgactttcttgtaatagaacgtctagtgagaagtactttgaagaagattggtcgagattcaaatagcatttcaaagtcaacaattaaaagcttctgtaaaaatgcaagaaaactcaaagtttgcaggtaccgtctaattgaagatgagtttaattctccaaacctacctgagttacagaagtacctcactgatgaggattacagcattgctgtggggatttatattttgcttcgtgctgttgaccggtttgctgctaattacaacagctttccaggacagtttgacagtgcaatggatgaagatatacctcgattaaagagcacagcaattggcctacttaatgacttgggatgcaatggagccactttggctgaggaccttatcaatgagatgtgtcgatttggtgcagcagagcttcatgctgttgctgctttggttggaggaattgcatcgcaagaagtgatcaagctcataacaaagcaatttgtacctatgtccggaacctacatattcaacggcattgaccacaagtcacagcttttgtcactgtaactgctcgtaccatgatttctattggaagaatcaagggcttgatggagcaagagcaatcatctattatggcttcctttaatcctatgcaaactaccgaggcatttttgctcgtttggtggactaaagtggattcttgttttatacacaaattttgtaactacggacactggtttcagacagaaacagcatcaagaggaaaagagacatttgcaaaatttgtagagtccatcttatttaatgaattctacgtttatatgtaatctaacctctaaagtatcttttttatccgcatcggtaaatataattgcagggaaatcgcattatcatgcac

SEQ ID NO: 1224 - DNA, 1156 bp, Glycine max
acgagcaaaaacaaatcagcaattgagaagatgtcactgtattttctatattacctatagttgttttctttctttaaaataatatccctggtaaggggaactagtcaacaactggttaattggcctcaaatacaccacagagaccgggataggaacagggacagagaccgagacagggaaagagatagagatcgtgggcgtgatcgagatagaacacgggaccgtgatccggggcggggaagggaccgtgaccgggatcgagaatatgatcgacatcgtgagagggatagagattatgaagttggcgaaactgatcgaggacgctcacgtgatagggagtctcattatgatcgtgttgaatctaaacatggggaaaggaatcatgactatgagcctgaggatgatcgtggtaggcaaaaccagtatgagcatggacataggcatgcagaccctgatcatgacactactgagcattatgacccctacaatcatggagatgatcgtggtgaccattacaatcagtatcctgaccctgataggatggaagatgactaccatgcaggacgtgcaacatctgaatcacatgaaaaggagagaagtcatgatgtggaccgtgaatatcggcgctcagagagatcacattcccgggagtatgattattaggaattgggcatagtacttctcaactttaattggtaagatttcatcatttggtacatttacttttgaatcttgctcccccggtattggtagtttttgaatggattaaagcacggtgtgatcattacaaagaaaactgtagctgctgccatccatatggtccatatttgaaagcttgaatactgcatctttcgagacgtttgctgccttttgtcaacctggacttggacatctaatattggtattttatttggcatttgtgttgttttctgctgactttttatgaaattaaacataatgtttttctggttcattttttacgggaaacaattgtgcggggtccaagttttcgttggtctgttgatctctgtcttagcttgtgtttacaatacagagtttccagcattatttgtacgttttcttacaatttttcttacgttggacaccaattatgtgacaacttccagggttatttgaggtttgatattagatcgat

SEQ ID NO: 1225 - DNA, 1334 bp, Glycine max
ttttttttttttttttccttctttaatcacggcctaaactaaccttggatacaagtcacagcgtcaaaatattaaaataaagaaacgccgttagccagaggcttacggcggaagcttgcacggactaggtggaagacttgtcttcccagtagcaacaagacgttgcacgaagctctcgattctgttaccgttagtctcctgcagtaaccgctttcccccgaacggtaacgattccaggactctctcgttcagcaccttctcttcttttccttgatctcccaaaccaaatgcctgaatcctgacataatccatacggttccaacagaaggcgttccctagcatctggtcaacggtctcggaaatgccgtcgagcgtaatgtcaaccaccgtcgacgtggagcactctccggcgttgttcattctcttcgcctgagctccgtttccgatggacaggacgaggagatcctccacgccgttcaccgacgggaaatcgcgcttgttgtggaggacgtgcgtgacggcagctgctgccggattgttcatcaccaggccgccgtcgacggcggcgcacgaggtttttccgtcgacggaggagaagtggaagggagtgaagaggccaggggtcgccgacgtggcgcggcacgccttccaaagctcgaagttgaagctcggtgactcggacgcgtcggctcgggagaacacgaacggcgcagagctcttgaggtcaaagcaagggataaggagcggcttacacgtgtccttcagagtcaacaacagtttttctccctctttcctcttgaaaacgcgcttcagcgcctcttccatgctccgcgcggagaatctacggcgtcggcggagcacgccggcgcgcttcggctggtagagttcgcggttgttttcggcgaggaagttgacggcgtctctggcggagtacagaggccggccgaaaccgtcgtcggcggtgatcatggaggcgaggattgcgccaatgccggttccggcgataatgtcgaagtaatcggcgatttgcgtgtgaggatcggaggtttgggcgcggatctggtcttcgaggtggacgagggaggcgccggcgacaatggcggtggttcctccgccgtcaatgctgagaatgcgcgttttggttgatgcttcgtagtgcgagagccattgctgctccaattttgaaaagatctctaacgtgactttgctaagctccattgcgttgagtttagaactttcaggaggaagcattaacaagtgaagagttgagagtgcgttagaagaagaggaaggaagtggggggggggcctaggagctgagtagttataatgctg

SEQ ID NO: 1226 - DNA, 1101 bp, Glycine max
cctgccaagtacgcttacctgtacctgccagacttctggcatcatcacctttccattagaatcccccatcccacccttggcgcatatatatacccctctcacactcttctcttcccatcataacttattctcttgctcactcctcacccaccccaccccaaccaaaccatataacaaacgccatagtttcctttcttttctctactgttttctccaaattaatacaacccattttccttcagatgaagcagctcatccgccgcctctcgcgcgtggctgactcctccaactacacgctcctccgttcggactcctcccaggcctgccaccaccgccgcccacgcgccgagtccttccgtctctccgccccatccaagatccgccgctcctccgcggcggtggttccggaggggcacgtcccgatctacgtcggcgacgagatggagcgcttcgtcgtgtgcgccgagctcctcaaccaccccgtcttcgtcaagctcctcaacgaatccgcgcaggaatacggctacgagcagaaaggagtgctccggctgccgtgccgcgtcttcgtcttcgagcgtgttctcgacgcgcttcgtctcggactcaacgcgcgtgacatcgccgagctcgtaaatttctcgccggaagagttttcctgagaaacaaagcaaaaaagaaaatacgaaatccgttaattggcgagatcttttgctggttttgttttttttttttttttgtaaatatactacgttaggatcttgaggaaaagaaatgaggcacaatgttaggatttgtagttgttttgggttctttttttcttgctgttgttcgattcaatgctctctcttactgtaaaaagggaaatttttttcactctgttgatttttgcgaccagagaattagaatctctctttcgaattttccgtttagtttttttttttttttctgtcgatttcaagggaaactagcggaaaagggacagaactggaaattttagccgcgataaaattcatgccgtttcaggtttggactgtgtagtgtgaattattcactgtgaagttcatgagtgaaattttaacttctgcaaaaaaaaaaaaaaaa

SEQ ID NO: 1227 - DNA, 1418 bp, Glycine max
ggctcgagctcgagccgattcggctcgagatacacaacacaacacacacctaacttgtttatgagagctataagtcaccaccttctagtttcactactcgattggagaatctctacctcacgatcccttttttctcttagaaccatcatgtcacaatctgatcattcctctgcttttaccacacccagattagttctcaagaaggttttggccaaatctcaacatgaaggggatggagctgttgttagaagaggcattggaaggagcgagttgaagaacttggatcccttcctaatgttggatcacttctcagtatctcccccagcaggatttccggatcatccacaccgaggttttgaaaccgtcacctacatgctagagggaggcatcactcaccaagattttgctgggcacaagggtacaataagaaagggtgatgttcagtggatgaccgcaggcaggggaatcattcactctgaaatgcccgcagaagcaaacaacaacaagggattgcaactatggatcaatttatcatccagggacaaaatgatggagcctaactaccaagagcttccaagtgagaacataccaagagcagaaaaagatggggttgaagtgagagtgatagcaggagaagcaatgggagtgcattcgcctgtgtacacacgaacaccaaccatgtaccttgttttctgcatgatgcccggaactcagtggcatcagaggattccagagtcgtggaatgcctttgtttatacaattgaaggggaaggagtattcgggtgtccaagttcatccccaacagtggcacaccatgtccttgttttgagtcaaggtgatggccttagcgtatggaataactcttccaagcctttgaggtttgttctgattggaggccaaccactgaacgagccagttgttcagtatgggccttttgtgatgaacacacagtctgagattgagaagacaattgaagactatcactatggcaggaatggctttgagatgagcaagtattggatgtctcaacagtaatactatctattagatttaaataagaagcatgttttctcaatccttttcagtgtcacaggcgtagttatcaaagtcaaaaagctagtacgagctcaaaagaaaatactactattgcttattctatccttttcatttccatgtaatgaaagcttctagaatattaaaattgctgcccggacaactattggttgtggctctagtcatgatgggtcagcttatcttgattttttttcatactttctcccttttgctcatttgccctagatttctttctttcatgagatctatccatgtgttggggtagttgagatcataaagagtaatataaatctgttcgcttttttatcaaaaaaaaaaaaaaatagctcgagactagttctctc

SEQ ID NO: 1228 - DNA, 2421 bp, Glycine max
ctaagtttctctctatccacagcgcccccaccacccccacccgccaccacagtctccggcgatagatcccgccgtcaccgctattggccccatgatccccgtggcgctgccgccgtggcaaatcgccggcggcgatcaaccccaccaccaccaacatactcaccctcaccatctcccaccaccaccaccctggtcccacactctctcttcttcttcgccgctttaccctccgaacttcttcgggttgccccataacccgtttccccctcctcggaaccacttccccgtcaccgtcacccctaactccgtcactaacggcgtcaacgctaacgttaacctcgcccacgatcttcgaaaactagggtttccaattgaagaaagccaccacaacaataataacaacaacaacgtggtcgatggtttcgttcatcatcatcatcatcagcagcagcagcagcagcatgaactgaagctgcagttcgggtctttacccacggttgcgtatgccgccgccgaagtttcctccaatggtgactccttgctcaatttgaagttcaacagaggtgggaatgtggttcaccccacttcgaattcgagtgggaatgtggttcttcagggtaaccatgatgctggggagagagaaagaagaggacttgggggttatatggctggtgggtcgttaccccccgagacaagtagggttgcaccagggtttgggaacaggattagagggaagggtttggagggtaggaatgagaatttgtatggtaggagggaaggtgggagaatggtgtctggtgagaggagcaatgtgggacttgttgatcagcttgatcgtcctgggccaccggcccggagtcacctccattcgggttcggggaatgagaccagtggcattggtgaagttggtggtagggatagtaagcacaagggaggtgggagattgaggatggagggttttcctgagtctggtggaagggttgctgatgttgatgtccttggagagcagttagctgattccttgttggtagaggatgagtctgatgacaggactaacttgaggcaacgccgccgagagaaggatgttagatttttggattcaagaggacagcagataatgagccagcggggaagaatgtacagaaggcagatgatgtgtcgaagggacattgatgattttaatgttcctttccttgcaatatatgggtctctaatacctcctgaagaagaaaagctgaagcaaaagcaattagtagcgatattggagaaattagtcagcaaagaatggccaacatctaatctatatctctatggatcatgtgctaattcgtttggtgtttctaaaagtgacattgatgtttgccttgctattgaggaagcagacatggaaaaatctaagattataatgaaattggcggatattttgcaatcagataatctgcagaatgtgcaggccttgacacgtgcacgggttcccatagtaaagctcatggatccagtgacaggaatctcttgcgacatatgcattaacaatctcctagctgttgtgaataccaagcttcttcgggattatgcacacatagatccaaggttgcgtcagctggctttcattattaaacattgggctaagtcaagaagagtcaatgaaacttaccatgggaccttgtctagctatgcgtatgttttgatgtgcattcattttttacaaatgagaagacctgctatccttccatgcttgcaggagatggagacaacgtattctgtaactgtggatgatgttcattgtgcttactttgatcaagttgaaaaactttgtgattttggtcgccataacaaggaatcaattgctcagcttgtgcggggatttttccattattgggcatattgtcatgattatgcaaatactgttatatctgtacgcactggaagcataatcagcaagcgagagaaggactggacaagaaggataggtaatgatcgccatttgatatgtatagaggatccttttgaaatatctcatgatctaggtcgagtggtagataaacatagcatcaaagttctcagggaagagtttgaacgtgctgctgaagttatgcagaatgatccaaatccatgtattaaactttttgagccctatgttcccagttaattgattgttttgaatatagattttataggtttggtaatggacactcagcttgtaaagcttcttttgtcacatctcatatattaacctagtctcatgtttacaagtgtattttttagttagggttttaaatatgccatctcaatgtaaagaactttttggcctttgatcttttatttgaaaggcaagaattttctgttacgttgaacaagctcccaaggtattaaatggcttgtgaataattaattatatagtcacaatgaaattattctatc

SEQ ID NO: 1229 - DNA, 702 bp, Glycine max
  misc_feature (646)..(646): n is a, c, g, or t
  misc_feature (670)..(670): n is a, c, g, or t
aaaactatatatagcgtccgggcaatcccccggctcgcgctcgagccgcttcaacagccgcaacatgctacttcgcaccaaacactcactttctctctcctcactctacactcgccacagctaccagattcgcgaaggggtttagggttccgttcatggacgctgttgaattgccgttaccacttgacgtggcagccacccccaaattgatgggatcggagggtttctcgctaattcaaaatgatgttgcaagtataaaaactgtgcctgagtttccttcctgcaataaatttgtagaaactcaactctctaagaattctagtctgctgccccatctcgagggtgaagaggtgtccaaaaatacgcctagtggtaatggcagaaatttttctgtaattaattccagattagaaggtgtaccattacaacgaaaagcagcaaaatcaaacaggagtaatagttcttgttcaaagaggccacggatgtcccaaccagaagattctttgagccctaatggaattgaagagtcaaaggatatttctgacaaacttggattgcataatttaaactgtacttctccagagaaaaatcaattaccaaagcaaaagagcaattctagcaagcgtggtgataagaggaattttanagtgccttctgtgaaggctaaatntgagtcatcctctatgaagatgggtgcatcaa

SEQ ID NO: 1230 - DNA, 2720 bp, Glycine max
ccacgcgtccgatttcacctctccatctctctagcagataaacttgtctttctttttgtttattttttaatcaaccctgttccacaatttgacctttattcaaattatcgcataaaataaagagcaccgactggcaccagagttgtaaaaccgtgtgcatagcgtgacatgattgctgagtgttaagtgtaaatccactttgtgtgtgtccaaatggaatctcagtggtaacccatcttacccacaccatatcatatgccacaaaagtcttgccaccttaatcacaggtcaatttgctgtccacactgctgcaactcttgcaaactcttttaggttaatcatttagtcactgtattgtgaggaagcttgtttgtcattgtttctaatttgaagtactgggtttgctacattaagtggggttttgagtggtgaatttgacattgaatgtctggtgaaacaggatccttttagcccgtaacagaacagtgaaagttgcagtttggatttgtactttcaactaataaatgtcgaggggatctgatggatcacaaaaaaagcgtttagttgctgcgatctgtgttgtggcaatttttcttggttttctgtatgtgtatggcggatccatctttggttctcagaatagtggttcatctgctcttgaatatggcagatcattgaaaagacttggctcgtcatatttgggtgcagaggatgacactgatggcaagcaagatgaatcttcatcaagtttcagacagggagatggggaggataatattgttcctaagagtttccctgtttgtgatgatcgtcattcagagttgattccctgcttagatagacaccttatctatcaaatgaggatgaagctggacctgtctgtgatggagcactatgaaagacattgtcctcctgcggaaaggcggtacaattgcttgattcctcctccatcaggatacaaggttcctattaagtggccacaaagcagagatgaggtgtggaaagcaaatatcccacatactcaccttgcacacgagaagtctgaccagaattggatgactgtaaaagctgaaaaaatagtgcttcctgggccccccccccattttcattatggagctgacaagtacatagcatcaattgcaaatatgcttaacttttcaaacaataatctaaacaatgaaggaaggttgcggacagtgcttgatgttggttgtggtgttgcaagttttggagcatatcttctatcatctgatatcattgcaatgtccttggcaccaaatgatgtgcatcagaatcaaattcaatttgctctagaaagaggaattcccgcatatcttggtgtcctgggaactaagagactcccttacccaagcagatcttttgagctcgctcattgttctcgttgtcgaattgattggcttcaaagagatggaattctacttcttgaactagaccggttgctcaggccaggaggttattttgcatactcatctcctgaagcatatgctcaggatgaagaggatctaaggatatggaaagaaatgagtgaccttgtggggcgtatgtgttggaaagtagctgcaaagaggaaccaaactgttgtctggcaaaaacctccgacaaatgactgctatatggaaagagaacctggtactcgccctcctctttgccagtctgacgatgacccagatgcaatttggggagtaaatatggaagcatgcataacaccttacagtgatcatgacaacagagccaagggtagtggattagctccatggcctgcaagattgactagtcctcctcctagattagctgactttggctattcgagtgacatgtttgaaaaggacatggaactatggcaaaggagagttgagaagtactgggatctcttgagttcaaaaatcacatcaaacacattgaggaatattatggatatgaaagcaaacatgggttcatttgcagctgctcttagagacaaggatgtttgggtgatgaatgttgtacctcaagatggaccaaacacacttaagctcatatatgacagaggcctcattggaactactcatgactggtgtgaagcattttcgacatacccccggacatacgatttacttcatgcatggactgtcctctctgacatagaacagaaaggttgcagtccagaggatctattaattgagatggatcgcatgcttcgacctactggtttcgtgatcatccgagataaacagccagtgattgattttataaagaagtacctaagtgctttgcactgggaagcaattgattccagttctgactctgtccaagatggtgacgaagttgtttttatcatccagaagaaaatgtggctgactagtgaaagctttagggacacagaataggataaccattgcattttcattttcttataaattattatctgctgcttcaagggatcgaagcacgtcctaaggtgtgaagcagtaaagtaaaacaacttcattttgtagcattacatgttttcttttcatctaatttccttcttttgattctcatttttgggatgatgattattcatgtgattaagacatacataggcatcacgcttttataggctattcaaaattttgcctgcatttggggatgatgtaagctaccaaataatcaagacatagaaatcacttatataagttatgtaatatatataaatgccttttctgctctgggtttctttt

SEQ ID NO: 1231 - DNA, 1365 bp, Glycine max
gctagatcggttgcttaggccaggaggttactttgcctactcatctccagaagcatatgctcaggatgaagaggatcaaaggatatggagagagatgtgcgcccttgtgggacgtatgtgttggagaattgctgcaaagaggaaccaaactgtcatctggcaaaaacctctaacaaatgaatgctatatggagagagaacccggcactcgccctcctctttgccagtctgatgatgacccagatgcagtttttggagtgaatatggaagccggcccaccaccttagcccccccccgacaacagagccaagggtagtggattggctccatggcctgcaagattgaccactcctcctcctagattagcagactttggctattcaaacgaaatgtttgaaaaggatacggaactatggcaaggaagagttgagaattactggaatctgttgggtccaaaaatctcgtcgaacacagtgaggaatgtgctggatatgaaagccaatatgggttcatttgcagctgctcttagaggcaaagatgtttgggtgatgaatgttgtacctcgtgatggacctaacacactaaagcttatatatgacagaggcctcatagggtctatccatgactggtgtgaagcatattcaacatacccccggacttatgatttactccatgcatggactgtgttttctgacattgaaacgagagggtgcagtccagaggatctactgattgagatagaccgtttgcttaggcctacaggtttcatcatcataagagataaacagcatgtgattgattttgtcaagaagtacctaacagcaatgcactgggaagcagttgcaactgctgatgctagtgctgactctgaccaagatggcaatgaagttatttttgtcatccagaagaaattgtggctcgccactgaaagccttaggaatacagaataggacaaagacgacgataacgacaacaacaactatatggctttttcgtttccactttcttatatattattctctgctgctacaagggatcccaagcatgccccctcccccagtgaacaactgccttctgtagcattattacattacataatatttatcaaagtccattattttcattctaaatttttgtgattatgatgcaagttattactaagccataggcattattatgcttctatgggctattcattattttgcccttcatttgggtaacaatgtaacctacttaataatcaacacatagtagatttgtcttcgtgattaaaaactaggacttgtcacactaaagtgtaatatttattcaggcatttttctgcttggaatatattataagtttcttgctttcatattacagttta

SEQ ID NO: 1232 - DNA, 791 bp, Glycine max
aagaagcagctgccaaaaaggcatcagaggatgcttccaaacaggagaaagatggtgagcagcaagctagcccacaggatacaacaatgactgagggtgccagtgcagcagcttctgaagccgagactaagagaactgatttgacggacgatgagaatgctcttctacagcaggcccttgcaatgtcaatggatgatcccacaattaaccatgaagtgagagatacagatatgtctgaagcagctgctgaagatcccgagttggctctagctctccaattgtcagtagaagacagctcaaaggactcggcaagccagtctgacgtgagtaagctgttggcagatcagtcctttgtatcttctatccttgcatcgcttcctggggttgacccaaatgatccatctgtcaaagatttgctggcttccttgcaaaatcagtctgagcctcagcagaagaatgaagacaagccaccaaatgaagaggagaaaaaataatctcgtaatttcttggctgttctatttgtattcctttggtaggcacattgatagcatgttggaaagtggttttacacggggagttatttcacatgtgttccagttgttgagttcccctgctgattaattacggataatatcaaaagcctattgtcaatgttcatcaagggagtacatggttttatggttaagaatactccatccttaaaatgttcattaatctcattacaaaattaatatgaatcctttcccttttttttttaattcttgtattaatttctagtttgttttaaagta

SEQ ID NO: 1233 - DNA, 1517 bp, Glycine max
  misc_feature (1507)..(1507): n is a, c, g, or t
ctcgagccgaatcggctcgaggggctccagaggagggcggcgcgtggcatgattcaacgctgtcatgaattcgacagttgatgatgatcggacggcttgcgttttagatttttatgaatcgtttgatgttcatctaacgggtgtaattggtgcaccggtaaccgcgtgaaatcctagtagtcttttaatcaggtacgtaggacccccccgaccccggagtgagtagtgagaatggagtttcaagggttaccggaaggttgcattgctagtatactctctcgcactacgccggcggacgtgtgtaggttttccgtcgtatcaaagattttccgttcggccgctgaatcggacgctgtgtggaaacgttttctcccttccgattaccattccatcatttcccagtctccttcgcctctcaactatccttccaagaaggagctctatctcgctctctcggatcgccctatcatcatcgatcagggtaaaaagagctttcaattggagaaaaagagtgggaagaagtgttacatgcttgctgctagagctctcagcattatttggggtgacactgagcaatactggaactggacaaccgataccaattccaggttcccggaagttgctgaacttagagatgtgtgttggcttgaaattcgtggggtgctaaacacccttgtcttgtccccaaatactcagtatgctgcttatcttgttttcaagatgattgatgcccgtggatttcataaccgtcctgtggagttatcggtcaatgtctttggtggccatggtagtaccaaaattgtctgtttggatccaaatgaagaacttccacacagaagagtcgagggactgcaacgtcccaatgcaagaagcgatgggtggttggagattgagatgggggagttcttcaatacaggcttagatgatgaagtgcagatgagtgtcgtggagactaagggtggtaattggaagagtggcctctttattgaaggaatagaagttaagcctaaggaagagaattaagcaaatatcttgtttagtttaattcacagaactatatgcataaagtcttgcgtcttagatggcaagaatgctgcttattttaaccttcaacctttgaactttgtgatgtatttttcttgccataactgttgcccttttctcttgaactactatatgcgtaagttatattgcttgtcgtaattcttttgactgatgagtgatgagcgaggtaactatttgtattagtatttgtatgctggttgtcatttttcaatatctggtgacggcatctagcgtggagaagtaaagtaaatatggttacggcctttagataaatctaagtgcacaactttattatacacctaataaaaactttgccttcttctctgtactcaaaagaaaaaaaaaaaaaaaaaaaaaaaaaaaaaaaaaaaaaaaaaaaaaaaaaaaaaaaaaaaaaaaaaaaaaaaaaaaaaaaaaaaaaaaaaaaaaaaaaaaaaaaaanaaaaaaaaaa

SEQ ID NO: 1234 - DNA, 1853 bp, Glycine max
tccggaattcccggctccgcccgcgccgactcaccctctttctctttctctgccaacctgcacactcttcactcgatcaaacagaaaatggcaaagaatgtggggatccttgccattgacatctacttccctcccgcttgcgttcagcaggaagcattggagactcatgatggtgccagtaaagggaagtataccattggtcttggacaagattgcatgtcattctgtaccgaagtagaagatgtcatctcaatgagtttgacagtggttacttctcttcttgagaaatatgagattgatcctaagctagttggtcgtctggaagttggaagcgagactgtgatagacaaaagcaaatccatcaagacattcctgatgcagatcttcgagaaatatggaaatactgacattgagggtgttgattcaactaatgcatgctatggaggaactgctgctctgtttaattgtgtcaattgggtggagagcaattcatgggatggacgctatggacttgttgtctgcactgacagtgcagtttatgctgaagggcctgctcgacctactggaggagctgctgctattgccatgctaattggtcctgatgctcccatttcttttgaaagcaaattgagaggaagtcatatgtctcatgtttatgatttttacaagcctaatcttgccagtgaatatccagttgttgatggaaagctttcacaaacttgttacctcatggctgttgattcttgctataagaatttctgtcacaagtatgagaaattcgagggaaaacaattttctctttctgatgctgaatactttgtatttcactctccttataacaagcttgtacagaagagttttgctcggttggttttcaatgacttcttaatgaattccagctctgtagatgaggttgccaaagaaaaactgggaccttttgcaactttatctggtgatgagagctaccaaagtcgggatcttgaaaaggcatcccagcaagtagcaaagcctctatatgatcagaaggtacaaccaactactctgattccaaagcaagttggaaacatgtacacggcgtctctttatgcagcatttgcctcccttattcacaacaaaaatagcacattggcaggtaagagggtgatattattctcatacggtagtggcttaactgccaccatgttttcgttgcaattacgagacagtcaacatccgtttagcttgtcaaacattgctagagtgatggatgtcgatggaaaattgaagtcaagacatgagtttcccccagaggagtttgttgaaaacctgaagctaatggagcataggtatggtggaaaggaatttgtgacaagcaaggacactagccttttatctccaggcacattctacctcactgaagttgactccatgtatcggagattctattcaaagaaaactaaagagagcagtttgactcccgctgagaacggtgtgattgctaatggcgttgctaatggcattgctaatggccactgatgttgagcatgtacaatcagctgtcaacttcgcctagaatgaagggtattgttatttgtgatagttctgtaggtaaattgtttctgggtgataagtattctcggttcaaatattttattgtactcttttaagatgtagctagttactcgagtccaaaatttatctttttctggttttttttttttttttttttttgcattttagtgaatggaaattagtctttgaataaaaaaagaagttgcaatagcttttattcaggccggttattatatgtatgaatcacatgatgtggttggactcaattaaaaatcaaatttttaggattatttatcatacac

SEQ ID NO: 1235 - DNA, 2121 bp, Glycine max
gttctggtccggaattcccggctcgacccacgcgtccggacgtggtgtgtgtttgggttgggtcctgcttctacttgtacacctcaccactggctgtttcctttatatctcagctacgtaggcccccccccccgatgtgagtttctctgcactcgatcaaacacaaaatggaaaagaatgtggggattctcgccattgacatctacttccctcccgcttgcgttcagcaggaagcattggagactcatgatggtgccagtaaagggaagtataccattggacttggccaagactgcatgtcattctgtaccgaagtagaagatgtcatctcaatgagtttgacagtggttacttctcttcttgagaagtatgggattgatcctaaacaaatcggtcgtctggaagttggaagcgagaccgtgatagacaaaagcaaatccatcaagacattcctgatgcagatcttcgagaaatatggaaatactgacattgagggtgttgattcaactaatgcatgctatggaggaactgctgctctgtttaattgtgtcaattgggtggagagcaattcatgggatggacgctatggacttgttgtctgcactgacagtgcagtctatgctgaaggacctgcccgacctactggaggagctgctgctattgccatgctaattggtcctgatgctcccatttcttttgaaagcaaattgagaggaagtcatatgtctcatgtttacgatttttacaaacctaatcttgccagtgaatatccagttgttgatggaaagctttcacaaacttgttacctcatggctgttgattcttgctataagaatttctgtcacaagtttcagaaattccagggaaaacaattttctctttttgatgctgaatactttgtatttcactctccttataacaagcttgtacagaagagttttgctcggttgtttttcaatgacttcttgatgaattccagctctgcggatgaggttgccaaagaaaaactgggaccttttgcaactttatctggtgatgagagctaccaaagtcgggatcttgaaaaggcatcccagctacttgcaaagcctctatatgatcagaaggtacaaccaactactttgattccaaagcaagttggaaacatgtacactgcgtctctttatgcagcatttgcctccctcattcacaacaaacatagcacattggcaggtaagagggtgatattattctcatacggaagtggcttaactgccacaatgttttctttgcaattacgagacagtcaacatccgtttagcttgtcaaacatggctagagtgatgaatgtcgatggaaaattgaagtcaagacatgagtttcccccggaggagtttgttgaaaacttgaagttaatggagcatagatatggtgcgaaggaatttgtgacaagcaaggacagtagccttttatctccgggcacattctatctcactgaagttgactccatgtatcggagattctattcaaagaaaactaaagaaagcagtttgactcacgctgagaacggtgtgattgctaatggcgttgctaatggccactgatgttgagcatgtacaatcagcagtcaacttcgcctagaatgaggaagggtattgttatttgcgaagttctgttggtaaattgtttctggggtggcaagtgttatcgattcaaacattttattgtattcttttaagatgtagctagttactctagtctaagtcttgtacacacaaaaaaaaaaagttactcaagtctaaattttatctttttctgtgtattttttgcattttagtgaatggaaattagtctttgaataaaaaaaagttgcaataacttttattcaggtgggttatatgaatcacatgatggggttggactcaattaaaaatcaaatttttaggattatttatcatataatctcttttaatagttttctttagcgtcattcttggacttttttctatccttttttttacaggtacaagactttcttctatcagcatcttcacctgaatcgattctgtcgtccttttcttgacaagtgttatattaataatacatcattgtatatagttgttctgtaaaaaaaaaaaaaaa

SEQ ID NO: 1236 - DNA, 1924 bp, Glycine max
  misc_feature (1786)..(1788): n is a, c, g, or t
  misc_feature (1791)..(1792): n is a, c, g, or t
  misc_feature (1795)..(1795): n is a, c, g, or t
  misc_feature (1798)..(1799): n is a, c, g, or t
  misc_feature (1803)..(1805): n is a, c, g, or t
  misc_feature (1807)..(1809): n is a, c, g, or t
  misc_feature (1811)..(1812): n is a, c, g, or t
  misc_feature (1815)..(1815): n is a, c, g, or t
  misc_feature (1819)..(1819): n is a, c, g, or t
  misc_feature (1822)..(1822): n is a, c, g, or t
  misc_feature (1824)..(1824): n is a, c, g, or t
  misc_feature (1830)..(1831): n is a, c, g, or t
  misc_feature (1833)..(1833): n is a, c, g, or t
  misc_feature (1835)..(1835): n is a, c, g, or t
  misc_feature (1839)..(1839): n is a, c, g, or t
  misc_feature (1844)..(1844): n is a, c, g, or t
  misc_feature (1847)..(1847): n is a, c, g, or t
  misc_feature (1852)..(1852): n is a, c, g, or t
  misc_feature (1861)..(1863): n is a, c, g, or t
  misc_feature (1867)..(1868): n is a, c, g, or t
  misc_feature (1872)..(1872): n is a, c, g, or t
  misc_feature (1877)..(1878): n is a, c, g, or t
  misc_feature (1883)..(1883): n is a, c, g, or t
  misc_feature (1890)..(1890): n is a, c, g, or t
  misc_feature (1893)..(1893): n is a, c, g, or t
  misc_feature (1895)..(1895): n is a, c, g, or t
  misc_feature (1897)..(1898): n is a, c, g, or t
  misc_feature (1900)..(1900): n is a, c, g, or t
  misc_feature (1907)..(1907): n is a, c, g, or t
  misc_feature (1910)..(1912): n is a, c, g, or t
  misc_feature (1914)..(1914): n is a, c, g, or t
  misc_feature (1916)..(1916): n is a, c, g, or t
  misc_feature (1923)..(1923): n is a, c, g, or t
ggctcgagtaaggtcctcgctgctgctaagtgcctccttcttcctcctatatatatatatatctgcttcgttgcccccccctcctcttcgcacaacttaaccctctctctctgagatggcaaagaatgtggggattctcgctatcgacatctacttccctcccacctgtattcagcaggaattgctggaggctcatgatggtgccagtaaagggaaatatactattggacttggtcaagattgcatggcgttttgtacagaagtagaagatgtcatctcgatgagtttgacagtagtttcttcccttcttgaaaagtatgcgattgatcctaaacaaattggtcgtctggaagtaggcagtgagactgtgattgacaaaagcaaatccatcaaaactttcatcatgcaaatctttgagaaatatggaaataccgatattgagggcgttgattcaactaatgcatgctatggaggaactgctgctttgttcaattgtgtcaattgggtggagagcagctcatgggatggacgctatggacttgttgtctgcactgacagtgctgtctatgctgaaggacctgctcggcctactggtggagccgctgctgttgccatgctaattggtcctgatgctcccatttcttttgaaagcaaattgaggggaagtcatatggctcatgcctatgatttttacaagcctaatcttgccagtgaatatccagtggttgatgggaagctttctcaaacttgttaccttatggcccttgattcttgctataatcacttaagtcacaaatatgagaaacaagagggaaaacaattttctatttctgatgcagaatactttgtatttcactctccatacaacaagcttgtacaaaaaagttttgctcgtttggtgttcaatgacttcttgaaaaatgccagttttgtggatgaggctgccaaagaaaagctggaaccttttgcaacattatctggtgatgagagctatcaaagccgggatctagaaaaggcatcccagcaagttgcaaagcctcaatacgatgcaaaggtgcagccaaccaccttgataccgaaacaagttggcaacatgtacaccgcatctctttatgcagcctttatttcacttattcacaacaagcatagcacattggatggtaagagggtaatattgttctcgtatggaagtggcttaacttccacaatgttctctttgctattacgtgaaggtcaacatccatttagcctgtcaaacattgataaaatgatggatgttgctgggaaattgaagtcaagacatgagtttccaccagagaaatttgttgaaaccatgaagctaatggaacataggtatggtggcaaggagtttgtaacaagcaaggacaccagccttttatctccaggcacattctatctcactgaagttgactccatgtataggagattctatgcaaagaaaactagtgaaaatggtttggtcaccaatggtcactgacgttttacttagagaacgtgtaatacctggaaaccaggaattcaactgtgcttagcatttagaaggctgttctcgtttggattagtttcttcttaagggaagacaaacgaacaattatgaaatctgtaggagccaggtgttgttagttcaaaaattttccgaaactcttcaagtttaaatgattccaccaaaaattgtttctagcaattatgcttttgaatatgtagagcactgtgaaggattggccgttataagtttggctccccggtttgctgttcaatggggggnnnctnnttncanntatnnntnnngnngtntgtnctntntgtgcnntntntgcntggcngtngagtngtgtaatcnnngaannttgnatgcnntcgtngagtgtntgntncnngngtgccgntannncnangactttnc

SEQ ID NO: 1237 - DNA, 2917 bp, Glycine max
  misc_feature (5)..(5): n is a, c, g, or t
  misc_feature (2691)..(2694): n is a, c, g, or t
  misc_feature (2747)..(2747): n is a, c, g, or t
  misc_feature (2754)..(2757): n is a, c, g, or t
  misc_feature (2830)..(2834): n is a, c, g, or t
  misc_feature (2893)..(2894): n is a, c, g, or t
tcggnaattcggcttcgaggggaaacgagttcatcccatgccttttcctgattcatctgtacctgttcaaccaagacctatggatcctaaaaaggatattgcagtttatggatatggaagtgttgcatggaaggaacggatggaggattggaagaaaaaacaaagtgaaaaacttcaggttgttagacatgaagggggtaaagatagtgatgagctggatgatcctgacttaccaaaaatggatgaaggcagacaaccactttggagaaagttgccaattagttcaagcaggataaatccatacagaatcataatagtacttcggattgcaattctttgcctcttttttcattatagaatcctccatccagtcaatgatgcatacgcattgtggctcacctcagtaatatgtgaaatctggtttgctgtctcatggatttttgatcagttcccaaaatggagcccaattcttagagaaacataccttgatcgtttatctctaagatatgaaaaagaaggaaagccatctctgttagctgatatagacgtgttcgttagtacagtggaccctatgaaggaacctccactcattactgcaaacacagttctgtctatccttgctgtggattatccagtggacaaggttgcatgctatgtttcagatgatggagctgccatgcttacatttgaagcactttccgagacttctgagtttgcaaggaaatgggttccattctgcaagaagttctgcattgaaccacgggctcctgaatggtattttgctcagaaggttgactacttgaaggataaagtggatgcaacatttataagagaacgtcgtgccattaagagggagtatgaagagttcaaagtgaggattaatgcattggtggctttggcacaaaaggttcctgaggatggttggacaatgcaggatggtactccatggcctgggaacaatgtcagagatcatcccggaatgatacaagttttccttggtcaaaatggtgttcgtgacatcgaaggaaatgaattacctcgtcttgtctatgtgtctcgtgagaaaagacctggatatgatcaccacaaaaaagctggagctatgaatgctttggtgagagtctcggcaataatcaccaatgctccttatgtactgaatgttgattgtgatcactacataaataacagtaaggcccttcgtgaagccatgtgcttcatgatggatcctacatcagggaaaaaaatatgctacgtacagtttcctcaaagatttgatgggattgatcgtcatgatagatactcgaatcgcaatgttgtattctttgatatcaatatgaaaggtttagatggcatccaaggaccaatatatgtgggaactgggtgtgtcttcaggagacaggcattctatggatatgatgcccctacatcgaagaaagcaccaagaaagacatgtaactgttggcctaaatggtgctgctgtctgtgttgtggatctaagaagaaaaagattaaagcaaagtcaagtgtgaaaaagaagataaagaataaggatgatataaagcaaatgcatgcactagaaaatattgaagagggaattgaaggaattgacaatgagaagtcatcactaatgtctcaatcgaagtttgagaagaagtttgggcaatcatctgttttcatagcttcgacactcttggaagatgggggtgttccaaaagcagcaagttctgctacactcttgaaagaggccatccatgtaattagttgtggttatgaagataagacagaatgggggaaagaggttgggtggatatatggctcagttaccgaagatattttaacaggtttcaagatgcattgtcatggttggagatctgtatactgcatgccaaaaaggcctgcttttaaaggttcagctcctataaatctctcggatcgtctgcatcaagttcttcggtgggctcttggatctgttgagatctttttcagtaggcattgtcccatatggtatggctatggtggcggcttgaaatcgctggaacgattctcttacataaactcagttgtttatcctctgacttcaattcccttaattgcctattgtgcattgccagctgtctgtctgctcactgggaagttcattgtccccgagataagtaactatgccagtatcattttcatggccctcttcatctctatagctgcaactggcatcctggaaatgcagtggggaggtgtcggtatacatgactggtggaggaacgagcagttctgggtcattggtggtgcctcctcacatctctttgctctctttcagggtttgctcaaagttctggcgggagtcaacacaaacttcacagtcacatccaaggcagcagatgatggagagtttgctgacctctacatcttcaagtggacatccttgttgatccctcccttgaccctactaatcataaacatcatcggagtcattgtcggtgtctcggatgctataaacaatggatatgattcatggggtcctttgtttgggaggctattctttgccctttgggtcattgtacacctttaccctttcctcaagggtgtcatgggaaaacaagaaggtgttcctaccatcatttgggtctgggctattctcctgtcttcaatcttaaccatactttgggtgagaatcaacccattattggccaaaannnnatgtggtgttgaaaatttgtggaaataaattgtaaataaaggtaacaaaaaantgaaggnnnntaccatggtaaaaagttaaacaataataagatatgaaacaagcataagtaaatggtaaaagacacaaaacacnnnnnatggatatgatggtgaaaaaaagacaaagcaaaaaaaaaatgtaaatgtgggtggtgtnngtagaaacaaaaatatgttttga

SEQ ID NO: 1238 - DNA, 841 bp, Glycine max
  misc_feature (20)..(20): n is a, c, g, or t
  misc_feature (825)..(825): n is a, c, g, or t
tcgagtcagctacgtaggcncccccccgagaaaatgcagcagcaacccttttcagcttgtcacttgcagatgagaacaagataattattggcgcctcaggagctataccggctttagtggaattgctccaaaacgggagtcctagaggaaagaaggatgcagcaacagcattgttcaatttatgcatttatcaagggaacaagggcagggccattagggcaggtatcatcacagcattgttgaagatgcttacagattcaagcaaatcgatggttgatgaagccctaacgataatgtcagttcttgcaagccaccaagaggcaaaagttgccatagtaaaagccagcactataccagttttgatagatcttttgaggaccggattgcctcgcaataaagagaatgcagctgctattctacttgccttgtgcaagagggatgcagataatcttgcttgtataagtagacttggtgctctcatacctctctctgaacttgctcgaaatggcacagagagggccaaacggaaggctacttcattattggaacatattcataagttgcagcaactttgaatggtgtagttctgcaaagaactttaagtttcttctgttctctcattatttgatataattctccacactgcggtttgcaaactggtcatacgaggtgaaataagaaaatcagcctcattgattcagttattcttttcttggtttgttctttgttaaccccggtatgagcgtataaagaaatcaattgatatattgtttccttatgaaattcttacagaagtttccgttcttttcggggggaaaaaaaaantatttaaggagaaaga

SEQ ID NO: 1239 - DNA, 1651 bp, Glycine max
tcagctacgtaggccccccccccggttcttggcaaatctgtgagtaggttgcacaaacaacaaagctgccctgaaaatttatcagaactagacagcattcctatcaacgatgaagggaaatgctgcagcacaaatcctgccagatctcgcttggaaagaacaaggagcatccctactgaagttgaagtttccttaaatgcaattgaacctgaaagtcaagaaatttctgagacaaagagtctacctgaggttaaaaagactgaagcaattgtgattcctgaagattttctttgccctatatccttggaactaatgagggatcctgttattgtagccactggtcagacatatgagagatcttacatacagagatggatagattgtggaaatacaacatgtccgaaaactcagcagaagctccagcatttgacccttacaccaaattatgttttaaggagccttatttctcagtggtgtatagagcacaacattgagcagccaacaggactaaccaatggaaaattaaagaaaagtgatggatcgttcagagatgttacaggtgacatagcagcaatcgaagctctggtccggaagctctcctgccgatctgttgaggagcgtagatcagctgttactgaacttcgatcgctatccaaacgaagtactgataatagaatactaattgctgaagctggagcaattccagttctagtcaaccttctaacatcagaagatgtattgacacaagacaatgcagttacctcaattctcaacctctccatatatgaaaacaacaagggacttataatgcttgctggtgccattccatccattgtccaagtcctccgagctggaaccatggaagcaagagaaaatgcagcagcaacccttttcagcttgtcacttgcagatgagaacaagataattattggcgcctcaggagctataccggctttagtggaattgctccaaaacgggagtcctagaggaaagaaggatgcagcaacagcattgttcaatttatgcatttatcaagggaacaagggcagggccattagggcaggtatcatcacagcattgttgaagatgcttacagattcaagcaaatcgatggttgatgaagccctaacgataatgtcagttcttgcaagccaccaagaggcaaaagttgccatagtaaaagccagcactataccagttttgatagatcttttgaggaccggattgcctcgcaataaagagaatgcagcggctattcttcttgccttgtgcaagagggatgcagataatcttgcttgtataagtagacttggtgttgtcatacctctctctgaacttgctcgaaatggcacagagagggccaaacggaaggctacttcattattggaacatatttgtaagttgcagcaactttgaatggtatagttttacaaagaactttaaggttattctgttctctcatcatttgacataattttcccccctgcggtttgcaaactggtcatacgaggtgaaataagaaagtcagcctcattgaatcaggtaatcctttcctggtttggtctttggtaacccctgtatgagcgtgtaaagaaatccattgatatattgtttccttatgaaatttttacagaagtttccgttctttttg

SEQ ID NO: 1240 - DNA, 1315 bp, Glycine max
acgaggagtcacctggggctatattaatcggattttggggcagccatcgctgatccgggagtcatctatggcaaagtttcctgggtcagagatcatttctcaagccaaaaacaaagtgctgtgtaatagtactttggctggggcagaaaagcctattgggagtaaaaatggtcttggaaatgtaatccttcatccatcattgcagagaagaatagagcatcttgcacgtgcaacatcaaataccaaatcccatcaggcaccatttcgtaacatgcttttttatgggcctcctggcactggtaaaacgatggttgcaaaggaattagctagaagatcgggtttgcattatgccatgatgactggaggagatgttgcacctcttggcgcacaggctgttaccaaaattcatgatatatttgattgggccaagaaatcaagaaaaggcctattgctttttattgatgaggcggatgctttcctttgcgagcgtaacagctcccacatgagtgaagctcaacgaagtgctctaaatgcattgctcttcagaactggtgatcagtctagagacatagtacttgtcctggccacaaacaggcctggtgatcttgatagtgcagttactgatcgcattgatgaagtgattgaattcccgcttccaggagaggaagagcgtctaaagttgttgaagctctatttgaacaagtatttatgtgatgacaataatggctccaaggggggtttctttctgaagaagcagcctcagaagatttccataaaagatttatctgaagatgttttcagagaggctgccacgaaaacagagggattttctggtcgtgagatcgccaaactcatggccagcgtccaagctgctgtctatgggcgcccagactgcatcttggattcccagttgtttagagaaagtatagattacaaggtcgtggaacatcatcaacgattaaaactagcagctgaaggctggccaaatataatttgtttgagcattttatttgcatccccattttgacctgctatgtgagtttttttgttcatgttatttgggccattgtggctgatgaagcatatttttgtgagccgaatttgcaggatacttcggctttattaattattactttattaggaataggaagcttttagccttcagttacttggaagcagcattcaatcagaacctttccacttcatgctatagagcaagaagccaggtttttaagagcatagaagtcaaattacacttattaacaaatatatagaatatgctcaaagttgtaatttaaatttttatttttttgtg

SEQ ID NO: 1241 - DNA, 3276 bp, Glycine max
ctatctatcagatcaattgattataaatgtaatattacttagaagcaataccaacgcaatatccattcaagggattggatcgtgtaattttcatcttgacaagaaattatctacatactatgataaaatatgtatcaaaagcacaagggctatagctcagttaggtagagcacctcgtttacgggagcgccaatgtttttttcagaggagtttcatcttgtaatcaaaagagtttatcttatagtaagaaatcgatgtcttactccattttaaggaacaaaacaagagaacaatagcctgacaaagggtttagccataaaatcgaatccatcattgatttgagatattgataaggtgaatactcatttctcgtcaatgctaggcataatgcgggtatagggacctaaaaaagattatcttttcttcctatcttatgaactttaaggtgtatgaagtgtcatttcctatcttagattttaattttagtaggtagataaagagtccatttaacttaagttgatctaggccagaagcagacctacgtcaagataatccttctttgaaacactttggtagtgctcttagattgtaatccaaataaaaaaatcagagcatagggaatcatctctttattcttgctgtcaagaaaaaagatggtggactaactaatatttctatcagttaatgaaaaagctcaatgcaaaaaaaatgcacgttgggtttttaaaacaattcaaatcatttagataataatcagtttgatttgttttacaaaaaaaaaaaaaaaaaaaagtccgtatagccctaatattcctacagatactaataatatttacatttacgatcgaatagatctcattactaatactatactattactaaattaagaatagaatagaaagaatttgtaaatttctatcggaacatattaatattcgatagaataatactaatagtagtatattcagatactagtctaaaaaaatttatactttattatttaaactttagactaataattaatactaatccggtatattttccacattcagaggagtacgtttatgtttcttctttacgaatatgatattttttgggcatttctaataatatcaagttttattcctattttggcatttctaatttctggaattttagccccgattagcaagggaccagagaaactttctagttatgaatcgggaatagaaccaataggtgatgcttggttacaatttcgaatccgttattatatgtttgctctcatttttgttgttcggctgcgtgaagccgtctgtcgggatccttgggcaatgagtttcgatgtattaggggtatccgtatttatagaagctttcatattcgtgcttatcctaattgttggttcagtttatgcatggcgaaagggggcattagaatggtcttaattcttgactatttagacaattagattagacaattagaaaaaaatattgagacaattatgaattccattgagtttcccttacttgatcaaacaaccaaaaattcagttatttcaactacattaaatgatctttcaaattggtcaagattatccagtttatggccgcttctctatggtactagttgttgcttcattgaatttgcttcattaataggatcacgattcgactttgatcgttatggactagtaccacgatcgagtcctcggcaagcagacctaattttaactgcgggcacagtcactatgaaaatggctccttctttagttcgattatatgaacaaatgcccgaacctaaatatgttattgctatgggagcatgtacaattacaggggggatgtttagtaccgattcttatagtactgttcggggcgtggataaactaatcccagtggatgtctatttgccgggctgtccacctaaaccggaggctattatagatgctataacaaaacttcgtaagaaaatatctcgagaaatatatgaaaatcaaatgagttctcaacgagagaatagatgttttacaaccaaccacaagtttcatattggatacagtactcatactggcaattatggtcaagaattattctatcaactgccatctacttcagagataccatctgacacatttttttaaagtacaataagaaatagcaattcctttttttttaatttcatcataatgtaaataggaaagactaataccaaattcattaaaaaattcaggagaagcaaaaaaatgcaaggtcgtttgtcttcttggctagtcaaacatggactaattcatagatcattgggtttcgattaccaaggaatcgagactttacaaataaagcccgaggattggcattccattgctgtcattttatatgtatatggttacaattatctacgttcccaatgtgcctatgatgtagcaccaggaggactattagctagtgtatatcaccttacgagactagagtatggtatagatcaacccgaagaggtctgcataaaaatatttgtcgcaagaaaaaatcccagaattccttccattttctgggtttggaaaagtgcggattttcaagaaaaggaatcttatgatatgttgggaatctcttatgataatcatccgcgtctgagacgtattttaatgcccgaaagttggataggatggcctttgcgtaaagattatatcgccccaaatttttatgaaatacaagatgctcactaaatgataaaaataagaaactaatccaaacttctacaacccctgatattcaaagaatatcagtacattctcttatagatcagacaaagtaattgacattaaatcagtcagaataatggaagtatcattcacatcttattatgtatgtgagaaatcacaaaattcataaataatatagggattaaaatgggataggggttctttaagattctaaaataggaacaatacttatttattatgagccaagccgataaaataaataggatgaactacaaaaattctttatcatgaactatttaacgtgcacatcaacatcaacaattatatggccacgaaaaacaaatagtaagatcaagggagatgaagaaaacggaaaaaaacataaagaaagaaaagggctcgattctttccgtgtaatccgaagaagatgaattttgaatattcccactccacccatgaactctattagagtagacttttaggtctttcaaccagactaattaaaccattcgaatattatcgaaatagaaagattttttttgttcccctaaaaaaaaaaaaaaaaaaaaaacacaaaa

SEQ ID NO: 1242 - DNA, 1581 bp, Glycine max
  misc_feature (1440)..(1440): n is a, c, g, or t
  misc_feature (1474)..(1478): n is a, c, g, or t
  misc_feature (1545)..(1549): n is a, c, g, or t
ccctcgcgtccgtacggctgcgagaagacgacagaaggggatccaactcaggaagggaaggcgagacagctcaatcctacacatgacatctcaatctcaatctctttcgtagtgttttttgtttttaaatacataaaaaaccattcattctgtttcgttccactccctaatagctgctacagttacagcataacttctattctatatttctttctactcgcaagcaaatcagaagaagagaatggcagcagcagaggggctaaacagagagcagtacgtgtacttggcgaagctgtcggagcaggcggagcggtacgaggagatggtggagttcatgcagaaggtggtggtggggtcgacgccggcgtcggagctcacggtggaggagcgcaacctcctctcggtggcctacaagaacgtcatcggctcgctgcgtgccgcgtggcgcatcgtctcctccatcgagcagaaggaggagggccgcaagaacgacgaccacgtctccctcgtcaagcactacagatccaaggtcgagaacgagctcactcaggtctgcgccagcatcctcagcctcctcgactccaacctcgtaccctccgtcttcgccagcgagtccaaggtcttctacttgaagatgaagggcgattaccaccgctatctcgcagagtttaaggttggggatgagagaaaaaccgctgctgaggataccatgttgtcttacaaggctgcccaggacattgcttctggggatcttccccctactcaccccatcagattgggtctcgctctcaacttctccgtcttctactatgaaatcctcaaccagtctgacaaagcgtgtgccatggctaaacaggcttttgaggaagcaattgctgagctggacaccttgggagaagaatcctacaaagacagcacgctcataatgcagcttttaagagacaacctcaccctttggacttctgatgttcaggaccagctagatgagccctgatatcccttataggttgatgggtggtattcttcctctcatggaggtgggctttgaatgtcatttatttgtgctaattaagaatcgccctagtttataaaatgattggcaatctgtgatataatgttgtatgaacagagaccaggcttcttttttttgtgtgtcatatggtattggaaaggatactgtataatgggatatccaattaattattatctgttgcaatctttcttgtgttacttccacagtcccacaacacatagggtcctaactcataagtgcccccattttaaaattttgggtcagcatctggtggtcctataggaactagaaatgtcattgtagcaacattattctcttggaaagaacatttttcattacagctataatggcgcataaaaaaataatagatcaaaataatgatagatacaagggttgttaacaaaaantatcaaagctatttactaaagcaaatgacattgnnnnncaaagatgccacaatatacgcttttgatgttgtggattggctatccacaccattcatcgcaatgtcnnnnnaaccaatcatctatgcttactaactgaagata

SEQ ID NO: 1243 - DNA, 1191 bp, Glycine max
aaattcaggaagggtgggtgagacaggtgaatcctacacatgttatctcaatctttttccaagtgtttttttatacataaaatccattcattcggtttcgttccactccccccaatagccgctattctactcgcaagcaaatcagaacaagagaagagaatggcaggagcagaggggctaaacagagaacagtacgtgtaccttgcgaagctgtcggagcaggcggagcggtacgaagagatggtggagttcatgcagaaggtggtggtggggtggacgccggcgtcggagctcacggtggaggagcgcaacctcctctcggtggcctacaagaacgtgatcgggtctctgcgtgccgcgtggcgcatcgtgtcctccatcgaacagaaggaggaagggcgcaagaacgacgaccacgtgtccctcgtgaagcactacagatccaaggtcgagaacgagctcacgcaggtctgcgccagcatcctcaacctcctcgactccaacctcgtaccctccgtcttcgccagcgagtccaaggtcttctacttgaagatgaagggcgattaccaccgctatctcgcagagtttaaggttggggatgagagaaaaaccgctgctgaggataccatgttgtcttacaaggctgcccaggacattgcttctggggatcttccccctactcaccccatcagattgggtctcgctctcaacttctccgtcttctactatgaaatcctcaaccagtctgacaaagcgtgtgccatggctaaacaggcttttgaggaagcaattgctgagctggacaccttgggagaagaatcctacaaagacagcacgctcataatgcagcttttaagagacaacctcaccctttggacttctgatgtccaggaccagctagatgagccctgatatccattataggtttgatgggtggtattcttcctctcatggaggtgggctttgaatgtcatttctttgtgctaaattaagaatcgccctagtttataaaatgattggcaatctgtgatataatgttgtatgaacagagaccaggcttctttgttttttatttttatgtctcatgatattttggaaaggatactgtataatgggatatccaattaattaattattatatctgttgcaatctttacctacaaaaaaaaaaaaaaaaaactcgagactagc

SEQ ID NO: 1244 - DNA, 1257 bp, Glycine max
tcgatcagctacgtaggcccccccccgagaatattctttctatttctatttatcctatctcaccatatcacgaaaacgacgacaacccgttccttgagaaaaccgaaaccctaatcacgactccgagaaccctaaattcgcccaatccaaagtcccaaacctctaaaatcaaaccatgaaaagcgtagaggtggcgaagacggtgctcgaggtcgccgacgtggcttggaccgccgttgaacacacccaccatctccgccaccgcagtcatcccgtccccgctgcccccgcagccgatgtctgcccatccgaccaagatttggagtctctgcgatccgaaaatcgacgtctcaggaacttactcgaccagaatctgaaattgctgcaaaacctctctgaggcgacttgcttcgataattgccctcccgatttgaatgaccggttagttgctaccatgaggtctgatgagtacttgactcggctcaagtaccttcaacaagaaactgctagtggaggaaatcaatttcctttcaaggaggccactgagcttgattaccgatcagctgacattttggtcaacatcaactctcaggaacccagttggtgggtttgggttacggatgagaaggaacctattaatgttgaggaattgagtggaattgatgatgagaattacttggtcatcagtgaggaacatgtggttgatggtgttgccaactttatggccagatgcattttgtcaaacccgaaagctctgaaattttctccagaggaactgcagaaagcgctatcaaaagcattgcgtggtacaagcaaactggaaaagattatggatatttgggaagctggaaagttgttttattgtctgtctacctggggacttgctttggcagggctttaccaaagtcgtgcaattttaagagttgctgcaaagggtgttcattcaggaagtaaacttgctctcaaggctctctaaagattgctgttccatgaacatggcaaagtgcaaatgtatgatgaatgctagtgcaaggagtttacagttccttgtctgactgtaaacctatttgttaattgcttcctacaagatctagctgatgtaaataatttgtcaataaaattattcgttgtcttacctagctgtgtggcctacagtgtaaattgtactgatgatgcagctacagtgtaaattgtactgaatatttcattgttgaatgatacaatgcttgtgtttttctcaaaaaaaaaaaaaaaaaa

SEQ ID NO: 1245 - DNA, 2560 bp, Glycine max
acgagggagcccactggcggttcagcgacatgcgtcagctacgtaggccccccccccgtcctcaatcggtccactccgcttctgcgaaatttcttcgtctctgtctctgacctcctaacgccttctcgattcctaactccttcaaccctttgcaccattcaacacgtcgtcatcatgctcccttcaactctcgcctgatcagattttccgtttcgtcggcgatctctctctctctctctctcagttcgcgatccatcaccggttggaggttttagggcacagagaccaaggtcgccgccatgtcaatgtcggattccgattcgtcctcctcttatggcgctgaatacaagagtctcaaacaagttagccgcgagcgattattacatgaaatgcttaggtcagcgaaaacaggggattcaaaatctacatggaaggtactaataatggacaaacttactgtaaagataatgtctcattcttgcaagatggctgatatcactgatgaaggcgtttcattggttgaagacatattcaagcgaaggcaaccattgcccaccatggatgctatatacttcatccagccaaccagagagaatattattatgtttttgtccgacatgtctggaaggaaacccttgtacaggaaggcctttgttttctttagttcacctattgccagagaattggttatggaaattaaaaaagatgcacaggtgttgcctcgtataggtgctctgagagagatgaacttggagtattttaccatagacagtcagggcttcattacaaacaatgagagagctttagtggagctatttggggatgaggagaataatcgtaaagctgttgcatgtttaaatgtgatggctactcggattgctacactttttgcttcattaagagaatttccttttgtccgctttcgtgctgccaagtccctagatgcaaccacaatgactaccttccatgatcttattcctacaaaacttgctgctggtgtctgggactgtcttatgaaatataaaaaaactgtacctaatttccctcagactgagtcctgcgagttgctcatcattgatagaactattgatcagattgctcctgtgatacatgaatggacatatgatgccatgtgccgtgatttgttgaatatggagggaaataaatatgttcatgaggttcctagcaagactggtggtccacctgagcgaaaagaggttcttttggaggatcatgatcctatatggcttgaacttcgtcatgcacatattgcagatgctagtgaacggctgcatgagaagatgaccaacttcatttcaaagaataaagctgcacaaatccaacatggttcaagaggtagtggtgaaatgtcgacaagggacttacaaaagatggttcaagcacttccacaatacagtgaacaaattgacaagctctccctccatgtagagattgcaggaaaaattaacagaatcattagggagtcaggacttcgggaacttgggaagctagagcaagatcttgtttttggagatgcagggatgaaagatgatacaagtcgtgaaaataagttgcgcttgttaatgattcttgcgtccatatatcctgagaaatttgagggtgaaaagggtctgaatttaatgaaggtagcaaagttgacagatgaggatacaattgccataaataatttgagaatgcttgggggagaacctgataccaaaaagacttcgacgagttcttttgctcttaaatttgatatgcacaagaaaaagcgtgcagcaaggaaagatcgttctggtgaagaggagacatggcagttatcacgtttttatcccataatagaggaactcatcgaaaaagttagcaaaaatgaattatcaaaactggactatccttgtctaaatgacccaagtccaactttccacggtacaccttatgctggaccagtaactcaaaatcctcctgctcattcaatgagatcaaggcgtacaccaacttgggctcgacctagaggctctgatgatggatattcaagcgattcggtgctaaaacacgcatccagtgatttcaagaaaatggggcaaagaatatttatattcattgttggtggagcgaccagatctgagcttaggatatgccacaagcttactggcaagctgaagagggaagttatactaggctcgtcaagtattgatgatcctgcacaatatatcacgaaattgaagatgctgacagcacaggaactttcattggatgatctccagatatgacgatgtcacccacttgaaaactggaagatgatcttctgcttctctaatatacgtgttgtatccatagtgtttattcatctcatgtaacaaattctttggacatttgacccgtggtatagtcaagccactgaatgttaaactgtgcatatattaggaattgttcattggatagagacaattttaaattttgaaaaatttctggtaactgctattcgttcaaagcactgttcgttaaaaaaaaaaaaaaaaaagaaaaaaaaaaaaaaaaaaaaaaaaaaaaaattaaaaaa

SEQ ID NO: 1246 - DNA, 1844 bp, Glycine max
ataggtgaattgagagagatgaacttggagtattttaccatagatagtcagggcttcattacaaacaatgagagagctttagtggagctatttggggatgaggagaataatcgtaaagctgttgcatgtttaaatgtgatggctactcggattgcaacactttttgcttcattaagagaatttccttttgtccgctttcgtgctgccaagtccctagatgcaaccacaatgactaccttccatgatcttattcctacaaaacttgctgctggtgtctgggactgtcttatgaaatataaaaaaactatacctaatttccctcagactgagacctgcgagttgctcatcattgatagaactattgatcagattgctcctgtgatacatgaatggacatatgatgccatgtgccgtgatttgttgaatatggagggaaataaatatgttcatgaggttcctagcaagactggtggtccacctgagcgaaaagaggttctcttggacgatcatgatcctatatggcttgaacttcgtcatgcacatattgcagatgctagtgaacggctgcacgagaagatgaccaacttcatttcaaagaataaagctgcacaaatccaacatggttcaagaggtagtggtgaaatgtcaacaagggacttgcagaagatggttcaagcacttccacaatacagcgaacaaattgacaagctctccctccatgtagagattgcaggaaaaattaacagaattattagggagtcaggacttcgggaacttgggcagctggagcaagatcttgtttttggagacgcagggatgaaagatgtgatcaaattttttactacaaacgaagatacaactcgtgaaaataagttgcgcttgttaatgattcttgcgtccatatatcctgagaaatttgaggctgaaaagggtctgaatttaatgaaggtagcgaagttgacagatgaggatgcaattgcaataaataatttgagaatgcttgggggagaacctgataccaaaacgacttcgacgagttcttttgctcttaaatttgatatgcacaagaaaaagcgtgcagcaaggaaagatcgatctggtgaagaggatacatggcagttatcacgtttttatcccataatagaggaactcatcgaaaaagttagcaaaaatgaattatcaaaactggactatccttgtctaaatgacccaagtccaactttccacggtacaacttatgctgtaccagtaactcacaatcctcctgctcattcaatgagatcaaggcgcacaccaacttgggctcgacctagaggctctgatgatggatattcaagcgactcggtgctaaaacatgcatccagtgatttcaagaaaatggggcaacgaatatttatattcattgttggtggagcaaccagatctgagcttaggatatgccacaagcttactggtaagctgaagagggaagttattctaggctcgtcaagtatcgatgatcctgcacaatatattacgaaattgaagatgctgacagcacaggaactttcattggatgatctccagatatgacgtcacagacttgaaaaatggaagatgatcttccttccgcttgtctaatatacgtgttgtaaccatattgtttattcatctcatgtaagaaattctttggacatttgacctgtggtatagccaagccactgaatgttaaactgtgcatatgttaggaattgttcattggacagagacaattttattttttgaaaaaaatctggtaaatgctattcattcgaatgacactttcgttaaaaaaaaaaaaaaaaaagaaaaaaaaaaaaaaaaaa

SEQ ID NO: 1247 - DNA, 2382 bp, Glycine max
ccacgcgtccgctctttccctcgccacactgacccttctgatgttcaagctcttgaggtcatgtacaatgcgttgaatagtccaactcagctaacaggttggaaaatcggtggtggtgatccatgtggagagtcatggaaaggggtaacgtgtgagggatcagccgttgtttccattaaactctcaggtttaggactcgatgggactctggggtacctgctttcggaccttatgtcactcagagagcttcacctacgtgggccccccccccatgatacaattccctaccagttgccgcccaatcttacaagcctgaattttgcaagaaataatttatctggaaatcttccttattccatttctgccatgggttcactcaattatttgaatttaagcaataatgcactctccatgacagttggtgatatatttgctagtcttcaagatcttggcaccctggatctatcattcaataacttctctggggatcttcctccttcagttggtgcattggccaatctttcttctcttttcttgcagaagaaccagttgactggttctcttagtgctctcgttggtttgcctttggatactttaaatgttgcaaacaataatttcagtggatggataccccatgagcttagttccatccataatttcatatacgatggaaattcttttgagaaccgtcctgctcctcttccgccgacagttacttcacctcctcccagtggatctcatagacgtcatcattctggatctggttcacataataaaacacaagcttctgataatgaaaaatctaatggccataagggtttgacagtgggggctgtcataggcattgttttaggttcagtactggtggctgctattgtgttccttgctcttgttttctgtatccgaaagcaaaaggggaagaaaaagggtgcaagaaattttagtgggagccttcctcgtggagttattaatgtaactcctcagatgcaagagcagagggtaaaaagtgctgctgttgttacagatctcaagcctcgtccagcagaaaatgtgacagttgagagggtagctgtaaaaagtggatctgtaaagcagatgaaatcccctataacttctactccgctccctgggcccctccccccaaagtgcaacaaatagctttagtcaagaatttattattggtgaaggttctcttggccgagtttacagggctgattttccaaatggaaaggtaatggctattaagaagatcgacaactcagctttgtcattacaggaggaagacaattttcttgaagctgtttcaaatatgtcacgcttgcggcacccaaacattgtgacattggctggatattgtgcagagcatggccaacgacttctagtttatgagtatatagcaaatggaaatctgcatgacatgctccattttgctgaagatagcagcaaggatttgtcttggaatgcccgtgtacgcatagcacttggcacagcccgggctttagagtacctgcatgaagtgtgcttgccttctgttgtacatagaaatttcaaatctgcaaatatattacttgatgaggagctcaatcctcacctgtctgactgtggtttagctgctttgacaccaaacactgagcggcaggtatcaactcagatggtcggttcatttggttatagtgctcctgagtttgcattatctggagtatacactgtaaaaagtgatgtttacagctttggggtggttatgctggaactattgactggtcggaagccacttgacagttcacgggttcgatcagagcagtcacttgtgaggtgggctacaccccaactccatgatatagatgccttggccaaaatggttgatcctactttgaacggcatgtatcctgcaaagtcactgtcacgctttgctgatatcattgccctctgtgttcagccggaacccgaatttcgacctccgatgtctgaggtggtgcaagcattggttcggttagtgcaaagagcaagtgtggttaaaagacgaccaagtgaggaatctggttttggtcacaagaccccagaccatgatgccatggacatgtcattttaaatgtcatagtgcctctagtgatcttttgcaattttgtgcagtttcccggctaaaaaattactactacaaaaacactggaagtaaggagtagaaaagtttgtgaaaatgtatcatcaatcaaaaacaaattctagatactaattacgcgttggaatttttcacacaccatttaacactatggaaaataagctgtatattttaattgatttgccatgctgtaatataatgtaatttaattgaaagtccattactattattattattattattaatattatttcttgccttgatgc

SEQ ID NO: 1248 - DNA, 1368 bp, Glycine max
gcaattggtatacgtcgcatgcaccgtcgtagctcggctcgaggcacaattttgagaagatcaattcacagttttcttcaaaactacgtaggcccccccccccattattttacctcaactgcagcttttctagcccttcctttctccgcatcaatactcctatcagaagcttttgtgccagcctcttcatccctcttgcctcagatacacagtcacctaaggactctctttgatgccgcaggctttccttccacatcacaattgtttaccattctcaaccttaaggtttctcaaacaatcacttcctcaatcttcacccttccctttactctcacatttctcctcattgcaaaagcatccataattcaagctctaaatcaccacaaaccaactttgccaacttccttcacttccatggtgttccattacaagcctcttctacttacctacatctacaactctttcttcattctctcagcaaatgcatcttgcttttgcctcctctttttggccttcacctttgctgaagggctgggatacacttcaccaagttccacactttttatgtcagctgcagctgcagttctcttttctgttatccttgccaatgcacttgtgatttgcaacatggcactgacactatctggcatggagggacatggagggtacatggcaattctgaaggcctgtgttatgctaaggggaaggacatcaatggctttgttcctggcactgcctgccaatgtaggccttgctgccattgaggctttgttccagttcaggctcgtgagagcctatcacaatggtgaaatgtcatcatggccttttatggctttagaggccattttcattgcctatttgtactcagttttcatcaccattgacacaattgtgagctgcaagttttacaaaagctgcaaggtgggattgaggggtgatcaggaagacaagcattttatgaggattgaattcccagaggaagacagttgtggttacttggtattgaagaattttgaagaactacctaagtaacataaggtagcatattgttgtcatcaatcaatttggccaaggtttttctgcttattttctcaaaagggaaggagctacaagttattcaaaatatatagatgcatttgaaaattccttcatgttactgaaaccaaatcgagcaacaccccagggcaaaaaggttttcaacagaggaacctcagctcagctatgtgctaaaactaggagattgattccccattttactttaatgtatttcttttatgttgttaaaatgtcttctttttatcctatctctctaccttgtatatttattggtaatcttttacttgtgaataatacaaaggctcttgtctc

SEQ ID NO: 1249 - DNA, 1985 bp, Glycine max
aacaaagtcccactcaccaattccttcccttccttcccccctctcctctctctctctctctctctttctcccaatcaattcaattacaattagggtttgctgatccccttcctcttcttcccctcaccgcatcgtcttcctcttcactggatcaatattcctcccgctgtgcttgaattggataatcaaccttaaagctatatgttctgaggttgatgtgttacgtataatcttgttactgttctgagcgtatggaggggtgatacctgattgatctgggatgttgcgtagtaatctattctgattgattatgcatatctggaatgagttcaatggtcatattcttttattaatactgtgaactgtgctttatactttagtactggaaagaaggtacaaccaccagaggatttcctgtatccatgctgtcagagagcatgcgtggaatctgtacatcgggtaatgcccctgtcgagattttctgccgaggcattcggtgtggtgacgatatgtttagtagccatcttgattcttcttgggttgatgtgcattgcttactcattttacttccgctctcgtattcatagtcaaggtttggttcagctcaattattttagtggtccttggatcatcagaatcacattcatcctattttcaatctggtggggcattggtgaaattttgcgattatctttgttaaggagtacctttcacttaaaatggccggacactgtctgcaagtgctatattgtatcaaatatgggatttgcagaaccgtgcctcttcctcacacttgtatttctccttcgtgcacctttactgaatttggagactggaattatgagcagaaaatggaatgtgaaaacatcgggatatattcttctttactgccttccaatgtttgttcttcagctttttgttattttggttggacctcagttagacaagaataagggttctggaaaaatgttgcctcattatttttcaagtgcagtggttgcccctggggagaatgataccatcctctgtacttaccctttactcagcactattctccttggcctttttgccattatcctgacttcctaccttttttggcttggtagtcggattttgaaattagttattaacaagggtttgcagaagagggtttacacattgctattctcagtttcatgtttccttccattaagggttctttttcttggtttatctgttttatcaggacctgggcattttatgtttgaagcctttgttttcttggcttttcttgcactagtatgttgtgctggcttgtgcatgtgcacacttgtttaccgtccagttgcagattgcttagcgctgggaaatctacaagacttggaagcctggaggcttaatgatgatcataatgatactgtgtctctcattgctaatcagagtcttctggaagaaaatgctcggtctagtcctggtagatattctgatgcatcgacaaagcgtggatcaatttcatttcggacattggagaagggggtttcatcaactggaacatttgtagaactaagcctcttctctcccagccgcagtgcaacccctccaggatcgcctcctcttctaggttggcctatgcgatccccaacacaagttattggaccatagaggcaggcgggaaactgaatatgttgggtgaatatcaattttgtggaaaaaagggaaaaaaactgattgtaaaggatttagcttcaataaggcgtatttttttcttaatttttgttatgtttgctaattctaggtataatgtttttgccctggaattattgtgagtacctttttacatttctgtaccaacttgataacgttttacctgtttctaattttgtacttgaaatgttggaatactcttacttgaagtcattgagttacgactaaaaaaataaaaaaaaaaaaaaaatgggttattccaaactcaatttggagagaaaaaaaaaaaaaaaaaaaaaaaa

SEQ ID NO: 1250 - DNA, 1538 bp, Glycine max
atagctgccagccatcctgaattttcatctcagctacgtaggccccccccccaatttttcctacattttcttgatcaagttgagcgagctaatactgggaaaactgaactggatccatcgaggagtttcaaatttggtattgaagatagaattttgtgttcatctggaaaagttacatataatagaaggaatgactacattctttccctcaatatcccattacatgaggcaactaatgaagaagaattagaatcctttcacaaactgaaagcagagaaacttgcagaaggaaaggaaataaatgccaatgagattgtgcgcccaagggtacctttagaaacttgccttgtgaacttctcagctcctgaggagatacaagatttttacagtactgctttgaaggcaaagacaacagcactgaagactgcaggtctgacctcatttcctgattacctggtgttacatatgcggaggtttgttatggaggcaggacgggaacctaaaaagcttgatgtgcacattgatgttcctgatatcatagatatcagtcacatgcgcagcaaaggtcagcagtctggggaagagctattacctgatggtgttcctggagagcaagattctaacaaaatttcggccaacgaagaaattgttgcccagctggtttccatgggctttaaccatctccattgtcagaaagctgctataaatacatcaaatgttggagtagaagaggcaatgaattggttgctatctcacatggatgatccagacattgacaatcctatttccaaaggccatggctctgagacaattgttgaccaatcaaaagttgatattctaatttcttttggatttgaagaagaaattgctaggaatgctctgaaggcatcgggtggtgacattgagaaagcaacagattggatatttaacaatcctgatgcatcagtctccagtatggatgcttccccatcaaacgctgaatccactaccaatgatgttaacctacctgatggaggagggaaatatcgacttatggggattttgagccacagtggaacctctttgcagtgtggtcactatgttgctcacattttaaaagatggaagatgggcaattttcaacgacaacaaggtcggggcatccattgatcctccaaaggaaatgggctatctttatttcttcgagaggctttgattggttttaggcgctgaacaaggtgaatatttcaaccattaagaggcgcacgggtcgtttttgaatggcgttaacatgccacctacttggtgatatttatatatgttacccttttcttggtggcatggtaaacaatcctctagttggccgaatcttcttttcttggttctcagctgtattgaagcattttggaactttacattgcattcatcttctataaattgcatgtttaggaattcaaataacaatggagcaatggatggtcagttctaggaattcaaataactatacaacgaatgatctgttttagtgaatatttatacaacttcatttttctgatgtct

SEQ ID NO: 1251 - DNA, 1892 bp, Glycine max
gcgcacgcaagctcggaacctaagctcgactcgagccgttcacgaacaagaactctactattactattaatcaaccaaaatctctcttcactccaaacagaacacactagcgagaaaaaaagtgataagcccaaaaactctgcgttctctcacaaattaaacagcgtcactatcgcatagtgattgagttttgcggtgtactgtgttgcgaagtctgtgtatcagatttgtggacatgggtgcttatgatcaagtttctcttaagccattggattcttctagaaagaggaaaagtaggagcagagggtatgggactagatccgtggctgagactattgcaaagtggaaggaatacaacgaacacctttattctggcaaagatgatagtagaacaactccaaaggcaccggctaaaggttcgaagaaagggtgcatgaaagggaagggaggacctcaaaactctcagtgtaactacagaggagttaggcagaggacatgggggaaatgggttggtgagattagggagcccaatagaggaagcaggctttggttgggtaccttctcttctgcccaggaagctgctcttgcctatgatgaagctgctagagctatgtatggtccttgtgcacgcctcaattttcccggcatcacagattatgcttcttttaaggaatcgttgaaggaatctccgatggccgcatcgtcctcttgttcttcggcagaaactgcaacatctgacactactactacatccaaccaatcggaggtttgtgcagctgaggatgttaaggagaatcctcgacttgtcaatgtgaatgataaggttaacgattgtcataaggcttatgaagctgcctcaccaactagcagaatgaagcaagagcctaaggatgaggctgtggatcacatggtccccggggctgggaaaattctagatgtcagaccagaaggaacacatgatgccgggcaggttgcagaggatgtaaacaaagatcagatggacttgccatggattgatggctttgattttagtgacaattacttgaacaggttttccacggatgagttatttcaggtggatgaacttttggggcttatagataataacccaattgatgagtctgcgttgatgcaaagtttggattttggacaaatgggttttcctggagatggtaatcctcaggtggatgatacgctttcaagctttatttatcagttgcaaaatccagatgccaagttgttgggaagtttgccccatatggagcagacaccttcaggttttgattatggattagatttcttaaaaacagtggagtcaggggattataatggtggaggggaagaaccgcgatttcttaatttggatgatgatctgaaccctgattcaaagggcatgcaagcaaggaaggatgactagagaaggcgacgtgcataagtctatcatctgcctcattttcaactggttcgagcatctgctagtaatctgtctcttaggttgttgtcccctttttagctatatacaggtgcataagaggaatacaactatacaactaatacaagaaatttgatttgtttatgttcttttaatatgctaattctctgtaagattttttaaaatggagaatttagctgtgacaatatttgttaattctttttacttacatgttttttgggattcaaattggactgcctttaactacataggtggagctgaggagtagactgtttgaagtcgtttggctgactatagttgagcactgatttggatacaaaatttctttgttatgtaccatggagaactattatatctcgagtatattatatcgttgctcaaaaaaagaaaaaaaaaaaaaaaaaagtagtggaatgtatatatatataataactattct

SEQ ID NO: 1252 - DNA, 1215 bp, Glycine max
cctcgtgccgaattcggcacgaaataagcatagagagaaaaaaagatgcaatatccttagtccacacccacccaccgaccccattccccggtaagaatgaagagaaggcgaatagcaacatgaagagagggccaaggaggatgaggacaaaatggtccatcaaataaaagaatccaaacgcattgatttctctctttgtcgtcttcgaaaaccatcaaaaacaggtgcaccccctaatgaccttaacctttagttcacctgccccattacccatccttgcattgctttcccatttccgttaccgttatcctcacttctctctctctcaacctcttatttatttattaaccctttattccacccctttcctctcccttcatcaagcacccaactttctgccacccccacaaaagggtgcttgcgtttctttctgtgatctcaaccatgaagcgtccactcacaccttcagccagcggcatgaagactaacaagaaagccaaggcgatggaaaatgacgaagacgtggaggggctggggcgtttcgacgacaaccttctgttcgaggtgttgaagcacgtggacgcgcggacgctggcgatggcgggatgcgtgaacaaacagtggcacaaaactgcgcaagacgagaggctctgggaactgatctgcacaaagcagtgggcaaacacagggtgcggtgagcaacagctgcgatccgtggtcctcgcgctcggtggcttccgtcgcctccacgcactttatctcttccctctctccaaacctcaacaactacaacaactaacatcatcttcatcctcttcctcttcctcctcggcctggggccccaccgtaccgcagatgattcgatcgaaaccgctacgtttggggaaagacgaggttcacctctctctttcgctcctctctattcgctactacgagaagatgaatttcaataacagaaccaccagatgattgatcattcttcttccataatccatccaccatccgcgtgttgttttttgttactattaatcaaacctaatctcggatttggactcttttttttccttaatttgtgcgatttatagatttcagttgccagatctgctttttattcgggcaattagtctaagccggacgtgttctgtaacttgtatgtactttgatttgataaatatataataatatatatgaattttgggatctaaaaaaaaaaaa

SEQ ID NO: 1253 - DNA, 1092 bp, Glycine max
ggagagagagagagagagagacggaggaagtgacagactggcattaaggaggttaagcattctctgtctctctctttattgctgcgtgtagactccaggggggcattcttcaaatttttggtttttgtgattttgataggacgaccctttggtgtttggatcttcaagaaagagagacccttgggatttcgtcaccatgagtctcttcggtcttggaaacagaaaccaaaaaacatttcgtccaaaaaagagtgctccatctggaagtaagggtgctcaacttcaaaaacacatcgatgccacgttgggtagtgggaacttgagggaggctgttaaactgcctcccggtgaagatattaatgaatggctagctgtaaacaccgtggacttctttaatcaagtgaatatcctgtttggtactcttacagaattctgcacgccaagtaactgcccttcaatgactgcaggaccaaagtatgagtatcgatgggctgatggtgttactataaagaaaccaatagaggtgtctgctccaaaatatgttgagtatttgatggactggattgaatctcagctagatgatgaaacgattttccctcaaagattgggggctccctttccaaccaatttccgagatgttgtcaagacaattttcaagcgattattccgtgtatatgctcacatttaccactcacattttcagaaaatagtgagtttgaaggaagaagctcaccttaatacttgcttcaagcattttgttttatttacttgggaattccgtttgatcgacaaagcagagttggcacctcttgaggaccttgttgaatctattgttcagttatagtgctgttggtgttttctttccctgatttttaggagagattaaacattggaaatgttggctatacatttttgtgaccccttgtaaaatacttgctaaatgaaaaatctttatcaaccccttatgtatttggctcttaattgttgtgatggttgctcaataacaataataatcgtgtgaatctagcgaaaacctccttgtgaggcaagggaaataatagatgcaattggcgctttatataaaaaaaaaaa

SEQ ID NO: 1254 - DNA, 1407 bp, Glycine max
gaagagaaggccaaagaatcgaaacgcattcatttctctctttgtcgtcttcgaaaaccatcaaaagcaggtgcaccaccctaaccttaacctttacttcacctgccccattacccatcatccatccttgctttcccactaaccctcccatttccgttaccgttatcctctcctctttctctctctctcaacctcttatttatttattaaccctttatcccgttcctttcctctcgcttcaccaagtacctaactttctgccaccgccagacccaaacggcaaaagggtgctttgattcgcattctgtgatctcaacgtcgcattcttttatctcaacgatgaagcgtccactgtcaccatcagcgagcggcgtgaacgttgaggacaggaagatgaagaagaaggcgaaggcggtggaaaatgaggacgataacggggagcgcgtggaggggctggcgcatttcgacgacaaccttctgttcgaggtcttgaaacacgtggacgcgcggaccctggcgatgtcggggtgcgtgaacaagcagtggcacaagacggcgcaggacgagagactctgggaactgatctgcacaaagcagtgggcaaacactggctgcggggagcaacagctaagatccgtggtcctcgcgctcggtggcttccgtcgcctccacgcgctttacctcttccctctctcaaagcctcaacaaacaccatcttcttcatcttcatcgacctcgtcctcttcctcctcggcctggggccccaccataccccaggtgattcgatcgaagccgctacgtttggggaaagacgaggttcacctctctctttcgctcctctccattcgctactacgagaagatgaatttcaataacagaaccaccagatgattgattgctctgctcattcttccataatccatccaccatccgcgtgttgcttctttttttattactattaattaaacctaatctcggatttggacttctttttttttttttaatttgtgcgatttttagatttcagttgccagatctgctttttattcaggcaattagtctataagctggatgtgttctgtaacttgtatgtactttgatttgataaatatataacaatatatatgaatattgggatctaaaaaaaaaaaaaaaaaaaattttaaaactaaaaaaaaaaaaaaaaaaaaaaaaaaaaaattcgggggggggccgggccccaattgccccatttaggaagcgtatttccccccccccatggccgtgggttaaacaacgaggaaatgggaaaaccctggggttaccccatttaaatcgcttggggaacatcccctttttgccaattggggtaaatgcaaaaaaggccccccccaaggccctttccaaaatttggcccacctaaatggg

SEQ ID NO: 1255 - DNA, 934 bp, Glycine max
ctcgagccggacccgcgcgtctgcggacgcgtgggcggacgcgtggggacacgcaaaccacgcactctctctctctctctctcctcttgaagccctcaaaggctcaaacacaaacactaacactaacactagcattcactcaagagatcaataatgggatctggggccggcaatttcctcaaggtgcttctcaaaaacttcgatgtgcttgctgggcctgtcattagtcttgtttatcctctatatgcttcaattagggcaattgagagcaagtctcctattgatgatcagcagtggctcacttactgggttctctactccttgatcaccctctttgaacttacttttgctaaagtccttgagtggattccaatatggccctatgcaaagctgattgcaacctgctggttggtccttccttactttagcggtgccgcttatgtttatgagcattatgtgagacctttctatgtcaatcctcagaccattaacatctggtacgttccaaggaaaaaggatgccttgggtaagcgagatgatattctgactgctgcagagaagtacatccaagagaatggaacagaagcatttgagaatatcatcaatagggctgacaaatcaagaaggggtgacggttattatacaatgtatgatgagacttattgaatgcgatcatctcgtagttttctctgtctttcgtggataaggggatgcatgtacatcttaccctgttgctgatattttgtttttccttctccatggtgatactttacttttttttttcatccctttattgagtttttattgtcactcatctatgttttgtgtaatggctatgacacgcatagtatatatatataatgttagtacagaaaaaaaaaaaaaaaaaagggccctccctatattatatccccaacagaaccccttcattgct

SEQ ID NO: 1256 - DNA, 1655 bp, Glycine max
tcagctacgtaggccccccccccaaaaaaaaaaaaaaaaaaaaaagagaaaggaaaaagatgggtactcaaacaacactttggtgtagagcaagaactactataagtgtaggaggtgattggaagttgttcgaatccagaatccgaaaaaagggcaccaccgtgtcaacaagtagaagcagaagctgtttttgttcttcgccgctgacactaatcgtttcttcaatgccttacgagaaggaattcgccgctgcaaaaaaagcagccactctcgctgctcgtctctgcaagaaagtacagaaggctcttctgcaatccgatgtgcactcaaagtcagacaaaagtcctgtcacagtggctgattatggttcacaagcattggtcagctttatacttgagagagaacttccttctgaaccattttcattagtagctgaggaggattcaggtgatcttcgtaaggagagtggtcaggatacgctgaagcgcattacagaacttgtcaatgatacccttgctagtgaaggatcaaatagcttttctactttaacaacagatgatgtgcttgcggccattgacggtggtaaatctgaaggtggttcagttggacggcactgggttttggatccgatagatggtactaaagggtttgtaagaggagatcaatatgctatagcgttagctttactagatgaaggcaaagttgtattgggtgtcttggcttgtccaaaccttccactggcatccattggctccaatcagcagctttcttcttcaaatgaagttggttgtctcttctttgctaaagttggtgatggaacatatatgcaagcactgggtggttctacacaaactagggtgcatgtctgtgatattgataacccagaggaagcatcattttttgaatcttttgaagcagcacactcctcacatgacttatctagctccattgcagaaaaactcggtgtcaaagcaccaccagtcagaattgatagccaagcaaaatatggagctttgtcaagaggagatggggctatatatttgcgtttccctcacaaaggataccgtgaaaaaatatgggatcatgctgctggcagcattgttgtgactgaagctggaggtatcgccatggatgctgcggggaaccctctggacttttcaaaaggaaagtttcttgatgttgtatctggtattatcgttacaaaccagaaattgaaggcatcgcttttgagagcagttaaagaagcactcaatgagaaagtttcatccttgtgatctccattaagcgaatgattctacaaatgagcttgctaactttgttgtcggctcgttatatgggaccttcccctctattgtgctatatttcattcgtgatctgataaagttgaataaatgatgggacttcctctgatactttctttgtagcagatttctgctctggtttttttgcagatgctattttcttctccttaatacttgtctttttctctccttttctgttagtaaacagagatgagaggtcttcttttaagcctgtttgaaaattaattcttcttcattactttgtgagaggtgatgtatttcaaaatttcaatatatattagtccaaaaataacctaaaatttagttatcaaatatcaggaaaataaggatgcc

SEQ ID NO: 1257 - DNA, 3001 bp, Glycine max
tcgccccgccgcttctttttctctctctttcctctgttctttttttttgccctatctattagggttcccgcggattcaaaccttaattcttctattactctctttctctcatgcgttcttgctctcaacaacaatcacacaccgccatcgaagccttcgttcttttcttcttcgttctcctttttgctctcgttcgagggttctttcgtggggaacactgcagatttcaccacccgggtcttattcatccgtgcccatgtccaaagttctcggcttttccggagttgacgatttttgccctatgggatcaatatacgccaaccccaaggaagcaagtttcttcttgtcccttggccctcaagttgatgtatactttcctcctcggaagagatcgcgtgtcaatgctccattcgtttttgatggagaatggttcgagcaaaagcagaaaacctctattgaagccttgccagatgagtgtctctttgagatctttagaaggttgcctgctggcgaagacaggagtgcatgtgcctgtgtttccaagcgctggcttatgcttctaagcagtatttgcaaaagtgaaatctctgttaacaaaaataccacagtagagaaccctgaaaaggagggtgatgatgtagaatttggaggtaagggatacctctctcgaagcttggaaggaaagaaggcaacagatgttagactggctgccatagctgttgggacttcatctcgaggaggattggggaagctctcaatccgtggaagcaacattgtttgtggggtgactagtcatggtctcaaggctgttgctcgtggatgcccttctttgaaggctctttctctatggaacgttgctaccgttggtgatgagggccttattgagattgcaaatggatgtcaccaactagagaaacttgatctttgcaagtgccccgcaattactgataaggctttggttgcaattgcaaagaactgccagaatctgactgagttgtcattggaatcttgccctaacattggcaatgaaggtctactagctattgggaagttgtgctccaatctaaggttcatatccatcaaggactgctctggtgttagtgatcagggaattgcaggattgttttcttcaacttctttgtttctaacaaaggtgaagctccaggcactgactgtttcagatctctctctagctgttattggtcattatggcaagtcagttactgatcttgtccttaattgcctcccaaatgtcagtgagagggggttctgggtcatgggtaatggtaatggattgcagaagctaaaatcacttacagttgcatcttgcaaaggagtaacagatattgggcttgaagctgtaggaaagggttgtccaaatctgaaaattgcacaccttcacaagtgtgcatttctgtcagacaatgggttgatatcatttgccaaggctgcttcatcacttgagagcctacgattggaagagtgccaccgaattacccaacttgggttttttggtgtcctttttaactgtggtgcaaaattgaaggctatctctttggtgagctgctacgggatcaaagatctgaacttggtgttgccaacagtatctccatgtgaatcacttcggtctttatctatcagtaattgccctggatttggcaatgcctccctctctgtattgggaaagctgtgccctcagcttcagcatgttgaattgagtggactcgagggagtgacagatgcagggcttcttccactccttgagagttccgaggctggtttggttaaagtgaaccttagtggttgcacaaacgttaccaataaagtagtttcgtccttggccaatctgcatggttggactcttgagaatctaaaccttgatggttgcaaaaacatcagtgatgctagcttgatggcaattgctgaaaactgtgcattgctatgtgatctcgatgtctccaagtgtgctataaccgatgctgggattgaagccctggcacatgctaaacagattaatctgcaagttctttctttgtcaggttgcactttggtctcagacaggagcttgcctgcgttgagagaattgggtcacacccttttgggactaaacatccagcactgcaatgcaatcaacagcagtacggttgacacacttgtggagcttctctggaggtgtgacatcctctcctgagctgaaagaaaaactaatctcactgcaatttaggccaggatcacatcagcaggaagcttgttatgctcagtgttgcacagtagttttttaggtccttaacaggtcttcatcgtccagtgactcggttcctttttaccggagtgtgcagtcatttagccctcatttttgcaggttccttcaatgggaagcctgttctttttggcatccattttgcccccttttaaatggctgcatatctgagaacatagctaccgggttctggagtgtaggaatctttgttactggtgttggcacctgatgtttttagctcagctttgcattggttttgccaccatgtgtgtcttagttttctaagtttttacagctagctgtaccactgtatcagtctttgtttaccaaatgtttcatgtgtttgaactatgttcttcacatgatgtttgggtatcagttttactcacagggcaggttagaagttgcagtgtcatgtgctgttattagcgtggttgcagttgtcaagttcggtgttatgaagccttgtttttagggactggctgtggcagcaagttatacaggtctgccataaccacgaccttttttcccctttgggaagggttgtgtttttttaccaagtcctagtttttttaaggcttcattttttttgaacttggcactgcacctccttattgtctaatgatattcatacctgcccttgtgctgtatgttatgaaatgtaatgaaataaataaaattcagtctcattcctagttgcttgaacagatgtgatgatatatatttctctatactttgatt

SEQ ID NO: 1258 - DNA, 2509 bp, Glycine max
  misc_feature (628)..(628): n is a, c, g, or t
  misc_feature (2382)..(2382): n is a, c, g, or t
taaagaagggtctggaaaggaatccccacgcgtgaggtgaacaaacaacgaaaccaaaccaacgcttcccactccaatttctctgaattttctttcgcttcttattcccaaactctgtgatttagcacgaaatttcatcttcagcttgaagattagataacgtgtgggatggatttggtgaaaatgatgatcatagagtgccccatgctagtgacaaacataataatcaatttgtaatacaaggagatagctgtaagaaaacacgtcttgaattacatggtatcagaaatagtgattatgtgaatagctacggtactcagggtaaagaggaattgtacttagaaaatatgattcaaaaagaaagaatgctggaaaaggattcatggtctcacacacctgaaggtgtgttttcttcatgtggtagtgactcaagcaaagaagccaaaaggctaacatcagatgacacgggcatgcccgatcactgcttcaagagcagtaatttagattctggtggttgtgagctctgtgaagatgatattatcttgggagacaagtgtgtggtggaaaatgatagtgtctgtcaatatccaaccagtcacatatcccaagttgacaatgaactcagttntcttgataatgatgggtggctggatataggagactttgaagatgttgacaggatgttaagttgtgatttaacatttggagcgggaagtctcaataacgaagaggagttttgctggctctcatcttctcatggtgctgaagggtctgatgatgcattgaagtctgacttcaagttttcatatgcagaaatgagtccattgaaaaatatatcagattataatatggattccaaggaaagtattgtaggtcttccgatctctgctccctacccccccccccctgctcttgatgaaaaaatcaggtctcaaatggatgttattgacaatggtgtccctgctccattatcaatgttcagtgagagtgattcagacatgaaatctgttaatatagatgacttgctgcccaaagaaaagctgcagaggaagttgccaaagccatcagcgggaaggcgaaaaaatggttacctacaaaatggtggttctgtgcatccttatgctgatccagagcaatgtgcagatacaaagcaatcctttggagcctcttccagtggggttacttctcttgatagcatccagaaacataagttgaacatagattctgattctttaggctgtatacagacacaaattcctatgacacgccctgactatagtcatgctccaaatcacacttccctctttccgactttgtctggatcaagatctgagcatgatggacatctgtctccttctcttaaagaatcatcttatgcatcaaacatggagagttcccatggtcattctttggaggctgcggccttgaaaacaaaagagaatagagaaaagttgtataattgctgtgatggacccctaaatagtagtttcaaaaatgaaaatacaccaaatcaaatgccattttgcagtccgggttcagctcagcaagtaggtcatcattttgaaaatgaaaatgaaggtcatagtgaattccgaggagttggcctaggcttttcaccagaaatagattcatcaacagtgcaggaaagctcatccatgggctctgctctggaccaagcttcacttgaagcaactagcttttgccacctgcaacagatcatggatcagttggatattaaaaccaaaatgtgcataagggacagtctataccgcttggctaagagtgctgagcatagacacaataattcaaatgcaaatggttgcattggagatgatgaaacatgcaaagcaatgatggcgcaggatgcaaacaggtgtgccggattaatggatatggaaactgacacaaaccccattgatcggtctgtagcacacttactgtttcacaggccctcagatccatcggtgttgcttcctaacgaaactttacctttcaaatccagtgccacgatgcataatggatcagtgatcaatccaccagtaaagactgagaaacaggtctgtcaggaagattctactggagtggaaaaaaaggttttacagggtaacacctcatgaaagtgaaaccagcgttggcgcatttcgtcgtacaatttatactttttcggtcatcgtcgtatatgatgatatataattatttcgggcttactcggatgcctttgttaatttgtgaatcatttttgcatcggatgccatgaaactaatgtaaatttgtgctaatcaaatcatcataaggtaatgatttagtgtaatgctactacgctcgcaactattttcacaagaaagatcacaattatcccgcgcagcccatgactcactcatnaaattaatatttttttggccccacctcaccaagttatttgtttttttggcacacacttatcagattaatttaacactagcgtcacttgattgccccatttgttttttggaatgaaccctttctcatg

SEQ ID NO: 1259 - DNA, 1228 bp, Glycine max
  misc_feature (1211)..(1211): n is a, c, g, or t
  misc_feature (1213)..(1213): n is a, c, g, or t
  misc_feature (1220)..(1220): n is a, c, g, or t
ggtttggatcctcttccagtggggttacttctcttgatagcatccagaaacataagctgaactcgggttccgacgctgggccccccccacagacacaaattcctatgacacgcccagactatagtcatgctccaaatcacactcccctctttccgactttgtctggatcaagatctgagcatgatggacatctgtctcctcttaaagaatcatcttatgcatcaaacatggagagttctaatggtcattctttggagcctgcggccttgaaaacaaatgagaatagagaaaagttgtatcattgctgtgatggaaccctgttaagtagtaatttcaaaaatgaaaatatgccaaatcaaatgccatttcacagtctgggctcagctcagcaagtaggtcatcagtttgaaaatgaaaatgaaggtcatagtgaagttcaaggagttggcctaggcttttcaccagaaatagattcatcaacagtgcaggaaagctcatccatgggctctgctctggaccaagcttcacttgaagcaactagcttttgccacctgcaacagatcatggatcagttggatattaaaaccaaaatgtgcataagggacagtctataccgcttggctaagagtgctgagcatagacacaataattcaaatgcaaatggttgcattggagacgatgaaacatgcaaagcaatgatggcgcaggatgcaaacaggtgtgccggattaatggatatggaaactgacacaaaccccattgatcggtctgtagcacacttactgtttcacaggccctcagatccatcagtgttgcttcctaacgaaactttacctttcaaatccagtgccacgatgcatcatggatcagtgatcaatccaccagtgaagactgagaaacaggtctgtcaggaagattctactggagtggaaaaaaaggttttacggggtaacacctaatgaaagtgaaaccagcgttggcgcatttcgttgtacaatttatacttttccggtcattgtcgtatatgatgatgtataattatttcgggctaactcggatccctttgttaatttctgaagcatttttgcataggatgccataatactaatgtaactttgtgctaatcaaatcatcaaaaggtagcatacgatgatttagtgtaaaaataaaaaaaaaaaaagaaaaaaaaaaaaaaaaaattctagagaagntnccatagncttacgta

SEQ ID NO: 1260 - DNA, 820 bp, Glycine max
ggtccggattccccgtcgacccacgcgtcctctcttttgcgtttcgatgggacccttcagtttctgcacacaccatcataccttttaaaatcttcacgaatcagcaaaatcccctcacacactctcttcctcccaaagatcttttctctttcgatattttatctctctctcttttcctcatggctgagaacttggacgacggcgagttctggctcccgccgcagttcctcgccgacgacgacgttttgccgacaccctttgaagcaaagttcccatctttgcccgacgacactgttttgttcccctccgagtggccgtacggttccccagttgattctaccgttggtggctccagtgagaccgagagcgacgaggaggagcaactcgtcgctgagttaactcgccgcttaactcgctcctctcttcaatctgataccaagtctgcgggtcggtttgtgtctagttctccacaatccacgctttgcgcgttcggaagtgggtgtggttgcggcaaagggtcgagccagggaagccctgatggtgtttgcaagttgtcctctgcgaagaccacttgggatctgctgcatgcggctgcaggggaagttgagaggatgaggttgaagcaagaaggttatgctttcaaccatcaaaatggaaacctcattccccaaagaaaaccttctccagtcatccctttaccctccaaaaccaccacctcaacgccaaaccctgatatgggtggtttctacacgcaacaacactcactttctcaccagcgattgcagatagcacaagtaagaaaatccaatcacacccttaa

SEQ ID NO: 1261 - DNA, 735 bp, Glycine max
agcgtcaaaacacgccctggggttgtcgcccgcttcccgcggcgcctagactggtctctcttctacgacgcacgcagcagcatcagcttctactcgtgtaatctctgcgtgggctacaatggattccggtgtccaaggttgcatcttagccactttaattctccacgacgaggaaatcccagtcaccgctgagaagatcaacgctctgttgaaggcttctaatgtctccgccgagtcttactggcccagcctcttcgccaagctcgcccagaataagaacatcgaagacctcattttgaacgccggcggtggtggggccgccgttgcagttgccgctcccgccggcggtggtggtggtgccgctgctgcagccgcacccgccgccgaggaaaagaaggaagaagtgaaggaagaaagtgacgatgacatgggtttcggcttgtttgattagatctttttatatagttgtagccagattttgagtctttgaattgaaatcttgttttgttctatataatttttattgaagggattcttagccaatctactatcataattgttgaattttggtggttttttaatatatttgtggcaactaaattcttatttacctgttaaaaaaaaaaagggcgcaagctaatccacttaatgaggtaataatagcaggcgcagcccatccttaacacatcggaactgggaaagcgtggcgttagcgtctgtgattcctggcgacga

SEQ ID NO: 1262 - DNA, 2482 bp, Glycine max
atcacgagagccagtccattgcttggatggctcagagtgccagggagaaaggtgctaaagtgcatagtgcatggtttaaatggccaaccctcaaactctgctccactgatttgaggaaacagatttccaataagaagaagaggaagaaggattcagccacctgccagaagacgacagaggggcagtctagagtgactggggctaagtattcataccagtggatggccttggcccaacagaacaactggcatgtcttgctggatgctggatcattgggccccaaggacatggattcccttggcttgtccctatttcgtccagattttatagtcacatcattttacagggtttttgggtatgatcccacaggttttggttgtcttcttatcaagaaatctgtgatgcaaagccttcaaaatcagtctggttgtactggatctggaatggtgaagattacccccgagtttcctatgtatttgagtgattctgtagatggtttggataaatttgttgggattgaagacgacgatgaaatcactgggattggtgataagacgtctgaaactcgtcagggaacacagttgcctgccttttctggtgcattcacatctgcacaggtcagagatgtgtttgagaccgaaatggatcaagacagttctgaaagagatggaacgagcaccatatttgaggagactgagagcatatctgttggagaggtgataaagagtcctgtcttcagcgaggacgagtcatcggacaactccttttggattgatttgggtcaaagtccgttgggatccgacagtgctggtcaatcaaataaacacaagacagcttctccccggcccccgttctggtttaacgggaggaggaaccagaagcaacattctccaaaaccaacttccaagatgtatggcagcccgatgtatgatgacagagaggtaaacctaggtgctcatgaggaccgccgcgtgctgtcatttgatgctgcggtcctgatgtcacaggaactagaccgggtcaaagaggtacctgaagaagagcatgtcgaggaagttgatcattattcaagacggctcgaggggtcagatcatctgcatgtcgatgagatcgtggaagaacctggaaccagtgaagctgtcaataatggatcttggctcaattcaacttctcttgcccggcatcaaagcttggagaatggctctacctctgaaatatgtcctgatgtcaaagagagtgccataagaagggaaactgaaggtgaattcaggttgttgggtaggagagaaggcaatcgttacggtggtggtaggttttttggtttggaagagaatgaagccaacagcaggggaagaagagtgtcatttagcatggaagataatcgtaaagagtacctaagccaggccctagagccaggggacatatctgcaactagctttgatgatgaagaggtcacaagcgatggagaatatggtgatggacaggactggggcaggagggaaccagagataatatgtcggcatatcgatcatgtcaacatgcttggtctcaataaaactacactacgacttcggtttttgataaattggcttgttacctcgttactgcaactgaagttgcctgcttctgatgggggtgaaaaagcaagtcttgtccaaatctatggtccaaaaatcaaatatgaaagaggtgcagctgtggctttcaatgtgagagacagaagtagggggctaatcaatccagagattgttcaaaagcttgctgaaaaagaaggaatctctcttggtcttggttttctgagtcatatacagattcttgatggctcacgacagcaccgtggagctctgaatcttgaagacacaactctttgcaggccaatggagaatggtcggcgcgatggaaaaggtagctttgtaaggcttgaagttgtcacagcttcactgggcttcctaactaattttgaggatgtgtataaattgtgggcttttgtggccaagtttctcaacccgacatttatcagagaagggggtcttcctactgttcaagaaggctccgagacatgagatggcagagttgcccgtgactttattcaattttggaaactgaacatgaaatgaaagattatgtgacaggttgccaaaaggggccgcagccgaagctgcaggaagaatggattggttcatgatgatctgtaagacccctagatagacacaaacttattttctgcatcaaaggaagataaggcaagcggggtggatttgttaattcatgtttcttgttgcttacatttttattatttttccccttttgttttttgagctgcttgtagagttggctttagaaagatttgttacatattgggaagtcatggtgtaatttgaagcaaatattgtatgggtagaacttctactgatatatatactaagcttccattgcatacgaaaggatttccaacttctgtaaaaatgtagctttcattggc

SEQ ID NO: 1263 - DNA, 1450 bp, Glycine max
attaacctatgtacacataatcgaacttctcaatttcacgaaaacccctctctatcccttttcgtggaacccatttcccatctcccccttccaaataagaatgaatgcataaagtttggtggcatctgatcctttttcgatcccaaataacagaagagaatgagagtatcactggtaggtttgattatttaacagaaaaacggttggaaaatgggaggttgctgttgttctgccaggaaacctcacctgcatggaacgccagtgtattactattgcccaccaactttagaagagcatgagtctttaacgtctaatgatggtacggctacgtcactcactactggattgctggtaggcttgaacctggaaacttccacacctgatacataccatccccctcctgcacctctaccttatgatatggtcctgggaggtccagcatcaacagattctgaatcaggcagagaaacagttagtggtagtagctttgaaacattaattacatgcaaagatcctgaagaatctgactgtaaaattaaagctaattcagcacctatatctccaagcaaggctggattgtcaaaatctaaagaatttcatgcattagtaacagaagaagaggacggctgtccaatttgtcttgaagagtatgatgttgagaatcctaaaactctgacaaaatgtgaacaccactttcatctgtcttgcattcttgagtggatggaaagaagtgactcctgtcctatatgcgatcaggagatgatatttgaccagacattgaactagttctgttgtttaaaaaagaagagcttgctaaatgcgtgaaagatagatgaaaactaattgtttgatagctggtttgaagatagtacaaattcattttcaattcctagagcatttaaaagctcttgttttaatggacccattcattgtgtgtacaatatgtgagaagaagaatgagaaggttttgacagaatgctacaccacattacatgtctctgagtgcaatttctcatgtcagaactcacctattatcaaagtgaaagagtgaagcttttctcaagaagaaactcatgttcccagaatggcttcccctccttccccacccccatgtcgctttgctgctctctctccattttcttgtacaaatttctcaatatttatttgtttttctatgttattttctgagaggaaaaaaaaatgcatactggtcttgtaaatcaagtctgctttacattttgccacattttcaatgtatatatcgtggtggatgttgttggggatcccttcttttgttgtatacactggacccctttgttttaaattgaaatctcttctgcttggtggcaaaaaggggttattgtgaacattgttaatcagtgtagattctgctggttttgctgttaaacagtgatctcaaaatttgttgttttcctatggtggaagttgg

SEQ ID NO: 1264 - DNA, 1282 bp, Glycine max
aatattcaaagatagagagaaccataaccaaagccatagcatgagccaccttcctgaaacccaattccttaacagtttctcacccttctcttctcttctcttcatctactcttttcaaaaagaatagatgcatgaagtctggtgacctctgatctgattccctcttgatgtcaaacaacagaagagaacgaaactatcaattatttatttcattaagtaaaaagaattagtggaaaatgggaggttgctgttgttctgccagaaaacctcatctgcaaggggcaccagtatattactattgcccaccaacttttgaagagcgtgagtctttaacatctaataatggcacgaatgcttcagtcaatgctggatttctcattggtttgaacctggaagcatccatgcctgatactttccagtcccctcccgtgcctctaccttatgatatggtcttgggaggttctgcatcaacatattctgaatctggcagagaaacagttagtagttttgaaacttcaattacacttgaagatgttgaagaatcagattgtaaagctcaagccaattctgctcctacatctccaaagaaggcacaactatcaaaatcaaatgtaactcaagaattagtgacagaagaagaggatgtctgtccaatttgtcttgaagaatatgatgttgaaaatcctagtaatttgacaaaatgtgaacaccattttcacttatcatgcattcttgagtggatggaacgaagtgactcctgtcctatttgtgatcaggagatgatattttgaccagacaatgaattagtttgattgttcaatcaaagcttgttaaatgaatggaagatagatgaagatcattgtatgataactggttagatgatggcaactacagattcattttcgattggtggtgcattgacaaagtcatcattttagtaggcccagcctttggtcacgaggttttgacggaatgccataccatatgatatagcatatctcttcaaatgcaattcctttggtcagaatttgcccgttattattagtgtgaaaaaatgcggcaactctgtagatgccaacatttattttcccagatgcttttctatttatttactgctctccattctcttttgtaaaaaaattctcaatatttatttgtcatgcctgatttacattttcattgtatatatataccctagtggattcttggggttcagtgtttttgcaataagtacttaattatcaagtatacaataagacccttttcctattaaattttattc

SEQ ID NO: 1265 - DNA, 714 bp, Glycine max
cccacgcgtccgcgaacttcttaatttcacaacctcccctccctctctcccttttcgtggaacccatttcccattttcccctttccaaaagaatgaatgcataaagtttggtggcgactgatcctttttcgatcccacataaccaaagagaatgacaatatcactggtaggtttgattatttaacagaaaaggactgctggaaaatgggaggttgctgttgttctgccaggaaacctcacctgcatggaacaccagtgtattactattgcccaccaactttagaagagcgtgagtctttaacatctaatgatggtagggctatgtccctcactactggattgctggtaggcttgaacctggaaacttccacacctgatacataccagtcccctcccgcacctccaccttatgatatggtcctgggaggtccagcatcaacagattctgaatcaggcagagtaacagttagtggtagtagctttgaaacattaattacatgcgatgatcttgaagaatctgactgtaaagctaaagctaattcagcacctatatctccaagcaaggctgaattgtcaaaatctaaagaatttcatgcattagtaacagaagaagaggacggctgtccaatttgtcttgatgaatatgatgttgagaatcctaaaactctgaccaaatgtgaacaccactttcacctgtctttgcattctgagtgg

SEQ ID NO: 1266 - DNA, 1128 bp, Glycine max
catttttgcagcttgtcctcgggacaatgtctcattctttttcctttttccgcaatttctcttgttaaattcacacatactagtattttcatcatcatcacttccctgtcagtctctgccttccattccctgtcgtattcttccccaatcaagctctctactctttactacccatttcccttcctttaaagtaactcgaaacggttttcctttcccatatgcctgacgccaaaagattcctccatagtatactccaaatccaaatcagcctcgatcagcctcacaacaacaacataggattatactaactattttcttgatggctcaagacatcctcagaatcatacccactctcctctctgcagcttcaatcgccgtcatggtcaccaacaaccaaaccgttctcatcttcgctatccgcttccaagcccacttttattactcaccctccttcaagttttttgttgcagcaaatggtgtagtcgttgccttgtctttgctgacactggtactgaactttctcatgaaacgtcaagcatcaccaagataccatttcttcctattcttgcatgacattgtgatgatggtgttgttgatagctggatgtgcagcggcaactgcaataggttacgtggggcagtttggagaggatcatgtgggttggcagccaatatgcgaccatgtgcgcaagttctgcacaacaaacttggtttcccttttgctctcttattttgctttcatttcctatttcggaatcactcttttatcagcctacaaaatcgtctcttcttctcccaagaactaataatcaaatcaagtcaatataccaccaacaacaacaacaacaactaccgttaccaacaacttgtctagctagctacaatgatgagggccatgagggggattaattaatttatactatataatcccatgttactataaatgttgtgcatgtattttttgttacaaaattgttagtttggtgtgtgtttatcaatgctttttttggtatggttataaatgctataacatgtaaagtaggagttaaagaaaatatttaccaataataatcaagctttgttttaagatcctaaaaaaaaaaaaaaaaaactcgagactagttctctc

SEQ ID NO: 1267 - DNA, 1882 bp, Glycine max
  misc_feature (1735)..(1735): n is a, c, g, or t
  misc_feature (1790)..(1790): n is a, c, g, or t
  misc_feature (1803)..(1803): n is a, c, g, or t
  misc_feature (1830)..(1830): n is a, c, g, or t
  misc_feature (1833)..(1833): n is a, c, g, or t
  misc_feature (1835)..(1836): n is a, c, g, or t
  misc_feature (1839)..(1843): n is a, c, g, or t
  misc_feature (1845)..(1845): n is a, c, g, or t
  misc_feature (1847)..(1882): n is a, c, g, or t
tctcgagccgattcggctcgagatttaacgagggagtgaagcttagagccggtgttaacaagatctctctactgagtgttgccgttggactcccggtttgctctctctctctctctcacatatacatacacaccaaatagatatttcagatgcacccctgcacgtcacactaagctgatttttcagtatcaactgcggattatgatcatgaatcatgactatatttaacatgcagaatgttggtcctcattttgaaacatggaatgctggtgttcttggcccgatttcattaagtggtctcaacgaagggagaagggacttgtcttggcagaaatggtcttataaggttggtcttaaaggtgaaaccttgagtcttcactctcttggtggaagttcctcagtggagtggattcagggatctttagtttctcaaaggcagccattgacttggtacaaaacaacatttgacgcgccagctgggactgcaccattggctttagacatggacagcatgggcaaaggtcaagtgtggttaaatggacagaatcttggccgctactggcctgcttataaagcatccggtacctgtgattactgtgactatgctggaacttataacgagaataaatgcagaagtaactgtggcgaggcttcccaaagatggtatcatgttcctcaatcatggcttaagccaacaggaaatttattggttgtgtttgaagagctaggtggagaccccaatggaatctttttggttagaagggatatagatagtgtatgtgctgatatttatgagtggcagccaaatcttataagctatcagatgcaaacttctggcaaagcacctgttagaccaaaagttcatttatcatgtagcccgggacagaaaatctcatcaatcaaatttgctagctttggtactccagcaggttcttgtggaaacttccatgaaggaagctgtcatgctcacaagtcttatgatgcctttgaaagggtattgccttttgttcttttggaatgctttcttttttgctatcaaattactcatttattattatggtcttatcttattacttggttcattaatcaatgataactttgttattgcagaattgtgttggacagaactggtgcacagtaacagtgtcacctgaaaattttggaggagatccatgtccaaatgtcttgaagaaactctcagtggaagctatttgttcctgatcattttaacctcagaaaataaatagattaaactctccagattgatttttcccaccactattcatttcaatacagttcttttgggtcaaccaaagtctacacttctgaatctgatcaacacgagcattattattttggctttaccaaggtgaagttgcagaaaacacaacacaccatatggttgaaagcctgtaaagattgctgagatgattgtggatatgtgtatatacttgtgttctgcatgttatacagaggtgaaaggtgatgatttgcttggtgcactatgagacgatactgaattgagtccatgtgctagtgttttagacttaggtgtggaagcctcttgcttcctgtaatattagttttcccttgtaagctgcattcatagtgatttagtttctttcttcctgtaagaaacttctcaagatgataaagatcagattcagtcattttggtttcgttatttcatgcattgtggcttttggtttctagatgttcttggtttagaattctntcggtttcatttagacatattgattctacaatggcagatatgcttccatattttngggatggatgaanttattgaatgaagtggatttaaggttnaanannagnnnnnanannnnnnnnnnnnnnnnnnnnnnnnnnnnnnnnnnnn

SEQ ID NO: 1268 - DNA, 2146 bp, Glycine max
  misc_feature (397)..(397): n is a, c, g, or t
  misc_feature (514)..(514): n is a, c, g, or t
  misc_feature (527)..(527): n is a, c, g, or t
ccacgcgtccgataaatattacatgtatgatggaggaacaaatttaggacgaactgctggtggtccctttattgctcacgctatgattatgatgcaccacttgatgaatatggattgctcacgcaaccaaagtggagtcatctgaaggatttacacatagcaataaaactttgtgaaccagctttagtatctggagatcctactgtaacaaagattggaaactatcaagaggctcatgtctttaaatcaaagtcgggagcctgtgctgcattccttgcaaactacaaccccaaatcttatgcaacagtggcatttggaaacatgcattacaacttgcctccttggtctataagcattcttcctgactgcaagaacactgtttataacactgcaaggngttggttctcagagtgcccagatgaagatgacttcgtgttcctattcatggcggtctctcttggctatcattcaacgaagaaacgaccactactgatgatagttccttcaccatganctggcctgttggnagcagttaaatactacaagagatttatctgacttctgctgcgtcgcccccccccccgtgcttgatcccaatgaaggatttctgagaaacggaaaggatcctgttcttactgtgttttctgctgggcatgctttgcatgtttttataaatggtcagctatcaggaactgcatatggaagcttagaattccctaaactaacatttaacgagggagtgaagcttagagccggtgttaacaagatctctcttctgagtgttgcagttggactcccgaatgttggtcctcattttgaaacatggaatgctggtgttcttggtccaatttcattaagtggtctcaacgaagggagaagggacttgtcttggcagaaatggtcttataaggttggtcttaaaggtgaaatcttgagtcttcactctcttagtggaagttcctcagtggagtggattcagggatctttagtttctcaaaggcagccattgacttggtacaaaacaacatttgacgcgccagctgggactgcaccattggctttagacatggacagcatgggcaaaggtcaagtgtggttaaatggacagaatcttggccgctactggcctgcttataaagcatccggtacctgtgattactgtgactatgctggaacttataacgagaataaatgcagaagtaactgtggcgaggcttcccaaagatggtatcatgttcctcaatcatggcttaagccaacaggaaatttattggttgtgtttgaagagctaggtggagaccccaatggaatctttttggttagaagggatatagatagtgtatgtgctgatatttatgagtggcagccaaatcttataagctatcagatgcaaacttctggcaaagcacctgttagaccaaaagttcatttatcatgtagcccgggacagaaaatctcatcaatcaaatttgctagctttggtactccagcaggttcttgtggaaacttccatgaaggaagctgtcatgctcacaagtcttatgatgcctttgaaaggaattgtgttggacagaactggtgcacagtaacagtgtcacctgaaaattttggaggagatccatgtccaaatgtcttgaagaaactctcagtggaagctatttgttcctgatcattttaacctcagaaaataaatagattaaactctccagattgatttttcccaccactattcatttcaatacagttcttttgggtcaaccaaagtctacacttctgaatctgatcaacacgagcattattattttggctttaccaaggtgaagttgcagaaaacacaacacaccatatggttgaaagcctgtaaagattgctgagatgattgtggatatgtgtatatacttgtgttctgcatgttatacagaggtgaaaggtgatgatttgcttggtgcactatgagacgatactgaattgagtccatgtgctagtgttttagacttaggtgtggaagcctcttgcttcctgtaatattagttttcccttgtaagctgcattcatagtgatttagtttctttcttcctgtaagaaacttctcaagatgataaagatcagattcagtcattttggtttagttaaaaaaaaaaaagaa

SEQ ID NO: 1269 - DNA, 864 bp, Glycine max
acttctttcaactacccacacacaagctcaaacacaactttaactcattaaaagtggttaccaatatcaaacttcaattaaaatcaagaatgtcatataacaaaaaccatcaacctaccaccaaaacataaaaaaaatagtgaagtggggtaataatatatataacttatcatttttatcattcaatacccacaaaaagtgtcaattattctacaactaacacaaaactctggagtacaaaaaaaaagacagaaattcataatcactctaagacaacagcagcacccaactccttgagcttctccatgatgggattagcctcctccttggtgagacccttcttcaaaacacagggaaccttctccaccaagtccttggcttccttcaaccccaaatcggtgaaagacctcacttccttgatgatcttgatcttggcagcagcatcatacttctccaacttcaagtcaaatgccatcttctccgcgactgcggcagcaccggcctcagcccgggcagccgccccgacggacggcatcgtcatgccagccacaggagcgccgtagcggtgcagacccatcttgagccgccagaggaccgtgaaatcgtgcctctcgaaactgttgaggtcgagaagctccgtggcgatgcgctcgatcttttgcccacgcgcctccgtggagagagcgcgcgttaggttaagaagcctcgtggcactccttgtggcacaccttgcggcacagtgagacattgttttttcacctttgttcacgactgtgattatagggtattataccatacacagttaacaaaaaccattagacgttagatctgggggctagctttaggtggctgagataaaagtat

SEQ ID NO: 1270 - DNA, 1352 bp, Glycine max
  misc_feature (1351)..(1351): n is a, c, g, or t
gcacgagcttggaagaggatttagggttcaataaggagcaattcggctcgagggcatacatgcaagggtatgacaaagaaggccaccctgtgtgctacaatgcctatggggtgttcaaggacaaggaaatgtatgaaagggtctttggtgatgaggagaagctgaagaagttcctaaggtggagggttcaggttcttgagagaggcatcaaggtgcttcatttcaagcctggtggggtcaattccctcattcaggtcacagacctcaaggacatgccaaagagagagcttagggtggcgtccaaccagatcctctccttgttccaagacaactacccggaaatggtggctcgcaagattttcatcaacgtgccatggtacttcagcatgttgtattcaatgttcagcccgtttctgactcagagaaccaagagcaagtttgtgatctctaaggaaggaaatgctgccgagacactctacaaatttatgagacctgaagacattcctgtgcagtatggaggactgaatcggcccagtgatttgcagaatggtcccccaaaacctgcatctgagttcacaatcaaaggaggagagaaagtgaacatacaaatagaaggaattgaggctggtgcaactatcacatgggacattgtagtgggagggtgggacttggaatacagtgctgagtttgtgccaaatgctgaaggaagctacaccatagctgttgagaagccaaggaaaatgggggcatcagaagaagcaatccacaactcattcacatcaaaagaatctggcaaaatggtactctcggctgacaacactgcctcaaggaggaaaaaggttgctgcatatcgctacgttgtccgcaaaagcagcaccatttgagaatggctattattaaatagtttctaggaccttctttattaattaatatcttgcttgtgatgttactttttctacctttttttgggttaaatttttagagggtcttcttatttatgcttctgaactcattaaaagcctgtttcacaggtattaactagtagtagtttattaactagtagtagttgtggtggtactaatgtgatgtaaaaaaagagagaaaaaatggttgttgtggtggtggtagcatatggcttggtatagaaggaaagcaagtaagtttgcttatatagcattaccaaattactgtttgttgtccttcacattgtggtgactcttgttgcaagtgagtgtgtgtgcgtgcgtgaccattgattgtattattgttgtcctttttggacacgtggttatttgtatgtttcaatctagaggcatcatcactttgtgaaaaaaaaaaaaaaaaaaaaaanc

SEQ ID NO: 1271 - DNA, 1806 bp, Glycine max
  misc_feature (1688)..(1688): n is a, c, g, or t
ggaaccttctccaccaattccttggcttccttcaaccctaaatcagtgaaagacctaacttctttgatgatcttgatcttggcagcagcatcatacttctccaacttcaaatcaaacgccgtcttctccaagacctcaagaacaaactccaatcttcttattcttccaccccttccatgtggggcgttcctttactcaacaacaacaacgccgacaacgccgacgtcatcctcctcaagttcctccgagcccgtgacttcagggtccacgacgccctctccatgctcctcaagtgcctctcatggaggaccgagttcggagctgacaacattgtcgacgaggagctcggtgggttcaaggaacttgaaggggttgtagcctatacccatggctatgacagagagggacaccccgtgtgctacaacgcctacggggtgttcaaggatagggagatgtacgagaatgttttcggggacgaggagaagctgaagaagttcttgcggtggagggtgcaggtgctggagagaggggtgaggatgctacacttcaagcccggtggggttaattctctcattcaggttacggaccttaaagacatgcccaagagggagctaagaattgcttctaaccagattctgtctctgttccaggataactatcctgaaatggtggctcgcaagattttcatcaatgtgccatggtacttcagtgtgttgtattcaatgttcagtccgtttctgacccagagaactaagagcaagtttgtgatctctaaggaaggaaatgctgccgagacactctacaaatttataaggcccgagaatattcctgttcggtatggtggattgagtcgaccaagcgatttggagaatggtcccccaaaacctgcttctgagttcacagttaaaggaggagagatagtgaacatacaaatagaaggaattgagagtggtgcaactatcacttgggatattgtggtgggaggctgggacttggagtatagtgctgaatttgtcccaattgcacaaggtagctacaccttagcagttgataaggcaaggaagattgaggccacagaagaagcaatccataactctttcacatcaaaagaagctggcaaaatggtactctctgttgataactctgcctcaaggaagaaaaaagttgctgcttatcgctattttgtgcgcaaatccagcacaccaacaccatctgaggtgcaattaagccctaaatgattgtaggaaccatatatgatctttatatgctttgaagttaattataagtcttaactctcttcggttatgaacttatgattctgaactttgtttgagccaacttaaaggtacttagtactattgtattagtgtaatgtaaaaaaatgaggggaaaaaacgtgctatagcatggtgatttggtacatatgaaaaagcaagtggctttgcttattataatacattttactatttgggcatgatgtggtgaattggtgattacttttgtcagagggtattgtattgttatttagcatgtgtgggaaagtactttagttttgttcccagaagagaagtgaattgaattgagtggggatggacctttacctgcccttgacggttttgatttgatattatgttatggtccatgcaagatgaacggtgatgatggtccattgaagagttcacgggctntggaacttgaaattgaatggtgtagcatctttccttgtctattgtatttatggtgatgtctgcattctgctatggtttggtgaatgaatattcatcctttgtaaaaaaaaaaaaaaaa

SEQ ID NO: 1272 - DNA, 1646 bp, Glycine max
ggtacgcctgctgcgagaagacgacagaaggggaaccaaaaacaatggccacttgttcactcatttccacactcttcccttctccttcttcttcttctttttcactctctcgttcttcctcaaacaccaccaaaccaaccaccattcacctctccaaatccctccatctccaaactcccatcctcttcctccttcgccccccaaacccaaaaccgacacttccaataatacccctcttccccaaactcaccattcccaactcccttctccttctctgcacctccctcgctctctccttcactctcctcctctcccccgccgactccgccgccgcctttgttgtcacctccccaaggaagctccagtccgatgaactcgccaccgtccgcctcttccaagagaacactccctccgttgtctacataaccaaccttgctgtcaagcaggatgcgtttacattggacgtgttggaggttcctcaggggtcaggatctggctttgtttgggataaggagggtcatattgtgaccaattatcacgttatccgtggtgcctctgatctcaaggtcactcttgctgaccagtcaacttacgatgccaacgttgttggttttgaccaagacaaggatgttgcggtgctgcgtgttgacgcacctaaagacaagctcaggcctatacctattggggtctctgctgacctgcttgttggtcagaaggtttatgctattgggaacccgtttggacttgaccacacactcacaactggtgtcattagtggacttcggcgagaaattagttctgctgcaactggtcgtccaattcaagatgttatacagacagatgcagcaattaatcctggcaacagtggagggcctctcttagatagttctggaaacctcattgggataaatacagcaatatattccccatctggtgcatcctctggtgttggattttctattccagtggacactgtaaatggtattgttgaccagttggtgaagtttgggaaggttacaagacctattttagggattaagtttgcccctgatcagtctgtggagcagttgggagtaagtggagtgcttgtcttagatgctcctgccaatggtcctgctgggaaagcaggcttgcaatcaacaaagcgtgactcttatggtagactcattttaggtgacatcataacatctgtgaatgataagaaggttactaatggaagtgatttatacagaattcttgaccagtgtaaagtgggtgataaggtgattgtggaggtgttgagaggtgaccacaaggagaagatacccgtcattctggagccaaagcctgatgaatcatgatgatatgcaattcattatccatccatccatcctatactgcatgtatatacatttcatatgccaggaatgaatgcagctgtgtatgtgtattcttaggttgtatcttgcttcataaaaacaggtccaagtgtacatatgtactatgggactgccagctcatcatccttttaactttctcattattaaacttaatataatttgccacgtctattttgcccccatacaaattcatacaaggggttatgatcattgtgctacatttttttcttttttttttatattctgtctgtgtgtgtttaaaaaaaa

SEQ ID NO: 1273 - DNA, 1414 bp, Glycine max
aaaagtgaatttgaaatttcaatgcccaccaaacgccaatcaatttgcctccctcccaatcccacaccgtgaccatcactcactccccactcttcgccaaaagacaaacgcgtgagaaacactctcctcagagcgcgtggcagcacaccctctcctccacaaccaaacccttctctcaacctgctcggccccacaacacaacacacacaatactcaaattttttctagagcgagaaagtgagaggagagagaaagtagcagatcctccatggcctccaccaaggaacgtgaaaacttcgtctacgtcgccaagctcgccgaacaagccgaacgctatgaagaaatggtggaagcaatgaagaatgtggcgaagctaaacgtggaattgacggtagaggagcggaaccttctgtcggttgggtacaagaacgtggtgggtgctcgtagggcttcgtggaggattctttcctcgattgaacagaaagaagaagctaaagggaacgatgtgagcgtgaagaggataaaggagtataggctgaaggtggagtctgagttgtccaatatctgcagtgatatcatgactgttattgatgaataccttattccctctagctcatctggtgaacctagtgtctttttctacaaaatgaagggggactattaccggtacctcgcagagttcaagtccggtgatgagagaaaagaggctgctgatcattccatgaaagcgtatcagttggcttccactactgccgaggctgagttagcatccacacatcccatccgtttgggcctggctttgaacttctctgtcttttattatgaaattttgaactctcctgaaagggcctgtcaccttgctaagcaggcatttgatgaagcaatctctgagttggatactctgagcgaggagtcttacaaagacagcaccctaattatgcagcttctgagggacaatctcaccctgtggacttctgacatccctgaagatggagaggaacaaaaggtggattctgcccgagctgctggaggtgacgatgcataggtattggccaaggaatttgtggagtgcatacgagaaggctagtctctctcttgatagtttaccattaggatgttgtaatagaacatggaattggtctctagaaaatcaccataaggctttgtgagccttttattctatgcgtgtgctttctgttactggagactggagttgagatttgcatggtgtttggctgtaatttagtgaatttcttcattttgactttctttctaagaggatgctaccttgcattcttttatcagtttacatagataatatttatttcaaattatgcgaatcattgtttctaaacagaagtttacgaccgttttttcttaaaaaaaaaaaaaaaaaaaactgagactagttctc

SEQ ID NO: 1274 - DNA, 1379 bp, Glycine max
ggcccaccaaacgccattcaatttgcctccctcccaatcccacagcgctccctccaccgtgacaatcactcactccccactcatcaccaggagagaaacgcgtgagaaacattcctctcagagcgcgtggaaacaccccctctcccaccaccaacccttgccgtcgtgccctgtccctccacaaccctcccccgcctccgctcagcctgcttattcccacaacacaacacaacgcacaaacacacaaaaaatttctagagcgagaaagtgagaggagagagaaagtagctgatcctccatggcctccaccaaggaacgcgaaaactttgtctacaccgccaagctcgccgaacaagccgaacgctatgaagaaatggtggaagcaatgaagaatgtggcgaagctgaacgtggaattgacggtcgaggagcggaaccttctgtcggtagggtacaagaacgtggtgggtgctcgtagggcttcgtggaggattctatcgtcgattgaacagaaagaagaagctaaagggaacgatgtgagtgtgaagaggataaaggagtataggcagaaggtggagtctgagttgtccaatatctgcagtgatatcatgactgttattgatgaacaccttattccctctagctctgctggtgaacctagtgtctttttctacaaaatgaagggggactattaccggtacctcgcggagttcaagtccggtgatgagagaaaagaggctgctgatcattccatgaaggcgtatcagtcggcttccactactgcagaggctgagttaccacccacacatcccatccgtttgggcctggctttgaacttctctgtcttttattatgaaattttgaactctcctgaaagggcctgtcaccttgctaagcaggcatttgatgaagccatctctgagttggatactctgagcgaggagtcttacaaagacagcaccctaattatgcagcttctgagggacaatctcaccctgtggacttctgacatccctgaagaaggagctgaggaacaaaaggtggattctgccagagctgctggaggtgacaatgcataggtattggctaggaatttgtggtgtcatacgagaaggctagtctttctcttgataatttaccattaggatgtagtaatagaacatggagttggtctctagaaaatcaccatagggctttgtgagccttttattctatgcgtgtgctttctgttactggatggagactggagttgagatttgtatgttgtttgcctgtgattcagtgaatttcttcattttgacttctttctaagaggatgataccttgcatacaataaaaaaaaaaaaaagatagataatattgaatcaaaattatgcgaaa

SEQ ID NO: 1275 - DNA, 2090 bp, Glycine max
aagtatggacatctatgcaaaagggtgcagtgagtagagcaatataagaagggaatgatgggtggttaaatcactgaaattgtgatcctaatcctaatagaagaaaaatgatgggcattgaatcgacggggagtaaatggcttgggttggtggcggcggtgtggatacaagcaatctccggcaacaactacactttctcgaattactcggacgctctgaaatccctcatgagcctaacccaaatcgagctcaacaatctgtccgtggccaaggatgttggcaaggcttttgggcttctggctgggctggcctcagacaaattcccgacttgggccattctcctcattgggtccctccaaggccttatcggctatggcgtccagtggctcgtcgtcagccagagaatccaacccctcccatactggcagatgtgcgtattcctctgcattggtggcaacagcactacctggatgaacaccgccgttctagtcacatgcatccgcaacttccgccgcaacagaggccccgtttccggcattctcaaaggctttgtcggtttgagcaccgccatattcaccgacctctgttccgctctcttcgccgacgaccctgcttcctttctcctcatgctcgccctcatccctttcgccgtttgcctctccggaatgtttttcctccgtgagattcctcccgccgccaccaacgaccaggaagagtctacttatttcgcggttttcaacgcggttgccgtggtcgtcgccgtttacctcttggctttcgggttcgtgccgaaccctagcgctctggtgtctcgggcattcgccgtggttttgctacttctgttggtggcgccgatgggaatcccggtccactcttacttgaaggcacgaaggcaggacgagcggttcaaaccgaatttggaggagcgggttgacgaaccgttgattcgcggaaaagagaaggggagtgaaagtgaggtggagagagggaatgtattagcggaagaggcggcggcggagggaatgagtggaccggcggtgggggaggagcacacgatatgggaggctctgaaaacggtggatttttggattttgtttgtttcgtttctctgtggggttggaacgggtttggcggttatgaataatatgggtcaaatcggtttggcgctgggttattcggatgtgtctctctttgtatccttgactagtatttggggcttcttcggtcggatcgtctcgggttcggtttcggagcacttcatcaagaaagctgcaactcctagaccactttggaatgcagcctctcaaattctgatggcggtgggatacatactcctggcaatggctatgccaggttccctttacatagggtccgttgtggttggcatatgctacggggtgaggcttgccattactgtgccaactgcctcggagttattcggcctcaaatattatggtcttatatacaacattctcattcttaaccttccccttggctctttcctcttttctggtcttcttgctggcattctgtatgatatggaggcgactaccaccgtaggaggaggcaacacttgtattggagctcattgctacagactagtattcatcatcatggctgtagcttgtgttgttggcttcttcttagacattttattgtcattcagaactaagaaggtttacaacaagatctcctccagcaaaaactccaacaaaaactctctgaattcaagtaggcgatgatccaaaatggcccatataaagagggtatgacacttgcgttgaccagcattttgcacaatggtatcctaatttccattggtatggtatggttatcactaacctttttccttttggtaataaaggctggctaatttgtttgtacatccattttgagtgctctgtagcaatagttgtcaaaatgttatagtagcaatttgttgaagaaaatgttgtcaaagattttccatggatggaaatattttgcaatttcttctgtgttgatttattgttctgctattttagccaggtgtcaaaagtattgcatagactttactccaatttcatcgcaaatatttacttggttttatt

SEQ ID NO: 1276 - DNA, 2239 bp, Glycine max
gaatttagtcaacatagggaaaaatatgataatcctgattcatgggctaactcatttgagcaacagtatggtgcaaatcggcgggtggccgactgtgggcattcccaattgtcgtcagtagatcaaatgcgaggtatgaacatgccaaactttgctgcaatggagcagactcgtatgcttgcaaacacgttggcccaaaatggtgaccctaaatttcagaactcaaaattccttcaatttgtgtcaaagatgagccgtggtgagttgattattgatgacaatcaagttaaagagaatgcattacctgcatctggagattgggcaacagaatacaatcagcaatataatcatggtcatgcatgggctggagaatttttgaatgataaggtttatcatggacctgatcagtgggcgaatgaatttacaagtgaaggacggcagcatgatgcagttgatgatcagtgggttaatgaattctcaaagttgaaagttaatgattgggcagatgaatttggtcagcagtttggtgaaggagccttaggggatagcacttctgatagttgggcacaagcatatgatgagttcctaaatgagcaagtggctgccaagcagcagttagacagttcgaggggtgtgtatgtcttttcagatttaaatccttatgttggccatccaaatccgctaaaagaaggccaagatctattcagaaaaggacttttaagtgaagcagttctagcattggaagctgaagtcctaaaaaaccctgagaatgctgaagggtggagactgcttggaatagcacatgcagagaatgatgatgatcaacaggctattgcagcaatgatgcgtgcacaagaggctgacccgacaaacctggaagtgcttcttgctcttggtgttagtcatacaaatgaactggagcaaacagctgctctgaagtatctatatggatggttgcgccatcacccaaaatatggaacacttgccccgcctgagatggctgattctttgtactatgccgatgtagctaggttattcaatgatgcagctgaactctcacctgatgatgcagatgtccacatagttctaggggtcatgtacaacttatccagagaatatgacaaagccattgcatcttttgaaagagcactgaaacttaagccgcaggattactctctatggaacaagctgggtgcaacacaagcaaacagtgttcaaagtgctgatgcaataatggcttatcaacaggcactggatttaaagcctaattatgttcgtgcttgggcaaatatgggtatcagttatgcaaaccagggtatgtatgacgagtccattcgatattatgttcgagcacttgccatgaatccaaaagcagagaatgcatggcaatatttgagaatttcattgagctgtgcttctaggaatgacatgttggaagcttgtgatagtcgtaatttggaccttctccagaaggagtttccactacagtaagggtgcgtttgagtgaacagcttaatcaagcgcttagtgaataagtacttatcatataagcactattgtataagattttttttttttaataattgaagaggatatagggttaacttcttttcatataaactgtgagctattttttttttttagttttcccagcaagttaattgaaataagttgaaaatagcttatggacacataagctaattttataggttctctcaaacacttacagaagtgcttgtgtcataataagctatcgataagcattttcaaatgcatattaaattttgacttttttcggagcggatgaattacaggagggtcagttccactgtggaggtggttgcttgaacatgaatcctaattttccttaaaacttttggatgagtaaatggcacattttctgccattaaagctcgcagtagatgcctgcttctatagaaatttcttggtgaaatgaaaggctgatcaagtgactaagcctgcaggtgaatacgatgcattattctagcaatctttgaacatatggtgtatatcatgaaagtacatcaacctgttacactgaatttaggcacagttacagactccatttcttaatgttacaaaagctatttatcataaaacagctgcagtactaaagttaaggattgtggcttcccattataaagttgagtttattgggtatgtacatatatatatacaggtatacaagattaatcgcaaatcctgaatctaatttgtt

SEQ ID NO: 1277 - DNA, 1955 bp, Glycine max
  misc_feature (1837)..(1837): n is a, c, g, or t
  misc_feature (1840)..(1840): n is a, c, g, or t
  misc_feature (1849)..(1849): n is a, c, g, or t
  misc_feature (1854)..(1854): n is a, c, g, or t
  misc_feature (1858)..(1858): n is a, c, g, or t
  misc_feature (1866)..(1866): n is a, c, g, or t
  misc_feature (1870)..(1870): n is a, c, g, or t
  misc_feature (1875)..(1876): n is a, c, g, or t
  misc_feature (1885)..(1885): n is a, c, g, or t
  misc_feature (1887)..(1887): n is a, c, g, or t
  misc_feature (1890)..(1890): n is a, c, g, or t
  misc_feature (1893)..(1894): n is a, c, g, or t
  misc_feature (1901)..(1901): n is a, c, g, or t
  misc_feature (1904)..(1904): n is a, c, g, or t
  misc_feature (1907)..(1908): n is a, c, g, or t
  misc_feature (1916)..(1916): n is a, c, g, or t
  misc_feature (1929)..(1929): n is a, c, g, or t
  misc_feature (1931)..(1932): n is a, c, g, or t
  misc_feature (1936)..(1937): n is a, c, g, or t
  misc_feature (1940)..(1941): n is a, c, g, or t
  misc_feature (1945)..(1945): n is a, c, g, or t
  misc_feature (1950)..(1951): n is a, c, g, or t
  misc_feature (1955)..(1955): n is a, c, g, or t
cagtgtttgaacagtacagatctccccgcagtagagatttcctccaaaaatcatacttcactttttccaccaaaaaataattaggaaaaaaataaaaagatggaaagataatgtggttccgattcaaaccacacgattccacgaccttattatggagccgcggtggcggtagcggtggccggcgattataacggcggaggagtaagagatggttgtgttgtgaggaagattggtaagctgtgggaacatgtcgttgagaagcatagtccgtgaactcaaggagatgagagatggaattggcagcacatcaaagcggggtgcagaaagcaagcattggctcagtcggacaaagtcacatgtagcaccagatattcttgctactccatttgaacctattcaacagggacaatgggcaaatctaccatcagaattgcttctggacataatccagaggatcgaagagagtgagacatcttggcctgcccgtgctgttgttgtcttttgtgcttcagtatgtaaatcatggaggtccattacaagagagattgtcaagactcctgaacaatgtggaaggatcacatttcccatttcattgaagcagccgggtccgcgtgattctccaatacagtgctttatcaggaggaacaaagaaacttctacatatctattgtactttggtctggttccatcagagaatgacggtaataagttgttattagctgccaaagggataagaagggcaacgggcactgactttatcatatccttggctgcagatgatttttctcgagccagcaacaaatatgttggtaaactaaggtctaattttttaggtaccaagttcaccatatttgacagtcaagctccaaatgatgttgcaattcaaccaaattgtcaatctagtaggagatttcattctaagcaggtgtcaccaagacttccagcttgtaattatcttgttagcactgtttcctacgagctgaatgtcctatgcactagagggccaagaagaatgtactgtgtcatgaactccatacctgtctcagctattcaggaaggcggcaatgccccaactccagcatcttaccctcaaatatttgatgaacatttttctccatcaccagcactgaaagaaaaagttccagtcacagatttaaactctgcaagcttatcagagccaccagtatcgagccaatgctcagccgagcaattagcactgaaaaacagggctcccagatggcatgagcagcttcagtgctggtgcctaaacttcaagggtcgtgtttcagtggcttctgttaagaactttcaacttgtagctgctgttgatccatctcataatatttctgctgaggagcaagaaaaggtaatcttgcagtttggaaagattggaaaagacatattcaccatggattactgttatccgctctctaccttccaagcctttgccatctgcttgagcagctttgacactaaacctgcctgtgaatgagaagcgttacattactacattgtaattgacatctgctgagttgctggttgtcaatcatggtggcatgcagctgaaaatcatagctgttctgccgttagtattttccccttgaattggttgctgattctggaatttgttcaatctgttgtttcgtggtcctgtaaaattaaaattaaatgaagtttagtgaattctgtaatatatatgtttctggtgttcctcactcacgaatactttgatctgcttaaatactgagttttcagttgccgatgttctttgcaggcagatgatgataacgttatacaatgcttttaacattactaaaaaaaaaaaaaaagaaatccngcngcccggggnatccncttnttttaganccgnccccnnccggggggnanccnccnncttttgnccnttnngggggggnaatttccccctgncnnaacnnggnncaanctcgnncccn

SEQ ID NO: 1278 - DNA, 1980 bp, Glycine max
aatagcaacattattactaaaataagatttttggatccgattcatgcttgccacaccattccggttccggagattacttttttgcggcggtgctggtggcggagactccgcgccggaatataccttcccacgcctcctcctccatctccctcaccttcttcttcttcttcgctgtagcgttcaaaacaacgtgatctctcttgcattctctggttcggttcttctcgtcgttttatcgatccggcttctagaacttccctttctcattgcttctcctctctctcgcctaagcgagaaatttcctagctgatttggctcgattcgtcttttccttgttcaattccatttttcaggtgattgaagttttgtggtagaaggaagattgatatgctgtgggaaaatgtcgttgaaaagcatagtaagggagctaaaggagatgagggatgggattggtagcatgtcaaggcgaggtgtcgagagcaggcgttggaacggtcggacaaagtcacatgttgctcctgatgtcactctaacttcacttgaacctattcagcaagggcattgggcgaatttgccgcccgaattgcttctggacataataaggagggtggaagacagtgagactacctggccagcacgagccgttgtggtttattgtggttcagtttgtaaatcgtggagggccgttacgaaagagattgttaagactcctgaacaatgtggaaggctcacatttcccatttcattgaagcagcctggtcctcgtgattctccaatacagtgttttatcaggaggaacagagaaacttcaacatatctgttgtacattggcctggtaccatcggagaacgagactgataagttgttattagctgcaaaaaaggtaagaagggcaacaggcacagacttcatcatatctttggttgcagatgatttttctcgctccagcaacacatatgttggaaaactcaggtctaattttttgggtaccaagttcactatttatgacagccaacccccacatggagctgcaattcaaccagatagtcagcctagtaggagatttcattcaaagcaggtatctcctagagttccagcatgtaactatgttgttagcaccattgcctatgagttgaatgttctccgtgcaagagggccaaggagaatgcactgcaccatgaactccatacctgtctcagctgttcaagcagggggcaatgctccaactcctacttttcctgaaatcattgatgagcctttttctccctcaccagcactgaaaggaaagggtccaattagagatttagacaatgcaagcctcccagagctactaccagtagagagccaaggctcagctgagcctcttgtacttaaaaataaggctcctagatggcatgagcagctgcaatgctggtgcctaaacttcaagggtcgtgttacagtggcttctgttaaaaactttcaacttgtgtctgctgttgatccatctcataatgtttctgctgcagagcaagaaaaggtaatcttgcagtttggaaagattggaaaagacatatttactatggattaccgttatccgctctctgccttccaagcctttgccatatgtttgagcagctttgataccaaaccagcctgtgaatgagaccaatggcactggatcatctgctggagcaccatcgataccaaaccagcctgtgaatgagaccaatggcactggatcgtctgctggtttgtatcatatatataatatgctaggcacagttaatcaggcctggtgggcatgcaactgagatcttggctatgcagtcttttagtatttttccgttgtgttgttagttgtttattctggaatttaactttatgctgtttcacagccctgcaactaaaagtaagtttagtgaatcttcaattttataaagtcgcatggtatttctcccctataaatcttttttttttcaaaagagaattttctgttgt

SEQ ID NO: 1279 - DNA, 713 bp, Glycine max
tcagctacgtaggccccccccccattgtaaagctttattattcctttcaagatgaagagtacttatatctcataatggagtatctacctggtggtgatatgatgacgttgctcatgcggaaggatatactgacagaaaatgaggccaggttctatgttggggagactgtcctagctatagagtcaattcataaacataattatattcatagagatatcaagcctgacaacttgctgctagatagaaatggtcacatgaaattatcagactttggattatgtaaaccactagactgcagtaatcttcaggaaaaggacttctctattggaagcaacagaagtggagcccttcagagcgatgggcgtcctgtggctcctaaaagaagccaacaggagcaactgcagcattggcagaaaaataggcgaatgctagcctattctacagtcggaacacctgactatattgcccccgaagttcttctgaagaaaggatatggcatggaatgtgattggtggtccctgggagcgataatgtatgaaatgttagtggggtatccgcccttttattcagatgaaccaatgttgacttgtagaaagatagtaaattggagaagttatttaaaatttccagaagaagttaaactttcggcagaagcaaaggatcttattagtagactcctatgtaatgtggaccagaggcttggaaccaagggg

SEQ ID NO: 1280 - DNA, 1741 bp, Glycine max
aatgggggctgatgattttgagcccctgactatgatagggaagggtgcatttggagaggtcagagtctgccgagagaaagcaaccggtcatgtatatgctatgaagaaacttaagaaatcagagatgcttcgcagaggccaggttgaacatgtaaaagctgagaggaatctacttgcagaagttgatagcaattgcattgtaaagctttattattcctttcaagatgaagagtacttatatctcataatggagtatctacctggtggtgatatgatgacgttgctcatgcggaaggatatactgacagaaaatgaggccaggttctatgttggggagactgtcctagctatagagtcaattcataaacataattatattcatagagatatcaagcctgacaacttgctgctagatagaaatggtcacatgaaattatcagactttggattatgtaaaccactggactgcagtaatcttcaggaaaaggactcctctattggaagcaacagaagtggagcccttcagagccagcggcgtccgccccccccccaaagaagccaacaggagcaactgcagcattggcagaaaaataggcgaatgctagcctattctacagtcggaacacctgactatattgcccccgaagttcttctgaagaaaggatatggcatggaatgtgattggtggtccctgggagcgataatgtatgaaatgttagtggggtatccgcccttttattcagatgaaccaatgttgacttgtagaaagatagtaaattggagaaattatttaaaatttccagaagaagttaaaatttcggcagaagcaaaggatcttattagtagactcctatgtaatgtggatcagaggcttggaaccaaaggggctgatgaaataaaggcgcacccatggtttaaaggtattgaatgggacaaattgtaccaaattaaagctgcttttattcctgaggttaatgatgaattagatactcaaaattttgagaagtttgaagaggctgacaaccaaactcaaccttcctcaaaatcaggcccatggagaaagatgctgtcatctaaagatgtcaactttgttggttacacatataagaactatgaaatcgtgaatgatgatcaactacctgaaattgctgaattgaagaagaagagcacaaaacctaagcgaccatctattaagaccctatttgatgatgaatcagctacagctgccaatcaacctacccaagggagcttcttaaaactgttacctactcaaccagaagttcctgagaagagtgaatctcaatgatcccaactagtaatattttacaggactcttacatggccatggaggtatgaccaaatgctgagttgaatactgattgttttagtctttcccacattcttttgttagtttggcgtggatagttgtgggagcaaaggctctgaaactttgtggttttggatagctgggttttggcttgactgggatatttgtctgtagaaaaatctttgaaggtatatattctttacatttttggttggtggtgtattcttttgttcaccatttatcaagctgcaatgtgttgagaatccaagttatttcttgtaattaagttactgctgaagtgctgacaaggatgtacaattctcacatgtagagattcattagtttgtaaggtaacattttcgttcttatcttacttcaaaaagtataatttttacaaattaaatcctgatgctc

SEQ ID NO: 1281 - DNA, 1819 bp, Glycine max
  misc_feature (195)..(207): n is a, c, g, or t
gctgcataaccagatttctcataaagatatttatcagatgatttgttacaattttgcaattctttcttttcataggttagaatctgccgggagaaggccactggtcatgtatatgctatgaagaagcttaagaaatcagagatgctacgtagaggccaggtgaaattatcacattgttagagacttagtgtatannnnnnnnnnnnncccacgcgtccgcctctttcaggttgaacatgtcaaagctgagagaaatctacttgctgaagttgacagcaattgcattgttaaactttattgttcctttcaagatgaggagtatttatatctcataatggagtatctacctggtggagatatgatgacattgctgatgcggaaggatatactcacagaagatgaggccaggttctatgttggggagactgtcctagccatagagtcaattcataaacataattatatccacagagatatcaagcctgacaacttgctgctagatagaaatggccacatgaaattatcagattttggattatgtaaaccgctagactgcagtaaccttcaagaaaaggacttctctgttggaattaacagaagtggagccctccaaagtgatggacgtcctgcagctcctaatcgaacccaacaggaacaactgcagcattggcagaaaaatcgacgaatgcttgcctattctacagttggaacacctgattatattgctccagaagttcttctgaagaaaggatatggcgtggaatgtgattggtggtctcttggagctataatgtatgaaatgcttgtggggtatccacccttttattcagatgaaccaatgttgacttgtagaaagatagtaacttggagaactactttaaaatttccagaagaagctaaactttcagcagaggcaaaggatctcatttgtagactcctatgtaatgtggagcagagacttggaaccaaaggagctgatgaaataaaggctcacccatggttcaaaggtgttgaatgggacaaattgtaccaaatgcaggctgctttcatacctgaggtcaatgatgaattagatactcaaaattttgagaagtttgaggagggggacaagcaaactgtaccttcctcaaaggcagggccgtggagaaagatgctgccttctaaagatattaacttcgtcggctacacatacaagaattttgaaatcgtgaatgatcctgaaatacctggaattgctgaattgaagaagaagagcacaaaacctaaaagaccatctattaagtcactatttgatgatgaatcagctacggctgccaatcaacctgtcagagggagcttcttaaacctcttacctcctcaaatggaagttcctgaaaaaagtgaatcacaatgatccacaccaatatattacaggacttcttgatggccatggtcacaaccaaatgttgatgactactgattgttatactttttctcacattcttttgttagattggagttgatggatttggaagccaggtccctgaaatttctggttttggatggctgaattttttggctgactgggatattttccgtgtagaaaaatcaattaaggtgtatattcttcaatccaccttctatcaaactgcaatgtgttaaatatcatagttttctctctctcctgtaattaagttactgttgaagttgaaatgctgataaggatgtgcaattcacatttttgtacaatatatagagattgattggtttgtaggtttacattttctgttgtgacattagggccgaaactttacaactgaaatccttgcctttaagtttc

SEQ ID NO: 1282 - DNA, 1871 bp, Glycine max
atgaattaaggataaatggagctctgccacagactctagaaagcagagaaaacgatgatgggcttacatggttgtactctcaaactcgcttcagttcccaatttctcttctccaactttccttttcaaaactccaaccctccgttttcagaaatctccattgtcacgccccatcagagctctatcttcctccgccctcgtccaaacatctactaccaaggccactgaagaccaaggtgtgaagcctcaatggaaggccacgatagacttcaagtggataaaggataacaaggaagctgttgctgccaacttaaagaaccgcaactctgatgctgatttgaacctcgtgctccacctttatgacaaaatgttcactcttcagaaggaagttgagagggttcgtggtgaaagaaatgcagtggctaacaagatgaaagggaaactagaacagtctgagcgtcaaagattgattgaggaaggtaagaatttgaaggagggacttgctgctttggaagaagacttggcgaagcttaatgatgagcttcaacaggaagcgcagtgtataccaaacatgactcatccagatgttccaataggaggggaggattgttccaccataaggaagatggttggtagctctcccaaatttagctttcctgtcaaggatcatctccaactaggaaaggagcttgatctatttgattttgatgcagctgcagaggtcagtgggtcaaagttctactacctgaaaaatgaagcagttttgttagagatggctcttgtaaattggacactctctgaagtgatgaagagaggctttactccattaacaacacctgaacttgtgcgatcctctgtggttgaaaaatgtggattccaacctcgtgcaaataatacccagatttattccatcgctgacagtgaccaatgcctcattggcactgcagagattcctgtcggtggccttcatatggattctatactctctgattcattgttacctttaaaatatgtggcattttctcattgtttccgtaccgaggctggtgctgctggcactgcaacaaggggtctttatcgagttcaccaattcagcaaggtggaaatgtttattttctgccgcccagaagagagtgaacattaccaccaagagcttattacaatcgaagaagacctcttctcatccctgggattgcattttaaaactttggatatggcttctgaagatttaggtgcacctgcctatcagaaattcgatgtggaggcttggatgcctggtttagaacggtttggtgagatctcaagcgcatcaaattgcacagactatcagagccgtcgtttgggaataaggtatcgtcctgcatcagaagcacaagccacaagtgcaaaaaaatctaaaggcaatcttgccccacctcagtttgttcatacattaaatgcaacagcttgtgctgtaccacggatgattatatgtttgcttgagaattaccaacaagaagatggatctgtccttatacctgagcccttgaggcccttcatgggtggccttagtgtcatcgccagaaaatcattatgattgatcacagtatttgtttccatttgaaggatgctgctgcggcattagactatggtgacagatgagttgaagcaattttcattagggtgatatttttacaaataatattaatagcctttttttccttataaactattttttgtatccttttttctttatgatgcaacgtgtatctaaatttatttttttcagtaaaaacaatttttcagtaaaaacaatattccttgtatatcttttttctttttaatgaaaagaactagtagtaaactaaaaaaaaaaaaaaaaaaattaaaaaa

SEQ ID NO: 1283 - DNA, 1174 bp, Glycine max
cctcgtgccgaattcggcacgaggggttttggaatgagttggaggcagtttattcgcttgagaagcttgttagagggatggtacaggatgttgaggtggagaggccgttgattggtaggtgcttgcctctttgggaggagctgaggagcaaggtgaaagagtggtgtgggaagtacaacatcgtgggaggacctgtggagaagatagttgagaagcggtttaggaagaattatcaccctgcttgggcagcagcatttatacttgatccactttacttgattaaggatgcaagtgggaagtatcttcctccgtataagtgtttgacgcgcgaacaggagaaggacgtagataagttactgaccaggctggcttcgcgagaagaggctcatgttgtgttgatggagctgatgaagtggagatcagaggggcttgatccgctatatgcacaggctgttcagatgaaacaaagggatccagtaaccgggaagatgaaagttgctaatccgttaagtagtagacttgtctgggaaacatgtttgagtgaatttaaatccctgggaaagattgctgttaggctcatttttctgcatgcaacttcaagtgggtttaagagtaactcgtctttcactaggaaagtttcagctaataaacactcaagagttaccttggagagggctcagaaaataatatatattgcagctcatgccaaacttgaaaggagagacttttctaacggagaagagaaggacgcagagctgtttgtcatgtccaatagtgaggatgacatgcttgaggtttatgctgatgctcccttagtgtaatgtgcttttttgtcaactcttacggaattgtgtaattttagtatttatcatattctttccagaagtcttctattattccctcattacatctggtggaagttttttcatgactttggggttggaacagaaggaatattggaagggaccaaagaaagcatgttgttagttattgtgttctctactttgatcctaatgaatcatcatcaatcttttttccggtaattattttgtacttttagggtttgtaaaggaggaaccgttgcacttttatcagccataacaacaatccaggaaaaggagcaagaaggatgtcaaatttttttttttttttgctagagtgagtttgcaatgag

SEQ ID NO: 1284 - DNA, 1652 bp, Glycine max
tcagctacgtaggccccccccccgagagacatgaattgaacggtactgaggcttacttataccaccctcaacctcaaccctcttctctttcaacatctgagaattccaagttctgttctgagaagaattcacaacaaccacccttctctgttttattttattccttcactctgtgaaaacaaaacatcatgtctcagaaccagaatggcaagtgggcgcgaattgccccagaacaagttcgaggctcctccaatggacacgtggaagtgggaggttccaacaggctctgcataaaccctcagaaagatcacaagtccgaaagctatgaggaccttcaattggagttcaaccctcttgtgttcagctctctggagcagtatttgcctcctcacatgttgaacctctcacgtgaggttaaggttcagtatatgaggaacattctgcttcgctatttgcccgagagtgagcgcattcggattcaaaaacacaaggaatacaggcacaggatcatgctgaactatccaccgctatgtaagcagatatatagtatggatgctgagaaatttttcacaccctcatttctcagagcagttgaagaaaattcagaagcaagttttagaagtataatggctgaacctcgtaaaggactttatacatttgaaatgcttcaaccccaattttgtgagatgctgatgtctgaggtggataattttgaaagatgggttcatgacaccaagttcagaatcatgcgaccaaatataatgaatcaatatggtgccgttcttgatgattttggcatggaatccatgctcgagagattgatgaatgatttcataagtcccatatctcgagttttctacactgaaattggtggaacctcgctggactcccatcacgggtttgttgttgaatatggaatcaatcgggatgtggaacttggcttccatgtggatgatgcagaagtcaccttaaatatttgcttgggaaacgaattttctggtggagaactgttcttcaggggtgttcgatgtgatgaacatgtaaattcagatatccaaccaggggagatctttgattatccccatgttccaggacatgcaattcttcatcctggtcgtcaccggcatggcgctagacctactacatctgggaatcggatgaatttaattatctggtgtagaagttcggcttttagagagttgaagaaatatcggaaagatttttctagctggtgtggagaatgcagacgcaagaagaaggagaaagagcgcctattagttatggccacccaacaggaattaatgaacaggggaatgcaatcggcctcgtgaacttgcacacacaaattgtccttgtatagttgattcaacattgagctttttttactttttctagattctggattgtttttagtgaaactagaacgcctgtgcaaaagcacaggaaacaacccagcagagtcccatttccgtgagtcattttttcgttaaaaaaaggtaaaatacaaagagagagaaaactgaacattgcatagaatgaagacacttggaagtttagaatggtggctggacagttgttataatactattgatgaaatgtgatgtaggttgaaagtcaaaaaaaaaaaaaaaaaaaaaaaaaaaaattaaaaa

SEQ ID NO: 1285 - DNA, 1365 bp, Glycine max
cttttcttctcttccccttcgtcggccccgaaatcacgaccatgtcgtcgcagaatcagaataggtcgttggagcaagctggaccctccggctccggtggacaggtgggagtgagagtagtgaattggagtggttccgataggctttgcataagccctaagcgagatcacaagcccgaaaactatgacgaccttcaattcgagttcaatcctaatatcttcgcctctctcgagcactatttgcctcctcatatgctcaacctctcacgtgatgttaagcttcactacatcaggaacattcttcttcgctatttgcctgagaatgaccgcatttggattcaaaagctgagggaatacaggctaaagatcatattgaattatccaccgctgcataaggagatatttactatggatgctgagagctttttcgtaccatcatttctcagagcaataaaagaaaacacagaagcgagttttagaagtataatggctgaaccttgtaaaggagtttatacatttgaaatgcttcaaccacaattttgtaaaaaactgatgtctgaggtggatcattttgaaagatgggtccatggtaccaaactcagaatcatgcgacctaatgcaatgaataaaaataaacatggtgttatccttgatgattttgcctttgaagccatgcttgacagatttatgtgtgatttcatacgtcctatatctcaagttttctaccctgaacttggtggatcctcattggactctcaccatggttttgttgttgaatatggaattaataaggatgtggaacttggcttacatgaggatgaggcagaagtcaccttaaatgtttgcttgggaaaagaattttctggtggagaactgttcttccagggtgttcgatgtgatgcacatgtaacatcaaatgcgcaaccagaggaggccttcaattattcccatgttccaggacacgcaattcttcatcctggtcgtaaccggcatggtgctagacctacaacatctgggaatcggatgaatttaattctctggtgtagaaggcatagttctggtcaattacttagtgcatcagccttcatgttgtcacacagttcggtgtttagagagttgaaaagatatcagagagatttttatagctggtgtggagaatgcaaacagaagaaggcggagagagtgtgtttgtcagttatggccaccaaacaggaattactgaagagcgaaatataattggcctcgtgaactttcacatgcaaattatgtttgtatagtttattcccaccattgaacttcttttctgtttctagattatggattatttttaacaaaatgaaatatattgaagttgcaagttatagac

SEQ ID NO: 1286 - DNA, 719 bp, Glycine max
tttgaagccatgcttgacagatttatgtgtgatttcatacaacctatatctcgagttttctaccctgaacttggtggatcctcactggactctcaccatggttttgttgttgaatatggaattaataaggatgtggaacttggcttacatgaggatgaggcagaagtcaccttaaatgtttgcttgggaaaagaattttctggtggagacctgttcttccagggtgttcgatgtgatgcacatgtaactacaaatacgcaaccagaggaggccttcaattattcccatgtcccaggacacgcaattcttcatcctggtcgtaaccggcatggcactagacctacaacatctgggaatcggatgaatttaattctctggtgtagaagttcggcttttatagagttgaagcgatatcaaagagatttttatagctggtgtgcagaatgcagacgcaagaaggcagagagagtgcgtttgtcagttgtggccgccaaacaggaattactaaagagcgaaatataatttgcctcatgaacttgcacatgtgaattgtgcttgtatagttgattcacatcattgaacttcttttctgtttctagattctgtattatttttaacgaaatgaaatatgattgaagttgcaagttataagcatgatgaacttgatacccgacccaaaagttctccaaaaaaaagggcggccaccgactagtgagcac

SEQ ID NO: 1287 - DNA, 1214 bp, Glycine max
ctcatccgaggtgtttctcctcctacttagagccattagatcgaattcgatcatttcggatttgatctgatggttttggacttctaattagtctaaggtaatctaaattagagtcctctctctctctctctctcatttttttacatttctttattttgttgttgtactttttgtctcttggaaaagaattttaatttctatacactatattcaaagatggacaaggttacgaggttggcaacagaaaagggtgtggtggttttcaccaagagctcttgttgcctctgctatgcagtcaacattctgttccaagagcttggagtgatccctgtggttcatgaaattgacaaagaccctgagggcaaggaaatagagaaagctataacaaggttggggtgtcctacacctgttcctgcagtcttcatcggagggaagctggtggggtccaccaatgaagtcatgtccctccaccttagtggttcactcactcaactgctgaaaccatatcgagctttgtcttaaagaagggtgcacatgcaaattaaattaaaacatgttcctgctaccttaattggaagaataaacatgcagtatagtagtgtaactactaagtctataatattggatagtctatgcagtgatgcatgtgtgatgtagttaattaatttctagcatttgattattagctatatataattaatgcaatgtcataattattcttaacaccctccttacactccccacccagtttatcactctcctccaccacctcctaccaacaagccttacatctatgcgtcacctccccctccttaccactattagctagcatagctctatggatatgaagaatatgtgcaacgaataaaagaaagcgatagaaaaggaagaagaagcgcttcgcgatgcacgaaagagaagaattggaagcaaagtttcggcgttttgtcttttataaaaaaaatgttaaatcattataattttctatgatagggattggtttcttgtcttttttcttttgtttatgaatatcggtgtattttaacagttgtaaagcactgcgccctcgctgcatgatcatgtagttttcaaccagctgcgtttgcaggggttgtaaaactaataacatatataattaaataaattatattctctctcaaaaaaaaaaaaaaaaaaaaacaaaaaaaaaaaaaaaaaactcgagactagttctc

SEQ ID NO: 1288 - DNA, 1293 bp, Glycine max
  misc_feature (1255)..(1255): n is a, c, g, or t
  misc_feature (1258)..(1258): n is a, c, g, or t
  misc_feature (1261)..(1261): n is a, c, g, or t
  misc_feature (1291)..(1291): n is a, c, g, or t
ggaattcggcacggcgcgcggcttgccccctccaacccccttcctttcctcttctcttattttcatttatttactttttttattgcttattttcaagggatcaatacaatataatggttcaaacatgctaacggtgtatgctcctagagctattctgaagtgtcatttacaccaagattcagcttctgctcaacaagcatatccatgcaagatcaataataatgctaatttggtgaattgtaatcctaaaccttttggcactccttgtagtaatatattgtttcatagttcctcctctgggaaatgtgataagctacaaaagagccttcatctattccatcatgtcgccacacataaatggctgtgtgggttacaggattccatttcatctgatgatgagtatcgttcttcccgcaacatagccatcagcttgttcaggcgatacaggaacttcattgatcgtggtggagccgacaatctaaaagagttcatcactgccggggtaaatgcatatgcactaggatgcaccgatgaaggattaaggaaagaacttatggatatgaagaactctgggatcgaaattgatgtaatgcaaagttatggtggaagcacaagcttaaaatctaagataatctcagaggaggttgatgaatgcattctctggttaagcattatattcatcaccatcttgtgtacaccccaaccaactattgttagatggtcatctacacctccagtgtcagatgaagttagacttcagtggaaaggcttttgtgcccttatagcaaatgcatattttatgaagggaatggcttggcttcctgtaaagactcttcagttagaacagacggctgtgatgggtcaggctgagaaaccgtcagttgttgctagcagaatgcgattaatctttagcacacttgaggtagtgagtccacagtggccaagagcatagataatgggatcattttaaaactggctcccaaccatttcacattgagttgtattccatatttgctaacagatgtagcaatatcgtgccagagaggatattaaaaaggaaaagaaaaaactggatttctattttgtatgtatgaaaatgagatacatgatatattgcaattttagtgatatactaaattagaggaagactaattcccaattggtcccaaaaagaaagtattgtttaatacttacattcatttcaaaaaaaaaaaaaaaagggcggccccgagtagtagctgtcgtaccggtaatnagnttngcatcgcctaagtctcctttcctttttttnac

SEQ ID NO: 1289 - DNA, 1165 bp, Glycine max
tcagctacgtaggcccccccccccacatacaaaagaggttatcccatctctcctcgttatttttgctgtcctcttttgaatcatgacgctcttatcctctcacctacttgtcttctccgccgtccaccaccgtgcgccgccgaccaccaccacccggaacagcccaacaacaaaccacactgtgcggtttctgtgttctcccggcgtgccgccagctgtccgcttggatcaaaggttgccgcgctttgttgtccccggcgccggagcagaagatctgctctacaatgccggagccaccgtcggcgttcttggcggcggttacgccctcgtccgtgcctttgacgaactcactcggagaaacatcctccaacagggtctgagcagaaagctggtccatatattatctggcttgctttttctggtttcttggcctattttcagcaactcccctaaggctcgctactttgccgcttttgttcctctcgtcaattgcttgaggcttttggtcaatggtctctcactggcttctgatgagggactcatcaaatccgtcaccagagaaggagatccactagaattgctaaggggtcccctttattatgttctgatactgattttatctgctcttgtgttctggcgtgagtctccaattggtgtgatctccttggcaatgatgtgtgcaggggatggcatagctgatatcattggtagaagatatgggtccatgaagattccctacaatgaacataagagtttagccggtagcatgtctatgcttgtctttggattcttggtttcaatagggatgctctactactattcagttttaggacatgtgcagttggattgggcaagcactctgcccagagttgcttttatttctttcgtggcaacattggtggagtctcttcccattactaaggtagtagatgacaacatttctgttccactagctaccatggcagtggcatttttcactttccatcattaactcttaggagtctactggtctagttcccctgtaatgtcttacttgccttccctatccaattttttcctgctagtgcgacaatatgaaatttagtttgttccttgtaaagaaattagtgaaaattttatagcataaagaatgggtcaaaaaactcgagactagttcaaagaattc

SEQ ID NO: 1290 - DNA, 2758 bp, Glycine max
  misc_feature (1387)..(1387): n is a, c, g, or t
tcgcatgcacgcgttagtagcctcggaattcggctcgagctttacggggggttcaggccaacctggagggacagatgttaaggtatatacagttggccctggatatgctcattgctgaggcaaggaagtctcctgtgggttgatggtgttgtgatgagaaatcctgatgggaaggatagttaggtatccagtcctcctgacctcctgctgagaaagaaatggcaagagaagtttgcattgcattcaggcaagcggtttgtgggtttgatctcttgagatgcgagggacgatcctattgtttgtgacgtgaatggatggagctttgttaaaaattcacacaagtattatgatgatgctgcctgtgtgctgcgaaagatgttcttagatgcaaaagcacctcatctttcttcagcaattccaaccaactttaccatggaaagtaaatgaaccggtccaaccttctgagggactcactcgtcagggtagtggtattattggcacttttggacaatctgaggaactacgttgtgtaattgctgttattcgtcatggtgatagaactcccaaacagaaggtgaagctaaaagttactgaggaaaagctgctaaacctaatgttgaaatacaatggaggccgacctagagctgagacaaaacttaaaagtgctgttcaacttcaagatttgttagatgccacacgaatgctagttcctcgtaccagaccagatcgagaaagtgatagtgaggctgaagtcgagcacactgaaaagctccgtcaagttaaagctgtccttgaagagggcgggcatttctctggcatatatagaaaggttcaattaaagccactaaagtggatcaaagtggccaaaaggcaacggtgaaggtgaagaagaacgacctgttcaagctctgatggttcttaaatatgggggcgttcttacacatgctggcagaaagcaggctgaagaactaggaagatatttccgcaataatatgtatccagatgtctgcagctgcttttgccaaaggtcttcttgaccttgaagggcagctcacaccaatcctggtttcacttgttagtaaagactcctccatgttggatggtcttgacaatgccagtattgaaatggaagaagccaaggctcggctaaatgaaatcataacttctagttcaaagacaatctatagcaatggatcacctgaattttcttggatggttgatggtgctggactgccacctaatgcgtcagaattgcttcccaagttggtaagtttgattaagaaggttactgaacaagtaagactgctagccaccgatgaagatgagaaacttgcagaaaagagcttatatgatgtaattcctccttatgaccaagcgaaagcacttngggaagacaaatatcgatgttgatcgtatagctgccggattaccttgtggtagtgaagggtttctattaatgtatgctcggtggaaaaagctggaaagggacctgtataacgaacgcaaggagcgctttgacatcacccaaattcctgatgtctatgattcatgcaaatatgatctcttgcataatgcccatcttaatctagaaggattggatgagcttttcaaggttgctcaggcacttgctgatggtgtaattccaaatgaatatggaattaatccgaagcagaagctaaagattggctcaaagattgcacgtcgattattgggtaaaattttaattgatctgaggaacactcgcgaggaagccattagtgttgctgagttaaagagtaaccaagaccatgattcattctctgtgaaaactgaaaaggaagatacagaggccaagtcaaaacttctcaacaagaatgatgaaataaggaaatccagcacattgaatgatatatcaatggatcaagaggacgatgatgataaagagaccaaatatcgtttggatccaaagtatgcaaatgtaaagtcgcctgaacgccatgtgcgaacacgcctatacttcacatcagaatcacatatccattctctcatgaatgttcttcgttattgtaattgggatgaatctcttctagatgaagagagcctcgtttgctataatgctctagagcgcctctataaaacaaaggagcttgattatatgagctacattgtgctgaggatgtttgaaaacacagaggtggccttagaagatccaaaaaggttccgcattgagctgacctttagccgtggtgctgatttatcccccttgcagaaaaatgatagcgaggctgcttcgttgcatcaggagcacacactgcctataatgggtcctgaaaggctacaagaaataggatcatatctcacattggaaaaaatggagatgatgattcgtccatttgccatgcctgcagaagacttccctccaccagcaacccctgcgggattctctggctatttctcaaaaagcgtacttgaacgtctagtaaatctttggcctttccataagcatggcaattcaaatgggaaatagttaacttgttcaatactttctccctctgcttcaatgttccaacttcgtgtttcttattgtacatgggaaaattctgatacaaccaaagtgacctttggctcctttggaattttttttcaagcaaacttcttccagccaaaaaaatgttggaacttgtacaaaatagcagctattgtagttaaagcagactattgtccatctcttttctattattatgctttataaaaaaaactaacaggaatactggaagta

SEQ ID NO: 1291 - DNA, 968 bp, Glycine max
ggtaccgcctggcggtcccgggcccgtcctcaccgaccgaagcagagaagatggagactcatttggttttgttgcttgctttgatcttcactgtagttgccggcgttggagcccaaggcccatccacctctcccgcgcctcccacaccccagtcttcaccacctcccatccagtcttctccgccacctgttccttcctcacctcctccggctcagtctccaccaccagcttccactcccccaccagccccactcagctctcctccccctgcctcccctcctccttcatctccaccacccgcatctcctccccctgcctctcctcctccggcatctccaccacccgcatctcctccccctgcctcccctcctccggcatctcctcccccagccactcctcctcctgcttctcctcctcccttttcaccaccaccagcaactcctccaccagcaacgcctccacccgcattgacccctacacccctttcctctccaccagccacttctccagctccagctcctgccaaggtggttgctcctgcactctctccttccttggctcccggccccagcctctccaccatctctccctctggcgatgatagtggggctgaaaagttgtggtcctttcagaagatgattgggagcttagtattcggatgtgctttgctgtccttgttgttctagacatcatcgatctctgtcttcggacttgcagatttttctgccaattcatgttatttttctatttaccttacctttatatattattattttgtggatgtgatcatgggagtttattaattactgtatttgaattatatacgtacattgcttgcattcttgggagatttgaggggaggttttgtattcgaggacagttattttgtatggcactattattagtgtatcgatcgttgcattctagtatttaaaaaaaaaaaaaaaaaaacaaagaaactttagaaa

SEQ ID NO: 1292 - DNA, 1095 bp, Glycine max
acgagtgggtccgaagccaggtagcttgagatgtgtttggtagcgagacacaaagttatgttatgagagtgtgagtggctatataagctgtcgtcgcatgcttcgctcttaaacacaacaactcatcatcctatattctcttcttggatcatcttggttaagctgcagatcagaatagaataataataaataaagataagatggagactcatttggttttcttgcttggtttgatcttcactctagttgccggcgttggagcccaagcccaaggcccatccacctctcctgcgcctcccacaccccaagcatctccacctcccgtccagtcttctccgccacctgttccctcttcacctccaccctctcagtctccaccaccagcttccactccccctccatccccactcagctctcctcctccttcctctcctccaccctcctcccctcctccttcttctccaccccccgcctctcctcctccttcttctccaccccccgcctctcctcctccttcttcccctccccccttcctctccccctcctttttcaccacctcctgccactcctccccccgccactcctccccccgcagttccaccaccctcattgaccccaacagttacacctctttcttctccacctgtctcttctccagctccgtctccttccaaggtgtttgctcctgcactctctccttcccttgctcccggtcccagcctctccaccatctctccctccggcgatgacagtggggctcaaaacttgtggtcctttcagaagatgattgggagcttagtattcggatgtgctttgctgtccatgttgttctagacatcgatctctgtcttcggactcgcagatttttctgccaattcatgttattttgctatttaccctataccttacctttatatattattttgtggatgtgatcgtgggagtttattactgtatttgaactatataaattgcttgcattcttgggagatttgaggggaggttttgtattcgagggcagttattttgtatgacattactattagtttatcgatcgttgcattcgagtatttcttctattcataattcattttt

SEQ ID NO: 1293 - DNA, 716 bp, Glycine max
atttctcagtaacagcgacatataccccggaacaaaaagcattgttttggtaacttggtaatatattttgttgcactctatggcctcagagacagaagctgctcttgctgccactccctctgatggtcccaccgtatttgacaagatcatcaataaggaaattccttctactgtggtctatgaggatgataaggtccttgcctttagggacatagatccacaagctcctacccatattctaatcattcctaaagttagggatgggttaactggtctgtccaaggctgaggagaggcactgtgagattctaggtcgacttttgtgcactgctaagctggttgcaaagcaagaaggtcttgatgatggcttcaggattgtaattaatgatggacgagacgggggccaatcagtttaccacattcatgtgcacctcattgggggacgacagatgggctggccccctttctaaaatgtgaaaagattcgtagtgtcacggtatgcctttgtgcagacctgcagttatactctgcttatgcaatctataaataatggttttaatttttaaatgactaagtagtgtcttgatgttacaccaagaaattatgatgttgtgttagatggcctatactaattatgtttaaactagtgtgtcaaatttatgctaaaaccatattccaaagtcgtttatggattatggttgttgatggcgttccaaa

SEQ ID NO: 1294 - DNA, 818 bp, Glycine max
tgaagatgatggggaagtctcggtctctgtttataaaggagtacaatcacaggctcttcaattggttggtggccttctccctggttatggtagtgattggccgcttttttataaaattcattttggttgaaattggagcttgggcactctttatatttctggagacatacacaaggatgttttggacagcagagtcactttactataacccagtttggcattttatagttgcaacttgggaaactgttgtttacagcccaatcctggatcttgacagatgggctattcccctcggtgtcatggtgtcattgtttattctttattggcggtgttatggaagaagaaaacatggatccctattacctttatacagaagcaataagaatggtcctaatcgaccacgaacagattaaatctatgatgatggttgcagttgccggcatgttgctcagcaattcgtcctacactgcgagcttttttttttatttttttaacagagctcgttggcctcttcatcttgaaaagtttcttctgcagagtgtaaaaaggtgaacagagggtgattggcctcttgggtagcttctacaactttagcgcctcaaaaatgttctttgatgccacaatggcactatatttgattttacttgtaacttgtgtattatttcataattacttatataggattttagagtaaattaaatgttatatacgttgctgtgccacaatcatgtatggactgacgtgtaaaatggtaaatttaaagaagaaagggaaaatatcttcattttttgttcttgtttcgaaaaaaaaaaaaaaaa

SEQ ID NO: 1295 - DNA, 2040 bp, Glycine max
  misc_feature (1851)..(1851): n is a, c, g, or t
ccacgcgtccgaaaccctagtaatggagatcttgccgtgtgactttctatctgtccttttctcaccgaagatttgagtacttatccttttcctatattctcgtcagctacgtaggcccccccccctctttctctccttattggcggagagagaaaaagagagaggtagagaaaagcgaagagtctctctcttcctatctctctctttcaatgtcagggcacaaatcttccacctctacttcttcttcttcttccttctaacctatatcagaaggaaacgcgaaaaaagaaaaaaaaaaaagaggcagaaggttctagaagccgccaatttttatttcttttaatttgtctgagtcagagacgttcgtgattgtaaccatggattcttcgtgtgtcccaaacggcgacgtttctgggttcaaagataaggagtcaatggttgaccctttcttggtcgaggctcttgagaaccctcggcaccgtgtcaccattttgcggatggagctggatatccagaggttcctgagtaatgcagattatcagcattttgagtttcaacatttcccttcttcctatctcagactggccgcacatcgtgttgctcaacactatggtatgcaaacaatggttcaagataatggcttagatggccagggaaccagaattatggtaagaaagatggcggaaagcaggtatcccatggttcgcttatctgaaatacctgctaaacagttggaaaatgataaacctgagaagataaaaattgccataaggcctaggcctaacaaaatcagtttaaatgaagccaatgaagctggaaggaaaagcaatcctcctagaagtgtggaagagagaaaggtggaatatgatcgggcacgagcacgcatttttagtagctccagaagttgtgattcagatgatactctgtcccagacttcaactgatgagaaaaattctcttataaacaaggatgagaatgaaactagcaagacccctgtggtttattcagaacaatgctctattggtagggatattaattctactcgagttgccatcttgagagatagggaaaaggatcgcagtgatccagattatgatcgtaactatgaaaggtatgctaggagtattccaacttcttctgttaacttgatgccttttaatttgcaacaagttcgacatccatttgtgcagtatgataatgcttttaatcagttgagtcagatgtcacaaaatcaagcttcacttggctatggacctcaaccaagccctatgatgaatccttttggtgtcacagggttgaatcaggtgcctagggatgctgcttatgtacagtggccaagtgctgcagtaatgtatgcacattcatatgaccaatttagacaagctgttttccaggctccatttggtcaacgcccattgagtttcgattattcgcagaattactagatgacgtttgggaagcagttttccatttggctgcataagttattttagctattaaggatttcagagttagatataatttttctgtactgttatagatccttgtttcctattctggtttttaagttttgatggtggtagcaagtatttggcgtttttggtatttcctggcgacatttttatacaggactgtagtgaaagtacttggatttgaagtatatgaagagttatatgtgattaccttgtctaatgttaggaatgcttgacctcgttctgtctataaagtttatgcaaaaacctcaccttaattccattttaaatgcgtgtatccgcagcctaagaaaaaaaaaaaaaaaaaaaaaaaaaaaaaaaaaaaaaaaaaaaaaaaaaaaaaaaaaaaaaaaaaaanccccccggggggggcccggaacccatttcccccaaaaaggaagcaaataccccccccccccgggccggttttttacaacccggggaggggaaaaaccctggggtcaccccaataaatccccttgaaaaaaatccccctttccccagttgggaaaaaaagaaaaaggccccaacccatcccccttcccaa

SEQ ID NO: 1296 - DNA, 648 bp, Glycine max
ccacgcgtccgcggacccgcgcgttcgcattaattaaaacactggagaaagagggatggaagaaaaaagattgggggaaggaaagaaattagaaatatttattcattgtcaccaaatcttgttccctgcaagagaaagaaagaagggagagaagaagttgttgggttgagttggattggatttctaatctaatctatacctttcttttttcctatgcttttaaggcacaaacccttctttcttccctcttctttcttcttcttattgttattccttgcctttaccctttagggaaggaagaaggaacaactatactactattatccttattattgttattattgtaattaatctttttattatagttattggtgttgttattattcctcaaatatggattcgttgtgcctctccaacgactcagttgtttctggattcaaagacaaggagtcaatggttgacccctttttggtcgaggctctccagaaccctcgtcaccgcctcaccattttgaggatggagctggacatccagaagtttttggataatgctgatcagcagcattgtgaggttccacatttgccctctagctaacattggatagctggacaccgaattgattcaaacattcaactacaagcgatggtg

SEQ ID NO: 1297 - DNA, 1573 bp, Glycine max
gcctatatgttctcccgagtctccctctaatactttctcttctctttctctcctaattggtcgagagagaaaaagagataggtagagaaaaacgaagagtctctctcttctttatgtcagggcacaaatctttcacctcttcttctttcttctgacccatttcagaaggaaccaccaaaaaatagaggcagaaggttctagaagccgccaattctttttttttttttttggtttaatctgtctgagtccgagaggtttgtgattgtaacaatggattcctcgtgtgtcccaaacggtgatgtttccgggttcaaagataaggagccaatggttgaccctttcttggtcgaggctcttcagaaccctcgtcaccgtgtcaccattttgcggatggagctggatatccagaggttcctgaataatgcagatcagcagcattttgagtttcaacatttcccttcttcatatctcagactggctgcacatcgtgttgctcaacactatggtatgcaaacaatggttcaagataatggcttcaatggccagggaaccagaattatggtaagaaagatagcagaaagcaggtatcctgtggtttgcttatctgaaatacctgctaaacagttggaagatgataaacctgagcagataaaaattgccataaggcccaggcaaaataaaaacagtttaaatgaagcccggaggaaaagcaatcctcttagaagcgtggaagagagaaaggaggaatatgatcgggcacgagcacgcatttttagtagctccagaagttgtgactcagatgatactctgtcccagacttttacagatgagaaaaattctcttataatcaaggatgagaatgaaactagcaagacccctgtggttgattcagaacaatgcactgttggcagggatattagttctactcgagttgccattttgagagatagggaaaaggaccgtagtgatccagattatgatcgtaactatggaagatatgctaggagtattccaatttcttcccttaacttgatgccttttaatttgcaacaagttcaacctccatttgtgcagtatgacaatgcttttaatccgttcagtcagatatcacaaaatcaagcttcacttggctatggacctcctccaagccctatgatgaatccttttggtgtcacggggtcaaatcaggtgtctagggatggtgcttatgtacagtggccaagtgctgcaatgatgtatgcacattcatatgaccaatttagacatgctgttttccaggctccgattgctcaacgcccattgagtttcgattattcacagaattactagatgacgtttagagggaagttttccatttggctgcagatgttattttagctattaaggatttcagagtaagatacaatttttctgtactgttataatagacccttgttttctattctggtttttaagttttgatggtggtagtaagcattcggtatttcctagtgaaatttttatactggactgtagtgaaagtactggatttgaagtctatgaagagttatatgtggttcccttgtccaatgtt

SEQ ID NO: 1298 - DNA, 1498 bp, Glycine max
attgtggaaagagggaaccgtacaaagaagataacgctaacgcggtgaccctttttgtctgttcacattaaagaatggagaaagagggatgaaagaagattttgggaaggaaatataaaacatttattcattgtcaccaaattttgttccctgcaagagagagaagaagaagttgttgggttgagttgggtttggattggatttctaatctaatctatacctttctttttcctatgcttttaaggcacaaatccttctcccttctctcttctttcttcttcttctcctgacccttattattattccttgcccttaccctttaggcaagggaaggaagaaagaataactatattattatctttattgtaatctatctttttattataattataattataattattgttgttattattccttaaatatggattcgccgtgtctctccaacgattcggtttctggattcaaagacaaggagtcaatggttgacccctttttggtcgaggctctccagaaccctcgtcaccgcctcaccattttgaggatggagctggagatccagaagtttttgaataatgctgatcagctgcattttgagtttcatcatttcccttcttcctatctccgactggctgcacaccgtgttgctcaacactacaacatgcaaacaatggttcaagataatggcttagatggccagggaagtaaaattctggttaggaagttacctgaaagcaagtaccctgtagttcgattatccgaaatacctgctaagcagttggaaaatgataaatctgagcagaaaaaaattgttattagacctaggcctaataaaaacagtttgaatgatgctaacggagttgggaggaaaggaaaccctttaagaagtgtggaagaaaggaaggaggaatatgaccgggcacgggcacgtatctttagtagccctagaagctctgaatcaggtgatacctcatccgtggttccaatggatgggagatattcttctactagcaaggatgagaatgaaactagcaagaaccccatggctgattcagaaagatatatcagtaccagggatagttgttcgactcgagttgccatactcagagatagggaaaaggatcgtagtgatccagattatgaccgtagttatggaaggtatgctaggagtatcccaacctctgctgttaacttggtgccatttaacttgcaaaaagctcaaccttcatttgctcaatatgatgctacgtttaatcagttaggtcagatgtcacaaactcaggcctcacttggctatatacctccttcaaccccgataatgggtccttttggcaccacaggattaaatcagacatctagtgagggtgtttacctacagtggcctagtgctgcaatgatgtatgcacattcatacgaccaatttagacatgctgttttccaggtaaatcacatttagtttacttaattttattaccctgcagaattcgacaagtgatat

SEQ ID NO: 1299 - DNA, 921 bp, Glycine max
tcgtcccacgcgtccgcccacgcgtccgtacggctgcgagaagacgacagaagggggagaaagagaaagcatagaaaggaaacgaaaaaacagagtacccgacagaatttgaaaacaaaggctgaaatttgaagaaactgagatcattgggtgtgaaatatatggcagaggttgtcctgctagtcgatgatttgaaattactttctgcgagtcctcgttgtagaatttgtcatgaagaagagtttgaaagcgtagaaaccttggaagcaccttgtgcttgttctgggaccgttaagtttgctcatagagattgcatacagagatggtgcaacgaaaaaggaaatacaacctgtgaaatatgtctccagcaatatgaacccggatatacagctcctccgccaaagaagtctaagataaatgatgaaacaatgtccattagggaggaggaagaaccgtcaaacgcaagaatagagattatggttgaaggagtggaaatggaaagcgattactccgaatgcagctctgccgctgacagaagcgggtcttgctgtcgatcacttgcaatagcttttacactagtcttacttgtaagacatcttttcccagtgcttacaaatggaacggaagattacccatttacactacttactgtaattatactaaaggctagcggaattattataccaatgtacataattattaagattctcggagctattcagagttgtattcagcactataaggatgctgactatgatacatcaatgtctgaggaagatgacgaagatgagatacatcataatgtaaatccaagacatttatagattatttgcttactagtgtatcagagcattatgatgatgctcgtcaaataacattttgtggcataatttatgataatggcattcagatcgaaaaaaa

SEQ ID NO: 1300 - DNA, 2478 bp, Glycine max
ccacgcgtccgcggacgcgtgggcggacccggtcagctacgtaggcaccccttatttttaatttttgggaaaagagtgagagagagagaggagtgggaaatcgagaaaccctagtggagccggaagtggaagtgaagagagtaaatgacgatccattcggtggtgatacagaagctgcttagcaccaatgctcaggtgggtcgacgtgttgccgctcaccatttgaaggagttcacctatggcttccgcaacaaaatggccaccatcgactccgacaagaccctcatttgcatgcgcagtgcctgcaacttcatggcctccctcgcccgccacaacggccgcttcatgttcatcaacaccaaccctctcttcgacgaaatcttcgacctcatgaccaagaaggtgggctcctacagcccctccaccaactctctctggcgcaccggcggcttcctcaccaatagcctcagccccaagaagttccgctctcgcaacaagaagctcgtcttcggccccacccagcctcccgattgcatcttcatcgtcgacaccgagcgtaagtcttctgtcatcaacgaggctttcaagcttcaaattcccgtcgtcgccttgcccgactccgccatgcccctcgacgtctataagcgcattgcctatcctgttcccgccaatcattctgtccaattcgtttatttgttctgtaatttgattaccaaaaccttgcttcacgagaaggccaagtctgatgctgccaatcccgatattgatgctcaaatggaagaagctccgcgcaagggcaagggcaagacctatttggataaggtcgacgtaaccgtagttctctacgataatttagctcccttacctcaagatatagaagaaactaagaagcttttggacaagcttgttgttttgaagtttaatggttctcaaggaagaaatatgtgttttgacggtcccaaatctgcaattgatatttgtgatggactgacatatctggatttgatcattaaccagattgagaccctcaattccaagtatggaagcagggttccattgcttcttttcaataaagatgacattcatgatagttctctaaaggttttggagaagtattctaaatcaagtgttgaagtgcacacttttaaacagggtgaagatcgagagttgaaatcattgggtgaatattatagcaaggaggaagtgcatccatttgatgatgttgatgtgttccgtttactaatgactggtggaacccttgattcattattatcacagggtaaggagtatatcctagtgttgaagtcggacaatgtggcaacagtccttgatccaaacatactaaatcatttgatgataaatgatattgaatattgcatggaggtgacaccaagcaattcgtttaatttaatgttacccacaacgaaatttaagcttcgggagattggtggagaccaagataaacacttgaaggacaatttcaaactcatcgatacaacaaacatgtgggtgagtttaagagccatcaagaggtttgttgacactgttgaagtaaggcagaagaagccctcattttcaaaggacacagcagctggaccagcaataaagttctttgataatgtatttggtgtctccgtgcccgaatctcgctttcttcccttggatgcaacatcagatctattacttcttcagtcagatctatacacttgtagagaaggtgttttaactcgaaatccagctagaactaaccctttaaatcctgtgatagacttgggacctgaatttgaaaagtttggtgactttcaaagtcgcttcagatccattccaagcatcattgagttggacagtttgatggtgagaggtgatgtgtggtttggggctaatattactttgaaggggcaagtgactattgctgcaaaacctggcttgaaattggaaattcctgatggggtgacgattgagaataaggagatcaacgaccctgcagatatctaaggatgaatgttgtcgaagttgctgagatttggttccagtgaatacatgactgctgaactttgatttgcagtgctatacaatttagtttgtcacattagcagccagccatcttttagcttttctatttgctgggaactaaaaggttgcagaagcaaatagttccttacacatttttttttcaagcggcatgatagtggtgaaataattgtctgctcatctatttattcatcctgtaactcttagggcaaggcttgatatagtcacagctgagagcctgagaagctgagacaaggaataggaatagtttcagttttgctggtctttttgccttagatactattagaatcacaccaattgtttactgtaccaatgagttggagcatacattacagaaaagacatttttaaggcatatttgtcattgacttatataagctaccccctaaatttactgcttaaaaaaaaaaaaaaattgttagcatct

SEQ ID NO: 1301 - DNA, 1484 bp, Glycine max
ctcgttcattgtttaatgttagcacttccctgtcttcttttttatttatccaattcgtcagctacggacccccccccactggccaacactacataacagagcaaagagaaaagcttccttcaatgtagttgtgattcttcaataccatatattctctttctctttcttgatttgtgttgtgaaacagttaaaagtggtcttgatgtctgaggcattggaagaggttgttccttcaatgaaaggagggtgtgaagaagaagggttgaacctggaggctactgagctgaggcttgggttgccagggtgtgagtcaccagagagggagggtgtgtttaagagtgtggtggtgtctggggccaagaggggtttctctgatgccattgatggaaactggaatggtggaggatctgaaaaagatgccgctgccttgttttctccaacttcaaggggtgctgttagtgttagtgttagtgctgccaagtctctcactctcactgcaacagactgcaccaaccaaccaactgctttgggtgcttctgttctcaaggaaactgttccacactctccaaaaccattacatgagaataagccccagatttctgctccagctgcaaaggcgcaagttgtgggatggccaccaatccgttcattcaggaagaactcaatggcttctcagcctcagaagaatgatgctgctgctgatgcagaagccaagtctggatgcctttatgttaaagtcagcatggaaggcgccccatatttgaggaaagtggatctgaatagttttaccacttacaaggacctctctttggcacttgaaaagatgtttagttgttttacactcagtcaatgtggctcatatggggtttctagtcgggaaaatttaagtgaaagtagattgatggatctccttcatggttcagaatatgttcttacctatgaagacaaggatggagattggatgctagttggtgatgttccgtgggagatgttcactgagtcttgcaagaggctgaggataatgaagagttctgaagcaattgggctagcacctagagccatggaaaagtgcaaaagtcgctactagctagtgcaatgctgtatgcttttgtcttctaatcctgaaagatggaagaccacatttaagcatataatacctgagtatttcttacgtataattctatatacgagattggggtgtcctaaactttttagtgggcaatatatattgatgacagcatattaggtttgttgtagtagccgtctatatcattgatgtagatgtttaaggttttaggttgttctcccacacttcagttacagtcatcaaggcttaccgtagtatgtaaattttgcatttctgtgagcgagcattttgtttgtcatggcaagctaagaaaagaaatatcatactttctttatgttcactcttacatgtaaagttaaatatttattttaaattaagagaaattttaaaaaaaaaa

SEQ ID NO: 1302 - DNA, 1482 bp, Glycine max
cttcaatgtaattgggctaacactacttaacagagcaaagagataaacgcttcattcacttattcactaacttaacatatactatctttctactgtggagttgtgattcttcaataccatatattctctctctttctctttttctttcttgatttgtgctgtgaaacagttagaagtggtgttgatgtctgaggcattggaagatgttccttcaatgaaaggagggtgtgaagaagaagaagaagggttgaacctgaaggctactgagctgaggcttgggttaccagggtgtgagtcaccagagagggagggtgcgtttaggagtgtggtggtgtctggggccaagaggggtttctctgatgccattgatgaaaactggaatggtggatctgaaaaagatgctgccttgttttctccaaggggtgctgttagtgttagtgctgccaagtctctcactctcactgcaacagactgcaccaaccaaccaactgctttgggtgcttctgttctcaaggaaactgttccacgctctccaaaaccattgcatgagaaaaagccccagatttctgctccagctgctaaggcgcaggttgtgggatggccaccaatccgttcattcaggaagaactcaatggcttctcagcctcaaaagaatgatactgatgcagaagccaagtctggatgcctttatgttaaagtcagcatggaaggcgccccatacttgaggaaagtggatctgaatagttttaccacttacaaggacctctctttggcacttgaaaagatgtttagttgttttacactcagtcaatgtggctcttatggggtttctagtcgagaaaatttaagtgaaagtagattgatggatctccttcatggttcagaatatgttcttacctatgaagacaaggacggagattggatgctagttggtgatgttccgtgggagatgttcactgagtcttgcaagaggctgaggataatgaagagttttgaagcaattgggctagcacctagagccatggaaaagtgcaaaagtcgtaactagtgccaatgctgtatgcttttgtcttctaatccggaaagatggaagatcacatttaagcatataataccttgtttcttacctataattctatatacgagattggggtgtcctaaactttagtgggaaagatatattgatgacagcatattagttttgttgtagtagcggtctatatcattgatgtagacgtttaaggtttaaggttttaggttttaggttgttctcccacacttcaattactgccatcatggcttaccgtagtttgtaaattttgcatttctgtaagcgagcattttgtttgtcatggcaagccaagaaaagaaatatcatactttctttatgtgtccactcttacatgtaaagttaaatatttatttttaaattagagtcattttaaaaatagcaaaaaaaaaaaaaaaaaaaaaaaaaaaaaa

SEQ ID NO: 1303 - DNA, 1486 bp, Glycine max
aagacaattgtaacactcattttaagtccttaaggattgcgttatttagagagaaaattaacttgttcaaattcttaattaccctgtggaattatagggtccaccaagattgagttgaacaactctattatttttttaactattggatatgctattaagatccattttgcacatcaactagagagtttttttatttcagctacgtaggcctccgcctcgtgctacaagtgaagagttggaaacaaaagatggcaggtttgggaatatggatgggtttcgttagcctgtgtcttctgtctgtatcagtatcaggtctgctccaacgcctagagcaccctgtcaaagctgatggctcacttagccttatggtcattggagactggggaaggaaaggaacatacaaccaatctcaagttgccactcagatgggaagggttgctgcaaagttaaatatcgactttgtgatatccactggagacaatttctacgatgatggattgactggtatagatgaccctgcatttgaaatttccttctcaaaaatctacactgccaagagcctccaaaagcaatggtatagtgtgttgggcaaccatgactacaggggtgatgttgaagctcaattgaatccaatccttcagaaaattgatcctagatggatctgccaaagatcatttattgttgatactgaaattgctgagttcttcttcattgattcaacaccttttgtggacaagtattttcttaagccaaaggaccacaagtatgactggagaggagtgcttccaagggaaaaatatttatcaaagctcttgaaggatctggaaatagcattgaaggattctactgccaagtggaagattgttgtggggcatcatcctgtaagaagcataggacatcacggtgacaccaaagagctcataagacagctcctgccaattcttgaggaaaataatgtggatatgtacattaatgggcatgaccattgcttggaacacataagtagcagaagcagccaaatccaattcttaaccagtggtggaggttcaaaggcatggaaaggagacatggataaagataagaaagatgggatcaagttttactatgatggacaaggatttatgtccgtggagctggaagaaaccaatgccaaagttgtttatttcgatatttatgggaaagttttgcatgttgtgaatctgcccaaggggttaggtacttctgtctctgccatatagaagatgttttcgtgtttcagtggttgcaaaaggaaacgatagttatgtttttgcatccattaattattccacaaaacaaaaccaacgctctgtctttaactcctttgttttattccatattaatgaagtgcggagatggctgctattgtattatatatgtctccaattaatttttaatgtgaggactgaatcactttcttaacgcctaaaaaaaaaaaaaaaaaaaaaaaaaaaaaaaaaaaaaaagg

SEQ ID NO: 1304 - DNA, 1973 bp, Glycine max
ccacgcgtccgctgaaacacttgatgcaaaatggactggtgaaaaccactcaggatatggaattcaaaaggataacagttctgtaaatcctgatatacttatggcagatgctttgacgaccagtgcacaaaaagaaacatattatctaggggatcgtacagaagatcaaaatggttccaagagtttctattcttcttttaaaggtcatgataatatggaagactcttcaaactggttaggaatgcccttcttgaacttctatcgccaatttaacaggaacctttttgctagtacacagaagtttgataccctagttgactacaatcctgtttatgtgtcatctttccggaagcaagaactccagggtggggcaaggctgcttctaccaattggtgtcaatgacactgtaattccagtatatgatgatgaaccctcaagtattatagcttatgccttaatgtcaccagaatatcatttccaattaaatgatgaaggagaaaggccaagagaaggaaatgagttcacttcatcatatttttctgactcaggcaccttgcagtcattctcatctgttgacgaaacagcttttgattctcaaaaaagttttggatcgatagaggaaatgatattttccatgtctgggtctcgtaattcatcaatattggacccaatgttatatactaaggctatgcatgctagagtttcctttggagtagatggtccccttggcaaggtaaaatattctgtgacttgttactacgccaagcgatttgaagccttaagaagggtctgttgtccttcagagctcgactatataaggtctctgagtcgctgtaagaaatggggagctcaaggtgggaaaagtaatgtattctttgcaaaaactttggatgatcgatttatcatcaaacaagttaccaaaacagagcttgagtcattcattaaatttggtcctgaatacttcaagtacctttctgaatccataggcaccggaagtccaacttgcctggcaaagattcttggcatataccaggttacatcaaagcatcttaaaggagggaaggaatcaaggatggatgttttggttatggagaatcttctgtttaggaggactgtgacccgactttatgatcttaaaggatcttccaggtctcggtataatgcagatagtaccgggaaaaacaaagttctactggaccagaacttaattgaagcaatgccaacttctcctattttcgtgggaaacaaagctaaacgattgttagagagagctgtctggaatgacactggttttcttgcttcagttgatgtgatggactattctttactggttggagtggatgaagaaaagcatgagttggttattggaatcattgatttcatgaggcagtatacttgggacaagcatcttgaaacatgggtaaaagcttcaggtatccttggaggaccaaagaacacacctccaacagtaatatctcccaaacaatacaagaaaaggttcaggaaagcaatgaccacttactttctcatgcttccagatcagtggtctcccccttctattattcctagtcattctcagtctgattttggtgaagacagcacacaacctaggactccagctgaatgattctttgttttgtgtttctgtaaattttactttcaatttggggaattaactcccccaaattttatattaacttcttttttgtttttccctcttaaatgatataggaattcttttggttcatttgtaattttgtcaactagatattatcaattatttgttagaagatgccaaagaagggctgctagcactttagcagccaaggatgtttgtctggggtaaaagtatttgatgacctctggatgaaatctttgtacaaaaacctacagtaacgttctaggaacacgttctatacatgtatatgacttaaatttctcaaatttctttgccgaaaaaaaaaaaaaaaaaa

SEQ ID NO: 1305 - DNA, 1040 bp, Glycine max
  misc_feature (929)..(929): n is a, c, g, or t
  misc_feature (969)..(971): n is a, c, g, or t
  misc_feature (1009)..(1009): n is a, c, g, or t
ccgacacgtaacgtaatgtcgcactcaatggatccggaaaatgctattcgtgcctccgacgcaggccccccccccgaagtcacaacgttccagtagctgctcctcagtttctccaaacccaaactttcacgacagggacctgtcagatttagttaaggtttttgcatcatcactgtgtgaagataatatagatatggaaatctcccatgacatcaagatcaaggatgacaagctaggtgatgtaaaggaagagaagattaaggcagaagcggaactgaagcataaatcagttgagaaagagcatacaaaaagtaaggaagagaagattaaggtagaagcggaactgaagaataaatcagttgagaaagagcatacaaaaagtaaggaagagaagaaacataaagatgaagataaatcaaagaaaaagaagaaagagaaggtggaagaggaagatgaagagagagagaaaaaagaaaaagatttgaaagctaaaggggacgatggtgaagagaaaaaggagaaggataagaaggagaagaagaaaaaagaaaacaaagacaagggtgacaaaactgatgtagagaaggtcaaggggaaagaaaatgatggggaggatgatgaagagaagaaggaaaagaagaaaaaggagaagaaagacaaggatggcaaaactgatgcagagaagatcaagaagaaagaagatgatgggaaggatgatgaagagaagaaggaaaagaagaaaaagtatgacaaaattgatgcagagaaagtcaaggggaaagaagatgatgggaaagatgaagggaataaggaaaagaaggacaaagaaaaaggagacggtgatggtgaagagaagaaggaaaagaaagataaagagaaggagaagaaaaaggaaaagaaaggataagatgaagaaacagacacattanaggaaaagggaaaaaatgatgaaggtgaaagatgatgaannngaaatagaaaaagaaaaaggattagaaggagaaagagnaaggatcacaaaaaggaaaagaaaggataag

SEQ ID NO: 1306 - DNA, 2279 bp, Glycine max
cgctcgagctcgagccgaattcggctcgagggaacagggtaaactcaaacaaaaccaaccaaagtaccaaacaagaccagaaggctttgtatatctacctatctgtctaagccattcatcaaagctcaactggaccagatgatgtaggctcttagatccgagtgatgaaagttggatatttgatatcagtatcacaaaattattcagtgtgaagcaatatggggaacacgtgtgttggtcctagcatttcaaaaaatggttttgttcaatcagtttctgcggcgatttggcggtcccaattgcctgaaggttcagtgtctaatagagaatctgtaaaagaggaagcaactagtgtgcccgaatcgcccttgcctgtccaaaacaagcctcctgagcagataactatgccgaaacaagaagccaaacaagagggaaaatcagaaatagaaccggaaaaggaacaggataagaagaaacagaagaaacgtggttcagtgaagagagtttctagcgcagggcttcgtgttgattctgtgttgcaaagagagaccgataatttcaaggagttcttcactcttgggagaaaacttggacagggtcagttcgggacaacgttcttgtgcgtggaaaaggcaacagggctggagtgcgcctgcaaatctattgcaaagaggaagctcgtcaccgatgatgatgtcgaggatgtgagaagagaaattcagataatgcaccacttggccgggcatcctaatgttatatccatcaaaggtgcatatgaggatgccgtggctgttcatgttgtgatggaattatgtgcaggtggagagcttttcgataggattattcagcgtggccattataccgagagacaggcagccaagcttactaagactatagttggcgttgtggaagcttgccattctcttggtgtgatgcacagagaccttaaacctgagaactttctcttcatcaatcagcacgaggattcacttctcaaaaccattgactttggattatctgtcttctttaagccaggtgatatatttaatgatgtggtgggcagcccatactatgttgccccggatgttttgcgaaagcgttatggtcctgaggcagatgtttggagtgctggtgttatcctttacattcttttgagtggagtacctccattttgggctgaaaacgaacaaggaatatttgaacaagttctgcgtggtgatcttgacttttcttctgatccctggccttcaatttctgaaagtgcaaaagatttagtaaggaaaatgcttgttcgcgaccctagaaggcggctgactgcacatcaagtattatgtcatccttggattcaagttgatggtgtagctcctgacaaaccacttgattctgctgtattaagtcgcttaaagcaattttctgctatgaacaagctcaagaaaatggcccttataattatcgcagagagcttatctgaagaagaaatagctggcttaaaagaaatgttcaagatgatagatgcagacaacagtggtcaaatcacttttgaagaacttaaagctggtttgaaaagagtgggtgctaatcttaaggagtctgaaatttatgatttaatgcaagcggctgatgttgataacagtgggacaattgattacggcgagttccttgctgcaacattgcaccgcaacaaaattgaaagagaagataatctatttgcagccttttcttactttgataaagatggaagtggctatattactcaggaagaacttcaacaggcttgtgatgagtttggcataaaagatgtccgtttggaagagataatcaaggaaattgatgaagataatgatggacgcatagattacaatgagtttgtggctatgatgcagaaaggaaatcttccagcggttggtaagaagggcctagaaaatagcttcagcgttaagttcagggaagcattaaaattgtagttttcattgtcatcattgagtttttttttttttttggtgctctttattaccacacatccctccttttcactttgaaggttcaagattttattcatagtgcaaagtgtttgcatggggatatttaggtgggccttttcatctctgcagttattttgtttgcgtccaatttaaaatggatttttgtaattacgagaatatattaaaaagagatatctttttttattattatattaaaaagagatatctggtggagtattactattagagaggaaatagattatttgaattgaattgacacataaaaaaaaaaaaaaa

SEQ ID NO: 1307 - DNA, 1229 bp, Glycine max
  misc_feature (2)..(2): n is a, c, g, or t
  misc_feature (7)..(7): n is a, c, g, or t
  misc_feature (10)..(10): n is a, c, g, or t
  misc_feature (18)..(18): n is a, c, g, or t
  misc_feature (20)..(20): n is a, c, g, or t
  misc_feature (23)..(24): n is a, c, g, or t
  misc_feature (29)..(29): n is a, c, g, or t
  misc_feature (31)..(33): n is a, c, g, or t
  misc_feature (36)..(37): n is a, c, g, or t
  misc_feature (41)..(41): n is a, c, g, or t
  misc_feature (51)..(51): n is a, c, g, or t
  misc_feature (54)..(54): n is a, c, g, or t
  misc_feature (56)..(56): n is a, c, g, or t
  misc_feature (65)..(65): n is a, c, g, or t
  misc_feature (69)..(69): n is a, c, g, or t
  misc_feature (79)..(79): n is a, c, g, or t
  misc_feature (85)..(87): n is a, c, g, or t
  misc_feature (89)..(89): n is a, c, g, or t
  misc_feature (94)..(94): n is a, c, g, or t
  misc_feature (107)..(107): n is a, c, g, or t
  misc_feature (111)..(111): n is a, c, g, or t
  misc_feature (114)..(114): n is a, c, g, or t
  misc_feature (116)..(116): n is a, c, g, or t
  misc_feature (123)..(123): n is a, c, g, or t
  misc_feature (132)..(132): n is a, c, g, or t
  misc_feature (140)..(141): n is a, c, g, or t
  misc_feature (152)..(152): n is a, c, g, or t
  misc_feature (159)..(159): n is a, c, g, or t
  misc_feature (163)..(163): n is a, c, g, or t
  misc_feature (165)..(165): n is a, c, g, or t
  misc_feature (167)..(168): n is a, c, g, or t
  misc_feature (182)..(182): n is a, c, g, or t
  misc_feature (185)..(185): n is a, c, g, or t
  misc_feature (204)..(204): n is a, c, g, or t
  misc_feature (206)..(206): n is a, c, g, or t
  misc_feature (208)..(208): n is a, c, g, or t
  misc_feature (215)..(215): n is a, c, g, or t
  misc_feature (221)..(221): n is a, c, g, or t
  misc_feature (226)..(226): n is a, c, g, or t
  misc_feature (228)..(228): n is a, c, g, or t
  misc_feature (284)..(284): n is a, c, g, or t
  misc_feature (301)..(302): n is a, c, g, or t
cnccctnaanaccccaanangcnncaatnannnccnnaaanaataggtgangcncncaaaaattncctnggaaacattnaaggtnnncnaagancccaccattgttntttnttnangttcccnttggcattntaaaagannttacaaattanggtttanaaantncnntccatttccttccntcnggtggcatgtggaggcgtngncngcctttngtattngcagngngaagggatggctcagcgattagttggtacgcagggtttccatcacgacgttgtaangcggcagtgattgtatnngctcactatagggcgaattgggtccgggccctcacctacgtaggccccccccccgagtcaccaaacgttccagaagctgcttcttagtttctccaaacccaaactttcaccacagggacctgtcagatttagttaacgtttttacatcatcactgtgtgaagataatatagatatggaaatctcccatgacatcaagatcaaggatgacaagctaggtggtgtgaaggaagagaagattaaggtagaagttgaactgaagaataaatcagttgagaaagagcatacaaaaagtaaagaagagaagaaacataaagatgaagataaatcaaagaaaaaaaagaaagagaagggggaagaggaagatgaagagggagagaagaaagaaaaagatgtaaaagataaaggggaggatggtgaagagaaagagaaaaaggagaaggataagaaggagaggaaaaaggaaaagaaagacaaggatgacaaaactgatgtagagaaggttaaggggaaagaacatgatggggaggatgctgaagagaagaaagaaaagaagaaaaaggaaaagaaagacaaggatgacaaaactgatgtagagaaggtcaaggggaaagaagacaaagagaagaagaaaaaggaaaagaaagtcaaggatgacaaaactgatgctgagaaggtcaaggggaaagaagatgatggggaggacaatgaagagaaggaggaaaagaaaaaaaagaaaaagaaggaaaaggatgacaaaattgatgtagagaaggtcaaggggaaagaagatgatggggaagatgaagggaagaaggagaagaagaaaaaggaaaagaaggacaaagatgaagaaacagacacattaaagggaaagggaaaaaatggggatgggtgaggagaaggagggaaagaaagagaaggagaag

SEQ ID NO: 1308 - DNA, 1321 bp, Glycine max
ccacgcgtccgcgtgtcagctacgtaggcccccccccccatttttatcgtactgtactatgtttgttatgtaatggtatcatggtaagctgaccaaagtgacggatttgttccatcactgccttcagggaaagaagttaactcatagcaggtccatacaaacatgatgactccaaacttgaacttggaacctgaaaatcattcagaaggcagcagccaagtggcttcaaatgtatcctttcatgaagcatctcatgatcttaaaaagggcagcaccaccacttcctcctgtctcacaaaggatgaaactgatccaggttctattacccttgacttgacactcaacttcaataattccggtgatggcgagttgaaaggctcaagtgatgctagcagtgaagttggagctgaagctcctgcttcagcatcagcaactccaagggttttttcttgtaactactgcaggaggaagttctatagctctcaggcattaggtggtcatcaaaatgctcacaaaagggagaggacaatggctaagcgtgcaatgcgaatggggatgttcactgagaggtatacaagcttggcatctctacctcttcatggttcacctttcaggtctcttggccttgaagctcattctgcaatgcaccgaagacacgtgccgtcctccgcggcagcactgagggctcctgatatgagagctgctgcaaaatttgagagaaaccaatttggatcactggttttcgtggaagatgatgatgttggattcttttggcctggcagtttcagacaggtagaccaacaaggagctggtgttaatgtaggacatgctcaaagttcaaatgctagtttaattccaatggtgcctcctccaccacaagcttctacatctcctgatctcacattgaagctttaagtttaaggcttaagaatgatgatacatacacaagcaaaggcctcacaaagtaataaataagtggctaagaactgactcatccattgctttgcattcagccaaaattttctcaaccactcattttcattgtgagggatttaattatcagagtttttatgtgtgtatgtatcacttctcttgagattttttagtctttgatttcattctcttcagacatgaaattattaattaatagggcgtgcattgtacagtgagatgtgtatttccaatggcgattttagcttattttaatctcacatgttattaatggtttcctctcatatgtattttacttcgttattcatgaaccatgatacagcgttcaggataatggactaatgttttatatctaaaaaatgtgtttgtg

SEQ ID NO: 1309 - DNA, 802 bp, Glycine max
  misc_feature (788)..(788): n is a, c, g, or t
ggctcgagcggctcgtgcggccccagattaattgcaagaatggcacttcgttgcttggtgatgtccctttctgttctcttcactcttggtcttgcgagagaaagccatgccagagacgaagatttttggcatgctgtttggccaaacactcccattccaagttcattgcgagatcttctaaagcctggccctgcaagttagttttgtgaattatcaactctagattcttgattatgggtttatatcttcctagaatgctcaaggttaccccataattggaatggaaaggttgaacgaagaaagagaataaaataaaaagaaaagaagaagaataactatatataaattaccttttattttaaacactccagcacctttttttatctatttatatcatatgatatcataaattctattatatttatatttttctatttatttactcaacttttagtatttaataatataataagtatttatcaaatattttcctttaacaaaacgaagaaagaaaatatatttttatatatgaaaaataaattttgtacatctcttttggtgtttatatctattgagagacaagaagaaaaatgttattattattattattgcaggtgttgaaatcgatgatcaccctatgcaaattgaagaaacacagtacccgaaaaccttcttctataaagaagaccttcatccaggcaaaacaatgaaagtacaattcagcaagccttcctttcacaacatgggggtgttgtacatggttaaaggaataaagacactctaagagntatagtttgagagc

SEQ ID NO: 1310 - DNA, 913 bp, Glycine max
aaaaataggctcctttttgattacgaaaatgtggaagagaacgggttttgaagaagaagcagttcaattgatcaactcagatttcagggaccgatctatctgttgattttggatcgtacaaactggaaaacaaatattctcacagcactactcattccatacattttcttcagcttgccttcattaattttcgacgtcttcaggggagagcttggaaaatggattgctgcagttgctgttgtattacgccttttccttccaagacacttccctgattggctggaattgcctggtgctctgattcttcttatcgttgtagctccttctctaattgcaagcacctttagagacaacattgttggggtggtagtgtgcctcatcattgcatgttatttgctgcaagaacacattcgggcttctggtggtttcagaaactccttcactaaagctcacggcatatcaaattccattggcataatacttctgttggtttatcccatctgggcgctggtggtcatacttttttaggcaccaccatttggacttggttgatatgtgagaattaaaccaagtgtcttctgtatcattcatttgttgcaacttgatatctataaacacccggccattgttttgtgattcatgtttgtcctaagacctaaagttagcatgtgttaaaaagtggaataaaatctcagtttaagtcctctggtttcatagaatgtagaaaacaaaagatgaagaggattgatgtggtgtctttctagctgtcgtgtattcataaatcatgtatgatttgggaaatcgttgtatttttacctgtgggatataatataaatttacatttgttgctgctctgtattattaaaaaattttgtttccagcaaatgcattcctagcaactacaacagaaatc

SEQ ID NO: 1311 - DNA, 1054 bp, Glycine max
ccttatcatagtggtaagatgtgcaattgtacatatagctcttaatgtttgctttgactttgtttcataggctcctttttgattacgaaaatgtggaagagaacgggttttgaagaagaagcagttcaattgatcaactcagatttcagggacctaagtctagctgctaatagactcgcccatcatgccatcaaacttggtggcattggctttggagcctcttttttcggattgtttgctgccattgctgctatttatctgttgattttggatcgtacaaactggaaaacaaatattctcacagcactactcattccatacattttcttcagcttgccttcattaattttcgacgtcttcaggggagagcttggaaaatggattgctgcagttgctgttgtattacgccttttccttccaagacacttccctgattggctggaattgcctggtgctctgattcttcttatcgttgtagctccttctctaattgcaagcacctttagagacaacattgttggggtggtagtgtgcctcatcattgcatgttatttgctgcaagaacacattcgggcttctggtggtttcagaaactccttcactaaagctcacggcatatcaaattccattggcataatacttctgttggtttatcccatctgggcgctggtggtcatacttttttaggcaccaccatttggacttggttgatatgtgagaattaaaccaagtgtcttctgtatcattcatttgttgcaacttgatatctataaacacccggccattgttttgtgattcatgtttgtcctaagacctaaagttagcatgtgttaaaaagtggaataaaatctcagtttaagtcctctggtttcatagaatgtagaaaacaaaagatgaagaggatgtgatgtggtgtctttctaggctgtagtggtatttcataaaggcatgtatgatttgggaaatcggttgtatttatatacctgtggtgatatatatataatatttacatattgaaaaatgctcgtgtaaaagaaagaaaaaaagaaaaaaa

SEQ ID NO: 1312 - DNA, 1991 bp, Glycine max
actcgagccgaatcggctcgagggcgattgtttttgtttcttttttttttttagcatcatcaagtgaagagcatcatcatgttatagcatttgacccactctcaatggtcctgcatacgtaggactcttacaccccttcttcagtttttctcattttctggttctgttctgttgttgcagacgctgacatgacaaaacaagcttcttcctaagcaatcctctttgctgctttgactcaccaatataaatatcaattgccgtatcctttgcttcacttcactccttctcttctcatattgcttcctttctttctcttcttcaaatggagaaaaaggtccccttttttttctccattctcttattcattgctctgctatttcatggaggaaaggtgttagctttgaattgccaagacggatcagaggaatggggatacgttcaagtcagacccaaagcgcacatgttttggtggctttataaaagtccatatagagtggaagatccttctaagccgtggccaattgttctctggttgcaaggaggacctggtgcttcaggagtagggattggaaattttgaggagattgggcctttggacagaagcttgaagccgcggaattccacatggttgagaaaagcagatctcttgtttgtggacaatccagttggaaccgggtacagttttgtggaggataagaaactctttgtgaaaacagatgatgaggcagccaccgacttgactacattgttgattgaattattcagtggggatgagaaactgcaaaagagtcctctgttcattgtggcagagtcatatggtggcaaatttgctgtcactgctgggttatctgctctgaacgctatagaagatgggaaattgaagcttagacttggaggtgtggcattaggagacagttggatctcccctgaagattttgtgttctcatggggtcctctccttaaagacctctcacgacttgacgataatggactgcaaaaatcaaacagtatagctgagaggatcaagcagcaaattgaggacggtaaatttgttgaagccaccgactcatggggtgaacttgagaatgtgattgctaccagcagcaacaatgtggacttctacaatttattggaggatgcgggaggtgatgacatagcagcaatggagttagggtcatatgagaaattatcaatggagaagtactccagatatcttacttccatgaggtcaaggtcatcatctcctggtggtgatgatgatcttgacaagttactaaacggtgtcataaagaaaaagttaaagatcatccctgagaatgtcacatggggagggcagtctggtgatgttttcaactatcttgcaggtgattttatgagaccaagaattaatgaggttgatgaactgctgacaaaaggggtcaatgtgactgtgtacaatggacaagtcgatctgatttgttcaaccaagggggctgaagcttgggttcataaactaaagtgggaagggcttaaaaatttcttggcgaaagatagaacacctctctactgcggaagtgacaaatctacaacaaaaggctttgctaagtcctataaaaacctatacttctattggatcctcaaagctggccattttgtacccactgatcaaccctgcgtggcactagacatgttgggtgcaattacacagtcaccagctacttgacatttgcatagaaaaggaaataatgttactatttggaaggtgaagcaacatacaagaaaagagtcgacaaacaaaatagaacagcatcatcaagcagtgaacagcaataataaaagactcaatattacagtgatgctattgattgtttgctttaccgtctcattcttttccgaatgtcataattaattatatgcttttttttattccagaaagtcagtccccctttaccgttctgatttttaaatggaaaatgggtaattctcactcaattgtaaataaaacccctagg

SEQ ID NO: 1313 - DNA, 1214 bp, Glycine max
  misc_feature (1187)..(1187): n is a, c, g, or t
gcgtccgctggagccccaaacgcagttgagaaaccaatttcgcgagaaaccagagagaagaaagaaggaaaacagagagagcgcaatggaggagctattcgtagcagttctatcgatgcttcttgtggcagcgttgatcccactctacctatggaaacgccgtcaagattctcaacctccccctccccaccgcgacgaagctcctcaggctccgcggagagaaaccgtggcgcgcgccgccgccactcgtcgcatgcgtcgccgacctgccgcctctggagctagcacttcggcagatccacctgcgacgcaagaaggatctggtggtgagagtgatgatgaagctgccggcggagggtattatgaggctaaagcatcaaagaaaaaggagattaaaaggcaagagagggaagaaaggcgtcaggctgaggaagttgcacgagagtcaaggcttgcaaaacaagatcgttattcagaaatgcggaggttgaaggatgaggagcgtgaggcacaggagcgtaagttggaagaggaagccagagctcagaaggctaaggaggaggaggctgctgcattagagtttgagaagtggaaaggtgaattttcagttgatgatgagggtacccttgaagaagtgcagggtagtactgaagacttgctaggcaattttgttgaatatataaagaagcacaaatgtgttcccttagaagatcttgctgcagaatttaaattgcgtacacaggaatgtatcaatcgcatcacatctctggaaagtatgggtcggctttcgggtgttatggatgatagagggaaatttatttacatctcccaagaagagatgaaagccgttgctgattatattaagcggcaagggagggttagcatttcccacttagcaagtaaatcgaaccagttcattgatttggagcctaaagcccagtactctgaggacattaacattgcggaggagataactgttaactgacattttttttgacttgtgggtggcaggaaaatcgtgttgtacataaaaaaaaaaacaattatctgtggtttgcctagggtttgtttggtacatgactttgaacacagctttagtgtaacaaatttcagatttttcctgtggaaagtacacagtatagaacgagaacgtatttcaagaggcagatcaacgtgtctgaatatgnaattagtcctcaacacactttattggg

SEQ ID NO: 1314 - DNA, 765 bp, Glycine max
ctcgagccgattcggctcgagcacacacatatatatatacacatactacttcataatatccacacaatccaacatggcttaattgatctctcttcaaactccttgcattctttctttctttacaacaatgactttcgaagagaagacaatttatcaaacctctttagcctcaattcccaactacacccttctagagtgtgtcttggggctatgcttcaaagtgataaccatcctccttcagcttccttatgagtacatagacaacaatccaattcccaccatagtcttcaagggtcgcccaagaaccttccatgccttcataacatgcataatcttcgccttctccggtgctaccaatgcacttgtggcattcaataagtcaagattttctaggctttgtgggtattatgcaatggcttctatggcttctgctttggcaattctcttgtgggcagtgtgctgcacaggcatcaattagaatggctggactttgattctgaaactgctatcgctttataaagagtaaacagtgttgtgttgtatgttgaagatttttggtttcaacctcttaggaaactactggtttatgtgagagccagtaagaatgttagataaaagttttgagcaaaattaaaattaattattgattggtaatttattggattaataattataattctaatgcaaaaaacatattaaaattgattacatattagaagatagttggataaatttatgcaaaaaagtcgtattttttgttcctaa

SEQ ID NO: 1315 - DNA, 1847 bp, Glycine max
aaaaaggagaaccttcttttctctgtttttttgttgttattcttcttccagacctaaagacccaaagcaccgattctgatttcaagaattacatcatcatatcaagaaaaccttggaactacacaaaaatggtgtcggcgaacaaggagatggtcgtgcactgctttgacaccctcctcgctcactacaacagcacggaagcacctcctcctgccttcgatcaggctcaacagtaatccctctcatcttttatttctttaataaatattttttattaatactatatacgcttttctgtaaatggtaagacatatttttttgaaaattgttctgtttttttttttaatttcatgagatggtccactgtttaaattttgtgatgttggtgaaattttcttaattttttgctcggataagtaagtgattctgcaatgggaatttgcgtgaataaggttgtgtttagataaatctctccataagcacaagtaaatgaaggaaataagattgtaaaatgaattgagcctctctcatatgttaaaactagtttatgcacctcagcttatggagaagttagatgagagaacttttgtagaagttgagtgcttaggttgattttaatgtatgggagaaatttacttaattgcaccttattttcttctcttgtaagtgcttatagaaaagtttattcaaacaggacttaagtacaaatgggaatttgaagcagtggaagagatattgcgtatttggttttaagaaagaaaagatttgttttccctttagttaagtcatagtttatacctgagctgagttatggaaaaggattttggggaagaggatgtgcccaatttgacaatttctttgcattgaaatggattaatctctgattttgtaagggggaaatccttttagcagtaaataaaaaaactatacttgagtcgacaatatgatataatatggtgtccttgtttcaagcaactatgttttgttttagtccattgtttgttacatggaagaaagtggtgaatggtggagatcctcgtcttcggggttgcatcggaactctggaagcacgcagcttgatcaatgggctcaaagattatgcgctgaccagtgccctcagggaccggagatttccacccatacaagttaatgagctgccgcttttggagtgtacagtgtcccttcttactgactatgaaactgctaaccattaccttgattgggagatagaaaagcatggtataattattgaattttctgatcctgtctataacacaaggtgtagtgctacatacctgcctgaagtggccgccaatgaaggttggacaaaaaccgaagccgttgattctttgatacgtaaagcagggtacaatggtccaataaccgatgaacttaggatgcaaatacagctaaccagataccaaagcaccttatttaccatgcactatagtgagtacgtctcctatgtgaaggagagaagaggtgaagctcctattcttgcggctaaatcacccaactattgaatatgttgcctacctttcttgaggctgcataatttctttactaaaaaaaagaattctgttttcaaatgaattacaaaataaaaaaagaaaacccacttgcctagggtcggaatcaatttgtttgtctaacccaaactaccgaagtgattggtgcaactttctatgctctccaaatttgtgtgcttttgaagagactaagaacattggacttagttcctaggaatgtcctctaccactgcagtttatgaaactgctgcactgttgaactgttttatgtcaatcttattgataacaggaatttcaatttctccaatgttgacaaat

SEQ ID NO: 1316 - DNA, 895 bp, Glycine max
  misc_feature (822)..(822): n is a, c, g, or t
  misc_feature (859)..(859): n is a, c, g, or t
gcggctcgagggagagagaaaaaggagaaccttcttttctctgtttttttgttgttattcttcttccagacctaaagacccaaagcaccgattctgatttcaagaattacatcatcatatcaagaaaaccttggaactacacaaaaatggtgtcggcgaacaaggagatggtcgtgcactgctttgacaccctcctcgctcactacaacagcacggaagcacctcctcctgccttcgatcaggctcaacatccattgtttgttacatggaagaaagtggtgaatggtggagatcctcgccttcggggatgtattggaactctggaagcacgcagcttgatcaatgggctcaaagattatgcgctgaccagtgccctcagggaccggagatttccacccatacaagttaatgagcttccgcttttggagtgtacagtgtcccttcttactgactatgaaactgctaaccattaccttgattgggagatagaaaagcatggtataattattgaattttctgatcctgtctataacacaaggtgtagtgctacatacctgcctgaagtggccgccaatgaaggttggacaaaaaccgaagccgttgattctttgatacgtaaagcagggtacaatggtccaataaccgatgaacttaggatgcaaaatacagctaaccagataccaaagcaccttatttaccatgcactatagtgagtacgtctcctatgtgaaggagagaagaggtgaagctcctattcttgcggctaaatcacccaactattgaatatgttgcctacctttcttgaggctgcataatttcttnactaaaaaaaaaaattctgttttcaaatgaattacanaataaaaaaagaaaacccactttgcctagggtcgga

SEQ ID NO: 1317 - DNA, 857 bp, Glycine max
gcctacggctgcgagaagacgacagaagagggtgtgagttcattaacatatacaaattctctgtgttgtgttgtgtacttgtgttaattgtgttgttgttgtaggaaatttaagtgaagagagaatgatgatgaagtctgctatgtgtgcattggtgcttgtggcactggttgtggttgaagtggggcccatggctgaggctgcggtgacttgcaacccaacacagttgactccttgtcttccggcaattaattcaggttctgcaccttcgagtgcttgttgccagaagctgaaggagcaaaagccatgcttctgtggctacctcaaaaaccctagcttgaagcagtatgttaactctcctaatgccaaaaaaaccgttagttcttgtggtattgcctatccaacttgttaagcacctcttatatatatatataaaatgtgtgaacaatatatatatattgattaaaaaatatagtttaatttatatacacactttgatcctataaaaacatcttgacacaagcattcaatagaatttcaccactttatcatgacattttactataatgatgtggtaataaagtaaattcttgttgaatattttgtataaagatgctttatactcatggtttctgtgtataaattaagcttatatatatttacactatatattgccactttacgtttgtgtgatattaattatacagtcaagtatttattagctatctttgaatatggtgtatacactagtatacatgttgtatccagggaattatggttaaagagctatataaattgagaaataatgatgttctagagtgacaaaaaaaaaaaaaaaaatatagaccaaaaaaatt

SEQ ID NO: 1318 - DNA, 639 bp, Glycine max
tgggacatttgccaatcactgcttgccttattctgccacgcgtccgattggaaattcctgctttggttggaattgccttgcaccctggttttcctatcctagccggacggctattcgtcgcaggttcaatttagagggaagttgcgaagcacttaatagatcatgcgggtgctgcggaagcattttggaagatgaggtgcagcgtgaacattgtgagtcagcatgtgacttggcaactcatgtcttctgtcatgtatgtgctctttgtcaagaaggtcgtgagctccgtcgtaggttacctcatcctggctttaatgctcaaccagtactggttatgattcccccaggagagcagaccatgggacgtgaggcttgaaaattttctccttcatcttggaagtgctattcgtgcgtatattaccgttgtcttgctctatattatataacttgatgttgtcgaaccgtgtgatgactttattaaaagagggccctttattattattatttttttttataaataagaacatgaaacatcatcataatttctgtttgcttccctactgttttgtatcatatatggatttgaaatgatattggagaaatttttctcctagtgtctatgccctaattacattcctt

SEQ ID NO: 1319 - DNA, 1139 bp, Glycine max
  misc_feature (1124)..(1124): n is a, c, g, or t
gggccggaaaaaaataatattataaggaggagacgacgacgcggggaatctccggtctccaccgacatctcttgtattctcttcacaatcccgtgatcccatttcgttccgttcacttcaatctcaatggccgataataagcaacccaatcacgaggaggcaagtcctcttctccaccagtcccaacccaaatccgaaccaccaacgccacctgagactcccgagtttcttctcggatggaccgctgatgggctcccgctgggccacggcagcgtcgtgggccagcccatgggccgcgccccttggaactcctccatctgcgcctgtctcggccaaaccgatcacttctgcagcagcgatctcgaagtttgtcttcttgggagtgtggctccttgcgtgctgtatggaagcaatgttgagagacttgaatctgctcctgggacatttgccaatcactgcttgccatattctggaatgtatataattggaaattcctgctttggttggaattgccttgcaccgtggttttcctatcctagccgtactgctattcgtcgcaggttcaatttagagggaagttgcgaagcacttaatagatcatgcggatgctgcggaagcattttggaagatgaggtgcagcgtgaacagtgtgagtcaacatgtgacttggcaactcatgtcttctgtcatgtatgtgctctttgtcaagaaggtcgtgagctccgtcgcaggttacctcatcctggctttaatgctcaaccagtactggttatgattcccccaggagagcagaccatgggacgtgaggcttgaaaatttcatccttcatcttggaagtgctattcatgcgtatattactgttgccttgtctctatataatttgatgttgttgaaccgtgttatgactttatcaaaagagggtcctgtattttttattttatttttattatgagaacatgaaacatcatcgtaatttctgtttgcttccctactgttttgtatcatatatagattggaatgatttgggagaaatttttttcctagtgtctatgcgtaattacattccttatataacttacattgttatttatctttcatttatggaaattttgtaattaataccnaaaaaaaaaaaaaaa

SEQ ID NO: 1320 - DNA, 2303 bp, Glycine max
tcagctacgtaggccccccccccccttctctttctctccatttcgccattctctccgcgcaccgttttccggcgcagtcgccggcgagtcaccgtcgtttccgccggcaagtctctctcaccgttgccatcctccttcagagaagttgagaaaatggacggccatatgggaatgaggaaaatcagctctcactgctctatccctgatttggatgattctgatatcttacgtttgcttgaaaagccaaagttgaacattgagagacagagatcatttgatgagaggtcactcagtgagctctccattggtcttgcgagagcgggcttggataactatgacacttattctccaggaggaagatctggcttcaacacacctgcttcgtctacacggaactcgttcgagcctcaccccatggttgccgatgcctgggaatccctcagaaaatctctagtctattttagaggccaaccggttggcacaattgcagctgttgatcatcaatcagaggaagttctgaactatgatcaggtttttgttcgagattttgtgcccagtgctctagcctttttgatgaatggtgaaccagagatagtcaggaacttcttgttgaagacactgcatcttcagggttgggaaaaaagagtagatcggtttaagcttggtgaaggtgtgatgccagctagtttcaaagttcttcatgatcctattaggaaaacagatactcttattgcagattttggtgaaagtgcaattggaagagttgctccagttgattctggattctggtggataattttacttcgtgcctacacaaagtctacaggggatttatctttggctgaatcaccagattgtcaaaagggaatgaaacttatactgactctatgcttgtcagaggggtttgatacatttccaactttgctttgtgctgatggatgttgcatggttgatcgaagaatgggcatttatggttatccaatagagattcaagcacttttcttcatggcattgagatgtgctttgtcaatgctgaaacaggatgacgccgaaggaaaggaatgcgtagagcgtattgtgaagcgtttgcatgcactaagttatcatatgcggagttacttttggctcgacttccaacaactaaatgacatttatcgatataagaccgaggagtactcacatactgcagtaaataagtttaatgttattcctgattcaatcccagaatgggtgtttgactttatgccaatgcgcgggggctacttcattggaaatgttagtccggcccggatggattttcgatggtttgctttaggaaattgtgttgcaattctatcttctctggcaactccggagcaatcaatggctatcatggatcttattgaatctcgctgggatgaattagttggagaaatgcccctaaaaatatcttatcctgcaatagagagccatgagtggcgaattgttactggttgtgatcccaaaaataccagatggagttaccataatggaggatcttggccagtgctcctgtggctagtaacagctgcttgtatcaaaacggggagaccacagattgcaagacgtgcaattgaacttgccgagagtcgtttactgaaggatgggtggccagagtattatgatggtaaacttgggagatatattggcaaacaggcaagaaaataccaaacatggtctattgcaggttatctggtggcaaagatgatgctggaggacccctcacacttggggatgatttcccttgaagaagacaaacagatgaaaccggttattaaaagatcatcttcttggacttgctaaattcaggtgatagataaatagtataaaaaacgaatagagaaaaacttagaaagtgagagatattgttgtttcaatacacggcactattcttggtgattcccttcctcgtaggcttgattggaagtttggcttgcttgtgtaaaatagctgctgctgagactggcttcatgcttttcccaaataagtaaaaagacacttcagttcatgtttgctaagtttcaatgctaccgtcccacttgttgcgtgggttaattagtaagataagagaaatcatgaaacattcttcattttattattgtgtttccttatagtttgtcaataaggcttcttttaaaaagggcctagaacaggaaagtattagctttttcatatgaaactttaggtctactgcccacattgctaaaaaaatatggtaaattatgatttttcttttttaccatttttcgttaaaaaaaaataaaatccgttgagttttttttaaa

SEQ ID NO: 1321 - DNA, 1541 bp, Glycine max
tcgagtcagctacgtaggccccccccccccgatatacttgttaattcatatttcactgtgtagaggcaacaaaaggagagtgtgatagtgaagagagtagaagagcggtctggtccaagtgctgcaatatgcaaggcaaagaaatggaagggttgtcgtcttcatcggcgatcgcgcagaaaacatgggaactcgagaacaacatcatcccgatggacactccgggcggcgccgctacctcctccaccgctaccaccacgaccaacgccgacgactcgatcttctactacgacgaggcggggcagaacgagttccagcgcgacaagccctgggccaacgacccccactacttcaagcgcgtgaagatctccgcactcgcgctcctcaagatggtcgtccacgcgcgctccggcggcaccatcgaggtcatgggcctcatgcagggcaagaccgacgccgacgccatcatcgtcatggacgccttcgccctcccagtcgaaggcaccgagactcgcgtcaatgcccaggccgatgcctacgagtacatggtcgattattcccagaccaacaaacaggctgggcggttggagaatgttgtgggatggtatcactctcatcctggttacggttgctggctgtcggggatcgatgtttcgacgcagatgctgaatcagcagtttcaagagccgtttctagcggttgtgattgacccgacgaggactgtttcggcggggaaggttgagattggggctttcaggacttatcctgaagggtataagcctccggatgagcctatttctgagtaccagactattcctctcaataagattgaggattttggtgttcactgtaaacagtattatgccttggatattacttactttaagtcctctcttgattcacacctcttggacctgctgtggaacaagtattgggtgaatacactgtcgtcttctcctctgttgggcaatggagattatgttgctggacaaatctctgatttagctgagaagctagaacaggcagagaatcagttggcacactcacgctttgggccactaatagcacccacgcctagaaagaaagaggaggaatctccacttgctaagattactcgtgacagcgcaaaaataactgtggagcaagtgcatggtctaatgtcgcaggtcatcaaggacattctgtttaactccgttcatcaagcaaacagaactcgcacagaaccatctggtcccgaaccaatgattgaaagttgattctggctcagctagacatgcgtttatatattctttcctttttttggatatgtcctcattatcggccaactcttaacagtaaatctagccttgtattttgcctctttttttccctcgcgctgtgcatattcttgttttatttcacaagagtatgcatgtactgtcaaccatgcagtggaattcatctaacagaaacaaaaccgttggcaaatactaagttaacaaatacaattgtctgtgcttcaatattaaaaatttaaaacttgtaacaaaaaaaaaaaaaaa

SEQ ID NO: 1322 - DNA, 1634 bp, Glycine max
gggccccccctcgagtcagctcgtagcccccccccccgaaaaatcagctacgtaggccccccccccccgcgaggaatagaaacgaaccgaaacggggaatcattgtctgcgtctgtaaattgtaaattgcatcatccctgaagctgaacctcaaaaccctagctgccggcttgtctgcaacggcatcgtttcagtatctcgttatgattagttgagaatccaaaggaatcgaatcgaatcatctcgacgagaagcaaaacaccggctatagttatgtacagagagcgaggaggcgtcggatccaaatcggaggtaacttccgttgatcggaagcgaatcaatgacgtcctcgataaacagctcgaacgatcctcgccgtccacatccagagccgccggcgccatcaacggcaaggaccgctcctcctcttccctcttagccgccgccaaggactcccgctccgcctccgtcaccgcccctatctccaagaattccaacgcttccgacgaggaatctgaaacagacagcgaggagtctgatgttagtggctccgacggagatgacacgtcgtggatctcgtggttctgcaatttgagaggaaatgaattcttctgcgaggttgatgacgattacatccaggacgacttcaacctctgtggattgagcagtcaagtgccttactatgattatgctctggatttgattttggatgttgaatcctctcatggtgacatgtttaccgaggaacagaatgagttaattgaatcagcagccgagatgctttatggtctgattcatgcccggtacatattgacaagcaaaggaatggctgcaatgctcgacaagtacaagaactatgattttggcagatgcccacgagtttactgctctggacaaccttgtattccagttggtcagtcagacatccctaggtctagtactgtgaaaatatactgccctcggtgtgaagacatttactatcctcggtccaagtatcaaggcaacattgatggagcttattttggaactacgtttcctcatctgttcttgatgacttatggacaactaaagccacagaaaccatcacagagctatgtcccgagagtttttggcttcaaacttcacaagccctgaagctgaaattttaagcttccatgaaagagcatgttgtaaagagaattgcagacgcgacatgtcatgcaagtgcttagtttcaatttcagcttggaattcagtgagcttcaagttcaatgagcaagtgcgtaatacttcaatgcactctaagtgcttattgcaaattgtattcttgcggttagttttaattaaagttgtttatgtttgtctcagattacagatactctactattttatattattttattccatttgctcccctcccacatttacataacgtttgaatttgtggattggacctcaatgggttcacacatttagtctgatattcatgacctcaattgctataataatgttagaccggttcgcccagacatcgataatgattatatggtgaatatatgtccctcgaactcgagactctgattcgtgtgcatgcataagtactctctagatgtggaagaatgaacatatcttctcgtcattaattgtatgggtga

SEQ ID NO: 1323 - DNA, 1429 bp, Glycine max
ccactcgagtcagctacgtaggcccccccccgaggaatagaaacgaaccgaaacggggaatcattgtctgcgtctgtaaattgtaaattgcatcatccctgaagctgaacctcaaaaccctagctgtccgcctgtctgcaacggcgtcgttatgatcagttgagaatccaaaggaatcgagtcgaatcatctgaccggcgacagttatgtacagagagcgaggaggcgtcggatccaaatcggaggtaacttccgttgatcggaagcgaatcaacgacgtcctcgataaacagcttgaacgttcctcgccttccacatccagagccgccgccatcaacggcaaggaccgctcctcctcttccctcttagccgccgccaaggactcccgctccgcctccgtcaccgcccctatctccaagaattccaacgcttccgacgaggaatctgaaacagacagcgaggagtctgatgttagtggctccgacggagatgacacatcgtggatctcgtggttctgcaatttgagaggaaatgaattcttctgcgaggttgatgacgattacatccaggacgacttcaacctgtgtggattgagcagtcaagtgccttactatgattatgctctggatttgattttggatgttgaatcgtcccatggtgacatgtttaccgaggaacagaatgagttaattgaatcagcagccgagatgctttatggtctgattcatgcccggtacatattgacaagcaaaggaatggctgcaatgctggacaagtacaagaactatgattttggcagatgcccacgagtttactgctctggacaaccttgtattccagttggtcagtcagacatccctaggtctagtactgtgaaaatatactgccctaggtgtgaagacatttactatcctcggtccaagtatcaaggcaacattgatggagcttattttggaactacatttcctcatctgttcttgatgacttatggacaactaaagccacagaaaccatcacagagctatgtcccgagagtttttggcttcaaacttcacaagccctgaagctgaaattttaagcttccatgaatgagcatgttgtaaagagaattgcagacgacatgtcatgcaagtgcttagtttcaatttcagcttggaattcagtgagctttgagttcaatgagcaagtgcttagatacttaaatgcactctaggtgcttagtgcaaattgtattcttgcggttagttttacttacagttgtttatgtttgtctcagaatacagatactctactattttatattattttattccatttgctcccctcccatatttacacagcgtttgaatttgttggacctgaatgggttcacatatttagtatgatattcaagccctcagttgttatataatgttagaccgttttcccc

SEQ ID NO: 1324 - DNA, 1144 bp, Glycine max
gtgcagcggacgtggtaggcccgtcaggggaggagggggaggggggaacgtcgagaggcggatgggctcgatcgcggcggccgcgccgtccacggcgcgccgcgaaggtctgtactagtcacactatcctctttcataagaggaagtgcagagattcattgactttcaaaaacccaaaaccctaaaaagcgcaagaaaacaaaatccccaaaatatctctcgctctgaaaccgccatggatttgcagcagagcgagttcgatcgcctcctgttcttcgagcacgctcgtaaggccgcagaagccgaatacgagaagaaccctctcgacgctgataacttaacaagatggggtggagctttattagagttgtctcagtttcagagttttcctgaatcgaagaaaatgacccaagaggctgtttcaaagctagaggaggcgcttgcggtgaatcccaagaagcatgacactctttggtgcctgggaaatgctcacacttcacaagcatttttaattccagaccaggacgaggccaaggtttattttgataaggcagctgagtactttcagcaagctgttgatgaggatccttcgaatgaactttaccgcaaatcattggaagtggctgctaaggctcctgagctgcatgtagaaatccataagcatggatttggtcagcagcagcagcagcaggcagcagcaacagctggatcttctacttctgcttcgacaaatactcagaagaaaaagaagagcagtgatctgaagtatgacatatttggatggataattctggcagtcggcattgttgcatgggtgggatttgcaaaatcgaacctgccaccacctccccctccacctcctcgataagtggagccatttgattttatctcatacattattgattattgagaatgatatttgatttcgggcagtgccgtttatttagttttttttgacagtagtaatggttgtcatggggcttatcttatccatcatgcgaaattttatcttaccgtgggttgagcagttaaaatgtccggcttagatctttgctagtatttgcaaaatcgaaatcattgccatttgccatcaggcaagtattgaatataataagaattttgctacagaaaaaaaaaaaaaaaa

SEQ ID NO: 1325 - DNA, 934 bp, Glycine max
ttccggctgcgagaagacgaatttccattagagagaaaatagagatcaagcgcagacatgggaacttaacaaaggaagaaacgcgaattgatgatggaggtcaccaaagacgaagctgcaaccccaggagcaggaggtgctcaacctcgcaatccaaatccaaatccaaatccaactccaaatccaaaccctaaccctaaccctcctcacaccaccagaggatctaaaggaaaatcgtgtaagggatgcacctactactcatcgcttcataaagccaagtccaaaaaccccacatgcgttggtttctccagaacactccagcaagtacccccctttgttgtcggagaatctgagttggaagcttccaaagagggccgcagccttaccaatttcaagtatgcatgtgttggatactctgtctacttagacaacaaagattcttcagctgactcgcaggataaaacagcaaaattgcccttttgcgttggtcttgaggtggtcttagaggagaaagcttcaaattcacatgcaggccatgttcctgctactcataaaactgaagatgaacatgctgctcctcaacctagaagatatatacctccaaatcatacgacagagttcttgaacaggtttcaaagaaatgcaggcctggtggcatctggtgttgccaaaaacttgaacagagtgggtaactatgtgaaagatctcctaaatgacattctaaactaattctacaatgcaccttgcatgggtggtacattcatgctcccttatgttgatttttcatttcaatcctcaccccctaatgtgcaaggcgcattatagaactactccgacattctatttaggcgaacgacggtgacaactgtagttcgtgtacgaaataaattcaattttacacattggccaaaaaaaaaaaaaaaggtcaatttat

SEQ ID NO: 1326 - DNA, 813 bp, Glycine max
  misc_feature (572)..(572): n is a, c, g, or t
  misc_feature (588)..(588): n is a, c, g, or t
  misc_feature (604)..(604): n is a, c, g, or t
  misc_feature (607)..(607): n is a, c, g, or t
  misc_feature (636)..(636): n is a, c, g, or t
  misc_feature (639)..(639): n is a, c, g, or t
  misc_feature (643)..(643): n is a, c, g, or t
  misc_feature (645)..(645): n is a, c, g, or t
  misc_feature (647)..(647): n is a, c, g, or t
  misc_feature (650)..(651): n is a, c, g, or t
  misc_feature (653)..(655): n is a, c, g, or t
  misc_feature (662)..(662): n is a, c, g, or t
  misc_feature (674)..(674): n is a, c, g, or t
  misc_feature (677)..(677): n is a, c, g, or t
  misc_feature (685)..(685): n is a, c, g, or t
  misc_feature (687)..(687): n is a, c, g, or t
  misc_feature (699)..(699): n is a, c, g, or t
  misc_feature (702)..(702): n is a, c, g, or t
  misc_feature (706)..(707): n is a, c, g, or t
  misc_feature (712)..(712): n is a, c, g, or t
  misc_feature (719)..(719): n is a, c, g, or t
  misc_feature (721)..(721): n is a, c, g, or t
  misc_feature (726)..(730): n is a, c, g, or t
  misc_feature (736)..(736): n is a, c, g, or t
  misc_feature (740)..(740): n is a, c, g, or t
  misc_feature (743)..(743): n is a, c, g, or t
  misc_feature (748)..(749): n is a, c, g, or t
  misc_feature (754)..(756): n is a, c, g, or t
  misc_feature (758)..(758): n is a, c, g, or t
  misc_feature (763)..(764): n is a, c, g, or t
  misc_feature (766)..(766): n is a, c, g, or t
  misc_feature (772)..(772): n is a, c, g, or t
  misc_feature (775)..(776): n is a, c, g, or t
  misc_feature (781)..(781): n is a, c, g, or t
  misc_feature (783)..(783): n is a, c, g, or t
  misc_feature (791)..(791): n is a, c, g, or t
  misc_feature (793)..(793): n is a, c, g, or t
  misc_feature (805)..(805): n is a, c, g, or t
  misc_feature (808)..(810): n is a, c, g, or t
  misc_feature (812)..(812): n is a, c, g, or t
ggggcttacgacggtccggccccccctgggtagctcgtaggccccccccccccgttttgtggtgaattgtcgtctttccccggccattagaatagagatcaagcgcagacatgggaacttacaaaggaagaaacgcgaattgatgatggaggtcaccaaagacgaagctgcaacgccaggatcaggaggtgctcaacctcccaatccaatttctaacggtaaccctaatccaaatccaaaccctaacccgaacatgcctcacacccccagaggatccaaaggaaaatcgtgtaagggatgcacctactacacatcgcttcataaggccaagtccaaaaaccccacatgcgttggtttctccagagcactccagcaagtacccccttttgttgttggagaaactgagttggaagcttcaaaagagggccgcagccttgcaaatttcaagtatgcatgtattggatactctgtctacttagacaacaaagattcttctgctggctctcaggataaaacagcaaaattgcccttttgtgttggtcttgaggtggtcttagtggagaaagcttcgnattcgatgctggccanttcctgtactctaatnctnctataacatgtgctctcatcctcaagatnttnctcntntntgnngnnnttgttgntcggttcataanttncggctggngntctgggtacaanctnacanngggcncatcgancnctctnnnnnttctantcanccntgttnngtctnnntncctanngntatttntcnncccgngnggtggttnantttgtttttttnaannngnc

SEQ ID NO: 1327 - DNA, 1663 bp, Glycine max
acgccgccgcgtaggccccccccccccactctcattataatagctgtttcatacctttccctgtttttgttttttcagttgcaacaaccctagtaactctctaaaagatcaaggaaggaaggaagcaagatgttgggtgttataaggcacaagagtattcgccatgccttctccgcaataagacacttgtcttctgcagctaaagagattactgtcagggaggctctgaactccgcactcgatgaggaaatgtcagctgatcctaaagtgttcttgatgggtgaagaggttggggaatatcagggtgcatacaagatatccaaggggctgctcgaaaagtttggccccgagagggttcttgatactccaatcactgaggctgggtttgctgggattggagttggtgctgcttactatggtctaaggcctgttgtggagtttatgacttttaacttctccatgcaggcaatagatcatattattaactctgccgcaaaatcaaactacatgtctgctgggcaaatatcggtacctattgtctttagaggacccaatggtgctgctgctggggttggtgctcagcattctcaatgttatgcatcttggtatggctcatgccctgggttgaaagtcttgtcaccatattcatctgaagatgctcgtggtttgcttaaagctgctataagggaccctgatcctgttgttttccttgaaaatgaattgttatatggtgagtcattccctgtttcggccgaagttcttgattccagtttttgccttcccataggaaaagcaaagattgagagggaagggaaagatgtgactattacagcctattcaaaaatggttggctatgctctcaaggctgctgagacactggcaaaggaaggaatcagtgctgaggtcattaatttgcgttcaatccgaccgcttgatcggtccacaatcaatacttctgtcaggaaaaccaacaggctggtgacagttgaagaagggtttcctcagcatggtgttggcgctgaaatctgcacatctgtcattgaggagagttttggttatctagatgcaccggttgagagaattgctggggctgatgttcccatgccttatgcagcaaatctggaaagaatggctgtcccacaggttgaagatattgttcgtgctgcaaagagaacatgctacagatccgtgcctttggctgcatccgcttgaatgttctggaaatttttcatgccatggtcagttctttgtagaagcaaaaaatttccttaatttccaccataaaacagcaggaagaaattgtaaccaaagaatgttagtcttaactcatttgttatgttaggctttggtttaaaagattctgtcatatgcataatactgtcttaattttcaggactcacagatgctatacatttttttcccatctcagcatatctgggaggaagttaatgttaaataacttagacaacagtgacacaaggcagcaggaagttttcaatgtttttggtttctgcttggcaataactaaaagtcaactttttgaatacattatttccagcggaccactttagtgcaaagatctaacttgctgttatttcatcttcgtttactgttttagttacattggcaaactagagatatttgatttgatgtgaggtcctta

SEQ ID NO: 1328 - DNA, 1658 bp, Glycine max
tcagctacgtaggccccccccccccaagagagggtaggctgttacggtttggtttggtggttatttgattggtgtgcatccatgttaagctagtggcgatcggatccagctacagcctacaacctacagatcaaggaaggaagatgttgggtgttataaggcacaagagtattcgccccgccttctccgcaatcagacacttctcttctgcagctaaagagattactgtcagggatgctctcaactccgcactcgatgaggaaatgtcagctgatcctaaagtcttcttgatgggtgaagaggttggggaatatcagggtgcatacaagatatccaaggggctgctcgacaagtatggccccgagagggttctcgatactccaatcactgaggctgggtttgctgggattggagttggcgctgcttactatggtctaaggcctgttgtggagtttatgacttttaacttctccatgcaggcaatagatcatattattaactctgccgcaaaatcaaactacatgtctgctgggcaaatatctgtacctattgtctttagaggacccaatggtgctgctgctggggttggtgctcagcattctcaatgttatgcatctttgtatggttcatgccctgggttgaaagtcttgtcaccatattcatctgaagatgcccgtggtttgcttaaagctgctattagggaccctgatcctgttgttttccttgaaaatgaattgttatatggtgagtcattccctgtttcggccgaagttcttgattccagtttttgccttcccataggaaaagcaaagattgagagggaaggaaaagatgtgactattacagcctattcaaaaatggttggctatgctctcaaggctgctgagacactggcaaaggaaggaatcagtgctgaggtcattaatttgcgttcaatccggccgcttgatcgatccacaatcaatgcttctgtcaggaaaaccaacaggctggtgacagttgaagaagggtttcctcagcatggcgttggcgctgaaatctgcacatctgtcattgaagaaagttttggttatcttgatgcacccgttgagagaattgctggggctgatgttcccatgccttatgcagcaaatctggaaagaatggctgtcccacaggttgaagatattgttcgtgctgcaaagagagcatgctacagatctgtgcctttggctgcatctgcttgaatgttctggaaaattttcatgtcctggttagttctttgcagaaacaaaattttccctattttccgccacaaaacagcaggaagaaattgcaaccaaagaatgctgattttaactcatttattatgttaggctttggtttaaaagattctgttgtatgcataatactgtcctaattttcaggactcacagatgctatacattttttccccttctcagcatatctgggaggaagttaatgttaaataacttgtacaacaatgacacaaaggcagcaggaagttttctgcgtttttggtttctgcttggcaataactaaaaatcaactttttgaatacattaaaaaaaaaaaaaaaaaacggggcggcggggtgggtggcggccgctttagaaggcatccaagtcttacggtacggcgtggcatgcgacagttca

SEQ ID NO: 1329 - DNA, 2220 bp, Glycine max
tccaacccaacccaacccaacaaatacaacataacacatcccgtccgcactccccggtcgcccacgtccaccaccacctccaccgcttctctctctcgggttcggatctccgatcgccgccgcaccgcgaaacgagtttccaaactcagaatccagatccctacttcaacaaacaaacaaacatgattgcgattccgtatttaaccgccttaaccacctacttcagctacgggttgctcttcgcctttggccagttcagggatttcttccggaaaatcttcgactggtgcagcgccaacactctccagggttacgcgccgatctgcttagggctcgaagatttctacattcgccgtttgtacctccgaattcaggactgttttgggagaccaattgcaagtgctcctgatgcttggtttgatgttgtcgaacgctactcgaatgataacaacaagacactgaaacggactgataaaataagtagatgccttaatttgggatcatacaactatcttggttttgcggcagcagatgaatactgcacacctagagtagttgatacgttgaagaagtattctcctagcacttgcagtacccgtgtggatggggggacaactgcacttcaccttgaattggaggagtgtgttgcaaactttgttgggaagccagctgctatagtttttggtatgggctatgtgacgaactctgctattcttccagtcttgatgggaaagggaagtttgattattagtgattcattgaaccacaactccattgttaatggtgcacgaggatcaggagcaacaattcgtgtttttcaacataatgagccatctcatctagaagaagtgttgagagaacaaattgctgagggacaacctaggacacataggccttggaagaagataatggttattgtggaggggatatacagcatggaaggagagctttgcaaacttccagaggtcatagctgtatgtaaaaaatacaaggcttatacatatttggacgaagcacacagcattggagctgtgggcaagacaggaagaggtgtttgtgagctcttgggtgtggatactgctgatgttgacattatgatgggaacattcaccaaatcttttggatcctgtggaggttacattgcgggatcgaaggaccttatccaacacttgaagtacgcttgccctgctcatctttatgcaacttcaatttcaccaccggctgcacaacaaataatttcatccataagagttattcttggagaggatggttccaatagaggtgcccagaaacttgcacaaattcgagaaaatagcaactttttcaggtcagaactgcagaagatgggatttgaggttcttggggataatgattctccagtaatgccaatcatgctttacaaccccgccaaaatccctgccttctcaagagagtgcctcaagcagaatgttgctattgtgacagtggcatttcctgcaaccccactgctactggctagagcacgtatatgcatatctgcagctcattcaagggaggaccttatcaaagccttgcaggttattagcagagtgggtgatcttgttggcataaaatacttccctgctgaaccaacaaagcagcaacaagaagggggtaaaactgtgaagtttgattgagagagaaacttttctttaagcagaaatgggattagagactactgaagatagagatgtagtgataagaaagcaatttgtttaaacaagggattggtttgaaactggctggtgtcttctgtacatgaattcattgccatatttggaagtgtggattttgcccagagcagcagatccatataattgttctcagattcaagtgaacgtctcttggagggaagtctgttcttattttgcccagtcattagataatatgtataggtggagtttggttattcatttgaaacttacttttgcttggaattttaatcaagtaaaattgatgatgatacattgggttgtaattttgaatgcgagcagtcctttggaaagtgtataggccactttagcaatgttttttttacaataggctgtctacttgaattgtcatgtgggcatgggtttctagtttcctcaaaagctgacggtcaaaatccaattttcttacccacatcttgctcatgatatttcatttgccaatttgataaaaaataatataataaaaaaaaataaaaaaaaaaaaaaaaaa

SEQ ID NO: 1330 - DNA, 1005 bp, Glycine max
atttgtttccctccctccgcgtcacgctgagccggacaacaaataagatgaaaaacgtaggaaaattagagtttagtggagaattatagaaattacggtcccttcttctaattgtgtgcgagtagctgttcttctgcttctgctttacaagttttgttgccatggaagcagagttggataccgagcagcagcagcaaatgacggaaggaagctattcccaaactatgcaaattgatccaaaaagggctcgatttccatgctccgttgtgtggtcaccacttcctgtaatctcgtggttcattccttgcattggtcacattggcatctgcagagaggatggggtgatattggattttgcagggcctaattttgtgtgtgtggacagttttgcatttggagctgccactcgctatcttcaaatccccaaagaaaagtgttgtgtccccttagtccagtctgtgtacaatggtgaggaacactacatgcagggtgaaactagaggagatttgaggacttgggatgatgcactaaggaaaagcactcaagaattccaacatctatcttacaatctctttacctgcaactgccactcgtttgttgccaataatttgaacaagttgggttttctgactggtggatggaatgtggtgaatctggcaattttcattttattcaatggacgttgggtcagcaaagcatctatgcttcgatctatcttaccatttgtggttgtattttttcttggagtcacattctggggcttcaccttcctaaagttttggttcttcttcacttccattcttattgggtggttccttcttggtacttattgtttcaagaacctgattcagttgtagtatctgtttctcttgttctactttgtataaaactgtaatacgttcgaagtgatggaagtgacccaattaaccatatactttgtattcagataaattttgttgctaaatgttaaaggcttgttcttgtggtaaaaaaaaaaaaaaaaaa

SEQ ID NO: 1331 - DNA, 1265 bp, Glycine max
gagagaactagtctcgagtttttttttttttttttttactcacgaaaatcataaacatccattcattaatacggctgcgagaagacgacagaaggggatccaaatccaccccaacacaaatcttagccgccattgatttttcctcttccatttctcttactttctcagcctttttcgattacccatttggttatttcgccctaatggctcttgctccatccaaagtttccaccttttctggtttttctcccaaacccagtgttgggggtgctcagaaaaacccaacttgctctgtttctctgagctttttgaatgagaaacttggaagcagaaaccttagggtttgtgcctcaacggtgcctctcactggggtgatttttgaaccgtttgaggaggttaagaagagcgagcttgctgttccaactgctccccaagtctcgttggctcgtcagaactacgctgatgagtgtgaatctgcgattaacgagcagataaatgtggaatacaatgcttcctacgtgtaccactccttgtttgcatactttgacagggacaacgtggctctcaagggatttgccaagttcttcaaggaatctagtgaggaagaaagagagcacgctgaaaagctcatgaaatatcagaacactcgcgggggaagagttgtacttcaccccatcaagaatgtcccctcagaatttgagcatgtggaaaagggggatgcattgtatgcaatggaattagctttgtctttggagaagttagtgaatgagaaacttctgaatgtgcacagtgtggcagatcgcaacaatgaccctcaaatggccgacttcattgaaagcgagtttttgtctgaacaggttgaatcaattaagaaaatttcagagtatgtggctcagttgagaagggttggaaagggtcacggtgtttggcactttgatcaaagacttcttgattaggaagatgctgcttaatcttgaatagccttattattagtcttcatttacatttggtcttttctgaaattctgggttgttttctaatttagtagtatttaaatgtttttcctatgtactgagatttaggaactcggagtaatgtaattgctagtagcacatgtaaaaggctgcaagcctattatgcaataacatttgatatctgcatttcaattatctccagtaaaatgtcattggttaaagctttcaattaagagatataaatgggtgcccgcaactaggacgctcgtcaacccggttattattccggac

SEQ ID NO: 1332 - DNA, 1170 bp, Glycine max
cccacgcgtccgcccacgcgtccgcccacgcgtccgtacggctgcgagaagacgacggaaggggatccacatcctccacaacacaactccactcttagctgccattggtttttcttcttccatttctcttcctttctaagcttttttcgattacccatttggagattctgtcctaatggctcttgctccttccaaagtttcctccttttccgggttttctcccaaacccagtgttggggatgctctgaaaaacccaacttgctctgtttctctgagctttgcgaatgtgaaacttggaagcagaaaccttagggtttgtgcctcaactgtgcctctctcaggggtgattttcgaacccttcgaggaggttaagaagggtgaacttgctgttccaacggctccccaagtctcgcttgctcgtcagaactacgctgatgagtgtgaatctgccattaatgagcagataaatgtggaatacaatgcttcctatgcgtaccactccttgtttgcatactttgacagggacaacgtggctctcaagggatttgccaagttcttcaaggaatctagtgaggaagaaagagagcacgctgaaaagctcatgaaatatcagaatactcgcggtggaagggttgttcttcacgccatcaagaatgtcccctcagaatttgagcatgtggaaaagggggatgcattgtatgcaatggaattagctttgtctttggagaagttagtgaatgagaaacttctgaatgtgcacagtgtggcagatcgcaacaatgaccctcaattggcagacttcattgaaagcgagtttttgtctgaacaggttgaatcaattaagaaaatttcagagtatgtggctcagttgagaagggttggaaagggtcacggtgtttggcactttgatcaaagacttcttgattaggaagatgctgcttaatcttgaattaccttattagtagtcttcgtttacctttggtcttttctgaagttctgggttgttttctattttaaaatagtatttaaatgtttttcctatgtactgggatttaggaactcggagtaatgtaattgctagtagcacatgtaaaaggctgcaagcctattatgcaataacatttgatatatgcttttcaacgaaaaaaaaaaaaaaaaaaaaaaaaaaaa

SEQ ID NO: 1333 - DNA, 1618 bp, Glycine max
gcgtgaggtaggtgaagacctctcggacttggaacgcagaacgaatgattcatcaatttaggagagttttggccgccaaataaacactctcactataaactccaaagtcccaacgctaaaccaaaccaaaactaaaacaatgttgtctgtctgagtttacattgagagtgcccaagttcgaattcgaaagcaaaaacatgtttttggcgagacccattttccgaggaccctccctttgggcgttgcactcttcctatgcatattcctctgcctctgcagctgctattcaagctgagagaaccatcaaagaagggcccagaaacgattggagccgagaccaagtcaaatccatctacgactctcccattctcgatcttctcttccacggggctcaagttcacagacatgctcataacttcagggaagttcagcagtgtactcttctgtctatcaaaacaggagggtgcagtgaagattgttcctattgtcctcaatcctctaagtatgatacaggagtcaaaggccaacgccttatgaacaaggaagctgttctccaggctgcaaagaaggcaaaagaggctgggagcactcgcttttgtatgggtgctgcgtggagggatacactaggaagaaagaccaacttcaaccagatccttgaatatgtgaaagacataagggacatgggaatggaggtttgttgcacccttggcatgctggagaaacagcaggctgttgaactcaagaaggcaggtctcactgcttataatcacaatcttgacacttcaagggagtattatccaaacataatcacaacaaggacttatgatgagcgtcttcaaacccttgagtttgttcgggatgcagggatcaatgtttgttctggaggaattatagggcttggagaagcagaggaggatcgtgtaggtttgttacatacattgtcaacactccccacccatccagagagtgttcctattaatgcacttgttgctgtaaagggaacccctcttgaggatcagaagcctgttgaaatatgggagatgattcgcatgatagcgactgcacgtatcataatgccaaaagcaatggtaagattatcagctggcagagttcgattctccatgcctgagcaggcattgtgctttctggccggtgcaaattctatattcactggtgaaaagcttctcactactcctaataatgattttgatgctgatcaactcatgtttaaagttcttggactcctcccaaaagctccaagcttaaatgaaggtgaaactaatgtgacagaagattataaggaagcagctttttctagttgagctgtcaacggtttttaaaaagtgtgatctttcaatttctctaattgctcattagcatgtactgatgttaggtttcattgaattttgtctattctcagctttgaagacacaaactccaacagttaaaaataaatattgaaattatttatttttcactaaatgggttttttttcaagcttaaaataaatgtaaaaaagatgttgacccttttcagcgtgatcattctaaaattatgccccaatatcatggtggtggttggagttttgccaaaaaaaaaaaaaaaaaaaaaaaaaaaa

SEQ ID NO: 1334 - DNA, 1645 bp, Glycine max
tccagtcagctacgtaggcccccccccccgaggtgaagactgaagaggtagctagtactgctccctctgcgacttcgtttcgtagagggattttggccgccaaataaacagtctcaccataaactccaaagtcccaacgctaaacgaaaccaaaccccaaacacaaataccgttgttgtctgttgtctctgtcgtgtctatattcgcagatctctcactcattctctgttgtttctctgcccaacttcgaattcgaaagcaaaaacatgtttttggcgagacccattttccgagcaccctccctttgggcgttgcactcttcctacgcgtattcctctgcctcagcagctgcaattcaagctgagagagccatcaaagaaggacccagaaacgattggagccgagaccaagtcaaatccatctacgactctcccattctcgatcttctcttccatggggctcaagttcacagacatgctcataacttcagggaagttcagcagtgtactcttctgtctatcaaaacaggagggtgcagtgaagattgttcctattgtcctcaatcctctaagtatgatacaggagtcaaaggccaacgccttatgaacaaggaagctgttctacaggctgcaaagaaggcaaaagaggctgggagcactcgcttttgtatgggtgctgcatggagggatacactgggaagaaagaccaacttcaaccagatccttgaatatgtgaaagacataagggacatgggaatggaggtttgttgcacccttggcatgctggagaaacagcaggctgttgaactcaagaaggcaggtctcactgcctataatcacaatcttgacacttcaagggagtattatccaaacatcatcacaacaaggacttatgatgagcgtcttcaaacccttgagtttgttcgtgatgcagggatcaatgtttgttctggaggaattatagggcttggagaagcagaggaggatcgtgtaggtttgttacatacattgtcaacacttcccacccatccagagagtgttcctattaatgcacttgttgctgtaaagggaacccctcttgaggatcagaagcctgttgaaatatgggagatgattcgcatgatagcaactgcacgtatcgtaatgccaaaagcaatggtcaggttatcagctggcagagttcgattctccatgcctgagcaggcattgtgctttcttgctggtgcaaattctatattcactggtgaaaagcttctcactactcctaacaatgattttgatgctgatcaactcatgtttaaagttcttggacttctcccaaaagctccaagcttacatgaaggtgaaactagtgtgacagaagattataaggaagcagcttcttctagttgagttgtcaacggtttcaaaacaatatctgtgatccttcaacttctctaattgctcattagcatgtactgatgttaggtttcattgaatttgtctaatctcagctttgaagacacaaactccaacacttaaaaataaatattgaaattattgatttttccctaacagggttatttcaaaattgaaataaatgtgtaaaaaagatgttgacagttttctgcgtcgtcattctaaaaatatgctccaatatcatggtg

SEQ ID NO: 1335 - DNA, 1476 bp, Glycine max
acagaatattaggaactagattttgaggtttagcacctccagagaaaaaggaaggagcagaacacgacagagtgagggaagctttgaccaacaatttcaagcaaggcgatttggagaagatttggcagaagcttctgttttgacagtttcctcagacgaagccctgcccccacgttctaggggaacctgacagaggcagttaacgaacaaacagatgggttgggccatagcactacacggcggcgccggcgacatcccgctttcccttccaccggagcgccgccagcctcgcgaggaggccctccgccactgcctccaaatcggcgtggaagctctcaaggccaaactgcctcctctcgacgtggttgaacttgtcgttcgggagttggagaacattccgcagtttaacgcgggaaggggatctgtgctgacttgcagaggcaccgtggaaatggaagcttccataatggacggcaccactatgaattgcggagctgtttccggcctcactaccgtcgtcaacgccatctctcttgctcgattggtcatggaaaacacgcctcacatctatctcgctttcgatggagcagaggaatttgcaagacaacaaggcgttgagactgtggattcaagccattttattacaaaagaaaatattgaaaggctaaagcaggcaaaagaagctaacagggttcagattgattatacgcaacctatccaaaatgatactaagaaagagaccgcattggctaatggtgatagccaaattggaactgttgggtgtgtggctgtagatagtcttgggaatttggcttctgcaacatctactggtggattagtgaacaaaatggtgggtcgaattggtgacacaccagtcattggtgctggtacctatgcggatgcacgttgtgcggtttcagcgacaggcaaaggtgaagcaataatacgtgggacagtggcaagagatgtggctgctctgatggagtttaagggtctttctctcgtggaagctgctaattgtgttgtacatgagcgcacaccaaaaggcactgttggtttggttgctgtgtctgccaaaggagaagttgcaatgccttttaatacaacaggcatgttcagagcgtgtgctactgaagatggatattctgagattgcaatttggcctgctgccaaaatagagtagtctttaggctttactgatttccaagcttaatgtattctgacatttgatgatgcttcacgcatgcttatatcacagggaaatctatctgcttttcaaggtataaatagtcgtttggttcctgatcatagtcttcccaagcgcctctttatccgttacactctgctttttatatagtttgtgctacattgtgaatatgataaccttctatcattaccaaggtgtttataaccatcatcttcctttacatttaggagacctaagaagggtcggtcgcgagttactggtcccgactg

SEQ ID NO: 1336 - DNA, 2000 bp, Glycine max
cgctcgagccgattcggcccgagcaattggaacgagggaagtgttcccgccatgggaatggagcgagtgcagtgtgcctatgcctctctggacgaagcgttcgaaatagggaaagaggcgtatcaggggcagcagtacagccagatttacttcgcgcgccttcatttgatgcgaacacttttatattccctcgttcctcattggaaacccaattttcccgtgtgcacagtgctgggattggaagaggggaaggagtgtgtcattgttggaaccctctataaacacatgaagctcaaaccttgcattcttgatgagtattccaaggagagatcagtggttccacttgtcaagccacataacttcatacacccggatgatcacctagttttggaagatgaaagcgggcgggttaagctcagtgggagtatcattttgccatctgaatatgtaacaggaattgtggttgctttacttggaaaggaaacgggggcaggtgactttttggttcaggatgtcctggatgctggcttaccaccacagatagaattcccccttaaaccaagggaagacaagtatgttgttcttgtgtcagggttaagtgttgggagcagcagctctaatcctcttcagtttcagcttctcattgatcatattacagggcatttaggagatgagaaggagcaaagtatcgcatcacaaattgctcaagttgtctttgctggaaatttaattgagatacctcacagacttcttaatggacagaatttggcttcaaaggatctctcaagaatggctgagccaataaaggagctagatattctgttgagtcagatagctgctggtttgcctttggatatcatgccaggacccagtgaccctgctaatttctcattaccacagcagtcattgcatagatgccttttccctgggtcgtcaacgtataatacttttagatcttgtacaaatcctcattgttttgagcttgataatgtcaggtttcttgggacatccggccaaaatgtagatgatcttgagaagtattcagaggcaaaagataaacttgaattcatggaaaggacattaagatggaggcatttggcacccactgctcctaatactcttggatgctatccttatactgataaggatcctttcttcattgagagctgtcctcatgtttactttgttggaaatcaagataaatttgaaactcgtgtcataaagggatcagaagggcagttggtgagactcatatgtgttcctaaattcagtgaaactggagttgctgttatgctaaatctgagggaccttgattgtcatgctctcagttttggaacgcaattcagctcataacaatgcagaatgaagttccacattcaagtttgttttgcgatgtttgttggtggtgctgctattggtgtatcttggggcataaagccaagaaccgaaaattgaagctgatagtcgaggaaggctacctgtgtttctttagtgtaatatatttttgtagtattgatatatattgacttccatgtttatttttcttattagttttcagtgtaacatagtatttatacattagttaaaaattggtttgcacaaggatggaagtcagtattattggtttggtctcaacctggctggttcaagaggaatcaatcatctgatggtagaatctcactcttttagtcattaagatgataaaggatggctgcttagacacccacctgagtccgcccgactagtcaaatctgttctttcttggaatcacgtattattcagagaggccaaccaagtagctgatgctttatccaaacatggtctttccttggtactactgatagcattgtttttttttttattcagttccgtcttttctttctgttaagatatgtgctgatgtatattgtctacgaccttccctcgtgggttttaataacagttttcttcttaaagctccgttttacttctacctaaaaaaaaaaaaaatcggccgctct

SEQ ID NO: 1337 - DNA, 1672 bp, Glycine max
  misc_feature (227)..(252): n is a, c, g, or t
agcaatagcataagatatggctatggtttaacttatttgaatagggaatttgcagcaactgcttttggacaaaatttaaagttggagcctctcaagcctgagaagaaggctatgtggaaaagagaaatgaattgtcttctatctgtgtgtgattacatagtagaatttgccccaactgcacaatatttagaagatggcacaattgtggaggtgaactatttctaaannnnnnnnnnnnnnnnnnnnnnnnnnaagattgttgtgcatctcataatatgcctaattaatatgttatctgatggtgtctattagatgatgtcaagcagaccaagatcagatgtttacatcaacctcccagctttgcagaagcttgacacaatgctcatagtatgacaaacttcaaaatgcttcttgtttgcgaccaagatcagatgtttacatcaacctcccagctttgcagaagcttgacacaatgctcatagaaatattggatagtttcaaggatactgaattttggtacgcggagcaagggagcatatcggggaattcaactcggtcacgtggaggctcatttcgaaggattgttcagaggaaagatgaaaagtggtggctgccagttccttgtgttcaccctggaggcctctctgataagtcaaggaagcacttgaatgagaaaagagactgtgctaatcaaattcataaagcagcaatggcaataaatagcagtgttcttgcagagatggatatcccagaaacatatatgtctaatcttcccatgcgtggacgaccgaggcggggggacacaatttaccgctgtatgtattctgcagacaagttctcacctgatcaccttcttgactgtctcaaaataagttctgaacatgaagcacttgagctggcagataaggttgagtcttcaatgttcacttggaggcgaaaagcttgtctgagccactcaaaaacatcttggaacaaagttaaggatctcatggctgacactgaccgaagtgacaaaaactacatcttagctgagagagctgagactttgttgttttgcttgaagcaaagatatcccgaactttcacaaacatcattggacacatgcaaaattcaatacaaccaggatgtaggaaaagcgatattagaaagctactcaagagtattagaaggcttagcattcaacattgtagcttggattgaagatgttcttcttgctgataaatcaatgaggaaccaaaatgtatagaaatcgcaactgggttgtacattaccaccctaacactggtgctcttccattcagcatttttttaagctgtttgtactttgtattgaaagccgttcacttgcatctgtatgacaagtagttgttgttagctagctgtattatataaatagttttcacattcgttgaaggattaagcataatatatataatcttctgttcagaaaaactgaaaaactaagaattcttattagtgtaattgcctgattttgaatctagctgattatctatcagaagtgggaggaattgatgttatacccaatagtattaaataagtgtacatcgttcactgaccattgtgctataagcttgacaactaagcaacacaactaagtgtacatagttctacgttctatgccctaaaaaaaaaaaaaaaaaaaaaaaccaaaa

SEQ ID NO: 1338 - DNA, 1062 bp, Glycine max
tttcctttttacatttttttttttggtgatttactgattgctgcttaacttccacagtcgggaatccagcttgcttttatagttgcgcgaagcagtgaagacacgacagaacacaacacaaacacagagaaagagagtgaataaatccagcattgttctgttctctgcaacattctccactctcaaccatggcttcaaagcttttactcatcactgtcttcgtttttgatttgattgcttttggacttgccgtggctgctgagcagagaagaagcaccgctagtgttgtgacggacaatgaaaagaattataattactgtgtctataactctgatatagcaactggctatggtgttggagcatttttgtttctcttggttagtcaagtcctgataatggtggcaagtcgatgcttctgttgcgggaagcctcttaaccctggaggctcaagggcctgtgcagttgttcttttcataatctgctgggtgtttttcatcatagctgaggtgtgcttgttggctggatcagtggaaaatgcctatcacaccaagtacaggaccatcttcggggagaatcctccgtcttgcgaaacagttaggaagggagtctttgctgccggtgctgcttttgttttcttcactgccataatctctgaattctactatatcaactactcaagggcaagggaaagcttccaaccttatgctggcggcgagactggtgtcggtatgggaacctacaaatgagcttctagttaagaattttacagcaaacatttaggtgtgactatatctggagtctggattctgcagcacatttccttgattttagtgcatttattgtatttactgtctagctactttacaagaatggtatacgttgtattttagtaattttttgttgttgttacctattgtcgtatgttatgggtgactgattcattgcctctttacatttttgaagttctttgtcatgtatacatttatcaacaagagaaataatttcttgcattctctgaaaaaaaaaaaaaaaaaagaaaaaaaaaaaaaaaagcgcccgccc

SEQ ID NO: 1339 - DNA, 1283 bp, Glycine max
ccgaaatcacattttttattctttctttctcagactccttcactctctgtgttgccgtttctgtttcttgggcaattcatcctagggaaaacatgaagttctgcaaaaaataccaggagtacatgcaaggccaggagaagaagcttccgggcgtaggattcaagaagctcaaaaagatattgaagaagtgcaggagaaactcttcatcccagaaaccccttcatgcatcccttgccgccaaaacctgccccgaccattgcccagtgtgcgatgggaccttcttcccttcccttctcaatgaaatgtcagatatagtggggtgctttaatcagcgtgctcagaaattgttggagctacatctcgcttctggggtcagaaagtacttcttgtggatcaaaggcaaattacaagggaaccatacggctctgattcaagaaggcaaagatcttgttacttatgcactcataaatgccattgcaattcgaaaaatactgaaaaaatacgataagattcattattccaagcaagggcaattgttcaagtcgcagatccagagtatgcacaaggagattcttcaaagtccctggctttgtgagcttatggccttccatatcaatttaagggaaactaaggtcaagtcaaggaaggcacatgctttgttcgatggatgttctctcacattcaaggatgggaaaccggcacttacttgtgagctctttgattctatcaaagttgacattgacttgacttgttctatatgcttggacaccgtgtttgatccagtttctctgacttgcggccatatattctgctatatttgtgcatgctcagctgcatcagtatctattgttaacggacttaagtctgcagatcctaaaatgaagtgtcctctatgtcgtgagggagcagtttatgaaggtgctgtgcacttggaagaattaaatattctgttaagccgaagctgtcaggaatactgggagcagaggattcagacagaaagggtggagagggttaagcaaataaaggaacactgggattcacagtgtagggcattcgtgggcgtctaagtacagcatgcaattttcttagtttcttttgtagagtttaaggtttgtagttttggctgaaatgtgaatatgcatctgtttaatagtttttgtgtatataatattctgaataaggcaaagccgcttttaaactatttgtaagtttttttgtgggaatgtcgttacttcttgccttacttataaagtaagggattctaattctattttagactaaaa

SEQ ID NO: 1340 - DNA, 1398 bp, Glycine max
tcagctacgtaggccccccccccccgggcagaaacagaagcacatcaccacgaaccaatcccaacctttcagttcccccacaaataaaatagttaccacaacccactattagttgcttgctgcgagcgaatccctctctctatctctcacacacactttctctctctctctctctcacccagatcttgtagcaatggcgagcgctcccactccacgcgaagagttcgtgtacatggcgaagctggcggagcaggccgagcgctacgaggagatggtggagttcatggagaaggtctccgcctccgccgagagcgaggagctgaccgtggaggagcgtaacctcctctccgtcgcctacaagaacgtgatcggcgctcgccgcgcctcctggcgcatcatctcctcaatcgagcagaaggaggagagccgcggcaacgaggaccacgtcgccgtcatccgcgactaccgctccaagatcgaggccgagctctccaacatctgcgacggaatcctcaaactcctcgacacgcgcctcgtcccctccgccgcctccggcgactccaaggtcttctacctcaagatgaagggagactaccacaggtacctcgccgagttcaagaccggcgctgaccgcaaggaggccgccgagagcacgctctccgcctacaaagccgctcaggacattgctaataccgagttgcctccaactcaccctatcaggctgggtcttgctctgaacttctccgtgttttactatgagattcttaactctcctgatcgggcttgcagccttgcaaaacaggcttttgatgaggctattgctgaattggatacattgggagaggagtcatacaaggatagcactttgatcatgcaactgctacgtgataacctcaccctctggacctctgacatgcaggacgatggtgcagatgaaattaaagaagccgcacccaaaggtgacggggaacaaaattaaacataccatactctctgcttattagtcattgaacttcccttctgtaatgttttcaaagggagaaggtgttgaatgctaatctcaatgttactgagattttgggcattcgtgttcttcgttatgaattgtggatgtactgggctattttagtttgtccttccatttatacgcgtttctgaactgcctattttcttaatgacactgaaatttccattatgatgctgtttagaatattaccaagatgttgttctctttagcaaacttcgtattgctcattattttaggatgcgaaggtgtgacacctttcatttgtttttattctaaagcctcggaatcataactctgatcgattttaacgtgttttttgttgtgagggttttcaacttcaaaaaaaaaaaaaaaaaaaaaaaaaaaacctt

SEQ ID NO: 1341 - DNA, 1348 bp, Glycine max
cagtctcttcggttcccccacaaataaaatagttaccacggcccgtttgcccctcgctgcgagcgaatccctctctctctctttctctttctctctcatccagatcttgcaaaaaaaaaaaaacacaatggcagcgagcgctcccactccacgcgaagagttcgtgtacatggcgaagctggcggagcaggccgagcgctacgaggagatggtggagttcatggagaaggtctccgcctccgccgagagcgaggagctgaccgtggaggagcgcaacctcctctccgtcgcctacaagaacgtaatcggcgctcgccgcgcctcctggcgcatcatctcctccattgagcagaaggaggagagccgcggcaacgaggaccacgtcgccgtcatccgtgactaccgctccaagatcgaggccgagctctccaacatctgcgacggaatcctcaagctcctcgacacgcgcctcgtcccctccgccgcctccggcgactccaaggtcttctacctcaagatgaagggagactaccacaggtacctcgctgagttcaagaccggcgccgaccgcaaggaagccgccgagagcacgctctccgcctacaaagccgctcaggacattgctaacaccgagctgcctccaactcaccctatcaggctgggtcttgctctgaatttctctgtgttttactatgagattcttaactctcctgatcgtgcatgcagccttgcaaaacaggcttttgatgaggctattgctgaattggatacgttgggagaggaatcatacaaggatagcactttgatcatgcaacttcttcgtgataaccttaccctctggacctctgacatgcaggatgatggtgcagatgaaattaaagaagccgcacccaaaggtgacggggaacaaaattaaacataccatacttctaattagtgattgaacttcccttgtgtaatgttttcaaagggagaaggtgttgaatgctaatctcggtgttactgagattttgggcattcatgttcttcgttatgaattgtggatgtactgggctattttagtttgtccttccattagtacgcgtttctgaactgcctattttcataatgacactgaaatttccattataatgctgtttagaatattaagatattgttctctagcaaacttggtattgctaattgttttagcatgtgaaggtgtgacacctttatttgtttttattctaaagcctcggaatcatttattccgatcgattttaacgtgtttttgttgtgaggattgtcaactccattatgtttgggtgcatggggttatgcagaatttgatataaaaagtatgatttct

SEQ ID NO: 1342 - DNA, 1375 bp, Glycine max
ataaccatcatccatctttttgttgttgttgatcacctcctcaacccactattccaccttcttctacgtttttctcttcccaccccttagtctcagaatcagatcacaccaccgcaaaaccctaaattcaattttctccatttccgatcttgcccccggactgcaaatggggagcaggagggacgaggcgcccgccataaacaacaccaacgtcttcgcggcgctcggcagcttgaagaagaagaagaagcccgagaaggaccaggaccagggcccgtccaagtccaaggcccaggacaacaagaaggacgtcttttgggcccccgcgcctctcacctccaagtcatgggccgatgtcgacgacgaagatgacgacgactactacgccaccaccgctcctcctgaatccgtttgggctgcgtctcccgtcactctaaacgacgccgccgctgctgctgctgctgaggaaagtgagagtgagttggaaggtcttgatgatgcagatgatgatggtgaggaagaacatgaaaatgacttagaagtgacagaagaagctgagcctgttctccagaagcctcctgaaccaccagtggttacaaaagaagctgaaaggcaactttcaaagaaggaattaaagaaaaaggggcttgaagaacttgaagctgttttggctgagctaggatacacacgaaaggaacccactggtcaagaagatgattccaatggtgctgagaagaaagaagaggatcctaagggtgctgtggagaagaaggagaatgctactggggaaagcaaaaatgctaaaaagaagaagaagaaggaaaaatcttcaaaggagcagaaagaatcacaagaccagcttgatggcttggatgctggaactggaaatgcaacttctgaaactgctgaaacggagaaggctgaggatgcatctgcaattgatgttaaagagaggctcaagaaagttgcttcaatgaagaagaagaaatcaagcaaggagatggatgctgctgcgcgtgctgctgctaatgaggctgctgcaaggaatgcaaggctagctgcatccaagaaaaaagagaaggcacactacaatcaacagccagtgcggtaaacggggtgtcaaagtgactgtatcttctctttggtgtttaattttccttttgtcctttttcatttgctatctttctatgtcatatatatgagcatatgctctttgttcatttgcaaatgcaaaataaacactggagcggctttaggtaatttgactttgagtaagttttgtctaattttatacttggtggggaatagaagtatttattggtgtatgttgttcatctttcttcagtattgcctctatctagttgctggatcagcc

SEQ ID NO: 1343 - DNA, 934 bp, Glycine max
  misc_feature (186)..(211): n is a, c, g, or t
aattagattctttagggattcaccaagcaaacaatggtaaacaaattatgggaacaaaacccaactttaatagaagtagaaacccctagaaagctatagaaggtaattaatgtacgtgtctccatgcatgggtatctttaatagaattcctcgaaaatactagacactggtcttgttttctatatnnnnnnnnnnnnnnnnnnnnnnnnnngcattgtaagaaagcccttcatcagagataacttgacaaataaaatcaccatgtctatcatcccaaacttgttcggtggtagacgaagcaacgtcttcgacccattctctctggacgtatgggaccctttcgaggggtttcctttttccacaggtcacgtgccttcctctggtggggaaagcagtgccatagccaacactcgcgtggactggaaggagactccggcggctcacgtgttcaacgttgatcttcccgggttgaagaaggaggaagtgaaggttgaagttgaagatgggagggtgctgcagattagtggtgagaggaccaaagaacaagaacagaaagatgataggtggcaccgcgttgaaagaagcactgggaagttcatgaggaggttcaggcttcccgagaatgccaaaatggatcaggtcaaggctgctatggagaatggagtgctaactgttactgtgcccaaggaggaagacaagaaacctcaagtcaagtcaattcaaatatctgcctagatctttaattggttgttgctgtctctcattccaaacaagtgtgttctgttctgtctttactgtatgttgttccatgtatgtgtttatgctgtgtgttgtgctttatgtcatttgtgagggtttaatactggggaagttgaaagttttccgttaaatgtatcaataaacttttattgctttatctcggaaaaaaaaaaaa

SEQ ID NO: 1344 - DNA, 1525 bp, Glycine max
gcacgacacaatctaaacctcggaagagagagaaagagagagacaacgaagaaaagaacctgttcttcaccagaacggagtttggttttataggaaccctcctattcatccatttatcgatccacgtccatccccatctttcttctcctattctctctgttttcttttcttcttctaaaaagtgagagaagaaaaaagggaattgaaggaagaagattgagaaaaaagggggaatgcccagataattaattcggtgaaatttcggattttcgtaagtgggtgtttctcttttcgtgtttttaccttcagtggtggaaggaagggggtttggtttggtgagttgatggacttgatgagcgttgagtgtgtgtcatcctcggacggcatggatgaggatgagatccacgccaaccatcatcactctgagttttcttccacaaagcctcgcaatggaggcactagtaacatcaattctgtgggccccaacggaattgctccggcaaccagcgtccatgagttgctggaatgtcctgtttgtactaattcaatgtaccctccaattcatcagtgtcacaatggccacacactgtgttccacatgtaaaactagggtgcacaaccgatgtcccacttgtagacaagagcttggagatattaggtgtctggcactggagaaggtggctgaatcacttgagttaccttgcaagtactactcccttggatgtccagaaatctttccatactacagcaagcttaagcatgagacagtatgcaattttagaccatatagttgtccttatgctggatcggagtgttctgttgttggggatattcctttccttgttgctcatttgagggacgatcataaagtggacatgcacacaggatgcacattcaaccatcgttatgtgaaatcaaatccacgagaagtagagaatgccacttggatgctcacagtatttcattgttttggccaatatttctgccttcattttgaagctttccagcttggcatggcccctgtatacatggcattccttcgttttatgggtgatgaaaatgaggctcggaattatagctatagcctagaggttggggccaatggtaggaaactcatttgggagggtacaccacgaagtgttcgtgatagtcaccgtaaggttagggatagccatgatgggctcattattcaaagaaatatggccctatttttctctggtggggatagaaaggagctgaagctcagagtcacaggaagaatatggaaagaacagaattcagatgctggggtgtgcatgccaaatctctgtagttgacatgttatttgaaaggaattcttacatgtgtttctgacactcttttgagatatatttgtaccaactttgtgcatgttgtaatagattaaggcactaaggtggctctgaaattttcagatttcataagctgtgtaataaacaagattttcttccttcaaaatttgcttgattggaattcgtattccgtgctttaaaaaaaaaaaaaaaaaa

SEQ ID NO: 1345 - DNA, 2643 bp, Glycine max
cccacgcgtccgcccacgcgtccgtacggctgcgagaagacgacagaagggtgggaaaacaagaacaagaaactaggtgaggttgggtttcttttagagggaacacataaccattaagataaggaaccgcactttattattttatttatttggtttagctttgcttgtgaagttggcttcgttttctgcaattcccattccacaaagccacaccattcatcacccccaaaaaactaacacaaaagcaaaaaaagaaaaaaaaaaggagaaaaattataacaacacattatttttattaatattgttgtaattattgttacagttttcatttgtcttgtccctttatttttcgattggatctgaggctcttcagagttgcagaaaggcacaccaaagttgcttcactttcttggagtgtggtttctccttgctccaagcaaccacacacacacacactcaacttgtggaatccatagccatggaagaaggtttctcgctctgcaatttcattgccatttttatgctttgatcagctcatcaaggatttcttaatggggtctcctgttaatgaagttgattctttatcagaggttcagaatttagtttctgtggtagatcatgatcctccttcgacatctgggattctccggtcttctcggcctccattaagagcaccaaggaattatggggcttcctccagtcaaaagcattcctatcaggaggctgacaatgtggaacacgacagaatgcctaatatggagaatcagtattacgacgctaacagcaagtctgacaatgcaagcctcaataaagctgttgaaagttgtttaggaaagaatatctcctctatggaaacaaaactaagcatcaagcaaccattagatgcttccaagaattgtgactctggtggcgtgttagaatctgacaattgcaaattaggttcatcaaaaggagttgttgatccaacaaagagttactgtcaatcggagattactttttgtccaagtcctcagaatagtttctattcagaagccaaggaaagttttgtcaatactggagccagtgaatgtgtgagtgttgataagtcagttgaaagtggagaagttactaattcctgtgaatttaatgagagcagaaagaccagcatctgtagagggagtactggaagtgacgttagcgacgagagcagcactagtagtttgagcagtactttgtataaaccccacaaggcaaacgatataagatgggaagcgattcaagccatccgagtccgtgatggggtgttggaaatgagacatttcaggttgttgaagaaattgggatgtggagacataggaagtgtatatctagctgagttaagtggcacaaggacttgttttgccatgaaagtaatgaacaaaaccgagctggcaagtcgtaagaagcttgttaggtctcagacagagagagagatactgcagtctttagatcatccatttctacccactttatatacacactttgagactgagacattctcctgcttggtgatggagttttgccctggtggggacttgcatgcactaaggcaaagacaacctgggaagtacttttctgagattgctgccaggttttatgtggcagaagttctccttgctttggaatacttgcacatgcttggggtgatctacagagaccttaagccggaaaatgtgttggtgagagaagatggtcatataatgctatcagattttgatctctctctaaggtgtgctgtcagtccaactcttgtgaagtcatcaaactctagcttggagacaaaaagctcaggatactgcattcagcctgcttgcattgaaccaacttgtgtaatacagccagcctgcattcaaccttcgtgtttcacaccgcgctttttctccagcaaatccaagaaagaaaaaaagtcaaaaccaaagaatgatttgcagaatcaggtgacccctctccccgagcttattgctgagcccacgaatgctcgttcaatgtccttcgtggggacacacgagtacctggcacccgaaatcatcaaaggcgaagggcatggcagtgctgtagactggtggacatttgggatattcctatacgagctcttgttcggcagaacaccgttcaaaggttcggctaaccgagcaacgctattcaatgttgttggccagcccttgaaatttcctgaatcccctacagtcagctttgctgccagggacttgatccggggcttactcgtgaaagagcctcagaatcgcctcgcatatagacgtggagcaacggaaataaagcaacatccattctttcataatgttaactgggcactgatccgatgtgcaaatcctccagaagttccaagacaggccatgaaagcacttgcagctgaaaaggtgcctggtgtgaaaccttctggtaactatttagatattgatttcttttgatcttaatgtctgttttctcctttgaactaatttcccatcttttatttgtgttgtttgcccatggttctttcctttgtataaaatgatgctactctttcgtctacattgatcaatgcttgtaattgtccatgataaacttctgtaagaaactccaaaatgcattaaattgaggaacaaagtttctggtctcttattt

SEQ ID NO: 1346 - DNA, 618 bp, Glycine max
ctcataactcacaagtccgaaccagatctgcaagtctttggtgtttgggttcgacggctcagtggcagaatcacagagagaatagcaataatcggtcatatacgcggaagcttgtgatatacgaggaagcatgtttgagggtatgatgcctaaggatttgaagatttatgccacaactgcatccaatgcacaagagaatagttggggaacttattgtcttggaatggatccttctccacctccagagtacatcatttgcctaggggatttgtacagtgttgcttggatggaagataagtactaaatatagtgttcttttgtaatcaacccatatataccatgtataatattctaatccaaatgttatgacactgggaggattcaaattgggaggattcaaactcgtctatgacctccttattactccaaatgttcttttttctctttctttgtttcacacttgtactcgctaggtgactttttgttttcactaaagctttttaagttgttgtgcacctcaatctatttgatcaacttcactttgtcattgacattgaaaaaaaaaaaaaaaaccaagacttaaaagtgttacaatgttaaatggattgatcatgttgg

SEQ ID NO: 1347 - DNA, 1745 bp, Glycine max
  misc_feature (43)..(43): n is a, c, g, or t
ggcccctccgcaatttccggttcgatttacacgcccgcactanacattctgtactactgcttgcacaatatctctcttttgttctctctctctctgtttcttcttcttctactcttgtccctgctcaaaatccaaccacacactgcacgcactagacacttcagattttcttttcttttctcaaagtcttgttctttgtgtagctatcaacagaaaatttcttgagggtctctgattttttttcaccacatggagagggaattttttggcttgagttccaaaaatggtgcatggactactatgaaagatgatgctgtcaacaaatcaagagaccaagtgaggagttcaggaatgcagtggtcattcccaaacaaggtctctgcccttcctcaattcctgtctttcaagaccaatcaggaagacaagcctagaaagactattcttgagccactagcttcatctggatatatggccatgtcaactcaatatgcttttgactctaaccaaaaatcattcttgggtttgaccaacagaaatttgtccataagcaagcatgctgcagggaacaaacaaggaatgacagtttatcctctacaatgttgtgatgcacagtcagaggaagcaagaatattttcagtgtccaaccaatcaaatcaagtgagtcctgttcttcaatctaatcttgcctctaccggactgaacatggtcaattcagtcataaaaccacaaccttttggttccaaatcctctggcacacctctatctattcttccatcaataggttccattgttggatctactgacttaaggaattattccaaaaactccaccatgcctactcagcttacgattttctatgctggttctgtgtgtgtttatgatgacatttctcctgagaaggccaaggctatcatgttaatggccggaaatggttatactccaactgagaaaatggaacttcccacggtgaaattacagccagcaatttctattccctccaaagatgatggtttcatgataagccaatcctatccaccctcaacctttcccacccctctcccattgacctctcatgtcaattctcagccaggaggaggatcttctagcaacaaagaaatttcaataataagacaagtaggaccttcaactgctcctactaaccatttgggatcacccattattggttctataggatctgcatctaaagaaaaggctcagccagtttgcttgcctcaggcacgtaaagcatccttggctcggtttttggagaagagaaagggaaggatgatgagaacatcgccatacttatatatgagcaagaaatcacctgaatgcagctcttctggatcagacagtgtcagtttctccttgaacttctctggatcctgttcactaccagccaccaactagccctacatgaatggaagtttagatttatatacttctgtaattgtaagatcattttttttttgtcattggtagagaaatttcgtaggcatttttgtcctaaatattgttttggttcccgagtttttttttttttacaattattactttttgcagtattttacttcactgtgaagatttttccaaatcgtcatatatgattttttttttttttactttcatcatgatgtataattatttcttttatacatatattacagtgaataatcttcagatttattatggctattggattgatcattgatcgatgattaatatcttttcagctgttacatgtc

SEQ ID NO: 1348 - DNA, 1567 bp, Glycine max
  misc_feature (20)..(21): n is a, c, g, or t
tcgagtcagctacgtaggcnnccccccccccaactgaaaatagtgggaaaatgaaaatatggatcgattgacattcacatcacttgcgagaaatgggtggtatccccaattccccattgagcgcaccgaaagcaaagtgtctctctaacctctgcaaaagtccaaggttgcacggttttaactgcttaggtttttgtcttcaaaattaaaactgtgcaactttggttgcaaagtcataggggttaagttgtgtttgcatgaaagtgggcttgagataattgtgcctcttgtatgatggaatccctttggaagcttttgtatttgctggagcctgcgcctgtcacacttatcactacagctgtggctgtgacatttggtgctgcttttcgagctctaaactatgggaaagaaatggagcgtaatcgggacttctctgaagcatcgattacattggataggtctcaggcattgatgatcccagtgatgagctcttttagcttgcttttgatgttctacttgttctcatctgtctcacagcttctcactgcattcactgctgttgcttctgcatcctctcttttcttctgcttgtctccttatgctgcctatttgaaggcacagtttggtttagcggatccatttgtttcacgctgttgctcgaaatcttttacacgactccaagcaatactattgttagtgtgctctttcactgtggctgcttggcttgtttctggtcattggatactgaacaatttgttaggcatatctatatgcatcgcgtttgtaagccatgtgcgtcttccaaacatcaaaatttgtgcaatgctccttctttgtctattcgtgtatgacattttttgggttttcttctctgaaagattttttggtgcaaatgtcatggtatcagtggcaacacagcaagcatcaaatcctgtgcacaccgttgccaatagtatcggtcttcctgggttgcaactgataactaagaaattagagctgcctgtaaagattgtttttccaagaaatttgttgggtggtgttgttcctggagagaatgcggcagacttcatgatgcttggtttaggagacatggctatcccaggcatgctactggctttagtcctctgctttgattatcgcaagagcagggatacagtaaatctcttagaattacattcctcaaaggggcacaaatacatatggtatgcgctacccgggtatgccattggcctggtaactgctttggcagctggtgtcttgacccactcacctcaacctgcacttctttatctggtgccttctactttgggacctgtagttgtgatatcttggatgaaaagggagctatttgagttgtgggaaggaaacaccccaaatctcaatgataaagatcgcgaaatagaagtttagtctagggactggtggtttatagccaaatagaaagttgtaaatttactgagagtctttaatcgtcagactcaccaagaaaatttacattaattgttcaaaaaaaaaaaaaaaaatttctatttatataccatacataaattgggggaaagaagtttat

SEQ ID NO: 1349 - DNA, 1190 bp, Glycine max
  misc_feature (93)..(93): n is a, c, g, or t
  misc_feature (1062)..(1062): n is a, c, g, or t
agtgctttgcggtctctgaaaggtgacaactttcagcggcgttggcccccccccattaaatcaactgcttcacaatctgctcttgatccagcnctctcggaaaaaatatatatgtcaaattgttcagctgggtgtccaatcacctgacagaattttccacgagtatctttaccaggctatgattgatttaggtctcgagaatgaattgctagagtatgggggtcctgacctgttgccatttttgcaaagtgccggtcgtaattctctacacgaggttcgtgctgtgacagccacaatttctccagtgggacaatcgggagcacctatgtcatctaatcaagtcaagtactatgaacttttggcacggtattatgttttgaaacgccaacatatgcttgcagctcatgcgttgcttagactagctgaaaggcgttctactgatggagttcctactcttgaactgaggtgtcaatacctaagtaatgcagttctacaggccaaaaatgcaactaatagtgatgggttagtaggttctggtcgaagttccattgacagtgggttcctagatgtgcttgaagggaagcttgctgttcttcggttccagataaaaatcaaagaagaactagagtctgtggcttccaggtctgatgttttacctgccacaccagattctgctgaaaatggtgtagtgcctgagggaagttctactgctgatgctaattttgcaaatgcaacacgagagaaggctaaagagctagcttcagatgtaaagagcataccccagttatataatgaatatgctgttccctttgggctctgggagatatgcctggagatgctgtactttgccaatttttccagtgatactgacagcagcattgtcagagagacatgggctagacttatagatcaagctatatcaagagggggtattgctgaagcttgctcagtactaaagagggtcgggccccgcatttatcctggtgatggagctgttttaccactcgacattatttgtcttcacttagagaaggctggactggagggttaaattctggggtngagctggtggagaatggaatgtgcaagagcccttgtttctgcttgtaggggtgcagctgacctgttttgaatgcatatgaccaattggtttcaaatggggctattttgccatcccgcaggggttagat

SEQ ID NO: 1350 - DNA, 800 bp, Glycine max
  misc_feature (799)..(799): n is a, c, g, or t
aagccggcagaagggggaaatccatcgcagcataaaatgtcaaatacaagtttgcttgatttccaatacagcctctcaaggaaaaaatacctgaggaagccatcacgtctgttctcctgggaccggcagaactcggggtcgaagaatgtatttcctcagcctaaggctgatgagatgaagcaggtgtttgacaagtttgattccaataaagatgggaaaatttctcaacaggagtacaaagccaccatgaaggctctaggcatgggggactcggttcatgaagtgccgaatattttcagggtggttgatttgaatggagatggattcatcaacttcaaggaatttatggaagctcagagcaagggtggcggggttaggatgatggatatacagagtgcatttcggacatttgataagaatggcgacggtagaataagtgctgaagaagttaaagaaatgctgggaaagctgggagaaaggtgcagcattgaggacagtcggcgaatggtgagagctgtagacactgatggagacggcatggttgacatggacgagttcacaaccatgatgacacagtccctgaggcatgtttgaatgtttatggctatcatgtttattgaggttgtacctgcggtcatctcaatgaaagctatctctgttgtatttagatttgtgcatgtgtttaataaactggattttaaaatcagtggaacaatacaactgtactgttaaaacggacaactctattgcttgtaatgaataataatactaataatataaaaactttattgtgcttccna

SEQ ID NO: 1351 - DNA, 2046 bp, Glycine max
  misc_feature (1995)..(1995): n is a, c, g, or t
  misc_feature (2007)..(2007): n is a, c, g, or t
ccacgcgtcgatactaaacacgatttattttgtcttttttctttatcacagctgcaatcaacaagacttagaatgcgatgagcaaaaatagacctcaattccgaattcagagatagcacgcaccaggagaagccatggctactcaatccccttcacctcagaacctaggtggtgaaattgagcaaacagaaaatgtagatcagcataataggggagaagagcttggtaaacagagttcagacacatcggtgtttgtgaactcagagccattgcgtgaggaacaaattcagaatgctgtgaaatttctgtcgcacccgaaagttagaggttctcctgtcatccacagacgatcgtttctggagaagaagggccttacgaaggaggagattgatgaagcctttcggcgtgtgcctgattcacctccaagtgtgcagacagctggcataaatcaagatggacaattgaagccatcatcaaacattcagcagcaaggccaaccacaggctttgcagctgactgtaccagcttctactggtgttactactacgcttggaaccttatctcgccgcagttttcactggtcacatgcccttattgcagttggattactggctgcttcaggtgctggtacagttatagtaattaagaattctattctccctcggttaaaatcctggatacgcaatgttgtcctagaagaggatcatgaccaatcaaagagaacaggctcaaaaccaacattggcagaagaagctgcacaggctgcaaaagcagctgcagttgcagctgctgatattgcaaaagcaagccaagaattactgagttcaaaaattgaagagaagagatattttgtagaagttgtgaaccttttggataagcaagtgcaggaaatgaagttgatgactaatgcaataggaagattggaatcttctggtggactctctgtctcaaagcaagaagaccgcttagtcactcaaacaggttcaaagacacagcaactgatcgtgaatgggaagtcagactatgagtcccgatcagtgagatcttcatcccctcctgtatctgttgaaccatctagtgctcctcatcctaaatcatatatggagataatggccatgatccaaagaggggagaagccttctaacattagggaaattgatgattcagcccccaacccttatcagcaaccatcaaatcctcgcttagcacctagagccaagccttgggaggttagtcaggtgcaaaacacctcaacccaagtccttccgtatcaagtaaatggcaagatccaagataatggtgacaacacagtaccctggtggcaaacaaagaacgtcagaatcaaagagatcgataatgaaattgagtataatggagcacctgctgcatccagtccgcagccagttaacgagcgtgggttcctcctcagcctcctcctatagcaatgccagaggctgcagaagcgatcagacgcccaaagcaggtagtccaaaaggaagtgacactggatgatcagtcagcagctcattcttcagacctcactaatggatccaaatccgaagatgcaatagaaggcaacgttgtcaactcacttgtcagctctggtgagatccaaaaccatgaagttggttacgaagagaaatgaaggtagatctttgtacttgatcatcttgattcctcataacaatacatgaagttggaaatagaacttgaatttgtctcaagttctgaaatagcttgatctggttcaactcttatttctttgttatgtgttctgttatatgaaggttgagtcttgcgtacaccaaagcatgaaatgtcgaaatgttaatagtcggtggttaccgtgttttcttcctaaatactgtttcactttatagaagcaacaccacttgttcattgaccaaaatattacctttggatagtgtcgtgattagaagactctttttaacaaaaaaaaaaaaaaaaaagttctgcagccccggggatcactangtctagagcggncgccacccgcgtggagctccagcttttgttccctttagg

SEQ ID NO: 1352 - DNA, 1856 bp, Glycine max
tcagctacgtaggccccccccccttttttttttctttctttcgctaatccactcattcacttggtcctcatctatacaactatagtctcatcccctgccattctcatgagtcttttggtcctttgcaacgcagcagtagagtagccaacatggccacccaatcaccgcctcctcccactcccaccgccaccgaccaaaaccaaggttctgaagtcgtgcaagcaacaactgtagatcagcaaaatgccagagaagagcctgctaaacagagttcaactacatcagtctttgtgaactcgcaaccgatgcgggaagaacaaattcagaatgctgtgaaatttctatcacacccaaaagttagaggttcacctgtcatgtataggcgatcatttctagagaagaagggccttacgaaggaggagattgatgaagcctttcagcgtgttccagattcagctccaactgtgcagacaggtggtgtaaatcaagatgggcaattgaaatcatcatcaaacattcagcaacaagcccaacaacaaactttgcagccgggtttacctgcttctactggtgttaatacttcatcgggaaccttatcacgctccagatttcactggtcccatgcccttattgcagttggattactggctgcttcaggtgctggaacagctataataattaagaattctgttctccctcggttaaaatcttggatacgtaaggttgtcttagacagtgatgatgaacaattaaagaaaactgacaacaaaccaacaccgatggaagaagctgtgcaagctgcaaaatcagctgcagctgcagctgcagatgtggcaaaagcgagccaagaaatgctggcttcaaaaggcgaagagaggagatactttgtggaagttgtgagccttttagataagcaagtacaagaaatgaagtcaatgaccaatgccataagaaggttggaagggcaagaagatcttcgaatcagtcaaacaagttcaaagcaactgattgtgaatggaaaagcagactacgacatgagttcagtgagatcttcatccccacctacatctgttgaaccatcaagtggtcttcatccaaaggcatatgcggagataatggccatggtccaaagaggagagaagtcttctaatattaggcctcgggaggttagtcaggtgcaaagcacgtctacccagatgcttcagtctcaagtaaatggtgaagacttgaataccaaggccctggatgcccctctagtaaatggggatgacccattaccctggtggcagaggaaaaatgtcagaatcagagagattgataatgaaaatgagtctaatggagtaccttatgcttctgcatccaatcagcagccagtccaacgcgtatgggttcctcctcaacctccccccatagctatgccggaggctgcagaagcaatcagccgcccaaacccagcggcccaaaaggaacaggtgtctgataatcagtcagtagctcattctttagacagctctgatgacgtacatatggccccaaaactattggaatccgaaggtccagtagaggccaccagtgtcagctcggttcccccctctagtgagatacaagaggagcatgaagtcaaatatgatgagaaatgaaggtgactcatgcatgctctatcatgaaaaaacatgaagtcggaaataacacttgaagtagtcccatatttggaataaccttgtcacacaatctgtttcataatcatatatagttgtacttttgaactggacatcaatacaatatgcaaatgcacgtatctttctatgcaagaatttgtttactaaagcaaaagttttaattactgaacttttact

SEQ ID NO: 1353 - DNA, 1488 bp, Glycine max
  misc_feature (1426)..(1426): n is a, c, g, or t
  misc_feature (1431)..(1431): n is a, c, g, or t
  misc_feature (1455)..(1455): n is a, c, g, or t
tcgagtcagctacgtaggccccccaaaaaaaacgagtttaagcaaacataacttgcagtaatggcttcaatgaataaccaaaaagaaattgagctctttgagggccaatctcttctgtacatgcagctatatgggcacctaagacctatgtgtcttaagtgggctgttcaactaggtattccagacataatacagaaccatgccaaacccatttctctttctgacttggtctctactcttcaaattccaccagctaacgctgcttttgtgcagcggttcatgcgcttcttggcacacaatggaatctttgagatccatgagagccaagaagatcatgaactaacatatgctctaacccctgcatcaaagcttcttgtcaatagtagtgatcattgtctatctccaatggttctagcgtttaccgatccacttcggaacgttaaataccatcacttgggggaatggattcgtggggaggacccctcagtatttgagacagcccacggaacaagcgcttggggacttcttgagaaaaatcctgaatattttagtctcttcaatgaggctatggcaagtgattcccgaatagtagacttggcactcaaaaattgcacttcagtttttgaggggctagattccatggtggatgttggtggtggaactggaaccacggccagaattatctgtgacgcatttcctaagttgaaatgtgttgtgcttgaccttcctcatgttgtagagaacttgacagggaccaataatttgagttttgttggtggtgacatgttcaactctatccctcaagctgatgcagtgctactaaagtgggttttacataattggaccgacgaaaattgcataaagatcctgcaaaagtgtagagattctatttcaagcaaaggcaacagtggaaaagtgattatcatagatgccgtaataaatgagaagctagatgacccggatatgacacaaacaaagcttagtttggacattattatgttgacgatgaatggaagagagagaacggaaaaagaatggaaacaactcttcatcgaagcaggattcaaacactacaaaatatttcccatctttggttttagatctctgattgaggtctatccttgaacatttttatgatgtgtatgtcacacttaacgtttatatttatgaacatcctcagacatcgttgtaattgtatttagtggtttgcgtgttgtttgctgaataaagctatgatgacatagcattatcaacttctggtggaattacattatgttcctccccgctatgttgttaaatgttctgtgtacggatttctcattcctatttggccaaaataaattgaataaacatgtaatggatgcaatcaatatacaatgttttggtatggctttacgtcttttcctggcttttgtttcaatctttnccttngttctcctttttttctcctcttcngccctccacacaacttctctctcctctctctct

SEQ ID NO: 1354 - DNA, 1376 bp, Glycine max
cccacgcgtccgtacggccgcctgcggacgcccccccggggtggcagagagcgaacccaaaactagagctaccttcccttcaaaccttccactcttctctccttttccaatcaagggaataatatttcttagagatattccgaaaccatggctcacgccaatcctatgatttttgttgttggaattctaggtaaccttgtctccttctgttgctttctagcaccagtaccaacattctatcgagtttgtaagaagaaaaccacggaaggtttccaatcacttccttacgtggctgcactcttcacttcaatgctttggatattttatgcttacataaagacgggcgaaatacttctcatcaccattaacgcattcggttgtttcatagagacagtttaccttgtcatctatatcacttattgccccaagaaagctaggttctttaccttcaagatgattttcttgttcaacgttggagtgattttcttggtagttcttcttacccacgttctagcaaaagaacgaacagcccgtatcgagctccttgggtggatttgtgttgtcctctctaccagtgtgtttgcagcacctttaagcatcattaaagtggttattcgtaccaaaagtgtagagttcatgcctattactctgtcactcctcctcacagtaagtgcaatgatgtggatggcatacggtattctcctgagggacatctatgttacacttccgaactttgtgggtatcacatttggaacaattcagatagtgctctacttaatatacagaaagaacaagcccgttaaggatcaaaagctgccagaacacaaagacgatgttgccaatgatgaaaacgtcaacacagctgtgagcggtgagaatcggggagcaaacgccactggattcgttgatattgagattggagagaagaagcaagttcaggaacaagcagacaaaaaacaggaccagcaagctgttaatgctcgtgaccaaacagaacacaacaacaatagcaacaaaacaagggaaggttgagaaatttaatgaagggatacatgtgcacgtgttatgcctctctctctctgccaccatgtgttgttcaattcgtgtgaaatcttaagagggttaatgggggcagaggcgttatacaatataggtcgatatctatgtctatatctcttttgcctagttgttactttctattttatgtaacctctgttttgttttctgtgttacgttgaagtaatcaaataatacaatagaaattgtccccaaatattattcggaaaaactattgcatgaaccgattgaatctgcatgaatagatactgattatgtttcttcaaaaaaaaaaaaaaaaaaaaaaaaaaaaactcgag

SEQ ID NO: 1355 - DNA, 700 bp, Glycine max
tttcggctgcgagaagacgacagaaggggaccacagaatcaaacaaaacaaaaccccttcccttccacatacactcttctccaatctcaccccaaaaaaacttgcaacaaaccaaaaaccatgcttgatgaatcagtctcatccaccccaacattcttgggcagcctgtacagctggttcacccccactgtcttcttcctcctcctccaactagtcattggcaccattttcatcatctcaaaccttgccaacacccacaaacaccaacaacaagaaccacaacaagcacatgactttccacaccaccatcttcccagatccccttccatgctccaaagactcaaatccatcaacttttacccttcttcccctttcagatcccaagaccttcaaaaccctcattttcacaacgctcatgaaaatgaacaacctcaacttgctagatctccctccgttctccagagactcaaatccatcaacctctacagttacttccctaccgaacccttcacttccaaactcacacccgaccagcacgtgccggagaaaccgtacgtgcgagaacaaaaccaaccgcaacaagtggtggaaacggacgaggaaaaagaagagggttatgatgactatgttgtcgaagatgacaacaacatcattatgagcacgcacaattacaattataacctcggagtctccgaagagg

SEQ ID NO: 1356 - DNA, 914 bp, Glycine max
  misc_feature (32)..(32): n is a, c, g, or t
taacacgagaattccttcctatatatagcgcnaagatttccaagtcaaatcctattttctagacaagattttgttttactggtgccagcacaaaactaaggaaaaaacttgatcccaaattttaatcgcataacctaattccagcggctagacaacgctgcattctataaaaataatctatctactaaataccaacgaaaacctaaatgaaggatagagtttttttctttttttcagggaagaaagttcaataagtaatcaatattaaaccgaaatctttcaaccacacaattcattggctttgaatagtactactttaaccaaaaataaaaatgacaaaactaaggaactctaattcgacaatatgttccgaacaaaggtttaaaaaccctaacaattaatcaaagagactgaatcccatatcgtcatccgattcctccttctcttcaaccttttcctccttcttcgattcggcggcagccggtgcagcagggccaccgccgggagcggcagcaacggcaacggcggcgccaccgccagaaggcacggaggccagcttttccctaccggaggcgataagctccacaatgtctttgcccttaacttcagacaagaagttgctgatgttgtcatcgttcgcgtcagctccaacggagccaaggatgtccctcaagtcatcggcggaaggggctgcgttgcctcccaaaacggcgagcaagtaggcggcgatgaccttcattttgcgccggaatgttaatatgtggcagaactgagagtgaagggaaggtgaaggcgaaggaagataggttatgaattctgtgatttcataaatagggtttagggctcccttcggcctcgtgcatcgggttctaaggttttgatttttttacccatgggctatgtattacatttga

SEQ ID NO: 1357 - DNA, 781 bp, Glycine max
  misc_feature (6)..(6): n is a, c, g, or t
  misc_feature (10)..(11): n is a, c, g, or t
  misc_feature (16)..(16): n is a, c, g, or t
  misc_feature (23)..(23): n is a, c, g, or t
  misc_feature (28)..(28): n is a, c, g, or t
  misc_feature (33)..(33): n is a, c, g, or t
  misc_feature (43)..(43): n is a, c, g, or t
  misc_feature (45)..(46): n is a, c, g, or t
  misc_feature (54)..(54): n is a, c, g, or t
  misc_feature (56)..(56): n is a, c, g, or t
  misc_feature (62)..(62): n is a, c, g, or t
  misc_feature (65)..(65): n is a, c, g, or t
  misc_feature (67)..(67): n is a, c, g, or t
  misc_feature (69)..(69): n is a, c, g, or t
  misc_feature (86)..(86): n is a, c, g, or t
  misc_feature (90)..(90): n is a, c, g, or t
  misc_feature (92)..(92): n is a, c, g, or t
  misc_feature (108)..(108): n is a, c, g, or t
  misc_feature (116)..(116): n is a, c, g, or t
accccnatannttttnttcgttnatttnggatnacgaacattncnngaaacttntncatatnccnantnaaataccccataaaganaaantngggtcccccgggggcncttaaaanggcaacaaaagaaacatccttcgtcgaaaaactaaatgaaggatagatatataacagtaaatcacggaagaaagttcaacaacatcacgaaagtaatcaatattaaaccgaaatctttcaatcacacaattcattggctacgaatagtactactttactcaaaaataaaaaagacaaactaaggacctctaaatcaacaatatgttccgaaaaaaggttgaaaaccctaccaattaatcaaagagactgaatcccatatcgtcatccgattcctccttctcttccaccttttcctccttcttagattcggcggcagccggtgcagcagcgccaccaccgggagcagcggccacggaaaccgcggcgccaccgccagaaggcacggaggccaacttttccctaccggcggcgataagctccgcaatgtctttgcccttaacttcagacaagaagttgctgatgttgtcatcattcgcgtcagctccaacggagccaaggatggtccttaagtcatcagcggaaggggctgcattgcctcccaatacggcgagcaagtaggcggcgatgaccttcattttgcaccggaatgtgagtgtgtgacagaaagagcgatctgagagtgaagtgaaggtgaaggaatattgggccggggcctacgtagctga

SEQ ID NO: 1358 - DNA, 2089 bp, Glycine max
ccacgcgtccgatttactcttcagctacgtaggcccccatttggttgaaggaagcagaagcacatggcagtgatatgtccgccaagccagggacaaacttggcttccccatggccccaattctaattaccacttcttctcaagaggaggagttggaaggcgcagtcgttcttattgtactttcagctcaccaaagaccaaaacgaatgcgtttacggtcagaggctgcggccaggactcggtggaagaccatcactttgtgaaggctctgagggaatcccaaccttacatttccgttcataggggcagactattcgttctgctcatatctgctcaacttgttgccggtccttacttcaatcccattctcaaggatatagctttccttaatcacctaggaatccgctttgttcttgttccggggacacatgtgcagatagacaagcttctgaatgagagagggtgccagcctatgtatgttggtagatataggataactgatgatgaatctctggaagctgccatggaagcagctgggggcataagattgatgatagaagcaaaactttctcctggaccttccatatgcaacattcgccgtcatggtgacaatagtcgatggcacgaagttggtgtcagtgttgccagtgagaagaggggtggtcaatggaattgattttgggtcaactggggaagttaaaaaagtagacgtaactcgcatgcgtgagagacttgatggtggctgtgtagttgtattaaccaacttgggctattccagctctggagaagtattaaattgcaacacctatgaagttgccactgcttgtgccttggctataggggcagacaagctaatatgcataatagatggtccaatacttgatgagagtggacacctaattcgtttcttgcctcttcaagaagcagacatgctaattcgtaaacgggctaagcaaagtgatgcagctgctaactatgtgaaagctgttgacgaagaaggtttcaactctcttgagtataacaattttaatggagcagtcaaatcaccacctattggatgttttacagaatggcataatgcaaccttccataatggtgttggttttgagaatggaaatggcttagggtccggtgagcaaggttttgctattggaggtcaagagcggctaagtcgaatgaatggctacctgtcagaattggccgctgcagctttcgtttgcagaggtggtgttcaaagagttcacttgctggatggaactattagtggagttttgttgttggaattgtttaaaagagatgggatgggaacaatggtggctagtgacctttacgaaggcactcggacagcagaggtaaaagatatttctggaataaaacaacttattcatcctttggaggcatctggcatattggttaagcggactgatgaagagctgttaaaaacattggattcattcgttgttgtggaaagagaaggtcacataattgcttgtgctgccatttttcctcactttgaggagaagtgtggagaggttgcttgtattgcagtatctcctgattgtcgtggccaaggacagggtgacaaattgcttgattatatggagaagaaagcatcatctcttggatttaatatgcttttccttcttacaacacgtactgcagattggtttgtaaggcgtggattttcagaatgttcaattgattatattcctgaaaagaaaaggagaatgatcaatctttcccgcaattctaagtattatatgaagaagcttctgccaaatattagtggaattactgttggtgtaaaatctgcttcaagttagtaccattttatgttgtttccaccaaccaggagtgaagggtgattggaagcaatatattaggcacttctatatataattggctcgtaacagtgtggcctctggaattattagtatctcgttcaggtcttccatgtgtaagcattaagtttctaactttctactgttaatatattgtgaattactaagctcatgttattatcttgatgaattactaagctcatgttaatatttgttgattagatagagaatgtgattcatagttcatac

SEQ ID NO: 1359 - DNA, 870 bp, Glycine max
caattacgcgttctgttctgttcggtagagagagagagagagaggaaagggaaagtgaaacgacatgatggtgggacagttgacggcgacgaagccgagccggagcgatgaggttttggatgctgaggagcaactgagaatcgctaatgagatcagagcccaattcgatgccttggaacccaagcgacccatcaagcccaacagaagcgaacccgacgccgttttgcaataccccgtcgcagccgcttctgtcaacaatatacctgagcttcacaagtttcaatcccttcaatctccctctcatgctataatttcatcggcggggtttgtggatgcacaggatgagtttgtggagacgcagtactataaagaattggcatccattgacaaacagcatcacacgacagggagtgggttcataaaggcggcgagagaaggaggggaaggtgaatatgagattcagttgcccaataatcatgttaatgctgctgaaacccaacccaggtcctataaaagcaaccctgccactaacgattgggttcctaactctgatgaacatcaggtttttgtctcctccaagccaaataggagcgagagtacttgaagatatgctaggtgaaaaattggaaatgggttatcttgtaccagctttttcttattactgtttatgtctatttggtgtttacaaattacgggaggtggggtggggtggtacaactgttgttgtataatactatagtctagaagagaaagtagtttcagaatactacaatttcccgtgatatgatttccttctcaacacctaacctaaatcacctttcttctacattgttctatttcattttcacaacttcaaaaaaaaaaaaaaaa

SEQ ID NO: 1360 - DNA, 2037 bp, Glycine max
tcgtccccgactcagccggcccccccccccccattactccatttccattctcaactgcgcggtgagtgagtgagagacggaaagtgcaaagccaccgtcttctcttctcagagcttggctttgcttatcgattctctctcctctcatctttctcattcaaggtttgtaaaagatggccgatgctgaggatattcaaccccttgtttgtgacaatggaactggaatggtcaaggctggatttgctggtgatgatgctcccagggctgtctttcccagtattgttggccgacctcgacacactggtgttatggttgggatgggtcaaaaggatgcctatgttggtgatgaagcccaatcaaaaagaggtattcttactctcaagtatcccattgagcatggtatagtcagcaactgggatgacatggaaaagatctggcatcacacattttataatgaacttcgtgttgctcctgaggagcacccagtgcttctcactgaggctcctctcaacccaaaggccaacagagaaaagatgacccaaatcatgtttgagaccttcaatgtgcctgccatgtatgtggccatccaggctgttctctccttgtatgccagtggtcgcacaactggtattgtgttggactctggtgatggtgtgagtcacactgtaccaatctatgaggggtatgcactcccccatgccatccttcgtttggatctcgcaggtcgtgatctaactgatcatttgatgaagatcctcactgagagagggtacatgttcaccacctctgctgagcgagaaattgtccgtgacatgaaggaaaaacttgcatatgttgccctagattatgagcaagaactcgagactgcaaaaagcagttcatcagttgagaaaagctatgagcttcctgatggacaagttatcacaattggggcagagagattccgttgcccagaagttcttttccagccatctatgattggaatggaagctgctggaattcatgagaccacctacaattctatcatgaagtgtgatgtggatatcagaaaggatctatatggcaacattgttcttagtggtggctcaactatgtttcctggtattgcagaccgtatgagcaaggagatcactgctcttgctcctagcagcatgaagattaaggttgtagctccaccagaaagaaaatatagtgtctggattggaggatcaatccttgcatccctcagcaccttccagcagatgtggatttctaaaggtgaatatgatgagtctggcccatccattgtccacaggaagtgcttctaacttctaagtacaaaatatgcttcaatggtgaattattttcgctccgggtgtttttatgggtctgtgtcgtgtcatgttaacaatattgccatggataaagaggtgaggaagcatcattaaaggagagggtctattcttagcttgatgcatcatattttgtgtgggggccagacagttagaaaggcatttcttgcgtttggctatccgtggttcatctatatcttcttagtaggttgtttgtagcaagggagtgattgtgatgatctctttttcctccattttctttttgtatttttaaagtttatatttgaaggattttttccccttggaacattgaatcattgatgttaatagtcatatgtatcaagaaatcttatattattgttattacccgttcttgctcgtaaattcattatgcagtttttatgtatgttgaattgctggcttcggagaaattgagggtgcgcttatgctgggaggcggcattaagtccatttgaagaatgcatagatcactgtacaattattctaaaacatattattggattggtttgtgttgaaactaaataccaaaatattggttatctcccatgatggtgtattcggattgcttaagttgaagaaaccgtatcttaagttgaattttgttgacaaaattattttttaccgttccctctcaaatgaaaatgttactgtttgaaatctgataaaaatgtacaacttctatctatc

SEQ ID NO: 1361 - DNA, 2817 bp, Glycine max
ctgcttttcatttcttttccccgctcgcgctctctgttctgctcttgtcctgcttttccatccatttatgtgaaaaaggaaaaattgcctgaggtggttcaatcactatggaatcctgcaattgtattgacccacaagtgccagctgatgacttattgatgaaataccaatatatctctgatttcttcattgcccttgcttatttctcaatccctttggagcttatctactttgttaagaaatcagcagtatttccatatagatgggtccttgttcagtttggtgcttttatagttttatgtggagcaacacatctaattaatttatggacctttagaattcattcaagaactgtggctgttgtaatgaccactgctaaggttttaactgctgtggtatcatgtgcaactgccctcatgctggtacatattattcctgatttattaagtgttaaaactagggaattatttttgaagaacaaggctgcagagcttgatagagaaatgggcctgattcgcacacaagaagaaactggtcgacatgttaggatgttgactcatgagattagaagcactcttgatagacacacaatattgaaaacgactcttgttgaactgggtagaactttggcactagaggaatgtgcgttatggatgccaacacgaactggtttggagcttcaactctcttacacattgcgacagcagaacccagttggatacacagtacccattcatcttcctgttatcaatcaagtatttagtagcaacagggcagtaaaaatttcacctaattgtccagttgctagattacgaccttatgctggaaaatacatgcctggggcagtagtagctgttcgagttcctctcctacatctttctaatttccaaatatatgattggcctgaggtttcgacaagaagttatgctttgatgggtttgatgcttccatcagatagtgctagacaatggcatgtgcacgagttagaactggttgaggtagttgctgaccaggtagctgttgctctttcacatgctgcaatcttagaagagtcaatgagggcaagggatcagctcatcgagcagaatgttgcattagatctagcaagaagagaagcagaaactgcaattcgtgctcgtaatgactttttggcagttatgaaccatgagatgagaactcccatgcatgcagttattgcactctcttcattactacaggaaacagatttgacagctgagcaacgactgatggtggagacaatattgaaaagcagcaatttgttggctaccctcatcaatgacgttttggatctttcacggcttgaagatggcagtcttcaacttgaagcagcaacatttaacctccattctttgttcagagaggtccttaacttgattaagcctgttgcatctgttaaaaagttatcactcacttcacatgtagcctcagatttgccaatgtatgccattggtgatgaaaaacgtctcatgcaaactattctgaatgttgttggtaatgctgtgaagttctcaaaagagggttgcatttccatcactgctttcgttgcaaagcctgaatcctttagagatgctagaattcctgactttcttccagtgccaagtgataaccacttttatttgcgagtacaggtaaaagattcaggatcaggaattaatccacaagatatcccgaagttattcactaagtttgcacaaaaccaatcattaacaagaaatcctgctggaagtggacttggcctggcaatttgtaggaggttcgtaaatcttatggaagggcatatttgggttgaaagcgaaggtattggtaaaggatgtacagtcacttttattgtaaaacttggaatcccagaccgatcaaatgaatttaagctaccttttgtacctaaagtaccaggaaatcatggatctacaaactttgctgggctcaaagttcttgtcatggatgacaatggggttagcaggacagtaacaaaaggacttcttatgcatttaggatgtgatgtaacaactgcaagctcaagtgaagaatgtctgcgtgttgtttctctggaacatgaagtggtcttcatggatgtttgtacagggttagatggttatgaacttgcagtccgtatacatgagaagtttacgaagcatcaagatagaccactgatagttgctcttactggaaacaccaaaaaggtaacaaaagagaactgtatgagggttggtatggatggccttatattgaaacctgtttctgttgacaaaatgaggggtgttttatcagaactattggagcgccgagttctgttcgaaagtgtttaacctgttagattgttgtacatagctatatcaaatttggagaagagcacaaacttatgaagcaatgaggcaattgacattagttgtcatcctttttgctgttttgagatcccggcaaaaggaacaacgattgagtctgcgttgttaaataattttttgtgaacacaagttcgtatatgttgtgtattctgcattttatagcagactttcgatgttttgcaatggcggtaaaattgcatttatactgtcctagactgttttgattaattgatttaagtttaattacttgttagatctctataaaaaaaaaaaaaaaaaaaaaaaaaaaaaaaaaaaaaaaaaaaaaaaaaaaaatatgatttaaaaaaatataatattaattattatgagaaagaaaataaaaaaaaaaaaaaataaagggggcgcccctttttagagaaccaagtttaaatacccgggcatggaaaagtaaaaatttttttttttgggcccc

SEQ ID NO: 1362 - DNA, 1084 bp, Glycine max
  misc_feature (8)..(8): n is a, c, g, or t
ccagttcnttgtggctcccgctcgtgccggcgcggcccgggaaaagattcaggatcaggaattaatccactagatatcccaaagatattcactaagtttgcacaaaaccaatcgttaacaacaagaaatcctgctggaagtggacttggcctggcaatttgtaggaggtttgtaaatcttatggaaggacatatttgggttgaaagcgaaggtattgataaaggatgtacagtcacttttattgtaaaacttggaatcccagaccgatcaaatgaatttaagctaccttttgtacctaaagtaccgggaaatcatggatctacaaactttgctgggctcaaagttcttgtcacggatgacaatggggttagcaggacagtaacaaagggacttcttatgcatttaggatgtgatgtaaccacagcaagctcaagtgaagaatgtctgcgtgttgtttctctggaacatgaagtggtcttcatggatgtttgtgcagggttagatggttatgaacttgcaatccgcatacatgaaaagtttactaaacatcaagatagaccactaatagttgctcttactggaaacaccaaaaaggtaacaaaagaaaactgtatgagggttggtatggatggccttatattgaaacctgtttctgttgacaaaatgaggggtgttttatcagaactattggagcgccgagttctgttcgaaactgtttaacctgttagattgttgtatatagctacatcaaatttggagaaacacaaacttatgaaaacatgaggcaattgacattaattttcatcctttttgcttttatgagatcccggcgaaaggaacaacgattgagtctacgttgttaaatcattttttatgaacagaagttcgtatatgttgtatattctgcatttttatagcagtctttcaatgtttttcaatggcggtaaaagtgcatttatactgtcctagattgttttgattaattgatttaagtttaattattttaatattactaaataaattaaattgttgtaaatcaagagagtttaatttaattggttgaacgtagtgtatgaattattat

SEQ ID NO: 1363 - DNA, 692 bp, Glycine max
cagtccgtgagctcggcctcctctgctacgctggtccctgagtttttttttttttattatttatttcaacagaggaaacgcgatctagaacttgccaaacggtgttggaatttgtgatctggtgaatcatgaatgctaggagagatggtcgtaacaacagagttgctctttttgatggtattgaggagggtggcatcagagcatcgtctctttactcctcaacttcttcccatgaaattgatgaacatgataatgaacaagcattggatggattgcaagatagagttaatctgctgaaaagattgtcaggtgatataaatgaggaagtggatagtcataaccggatgctggatcgtatgggaaacgatatggattcttcgagaggagtcctctcaggcactatggataaattcaaaatggtatttgagacaaaatccagccgaagaatgttttcacttgtagcatcctttgtcgtgctttttcttataatatactatctgactaggtaattggtctttcacgcacttgtcagctttatgttagatcgaaaaggaggctactcgcactattcctgtaattagcgttacttgtaagattttccttatgtttgtataaagactttgctgtttcgtttaatccaacgagtaatgtccatatccagtttgtacaagaaaataaaaaccagtttgtgc

SEQ ID NO: 1364 - DNA, 760 bp, Glycine max
atgagatttcaacctcgtctagggaggtacctagctgcagctgcagataatgttgtttctccacgcgtccgggaaactcaagcatctcgatattcactaaagggacatacaaaatcaatacgttctgtgtgttgggatccttctggggagtttctggcatctgtcagtgaggactctgtcagagtttggactcttggatcagggagtgaaggggagtgtgttcacgagcttagctgtaatggcaacaagtttcactcatgtgttttccatccaacatattcttcgctgttggtcgttggttgttaccagtcattggagctctggaacatgactgagaacaagacgatgacactatctgctcatgaaggtcttattgcggcattggcggtttctactgtaaatggtttggttgcttcagccagtcatgacaagtttgtcaagctctggaagtgaatttgttgtgtcattaatacaggttgttttttagtctgttgatattgttgtagtttatgatgtccccttttttgtagtttggtcaaccaccctccctcgcatgtttgtagtttatgtacccttttatgtagcttgatcaaccaccctccctcttttgccatttgggtataatctgattttctatgtaaccatagatactaactttttgtaatattgtcacccctgttgtatcctgtttcataattgttatacttggagatttctgctcatcatttagattggcctattataatctatgagtgctaac

SEQ ID NO: 1365 - DNA, 1559 bp, Glycine max
aatttatcctacgaagagtaagaaataggttcctaacatggttatctgaatgcactttaagggttcgctacgccaggcccccccccagagaaagcagcctggatcctcatcaggtcctgccaatagttcaggaacggcaaatacaacaggtccatcaccaagttcagcaccctcaactccgtcgactcatacgcctggagatgtgatatcaatgcctgccttgccgcatagtggtagttcttcaaagcctctaatgatgtttagcacagatggtactggaacccttacgtcaccttctaaccagttgtgggatgataaggatcttgaattgcaggctgatgtggatcgctttgtggaggatggatctctagatgaaaatgtcgagtcttttttgtcccatgatgacacagaccctagagatactgttggccgttgtatggatgtaagcaaaggcttcacattttctgatgtaaattctgtacgggcaagcacaagcaaagttgcctgttgccatttctcatctgatgggaagttactagcaagtggtggccatgacaaaagggttgttttatggtacacagattctctaaaacaaaaggctactcttgaagagcattcatctttgattactgatgtccgtttcagtcctagcatgcctcgtcttgcaacatcttcattcgacaaaactgtcagggtttgggatgttgacaatcctggttattcacttcgcaccttcacgggacattcaacatctgttatgtcactagattttcatccaaataaagatgacctcatctgctcttgtgatggtgatggtgagatacggtattggagcataaacaatggaagttgtgctagagtctccaagggtggcaccacacagatgagatttcagcctcgtctcgggaggtaccttgctgcagcggcagagaatattgtgtctatatttgatgtggagacacaagcgtgtcgatattcactaaagggacacacaaaaccagtggattgtgtttgttgggatccttctggggagttgctggcatctgtgagtgaggactctgtcagggtttggactcttggatcagggagtgaaggggaatgtgttcatgaacttagctgtaatggcaataagtttcatgcatctgttttccacccaacgtacccttcattgctggtcattggctgttaccagtcattggagctgtggaatatgagcgagaacaagacaatgactctgtctgctcatgatggtctcattacttccttggcggtttcaactgtaaatggtttggttgcttcagccagtcatgacaagttcctcaagctctggaagtgagtgtggctcttccaagttaccataaatataatggcaatacattaggtctttttgtcaatgttgttcacatgtttgtagtttatttcccttttttttgcttcttgatcgaatttgattttctacgtatctttagcttactaacctatgttatgtaatgtaacattgccttcctgctgtcacatcttccatttaaatatttacttggatattgtttatgttaaaa

SEQ ID NO: 1366 - DNA, 993 bp, Glycine max
  misc_feature (795)..(795): n is a, c, g, or t
  misc_feature (842)..(842): n is a, c, g, or t
cccaaaaaaaacagagtgggtagggtgacggaagcagaaaccaaacacaactcaatcgcgaaatgtcgaatttgccccaatcgctgtcgatgggcgcggccttcggcggaggcggcgctccgccgcagccatcgagtgtcggcggcggagcacagggttccggcgctggcaaggatcggaagatggcgtcggcggagcagctcgtgctcgaactcagcaaccctgagctccgtgaaaacgcgcttctcgaactctccaagaagagggagctatttcaagatcttgctccattgctatggaattcttttggtacaattgctgcacttttgcaggaaatagtttcaatataccctgttctttcaccaccaaatcttactcctgcacaatcaaatcgagtgtgcaatgctcttgctcttcttcagtgtgtagcatctcaccctgatacaaggatgctattcctcaatgctcatatacctttatatctgtatcccttccttaatacaacaagcaagtcaagaccatttgagtacttgaggcttaccagtcttggtgtaattggtgcattggtgaaggttgatgatacagaagttataagtttcctttctttcaacagagataattcctctatgcttgcgaaccatggaaatgggcagtgagctatccaaaacagttgcaacatttattgttcaaaaaattctgtagtacaaatgtagtccaagcccacatcgtccaacagcggagcgcttttttgcggtaggtcgagttctggggaacatggtggcagctctagctgancaaccctcatctcgtctattgaagcatatcattcaatgctatcttcncctgtcaaataatccaaaggcttgtgatgcattaaaaagctgtctgccaaacatgttaagagatgctactttcagcacttgccttcgtaaaaaccccacaactaagaagtggctacaacaattgcttcacaatgttagagtgaatcagatt

SEQ ID NO: 1367 - DNA, 1453 bp, Glycine max
tcgagtcagctacgtagggccccccccccgaccaaacccaaaacagagttagtagagtgaggcggaagcagaaaccaaacacaactcaatcgcgaaaatgtcgaatttgccccaatcgctgtcgatgggcgcggccttcggcggcggtggcgctccaacgccgtcttccagtggcggcgccggagcacagggctccggcgctggcaaggatcggaagatggcgtccgcggagcagctcgtgctcgaactcagcaaccctgaactccgtgaaaacgcgcttctcgaactctccaagaagagggagctatttcaagatcttgctccgttgctatggaattcttttggtactattgctgcacttttgcaggaaatagtttcaatataccctgttctttcaccaccaaatcttactcctgcacaatcgaaccgagtatgcaatgctcttgctcttcttcagtgtgtagcatctcaccctgatacaaggatgctattcctcaatgctcatatacctctatatctgtatcccttccttaatacaacaagcaagtcaagaccatttgagtacttgaggcttaccagccttggtgtcattggtgcattggtgaaggttgatgatacagaagttataagtttccttctttcaacagagataattcctctatgcttgcgaaccatggaaatgggcagtgagctatccaaaacagttgcaacatttattgttcaaaaaattctgttggacgatgtgggcttggactacatttgtactacagcggagcgcttttttgcggtaggtcgagttctggggaacatggtggcagctctagctgagcaaccctcatctcgtctattgaagcatatcattcgatgctatcttcgcctgtcagataatccaagggcttgtgatgcattaagaagctgtctgccagacatgttaagagatgctactttcagcacttgccttcgtgaagaccccacaactaggaggtggctacaacaattgcttcacaatgttggagtgaatcgggttcctgcactacaagctggaggaggtttcgatcacatgattgtgacctgagtatacaccaagatcttgcttcattggtgatatcagcattttagggtccgttatatctatatttcatggaacttggtttttcagaggaaaaggttgtaaattagtggtgcgtggaaaccaagttagaagacattttctttctttatacccctcccctccttgtgcggttaagcttatatcaagacattgaggcagtttttactccttaaatgaactttgagtaggtacattatgatgtcaaattttcaataaagttaaaggtattcttagaaggtggcattttataaacgcaatccttgtttaaggttatggataagatttggggtctgcaataatatttttctcacaaaattataatcagaaaaaaaaaaaaaaaaa

SEQ ID NO: 1368 - DNA, 1485 bp, Glycine max
atattcctggttcaaatcaaattctgttattcatgcatcataatttcaagcattccagatatggcgcaagaacaagagttcagaacaagcaccccacttccaaagtgtgatgcctatttcgaaaccatacaatccagaaagaagctaccgctgtcactgcaggagaccttgacagatgcatttgcaaagattcctgtttcttcttttcctgcagttcctagtggaaaagtaattgaaattctagcagacacacccgttggtgaagcagttaagattctatctgaaagcaacattttagcagctccagttaaagacccagatgcatctaatagttcagattggagaagtaggtatcttggcatcatagattattcagccatcattctctgggtgctggagggtgcagaacttgcacaagctgcactattggcaggtacagcaacagctgctggagttggtgcaggagctgctggtgctttgggagcactagcattgggactgacaggtcctgcagcaattgctgggctaaccactgctgcagcaggtgctgcactggcaggtggtgttgctgcagataaagtgatggctaaagatgcacctcaagctgctgataacctgggagaggacttctacaaaataatactggaagaagaacccttcaagtcaacaacggtgcgatcaataattaaatcataccgatgggcaccttttgttccagttgcaagaaacagtgctatgttgactgtcctgctgcttctctcaaagtataggctgaggaatgtacctgtgatagaaccaggtagacctgacattgtaaatttcattactcaatcagcagttgtccaagggctcgagggatgcaaaggaagagattggtttgattgcattgctgaaaagtgtatatctgatctgggacttccatttatgtctaccgatgaggttattagcatccagagcaatgaattgattcttgaagctttcaagcagatgaaggataatcgaattggtggtcttcctgtaatagaggggccaaagaagagaattgttggaaacttgagcatacgagacatcagacacttgcttctaaggccagagcttttcaccaattttaggaagttgactgtgatggatttcatgaagaaaattgtctcatcatcccttcaaactggaaaagttacccaacccataacatgcaagcctgactcgacactacagggggtgatccatactcttgcttctcagtctattcacaggatttatgtggtagatggacatgatgaagtagttggagtcattacactaagagatgtgatctcttgttttgtcaccgaacctccttacaattttgacgattactatggatttgcggtgaaagagatgttgaaccagtgatttttattgaagtttaaataaaggaaacactccaaatgtaagaaactcttatgttatctgagaaaacatttcatttgaaaaaaaaaaaaaaaa

SEQ ID NO: 1369 - DNA, 1017 bp, Glycine max
gaaagaagaagctacttgttggctcgcaaatgaagttgtgtgagaactgagaagggtacttggtgtggtgggtcttcctaatccattgaagataaattattaaaagatgatcagctacgtaggcccccccccccttatttatccagattaagacagtctttagctgaacataggaagctgcaaagtttccctcttttggggcagagtcaattcatcaattaggagttggatgagagaatggaagccacaacagagcagaacaattcaaaggtggtgctgattgattctttgcaatcttgggagttccatgtcaaccaggcctccaatcagaatagtcctgttgttgttcacttcactgcttcatggtgcatgccatcggtggctatgactcctgtttttgaagaactggcttcaagctatccggatgttctgtttctcactgttgatgttgatgaagtcaaggaggtagccaccaaaatggatgtaaaggcaatgccaacatttttgtttctgaaggactgtgccgtggtggagaaggtggttggtgctaatccagaagagataaagaaaaggatagatgggcttgctgagtccactcgtgtctcactggcgtagttaagcatctgtatgatattctactgttgcaagttgcgagatatgtgcttgtggtcctgcactgcactatgtcatctgagtcgaagcttttttgtatgctgaatatcagttcaagtgtaatttccaattttcataagctcaatgctttggttactgattaatatcggcagtttttgtaccagccaaaattttacatttcatagttttggttgctgtggatttatggtgctctttccctgctagttgtgaattcaagggttatgtcctgctgtctttctattggttctttcgcaaatgaaatatatatgtatattttcaagaaaaaaaaaaaaaaaaactgtgacttaatcagttgtgtgagtataatgtatgaactggttcgcgaatgcaccaatttcttgc

SEQ ID NO: 1370 - DNA, 1091 bp, Glycine max
aattcggctcgagcgcgcagctacgtaggccccccccccatcgtctctagtgaattgtgatctccgaatccgaacacaacacacaaacaaagcttcagagtctttactctctctctctctctctctctctctctctctcttcgtaaatcgcgtcttccaccaatcagatggcaatgccggagacaatccctcccactactcccagtgctcaagttgtcggcaatgcctttgtggagcaatattatcacattctgcatcaatccccagaattggtgcacagattttatcaggattcaagtttcttaaccagatcagacagcaatggtgtgatgacaactgtgacaactgtacaagaaatccatgaaaagattatttccctgaaatatgaagattatacagcagaaataaaaactgcagacgctcaggagtcacataagggaggtgtgatagttttagtaactggatgcttaactgggaaggataatgtgagaaggaagttctcacagacattctttctggctccacaagaaaaaggatattatgtcttaaatgacgtctttaggttcattgaggagaatgacacacctcagttaaattcttcctcagtaagtgtcatcaatgaaaatgctgaggcagtgcatgagccagaatcagaggatctgcatgctcccaaacatctcgtggaagacaatgcaactttggcagagggtgagaaccttaataatggtgctgaagtttatcatcctcaggatgaggaagaaggatcagttattgatgaagaggttgctgaaccccctacagatttaagtcagaatgatattgttactgttgatgattcaacttctgctgtcctggatgatgcaccaaggagatcatatgcagccattgtcatgaaaagtcatgtagcatctggtcatgtctatgttcccagccgagctgcaagaatagcatctgctaaatccagtgaacaatggcctactactgccaaatcaacccctgtgcctgaggcattagctcctagtagtgatagtgcacctgggagcagtgatgttcatgaagaagctgaaggtcactccatatacatccggaac

SEQ ID NO: 1371 - DNA, 1396 bp, Glycine max
tacgctgcgagaagacgacagaaggggacttttcattcattttttttccaattattttatcattcctctgactgagttagagctgcacatctccgttacattactttcccatttcattattcgatccccaattcctctcccacgcagaagaatcatcaccccaaaacccaaattaaaaaaaaaacccaaataatacaactgaagttattttaattttcttagtaaaaaaaaaaaagagaagaaaaatgacttcgattcatttgataaacactctcgctgctccgcttcgttctttttctcctccgtcgctttttccgcaatgccattctcctctccgttcttccgctgccccgaaacggcgtcgtttcgctaactcctctgggttccgccttgcttcaagccaaaccgtgaattcggttccgcgtgggaatggaacttacaccgttgctgatttcatgacaaagaagcaagatttgcatgttgtcaaaaccaccactaccgttgatgaagctctggaggctcttgtaaactacagaatcagtggtcttccggtaatcgatgaggtctggaatctggttggagttgtatctgattatgacttgttagctattgattcgatatcaggaggtcctcaaagtgatgcaaacttgttccccaatgttgatagtacttggaaaacattcaatgagttacaaaaactgcttagtaagactaatggccaagttgtcggtgacttgatgactccaactccacttgttgttcatgaatcaactagtcttgaggaagctgctaggctgttacttgaaacaaaatatcgtcgactacctgtggtagatgatgatggaaagctggttggacttattacacggggaaacattgttaaggcagctctactatcaaaacgtgctggatagtggtgattgtctttgtgaaaagttattcaaatagatttgcttgaaggttgtgctggcgacggtcagcgtaacctctatattattagctacggataatgttaatgtatgtagttatatctaatggatgtttagactattgcaaatgtatatggcaggccaaaggaggagctggaggcaacttttgatggccttgtgagatcttagtggtggataaaaaaccatatagagtgatgtgatttatcgataacctttattaagttgtcaaaattgtttcggtgcattggattgtttcgagcttggatatactacatcctgttcttgatgcagtctctgttaacggacatttatgaggtcggaatagataattttgtgccctttattataacctttgtattgtaaattgcataggattttaatttatatgtaatttatgtcctagtccttcattattggattatttaccaaaaaaaaaaaaaaaaaaa

SEQ ID NO: 1372 - DNA, 1694 bp, Glycine max
tcgagtcagctacgtaggccccccccctttttttcaattattttatcattcctctgagatagagctacagcaccattatcattcatctccattactttcctattcgatcctcgatccctctcccacatagaagattcatcaccccaaaacccaattttttttaataatacaactgcaattatttttattttctcagtaaaaaaaaaaaaaagagaaatgagttcgattcatttgttaaacactcttgctgttccgcttcgttctttttctcctccgtcgctctttccgcaatgccattctcctctccgttcttcttccgctgttccaaaacggcgtcgtttctctaactcctctgggttccgtcttgcttcaagtcaaaccgtgaattcggttccgcgtgcgaatggaacttacaccgtttcggatttcatgacaaagaagcaagatttgcatgttgtcaaaaccaccaccaccgttgatgaagctttggaggctcttgtaaacaacagaatcagtggtcttccggtgatcgatgaggactggaatctggttggagttgtttctgattatgacttattggctattgattcgatatcaggaggtcctcaaagtgatgcaaacttgttccccgacgtcgatagtacttggaaaacgttcaatgagttacaaaagctgcttagtaagactaatggccaagttgttggtgacttgatgactccaactccacttgttgttcatgaatcgactagtcttgaggaagctgctaggctgttacttgaaacaaaatatcgtcgactacctgtggtagatgatgatggaaagctggttggacttattacacggggaaatattgttaaggcggctctactatcaaaacgtgctggagagtggtgatagtgtttgtgaaaagttattcaaatagatttgcttgcaggttgtgctgatgatggtcagcgtaacctctatatttattagctacggataatgttaatgtatgtagttatacctagtagatatttagactattacaaatgtatatggcacaagccgaaggaggagctgaaggcaacttttgatggccttgtgagatcttagtggtgtataaaaaaccatagagggaagtgatttatcgatcacctgtattaagttatcaaccttgtgtcggtacattggattgtttgtttcaggctaggagatactacatcctgttctttatgcagtctctgataactgacatttatgaggtcagaatagatcatttggagccctttattatgaacttaatactgtaaagtgcttaggattttaattatatgcaattatgtcctggttttgttgaagaattggattattcacgaacttctcgagtcttgtccgcacatttacccagtttactgtcaaattgaatatctcttactgatataggcagggtcaaggctgagagatcccataacgaattgacacattttcttaattattagttgtacacttggaaatacaggggaatgggaaatattttatcgtaatcgaactctctattttattttttatattcactttgaacttgaagtatcttgtcaaccataaactaatattggatcattgctacagaagtggggcaaaaatattagtacttcaaattctgataaaaaaatagctgtgaggatataaaataatactagtagtcgcaattt

SEQ ID NO: 1373 - DNA, 1264 bp, Glycine max
atttctcaccatgtgattcacacctctcttccaccgtttcttctttaacccagtaatctccatttgtctttcccatatgatatatatatcacctttgccttcaacacatcccacataacataacctcttgttttgtcatctaagaaaacctagtgagagtaagcacacattgatcagcaacaatggcagcctactcaagccatgctttgaaaaccatccctttttcttcctttgtgaagcctgtcagtaccaaaccaacatcattcttcacaccttcacctaccaaacctttcttacccttcacctcaccaaaccactctctcaccaaaaatctcaagctgaactccactttgccacacttttgcttgtcttcagttcccaagaaatctttcacttgtagaagccaggctgagcctgttgactcagaaaaagtccaagaactgagtgtgtatgagatcaacgagcgtgaccgtggaagccccgtttatcttcgattgagctataaaagtgtcaattcccttggtgatttagtcccctttagcaacaagttgtacactggagatttgcaaaagcgcattgggataacatctggtatctgtattttgatccaaaacaaagctgaaaagaaaggggacaggtatgaagcaatcttcagcttctactttggagactatggtcacatagcagtgcagggaccttacctgacctatgaggacacatatttggctgtgactggtgggtctggcatatttgagggtgttaaaggtcaagtgaagctgcgtcagattgtgtatcctttcaagattttgtacacattttatctaaagggtatcaaggatttgcctcaggagcttcttgtcaagactgttgagccaattccatctgttgaaccttcccctgctgctaaggcccttgagcccaatgctaccattgctggcttcaccgactaattcatcaactttttttgtatttgctttggcctttgtagtagtatgatttaagttactgaataataataacaagtggggactatgatgggttttgtagtggtggagtttctatttaacgaaaagcttgacattattcagttagtggtgtttaagcaaatataatgaataaggaaaggaagtataattatgtttgccatcatttcattatattttcgaattgtggttgtgtttgtataattatataataatatcatttgttgtatattttataaacacgtgccttttaagccgacgcctatggttgtttttttatg

SEQ ID NO: 1374 - DNA, 1303 bp, Glycine max
tcagctacgtaggcccccccccccgtagtttgcgcacgggtgcgtagtgcgtaccctagcaggaagtggattacactagaatacacaagtattctgttatcgttattcctcttcttcttcttattgctccaccctgcctggtggaaccaaacgaagaagacgttcggttttccctctgcttttcgaactttccatcgactccaccatgctattcaattagggttaggaattagggcttcttcttgttttcgctccgttaatttcaacaacggccaacatggttgttctctcgctttcatctcccagcctctccaccgctctcctcgcaaagaagctgcctccccgagaacacacggtgaagctagcgacctttcgcaacaattcatttcgctttagatgcgcggtggacacgccctatggagggaatgcccaaaaattccctcgaatcaatgtctggaatccttaccgacgccttggtattagccctgatgcctctgaagaagaaatctggggatcaagaaattttctgttgcaacaatattctgggcacgagaggagtgaagaatcaatagaagcagcttttgaaaaaatattgatggcaagtttcgtacagaggaggaaaacaaaaattaatttgaaaagcaagttgaaaaagaaagtagaagagtctccaccatgggtgaagaacttgctaagctttgttgaacttccaccaactgaagttatcctcagaagattgtttctctttggcttcatgggtggctggagtattatgaattctgctgaaactggacctgcttttcaggtggcaatctctttggctgcttgcatatattttctcaacgaaaagacaaagagcttggctagagcattcattattgggtttggagctctagtggctggatgggtctctggttcattgctggtacctaatattccatctatgttgctgcggccaacttggacacttgaactcttaacgtcattggtagtttatttgttcttgttcgttgcttgtacttttcttaagtgaagtggaaactattctttcaacgttatagtcggtgatgagtttataggtgatcaaacaatttttttgtttttgttgttgtagcgagccaaattgtttagtgtcgtctttttttatgaaaacaattgtctgagttgccaatattcagcagatatattattaccgagccttaactccttgcctaaatttccgttggttacggggcaagaagttcttccaccgaggtttgtgacttcaatcttattcttattcttctgttaaaaaaaaaaaaaa

SEQ ID NO: 1375 - DNA, 1974 bp, Glycine max
  misc_feature (1284)..(1285): n is a, c, g, or t
acggctgcgagaagacgacagaagggggggtgcgtagtgcgtaccccagcaggaaatggattacactaggatacagaagtaatctgttatcgttattccttccaccctgcccggtggaaccaaacgaagaagacgttccgttttccctctgcttttccaagttttcatcgactcaaccatgctattcttacataactagggttaggagttagggcgttcttatcgttttcgctccgttaattacaacaacggccaacatggttgttctttcgctttcacctcccagcctctctaccgctttcctcgcaaagaaactgtctccccaagaacacgcggtgaagctagcgacctttcgcaacaattcatttcgcattagatgcgcggtggatacgccctatggagggaatgttcaaaaattccctcgaaccaatgtttgggatccttaccgacgccttggtattagccctgatgcctctgaagaagaaatctggggatcaagaaattttctgttgcaacaatactctgggcatgagaggagtgaagaatcaatagaagcagcttttgaaaaaatattgatggcaagtttcgtacagaggaggaaaacaaaaattaatttgaaaagcaagttgaaaaagaaagtagaagagtctccaccatgggtgaagaacttgctaagctttgttgaacttccaccgactgaagttatccttagaagattgtttctctttggcttcatgggtggctggagtattatgaattctgctgaaactggacctgcttttcaggtggcaatctctttggctgcatgcatatattttcttaacgaaaagacaaagagcttggctagagcattcattattgggtttggagctctagtggctggatgggtctctggttcattgctggtacctaatattccatctatgttgctgcgcccaacttggacacttgaactcttaacgtcattggtagtttatttgttcttgttcgttgcctgtactttcctcaagtgaagtggagcctattctttcaacgttatagtcggtgatgagcttataggtgatcaaacaatttttttaagcgagccaaattgtttactgtcatctttttttatgaaaacaattgtttaagttggcaatgttcagctgagatattactgagccttaactccttgtctaaatttccgttggttacgaggtaataagttcttccaccgtggtttgtcactttaataacgggttcctaacctctccaatcgcctgatattcctttctgtgcccgtannttggttatttgatttagaaataaacttgtgtaccaagcgtgcaatattttaaatgcaatttaatgaaagatggaaaacgaatgaagtagttgctaggattattaactagggttctggagcaacagttattgtattgaaagatttatttggtgtttcaactttcaaatgtttaaaaagcatttttagttttccaatatcaattttaagaacagggtatatatagtttaggtaattgaaaggccagcataacttgttggtggcatttcaattcttggacgaagttatctttaattcgttcagctttcacaatgtcctttataaaaaaaaaaaagttttcacaatgtcctttataaaaaaagttttcacaatgtccgatcaaatacttgagacagctgacgttctagttctttgtagtgtaacatgtcttggatgttcaaaatcgtacttctatttgggtgtgtatcatatttgattaaaaagctaagctgagagaaaataggagtaaaagttttgggtttagtaactaagctggttattataaaaattaataaaattttcaagcatatttactctaaagttttttaaaaattcaattaattttatatgatattttataagtgatttaatacaaaaatagggaaccaagaggatttagataaaccccgatatcatgtttaatttttacgtat

SEQ ID NO: 1376 - DNA, 1768 bp, Glycine max
tctatgctgagaggtttgtcaatggggcatctgctcactcaaaagtcccgtgccgacgttggtgtctttcccttgttgcatgccttggaaggagtttctggagaaaatgaaatttgggaaagggctgaaaatttgttggacacattatctaacaaggagggaaaaggagatggattcttggaggagaaggtgtgtaagctgcgagatgcaactagggatgaaatgaagcgtcgtgctttgcggaagagagaggaattgcttcaggggcttagaatgcgtctagaaccgtcttcagatggaggagaacgtattgttgtttcccagcctgtccttgaaggtttagaagatgtccaggaggaggatgggctggcatgcatggtatgccaggaaggatacagtttaagacctgctgatttattgggtgcttactcttatagtaagcgtgtgaatctaggggttggttcttcgggaagtgctcgtggaggagagtgtgtttataccactgtaagttactgcaatattattcatttccagtgccatcaagaggccaagagaactgatgctgctttgaagaatccgaagaaagagtgggatggagcaacacgtagaaacaatgaatgtctctgtaattctttattccctgtcagaggtccatctgttcctctggcacagtatgttcgctatgttgaccagtattgggacaaccttaatgctcttggacgtgctgatggaagtagactccgcctgctgacttatgacattgttctgatgttagctcggtttgcaacaggagcatcattcagtgcagattgccgaggtggtggacgagaaagtaattcccggttcctcccatttatgatccaaatggcatgccatctccttgatcaaggaaacccctcccagtgtcgaaccatggccagggccgtatcagcatacatatcctcttcctcatcagatctcagaccctcttctccatctggcacccaacctatgccggggactgaagagactgtccaatttatgatggtaaactcatttctctcagagtcgtacgggtcctggctgcagcatcgttgtgcttttctgcagcgtggaatttaccatgcatacatgcagcacacacattctcggtctgctacccgtgcaccatccgttacagctcctgcacaaggtgtggaatctggaagcatggaccaaactgctactaccgaaacagggcagagtgatcttttgtctattatacgtccaatgcttgtttatacaggcttgattgaacagttacaacgtttcttcaaggtcaagaaatcaactagtgcaacaccacctgcaaggactgaaggggcttcatctactatagaaggggaagatgaaagtggaaatctggaaggctgggaagtggtaatgaaagagcgactcttgaatgtaaaagaactgctcgagttccccaaggagatgctgtcatggcttgatgagattaattctgccactgacttgcaggaagcctttgacatagttggtgttctagctgaggtcctgtccggcgggttcacccggtgtgaagattttgtgcaggctgcaattaacgcagggaaaagctgaaagattttgtgtccctttttgtaataatgaaatattaaaagcataacatatattccgagggaatgtaaaacgcttggctactatgttcttttgaacgtatgaagctgatggagaatgcaagggcggatatttatgatggtgtggtgaaaaaaaaaaaaaaaaggcccct

SEQ ID NO: 1377 - DNA, 1139 bp, Glycine max
attggtggtgaagacttgcttcagaatatgatgcatcatctgctaccaaattctgaaaatctatttaagaaccatggggtcaaagaaattaaacagatgggcctgcttcgagttgcaacccaggatgcaattcgccagctttcctctcagaccatcgttcaggttgatgtagacctgggagatggtttgaagatatgcaaggctgttaaccgggaggagtttgaggaggtaaacagaaaggtgtttgagaaatgtgaaagccttatcatacagtgtttgcaagatgccaaggtagaagttgaagaagtaaatgatgtgataattgtaggcggatgttcttacatcccgagggtgaaaaatcttgttactaacgtatgtaaaggcaaggaactttataaaggcatgaatcctttagaagctgctgtttgcggtgcagcagtggaaggagctattgcttcaggcgtcaatgatccctttgggaacttggacttgttaactatccaagctacacctcttgccattgggattcgagctgatgggaacaagtttgtccctgtaattccgagggatactacaatgccagcacggaaggagctagttttcacaactactcatgacaatcaaactgaggcgttgatccttgtctatgaaggagagggtgaaaaggcagaagaaaaccacctattgggatatttcaagataatgggaatacctgctgctcctaaaggagttccagaaatcaatgtgtgcatggacatagacgctgcaaacgtgctaagagttttagctggtgttgtgatgcctggttctcgccaacctgcgattcctgttatggaggtaaggatgccaacggtggatgatgggcatggttggtgccccaaggctctaaatagaacctatggtgccacactggatttagttactctccagaagaaggcatgaagtgatacactactacacaacatcattgtatttgtacctttttttttagttgttttcttgtgtttgtttcggcaaatagaagttgatgtacatggcatgtctgatgtttgtattttgtccctagaataatggaaacaatgcgttccgaaaaaaaaaaaaaaaaaaaaaaaaaaaaaagcggccctctagaggatcca

SEQ ID NO: 1378 - DNA, 882 bp, Glycine max
ggctcgagatctcttgcaacactacaattttgcttacatgggagccaagttaacaaaaaggataagacttggcatgctggagaatatcttgacctttgaaactgcttggtttgatgaggaacaaaactccagtggagcattatgctcaaggttaagcaacgaggcttccatggttaagtcccttgtagcagacaggctctctttattagttcaaaccacttctgctgtcatcattgcaatgatcataggccttgccgtggcttggaagctagctcttgttatgatagcagtgcagccactcacaatcctttgcttttatacaagaaaagtgttgctctccacactctcaacaaaatttgtcaaggcacagaatcgaagtacacaaattgcagtggaggcagtttataaccacagaattgtgacttcatttgggagcattacgaaagtgctatggctattcgatgaggcgcaagaggcgccgaggaaggaggcgaggaagaagtcttggctagctggcataggaatgggttctgctcagtgtcttacgttcatgtcatgggctttggatttctggtatggtggtactttggtggaaaacagagaaatatcagctggggatgtgttcaaaacattttttgtgttggtgagcactggcaaggtcatagctgatgctggaagcatgacttctgaccttgccaaaagttcaacagcagtagcatctgtgtttgaaattctggaccggaaatcgcctattcccaaggctggagattacactaacggcatcaagttggaaaagatgagtggaagaatagagttgaagcatgttgattttgcttatccaagcagggcagggaccccaatttttcgcaagttttgcttgga

SEQ ID NO: 1379 - DNA, 1871 bp, Glycine max
ctcgagccgactcggctcgagacttgctaacacggctgcgagaagacgacagaaggcggcgataaaacggagaaaagaaaaaagaaaaatgtaagtggaagaagagaaagtggcatcgcttaggtacagatacagacacaacctggtaaaaatcccgaccccagtgccgcacaattttccttcactcgcagcggaggtttacttttgatctagtacctgctatccctatgtataagcatggacttctagcatactattgtttgattaaccaagttcttccatattggttgaggaagcctcgagtcaatatttagtttttgctgccatctgtgggtttctgatggatgatgccgggcatcgtgaaaatggaaggcacaaagcagcagatcaatataaatctgctcagggacagtggttgatgcaacatcagccttccatgaagcagattatggcaattatggctgaaagagatgcagccattcaagaaagaaatctggccatttccgagaaaaaagcagcatatgctgagcgcgatatggcattcatgcagcgagatgctgcaattgctgaacgtaataatgcaattttggaacgagataatgcaattgcaactcttcagtatcgcgaaacctctttaagtagtggcagtatgccatcatgccctccaggatgccaaatttcacgtggtgtgaagcatatacatcatccccagcaacaggtacaccatatacctaacatgggtgatgcctcttacagcacacgggaaatgcacacaaccgatgccctccctgcagcccccatcccttctgaggccgggaaaccgaggcgggccaagcgaccaaaggaaccaaagtcagcttcacctaataagaagacttccaaaccagcaaaaaaagtcaagaaggagagcgaagacttgaacaaggttatgtttggcaagtcacatgagtggaagagtggtcaggaaatggtcaatggaggtgatgatcttaacaagcagttaactgtgtcaaaggctgattggaaaggacaggacttggggttaaaccaagtggcgtatgacgagtcaaccatgccagctcctgtgtgctcttgtactggtgtcctgaggcagtgttacaaatggggtaatgggggttggcagtctgcctgttgcacaactactctgtcaatgtatccacttcctgcagtgcccaacaagagacatgcccgggtaggtggtcggaagatgagtgggagtgctttcaacaagctgcttagtcgccttgcagcagaaggtcatgatctgtcaaaccctgttgacctcaaggaccattgggcaaaacatggaacgaaccgttacatcacaataaagtagaggatgagaaattgtttgtggggcagcattacatgaatagaaacagcttttagcgatcaattatggattctcaagtcgaatgagaaaaataatgtaagtgtaaaggtcatctgggaaagctaatgattagagtatgcccttgctatatttaggatgcataagcctggtgttaaagtcatcctcgttcgtcatttgtacgcacttaattttcttagatggtctgatggcgccaatggcatgtataaaaagtctgcatgatgggatggataaataactgttagatagtcttgtttaatgcatgtagtccttaaacctgaataattgtagactcgtgtcctcagtcatcctggaacctctctgcggtaatatgtaaaatcaactatgtatgttaattttttccttgtttcatgtttgtttttcctccacattggaacccaatctatgagtttagtttttattagtgattgctacaggaggtggccaatatgagccctatgaacctattccttggttt

SEQ ID NO: 1380 - DNA, 2830 bp, Glycine max
  misc_feature (247)..(251): n is a, c, g, or t
gaattcattctatttgtgattttccaggtttatgtgcataacttggtcactgaaaatggtctagttagtcgttcatccgagtttgaagctgcaatacagaatggggaaaggtctttattgagggttttatgcggataacaaactgaggaatcagagtgagttctattcatgaagtgcaacattgtctcatggtctttctttattatgcctaacctaatccgttacacttggaacaatgctgatcacnnnnngatgttatagatctgaggaggaaagagaaacatggggctttttgaaggttatgcttgaagatgatgggactgcacggacaaaacttctctcacatcttggtttcaatgtacctagtgaagcaaaagatacagttaatgatgatctttcccaagaagtaaatgcacttggacttgaggacacaactgttgacaatgttggacatgtgtctactaatgaaacccctattttctctactgataatggggaagatttctttaataatcttcccagtcctaaagctgatacccctgtatctacttctgccggcaactttgctgttgtggaaaatgccaatggttcagagaaaatccaagatgatgtggaagtggaggagagcagtgacccttcatttgacgacagtgttcagcatgctttagttgttggggactacaagggggcagttatgcaatgcatttctgcaaataaatgggctgatgcattagttattgctcatgttgggaatgcttccttgtgggaaagtacacgggatcaataccttaaaatggtccgatcaccatacttgaagattgtatcagcaatggtgagcaatgatctcttgagcttagtgaacaccagaccactgaagttttggaaagaaacccttgcgcttctttgtagttttgctcagagagatgaatggactatgctttgacggctgcgagaagacgacagaaggggggctggcaatacattagctgcaactctgtgttatatatgtgctggaaatattgataaaactgttgaaatttggtcaaggagcctgtcaaatgagaccgagggaaaatcttatgttgaccttcttcaggatttaatggaaaagactattgttcttgccttggcaactgggcagaagcggtttagtgcttctctgtgcaagcttgttgagaaatatgctgaaattttagcaagtcaagggctgttgactacagcgatggagtatttaaaacttttgggttctgaagaactgtcgcctgaacttacaatcttaaaggatcgaattgcactttctacagaacctgagaaagacttcaaaactactgcttttgaaagttctcaatcacatagtgggtcctattatggtgccgataattccaattataatagtaattattatcaggagccagtaaccactcaagtgcagcatggtgtttctggaattcaatatcctgatagctatcaacagccatttgatcctagatatggaagaggctatggtgctcctactccaccccagcaacctcaacagcctaatttgtttgttccaccacagactactcaggttgtgcaaactccccagccgactttctcaaatactgctgttgcaccaccacctttgagaacttttgatcctcaaactcctcccatgcttagaaatgtggagcaatatcagcagcctacattgggatctcaattgtataatacaaccaatccaccttaccagcctacaccccctgttccatcacaagtggccttgagtcatggccagaacttgtcacaagttgtggcacctaccccaaatccaatgggatacatgccagtctctggttctggtggtgtccaaagacctggggtgggatcaatacaacctcccagtccccctcaagtgcaacctgtgcaaccacctgcagctcctcctcctactttgcagactgctgatacttcaaaagtacctgggcatcaaatgcctattgtcacaactttgacaaggcttttcaatgagacatcagacgcccttggaggttcacgtgcaaacccagctaagaggcgggagatagaagacaactcgaagagacttggtgggttgtttgccaagttaaatagtggagacatatcgaaaaatgcttctgacaagctccttcagctttgtcaggcattagacaatggtgattttggtactgccctacaaattcaggttcttcttactactactgagtgggacgaatgccaatcctggttaggttcactcaagcggatgatcaagacaaggcagagcgcgagactaggttaaaaaagctacagatttctttttgctgattttggaaaattttcgtgtgattagcatcttgcagtagtgattgctggtcctcgtatcaatgtacacagactactgccatctctagatttcaggtgcagggtttttgattctatgtgcttctacaattttcttgctgtgtctgcagctttcacatcgactgttattaaaagctgttaatgaaggtagttttcaggaaaagatcagaaattttagcagattgtttttcaaccaatatctgtaatatgaagaacggtgttttgtctgtctgtttgccctaaatttccagatggtttttcttcacaccccctggctccatggtgacgccccaaggtgttctaatgtcagttatagattaatgtttccttttcttttatttttatttttaaagagtattttgtatcacactagccgtataagtattgatttgatcgtcaaacaggtgaataatgtagcatcatgtttatttaatcatccatcatttaatttctctaaaaaaaaaaaaaa

SEQ ID NO: 1381 - DNA, 2169 bp, Glycine max
gaaaagactattgttcttgccttggcaactgggcagaagcagtttagtgcttctctgtgcaagcttgttgagaaatatgctgaaattttagcaagtcaagggctgttgactacagcgatggagtatttaaaacttttgggttctgaagaactgtcgcctgaactaacaattttaaaggatcgaattgctctttctacagattcttagaaagacttcaaaactactgcttttgaaggttctcaatcacacagtgggtcctattatggcgctgtgaattccttccatattagctttgttgttcaggagccagtacccactcaagtgcagcatggtgtttctggaattcaatatcctgacagctatcaacagtcatttgatcctagatatggaagaggctatggtgctcctactcatactccaccccagcaacctctacagcctaatttgtttgttcctccgcaggctactcaggttgcgcaaactccccagccgactttctcaaatactgctgttgcaccaccacctttgagaacctttgatcctcaaactcctcctgtgcttagaaatgtggagcgatatcagcagcctacattgggttctcaattgtataatacaaccaatccaccttaccagcctacaccccctgctccatcacaagtggccttgagtcatggccagaacttgtcacaagttgtggcacctaccccaaatccaatgggattcatgccagtctctggttctggtaatgtccaaagacctgggatgggatcaatacaacctcccagtccccctcaagtgcaacctgtgcaaccacctccagcacctccaactcctcctcctactttgcagactgctgatacttcaaaagtacctgggcatcaaatgcctattgtcacaactttgacaaggcttttcaatgagacatcagacgcccttggaggttcacgtgcaaatccagctaggaagcgggagatagaagacaactcgaagagacttggtggattgtttgccaagttaaatagtggagacatatcaaaaaatgcttctgataagctccttcagctttgtcaggcattagacaatggtgattttggtactgccctacaaattcaggttcttcttactactaccgagtgggacgaatgccagtcctggttaggttcactcaagcggatgatcaagacaagacagagcgtgagactaagttaaaaaagttacagatatctttttgctgattttggaaatttttcatgtgattagcatcttgcagtagtgattgctgatcctcctatcaatgtacacagactgttgccatctctagatttcaggtgcagggttttgatatgtgcttctacaatttcttgctgtgtctgcagctttcacatcgattgttattaaaagctgttactgaaggtagttttcaggaaatgattagaaatttttgcagattgtttttcgaccaatatttgtaatatggagaaaagtgttgtctgtctgtttgtcctaaaaatttcagatgggttttttcctcacacccctgtcgtaccatggtgacgctccaagctattctagtgttagttatagattgatgtttcttttctttttaaagagtattttgtataacactagccatataagtattgatttgatcgtcaaacaggtgaataatgtagcatcatgtttttttaatcatccatcatttaatttctccaagctgtacatgtttgtgatttagacgcactagtttcaacgggctgtccatggcgcttggggcctagcgtgatcatgtagtatttgtgggttgacatttctcaggacatgaaatatgattaaaaaacttacgtatcagtgccaaaaagctcatcgcaatgcgacatgaaatacgatgcaaaagattggattgtgaactatgaattttaattatgtctcatcctaactgactgagatctaactattggtttggagttgtcatattggggatgtgtctcttacatccttttttttatgcatgtgccttgggtgtgcagttcacgatgatttagtttattaaataaattaaaatatttaaattcctttgaaaagtattaatgttttcaatgtttttgaggtgagcattttttatgcttatatatatatatacatatatatttttttgaaagatgtttaaaa

SEQ ID NO: 1382 - DNA, 1001 bp, Glycine max
cctctatgcatctgctgaccttccgtgggcctcctctgtgataatttcggctcgcgctcgtgcccaattgctttgtccggcctagggaggcacaaaaagctgcggatgaagcaaaagctaggtttggacacattgatggggatcatctcacgctcttgaatgtataccatgcctacaagcaaaataatgaggatccttcttggtgttatgataacttcgttaatcatagggcattgaaatcagcagacaatgttagacaacaacttgtgcgaatcatggctcggtttaacctgaagttatgcagcactgatttcaatagccgggactactatgtcaacattagaaaggcaatgctagcagggtattttatgcaggtggcccatctggagcggacaggacattacttgacagtgaaagacaaccaggtggtgcacttgcatccatcaaattgcctggaccacaagccggagtgggtaatatataatgaatatgttcttactagtcggaattttattcgaactgtgacagatatacgtggagaatggttagtggatgtagccccacattactatgatttgtcgaattttccacaatgtgaagctaagcgtgttcttgagaggctttacaagaagcgagagaaggaaaaggaggaagccaggagtcgtaaatgaagtcccttaccatccatgcctttttttgcctttagattggaattggatatttagtctcctgtaatttgacatcgtaattttgtcaggagaaggtttccgaatgtgagtgttttattacctctgaagtctgaaggacctattgatagttaattttagtgagaaataggctgtgtttttttttttttttccatatatataacataggctgtgtttcttgcactatttattagtgtattagtaacgttttatattcgtcgactttttgctgtttttccttcggaggccttatcattgcattttctaataaaatatgttctgttctataatcat

SEQ ID NO: 1383 - DNA, 1092 bp, Glycine max
gtagatttgagaggtaagaagagaaggagagagcaaagcataatttaatatcggggatgccattgctcgtatccaattgtgcaaaggctttcatcctctcgacgctcccacagtcgaagcgaatgtcccatcatgctcccggcgtcaaaacgcgcctgaggggtgtcgttttcgacatggacggcaccctcaccgtcccggtgatcgattttccggcgatgtacagggcggttctgggcgacgaggagtacctgcggctcaaagcggaaaacccttccggcatcgacattttgggccacatcgaagggtggccgcctcacaaacagcgcaaggcctacgacgccattgctgaggtcgagcgtcagggtcttgaacgccttcaaatcatgcctggttgtgcagagctttgtgccatgctcgattctaagaaaataaggaggggtttgatcactaggaacacgaagtcagcagttgatttattccatgaacggtttgggattacattttctccagcattaagcagggaatttcgtccttataaacctgatccaggtccactactgcatatttgttctctttgggaagttcaaccaaatgaagtaataatgattggagatagccttaaagatgatgtgcgctgtggaaggcaagcaggagcctttacatgcttgcttgatcaaacaggagtatatgattctcccaagtatgctgatgttgaattcaaaccagatttcaaggtgacttcccttgatgaagttcactcagttctgaaggaaaattttgatttgtcaccatgatgccaaggattgttatcgtgaaccaattttttttttttggggtttatgctgagatttggaggaggcatatatgttgggggtagctttattccttcacgaaacaaaatatcattaaaactttaggttaaaggatttaatgggtggcattttaataatgatgttgtaacttgtcttatatgggcatgaatgccatacaaaattactgttctaaaatttgatgtcagtagcaagatacattgaattgtgctgtgcccgttgcctctctttcttggatttgcgagttctgttggatgtt

SEQ ID NO: 1384 - DNA, 1759 bp, Glycine max
  misc_feature (18)..(18): n is a, c, g, or t
  misc_feature (82)..(82): n is a, c, g, or t
tcgagtcagctacgtagngcccccccccgatgttgcaagtgaaattgctgctgagttacaagggtatcctgatttcatcatntggaaactacagtgatgggaatcttgtttgcatctttattggcttataaaatgggagttacccagtgcacaatcgcgcatgcacttgagaagacaaaatatccagattcagatttatattggaagaaatttgaggataaataccacttttcatgccaatttactgctgacctaatagccatgaataatgctgattttataatcaccagtacataccaggagattgcaggaacgaaaaatactgttggccagtatgagagtcacactggttttactcttcctgggctctatagggttgtccatggcattgatgtttttgatcccaagttcaatattgtctctcctggagctgatatgtcaatatatttcccctactctgaaaagcagaacaggcttacagccctgcatggttcaattgaaaagctgttatttgatcctgagcagactgatgaatacattggttcattgaaagacaagtcaaagcccataattttctccatggcaaggctagacagagtgaaaaacataactggattggtagaatgctttggtaagaacagcaaattgagggaactggtcaaccttgttgtagtagctggttatattgatgtaaagaagtcgagtgacagagaagaaattgcagaaattgagaagatgcacgagctcatgaaaaagtataatttaaatggtgattttcgttggattgctgcccaaacaaatagggcacgtaacggggagctgtatcgctacatagcagacacacaaggtgctttcattcagcctgctttctatgaagcttttggacttacagttgtggaggccatgacttgtggactccccacttttgctacttgtcatggtggtcctgctgagatcattgagcatggtatatcaggattccacattgatccttatcatcctgatcaagcttcagagctattggttgaatttttccaaaagagcaaggaggacccagaccattggaagaaaatatctaatggtggtcttcaaagaatttatgaaaggtacacttggaagatttattctgaaaggcttatgaccttggcgggagtttatagtttctggaaatacgtttccaaattagagaggcgtgaaactcgacgatatcttgagatgttctatatcctcaagttccgtgatttggcaaattctgttccgcttgcaaaggatgatgcaagttaagtagctatatatatataatttcaccaaggcttgacagcagacataataagagtcatatatgtaaatataaaagtctgcttctcgtgttttgaaatcttgtgatgcgacctagaggagtttcatggaagacttgtctatgttaacttcgattatgtatatgcaagagatggcgagcaattgttgttgaatttggatgtctcttgttttcgtttgattagcagttatcaaagatctagacctgggaattacctgtgaggattgttatccttactgatgggtaagaataaagcattatgaatcaatggcctaatggtctgtattgtggcattgtatatatgatgagacggtctagccaacccagtgttgggtgtaacatttactaaatggccttgaatttcttaagtttgaaaataacacttttatcatgaattaatgtcataaaatagaagaagtcataaactaaaagttattaaaa

SEQ ID NO: 1385 - DNA, 816 bp, Glycine max
cgaaactctccaaattccaaaaatgcttgtcttccgttggtcttgcccttgttgttttttaaagcagaatccctcaatcataaatcattggtcaaattatgttatataatacattagggatgttcagaaagaaaaagggtaacttggtaattcttggcagtctccatcgaaggatttcttacattattatgtgatagacaaaaacagaaacatggtattcagtttacttaagtttacaatgatatattataggcttttacctagatataatgatgcaacatagtggtcatcctactgtttttgacattttgtatacaaatgcgtgcacatatcacacgaaagatgatatgcctccataattccatccaaccacaaatacgtctttgattaaggagacaactctcctttgcaaggaatattggtgcagcggcaaacgggtctaccagaagcttcccacccattgaagccacgttccaagaccataatgttctttatcccagtatcttccttgttctcctcaagataattgacaagcctcctagcacaagttgggccacgaacctgacttagagcgcagtggaagacgagagtgtctttgcctttaactgcctgaatgagatttgagatgttatcggagaaagtgtcgcttgcgtaatgaagagaccccgatatgtgtccgtcgtagctcctctcatcgtcccttacatcgacgacggcgatgcttggatggcgtctgagagagagaagctgcgaccccgttatgtacgatatactgcgagccattatctcatacctcctcccccttctgtcgtctga

SEQ ID NO: 1386 - DNA, 3072 bp, Glycine max
  misc_feature (3055)..(3055): n is a, c, g, or t
  misc_feature (3058)..(3058): n is a, c, g, or t
gtcctctttaactctcatgcttttttccacttgcaaactccaaattcactctgacagtttttgcagctaattaagaagaacttaacagacatataaacatagtgatcgttatgtctacgcaaccaaagcttggtcggattcccagtatcagagaccgagttgaagacactctctctgctcaccgtaacgaactcatttctctcctctccaggtatgtggctcaggggagagggattttgcaaccccataatttgattgatgaacttgacaacatccctggcgatgatcaagcaatagtggatcttaaaaatggtccctttggtgaaatcgtcaagtctgcaaaggaagccatagttttgcctccttttgtggcaatagcagttcgtccaagacctggtgtttgggaatatgtccgtgttaatgtctctgagctcagcgtggagcaattaagtgtttctgaatatctcagcttcaaggaagaacttgtagatggaaagattaatgacaattttgtattggagcttgattttgagccatttaatgccacatttcctcgtccaactcgctcagcatccattggcaatggtgtccaatttctcaatcgccacctttcatctattatgtttcgcaacaaggattccttgcagcccttgcttgatttcctccgagctcacaaatacaagggccatgctctgatgttaaatgatagaatacaaaccatttccaaacttcagtctgcattggccaaggctgaggattatctctctaagcttgcacatgatacactctattcagagtttgaatatgtattgcaaggaatgggttttgagagaggttggggtgatactgctgaacgggtattggaaatgatgcatctgctattggatattcttcaggctcctgatccttctacactagagacttttcttgggagagtaccaatggtattcaatgttgctatattatctcctcatggctactttggacaagccaatgtcttgggtttgcctgacactggtgggcaggttgtttatatactagatcaagtgcgtgcccttgaaaatgagatgctccttcggatcaagaaacagggacttgatttcactccaagaattctaatagttaccaggttaatacctgatgcaaaggggacaacatgcaaccagcggctagaaagagtcagtggtactgaccatactcatattttgcgagttccattcagatcagagtcaggaactctccgtaaatggatttcaaggtttgatgtgtggccttatctagagacttatgcagaggatgttgccagtgaaattgctgctgagttacaagggtatcctgatttcatcattggaaactacagtgatgggaatcttgttgcatctttattggcttataaaatgggagttacacagtgcacaatcgcgcatgcacttgagaagacaaaatatccagattcagatttatattggaagaaatttgaggataaataccacttttcatgccaatttactgctgacctaatagccatgaataatgctgattttatcatcaccagtacataccaggagattgcaggaacgaaaaatactgttggccagtatgagagccacgctggttttactcttcctgggctctatagggttgtccatggcattgatgtttttgatcccaagttcaatattgtctctcctggagctgatatgtcaatatatttcccctactctgaaaagcagaacagacttacagccctgcatggttcaattgaacagctattatttgctcctgagcagactgatgaatacattggtttattgaaagacaagtcaaagcccataattttctccatggcaaggctagacagagtaaaaaacataactggattggtagaaagctttggtaagaacagcaaattgagggaactggtcaaccttgtcatagtagctggttatattgatgtaaagaagtccagtgacagagaagaaattgcagaaattgagaagatgcatgagctcatgaaaaagtataacttagttggtgattttcgttggattgctgcccaaacaaatagggcacgtaatggggagctgtatcgctacatagcagacacacaaggtgctttcgttcagcctgctttctatgaagcttttggacttacagttgtggaggccatgaattgtggactccccacttttgctacttgccatggtggtccggctgagatcattgagcatggtatatcaggattccacattgatccttatcaccctgatcaagcttcacagctattagttgaatttttccaaaagagcaaggaggacccaagccattggaagaaaatatctgatggtggtcttcaaagaatttatgaaaggtacacgtggaagatttattccgaaaggcttatgactttggcgggagtttatagtttctggaaatacgtttccaaattagagaggcgtgaaactcgacgatatcttgagatgttctatatcctcaagttccgtgatttggcaaattctgttccgctagctaaggatgatgcaagttaactagctatataatttcaccaaaggcttgacagcagacataataagagtcatttatgtaaatataatagtctgcttctcgtgttttgaaatctagtgaggcgacctagaggagtttcatggaagacttgtcttgtctatgttaacttcgattatgtaagagatggcgagcactggttgttgaatttggatgtctcttgttttcgtttgattagtagtcatcaatgatatagacctggaaattacctgtgactgaggattgttatccttactgatgggtaagaataaagcattatgaatcaatggcctaatgatctgtattgtggcactgtataatgttaatgtatatgatgagacggtctagccaacccactgttgggttgggtgtaacacttgccaaatgaccttgaatttttaagtttgaaaataacacttctatcatgaattaatgtcataaaatagaagaagtcataacctacaaatatttgatttcttcccaaaaaaagttnctncaacattatttaat

SEQ ID NO: 1387 - DNA, 2696 bp, Glycine max
atactgctgaacgggtattggaaatgatgcatctgctattggatattcttcaggctcctgatccttctacactagagacttttcttgggagagtaccaatggtattcaatgttgctatattatctcctcatggctactttggacaagccaatgtcttgggtttgcctgacactggtgggcaggttgtttatatactagatcaagtgcgtgcccttgaaaatgagatgctccttcggatcaagaaacagggacttgatttcactccaagaattctaatagttaccaggttaatacctgatgcaaaggggacaacatgcaaccagcggctagaaagagtcagtggtactgaccatactcatattttgcgagttccattcagatcagagtcaggaactctccgtaaatggatttcaaggtttgatgtgtggccttatctagagacttatgcagaggatgttgccagtgaaattgctgctgagttacaagggtatcctgatttcatcattggaaactacagtgatgggaatcttgttgcatctttattggcttataaaatgggagttacacagtgcacaatcgcgcatgcacttgagaagacaaaatatccagattcagatttatattggaagaaatttgaggataaataccacttttcatgccaatttactgctgacctaatagccatgaataatgctgattttatcatcaccagtacataccaggagattgcaggaacgtaagtaccgttttcatgatatatatggtttacttcatgattttgtgacaatgttaattcttttataatctcgcttgttatataactttcttttcttttacaagctccactctgactatttattttgcagataaaattatgatacaaatgattgccttttgtttcccgaacatatgctcccaaatggcacatctccattcttattttaactgttattggcttcttttcattgaaccttgcattacccatttggcattacatgtgtaggcatccatgactgtactgagagacttataccgtgtttggtgtagcataacttgttgtctcaagattcctaaattatgcgtggtgacagcaagtgtcatggactcatggcttaccaaagaccactcagttatatgatgctatacctagtcatttcttttgtctcttgatatttctctgaaaggcatatgagctagttactattttgtttaagcatcctctcttggcatctcacatatctatccctggtgctaacctacattttccttgtaatctatatatacttgtttttcagttaagctaatgttactcatttcattttcttaacctgtctttcaggaaaaatactgttggccagtatgagagccacgctggttttactcttcctgggctctatagggttgtccatggcattgatgtttttgatcccaagttcaatattgtctctcctggagctgatatgtcaatatatttcccctactctgaaaagcagaacagacttacagccctgcatggttcaattgaacagctattatttgctcctgagcagactgatgaatacattggtttattgaaagacaagtcaaagcccataattttctccatggcaaggctagacagagtaaaaaacataactggattggtagaaagctttggtaagaacagcaaattgagggaactggtcaaccttgtcatagtagctggttatattgatgtaaagaagtccagtgacagagaagaaattgcagaaattgagaagatgcatgagctcatgaaaaagtataacttagttggtgattttcgttggattgctgcccaaacaaatagggcacgtaatggggagctgtatcgctacatagcagacacacaaggtgctttcgttcagcctgctttctatgaagcttttggacttacagttgtggaggccatgaattgtggactccccacttttgctacttgccatggtggtccggctgagatcattgagcatggtatatcaggattccacattgatccttatcaccctgatcaagcttcacagctattagttgaatttttccaaaagagcaaggaggacccaagccattggaagaaaatatctgatggtggtcttcaaagaatttatgaaaggtacacgtggaagatttattccgaaaggcttatgactttggcgggagtttatagtttctggaaatacgtttccaaattagagaggcgtgaaactcgacgatatcttgagatgttctatatcctcaagttccgtgatttggcaaattctgttccgctagctaaggatgatgcaagttaactagctatataatttcaccaaaggcttggcagcagacataataagagtcatttatgtaaatataatagtctgcttctcgtgttttgaaatctagtgaggcgacctagaggagtttcatggaagacttgtcttgtctatgttaacttcgattatgtaagagatggcgagcactggttgttgaatttggatgtctcttgttttcgtttgattagtagtcatcaatgatatagacctggaaattacctgtgactgtgaggattgttatccttactgatgggtaagaataaagcattatgaatcaatggcctaatgatctgtattgtgccactgcataatgttaatgtatatgatgagacggtctagccaacccactgtttggttgggtgt

SEQ ID NO: 1388 - DNA, 1671 bp, Glycine max
  misc_feature (1652)..(1654): n is a, c, g, or t
  misc_feature (1657)..(1659): n is a, c, g, or t
  misc_feature (1661)..(1661): n is a, c, g, or t
ttttcattaaaaggaaataatttttattaattaacaaaacaagaggtaattggcaccgttaagaaacattatggtctgatgtcatatataccggtgtccccgggttggcccccgcgccccgaagaaaaacgcaagctgcttgtttgatagggaagagaagaaagagagaaaacaaagggcggtggtgagtgcttctgcttcatcatcatcagagaatggcggctactgtgtcttctgcttggtcaaagcccggcgcgtgggccctagattccgaggaacacgaagccgagctccttcaacagaacaacaacaaccccaacgacaagccactcgccgacttcccctcccttgccgccgccgccgccaccaagcccaagaagaagaaggcccagacctactccctcgccgaattcaccgccaagcccgactccgccttcgccgaccaagatcccgtcgtcctccccaccggcccccgccagcgcaccgccgaggagctcgaccgcacccgtctcggtggcggcttccgcaactatggcgaccgccccaacaggaataactcctccggcggcgacgagtcttccaattcccgctggggttcatctagggtttctgacgagcccaggagaaacggttttggggctagggattccaatcgcgagcttcccccttcgcgcgctgacgaaactgataattgggccgccgcgaagaaaccctccggggggtttgaaaggagggagagggacaaaggagggtttttcgattcgcagtcgcgcgctgatgaatctgacagctgggtttcgaataagagtttcgtgccttctgaagggcggagattcggttccaacggcggcgggttcgagcgagagaggagggttgttgggttcggctccagcggcggcgcggattccgacaattggaacacaaagaagggcgagtccaacgttggtagcgagagtgttggtgggaggccgaagcttgtgttgcaacctcggacagtgtccgtgagcgatgaaggggttgatggcaataatgcggggaagcctaaaggtgttaatccgttcggagaggcgaggccgagggagcaggttttggcggagaaagggcaggattggaagaagattgatgagcagcttgagagcgtcaagattaaggaggcaagtggtggtgatgggtttggaaagaggggttttggctcttccaacggtggtggaggacgtgctactttgcctgaaagtcgcactgagaggagttggaggaagccccaatttgatgatgatcgtcctaaaagtgctgagaaagtggaagatgaacctgatcaaaaaaaggaagtggaagatgaacacgttgaaaaaaattgaagagctattaatttcttttggtccctgcagattgatcgataagagagttggaaacgaacactgaacctctaaaacttattttttgtttcccattgaagttttgtccgtctttatcttttcatgttttattgtgagagattaatactgaaagagttaagagacattttttgtagcagtgttggtagcttagtaagtcgttattatgaatatgtttgttgctaaatgttaccgtaatttcctccccacatcattcataatctatataagtaagcttggtgatgaattttggaattnnnttnnntngaaataaaaa

SEQ ID NO: 1389 - DNA, 1630 bp, Glycine max
attccgggtcgaccacgcgtccgccgagttcactgtactgctcaaagtttgctcaaagttatggcataaatggggagggacaggccagtaattgcatgatccttaacagactctttcagtaaactgtatctggttaggatcatgcaattactgaagaaagggaaaaccatgaagatacagaagaaataaatgcactgctttattctgatgatgaaagccctgaaggcgatgatgatgatagttgtgatgaggtaacaagtacagatcattctccattggcaactaataagacttatgtgatacaagagcaatttgaagacacgaaggaggaggttgctagctctgattggcctaacaaaaggctaaagctatttgatggtgactataatagatcatccacacctgcggacaggtatagtttgctaagaccaaatgaaacctgtgattgtgtaagcgatgctgaatcaaagaattcttgtggctgggcatattctgttgataaaactaaagtagataattcagtggcttgcgatatcaaatttaaaaaggataagatcagtgaatcattgaaagttcttgaaaatttaattcctggtgcaaaaggaaaggggccactgttagtcattgatggaactattgagtacttgaaaattttgatgtcccaaactggtgctcttggggtgaaatatcactaagtagtactcacagtcacagccactgatgttacagtatattggttgaaggacaattcatggtgaaaagatgtagctctttgaattcttagctttgttggttgatatgtttatctagcatgtttgcttcttgtcttctttaaatcctctttcttgaggtgtacatatatggctgggaaataaagtttgtactaatgctgaaatagatagcattgcactttggcacttcggttggagaaaaatgcaggatatggggtttcaatttgttgaccaacatgattatactgtagctttttttggagattaaaggtcacagattgaaactttgaagtgatggagatggtagtgggggggctttgctgtaaatgaggacacttttttttctctctctcaagtgttgcactctctcttggtgattgaacgcacgcgcattaggcaactggggtcccactttccaccctccttttttcattctttcaaggttgcacgcatatcatgctggcatctactctaaaagtaacaagaaagtttcctgatgtttggcagagtgatcctagtgtttcatcatgagtttctgggaccccctttgtttggatatgtagcattttgtggtaaaggttactttgttttacatgttgaggggaagagcggaatgatgacaagaaatactagtttctgctttgtaattcataatattggtggtctaggtctcttttggatgattctattatgtagctgtcaagtgtgtgtgattgtatgaataattggagtgtgaatggttatggaagtaatttatgcagtttatagtctattatcatgcttcatgcatgttgatcttgtcagttgttagctgatgtggttttcatgtttgtacatatcatatcattttctatcaatctgtgattcctcattacatgttaaaaaaaaaaaaaaaaaaa

SEQ ID NO: 1390 - DNA, 1700 bp, Glycine max
  misc_feature (5)..(5): n is a, c, g, or t
  misc_feature (184)..(184): n is a, c, g, or t
  misc_feature (1699)..(1699): n is a, c, g, or t
cgggncggggccaacacatttcattattcacacttcttcctccgatccaataaatggcggaaccgtcgtccaccgccgccaccgctgccaccgccgccaccgcttccaccgctgatcctccggcgccagtgactaggagctgggccgacgaagcagacgaagaaaccaacaacacctccaccgncgagtcagaaagctcctccattaacctggaagcgttctcctgcgtccgcggacgcgtgggctcttccagaattcttggatgatcccgatgattccaatatccaagcggttacttctggcgacacgccgtacacctcggcggcgaggttcgaggacctgagcctctcgccggagcttttgaaggggctctatgtggagatgaagtttgagaagccgagcaagatccaggcgataagcttgccgatgatcctgagcccgccccaccgggacctgatcgcgcaggcgcacaatggctccggcaagactacatgtttcgtgcttgggatgctcagccgcgtcgacccaaaggtgcaggcgccgcaggcgctctgtgtctgccccacccgggagctggccattcagaacgtggaggtgctccgcaggatggggaagtacaccgggattgcatctgagtgccttgtgcggttggacccggatgccgttcatgtatcgaaaagggcacctattatggcgcaggtggtgattgggaccccagggacaatcaagaagttcattagcttcaagaaacttgggacctcgaggttgaagattcttgttttcgacgaggctgatcaaatgcttgcgcaggaaggatttacagatgattctttgaagataatgaaagatatagaaaaagacaataaaaagggtcaggttcttctgttttctgctacatttaatgacaccgtcaagaatttcatttcaaggacagtcaagatggatcataataaactctttgtaaagaaagaagaactatctttagatgcagtgaagcagtataaagtgtattgtcccgatgaacttgctaagattgatgtgataaaagattacatatttgaaataggagagaatgtggggcaaactattatatttatggccacaagagatagtgcaagattattgcaccaagcacttgttaatttgggctatgaggttacatctatacaaggttctcttagtaatgaagagagagacaaagttgtcaaggagttcaaagatggtttgactcaagttcttatatcaacagatattcttgctcgtggctttgatcagcaacaggttaatttggtcatcaattataatcttccaaataaacacagtttacgggatgaaccagattatgaagtgtatctgcacagggttggcagagctgggcgttttgggcgcaagggggctgtatttaacctgatatgtgatgaaaatgatgaaaggctcatgtcgaagattgagaaccattttggcacttgtgtaactgaggtgcgagctcaaagtgttgaagaatataaagccgctctcaaggaagccggtttactgcaatgatgccgtcctctttttactttttgttcgtagtagggattctttccttttctttttccccccttttcacaaattctttgcggcggattgaaaactgaaacaattaattgaaagtatgactttacaaatgtgaagttgcggtttttgaagagaacatccna

SEQ ID NO: 1391 - DNA, 2016 bp, Glycine max
  misc_feature (5)..(5): n is a, c, g, or t
aatanttcagttttcaatccgccacaaagaatttgtgaaaagggggaaaaaaaaagagtccctgctatgaacaaaaagttatgatcttggagaaaagaagaaaaaaaaaaaaaacagatgtgtgcctcgcttctattcagctacgtaggccacccccgccgaaaaacgcgtgttcgcagcaacaaagaatcacatcgcaacgaatcagaggcccctttcaacgaatcacatggcagaaccgtcgtccaccgccgccaccatcgctaccgctgatcctccggttccagcgaccaaaagctgggccgacgaagcggacgaagaaaccaacgcctccaccgccgaggcagaaacctcctccgttaacctggaagcgttaaccatcgacgacaaagaaaagaactcttcaaaactcttggacgaccccgacgattctaatattcaagcggttacttctggcgatacgccgtacacgtcggcagcgaggttcgaggacctaagcctctcgccagagcttttgaaggggctctatgtggagatgaagtttgagaagccgagcaagatccaggctatcagtttgccgatgatccttagcccgcccaatcgggacctgattgcgcaggcacacaatggctctggcaagacgacttgcttcgtgcttgggatgcttagccgtgtcgatccaaaggtgcaggctccacaggcgctctgcatctgccccacccgggagctggccattcagaacatcgaggtgctccgcaggatggggaagtacacggggattgcatccgagtgccttgtgccattggaccgggatgcggttcatgtatcgaaaagggcacctattatggcacaggtggtgattgggaccccagggacagtcaagaagtttattagcttcaagaaacttgggaccacgaggttgaggattcttgttttcgatgaggctgatcaaatgcttgctgaggatggatttagagatgattccctgaggataatgaaagatatagaaaaagagaattctaagtgtcaggttcttttgttttctgctacatttaatgacaccgtcaagaatttcgtttcaaggacagtcaggatggatcataataaactctttgtaaagaaagaagaactatctttagatgcagtgaagcaatataaagtgtattgtcctgatgaacttgctaagattgatgtggtaaaagattacatatttgaaataggagagaatgtggggcaaacaattatatttgtgcgctcaaaaattactgcaagattaacacatgaagcacttgttaagttgggctatgaggttacatctatacaaggttctcttagtaatgaagagagagacaaagttgtcaaggagttcaaagatggtttgacccaagttcttatatcaacagatattcttgctcgtggctttgatcagcaacaggttaatttggtcatcaattatgatcttcccaagaaatacggtgtacgtgatgagccagattatgaagtgtatttgcacagggttggcagagctgggcgttttgggcgcaagggggctgtatttaacctgatatgtggtgaattggatgaaaggctcatgtcgaagatcgagaaccattttggcactcgtgtaactgaggtgcgagcacaaagtgttgaagaatataaagctgctctcaaggaagccggtttactgcaatgatgtgaatctgcacaagttaaaggatgatggatttagagatgattccccgaggataatgaaagatatagaaaaagctaggtgtcaggtttgttggattctctctcgcatagtgatgcttgcatgcatcatgatgtctccatctgcccaagaaatccttataaagacttggtcttcacactgacatgacattatttttcggtaattatttttcgtaaagtgtccgtttgttttagattttggcagaattggtcttgatttgttgaatatgatcgagatgtgtgtccaaattaagctcagccatagattttacattgtgtgcc

SEQ ID NO: 1392 - DNA, 972 bp, Glycine max
ttgatgcgtgggcactcttttttctttttctttgacaattgagaattgttcctctcttctcttccattcgtgtacgcgcaaaagaatcatgacgagttcctctgctgccgctcgcaagaatctgagtaagattgcctgcaataggctccagaaagagctcgtggagtggcaggtcaatccccccactggtttcaagcacaaagtcacagacaatctccagaggtgggtggttgaagtcactggagctcctgggacactttacgctaatgagacctaccagcttcaggttgattttcctgagaattacccaatggaggctcctcaggtgatattcttgcatccggctccgctgcatccccatatctacagtaacggccacatttgtttagatatattgtatgattcatggtctccggcgatgacagttagttctatctgcatcagtattctctcaatgctttcaagctcaaccacaaagcaacgccctgaagataatgaccgctatgtaaagaactgcagaaatggcagatcacccaaggagacaaggtggtggttccatgatgacaaagtataataattataaaccagtttctctaataagtccacaaaagtagagtagaggattatccttttgaaaacaaaatgaagaaatgggaaaatgcattttgagaaaccaggatccctttaaattcaatggataataactctgctgtaaattggcattgcctggtatttgtaaaggaaggggaaactatgtgtcttaagcaacttaaggagcaaacaaactcaaaacattgtggttaatctcacaggtatttggatgtggatatagatggtctgattaacccccttattgacaacttgtgtttcatacttcttttaagaattgcccattatatctcagaattgactatatgcattgccgataaatactcccccattatatctcagaatttgattatatgcattgcc

SEQ ID NO: 1393 - DNA, 1876 bp, Glycine max
ggcggccgcccttttttttttttttttttaaatttataacattaactttaatttccatttaactgtaaagtaccgtgtgaagtattcatgccataatgtttttcttcttttgagggtcaagtcattatctatcctaattctgatgccggacgtcacattccacaaatatatattcacgccactgccattcatcatttcaattttcatccagtctatggcatggaatggaaacgggtctctatcgtcattaccagagactccatcagcaataatggtgcatcattatatgattatattgatgatgataaacattgtgtcttgcactctaatcttaacaaagctttatcctgttcttggagttggatccaaccaatcccgttatgcgttatcgtgtcccgtgttggcccccccacttgccagttgccaccaaagatatattccctgcaaaacaaacactagaaacaattattaatagcataaaaacaacaaataattaaatcaaactaaaaagaattaatacgtgttgtaaacgtatctcaccaagtaaacaaatacacacgaaaatatatcagtgaaaaatacggaatatatcagtgaaaaatacggagaaatacacacgattacgaaaaaacgcacaacaaataaatacaaggcaaagttgacgaacggataccacggaaaagtttatgacaaacgccacgtcacgacgagaagataaaaacttaaaaaagaaaaacgaaaactatagaagaaataaaaaagagacgtgacattgaaattgaactgaaaaaattgaacgaagtggaacatttgtaatgaaccaaaattttgactgaatatagttttgaattttaattgaggattagttatttgtttttaaattttaatcaaaatcgttttccataaaattaggtccagaagctccaagaatggccatcaatggctgcaactgaatatataagttctgtattatatacacacagacacacgcaaacacagagacgaagcacataatcagttttcgcttggatttggaaaccgtccgcgcatccattagatctcaaaccagttcggttggatccgtcgccgccgttttcgtcgccgtccgcggtggccggaaacggtagaggtaggggaagtagttcaattcaaatgacctctctctgccatggacataacggagagcctgctaggcctcgggtaaaagtctcctcgccttctctgctggtgcgaggaaggtcgaatcaacgcggcgagagctcgcttcacgagatctccttcgacgccgcgaattctcacgagcgagttcgtcatcgcggatctgcgcgcgttgaggcggtgcggcgagtacggcgccggagcgtggctcttcttgtggaggctgcaacggaaggagccagggtgcgtcgtaggcgagcacatgcaggtccgcttctgctggtggtgcgggctactgctttgccttgaagcgccggttcgcggcgccaccgagatggagcggttcggagagaccgaacggtcgagggagaaccggacggagggagcggtggaaccgtagaggttgacacgtgttggagagcaagagcggtgaaagaaggaggaggagcgagaggtgaagctggaggtggaagaagcgaaagctgaggaagaagaagatgatgatgtagagtgagagttgcagaacctaggggttgaagaaagggatccaattactgcgcttcttggttttctagaagctgccgccattttttccatggaagagagaagagagggaaacaaaaagagaagggattttttttttcttctttttttccctaaaggccgggttcggctctttggtttggcccccttctgtcgtcttctcgcagccgtagga

SEQ ID NO: 1394 - DNA, 1164 bp, Glycine max
tacagggacaacataatagtgaaaaattcggaaaaaacacacaccaaatacaaggcaaagttgacgaacggatacgacggaaaagtttatgacaaacgtcacgtcacgacgcgacgaggaggaaaaaacttcaaaaagagaaaacgaaaaatatagaactgaaaaaaattgaacgaaaattttgaggattagttgattctttttaaattttaatcaaaatcgttttccataaaattaggtccagaagctccaagaatggccatcattggctgcaactgaataatataagttctgtattatatacacacagacacacgcaaacacagagacgaaacacacaatcagttttcgcttggatttcgaaaccgtccgcgcatccgttagatctcaaatcaaaggtcctctgccttggacataacggagagcctgctaggcctcgggtgaaagtcccctcgccttctctgctggtgcgaggaaggtcgaatcaacgcggcgagagctcgcttcacgagatctccctcgacgccgcgaattctcacgagcgagttcgtcatcgcggatctgcgcgcgttgaggcggtgcggcgagtacggcgccggcgccggcgcgtggctcttcttgtggaggctgcagcggaacgagccaggatgcgtcgtaggcgagcacatgcaggtccgcttctgctggtggtggtgcggaccaccgctctgcctcgacacgccggttcgaggcgccacagagatggaccggttcggagagacggagcggtcgagggagaagcggacggagggagcggaggaaccgcagaggttgacacgtgtcggagaggaagagcggtgaaagaaggtggaggagcgagaagtgaagctggaggtggaagaggcgaaagctgaggaataagatgaagatgatggagagtaagagtgaaagtgagagttgcagaacctaggggtggaggaaagggatccaattactgcacttcttgattttcttgaagctgccgccattttttctctttggagaaaaatctctatggaagagagaaggaggggaaagaagggttttttttttttctttctttcttttttccctaaaggccgggttcggctctttggtttggctcacgcgtccgcggacgcggggtcgacgcgggaattccggacc

SEQ ID NO: 1395 - DNA, 2442 bp, Glycine max
ctgggaagattgaatgaagagtttgtggaggtttggaactaacagggccgacataacacagttctcctttctctgaatttttcgttagagaatggggaagagtagcggaagagaccgaagacgaagaagatcacatgactctgaatccgactcaccttccgattccgactccgacagacgccaccgtagcaatagtcgccggtcacggcgggactccgatggcgacaggaagatgaagtcctcgaagtctgaatccgagtcgccttccgattccgactccgacatacgccaccgtagtagcagccgccggtcgtggcgggactccgacggcgataggaagaagtcctcgaggagcatcacagaagaggaaattacaaagtacatggccagaaaggcccaatcgaaggcaatgaaagtagcgaaaaagttgaaaaccagtacggtatcgggctattccaacgattcgaatccgtttggtgactctaatctcaacgagaagtttgtctggcgcaagaagattgagcgcgatgtttcacaaggtgtgtctattgatgcgttttcaatgaaggcagagaaaaagaaacagagagaaaggatggcagaaattgaaaaagtaaaaaagagaagagaggaaagggcacttgagaaagcaaggcacgaggaagaaatggcactgttagccagagagcgtgctcgagctgagtttcaggactgggaaaaaaaagaagaggagtttcattttgatcaaagcaaagttaggtcagaaattagattgcgtgaagggcgtgccagacccatcgatgtcctaaccaagcatctcaatggctctgatgatttggatatagaaataaatgaaccatacatggtcttcaagggtttgactgtgaacgaaatgagtgagctacgtgacgacatcaaaatgcatctagaccttgaccgcccaacaccaactcatgtagaatattgggaggcactccttctggtttgtgattgggagctagctgaagctcaaagaaaggatgcacttgatcgagctagggtgcgtggagaagaacctcctgctgagctgcttgcagaagaaaggggtctgcattccagtgttgagccagatgtgaagaggcttttgcaggggaagacacttgcagagttggaggctttacgggttcacattgaatcagaaatgcgtactggtacagcaaaggtggttgagtactgggaggccattttaaaacatctccacatttataaggccaaggcttgtttaaaggaaattcatgctaaattgctacgtaagcatttgcaatctcttgagagaccattggaggatgaagataaattagagaatgctcatgttatggtacctgaggaggaagatactgaggatgatattaaagtccaatctgcagatgaatcattctcactagagcccattagagaggatcaagaagctgatgatgaggctggatcattttcaccacaactgttgcacggtgatgaaaatgcggaagctattgacccagaagaagatagagccatgctggagcggaatcgtaaggctgtattagaagagcagcaaagacgagttcaggaagcaatggcatcaaagccagctccttctgaagataattttgagatgaaggccttaaaagctatgggggatatggaagatggagattctgtgtttggatctggtgctgaagttaacctggattcccaggtttattggtggcatgacaaatacagacctaggaagccgaagtatttcaaccgtgttcacactggatatgagtggaacaaatataatcagactcactatgatcatgacaacccacctccaaagattgtccaagggtacaaatttaatattttctaccctgatcttgtagacaagacaaaagccccaacctacaccattgagaaggatggcagcaatggggagacttgcattataagattccatgcagggccaccatatgaagacatagctttccgcattgttaacaaagaatgggagtattctcataagaaaggttttaagtgtgcatttgaacgtggaattctgcatgtgtacttcaatttcaaacgccaccgctaccgaagataatttcacacaaggcaatggttcactttctgtaaaatttcccctaatagaaaggctatggactgcaatttttagaataaattttatttgatggtgttgacactagagatagatggccaggaattttttacagcttagattgagaccaagaagaaattctaaggtactatcagagtgatactcccaccggttaaagtttgatctaaatcttgtcatatgatattttaaatttagttttaaggagatagtatggttatgctgttctcatctactgattatgtttttgatggattgagtatagtactcctgtgcataagaatatggatacccagggtgattcc

SEQ ID NO: 1396 - DNA, 890 bp, Glycine max
ctcctgcctcctataaaagccatttggctctcttccgtttgaagaaaaaagccacccaaccaaaagcccatcaactacattgctatattctgctactcctgagttcaacacacacacatatacatccatggcatcatctcaagcagacctcagaaagattgctgtagaaagcttcgatttgatagacaagctctacggtcgaaggggccccgccagcaatgatgcattccccagccaacgacaatgcttttgggtggttcatcaagtgcctaatggtgacatggatcaaaagcctggtctgaaaaacaaacatgttgttaactatggaatacctgttgcaaaccagtaccctaggggaaaagctcagaatcgctggggtaggcccatcaaattttaaacacttatggtagcttaaatattgttattataaagttatcttccagtgagtctctcaggtcatataggtaggttatttactgagtctagcaatgatggaatcaagactctaagtcaatgagaataaattataaaaaataaaattaatgagttcaattatataaatataaatgaaataaaatataagattttatttataacttttaattttaaaaaaaaaattattggtaaattttaaaaaatgagaaaatgtaagtgcacatcctcaccatagtgtaggtccgccattgcagtctagtatggtatgtatgtaatgtaattttagagctcgatgacctgcaatagtttatgtataaggtaaggtcttctgcagctaaggagggatatgtagttttataagtaccctccctctgtagtttttgtgtggtgaattaattcttataagtggatgcatgtaaaataactattatcactaaaaaaaaaaaaaaaaaaaa

SEQ ID NO: 1397 - DNA, 1593 bp, Glycine max
acagcacaatccaaacccaaaaatcatatcttccactccacaacctcaaacttctctctctctctcttcctattctaaaaatcccacaaacccctttctctattccatctaaagattcattctttctgcaatttcgatacacgggtcttcattaattcactaagattctgcgtaaataatcgttttcactgaattttctgttccgatggagctaatttcaggattaccggaggacgtagcccgagactgtttaattcgggtttcgtatcagcagttcccaacggtggcgtcggtgtgcaaactctggaaatcggagattcacgcgccggagttccgccgtcaacggcgtagcacaaagcacgcccagaagctcatagcgatggttcaagcacgcgtcgaactgggaaccggttcgaccaagcgactgacgaacccggtttaccggctcagcgtgttcgaaccggaaacgggtaactggagtgagattccacctccgccagaattttattcggggttacccatgttctgtcagttagtgagtgtcgggtacgatctggttgtgttgggtgggttggacccgaattcgtgggaagcatcgaattcggtgtttgtttataatttcttgtcggcgaagtggcgccgcggggcggacatgccgggtgggcctcgcacattcttcgcgtgcgcgtcggattccgaggagacagtttttgttgccggcggacacgacaacgagaagaacgcgctgcggtcagcgttggcctatgatgttacctcggacctgtgggtcatgcttccggacatggaggcggagcgcgacgagtgcaagggcgttttctgccgcgggaggttcgtcgctgttgggggttacccgacggagacgcagggaaggttcgtgaagagtgcggaggcgttcgatcccgccacgcggagttggagcgaagtgaaggaggacttcttggattgcgccacgtgtccgaggaccttcgtggacggtggcgatgacgagggggtgttcttgtgcagcggcggggacctgatggccctccgtggggacacgtggcagatgatggcgaccctgccgggggagatacgcaacgtggcgtacgttggggcgtttgatgggacgctggtgttgattggatcgagcggctacggtgaagtccacgtgtcttttgcgttcgatgtgaagagttgctgttggaggaaactggagagcccagaagggttcaggggccatgtccaaaccggttgtgttttggagatttaagaaattggctttttgatttttccatataaacatgatacagttacataagcatagagtatatagtctttgttttgtaaattagcccttttcttacacattagagtttaattgatgaaaatatcctgagtgaaaaatatttttgcctcattctgtataatagtataaggtgaagattggataatttttcttcccttaatattttggtatgtttttgaaattcatttctactagattctccctttcctgtatagcaaacgtgaaaagataggattgagtctgtttttttcttacataattgatgtggtgttattcatttttgttat

SEQ ID NO: 1398 - DNA, 953 bp, Glycine max
cttgcactccacaaacttattggagcagacaagaacttaagtctgtagccatggcaatagtaatcaaagtggcggctctctctggttcccttagaaaagcttcataccactcaggccttatccgagctgcaattgaactgagcaaaggggaaattgaaggaattgaaattgagttcattgaaatttcggagcttcccatgttgaacactgatcttgagatcaatgggacctacccaccaatagttgaagcttttcgtcaaaagattcttcaagctgatagtattctctttgcttctcctgaatataattactctgtcacagctctactaaagaatgcaattgattgggcctctaggcccccaaatgtttgggctggcaaagctgcttcaattgtaagtgccggtggggactttggtgggggaaggtcacactatcatcttcgccaaattggagtgtacattgatcttcgtttcatcaataaaccagaattcttccttcttgcattcaaaccaccaccaaaattcaatgatgatggtgacttaattgatgaagaggccaaggataagttgaagcaagttcttctgtccttgcgtgcatttactctaagacttcaaggcaaaaactaagcttgaagttactttaattccacgaattattgttgaaataagctgaggatttagaaataaaccaatgttattctgaacgtgaatgatgccactatgtataaggatggtttttaaaggtcgaaaatgtgttagttctctaaaaaaattggtacatttggagtaatgtttgcatttgttgtcctctactctaattcggttttctcactcgtatcatatagttagttctctagtacgcaatactctgacatttttggtatataagggcacgtggtatcgtactatgtaataatgttatgtgtgtttctttatgtaagaaatacttatagt

SEQ ID NO: 1399 - DNA, 825 bp, Glycine max
gggctccaagtggttggtattgagatatgcggtactcaacttggaggttattcaagcagcaattcatttagccaaacaggaaggccttcttgtttccttggatttggccagttttgagatggtgaggaactttaaactaccgcttctcaagctactggaatctgggaacatagacctctgctttgccaatgaggatgaagcagctgaacttttaagggatgaacagaaagatgatcctatagctgctgtagaatttctttccaaatactgccaatgggctgttgtaacattgggtgctaatgggtgcattgccaaacatggaaaggagatgatacaagtcccggccattggggaaacaaaggcaaccgatgctacaggagcaggggacctttttgcaagtggatttttgtatggagtggtcaagggtttgtcactagaagaatgctgcaaagtaggcacatgcagtggtggatctgttatccggtctcttggtggtgaggtaacgtcggagaattggcaatggatgtacaagcagatgcagataaacggtctgcccacgccttccggtttatgcaaatgaatagtagcaaccgttgcccccttaatttgtgctgtcttatattttactgatttttaatgttgtttttcttattctattgacttctattattcatttcacacaatagtatggaagctagatatttttcagggaaattcaagcgggtttgagtctttaatgtacttgtgcttgggataagtatgaactgtctcctaatttaatgttaacacctaagtcatggttacttaaaaaaaaaaaaaaaaaaa

SEQ ID NO: 1400 - DNA, 972 bp, Glycine max
  misc_feature (66)..(66): n is a, c, g, or t
  misc_feature (857)..(857): n is a, c, g, or t
  misc_feature (878)..(951): n is a, c, g, or t
  misc_feature (953)..(969): n is a, c, g, or t
ctagcagacagtttgttggagtggctgagatgcttgaccggggactttaaaaacgacatgaacttntttggaaacttgataagtacaacggtttcttcccaattaagtggcacataataaaagatgttcccaacaatcagtttgtgcatatcatccttccaagcaatgagaacaagcctgtaacttacactagggacacacaagagattggattgaaggagggcctggagatgctgaatatttttagaagttatacagctaagacatctctattggatgattttgacttctatgagaggcgagaaaagttatttcgttcccagaggagtactaagcacaagcatgcaaggccggaacaggaagtatatggcaatgacaattatcaaaacactgtcaaagccagagagaagaaaatggagatgcaatcgagtggtaccaagcaaggtactctcatcaaacataccaaaaacctttctctcaacaactctggatttagatagcaagattgggagaggagaaaaagagagcccgatatttatttctacacgtatgtaggcatttaagagttgcagacgcaattgcagtttggtttgtttagagcttctgaagcacacgcacgcttcctttttgatttgtgtgatatgccgataagatgaccacgacaacacattttaagtttgaccaattatttttatattactcaatgagttgatgtttgccattggcaaatgaggaggtatttgatagtatggttcgatgtctccaatatttccgtataactcattggctttggtctgtatttactattttgtttcacgtggatgagcgcccagttccatagttgtgttttgtttggntgaaaaaaaaaaaaaaaaaannnnnnnnnnnnnnnnnnnnnnnnnnnnnnnnnnnnnnnnnnnnnnnnnnnnnnnnnnnnnnnnnnnnnnnnnngnnnnnnnnnnnnnnnnnttt

SEQ ID NO: 1401 - DNA, 853 bp, Glycine max
gaacaaaaccagcaatcttccctcccgtcctctgctcatcactccaaccttgctttccatagataacatcttcggcatcagacaatagacaaaaacatgcattccttaacatgcacaccactttcttcttcttattcttctcatcacaccactctaaagccaaacctcaaccctctgctgggtgctgatgcaacttttaggccatgttctctacccttgaaaagaagaacatgctttactaccagagccattctctcatccaccagagaagatgtcttgaagcatttcagcgagcgaagagctctcaagattatctcaggcctgcagaatttcaataaagacaatgttgcctcggttgtcactgctgctgacaagggtggagcaactcacgtggatatagcatgtgaccctgagttggtaaagctggccattggcttaacttcttgtccggtttgtgtttcttctgtagatcctgcaacatttccagctgcagttgaagcaggagcactaatggttgagattggaaactatgattcattctacgagaagggaatatttttcactccagagaagattctaggtctaacaaaggagacaaggaggatacttccatctgtagtcttgtctgttactgttccacacacactaagcctccctgatcaggtcaagcttgcagagtcactggagcaagtaggtgtagatattattcaaactgagggaggaaaatgttctaatcctacacaatctggtgttatgggttttgattgagaaaggcacaccaactttagcagcagcatattctatatcacatgctggtgagatccccgtcatgtgctcatcaggggtaagcgct

SEQ ID NO: 1402 - DNA, 1556 bp, Glycine max
tacggctgcgagaagacgactttttttgactctgttatcaagtgatggcgatgatggcggcgacgacactcacactgacaccaccgagatggtcgtggcgtccaactcgtcgttccttttgccggcaaatgcatccagggctgagaggtttgggaatgtacagaaatggtgggagcaatgaattgaatgtttctgcctgggatgataagccctttgaaatgcttccgagcggtaacaaggcttacttggatgagcaggatgtggtgacgtttcttgatcctcctaaggacttaatccctttcgacccatcttcctataatcccgctgcatacctatggaaaaaaattgaagatattcctcaggaaaggcgacatcgacttctccgattgttgaaacctagacttgtatcaattgcttggcagattgctggtacacgattcgatgatcccaagttagtaaagaaaagtgcatctaccttgctgtctagctccaccaacgatggtatcatgcttgaatgttataactgcacatcaagtggaggaccaatgtcaatttcctggatcaattcctttagaaaggctatatttactggcaaggatgggcaagcatatggacgaatcattagtggatcagttttgactgcatttgctgactcctttgctcccttgtactttacggtgagagaacttaaggaagtgatgtcaactgagcagccatgtgatttagcatatgaatttggggatggactacatgatatcaaagagctcccattaggctttccaagaccagttaaacatccttatcctttcaacgatcaaattgttgtgtatgttcgctatctaggacctggggtttcagtagggcaagcatggcaagaggggacaaagttggagcaagtcccacgtaagttatgtggggagattttaatggtgaaggattacacatcattacaagaagatcaatgaagaaagtggtcaggattgtcggtggaaagtgagtgcatttcagtcataatgggatacttggagttagagggagagggacactgcttttggcaatacgggccaagcgcggtgtcagctttaaagaagggtcccaagattgcacgattatggcagcattagcagtaacgtccaaggatcgtttggtatggcactatggctgactgttccactgaatcctcagtcacaaaaagacaagtttcttaaaacatattcctactagatttaagctttttccataaccaattctctatcaaccttgctttggtattattatatgccagtgaagaattgtaggtccaatatttagcactgcataaaggaaaaaacatgcaatttttactctttattttcgtacgatgaagaaatgttgaggaatgttttttcagggttgtatttgtgttagacattaaatatagtgtaatactgtgactatgaaggtccctgtttttcccatccttctaagttttgtatgctatcctctttttttcctatgaatttcagaaggtttatgtttgcactttgcacagttagcttgaaggaaaaaaaaaaaaa

SEQ ID NO: 1403 - DNA, 1158 bp, Glycine max
aaatgcgaatcctattccggtcccgtctcccgcgccctcccccccctcccactcactctctcatccactctccaccaccatgccaccagccgcaggagccgtagccttacactcctccctctgcaacatctcttccgacaaaccctcttctccactaagatcaccctccatccacgtgtccccaaagcccaaaagcctcctccaaaaccaccccttatacaccccaacccacacaaaactctcccttgaattcaaagagaaaatcctctgcctcgaggtaatgggtgttgatgcaggcaaagcactgtcccaaaaccctgacctacgcacagccaccatggaatccatccactccatcatctccttcctcctctccaaaggcctccaagaaaaggacttgcccagaatctttggcatgtgccccaagattctaacttctgacatcaaaactgatctcaacccagtttttgatttcatcttgagtgaactcaaagtccctgaaaacagcttcaggagggttgttaacaagtgcccaagattgctcacatcaagtgtcaaagaccagcttaggccttgtttggtttacttgaggagactagggttcaaggatttgggggcattggcttatcaagattctgttttgcttgtgtccaatgtggaaaataccctcattcctaaactcaagtttttggagactttagggctttccaaggatgaggttaggagcatggtgttgaggtgtccagcactgctcactttcagcatagagaataactttcagccaaagtatgagttttttgctggagagatggggagaaaattggaggagctaaaggagtttcctcagtattttgcttttagtttggagaacaggataaagcctagacacatggaggttgtgcaaagtgggattgctttagctttgccagtgatgcttaagagcactgatgaggagtttagggagctggtaaagcaggggggtggttgattgcctatagtggggagcattctattatgtcaatgcatatagtttcccaatgaagttgaaatatttgataaaagtgtttatatcgcttttgtattttttacttccttgagtacagagttcttatgcgaaattactgataaaaaaaaaaagttgtttctcgaccaatcaaa

SEQ ID NO: 1404 - DNA, 1136 bp, Glycine max
ctggtgaagtaaatctctcttttttcggtataaccatgagcagcttcttgttaacattcccttacttccctaacgacgcttcgtggcaggtaaaactttgtccttctccacaaattcgccttgtctgcgtcaaaaccaatctcaaaacactcaccaaggcttcttctcagaattgcgtcgaaagcatgagttctctcaccagtcttgctccactcgaagcagtgctctttgatgttgatggaactctctgtgattctgatccactccactattatgctttgcgtgaaatgctccaagagcttggttttaatggaggtgctcctataacagaggaattctttgtcgagacattttctggcaagcacagtgatgatactgccttggttgtctttcctggtgatctggaacgaggtttaaagtttgtagaagataaggaagccatgttccggagattggcttcagagcaactgaatcccttgaaaggccttgataaagtgaggaaatgggttgaaaaccatggtctgaagagagctgcagtcaccaatgctccaaggaaaaatgcagaactcattatctcaaaacttggtctaacagatttctttgatgctgttattattggtgatgaatgtgaacatgccaaacctcatccagaaccctacttgaaagcacttgaagttctgaaggcatcaaaggatcatgcatttgtatttgaggattctgcttcagggataaaagctggagtggcagctgggatgcctgttataggtttagctacaagaaacccggagaatttactgatggaagcaaagcctgcctttctgattaaggattatgaggattcaaaattgtgggcagctttggaagaacttgacaaggctggtgcacgttaagtttgaattaatgatgtgactgacggaatttcttgatataaacatgtaacaaggagttccatattaaatcccctacttccctaaataattttgttcaaagtgggcaatattattacactagtccacaatcaatctcgctttggaacagaaggcaaacggttctattctatttgtatttagtaataatgtaacgttggccatgaaaaacaaaaaaaaaaaaaaaatattgtttatactttattatag

SEQ ID NO: 1405 - DNA, 1157 bp, Glycine max
  misc_feature (1144)..(1145): n is a, c, g, or t
  misc_feature (1147)..(1147): n is a, c, g, or t
  misc_feature (1149)..(1149): n is a, c, g, or t
  misc_feature (1155)..(1155): n is a, c, g, or t
aacatgctcaactgactcttccctttctccgtttcctctgttctttctctctctctctctctgtacacaccacatctttcagtttcactaacaatgacggtttcttctgagaattgcgtctctagccagagttctctcactagacttgctccacttgaagcagtgctctttgatatagatggaactctttgtgattctgatccactccattactatgccttccgcgaaatgcttctagagattggttttaatgaaggtgttcctataacagaggaattttttattgagactgttgctggcaaacacaatgatgatatagcctcggttctctttcctggtgatctggaacgaggtttaaagtttgttgatgataaggaagccatgttccggagattggccgcagagcaagtgaagcctttgaatggccttgataaagtgaggaaatggattgaaaatcatgggctgaagagagctgcagttaccaatgctccaagggcaaatgcagaactcatgatctcaatacttggtctctcagatttctttgatgctgttattattggtggtgaatgtgaacgtgccaagcctcatccagacccctacctgaaaggtcttgaagctctgaaggcatcaaaagatcacacatttgtatttgaggattctgtttcagggatcaaagctggagttgcagctgggatgcctgttattggtatagctactcgtaacccggaaaatttattgatggaagcaaaacctgcctttctgattaaggattatgaggatccaaaattgtgggctgctttggaagaacttgacaaggctggtgcatttagtttgaattactagtgcaactgacataattttctgataaaaacaaatagcgggattcatattaaattcataggttagcctgcataattttgttgtaggtggcccccattataatactagtccataattagtgttgctttgcaacctagagcaaatagttatattctatttgtattttgtaataatgtgattgttatctatgaacccgcatggtcaaggcaaggaaattgcagtgcccaagtgtactattgtttttactttacaaaaaaaaaaaaaaaacaaataatttacggtttatattttttgtagggtcaanncntngagcgngc

SEQ ID NO: 1406 - DNA, 1702 bp, Glycine max
  misc_feature (1685)..(1685): n is a, c, g, or t
caacctttttcttgggatgacatgttaaactccttccagtttattgggaatcagctcttatatctctggaatacatttctgaaattccacagggaaaataaaacaaagatactggaatttctccgtaactcatgggctaatgatcgaagaactgagtggtcaatatggatggtgtactccaaggttgatatgcctcaccagtacgtgagtaatggagttgaggggacatcattgtaccgtagcttgcgtgggagatcgtcaagtacaaggagttctaacgatgatcctgttcaaactgcaacaatgcgagctgaacttcacaggcgtggtatagcacaaatgaggatcaacgaccggtcacttcaggacatgtatatatttggagatcctttgcgtgttcctattattattgtagaatgcttggaaaacatgcaccgttctgccagtgtgaagtcatatttccttcctttggaggacaaagctagacatatcctggaaaatggatctagagccataataaagttgcctgggaatagccccccacaaaatgagcacgttttgagagtagttgtttttgttcacgggtttcagggacatcatttagatttacggcttattaggaaccagtggcttttaatagaccccaaaatacaggttcttatgtcagagacaaacgaagataaaacatctgaagacttcagagaaatgggatcacggcttgctcaggaagttatctctttcctgaaaaagaagatggataaagcttcaagagttggaaccttaaaagatatcaagcttagctttggtggccattcgtttgggaatctcatcatcagagctgcttcggcagaaagcatcatggagccttatctaagatacttgtatacatatgtttctatatctggtccgcacttgggttatatgtatagttcgaactctatattcaattcaggattgtggctcttgaagaagatcaagggcacacaatgcatccatcaactaactttcacagatgatcatgatcttgaaaataccttcatctacaatctttcaaagaagaagacacttgcaaacttcaagaatgtgattctgttatcctctcctcaggacggttatgttccatatcattctgccaaaatagaactgtgtccagcagctacattggacttttctaaacaagggaaagtgttcctggagatgttaaacaattgcttggaccaaatgagaactcactctgagcatcgtatagtcatgcgctgtgacattaacttcgaaacctcctcctacggcaggaggagcttcaacacacttattggacgtgctgctcacattgaattcttggagtgtgacatttttgtcaagttcataatgtggtctttcccagagctctttagttagaattagtaaacaaagggaattatttgcatgaaattagacttacactgttacacaacacagtgacaatactgcattgtgatcaaagcaatcattagatgccaatgtaattatttcttgcactggcatgcacaaccaacagcacgtgtgtacaacatcggttaaaagttaaattttttttacaagttgttagttctgtaggattaggaacttaattaggcaaaatggtgtaaattgacaattggaattcaaagaaatttctgctgaaattcaaagttatgtgttatacnaaaaaaaaaaaaaaaaa

SEQ ID NO: 1407 - DNA, 2024 bp, Glycine max
ccacgcgtccgcgaaatctttaatccacagcatgtgctttacgctacctgtatatatgtaagatggtcaaaattcttcaaatactttttttattgtataggagcagaaccagaagagaaggctcaaccacaaagggatccaatttcatttttcatcttcctcttcttcactctcttttatggctccaagcaagctcaattcctcgggaaatactagtatgccatgttcacaggctgagaatggttttgtcaattccttttctctcttccccgagaaagtggtgcaagagcttcttcaatctccagtccaggggtcggatgaccatcttattgagttctctgaagctttaagaactgttgcgaaggctctcaggctagttgccgaagggaaagcttctgctcaagctgaggctgctgaatggaaacgtaaatatgagttggagagggatcggaatctgaagtttgaacatgcagagaaatcatgtatagagcatcaggctgaacatgaggatgtgaggacaaataaccctgccaaacaacctgttttatgtaatgaagctaatggacagtctgagaaatgttgttcaaggaatggtatttgctcccatgaagttcttagggatggaacacctggttctgattccaagatggtcaaaaaggcttcatttaaactctcatggttcagcaaaggtgatcaaagtgatcagtacaaacacgacattgtctcttttgaaaggggaaatataaccactgcagagcgcagtagtaagcagatctctttgaagtgggagtcatgcccacagacagtgcttatattgaccaaaccaaattcagtttcagttcaaattctgtgtgctgaaatgattacatggttaaggcagcaaaagaatctacacatctatgtggaaccacatgtcagggttgagcttttgacagaatcatcatactttaactttgtagaaacttggaatgatgataaggaacttttgaggctacacactaaagttgacctcgtggtaactcttggtggagatggcactgtcctatgggcagcttcaatgttcaaagggccagtgcctcctattgtccccttttctttagggtctcttggctttatgacccctttctatagcgaacaatacaaagaatgccttgaatcaattttaaagggacccattagtatcacattacggcatcgtttgcaatgtcatgttatacgagatgcagctaaaaatgaatatgaaactgaagaacctatccttgttctaaatgaggttacaattgaccgtggaatatcttctttcctcaccaatttagaatgttactgtgacaattcctttgtcacgtgtgtgcaaggggatggattaatcttatctactacatctggcagtacagcatattctttagcagctggaggatcaatggtccatccgcaggttccaggtattttattcactccaatttgcccacattcgctatcttttaggccattgatatttccagagcatgtgactttgagggtgcaagtgccattcaacagcagaagccctgcatgggcatcatttgatggcaaggacaggaagcagttagcacctggagatgcacttgtgtgcagcatggctccatggcctgttcctacggcttgtttggatgattctactaatgacttcttgcgcagtattcatgagggcctccattggaatttgagaaagacacaatcatttgatggcccccgggaaacatgacttctttcttagtaaactttagttgcaaactggttagtcatttatcaagataatagcgacttgttacagaaaaaatctagtgtaattttattcctttatcaatagtcacatgtagttataattattagagtaaattatactcctctacaccctattcctctctcttattttagaatgtatactctcctcttgagaaagagatgaatatggatcatactttagatcatttcaatataaatgtaccttttaatagtaatgaataattatgaatgtatttctc

SEQ ID NO: 1408 - DNA, 1650 bp, Glycine max
caactccaaaatgagagggaaaaggaatgaaagaggaatcaataaacacccggcccgcggaaatggaataatgtggggaaaagaaagcaatttgaggagttatatcattttacaattagttgttattctcccctcactcatccacaatacaagggtcaccccaatggtattggtgagagtggttcccatggcttcttcttcttcgattcgacccactctctcctcccttagattcttaacaccgtcatctctttcgctctccaacccttcttctcgtatctctttctcccatcttccctctccctctgtgtctcaatccaatagttttggcctcaaagcttccagagagttgagacaacatggcaactccacgagaatcatggcatcagggcacgtgtctcaatcgatttcagctgcttcaccagaaaatgtgcttgagtgggtcaaacaggacaagcgaagaatgcttcatgttgtatatcgtgttggggacttggacaggaccataaagttttatacagagtgcctaggaatgaagctcctcagaaagagggacataccagaggagaaatatactaatgcctttcttggatatgggcccgaagactcacactttgttattgaactgacatacaattatggagttgacaagtatgatatcggaactggatttggccattttggtatagctgttgatgatgttgcaaaagcagtggaactaatcagagctaagggtggcaaaataactagggagcctggtcctgtcaagggagggcgttcagtaattgcatttattgaagatcctgatggttacaaatttgaacttatagaaagaggtcccactcctgaacccttgtgccaagtaatgcttcgagtgggtgatcttaatcgttccatagaattttatgagaaggcatttggtatggagctgcttcgtacacgagacaatccagaatacaagtacaccatagcaatgctgggttatggtccagaagataaaagcactgttctggagttgacttacaattatggagtcactgaatatgataaaggaaatgcttatgctcagattgcagtaggcacagatgatgtgtacaaaactgcagaagcaattaaactagctggaggaaagattactcgggaacctggagcattacctggtatcaacacaaaaattactgcatgcttggatccagatggctggaagtcggtttttgtagataatgttgattttctaaaggagttggagtagagtattttggtaggtcatcatagcaatcttgtgagatcagtatcaaaatctggcaaagaatcggtattctttaagaaaaatgtatgcatcagagtgtatcatattcaaatccgattttgtagataatgtaataatgacaatagcaccgacccctgtaagctgtagcaaatgtcttcaactaaatacaataaagcaaggttgagaaacatatgtcgtttatctccattttctttggccttcgtgattttggcagtaggactaaaaaaaaaaaaaaaaactctggatgtttcagaggcgtatcatggcacattactcttctactttttagagtaaattttggacacgggtctttgccaattgaattagaccagttaaataaaattattcaatttaatctc

SEQ ID NO: 1409 - DNA, 607 bp, Glycine max
attttacaattagcttagcattattctcccctctcactctgttccttcctcatccacaattcaatggtattggtgagactggttcccatggcttcttcttcaatacgacccgctctctcaacaccttcctccttttctctcttcagcccttctcgccgtatctctttctcccatcttccctctccctctgtgtctcaatccaatagttttggcctcaaagcttccagagtgttgagacaatatggtaactccacgagaatcatggcatcaggggacttgtctcattcagttgcggctgcttcaccagaaaatgtgcttgagtgggtcaaacaggacaagagaagaatgcttcatgttgtatatcgtgttggggacctggacaggaccataaagttttatacagagtgcctaggaatgaagctcctcagaaagagggacataccagaggagaaatatactaatgcctttcttggatatgggcccgaagactcacactttgttattgaactgacatacaattatggagttgacaagtatgatattggaactggatttggccattttggtattgctgttgatgatgtcgccaaagccggggggcctatta

SEQ ID NO: 1410 - DNA, 651 bp, Glycine max
  misc_feature (7)..(7): n is a, c, g, or t
  misc_feature (647)..(647): n is a, c, g, or t
ctaatcnaaaaatgacaacagaaatatgtacaacttcaacttctgaaatgtaccccacttgagggcctcgatccgaaacatttctactccaaattgcttagtttccaaatggcagaaatccgagcacaaggatgaaactcgcaacagttacttgaccaagagaggaattgggcttgtcgctgtgtcaccctctgcgcgtgtcgtcgtcggcgccggcgccgatgccttacccaaacgacaagatctactgattcacggcctctgtggccagatctgtggtcttcacggccagatctgcgacccttagatatcagatctgcgacccaacaaccttcgcatcctcgcttcactcacctcatgtggtgaaggtggattcgtgaatttgaggtaacggattgtcggttgtcaaggtagctccagagagtgccatccagttttatgcttatgaaatgctgaaaaatgtaaaatgtaattgaagatagtcaagacagcaagttagatattgagtagccaccccgtgcaaattttctattgattcacggtggacttgtagtacatggtcatcgatcctctcgattgagttgattaatttattgtttggttcagtactggttattagggtttttttaattttttaaaaaaaaaanaaaa

SEQ ID NO: 1411 - DNA, 1420 bp, Glycine max
  misc_feature (9)..(9): n is a, c, g, or t
tcgagtagntacgtaggccccccccccaataattctaaattacatttcttttccaattctcgtcaattctctgttctttctcaattgtccaccaactcctcaaaatcagttagtggaagttcagggctgcagaacagttcctttgtttctggcattgagtacaggaagcgtcctctatattctgtatttcccacaaagcctgctcaagtttcctctgtggaagacctctatgaatttatttgctcgggacctttacttgacaaaataggcatcacacaagagcaggtggccgagtccatcgataattggttgttatatggccggtacctatgcagactgtttcagcttaatgaattgttccttacagagcctcaaaaggctaggatttatcattactatgtacctgtctttctctggtgtgaacagcagattactgagcatcagtccaagttcaaagatggagaagatatacctcctttagtgattggttttagtgctcctcaaggttgtggaaagacaacccttgtctttgctcttgactatcttttcgaagtgattggcaggaagtctgcaacagtatctatagatgatttctatttgatggctgaaggtcagaataaactaagagaagctaatccaggaaatgcccttcttgagttgcgtggaaatgcaggaagtcacgatcttgctttttctgttgaaactctaacagccttaaccaaattgacaagagaaggtatgaaattgaagttgccaagatatgataaatctgcattcaatgggagaggtgatcgtgccgatccttcaacatggtcagaagttgaagggcccctgacggttgtgttgtttgaaggttggatgcttggtttcaagccccttccagttgacgcagtaaaggttgttgatccccagctagaaactgtaaataaaaaccttgaagcttactatgatgcttgggacaaatacataaagtcttggatagtcatcaagattaagaacccaaactgtgtcttccaatggcgcttacaggctgagattgccatgagggaggcaggcaagcctggaatgacagatgatgaggtgagagattttgtttcacgctacctgccggcatactatgcataccttcctacactttactcggagggaccaaatggatcagatcctcaacatctcctaactattgaaatagatgaagggagaaaccccatccttgctacctaggttaattgtatgatagagcactgctgttttttcagttctttgagataatttgaatggctattcagcattaattagtggcatcatcagtggagtggtcaatgaatgtgtgctatttcccttgaaatttatagagaatattttcattaattcacaataacggctaatgctttctggtttcaaaaaaaaaaaaaaaaaa

SEQ ID NO: 1412 - DNA, 1497 bp, Glycine max
  misc_feature (596)..(596): n is a, c, g, or t
  misc_feature (650)..(650): n is a, c, g, or t
  misc_feature (770)..(770): n is a, c, g, or t
  misc_feature (809)..(813): n is a, c, g, or t
atttgaagtggttgggcgagtgtattcggatgaacaagcagagagtgtgtagtgcgtagggtttaagatcgcgttctttagatgaacgagttatctcagaagcagactcttgttgtccatgggattgctggtgctggttcggtggctttagccaccgccttcacttaccctcttgacaccatgaaagtcctcattcaggttggttccagcaccggtaaagaattggaccatgcccatgttttgaccagactactctctgtatccggcaatgcaggtttgttcaatggttttggctggttgttggttggaaggatttttggtctgggagcacgatttggggtttatgaaatcctgtctgccttttataaagatggtcgggaaaataattatttgtttgcttctgaggctcttttggctggcgtggtagctggtgccattgaggcagtcataagctctccattcgaactcatcaagcttcgtatgcaagttagctctgcttcatatgttcctagctccaactttgctttggaaaagggggctcgtacaccttttattgcaagaattacttcatggctgttatccacacaggagggcanttggaccaatatattggtctcatctccaccctaaaagccaaaaatacaaacctngaccagtgcgttgctagagtatccatggacaatgacaggatcttgggagtccaccatcagtttccaatgtcaggagaccatctgacattatatctttggaaggatggagcacattatggnagagggtctccgttctgggaattgtccgagattctgtgnnnnntggcgtatttttttcgacctggcaatttctgcaccaagcaatgctagattggaaggctgcagggatgaatcctccacccaggttaaatgaagaagtcggtccattgtctcctttgactgttagtcttactgctggattctcagcttcagttgctgctgctgcttcccatagttttgatactacaagaagtagatcgcagtgtactgtgctgccaaagtacatctctatggagagaaagattctgaagtggaaacgaccaggaaacaagtttgaaagaattactgggatccatccttctgacaggggtgtcttgttccgtggtattggttggcgaatggctcgctctgggttggcttcattcattattgtaggaagttatttatttgttgctgatcagcttgcttctagtttgacttaattaccacttgataccccctttttggttaatatgtaatgtttactatttttctcctggagaagtcacatttgggatgctgctctgtactagttagtaaagaaaaatagaaaggagacagtagaaagagaggagactgcatttgttctatacatataaaagatccttgatgtggggattcactatgggaatttgatttttaaattctcttatacaagagtttgtaccttccaatgactggtaattaaataagagtatgcattttctgt

SEQ ID NO: 1413 - DNA, 1580 bp, Glycine max
aaccctagttaaaatgaagaagcagagagtatgtagggtttaagatcgcgttccgaaactctggcgaagtttctccattaattcttcttgtgcgtttctcccacactttagatgtgaagatgaaggagttatctcagacccagagtgttgttgtccatgggattgctggtgctggttcagtggctttagccactgccttcacttatcctctcgacagcatcaaagtcctcattcaggttggttccagcaccggtaaagaattggaccctgcccaggctttgacgagactactctctgtgtccggcaatgcaggtttgtttaatggttttggctggttgttggctggaaggatttttggtctgggagcacgatttggggtttacgaaatcctgactgccttttataaagatggtcgggaaaataattatttgtttgcttctgaggctcttttggctggcgtggtagctggtgccgttgaggcagtcataagctctccattcgaactcatcaagcttcgtatgcaagttactgctgcttcatatgttccaagctccaactttgctttggaaaagggggctcgttcacctttaattgcaagattacttcatggccgttatccagacaagagggcattggacctatatgttggtctcatctccatcctaaaaaccaaaaatacaaacgtgaccagtgccttgctagagtatccatggacaatgacaggatctgggaggccaccatcagtttccaatgtcaggagaccatctgacattatatctttggaaggatggaggacattttggagaggactccgtcctggaattgtccgagattctgtgtttagcggcatatttttttcgacctggcaatttctgcaccaagcaatgctagattggaaggctgtagggatggatcctccacccaggttaaatgaagaagtcggtccattgtctcctttgattgttagtcttactgctggattctcagcttcagttgctgctactgcttcacatagttttgatactacaagaagtagatcacaatgtactgtgctgccgaagtacatctccatggagagaaagattctgaagtggaaacgaccaggaaccaagtttgaaagaattactggcatccatccttctgacagaggtgtcttgttccgtggtattggttggcgaatggctcgctctgggctggcatcattcattattgtaggaagttatttatttgttgctgatcagcttggttctagtttgacttaattaccacatattcataccccgattttggttaataagtaattgtaatgtttaatatatttttttctggagaagtcatgtaatttgggatgctgctctgtgctagttagtaaagaaaaatagagcggagacagtacttgatgtacccggattgtagtccagatagaaaaagataatttgttcaatacatataaatgatccttgatgtggggattcacaatgggaatttgattttttaattctcttgtacaagagtttgtaccttccaatgactggtaattaaataagaatatacattttctgccaaaaaaaaaaaaaaaa

SEQ ID NO: 1414 - DNA, 754 bp, Glycine max
  misc_feature (716)..(718): n is a, c, g, or t
tacggctgcggagaagacgacagaagggggagcagagaggaggggcttgaagtttaaaactggcagctagctgtgggcattcatcctcgatttggagaaaagaaaaagaaagaagacatttccttccgaattgaggaagggaaaggtgtcttggatggccaagtcatcttccttagctatcacgttgatctgcgccgccacggtattggtggcgatgagtcggtggccgacagccgtgggcggcggggaccaccacttgggaatgggatgggtttccagcacgtgcaaggggaccattgctgagtgcctgggaggggaggagtacgagttggattcggagatcaaccggcgcatcttagccaccaacaagtacatcagctacgttgcgctgcagaggaacactgctccctgctctcgccgcggcgcctcctactacaattgccgacccggagcacaggccaatccttacagccgtggctgcagcgccattacgaggtgcaggagctgaattttccttttttttaaaattttttttttcggatgtgaattggaatgtgttttgttgttgttgttattgttatataaaatagttattattcacgaacatttgtggtaatggtaatccatttcgggttgctgttgtgagaatacactgcattgcttcttcttaatactagtattgttgtttatttggatttgaattgaatgtttccgtnnnaaaaaaaaaaaaaaaaaaaaaaaaaaaaaaaaaaaa

SEQ ID NO: 1415 - DNA, 2026 bp, Glycine max
cgattaacgagcggcttcttcttcaaaaacacacaaacacactacactttgtctctgttctgtgtgtgcgagaaatggcgatggcaatggcgcttcgcaggctttcatcttcaattgacaagcctctgcgccctctcttcaatgccggttccctctactacaagtcgtctttgcctgatgaagctgtttacgacaaggagcgacccggagttacatggccgaagcagttgaatgctccacttgaggtcgtggatcctgagattgctgatattattgagcttgagaaagctaggcaatggaaggggctagaattgataccgtcagagaatttcacctctgtgtctgtgatgcaagcggttggatcggttatgaccaacaaatacagtgaggggtaccctggtgcaagatattatggtggaaatgagtatattgacatggctgaaacactgtgccaaaagcgtgccctagaagcttttagattggatcccgctaaatggggagtgaacgtgcagcctctgtcagggtctcctgcaaatttccacgtttacactgcattgcttaaacctcatgaaagaatcatggcacttgatcttcctcatggtggccatctttctcacggatatcagactgataccaaaaagatatctgcagtctcgatattttttgagacaatgccatatcgattgaatgaaagtacaggatacatcgactatgaccagatggagaaatctgctacactcttcaggccaaaattaattgttgctggagctagcgcttatgcacgtctctatgattatgaacgtgtacgcaaggtttgcgataaacagaaagctatactattggcagatatggcacacatcagtggattggttgcagctggtgtcatcccatcaccttttgattatgctgatgtagttactaccacaactcacaagtcacttcgaggaccacgtggagctatgatattctacagaaaaggggttaaagaaattaacaaacaaggaaaagaggtattgtatgactacgaagacaaaatcaaccaagctgttttccctggactgcaaggtggccctcacaaccacactattactggtttagctgttgcgttgaagcaggccactactcccgaatatagagcatatcaagagcaagttctcagcaacagctttaaatttgcacaggctctgagtgagagaagctatgagcttgtctctggtggaaccgagaatcacctggttttggtgaatctgaagaataagggtattgatggctccagagttgagaaggtgttggaagcagttcatattgcagctaataaaaacactgttcctggagatgtgtctgccatggttcctggtggcatcaggatgggaacccctgctcttacttctagaggatttgttgaggaggattttgtcaaggtagcagagttttttgatgcagcagtgaagatagctgtgaagattaagggagagagcaaaggaacaaagctgaaggacttcttggccacaattgagtcatcttctacctttcaatcggagatagcaaagctccgccttgatgttgaggagtatgcaaaacaatttccaaccattggttttgataaagcaaccatgaagcacaagaattgagaaaagaaaattttccattaggtcatcccatggtcttactggcaagcaattcaacaagatcagttttcctgatccatggtagaggacgacaacatattttaaaaacaatgtcaaaagcctttatatgtaagaatccagaaaatcttgatcgttatgttgaaatgtatagatgcatatgtaataaaggcttcaaataccaaatttcttaatcagatgattgttgaacctatcccctataatggggttacaatcgatcgtaagtggttgtatctgctataaattcaactagcctcctcaattgcatagaatcctgctggatgctgatgtgaattattttacctcaatgatatttcttaaaatgggcaaaaaatattattagccataaaaaaaaaaaa

SEQ ID NO: 1416 - DNA, 1452 bp, Glycine max
tcagctgcccgggctgacgctgcgataataggcaaaggtggaattgaaggatgggcatggcagcaggcacagcataggcagtgacacaacacaacacagccgcccttggaattaaccatgaaaggcgtgttttcggcgcccggtgattacgtccacttcaagtcccaagtccctcttcacaaaattcctattggcactaagcagtggcggtattacgatttcggtccaaaagccgtgcctccgcttatatgtcttcctggaaccgccggaaccgccgatgtatactataaacagatcatgtcattatctatgaagggttaccgtgtcatatctgttgacatacctcgtgtatggaataatactgagtggattcaagcatttgaaaagttcttggatgctattgatgtacaccatatacatctttatggtacatcacttggtggtttcctagctcaactctttgctcagcatcgtcctagaagagttcgatcgttagttctatcaaacacatttttggagacacgaagtttctctgctgcaatgccatgggcgcccattgttagttggactccttcttttttgctgaagcggtatgtcttaacaggaattcgtgatggtccccatgaaccgtttattgcagattcagtggactttgttgtttctcagactaatgactactgtgcaattcctcaacaacttaaagatcaactgggtgaaaggtatcccgaggcaaggcgtgcatatttgaaaacagggggagattttccttttctttcaagaccagatgaagttaacttgcatcttcagttgcaccttaggcgtgttggtgtggaacctcggccagatttggttcacaacatacctaaaggtgatattggaggaagccctagcaaagaaaataacgaagatgactctgacgagtcacataaggataatggaggagggtcagaaaacccacctgctgaatatgagataaatcctactagcccagaaagctcgggatccggtaatttagacaagcagcctctcgatagttcagagtgttgccatttgtttcctggtggattcccaagggaaaagcacattgtgcctccaggaactcctttacatttcgtgtgggaatatattgttttttttcatcttcttcacatccgttcactgtgcattatatggaactattctttggaatttaggcaatttgtgtaagttggaattcttttggatatactatatgcatcatgagaaccaagtgcgtgaaacaaagttattaagatggaccgtattgtggattggatttctgagttccttttggctggatgaagttgagatagctacgttgtaagtgattatttgcattttttaaggtagggtttgaagtttaaactgctaaaccatcaaaatttatatttcatgtcttaagtatttatatgacccgaagtgttatgtgaaaaa

SEQ ID NO: 1417 - DNA, 1080 bp, Glycine max
aataatgcataggaattgaagcataggcacccttcccttccgtttcgaattaaccatgaaagccgccgcgtcggcgccccgggagggcgttcacttcaagtctcaagtccctcttcacaaaatcccaattggcactaagcagtggcggtattacgatttcggtccgaaagctgtgcctccccttatatgccttcctggaaccgcaggaactgctgatgtatattataaacagatcatgtcattgtctatgaagggttaccgtgtcatatctgttgacatacctcgtgtatggaataatactgagtggattcaagcatttgaaaagttcttggatgctattgatgtacaccatatacatctttatggtacgtcacttggtggtttcctagctcaactctttgctcagcatcgtcctagaagagttcgatcgttagttctatcaaacacatttttggagacacgaagtttctctgctgcaatgccatgggcgcccattgttagttggactccttcttttttgctgaagcggtatgtcttaacaggaattcgtgatggtccccatgaaccgtttattgcagattcagtggactttgttgtttctcaggtagaaaccctctctagagaagacttggcctctaggttgtctctgacaactgatgctgcttcagtgggaccacttcttctttcagtttcatttatcactataatggatactaatgactactgtgcaattcctcaacaacttaaagatcaactgggtgaaaggtatcccgaggcaaggcgtgcatatttgaaaacagggggagattttccttttctttcaagaccagatgaagttaacttgcatcttcagttgcaccttaggcgtgttggtgggaacctcggccagatttggttcacaacatacctaaaggtgatattggaggaagccctagcaaagaaaataacgaagatgactctgacgagtcacataaggataatggagggagggtcagaaaacccacctgcttgatatgagataaatcctactagcccagaagcttcgggatccggtaatttagacaagcagcctctcgatag

SEQ ID NO: 1418 - DNA, 1401 bp, Glycine max
tcagctacgtaggccccccccccgaagataatgttggacccctaatatatttctgttatttacaacaatttgtttttagaatcggattccagcttttacagtgcctcaacctgatgaagcaatgcatgtacttgaagagaaggcttctcaattaaatgtacctcttcaagtgctaactccattagatgccaaattgctaaatggtttgagacttggtcttgaaggcgagcaccaatatttaaatgctggtcttgccattgcactgtgctttacatggctgaaaaggactgggcatgttggagatattaatttggaacaaactgacactttgccagagcagttcataaaagggttaacaagtgcaagtttgcaaggaagggctcagattgttcctgaccaacacatcaagagtgaaaggtcaaatgaacttgttttctttttagatggggctcatagtcctgaaagcatggaagtgtgtgcaaggtggttttctctagccattaaagaatacaacccggaccaaaccttgtttcatcagcaacttaataattctaaattgccacatgaagtagtgaagagcacacaccacggcgaaagaggatcccagagaaattccactccgatattgctgttcaattgtttgactgtacgagatccacagttgcttcttcctcagctgatgaaaacatgtgctgatcatggtgtctacttcaagaaggcgctctttgtaccaagtttatctgtgtttaataaagttggaccccaggcttttacaccggctgattccaaagttgatctgtcatggcagttcaatcttcaaagagtgtgggaaaatctcatgcaaggcagcaaaggtagaagtactgacattgtttctgaagaactaaaagatgatatggaaatgagtgtcagtaattgtgatcatagtgcagtgtttttgtcattgccattggcaatcaaatggctcagggacagagtgcaacaaaatcaatcagttcgttttcaggtccttgtgactggctctttacatcttgttggtgacgtgttgaacttggtcaagaagtgattcgttggacaaatttgaagattccttcgagatagagatttccattctaaagctaaaacagtccataatttgatgagttttctctggcattgacacagtccattgcaggggtagttgtgcactttgttctgaaaatccaacaccattggacattcatttgatacatcctatattcaagaaatgtacatccagtttgacaaaaaaaaaaaaaaaaaaaaaaaaaaaaaaaaaaaaaaaaaaaaaaaaaaaaaaaaaaaaaaaaaaaaaaaaaaaaaaaaaaaaaaaaaaaaaaaaaaaaaaaaaaaaaaaaaaaaaaaaaaaaaaaaaaaaaaaaa

SEQ ID NO: 1419 - DNA, 1139 bp, Glycine max
atcaacaacgaacagaatgaaattgtgaatcgacgacgtattttggtgcgtgcaggtcccggtgttagaattggggtttccgtttcgattgtacctaccggccaacttagggtgcagtcactctcgatctcaccgatcaccaacgtgccttcttctcctcaggttcccttagtcaactttcggttttttgattgttgaggatggtgctggttttagccctgggggatttgcacataccccacagggcacctgatcttcctgcaaagttcaaatccatgcttgtccccggcaagatccagcacattatttgtactggaaatttgtgtattaaagaaattcgtgactacttaaagactctttgtccagacttgcatataactcgtggtgagtatgatgaagagacgaaatatccggagaccaaaacactaaccattggccaatttaagctgggactatgccatggccatcaggttattccatggggagacctagactcgctggcaatgctacagaggcagcttgatgtagacatccttgtcacaggtcacacccatcaatttacagcttacaaacacgaggggggtgtggttataaatccaggttctgcaacaggtgcctacagcagcatcacttatgatgtgaacccaagttttgtccttatggacatcgatggtctgcgagttgtggtttatgtatacgaacttattgatggagaggttaaggttgacaagattgattttaagaaatcatccacaagccactctgctcattaaacactgggattttggtcctactctcttttctctttctcttatttggctgtttagttttctttttcctccttcaaacttttcaagggtgtactgtttttagttttattttgctttgtatgtacacttgtatttggccatataataggattcttaggatttggttaatatgtgatctgcgccaaacgtaacgactgattgatcagcaatggctttgtgtattactactccttttaccagttgcccagagatgatatgcagcaaaaagaaaattttattgtaaaaaaaaaaaaaaaaaagtgggaaattgatcacaaaaattggagagggatacaagtggattattgtatttgtgctttgtcaaagtat

SEQ ID NO: 1420 - DNA, 1145 bp, Glycine max
ttacggctgcgagaagacgtctggggggggggtttgggtttggattgtaccggccaacttagggtggactcactctcgatctcaccgatcaccaaccaacgtggcttcttctcctcaggtaaatggaaaattggtgaagcgggctattttgtataaattggaggaaatgttttaattttgtttctcaagttcagcttcttgctgtacaagtaatagactattattagacttgccagaaatcaccaactgggttgctctttctaaccaggttctctaagtcaactttcagtttttgattgttgaggatggtgctggttttggccctgggggatttgcacataccccacagggctcctgatcttcctgctaagttcaaatccatgcttgtccctggcaagatccagcacataatttgtactggaaatttatgtattaaagaaattcatgactacttaaagactctttgtccagacttgcatataactcgtggtgagtatgatgaagagacaaaatatccggagaccaaaacactaaccattggccaatttaagctgggactatgccatggtcatcaggttattccatggggagacctagactcactggcaatgctacagaggcagctcgatgtagacatccttgtcacaggtcacacccatcaatttacagcttacaaacacgagggaggtgtggttataaatccaggttctgcaacaggtgcctacagcagcatcacttatgatgtgaacccaagctttgtccttatggacatcgatggtctgcgagttgtggtttatgtatacgaacttattgatggagaggttaaggttgacaagattgattttaagaaaacatccacaagccactctgctcattaaacactagggttttggtcctactcttgtttgtctttctctttcttgtttagttgtttagttttctttttcctccttcaaactctccaagggtgtactgtttttagtttttattttgctttgcatgtacacttgtatttggccatatcataggattcttaggatttggttaatttgtgatatgcgccaaacgcgttacgactgattgcccacacgggctttgtgtattactccttttaccagttatttacccagagatgatatgcagcc

SEQ ID NO: 1421 - DNA, 2298 bp, Glycine max
tttattgattctctctctatatctttctctctctaactagttcttcgtagtggtgtggagcccatagctggacctgtgctttgctggctccaagctcttcattgatagtctttttatggggcttctccgctgagttcagaacaaaacaagagaaaaaaaagggtttcacactttgtccaatctttcacactgaactcttcaattttcaattctctttttcatgcaccactcttctttttcttcagacaccttcatcatctgcataccgcttagctccaaaaactacacacacaagaattctgtttctttctgttgatttgatggatccgcagatctaatggtttcacacactttcttcactacggatcattgtcttcttcatctggggcaccccaatagcttcttctaatcgatagtcaaattttgttggtttgtggtggatcatcttcgtcgttgtggtgactagtgaggagtgcaggactatacctatctatatagtgtatgaaaattctggggggtgaagtcgtttttggggtagttgatagatgttgaaatccttgacggttgtttggtgaaatgagggatgttatcggggttgatgaacttattgagggcctgctttcggccgggttcggatggatttacacgtgcaggttcggatgccggtggtagacaggatggactgttgtggtacaaggactcggggcagcacttgagtggtgaattttcaatggctgtaatccaagccaataacttgctggaagatcagagccagattgaatcaggctgtttgagctccaatgaatccggcccttatggtaccttcatcggtgtctatgatggccatggagggcccgagacatcacggtttatcaatgatcacctatttcaccatctcaagagattcacttcagagcaacaatcaatgtcggtggatgtaattcgcaaggcactccaagcaacagaagaggggtttatttcggtggttgccagacagttttctctgtcaccacaaattgcggctgtcgggtcatgctgtcttgttggtgttatttgtaatggaaccctttacatagcaaaccttggggattcccgggcagttttgggaagagcagtcaaggcaactggcgaggttttagccatgcaattatcagcagagcacaatgcatcgatagagactgtaagacaggagctgcatgcttcacatcctgatgacccaaatattgtggttttaaagcataatgtatggcgtgtgaagggtcttattcaagtttctagatctattggtgatgtatatttgaaaaaggccgagttcaatcgagaaccactatatgctaagtttcgacttcgtgaaccatacaagatgccaatactaagctcagaaccatcaatatcagtgcatcatttgcagccacatgatcaatttattatattcgcatctgatggactctgggagcaccttagcaatcaagaagcagttgatatagttcaaaacagtccccgcagtggaagcgctaggaggctggtaaaagctgcgcttcaagaagctgcaaagaagagagaaatgagatattcagatttaaagaaaattgatcgcggagttcgtcgtcatttccatgatgataccacggtgattgttgtgtatcttgactcaaatctcgtgagtagggaaagcactgtgaagttccctggcatttctgttagagggggtggtattaacctgcctcataacacactggcaccttgtaccacaccaacagagattggtggtaactgatctaagttgtatcttttatctttttctttgttgtatcattttcttgtgtgaataccagttgtcttcaaatagcaatgagaggagcagcacttcaattctttgaatgtgaactgtaacttactaggatactaatactcatgtttaggttttttttttcccttcccctcaaaaccaaaagaacagaagagatcttctgatgaccattataagagttgcctcggcaccattttatatattttttttttatttccctgtttatgttggtaactttggtcttacaaattgtgatgtgcggagtgttgctgtattgctgaggatgttattcttagccatagtccatagataatgcaatcaatgcatttaggtgttggagagtggagaggaaaatcaccatgtaaatgcacgatgtagattatgcatgatgtaatgttaaaggtgtattcattgtcatgttattgaacataacccatcaatctcacatagacgcccacgtcttctctctccaataaaaaaaaaaaaaa

SEQ ID NO: 1422 - DNA, 2346 bp, Glycine max
ccacgcgtccgcgataaacctagaaaaattctacccggggttgttgggagagcaaccattggatctctgatcatccttgctcgtgcagtcactttagcattaagtcacttacattcacagcagggatttcctgaagctcttcttgttcaactcctaaaagcaatgttgcattcagatgtggaggctcgcgtcggaccacaccttatattttccattcttctttttccaagttccttccatacgaatgagatttcctctctgcggtccagatatctaggtcaacacaacaaaaggcattctcatgctccatctgtgtctgcatctgcttcaattacagctttacttgaaaagctccgcagaaacagaaacaccaaggtagaaaatcatgggaatattgttcatgatcaagaaagggatattgtggcagaagactggaaccagggctgtggcttaaagaattctcctaacttttacaaactcacttctatcattgatagggctacaggatcaccaagtttgactgacacagaaccatatgttatgaaactaactgaagatcaaatggcccagctgctttctgccttttggattcaagccaatcttcctgataatttaccttcaaatattgaagctatggctcattcattcattttgacactaattgtcttacgcatgaagaacctgaaagacagagataacctggttatccgcttcttccagcttcctctgtctctctggactatgttgttggaccaaagtaatgcaggaataatgccccctgcttgccagaggtctgtctatgtattgtctgctggcatgttggcgtttgcctgcaaaatatatcagattcatgatctgaatgatgtgtttgcgtcattgccaatgtctgatgttgatccattcttgagtgtcagtgatgattatcatgtatatgctaagatccatgtggatgtgagagaatatggtactgctgctgataatcagttagcatgttcaatgttgtcagagttacagaacaaaatacgggaatgtcaatcgatcataagggatgctttggttcataatttagctaacgtcactgagctggatgcagatgaactggctatgctattgtcagagaaattcaagcctgatgaagagtttgtgttcggtccacagtcaatgcttgatcagaatcaaataatttttcattcccaggagtcactgtcatttgatggggattttccctcaaattcagcaggtggtgaagatgacacaatcagtgaagcatctgtctctgacctttctcgatttattccaaagatgcctctatccccttcggcacctcatgttatcagcattggacaacttatggaatcggcattagaggtagctggtcaagtggcaggaacagctatctccacttcgccccttccgtacaacaccatggctagccagtgtgaatcactcggtacatgtgcaaggaaaaagctttcaaattggctggcctttgagaatcattacagccaagcacttgatgataaatcgtttttggcaattgctgatattaggaactcagcacctgagaaggtgacaaatggtggtgggcatgcccaattgccaagggaccccatgaagctgcctcctgctagcccctttgacaatttcctcaaggctgctgggtgttagattaggtggtttcatgcttacatctttctgctatgtatagttctaatgttaaatgttctttccagacaggagtttctagggtctgtatccttgtaaggactagtaggtagttccagtattttgacttcagtgatcagtgatatatataattgtagaatgacaatttctctactgaattgttcaagactttatggtatacagagcctggaactgtttaaagtgggggccagtgctgcatgccttccctacacactgttttggattcaattgcactggcaatttgctattttgtgaaaatccagtgtataatggcactggcactgccacactccggtgggcactacatatatgttcatataatggcactggcatcttcaacattttgagagacaaacttggggtgactatgtcaccatcagtttgaaagggggagttagagaaagttataattctaatgattacacattgattacaatatcattgatattatgtcaatcctctcaatcctgtatcatgaccttgattgctctatgatttggtttctgcgtgtgtagctatcaggaccaattcattccatataagttcatttctataattagtgtaattactcctagcttatttataggatcacgattgtactataatgtgtgtatataaacacattctctcatgtaatag

SEQ ID NO: 1423 - DNA, 1821 bp, Glycine max
tcagctacgtaggccccccccccaatcgcaactcgcgaaagttgttttgtaaagtcgtcacttcccacttcgtctccgttgctgtagttgtgttctgtgtgggtcgctgaagggcccttcatcagcacagatggatttccatggattcctaaacgacttgcaggattgggaattttctagaaaggataaagcacgaccacaaaaggaaaatgttggcttcatcttctcgaattacgggatctgtgggtgtggagaaggcatcaaaaggagataccatttcttttgataatgcaagaaattctccaggacagtatgatttatcaagaattaatcatttgcatagtagttttgttcctgaagatgttcctgatgctgcttccgagaaagacctgggtaacgagtttttcaagcagaaaaagtttaaggaagctagagactgctattcaaggagcattgccttatcaccaacagctgtagcatatgcaaatagggcaatggccaatatcaagctcagaagattccaagaggctgaggatgactgcacagaggccttaaatcttgatgatcgttacataaaagcatactcacgaagagcaacagctagaaaagaacttggaaaaattaaagaatcaatggacgatgctgaatttgccttgaggttggaaccaaacaatcaagaaatcaagaaacagtatgctgatgctaagtctttctatgagaaagatattcttcagaaagcatcaggggttctgagaagcactgtacagggaactcaaaaagtggggaagtcagaggaaaaagttaatggagacagcatccaccccatttcacatagtactcaaaagtctggactagctgaagttcatcatcataaaaaggataatgaacggcaaatacttgttaaagaatcactcttaacagaggatgttgatagcagagaaataaaagccagaagcaggcctcaatcacaaggagatgatggctctaagggaggtttgagtgcaagcaacagtttggagcagagaaatcacagaattaccaagccagaaatgaaagcttctgttcaacagcttgcttctcgcgctgcttctagagccatgtctgaagctgccaaaaacgtaacacctccaactacagcttatcagtttgaggtctcctggagagcattttcaggtgatcttgctctgcaggctcgtctattaaaggctatatctccccatgaattgccgaaaatattcaaaaatgccttgtcttctaccatactaattgagatcatcaagtgtcttgcatctcttttcactgaggacatggatctggttgtcagttatttggagcatttgaccaaggtaccaagatttgatgtgattgtaatgtgcctttcatcaacaaataaggatgacatacgcaagatctgggatgaagtgttcagcggtgaggcaacaccaatagagtatgcagagattctggacaaccttcaatcaaagttcggccttggacagtgacatcttcccctgtatgttttaatatttttttttcctcggtggatcctctcccttccgcaactatcttcacttgtaaattattatgctattgaaatgtttgagcattattgacggtcaacttgatccatctttaagcgttagttgataatgaggaaatgggaggaaaaagaaaaacaaaaggctcatgtgtagtgcttgaggctgagggtccagtacgttttaatggttttttcctccagaatttgggtcttctaaaatgaggaaaagtaaaggaagtaattttagttgataatgagaaaatcaacattttaatacatct

SEQ ID NO: 1424 - DNA, 1350 bp, Glycine max
tcagctacgtaggccccccccccgaggaaagttagtagtagtaattgtgtagttgggatttggcgaagtcggtttagggtggaaaaggataagaatgacggtgtgcgcagtgcgcctttccctcacacacactccctcctaattgcaatttaataaatccacctcactccttcatccattgaatgattctatcttccaatggatcctcctctcatcactgactccacattctcccccgcttactctctcgccgagatttggcccggaatgccccatttcccccctcccttcccccacccctcctccgccgatcactccaccctcaccgacctcaccgccaccccccgcaagagaaaggactgctcctcctcctcctcctccgcctccgccgccgccgccgacgaggacgactgctccaaggtcctctcctccaccaccaccgccactgccaacctcttcaataatgattctggtagcaataaacagatgaagttaggagggtccagtgttgaaaacgatggtttcaaagctgaggcagaagcgagttctgcgggtggtaacaagtcaagtgagcaaagcaataaaccttgtgaggcacctaagcaagactatattcatgtgagagcaagaaggggccaagcaaccgatagccacagtctggcagagagagcaagaagagaaaagatcagtgagaggatgaaaattcttcaggatttggtgccagggtgtaacaaggtaattggtaaagcacttgttctagatgagataatcaattacatccagtcactgcagcgtcaggttgagttcctttcaatgaagcttgaagcagttaattcaagaatgaacatgaaccctactattgatgggtttccttcaaaagatgttggtactcagccatttgacattgctggaatggtatttggatcacaagcagcaagggggtatgctcagggatcatcacctcctggatggctgcatatgcagataggaggtggtttcgagagaacaacataattcagagaagcctcattgggaatgacagatgaatcgataggattgattttctattaaaaaaacaaaaaaatagtgggttgattacagtgtgcttttttaacaacctagtcaactgttgtcgaatgttgtaggtttgcgtttcccattgttatagtatgaaattatttatagaaagtgcatcttaatcgcatgtgcttcattgtattagcaattagcaagtagaaaacaatcttagtgtggttttcgtttttaatcctgttgtgataggactcctgcatcctgatttgatttgtataactatatatattgcagctatgcaattgtgtattctgagtg

SEQ ID NO: 1425 - DNA, 874 bp, Glycine max
attagctaatgaagtgacacatggatcccgaccctatctgtgccttttcctatgtttgcgaattaaatgaagcattcataaaccataactgaagaaaactaaggaaggaaggaagagtgagcgtgaaagatgccttgggcgaggctttcagggtctccaaggctcgacgttgctattgacatgggcaatccatttctcaatctcactgttgatggtttccttaagatcggagctgtcgcagccacgcgatcagctgctgaagatacttatcatattatccaaaaggggaatatctcaagtcatgatttcgagaaaacgttgaagaagatgtgcaaagaaggtgtatattggggaactatagctggcgtttatgttggaatggaatatggggtagagaggatccgtggcaccagagattggaagaatgccatgattgggggtgcagtaactggggccctggtatctgcagccagcaacaacaagaaagacaaaattgcgatagatgccattactggggcagcaattgctactgctgcagagtttataaattaccttacctgaatgaatgaaagtggatgtcttgctggttttcttgcatgttttggaaagggattgcacactcagtctcttttgtcatcatctgtaccggttccgtcttgatattggtgcagttacttctaagatattctatttatttaactttctataaaacctatgatttgataaattgtattggccaatcggtttctgcatgttagtagctttgccttgcaattttgttaatgcatgttcagttcgatttagtctttgggttttggaatgatgaaggttctggatggacatgttttcaaatttaaaaaaaaaaaaaaaaaaa

SEQ ID NO: 1426 - DNA, 909 bp, Glycine max
ttcgggtttcggaagtcttaaatgggcattgttgtctgagtgtcgagactcgagagttttcaaatcgtaaaacctaaataaatacatcactgccttcagaaaacgactgcgcctagcttctagccaccctttaatcttcgtcaacgttacttttccacctcgtacgagggattcaattgagagggaaagggactgatggcagacaacacacagtcttactgggaaggctacaaagcgttttggtcagagaggttttcctttttgagcaactattcgaggttcatcaaccgtgataaacccatcccttcctggtcaagctctgatgtcgaggagttcattgcttctgatcctgttcatggacccgtcctgaaaagtgctagagaagcagtgcaatttggcctcacaggaagtgctttgggagcattatttactgcaggctatgcctggaaatattcaaagagtttacatggcgctggactgtcatttttagctggaggtatatttgggtggacttttgggcatgaaatcgcaaatcacacacttcaactttacagggtagacacattggctgctgaggccaagtttctggactggtggaataagaagactggagggtattaaaactgttggcttatgggaattaatgctacatttgttatcgtttctgaaaaatgaagaataatttttggtgttggcagtgcgatttatgctcactgaataagtatgttgtgaattaggttatgttttaaaactaatgcatcatcgcaaaacaaatggtgacttgtgccattttttctctgtattgttgtgctgttgtttattagtctgggaccaatggttgagagaggtcataagtgctggcattttcatggtgttccaccgctaatacaatcgaggcaccatcgctct

SEQ ID NO: 1427 - DNA, 838 bp, Glycine max
aggcaactgaaattccggtcaaaaatacacaacacaggacgttgaaacgagctcacaaagtccccgccctcgagtcaacacagttattcttggccgaccaatgatccctaatccgctgatccaatgcagaagccaccatctccgcaggaccgccacgcgggcaccgaatcaccggcacaaccgcaagagtggccagcacgcaaaacaacccaccaacgatcttctcaacaagctcctcaatttccttgtccccagcggaagggtcgttgagttgaacataacaaggcttgtgggccagcgaaaaaaggttatcctctagggttacgaattccagatactgatcgtgaaccttggagactcgctgaatcgaatcggaatttagggttccggtggcgaggtcttcgaggagggggcgagggatggaggtggagaagttgaggtggaggctctggtagagcgatttggaggcgtcggaaacgatgcgttgcacgttgggttggttgggctggacgaaataaactgcgggaacgtcgtgaacgggcttgcgatccttgtcgatgaggaagtagagggtgacgccgtgcttgcggaggtccttgacgtggatcagaggggagaggatgttctggcagaacttgtcgtagatgaggatcttgtagacctcttcgttcgcggttccggcggcgtttaagggctggttcaggttcagcatgcgcgcgatgcattctgtttgcttctgacggagattcagagacatgatggctgttgtattgttggaggagcgatgaattgggattgtgatgacgcggacccggtggtcgacccgggaatccggacc

SEQ ID NO: 1428 - DNA, 2046 bp, Glycine max
agagcctgataataaacatattttaatgatcagagttgaatggacattaatgattcaggtaaaacttccctactctgtcaaatagatcaatctacaaaccagacacttcaagaattgtaagaagagcagcaaaatatctccaattacagactatctttaattaatacaaaatgattttcaataaccaatatatctcacttacagaatgaaaataaagcataaacggcacatcatgcttttcaaaaaacttttcactgcaatgaacataaaacataaacggctgtgctacaggaaactaccaagcaagaagcaaccccctaactttataatcaagaaggcagtgtaaggttcatattccttcatcgtttttttccagatgatgaacatcaaaaacatatattgactttgtctgggttacctcaatgtctgagagttttcctttcacactaaagaataatttggcaaactgaaatgtgaatacattcaacctctgaactactgagctggggtagaactagaaccaacattacccaagcccatcttctgccccaacaatgttagctgctctacaaagtcaactccagttagcatttctgttgttccatatataatatgtttggcaggttgctgatgttgtgcaagctcttgcagactacaatattcaacgtaattcccaccaccaatcatgaacacaattgcttccttaaatggtcctttcatatggctgctacttgctcccgaaccagactttggagcacggggatcaaacgagaggtatgaatctgtttcagggtttggcctcccttcaatcaaggcctcaactgtcctcgccaacgctagctgccggtcattagatagaagattttttacaccagccgtcactgcactaattgactgtccatagagcttctcagcccaatcaacaatattacttctgctggcagaatttgccgatgccaacgaaacattcaacgacttgatcttcttcacatactgaaaagcagcagtatcaacctcagactctctcagcgccgcttccacagcttccacttccgactgattaatggtttccgacgaaatgagatatatgatggcaaacctaagcttatccatcttcgttcccttccctttgagcacgccaagcaggtcagcccgttcaatgccccctctaaccatcatgtcattctccttcttagcataagaatcaagagacctctccttgatctcgcccaacaacacggtcgcaatgttggtgtgcttatcgatcacctgcttcctctcagtcaactcaggcagagaattcacagcgttcatcaaatgcttcgtgttcccgatcaaatccgtcccatcaaactccgcgccatgagtcccaccagtcctcttgttcacctcatccacatccttcttatacttattcaactgcgtctcaatctccaccgcaacctccgggaactccaacgacccattcgcaacccaaaaagaatcagcactatccaactcataagatctcatcccacccttctccccctgcacactcagcctattcagcttcaaccccagcacatcatggctcgagccgattcggctcgaggcatgctgaatcgccaccggcaactcgaaattccggtcaaaaatacacaacacaggacgctgaaacgagctcacaaagttcccaccctcagtaaacaagttattcttggacaacaaatgatccctaatccgctgatccaatgcagaagccaccatctccgcaggaccgccacgcgggcaccgaatcaccggcacaaccgcaagagtggccaacacacaaaacaacccaccaacgatcttctcaacaagctcctcaatttcctcgccccccgcggaaggatcgttgagttgaacataacaaggcttgtgggccagtgaaaaaaggttatcctctagggttacaaattccagatattgatcgtgaaccttcgagactcgctgaatcgaatccgaatttagggttccggcgaaaagaaattcgaggagggggcgcgggatggaggtggagaagttgag

SEQ ID NO: 1429 - DNA, 1874 bp, Glycine max
aacgagcacatgatgcacagtcttatctgaaaatgaaatgtcggaaacgctatacccatgagtcgtgcccttaaggacaaggatcacgaccacgaccaccataacttttgacccttatagttcggctgcgtcggccccgccgcccccgacccatccattcttcaaatggaaaagctccatgcttctgtgctcgcccttgtattccttcttgtcatactatttcaggaaggattggtaacatgtatgaagaatgaagacggatcagaagaatggggatatgtgcaagttagaccaaaagcccacttgttctggtggctttacagaagtccatacagagtggagaatccctccaagccttggccaatcattctctggcttcagggaggaccaggctcttcaggagttgggtttggaaattttggagaggttggtcctttggatgctaatttgaagccacgaaatttcacatggttgagaaaagcagatctcttgtttgtggacaacccagttggaaccgggtacagttacgtggaggattccaatctctatgccaaaacagacgaagaggcaaccacagacttgacaacattgttagttgaattattcaacaatgatgcaagtctccaaaagagtcctctgttcattgtggcagagtcttatggtggcaaatttgctgttgctcttgcattatcggctctcaaagctattcaacacggaacattgaagcttacacttggaggtgtggtattaggagacacctggatctccccagaagattttgtgttttcatggggtcctctgcttaaagacctatctagaattgacgacaatggactgcaaaaagcaaacagtatagctgagaggatcaagcagcaacttgaggcaggtcaatttgttgatgcaacttactcatgggctgatcttgagaatgagattgtcgctagcagcaacaatgtggatttctataattttctacaagattcaaaaagtgattcggacaccttaaacgcaatggagctgggattattcaaagaagtatcaatgatgcgatactccaagtatcttagttcaaagacttcatatcttggcagtgaggatgatgatcttgaaagattactaaatggtgtcataaggaagaagttgaagatcattcctgagaatgttacgtatgcagtgcagtccttggatgctttcgaaagtctagtacctgattttatgaagccaagaattagtgaggttgatgagctgctggctcttggggtcaacgtgactgtgtacagtgggcaagtggatctcatttgtgcaaccaaggggactgaagcttggcttaaaaaactcgagtggacagggcttcaaaatttcttggagaaagacagaacccccctctactgtggaagtgacaaaacgaccaaagggttttttaagtcatacaaaaacctacaattctattggatccttggagcgggtcattttgtacctactgaccagccctgcgtagcactggatatggtgggtgcaattacacaatcaccagcggcttgaggataatatgcaccgaatgaaataaaatataaaattgtacaattaaataaacactaaaataaaatcacccagataatggctatgaggtttatattacgagttttgtcgggtatattcaatttttttttttaatttgggcatatctatgatgttaggtgtagcaatgatgataagtaatgactaaaattaagtttgaacagcatgtttggagtggccttaaaaatacatgtggagtaatattttaacgtccaatcaacattacagtaaactaccgaaataaaagttggcacttagcaataaacaattaataacttttttataaaaaaaaaaaa

SEQ ID NO: 1430 - DNA, 1073 bp, Glycine max
  misc_feature (1018)..(1020): n is a, c, g, or t
acaagctacttaaatgagactgtgtaaggcaccaccccacaccacaacttcagcgcatccacgtcatcaccctcaacctcaacctctccgagcgagaaccagacacaagaaagaaaacgtgttgcgtcagtgttacccctttctccttctctttatctttcctgaatttggcgcgtttcgattcttcttcttccgaatcagagagagtctggatttcttgttgaagatgcgacgctcttctgcatccaaaaagacgggtcaatccaattccacccccatcgccgccgatctcttccgctccgcttcaagtaaggcaagctcgaaggaatcagagcgaattgatagtctattctattcgtatgccaatgggtctactgggttgattgacccagaaggaattgaaacactttgtgctgatatggaggtggaccatacagatgtgagggttttgatgcttgcgtggaaaatgaaagctgaggagcaaggatattttaccttggatgagtggaggagaggcttaaaagcattaagggccgatactgtaagtaaattgaagaaggcactcccagacctagaaaaagaggtcaggaggccatcaaactttgcagatttctattcttatgctttccaatattggttaacagaggagaaacagaaaagcattgatatagagagcatttggtgagttacttactcttggtttgggttcttacatcttcctgcgcaagtcaacttgtttgtggaatatttgaagactcaaaatgattacaaggtcataaacatggatcaatggatgggatttttccgcttttgcaatgagataagttttccaacccttaatgactatgattctgaacttgcctggcccttgatcttggataacttcgttgaatggctgcgagaaaaacaaaaataatcgataagccacccgattctctgtaactgcaaccactgcaccccttttaagagaaactgtcggattctgcaattaaatcagatagatgccttgcggctccgnnntattatacttaacaagttattgttcttttgtttgcccagtttcttattttggg

SEQ ID NO: 1431 - DNA, 2380 bp, Glycine max
tcagctacgtaggccccccccccctttttttaatttttttaaacattttgttatttcttcatttatacataaaaataaattaaatagatattaaaaaaatagagtgacttgaagaagtttagattcattatatattattattattaattactaatacaaataaaagttaagtagtataagtaaggcatataattgtcatattcaggccttgcaaagtcaatgcttttttggttaaatatacaaatttaagttggttgatgctgttggatttttagtaaggcatatgtagattaaattaaactccaattttaattggagaacaatatgtgaattgacttgatttatgtttgcttactgtttatctagttatgctttttctttgcatatagaattttgatatcactcttctatatggaacatgactcactaatcgcacttgtaaaacttgacagatatagaagtttcaggtgcctacatcatattgatagggcttgtttgcccttcaacgttatggcacatacaaggttaatttctttacttggtgaacatttgaacccagcaatcgtacaagcataatttttcagcttcaagtaaggcaagctcgaaggaatcaaaacgaattgatagtctattctattcatatgccaatgggtctaccgggttgattgagtaagtgtgcttcatccaagactgtttgttttctttcctccattcaatatgcatatatcaaattgcattatcctgttgttgttttcttaattcaagtttcaaaccttggacatggatccagtggcagatctaggacaatctatttaaagaataaaaattaacaagtattatcatgaaaagaggggaaaattaagggcaggggttcaaatatgaaaaattaggagggacaaaatattggattgaaagtgaggggtgcatgtgcagcccctcatttaagtgtggatgcgccactgcatgaatctgttggggataaatagattgtcctagatctggggtcaataaagagcttactgcatcctcaacaaaagcatggcttgagaaaatgggaatcaagtatatatagatgtggacaaaggtaataaaatcattgaatgtagctattagatcataactacatatttgtatatataccttgtgtgagtgaaatgacaaattgttatttaactataagttttcttttctattgtactgctaaatttgatttgtattatgtacaagtgcatttttcctggtttcatcaaagaattagaacaattatggctacaactttgtatgttgcatacattagaggatcattaattcaaaaaaggatattcaatttgcatggacttatatatgtaggatgcatgtcatttgatgctattgttcagatttcatttgatgttattatttaatttgcatggtctgatttaatttataggtaccagagatcaatgtaaaaaaaatgcatcaataaaacgaagaaaataaaaaaaaaaacttagacatacaaagacggtttccgaaaacgtcataaaatgacaacataatatagacctacaaagacgcttcccataaccgtcgtaaatttgcataacatacaaagacgtttcccataaaacgtcttagtatgcaatcttgacatgctatctaagacggtcataaaaaccgtcttaaattggcacctattaagacggtcatggtaaccgtcttcatatcgcaaatttatctgtagactttaagacggttatggaagaaacgttgtaatatttagcacatactaagacggttcccataaccgtcgtaaaatagcttatacattttacgacgttggcattaacgacggttgaaaaccgtcgtgacatggccataagaaccgacttaaaatccaatttttctagtagtgctcactcttgccatactatatatatatataactaaacccacatggacatgttataaaacacaagaattattacttgtacgtttttgcaacaaaaatgatttgaatgacatttttggctcttttaattgctttatttttaactcacatacttttcaattagcagaacaccccatccttcccttttctcctagggttaattagtactacccttgcactttcaaattcaaccaaacatataggagataattaatccagattcaaaaaaaaaagattgctagggttatgctatatatatatatatatacatacataaatttcaataataagaagaaatcatttcctaattataaaaaacaagggttagaaaaataaactaccttgatcgaattgctttggggacaatttcagcccacttgcatatattgttttaagtcatagttactgacaattatgaaactatatgtgtggaacatgttcactcatcac

SEQ ID NO: 1432 - DNA, 2195 bp, Glycine max
cagagctcctggcatattagtatattcaagaacttgctagtgctatctactttcaaccgaaccagggagtacttcgttttttttttttccttctttgaaccgtccggttcgttgcgaactgaatactatggcagctctgttaccttgcgcgccgaacgtagtctctgctcccttggggaaccggagcacgtgccacttcccgcaccgaccttactcccacgctttctccggttcgaccgccagacactttcttcgcggttcgcttaccgtcgcccgcttcgggttccaacccggtttcttgcccgagccggacgaagctgaaggtgttctcagagaactgtttggccgagcggagggacttctttacacgattgccgatgccgccgtttcttcttccgatactgttgcggcttccaccaccgccaaacagagcaacgactggctttccggaattgccaattacatggagaccgttctcaaggtactcaaggatgggctttctgctttgcatgtcccgtatgcttatggttttgcaattatactgctcacagttcttgttaaagctgccacttttccattaaccaaaaaacaggtagaatctgccttggctcgagtgcgaactttgcaacctcaagtattggccatccagcagcgttatgctggcgatcaggagagaattcaacttgaaactgctcggttgtataaactagccaacattaatcctctagcaggatgcctccctacactcgcaacaataccagtgtggattgggctatatcgagccctttcaagtgtggcagatgaggggctccttactgaaggcttcttctggataccttcccttgctggtccaactacagttgcagctcgtcagaatggcagtggtatctcttggctttttcctttcgtggatggtcaccctcccctcggatggtcagatacattggcttacctggtcttgcctgtgttgctggtcgtctctcagtacatctctgtccaaataatgcagtcatcacagcctaatgatcccaacatgaaaagttctcgagccgaaccggctcgagcggctcgagatgattggttactttgctctctcagttccttctggtcttagcctttactggttaacaaataatatattgagcactgcacaacaagtatggcttcaaaagttaggaggtgctaaaaatcctgtgaggcaagtcccagatgatatcatgaagaatgacctaacacaggttcagaagtcaatgtctaaactaaattccacaacagcggaagaagccagactaagtgagaaaacatcagaggggccacaacctggtgaaagatttaagctaataaaagagcaagaggcaagaagaaaacaacaaagagaagaagaagaagaaaaaaggaaagccttggaagcagcagctagagaaactaaagtagacaagacacttgaggaaacagttgaagtggagaatcaaactggaggtgatttagttgttgaaaaatctcggtctttggcttcagatactgatccctccatatctggagtagtaaatggtaatccattaagtaaagacttggagggaaatcagaattctacatctacatctgagacagaaaataatgaaggttctgctcatttcaacaatgttgagataaacgagaaaattttagacaaggaaccaagagaagtattaacaactacaaccaccacaaacaaacaacctcctgcggaagagacaaaggattgactatctaaaagagattgatctgcttggagattgactggcccagttgccatctatatgccatatgggaaacgcaacctccctttcaatttggggtctgcctggttaaagactgtacattgccacagaaatggtggaatgaatgagattcaatgtttctatattggcagagggagtgcttggatttgatggctgattttacagccatatagtgctagtttgtattatactctttttatcaattttcattgacaaagatggatgaattcccattagaacagatgtttcacaataccctttatagtcagcttgtcatctttggtactatttttgtttgtcactgtaatggttcaacaaatgcaggcctgggtctgtatatcccggagaaaccgtgataggaaaatatccataatgcttttttttctccttaaaatatcgtcacgtaacagaact

SEQ ID NO: 1433 - DNA, 895 bp, Glycine max
  misc_feature (17)..(17): n is a, c, g, or t
  misc_feature (26)..(26): n is a, c, g, or t
  misc_feature (28)..(28): n is a, c, g, or t
  misc_feature (738)..(738): n is a, c, g, or t
  misc_feature (743)..(745): n is a, c, g, or t
  misc_feature (748)..(748): n is a, c, g, or t
  misc_feature (758)..(759): n is a, c, g, or t
  misc_feature (772)..(773): n is a, c, g, or t
  misc_feature (782)..(782): n is a, c, g, or t
  misc_feature (787)..(787): n is a, c, g, or t
  misc_feature (793)..(796): n is a, c, g, or t
  misc_feature (806)..(809): n is a, c, g, or t
  misc_feature (818)..(818): n is a, c, g, or t
  misc_feature (821)..(823): n is a, c, g, or t
  misc_feature (825)..(825): n is a, c, g, or t
  misc_feature (836)..(838): n is a, c, g, or t
  misc_feature (841)..(846): n is a, c, g, or t
  misc_feature (848)..(848): n is a, c, g, or t
  misc_feature (850)..(850): n is a, c, g, or t
  misc_feature (853)..(855): n is a, c, g, or t
  misc_feature (858)..(862): n is a, c, g, or t
  misc_feature (864)..(864): n is a, c, g, or t
  misc_feature (871)..(872): n is a, c, g, or t
  misc_feature (880)..(880): n is a, c, g, or t
  misc_feature (882)..(883): n is a, c, g, or t
  misc_feature (890)..(890): n is a, c, g, or t
cgatatgggtaccgggnccccccctngngtcaccgccgcgggccccccccccccccccaccaccaccataaatcaatccttgttcactctatttcttagctccaacaacatcactaaaaaaaatggcctctctccgttttctcttctttgtttctttcttcattgttttgtcactttccatcaacattggtgaggtccaaggtgcaaatagaaaacttttggcaccaacatttcctgatataggcaacattcctggcgtgcaatatcctcctttccccccagtaaccgattggccagagtacaggttgccatcattcttaagacctaattaccccgcaattcctgcaaattattaccgctacactccccctgccaaaacaaccacaaccacagcttccaagccttgatatgagcacgatatgcatgcaacttggtatatacattattgttatgactgttagcatttcaaataagaggttcatcaatatggccttgctcaagccttctcgatcaccaagtttaattattactttatggtttaattttagttgtattccttagattattaattgggtggattcaatttgcgagatccttgttgatcccgtgatgtttctctcccctgttaaatgttcacaatgttcggtgtatgaatgaaaaaaaaaatgtgcttgtttctttaatgtttactagaaattaatatatcatcactcgcgagggtgttcaagtaaaaaaaanggggnnnccnccgggggggnnctccacttttggnncctttaggnggggnaaattnnnngctgggggannnngggagaaanggnnncnggggaaatggnnnccnnnnnnantnccnnnaannnnnancgggagnnaagggaancnnggggggnctaag

SEQ ID NO: 1434 - DNA, 1401 bp, Glycine max
tcgagtagctacgtaggcttttttgggactttgggttttgatttgggaagcagcaatagacatagacaggcatagtatagcagcgcggaaatcgcatccacgactctgacttagagagatggcaagacaagctctgaccaaattgctgtcctcgatcgcctcgcgccgccaccatggcctccgccacttctcggcggcctcgccggcggtcttcgtcgacaagagcacgcgcgtgatctgccaaggcatcaccggcaaaaacggcaccttccacaccgaacaagccatcgaatacggcaccaacatggttggtggtgtgactcctaagaaaggtggaaccgaacacttgggccttcccgtcttcaacaccgttgccgaggcgaaggcggagactaaggccaacgcttccgtcatctacgttcctccgccgttcgccgcggccgccatcatggaggccatggaggctgaactggatctcgtcgtctgcatcacagagggcattccccagcacgacatggttagggttaaagcagcacttaacaggcagtccaagactcgtttgataggaccaaactgccctggcattatcaagccgggggaatgcaaaattggaatcatgccaggttatattcataagcctggtcgcataggaatcgtctctcgttctggtaccttgacatatgaagcggttttccaaacgactgctgttggccttggacaatccacttgtgtgggtataggaggagatccctttaatggaacaaacttcgttgactgccttcagaagttcctaactgatcctcaaacagaaggtatcattcttataggagagataggaggaactgccgaagaggatgctgctgcactaattaaggagagtggaactgagaagcctgttgttgcttttattgctggtttaactgctccccctggtcgtcgtatgggtcatgctggagctattgtgtcgggtggcaagggcactgcacaagacaaaattaaaaccctcagggaagctggggtcacagttgtggagtcccctgccaaaattggagctgccatgctagatgttttcaagcagaggggcttggttcaatagtttgggttcatttaacttcaaatcattttggtttcgattgtttacatgctcaaaatttcttgattcccattggtaatgatgggctatttttccattttctttttggagttacgagaggtgcattaaaataaaattcaagatgctttatatttgcggaaagtttgatagtctttgaactccggattttctggcgttgatttgtgaacacgatataccctttgccaatgaatttccagcaacttcaaattaaaaaaaaaaaaaaaaaaaaaaaaaaaaaaaaaagggcggcgctcgcgatctagaac

SEQ ID NO: 1435 - DNA, 2177 bp, Glycine max
ggctcgagctcgagccgaatcggctcgagttcagcactgctgcgtttcccatttttttttttctagaacagtaaatttcaagtaaaccaaaaaaccataaatagtagtattaattaccaatattgtctttttctttttattttttttaaatactctgaaaccgcgaaaccctagctgaaccctctttcccttctccggccaccgcaatggacttcactacgccgccgatcgaggacggtttcaccgccgagaagctcttcacgcagggcttctcctacacctacgatgacgtcatcttcctcccccactacatcgacttcgccgccgacgccgtggacctctccacgcgcctcacgcgccgtctccccctcgccgtgccgtttgtggcctctcctatggacaccgtgtcggagtccgccatggccgccgccatggcctcgctcggcggcatcgccgtcgtccactccaacgtccccgccgccgtccaggcggccatcctccgcagagcgaagtcccgccgcgtccccatcctctccgaccccgccttcgccgctccctccgccgtggtcgagcacgacgacgccttcggggcctcccccttcctactcgtcaccgacactggcacctccgtcgggaaactcctcggctatgtcgcgaggagcgactggacgaatcaaaccgacaagggcttgagagttggggactacatggcgccacctcccaagccggcgccatggaacgccgacctaaataaaattaatgaaattatggagagtgagaaaagtggtgctgtggctttggagagggatggtgaggtggttgatttggtggtgagggaggaggtggagagggttaggggatacccaaagctggtggcgccggctacagtgggggcggacggggagtttatggtgggggctgcggtggggacgagggaggacgataaggagaggttggagcatttggtgaaggctgggttgaatgttgtggtgttggatagttctcaagggaactcaatttatcagttggagatggtgaagtatgtgaagagggtgtaccctgagcttgatgtgattggggggaatgttgtgactatgtaccaggctgagaatctgattcaggctggggttgatgggttgagggttggaatggggtctgggtccatttgtactactcaggaggtttgtgctgtgggccgtggtcaggcaactgctgtttacaaggtctcatccattgcttataaaagtggtgttcctgtgattgctgatggtggcatctcgaactctggtcatattgttaaggctttgtcattgggagcgtcaactgttatgatgggaagcttcttggctggtagccttgaggctcctggggcttatgtatatcagaatggtcaacgtgtcaaaaagtatagaggaatgggttccctagaagctatgactaaagggagtgatgcaaggtacttgggtgatacagcaaagctaaaaattgctcagggggttgttggagctgttaaagataagggttctgtcttgaatttcataccatacaccttgcaagcagtcaggcaagggtttcaggatatcggtgcctcctctctacagtctgctcatgaccttctaagatccagggagttaagactggaggtccggagtggagcagcacaggttgaaggtggagttcatgggctggtttcttatgaaaagaaatacttttgaagtatgaaaccatccaaaatcataagcggtgctataatcccttgctgcagttcagcataaaagaagggaacacactgttattggttagtggcaacttgttgctactctgtcaagcgaattgaagtttataccaatagaacatcgtgggaattttcttccctgaggttctgaaggaagaacactgatttcgtggtttttttttgttttttttcatctccattagactttgtcaaatgtgtcatagactttcctaaatatattttgcatgttttctgtcctgttaagtaaatgttactgtcatagtactgcaaaaatttcctcctatcttatgaaaataagacttcataaaaaaaaattatggttcttgatataagactttataaaaaaaaattatggtacttgatataagacttttaacaaagttttagaagtattttagatttgaaaaaaaaaaaaaaaaaa

SEQ ID NO: 1436 - DNA, 1213 bp, Glycine max
gacgccaaaaccactgtatcagtgtgtccttccattccaggtttttccaccacactagaaagtaactttaaggttactatgatcttttttcaacatgattcatcacattttcaagcacacactgcattaagaagcgagaaatcataactcatacatatatatggtcacttataaataattcttatagcaaaacggatggcatggaaagcgtagggaagaatgtgcctgtaattgtctttgtctaagtagagtctgtaattgtctttttgagaaaacaacagctaaggtaattacatagagccatatttcatctataaaatagcctgaaatccccgtcagctacctaggccccccccctgaagaccacacttgagataacttctctctgtttcttcttttctctttgtctgaggtccatttttgagcaatggcgagaaaactaagcattgttgtactttgcattgttcaaatgctgcttcttcttgtggaaaacgatgctgagattgttgtgtccaccgtggaggctccagctccgcagcctcacaagaacaccacccacaccctgtccagcgctccagctccgctgcctcacacaaacaccaccaagtcccatgttcccaatttgcagcatggcatcaccgaaggcagtcttaaaccacaagaatgtgggccacgttgcaccgctagatgctcaaacacacaatacaagaaaccgtgcctattcttctgccaaaagtgctgtgccaagtgcttgtgtgtgcctcctggaacttttggcaacaagcaagtttgcccttgctacaacaactggaagacaaaaagaggaggaccaaaatgcccctgaaactttaaattttacctattaagtctcttaatgcccttgctagttgctaccaccactccatgtatttatatatgtacccaccagattgaaattaagtaccttaatttaatcttttttgtctttgtgtgctttcataatccttagggaataagacagaacacttctgttctggcattgaacttgtagtcaaattcctccctagaaattgttaaacaaggcacaaggaagacacacaatgcaaatatgtgtcctctcgttatgaaaatttaaatattattagtaaaagaaaaaaaaaaaaaaatatatgcttagaagctaccaatgaggtctaatttagttggttgaataagatgcgtgataggtgagtta

SEQ ID NO: 1437 - DNA, 1064 bp, Glycine max
cccgcgcgtccgcccactcgtccgtacggctgcgagaagacgacagaaggggacgccaaaaccactgtatcagtgtgtccttccattccaggtttttccaccacactagaaagtaactttaaggttactatgatcttttttcaacatgattcatcacattttcaagcacacactgcattaagaagcgagaaatcataactcatacatatatatggtcacttataaataattcttatagcaaaacggatggcatggaaagcgtagggaagaatgtgcctgtaattgtctttgtctaagtagagtctgtaattgtctttttgagaaaacaacagctaaggtaattacatagagccatatttcatctataaaatagcctgaaatctcatctgccactagttcttgaagaccacacttgagctaacttctctctatttcttcttttctctgtgtgaggtccatttttgagcaatggcgagaaaactaagcattgttgtactctgccttgttcaaatgctgcttcttctcgtggaaaaccatgccgagattgttgtgtccaccgttgaggcttcagctccgcagcctcacaagaacaccacccacaccctgtcccacgctccagctccgcagcctcacaaaaacaccaagtcccctgttcccaatttgcagcatggcatcaccgaaggcagtcttaaaccacaagaatgtgggccacgttgcaccgctagatgctcaaacacacaatacaagaaaccgtgcctgtttttctgccaaaagtgctgtgccaagtgcttatgtgtgcctcctggaacttatggcaacaagcaagtttgcccttgctacaacaactggaagaccaaaaggggagggccaaaatgcccctgaaactataaattttacctattaagtctcttaattaatgccttgctagttgctaccagcactccatgtatttatatatgtacccaccagattgaaattaagtatcttaattttaatttattcctgcttgtcttcgtgtgctttcataattaatcattagggaataagacagaacactttttttg

SEQ ID NO: 1438 - DNA, 2855 bp, Glycine max
cgctttccaacgagggtttttcatttttttttctctcactctcaccaacgcactcgaagagataacattcattccatattcacaaaagcgcacacaaactttttttttttttttttgtctaactatggctcctgtgctgagcagaaccatggccacggcctctctggcctcgcttcctccttcttccccttttgcgaggacttcccttctcagaagcgcttttctgccgccgcaaatagggctcggcaggaactgcttctcccccgccgcggggctgcggtggacgcagcagcggcgtgagggaaggaggggagggctaaccgtgcggtgtgaggccgcggtggcggagaaggacgaggccaccggggagaagtttgagtaccaggccgaggtgagtcgattattggatttgattgttcacagtctgtacagccacaaggaagttttccttcgtgaacttgtcagcaatgctagtgatgctttggacaagttgagattcttaagtgtgactgagccttctttgctcggagatgctggtgatctagagatacgtatcaagtctgatccagacaatggaactattactataacagatactggtattggaatgactaaagaagagctcattgattgtcttggaaccattgctcagagtggtacctcaaaatttttgaaggcacttaaggaaaacaaggatctaggagcagataatggtctgattggtcaatttggtgttggattctactcggcttttcttgttgctgagagggttgttgtttctacaaagagcccaagatcagataagcaatatgtgtgggaagcagaagctgacagtagctcttatgtgataaaagaagaaactgatcctgaaaaggttctgcgtcgtggtacacagattacactctatttaagagaggatgacaagtatgaattctcagagccaagcaggattcagggtttggtgaagaattactcacagtttgtttccttccccatctacacatggcaagaaaagtcaagaactgtggaggtggaagaggaggaagaacccaaagaaggggaggaaccaaaagaagagggtgagaaaaagaaggtgaaaaagactaaaactgagaagtattgggactgggaattggccaatgaaacgaagccaatatggatgcgcaatccaaaggaagttgaaaaggaggagtacaatgaattttataagaagacttttagtgaattcttagaaccacttgcacatactcacttcactaccgagggtgaggttgagttcagaagtattctgtacgttccgggaatgggacctcttaacaatgaagaagtagtgaaccctaaaacaaagaacatacgcttgtatgttaagcgtgtattcatttcagatgattttgatggggagctgtttccacgttacctgagctttgtgaagggtgtggttgattcagatgaccttcctctcaatgtttctcgggagatccttcaagaaagcagaattgtaaggataatgagaaagagacttgtcaggaaggcatttgatatgattcaagaccttgctgaaagtgaaaataaagaggactacaaaaaattctgggagaactttggtaggttcataaaattaggttgcattgaagacactggaaatcataagcgcattacaccattattgaggttttacacttccaaaagtgaggaggaacttaaaagcctagatgattatgttgaaaacatgggagaaaaccaaaaggctatcttttacctagcaactgacagcttgaagagtgcaaagactgctccatttttggagaaattggttcaaaaagatattgaggttctttatttggttgaacctattgatgaggttgccattcagaacctacagacctacaaagaaaagaaatttgttgatatcagcaaggaggatttggaattaggtgatgaggatgaggtcaaagagagggaaaacaagcaagaatacaacctactctgtgattggataaaacaacaacttggtgacaaggtggccaaagttcaaatctcaaatcgcttgagttcatctccttgtgtgcttgtatcagggaagtttggttggtctgcaaacatggagagactaatgaaggcacaagcccttggggacactgcaagtttggagtttatgagggggaggagaatattggagattaatgcagatcacccaattatcaaagacttaagtgctgcctgcaagaatgcacctgacagcagcgaagctaagcgagcagttgacctcttatacgacacggctctaatttctagtggattttctcctgacagccctgctgagttaggaaataagatttacgaaatgatggccttggccttgggaggaagatggggtagatcagaagaagaggagggagatgcttctgttgaagctgctgattcaagcacaagtgaagaaagttcagagccagaagtttatgaaccttctgaagtcattgcagagagcgatccttggacaactgattaggcatactatgttctcatagaataagttaaatttttttgtcattataggggattatgcataccaaaaaggtgagaaaggaaagggagactcttttttccaataatttcatggcgttgaagcaaaatttctaatatcaatatagaactgggaatgaatgtcctaaggggcaaatcctatggatcctttccaaatgaaattgagatctattgttcgtaggtgggcaatttttttgatacttcaaggtcttgtggcattttatctgttaactcgttggtaagtatatcaaataaagtatttgaaagtttgagtgtcgaaaaaaaaaaaaaaaaaaaaaaaaaaaaataaa

SEQ ID NO: 1439 - DNA, 887 bp, Glycine max
tccgtcgggggaaagggaaaaaccgtgatgcatttcgcaagttgcttgaagaacatgttgctgctggaattcttactgctaaaactcaatggcatgaatattgcttgaaggtcagggatttacctcaatatcaagctgttgcgtcaaatacatctggttccactccaaaagatttgtttgaggatgctgcagaggatcttgaaaaacagtatcatgaagacaagacgctcataaaagatacaattaagtcaggcaagatcactgtagtgactacatcagtatttgaagagtttaaggttgctgtcttggaagaagctgcatgccaaacaatatccgagatcaatttgaagcttatattcgaagagttgttagagagagccaaggagaaggaggagaaagaagccgagaagcgccaacgccttgctgatgactttactaacctgttatatacattcaaggatattactgcttcctcaaaatgggaggattgcaagtctctttttgaggaggctcaagagtacaggtcaattggagacgaaagctatagtagagaaatttttgaggaatacatcacatacttgaaggaaaaagctaaagagaaggaacgcaagcgtgaagaggaaaaggctaaaaaaaaaaaaaaaaaagaagagaaagagaaacggaaggagaaggagaaaaaagaaaaagatagagaacgtgaaaaagataagtctaaggaacgtcataggaaggatgaaacagatagtgataatcaagacatgactgatggccatggttacaaagaggagaagaaaaaagaaaaggataaggaaaggaaacatcggaaaaggcatcagagcagtatagatgatgtggattctgaaaaggaagagaaggaagaatct

SEQ ID NO: 1440 - DNA, 1246 bp, Glycine max
tcagctacgtaggccccccccccattagagttttgactatgtttgaaactttggattaattaatggtttctaatattatactctaagcaaagaaaatgtttgtttatgactaaatcattttctctgtcttcaattgcaggtctgcttcaactaaaagaccctctaaaattaatttcatttccaaaatccgcaatccaaggtgcaaagcctgtaatctctcagaacttgtggccacgcaaagcttcaaagaactcatcagatccattggtaaagcttgttcatgaactgcatagagatttggaattagtatatgttgggcaagtttgcctctcttgggaaatcctttgttggcaacacaagaaagcccttgagttacaacaatatgattcacaagggtctcatagtcataggtataaccatgttgctggtgagtttcaactttttcaagtcctagttcagagattcatagagaatgagccatttcaaggccctaggctacagaactatgtcaagaaccgttgcgtgattcgcaacttgctccaagttccaggcattaaagatgatagtaaagttgatgaggaggaggatgcaattgctagtggaaagttggcagatatcatcaaggaatcaatgcgggtgttctgggaatttgttcgagcagataaagattatgggaatgtgatctttaaagcttctcggcacaacagaattgatcttaaagaccctatgatttctggtcttatggtggacattaaaacacaactacagaaaaaggagagaaggctcaaggacatagtgagaaccgggaattgcatagtgaagaagttccaaaagcaccatgaggatgaacttgatcatgagcaattggttgctcgggtggggttgagattgatttcaagggtggtaaacatgtccaaattgagaaaagaacagctaatatggtgtaatgagaagttacaccgaatcaagtttttgagcaggaagattgttcaggtggaaccttccttcttgctttttccatgttgacaatttgttctcaattttagaggaagagaaatgctagaggaatagagatagggataccttttcacagaaaatgatatcctagcttacacagaaattgagacacacgccacagaattctcagtgtatatatataagttatatatataagcttgttgcttatacatcatggtaatataataaatggcaagcttggttagttcaagaaaaaaattttttttaa

SEQ ID NO: 1441 - DNA, 871 bp, Glycine max
ttcggcacgaagcatcccacaagtacacgcatacatgagataagccaattgtgataagccattcactcaggtgaaaagaaaaaaaaaacatatagtaacaaaaccatggtgattcacagactcgaattgtgcataaacatggttcaactcgccatagagttcgtcgtgagcgtcgcggaaacagtggtcatagttcagcagagaaccgtggagcctctcggaatgttgaatcgcgcaagtacacctcttcctttctatggctacctccgttgaatgttgaagagcatcgcttgattaattactttctagctttcttttcttctatgaaattccgcaatttttatagaccctgtgttttctttccttttgggtgcatcaagcgctgattgatgcaaacccacacgagttgctgttgtaaggaaaattgatgcccttgttttttttttctgggttttggctggacttcttgtattcgttgaatccagtttcgttttctgcttataatggatgattcaggttaaagatgtgttttttttttttctttttttatcagtaaaattcgaagacagagtttataatcacttacacatctgttaagctaattaagctagactcctgattttcttctactcatgtatattctttttctggcccttaattacatgtcaaatcttgagagggttcctttcatcatcatgtttatacaatttttttattagttggtttagtataatgaaaattaagatgtgtttttttttttttttttcctgagtgaatgaaatttgaaattttgcccaagaaaaaatcactttttcttttcctgttattttatcacccttttattttttttataaataaagtctcagtcttt

SEQ ID NO: 1442 - DNA, 614 bp, Glycine max
tttttttttttcaagctaaaacaaaaactaagcacgtttttgaatataaagaaatcaattatgtactagaaacaatgatctcacaataatactactcaaaccataaacgcaatatagatccagaaatcaacatatgtagtaataatctctacatagcaatatcaatatatatagagagagagggagggagagagagagagagagttatatactaatgctgctcaaatctccgcttctactaaaaatccacgcatgtaaacgagaaaatccatgagctacgttcagatccgcagagcagatccgaacgcaagagcggctccggcggcgagaacaccggcgacgaaggacggcgaaacggcggcggcgggagacgtagggctcggagctggagcttcggcggcggagatgacggcgacgagcaccgacattacggcggcgagaaacattgccttggagaaagccattggtgaatatggcagcaactgtttttggtttgttagggttttgagtttggttcggggcagtgagatttcgctttttggaagcccgtggcctcgcgcgccatagagttcgtcgtgagcgtcgcggaaacagtggtcatagttcagcagaga

SEQ ID NO: 1443 - DNA, 1018 bp, Glycine max
  misc_feature (35)..(35): n is a, c, g, or t
  misc_feature (40)..(40): n is a, c, g, or t
  misc_feature (45)..(45): n is a, c, g, or t
  misc_feature (48)..(48): n is a, c, g, or t
  misc_feature (55)..(55): n is a, c, g, or t
  misc_feature (61)..(61): n is a, c, g, or t
  misc_feature (84)..(84): n is a, c, g, or t
  misc_feature (97)..(97): n is a, c, g, or t
  misc_feature (106)..(106): n is a, c, g, or t
  misc_feature (111)..(111): n is a, c, g, or t
  misc_feature (962)..(962): n is a, c, g, or t
  misc_feature (981)..(981): n is a, c, g, or t
  misc_feature (987)..(987): n is a, c, g, or t
  misc_feature (993)..(993): n is a, c, g, or t
  misc_feature (1000)..(1001): n is a, c, g, or t
  misc_feature (1006)..(1017): n is a, c, g, or t
ttagggtttaggcccttgcccccaaaaattgattnggggnggttnagnagggccntccccngaaagcggtttttcccccttgangtgggtccagttntttaatagngattnttgttccaaatggaacacattcaccctctttcgcgtcttctgggtgagtgcccttaaattaagttctcagttaggcgaaggaagtatgactgctttaccaatagttgaaactcaatcgggagatgtttcagcttatattcctactaatgtaatttccattacagatggccaaatattcttatctgccgatctattcaatgctggaatcagacccgctattaatgtaggtatttccgtttccagagttggatcggcggctcaaattaaagccatgaaacaagtagctggtaaattaaaattggaattagcacaattcgcagaattagaagcttttgcccaattcgcttctgatctcgataaagctactcaaaatcaattagcaagaggtcaacgattgcgcgagttgcttaaacaatcccaatcagctcctcttaccgtggaagaacagataataactatttatactggaacgaatggttatcttgattcattagaaattggacaggtaaggaaatttcttgttgagttacgtgcttacttaaacacgaataaacctcaattcaaagaaatcatatcttctaccaagacattcactggggaagcagaagtccttttgaaggaagctattcaagaacagatggaactctttttactacaggaacaggtagaaaaaaattgattaatcatttaataactttataatttcactttcaaattcttataattagtatcttttaatatctttttatttcatttgaatataatattaatatataaataaaatgaattcgaatgaaaatagaaaaaaaaaaaaaaaaaactcgctcgtgccgaaaaaaggccgcccgggnatccactattctagagcgncgccgncccggnggtccannataannnnnnnnnnnnc

SEQ ID NO: 1444 - DNA, 2117 bp, Glycine max
ggcaccttcagctccggttaaaaaggctgaaaccttttggactatctgtaataggtgcaggacacattatgaatatctcagggtttatttgaatcacacccttttatgtccaaactgtaatgaagcttttgtcgctgtagagaggggtcctccgccacgtgggccccccccccccccttggtcttctcatcaacggcatcagaattctcaacaccatgctggaagtaataatacaaattttcagctggggttctcactctagaatggctggttttggtagcacagatggatcaacatctgttgcagctcaagctgcaagtgttgtgcagcaggcaagtgagaaagtaaggagggagggttcttttcacaaacctatgaaaaaaaggaagacagatgatattcgcattaatggttatcaaggatacatggcaaatcatatggctacaagagatggagcggctggtttgggcaccttctctgaaccaggaaaggttaacttggaaacagaaaggaattatggtttttcaggtcttcctggcaagcattacagcacaagagaattgtcaatgtttgaaatacgaaacatgttgatggataagtcgcgcattgaaattcgtaagaaacttcaagaatggaaatcaatggctgaagctaagattaacaaggataaagagaataagagacagaaaagcacatttaatggcaaaacaactggttcagagaagctgagagagactgctgttaatggtaacaggcatctggacattgattctttccctgtcagatctgatgatacagttaagaagagccaagcttacgttacaatcactgttccagaccctgattttcataattttgacttggatagagatgaaaattcctttgcggaggaccaggtctgggctgcttatgatgacgatgatggaatgcctcgttattatgctagaattcacaaggtgatctccatgaagccatttaaaatgcggatcagttggcttaactctcgaagcaacagtgaattgggcccaatagattgggtaaggttctggtttttataaaacttgtggggatttcagaactggcaagcatgaaataactgaatcattaaattcattctctcacaaggttaggtggacaaaaggcacaagaggtgttgttcgaatctttcctgggaagggggaggtctgggctctttacagaaactggtctcgtgattggaatgaacataccccagatgaagtgatacacaagtatgatatggtggaggttcttgaagatttcaatgaagaacaaggcatattagttaccccccttgttaaggttgctggttttaggactgtgtttcaaaggcacatggaccgtgatcgggagaggatgattcctaaagaggaaatgtttcaattctctcatcaggttccgaattacttgcttactggccaagaagctgataatgctccaaaggattgtcgagagttggatccagccgctactcctttagacctcctccagataataacagaagctaatgagacatcgaaaaatgctttggaagcctgatgaagaaatgaaggccggttcacctgctgtggactgggagagagaatgcttcaaaaccttgtagagcagaaatgttaaacgaggatagtaaacagataaagaatgatagatgacggtgcaaaggatgcaataggcttgagaaatcaaaatgaagataatgaaaaatacactctttcacgactctttcattttcttagcctggcaaagatattctatagtgcccttttggtgttataaatggatcgaagggatccacagcttttcggtttttgttgtataattttcagatatgttattcttagacccgtggcagttatcattcatcgttctgcaagcaagatgaatagacttatagttctggcatttcatgtcgtccatgcctggtgctttactcttccagtttatgggcgtgcatattctgccttgtgttataaactcatgagttataattacatccgattcatttgcttattgtagtgtcatacccaatgcaaggctgctattatttgtctaaagctgcgttattttttaattgtaactcacagattaagattactttc

SEQ ID NO: 1445 - DNA, 2119 bp, Glycine max
  misc_feature (2099)..(2099): n is a, c, g, or t
  misc_feature (2101)..(2101): n is a, c, g, or t
cggctgcgagaagacgacagatgggggactgaaagaaggagacaaaaatagaggaggaaaaattagaattgtaagcacacagtttccacctaactccaccgctcaattagttggttacaatatctgccaccaacctaaatgagtcgctcattgaaagctttcaacaggcaccttactcccctccctacttcatcaacgcacagcttcttcttcttctcatgccttcatagcttcctctcctctccctctttttccacatcttgtttcctaccccagcttctctttctctctgtttcgaccactctctttggtatcaaaatccggggaaatctcgggggagctcgaataggaattgtagccaaaccttctgctgaatttgttgctggaatacttgggatttggcttagtggaggtgttgctgttccgcttgcaaccagctatccagaagctgtcctcctgtatgtgattaataattcggatgtatctgcaatactgagtactgaggatcatactgaaataatgcaaagcgtagccaataaaagctcttctcagttttttcatcttccacctgttctcaacaagtcttctgagaaaagcagagataaacattcacagaatgggggaattcatacagataaaattttgttggataagtttggaagatcaagtgaagatccagcactgattttgtacactagtgggacaacgggtaaaccttcggctgcgttggccccccccaaaagcatcatttcccaggtacaaactttgacaaaagcttgggagtactcatctgctgaccagtttctgcattgtctaccactacatcatgttcatgggcttttcaatggtttaatggcccctctctatgcaggttccacggttgagtttttgccaaaatttagtgtgagaggagtttggcagagatggcgtgagtcatatccaaccgatggttctaaggctgaagaggctataactgtgttcactggagttccaactatctatgcccgattgatacaaggttatcatgcaatggatcctgagctacaagctgcttcagtatctgctgcaaagaacttgcgtcttatgatgtgtgggtcctctgcacttccactgcctgttatgcaagaatgggaagccatcactgggcatcgcttattggaacgatatggcatgactgaatttgttatggcattgtcgaatccattgaaaggtgagcgcaagcctggaaccgttggcaaaccatttcctggtatacaggtcaagattattgcagatgaagagagtgtgaatggaaatactggaatgggtgagctttgcattaaaagcccttcattgtttaaagaatattggaaacttcctgaggtaacgaaggaatcatttactgatgatggattctttaagactggagatgcagttactacagatgaagatggatatttcatcattctaggacgtactaatgctgatataatcaaggctggtggatataagctgtctgcattagaaattgaatcggttataatagagcatccagctgtctcagaatgttgcgttttaggcctaccagacaaagactatggagagattgttagtgcaatcgttgtgccagaggccgatgttaaacgaaaacaagatcaagaatcaaagcctgttctaagcctagaagaattatccaactgggccaaagacaaaattgcaccttacaagattccaactcagctaatcgtgtgggataaactccctcgcaatgccatggggaaggtaaataaaaaagagctgaagaagctgcttgtttcagaacagtgaacaccatttgatcatttattcatattcactaggcaaagttaatttattgaaaccagtttaagatggtggcaatctcaaataaaattgcaccaattattgagtgaaatagaaacctttatattatgacatttataagttgaataagttttagcatattattagggggaagataaaggagaaagtatagcataattttagcattttagctgtatgaaggcgattgattgaatgtgtttaataagaagtatttattgtattgaaaatgaaaaaatatttaataattacgtccgttngntaattaaaaatatttaat

SEQ ID NO: 1446 - DNA, 1118 bp, Glycine max
tagaaccactacatggtaagggataaggtgggcacttgaccttgtaagacttttctttttaccttttgtatctagaccaaccttctttcatcctgaacatggctgctttctttggttccccaccaattttctccctcccccctactattattagaactcatcacatttcttcatcatcacaaactccaccaccaacaccttcaccacaatctcagcctccaacttcgtctccacagcagctaagaacaacaaatttgaatgaggaatcagtgcaagtgtccactgaagctaagcaacagaagcccatcaaaccagtcacttcatccactaaggttggatccacggattggatagccacttccttgaccagaaggtttgggataggagctggtcttgcatgggttggctttcttgcatttggtgtcatctcagaacaaatcaagactcgccttgagctgtctcagcaagaggcaaatacaaggaacgttgagaaggtggaagaggtggtgcttcctaatggcataaggtactatgagttgaaacttggtggtggcgcttcaccaaggccgggagatttggttgtgattgatatcatgggaaaaattgaaagtagtgaagtgtttgtagacacatttgagggggacaagaaaccattggctctagtgatggggtcaaggccatatagtaagggagtctgtgaaggtatagaatatgcacttaaaactatgaaggctggaggcaagaggaaggtaatagtccctcctaaattggggtttggagagaatggtgctgacttaggcactggtgtgcaaattcctccacttgcaacacttgaatacattctagaggttgaaaaagtctccattgcacccgcttaatccaatcatgcagggtgctcagcttctatcatctaatataatatcattcatttaattattttctcattcttttcgatgggattgaaagatagtaatatacatttaaactgtcaataattttgtcaggctgacctttaaaggccatgatggggctttgtttaacttctaatttcaaatttagtgcctacaaatacaataacacgtgcagtcctcaactttatacattttatttttctgggt

SEQ ID NO: 1447 - DNA, 1110 bp, Glycine max
ccacgccgtccgaaaagggaaataggaaaaaagggaaattttcagcagattactaaaatcgaccaaaacaaaactttgtgcgttttcgttctattcgttcatattcctcagtgcaacacatccaacagcaagacgcaaactagtaacagagagaaagcatttcaaagaagaaacaaaacgatgtcgtttatgcgaggggattttctttctcgaacgaggaagctcgtgaagggtttggccaaggcgcaacccgcgtggctcaaagccatggaacaggcaccacctgcaacgtttcctcggtctgccgggaaaattccgaccattactcttcccgaggatgtttatgtgaagaagttttataagaaatatccggaatccaaatcccatgacgccataaagtttcatgcttttgatccccctccgtctcgtgtatttgccttgagggttcttgaattgaaggagcagggcattagtgaggagcaagctatggctatagctgatatggaatatctgacagagaagaagacaaagaagaaagcatatacccgtttgaaggaaattgcacgtcttcaagggaagagacttcctcaaaatccatatcctagtgccatcaaggagatacaagctgaggagaggaaatatgttcgtgatcgtttcttcaatcccaagatgcttgaaattgtggagaaacagaaagccgaggcagcagcggagagattgagtcgaggtggtgattggtgacttttacgggggctaagttacaatacattgagtgtttagctcttgaaaaattggctctgacaataatatttaccattcagccactgaaaagtgcgttcttcttccctgatattaggtgaaatatttatttgttgtattagatggctgcaataaaaaaatttaccaaaatttcatgcgcggatcatttcttccaggctacccaagttttgttagtagctaacacatgccttgaggagatcttgtgttaagctctctcttttgttgtcaatttgatcattaaccagtttttcatggagtttctttgcgcatgccatcaaaaaaaaaaaaaaaaaaaaaaaaaaaaaaaaaaaaaaaaaaaaaaaaaaaaaa

SEQ ID NO: 1448 - DNA, 2018 bp, Glycine max
gtaacagacgaagccttcgcagagctattaaagtgtgagcggttagaagttgaagccatggaggctataaggaaggtcaatttgtttgaatctgcccatgtgcgtgaagtaaagctcagaaaagaggctgaggatgcactgacagatacagtacaagaacaacaaaagctcttgaatgcgagtgaagaaattgctggcgagctacaaatgaccatgagaaatattgccctgctagatagtcgtgctcaggaagcacaccgtaggtgcgatgaagctgcagatgaactatcactaattcaagaatccatctcaaccctgtggcaagaaaggcagcaaatcaggagacagaaaatggaagccttacgttggcttgagcgttggagaagtcgtgggaaagttggagcagctcattgcaatggggtcattgggtttgctgaagaattacctgagttagcagaattttcattatcagatcttcaaaatgccacatgtaatttttccaatagctttataattgagcaaggtggatacgtttgtatatacaagggagaaatgttgggtaggactgttgctataaaaaagttccatcaacataacatgcaaggaccattggagtttcgtcaagaggttcaagttcttggtagtctccagcaccctcatttaatcactttgcttggtgtttgccctgaagcctggtcaattgtatatgagtacctccccaatggaactcttcaagactacctattccgaaaaagcaacaattcccctttgacatggaatacccgagcacgaatgattgctgaaatcgctagtgctctctgcttcctacattcttttaagcctgaaactattatccatggtgatctgaagccagaaactgtactacttgattcttcactgggttgcaagatgtgtggatttgggctctgcaggctggtgagcgaggagtctctcctccgtcctagtttccgcttgagcactgaaccaaaaggtgctttcacatatacagatccagagtttcagagaactggaatactaaccaccaagtctgacatctactccttcgggctcatcattttacaacttctcactggtaggactccagttggattagcagttttagtacgcaatgcagtttcatgtggaaagttgtcttcaattcttgattcttcagctggagaatggccctcagctgtggcaatgcaattggttgaactgggactgcaatgctgtcaacaataccatagagacagaccagagttaacacctacacttgtgagagaattggagcagttgcatgcttcagaagagcgacctgtaccatcttttttctcatgtccaatccttcaggaaataatgcatgatcctcaagttgcggcagacggatttacctatgaaggagatgccatacgtgaatggttggaaaatggacatgatacttctcccatgactaatttgaaattaagtcacctgtttcttactcccaattacgcacttcgacttgccatccaagactggctttgcaaatcttgaagcttcttctatttatctgggctaaagttctcttttttatcctcattagtttggggccagtttcgtttcagtcccatgattttcttttcttgtttcagtttgtgtgtgtggttgtaaatttattttgtatcccacaaaacattttcaaattgatttgatcccagcttacgccattcaagtagacagaaggaaaaaagaactgtattttggccacaatttccagccaagagaaaaaagaaaaagaagggaaagtaatagaccgtcatcgtctgtgcacccgtcatgattaagactttaatatgttatgggattaaactgattcttgtctcatatttgagggggcaaaagaaacaacttagcctttttatttatgtaaatatttgtatattttattattctcattgcgttttggtaatgttcttcagcttcaccactgtttagctacaaatgatataagactgttgttttgctgttgcgctttaaaa

SEQ ID NO: 1449 - DNA, 1112 bp, Glycine max
  misc_feature (16)..(20): n is a, c, g, or t
  misc_feature (23)..(23): n is a, c, g, or t
  misc_feature (35)..(36): n is a, c, g, or t
  misc_feature (44)..(52): n is a, c, g, or t
  misc_feature (55)..(56): n is a, c, g, or t
  misc_feature (66)..(66): n is a, c, g, or t
  misc_feature (850)..(854): n is a, c, g, or t
gattgcaatgctgtcnnnnntancgaagagacagnncagagttnnnnnnnnnacnngtgagagaantggagcagttgcatgcttcagaagagcgacctgtgcctcctgttttctcgggtctccttcttctggaaataatgcatgatcctcaagttgcggcagacggatttacctatgaaggagatgccatacgtgaatggttggaaaatgggcatgatacttctcccatgactaatttgaaattgagtcacctgtttcttactcccaatcacgcacttcgacttgccatccaagactggctttgcaaaccttgaagcttcttttatttatttggcttggactgaagtgctcttttttatcctcattaggccagtttcgttttagtcccattctttacttttcttttcttgcgtgtgtggttgtaacttgtaaaattattttgtatcccacaaaacattgtcaatttgatttgatcccatcttactccattcgagttgacaagaaaaaaaatattgtattttggccacaatttccagccaagagaagaaggagagcggaaagtaatagacggtcatcgtctgtgcacccgtcatgatttgacttcaatatgttatgggattaaactgattcttgtctcatatttgagggggcaaaagaaacaatttagcctttttatttatgtaaatattctattttcccattgcgtttctttagagttcttcagcttcccccttaagcgataaatgatataagactggtgttttgctgttgcgctttactgaatcgctttagatgctataaaaattgactgcttgtatattcagaatttccactggaattgcgtcctatnnnnntcacgtcaccaagcccatatgatgcagaaattacttcttgttgcttctagtagatatgatgtgcgttgtggaattagttccaaacacccgctaagataattgtagacttgcttgcttctaatctcgtaatatatattagaaatctgagcaaattgtttggatttatgttctataaactacttaaatctatagctcataataataaatacgctgtcattgcccaaaatatgccatggttagctaggtcaagtaaaactt

SEQ ID NO: 1450 - DNA, 1865 bp, Glycine max
cccgggtcgacccacgcgtccggcgacctctctttataatagattttctgccatcccaccaaaccaagaagaaacgcaagaatctgttttaggattggaagatgaggctttgattgatttcgtagatcaaggaggaaagtggaatgggttgtttttcgtgcttcgattcgcgggaggacgagaagctgaatcccaatcctcagcaggaaaaccaccagcatgaacatgaacatgaacatgatcttaagccccctgttccttctcgtatatccagattgccgccctctgcctctgcctctgcctctgcctctgcagtaggagcagacaagctacgctcaacaacaagtaatggtaatggagagtccactgctgttcaaattgcggctcaaacattcagtttccgtgagcttgcagccgcaacgaaaaacttcaggccccaatcctttttgggtgaaggtggttttggaagggtctacaagggccgcctggaaaccaccggtcaggttgtggctgttaaacagttagacagaaacggtcttcagggtaatcgggaattcctcgtcgaggttctcatgctcagtcttctacaccaccctaatcttgtcaatctcattggatactgtgccgatggggaccaacgcctcttagtttatgaatttatgccttttggatctttggaggaccaccttcatgatcttcccccggacaaggaaccattagattggaacaccaggatgaaaatagctgctggggcagcaaaaggattggaataccttcacgacaaagcaaaccctcctgtcatttatagagacttcaaatcatctaatatattacttgatgaaggttatcatccaaagctttcagactttggtcttgcaaagcttggtccagttggtgacaaatcacacgtttcaacccgtgtcatgggaacttatggttactgtgccccagaatatgctatgactggacagctgactgtgaagtctgatgtatatagttttggggtagtcttcttggagctgattactggccgtaaagccattgacagcactcgaccccatggagaacaaaaccttgtcacatgggcacgtccactgttcagtgaccgcaggaagtttccaaagttagcagatccacagctgcagggacggtatcccatgcggggtctttaccaagctctagctgtggcatcaatgtgcattcaagaacaggctgcagcacgtccactcattggggatgtggtgacagccctttcttttctggccaaccaggcatatgaccataggggagctggtgatgataaaaagaacagggatgataaaggtggaagaatattgaaaaatgatgtaggtggaggatctggacgcagatgggatttggaaggatctgagaaagatgactccccacgtgaaactgcaaggatgttaaacaacagggatcttgatagagaacgtgccgtggctgaagccaagatatggggagagaattggagagaaaaaagacgacaaagtgcgcagggcagttttgatggttctaacgcttagtctcgattgtacaattcccatacgcgtcttctgtatctcagctgtgccccaggtggagctttttgggagctcatctttcataaagctggtgtaggacaagtctgaaaggccgttttggccatttactaggttctgttttgtttagaatttgtcttgtggccatttcttgcagtggctgcaaccaaacataatgaaccgggtaccaaaatcttttctacatcagccttttatgcgcttagatttcttttaaaaattttcatttacagagtgtacacaagcatattggagttggagagtgtacattatttgctagaactagga

SEQ ID NO: 1451 - DNA, 746 bp, Glycine max
gttgggcttgggcatttttttggttctggattgttctgtgaagttccattcctttctctccctttcttctctctctttcgctttcaccgcaacacaaccctcgttgttccgtgttcaggtgaaacgacaccgttttacccttcctcttctcggcacagcatctagcaggttgtagaaaatatggccaagcatcatcctgatttgattatgtgccggaagcagccagggattgccattggacgactgtgcgagaaatgtgacggcaagtgtgtgatctgtgactcttatgtgcgtccttgtacgcttgtccgagtttgtgatgaatgcaactatggatcatttcagggtcgatgtgtcatatgcggaggagttggaatatctgatgcctactactgcaaggaatgcacacagcaggagaaagatagagatggttgccccaaaattgttaatttagggagtgccaaaactgatttattttatgaacgcaaaaagtatggttttaagaagagatgatgaaggtagattactgaggcatgcgtatttctctaaaactttttgtatgtgtattgttcggatataagaaccggatgtgaaaccttgagcttgtaaacttttttatggtacaattatgaatcatgatataataaatgcttgactagtttgctactggtaaaaaaaaaaaaaaaattctcgtgtcttgttctctctctctctctattaattttatttattttaattataattta

SEQ ID NO: 1452 - DNA, 592 bp, Glycine max
  misc_feature (586)..(592): n is a, c, g, or t
ttttttggttctggattgttctgtgaagttccattcctttctctccctttcttctctctctttcgctttcaccgcaacacaaccctcgttgttccgtgttcaggtgaaacgacaccgttttacccttcctcttctcggcacagcatctagcaggttgtagaaaatatggccaagcatcatcctgatttgattatgtgccggaagcagccagggattgccattggacgactgtgcgagaaatgtgacggcaaggtcgatgtgtcatatgcggaggagttggaatatctgatgcctactactgcaaggaatgcacacagcaggagaaagatagagatggttgccccaaaattgttaatttagggagtgccaaaactgatttattttatgaacgcaaaaagtatggttttaagaagagatgatgaaggtagattactgaggcatgcgtatttctctaaaactttttgtatgtgtattgttcggatataagaaccggatgtgaaaccttgagcttgtaaacttttttatggtacaattatgaatcatgatataataaatgcttgactagtttgctactggtaaaaaaaannnnnnn

SEQ ID NO: 1453 - DNA, 596 bp, Glycine max
acgtaacagagtcgtaaaaagaaaaacctcaaaaaaaggagaaggtagagtatggctgtgaatggtgcgagcgtgatgctgcggtgcagcgtggctgcgaggttgttcatgacggcggacagggtggcgccggcggtgcctcaggtgtgtgggcgcggggacaagaagacgaagaaaggaaagaggttcaagggatcgtacggtaacgctaggccgaagaaagagaagatgatagagcgcatcaaggacaaggtcgaagttcccaggtccactccttggcctctccctttcaagctcatctgattccctattctattctaggctttccgctcactcatatcacatatctactctctcgttaccattttctattcaattcgattttcacttttatgctctctctttggttttatcatcaaaacaaatagtaggattttgcaattataaagttcccataaactatatgtttattcaaaagcttgttagtttgtaatagataaacaattggttgagttggtaaattactgtgtacttgtaaaaaatcctttaaattgatccttggagagtgacacttgttgctgtgatttaaaaaaaaa

SEQ ID NO: 1454 - DNA, 1696 bp, Glycine max
  misc_feature (54)..(54): n is a, c, g, or t
  misc_feature (1451)..(1451): n is a, c, g, or t
  misc_feature (1453)..(1453): n is a, c, g, or t
  misc_feature (1455)..(1455): n is a, c, g, or t
  misc_feature (1461)..(1461): n is a, c, g, or t
  misc_feature (1463)..(1464): n is a, c, g, or t
  misc_feature (1467)..(1467): n is a, c, g, or t
gaatcttgagatccaacaggctgaacgcgagtcagctcacgtaggccccccccnatgatcttaatcgtgctgctgaattaaagtatggcagtcttaactccttgcaacggcaacttgaaagtgcagagaaggagttagacgaatatatgaactctgggaagtctatgctgagagaggaagttacgggaaatgatattgctgaaattgtaagcaagtggactggtatccctgtttcaaaacttcaacaatcagagagggagaagttgttgtatttagaggaagtgcttcataagcgtgttgttggccaagaccctgtagttaaggcagttgctgaggctatccaacgttcaagagcaggtctttcggatcctcatcgtccaattgccagcttcatgtttatgggacctacaggtgtaggaaagacagagctggctaaggcacttgcagcctacttgttcaacactgaagaagctcttgtacggattgatatgagtgagtacatggaaaaacatgctgtttcaagattgattggggctccacctggatatgttgggtacgaagaaggagggcaacttactgagatagttcgccgcagaccatatgctgttattttgtttgatgagattgagaaggcgcacgccgatgtcttcaatgtattccttcaaattttggatgatggaagagtaaccgactcacagggtcgcacagtaagttttaccaacactgttatcattatgacctcaaatgttggatcacagtacatcttgaacacagatgatgacaccacgccgaaagagttggcttatgaaaccataaaacaacgtgtaatggatgctgcaagatccatcttccgccctgagtttatgaatagagttgacgaatatattgttttccagcctctagaccgtgaacaaataagtagcattgtcagattacagttggagcgcgtgcagaagagaattgcagatcgcaagatgaaaatccaagtgacggatgctgctgttcaacttcttggaagtttggggtatgaccccaactatggtgctaggccagtcaagcgagtgattcagcagaatgtggagaatgaactcgccaagggtattctcagaggagaatttaaggaagaagatgcaattataatagacacagaactcacagcatttaccaacggccaacttccccagcaaaagcttgtttttaagaaacttgcagctgattcagaatctacccctcaagacaccttggaacccttcccacaggctccatgaattccttctactgccccataactttccatcatacaaattttagtatacagtttccttacaccaattgaacaatgatcccggcgcagtttgcatctaatatatattttctattaccaatacgaataacatgtgtcactcaaaaatagtgtaaatatatatatttttaccgctgttgaaaaaaanancnacaccncnnccncctccaccctcacactacctctctcctctctctctcctctctctttctccttcttccactataataaaaaaaaaaaaagggggcgttttagggatccagctctctcccggcgctcgaagtatacttctttaatggcacataattaattcttggcggcgtttaaccgtggcatggaaacacttggtaccaaattattgtctggcacactccttttccagttggttataca

SEQ ID NO: 1455 - DNA, 1546 bp, Glycine max
tcgagtcactacgtagtgccccccccccgatgctctctctcttcctcaccacacccacaaatataacaagagatgatgatgatgatgttgtcgtcgtcatatgttacatgttccaattacctcggtggcaatcagtgaacaacgccaaatcttaaacttgttcttttgtttctcttttgtactactagttctgaacatggagctgttgtctctgagactcaccccttcaccttctgcttcgacttcatcgcttcctgcagcacttgctcactgctccaagctatgtgagtttcaaccgcggaagaagaagaaggtgtgtttcgacgcgcctaggcttgcggtgcggtgtgtgaaagcctcggcgcagcgaaccggtgatactatcgacgatggagagactcggactgggttcaccacacctgccatggaagtcaccacattcaatcgaaccactttcaccgatgctgctgactttcccgtttgggaaaagattggtgctgtcgtcagactcagttatggcctcgggatttatggtgccatggcagttgcggggagttttatatgttcaatcacgggaattgactctctggggggtttccatctatcgttagatgccattttggaagggcttggatatgcagctcctccaattatggcccttttgtttatactcgatgatgaagttgtgaagctatcgccccatgcccgtgctatcagagatgtagaggatgaagaactgtggagctttttctatgggatgtctccttggcagtttatactgatggttgctgcaagttcagttggagaggaactcttttacagggctgctgttcagggggcattggctgatatatttttacgaggcagtaatcttataacagatgttcagggaatggcatcattgaccggtgtgctgcctccatttgttccatttgctcaggcatttgcagctgtacttactgctgtccttactggttctctctattacatggctgcctctcctaaagatcctacttatgttgttgcacctgttttacaatctcgctctggtcgccaagatttgaaaaagctatttgaagcctggtatgagaaacggcaaatgaaaaaaatctattccccacttctggaaggactgctggcactatacctaggttgcgagtggatccaaactgataatattcttgctcccattatcacacacggaatatactccactgtgatattgggacatggcctttggaagataaatgaccaccggcgtagactacgtcaaagaatccaacagcttaagtcagaagaaaaaaactccaactagattttgaaatatcctccacgactgattttggttaaaaaaaaaagtgtatattagtgttgttgttgtataaaaagaatatatgtatactcatgttagttttggtctcatacatacagaatatgcaggttttgattgcagaaatttcgaaataagagttgtaactcttttttcccttaataaaatggtataatccaaaagtggattatttggtcgaaaaaaaaaaaaaaaaaa

SEQ ID NO: 1456 - DNA, 1124 bp, Glycine max
cacagactccaatcataagagattatgattatgttgtcatatgtttcatattccaattgcctcggtggcaatcaatgaacaacgccaattctgaaacttcttctccttcttcttcttcttttgtttctcttgtgtacttctacttcttctgaacatggaactgttgtctctgagactcaccccttcaccttcgagttcgacttcatcgcttcctgcagcacttgctcactgctccaagctatgtgaatttcagccgaggaagaagaagaaggcgtgcttcgacgcgcctaggcttgcggtgcggtgtgtgaaggcctcggcggagcgaaccggtgatacgatcgatgatggggaggctcgtagcgggttcaccacacctgccatggaagtcaccacattcaatcgaagcactttcagcgatgctgctgactttcccgtttgggaaaagattggtgctgtcgtcagactcagttatggtatcgggatttatggtgccatggctgttgcggggagttttatatgttcaatcacgggaattgactctctgggtggtttccatctatcgttagatgccattttggaagggcttggatatgcagctcctccaattatggcacttttgtttatactcgatgatgaagttgtgaagctatcaccccatgcccgtgccatcagagatgtagaggatgaagaactgtggagctttttctatgggatgtccccttggcagtttatactgatggttgcagcaagttcagttggagaggagctcttctacagcgctgctgttcacggggcattggctgatatatctttacgaggcagtaatcttataacagatgttcaaggaatggcatcatttgaccggtgtgctgcctccatttggtccatttgctcaagcatttgcggctgttcttacagctgtccttactggttctctctattacatggctgcctctcctcaagatcctacttatgttgttgcacctgtgttacaatctcgctctggtcgccaagatctgatacagctatttgaagcctgctatgaaaaacggcagatgagaacaatctattgctcacttctggaaggactgctgtcactatacctaggtgccgagtggatt

SEQ ID NO: 1457 - DNA, 3957 bp, Glycine max
ttttttttttttttttttaccctcagcagaatcatagccacgcattaattcatgaaatacagctgttaaagtttgtccttgttgggaacactcaacagttattggttgactcaatcttaattaaagccatccttcataaaattgcctatcactgatttgatcagttcatgaaccctgcacttcacttcaaatcactcaatttcattcatccactcaactccctttcctaccatggcactagaattggttggtggtgctcttctttctgctttccttcaggttgcgtttgagaagcttgcttctcctcaagttcgggacttctttcgtggaagaaagcttgatgaaaagctgctcaacaacttggaaatcaagctgaactccatacaggctctggctgatgatgcagaactaaagcagttcagagatccacgtgtcaggaactggcttcttaaggtcaaagatgctgtgtttgacgcagaggatctcttggatgaaatacaacatgagatctccaaatgccaggtcgaagctgaagcagaagctgagtctcaaacctgcacttgcaaggtaccaaatttcttcaaatcttctcctgttggttccatttaacataggaaattaaatcaaggatggaacaaatccttgatcctacggagcagacctttctctcaagccaaaaggatgatctaggcttgaaaaatgctagtggtgttggggttggatcagaattgggttgtgcagtaccacagatatcacaatcaacatcttcagttgttgaaagtgatatttatggcagagatgaagacaaaaaaatgatttttgattggctgacatctgacaacggcaatcctaaccagccatcgatactttctattgtgggcatgggtgggatgggtaagaccacacttgctcaacatgtattcaatgaccctaggatcgaggaggctagatttgatgtcaaagcttgggtctgtgtttcagatgattttgatgctttcagggtaacaagaacaattcttgaggccatcactaaatcgactgatgatagtagagacctagagatggttcacggaagattgaaagaaaaattgacggggaagagatttcttcttgttttggatgacgtttggaacgaaaaccgacttaaatgggaagctgtgctaaaacatcttggttttgcggctcaggggagtagaattattgccaccacacgtagtaaggaagttgcttctaccatgaggtcaaaagaacacctcctggagcaattacaagaagatcattgctggaagttgtttgctaaacatgcattccaagatgataatattcaaccaaatccagattgcaaggagattggtatgaagatagttgaaaaatgtaaaggacttcctctggccttgaaaacaatgggaagtctattacacaacaagtcatctgttacggaatggaaaagcatattgcagagcgagatatgggaattttcaacagagcgtagtgatattgtacctgctttagcactaagctatcaccatcttccttctcatctcaagagatgttttgcttattgtgccttattccccaaagattatgagtttgataaggagtgcttaatacaattgtggatggctgaaaaatttctacaatgttctcaacagggtaagagtccaggagaagttggtgaacaatacttcaatgatctattatcaaggtgcttctttcaacaatcaagcaacacagagagaacagattttgtcatgcatgaccttctcaacgatttggcaagatttatttgtggggacatttgtttcagattggatgggaatcaaacaaaaggtacaccaaaagcaacccgtcattttttaattgacgttaaatgttttgatgggtttggaactctatgtgacacaaaaaagttacgtacttatatgccaacaagttacaaatattgggattgcgagatgtcaatacacgaattgttctccaagtttaattacttacgtgtcttatctctgtttgattgtcatgacctaagagaggtgcctgactctgtgggtaatctcaaatatctccgttcgttagacttatccaatactaaaatagaaaaactacctgaatcaatatgttcactctacaacttgcaaatactgaagctaaatggttgtagacatttgaaggagctgccctcaaatttgcataaactcactgatttgcatcggcttgaattaatagaaactggagtgagaaaggtaccagcacatttgggaaaactggagtatcttcaagtattaatgagttcgtttaatgttggcaaaagtagggagttcagtatccagcagttaggagaactcaatcttcatggaagtctatcaataaggcaactgcagaatgttgagaatccatcagatgcattagcggtggatttaaaaaataaaacacaccttgtcgaggtagagttagaatgggattcagactggaaccctgatgattcaacaaaagaaagggatgtaatcgagaatctacagccttccaaacacttggagaagttgaggatgaggaactatgggggtactcaatttccaaggtggttattcaacaattcatcatgtagtgtggtgtccttaaccttgaagaactgtaaatattgcctatgtttgcctccccttggacttttgccatctctgaaggaactttcaattaaagggcttgatgggatcgtgagtatcaatgctgattttttcgggagtagctcttgttcatttacatccttgaaatctttggagttctaccatatgaaggaatgggaagaatgggaatgtaaaggtgtgacaggtgcttttccacgtcttcaacgtctttctatagagcgttgtcccaagctgaaagggcacttgccagagcaactatgtcatttaaattctctaaagatttctgggtgtgaacaacttgtaccttctgctctcagtgcccctgatattcataaattatacctaggagactgtggagagctgcaaattgatcatgggacaactttgaaagagcttaccattgaaggtcacaacgtggaggcagccttattcgaagagattgggcgcaattactcttgttcaaataacaatattcccatgcacagttgctatgatttccttgtaagcttgcgcatcaaaggtggctgcgactctttaacgacctttccgctagatatgttcacaatactcagggaactttgtatctggaagtgtcctaatctacggaggatttcacaagggcaggctcataatcatctccagactctggatatcaaagagtgcccccaattagaatcattgcctgaaggaatgcatgtcctccttccatctcttgattctctgtgcatagatgattgtccaaaagttgaaatgtttcccgaaggaggtttgccatcaaatttaaaagaaatgggtctctttggtggtagttacaaacttatctccttattgaaaagtgccttgggaggcaatcactctctagaacggttagttattggaaaagtggattttgagtgtcttcctgaggaaggtgtactgccacactctcttgtttctctacagatcaatagctgtggagatcttaaaagactggactacaaaggtatctgccacctctcctctctcaaggaattgagtcttgaagactgccccaggctccaatgcttaccagaggagggtctgcccaaatccatttcaactttgtggatttggggggactgtcagttgctcaaagaacgttgccgggaacccgaaggcgaagactggccaaagattgctcacttttgcccgttgctcaatcaacgttgccgggaacccggaggcgaagactggccaaagattgctgacattgaaaacgtgtatataaggtagtgaggttgattataaagaataatggtgaaagatgtagatgcttctctattgcctgcaatttact

SEQ ID NO: 1458 - DNA, 878 bp, Glycine max
cccacgcgtccgcccacgcgtccgcccacgcgtccgtacggctgcgagaagacgacagaagggtacggctgcgagaagacgacagtaggggaccgatattagggtttcggagtcgttgcagagctgcgcgttgatctagaaaaatggcgaggataaaggtgtacgagttgaggaataagacgaaggcggagctactgaaccagctcaaggatctcaaggcggagctagccctgctccgcgtcgccaaggttaccggcggcgccccaaacaagctctccaaaattaaggtggtgaggctatcgatagcgcaggttttgacggttatttcccagaagcagaaagcggcgctgagagaggcttacaagaagaagaagtatttgccccttgacctccgtcccaagaagacccgcgccattcgcagacgccttaccaaacaccaggtgtctttgaagacggaacgtgagaagaagaaggagctgtactttccactaagaaagtatgcgatcaaagtttaggttagaattggtttcaagttgcattttttaggacagttacttgtattgaaattttaaggttttgatgcctgccgctggggcagcattccaattattagtaccagagttgtttcaatgcttgcattaagtttccaaggtctatatgttaaaaactagagttgtttcgagaaactattgttgctttcggcctttaactttatagcgattacctgttgaatgatcaatggccgtaacctttatgagttgtgatttatgcacatctcaacagtggatacccaaatcgacactcttcatttctctcgtttttgttaaattatattaccctatcaaaattattactattcttcttcaaaaaaggcccct

SEQ ID NO: 1459 - DNA, 2709 bp, Glycine max
ctccaccttggctccttctgcaaaaactaacgcacacacatcacagtttctttcgcaccactagcacttcattgagttcatttcacagttcctattcgtaccaaatgacaaccaccaatacgagtttctctctctagaaccaccgaagcgaagaagaagagagaagagaatcacggtttcgccatggacgcggcatcgcagctcgtctcctgcggaatcgatcccttccatcgcgcctcctctccttccccgcgccaccgccgccacagcaacctcctcctcctacgccgtcgctccagccgtgtcttcgccgtctccgccgagccgaaacccgccgtcaacggagcaaactcgaggccgcctccgaccagagccgtcaatggcggcgtctccacgagaattggagatgtttcgaaggagattaagagagtgagggcgcaaatggaagaggatgaacagttagcgacgctcatgaggggtcttcgaggccagaatttgagggactcgctcttcgctgaggacgatgttgaacttcgtcttgttgaggtagacgagagtagtgagtttttgccattggtgtatgatcctgccagcatttctgcatattggggaaaacgtccacgcgcggttgcaacgcgcattgtgcagttgctatcagttgcaggaggttttctttctcgcattgccggggatgtgattaacaagaaggttaaagagaatgaagttgctagggccattgagttacgtgaaattgtgacatctttgggtccagcgtacataaaactcgggcaagcattgagcattcgacctgatatactgtcacccgtagcaatgacggagctgcagaagctatgtgataaagttccttcatttgcagatgatgtggctatggctctaattgaggaggagcttggtcagccatggcaaaacatctattctgaactatcatcttctcccattgcagctgccttctcccattgcagctgcatctcttggacaggtatacaagggtcgcctaatggaaaatggggatttggtagctgttaaagtgcaaagacctttcgttcttgagacagttacaattgatttatttattattaggaacctgggtttggctcttcgaaagtttcctcaggtctccattgatgtggttgggttggttgatgagtgggctgctcgattttttgaggagttagactatgtgaatgaaggtgaaaatggaaaccgttttgcagaaatgatgaggaaagacctaccacaggttgtcataccaagaacctaccataaatatacatcaaggagggttcttacgacagaatggattgatggagagaagctgtcacagagcacagaaagtgatgttggagaactggttaatgttggagtcatctgctatctaaaacagcttctagatactggattttttcatgctgatccacacccgggaaatttgatccgcactcctgatggaaaacttgccatacttgactttgggcttgttacaaaactgactgatgatcaaaagtatggaatgatcgaagcaattgctcatctcatccatcgggattatccagccatagtaaaagactttgttaaacttggttttattcccgatggagtcaatttggagcctatcttaccagttcttgccaaggtttttgatcaggccttagaaggtggaggggcaaaaaacatcaattttcaggagctggcatcagatttagctcaaattacctttgattatccttttaggatacccccatactttgcccttataattagagctattggggttctggaagggatagctttagtaggaaattctgaatttgccattgttgacgaggcttatccttatattgcacagaggctcctcacagatgaatctcctcggctaagggatgctctgcgttacactatatatgggaaatctggggtttttgatgctgaaagatttattgatgtcatgcaagcctttgagaattttattactgctgccaaaagtggcggtggagagaacatgaatgggaatatggctgaacttgggattctttctactagtcagtcagaatatttgttgccaggattccaatctgtcattcctctatcacagcagccagtgcaaacaagggcagctttagcgtttttgttgtctgacagggggaattttttccgagaatttcttttggacgagatcgtcaagggcatcgatgcagtaacaagggaacaactggtgagagtaatgtccttgctaggagttcagaatgtaacccctgttttcagcatggtacctacagtgggaccctttaagcctgcggctcttatacccaccataactgaagaggatgaagttatattgaacaatgtccagatggtggtggagttcttgactgctggaagttccctatcaagaacatctggtcaggcactgaatattcctcagattatccaagagcttctcccagtgttaccaggcatctctgttaaagtgcttccggaggttgttagcagattatcttctcgggttttagcacgattaattcgtgatacatttttgtaagagaattctgtctaccttactgcacacaattgtgtatattttgacagttgttcaaaaattgtatatatgaccattattttacatattttcatgttgcagaaaattcttaattacatattttacatattttcaaaaactcactttacctc

SEQ ID NO: 1460 - DNA, 1513 bp, Glycine max
acgggcccccccccgaagttaagtaggtaggcccccccccccgcggatgcatagcaattcccaattcctaattgtttaaacctaattctcatttcttcatcgttcgattcttctcctcctaaagatgcagatcttcgtgaaaactttgaccggtaagaccatcacccttgaggtggagtcctccgacaccatcgataacgtgaaagctaagattcaagacaaggaagggatcccacctgaccagcagagacttatctttgcgggtaaacagcttgaggatggtcgaacccttgccgactacaacatccaaaaggaatccactctccacctcgtgcttcgcctcaggggtggcatgcaaatctttgtcaagactttgactggcaagaccatcaccctcgaggtcgaatcctcggacaccattgataatgtcaaggccaagatccaggacaaggagggtatccctccagatcagcagaggttgatatttgctggtaaacaacttgaggatggaagaacccttgctgattacaatattcagaaggagtctaccttacacttggttcttcgtttaagaggtggcatgcagattttcgtcaagactttgacgggaaagaccatcaccttggaggtggagagttcagataccatagacaatgtgaaagccaagattcaagataaggagggtatccccccagaccagcagaggcttatctttgctggtaaacagcttgaagatggacgaacccttgcagattataacatccagaaggaatctaccctgcacttggttttgaggcttcgtggtggcatgcaaatctttgttaagactttgaccggaaaaacaataactttagaagttgaaagttctgataccatcgataacgtgaaggcaaagatacaggacaaagaggggattccaccagaccagcagaggcttatctttgctgggaagcagctggaagatggtcgtactcttgctgattataatatccagaaggagtccactctgcatttggtgttgaggcttcgtggaggtatgcagatatttgtgaagactctgacagggaagaccattaccttggaggtggaaagctctgatactattgacaatgtgaaagctaagattcaggacaaggaaggtatccctccagatcagcagaggctcatttttgctgggaagcaattggaagatggtcgtaccttggcagattacaatattcagaaggaatccactttgcatcttgtccttcgccttcgtggtggttgctaaggggaatcccttttatgaagtgttctcatatgtcttatctgtttgttcagtgtctcccttgaacttgtgctttgcatctctggtttaagtgctgctgtttattatgttttaaaatgatgtattgaactcgtttcagcgaaagtatgttgtttatgtttttattttaaatatcaatatcgtttcacagttaaaaagttgtttaatatttgattaaccaatcttaagaaaattaagattctattt

SEQ ID NO: 1461 - DNA, 1254 bp, Glycine max
attcatagctattcgcagttcccaaattcattttaatcctaattctgcacttcttgatcattcgatttttctcctcaagatgcagatattcgtaaaaactttgaccggcaagaccatcacccttgaggtggaatcctccgacaccattgacaacgtaaaagctaagattcaagacaaggaagggatcccacctgaccagcagagacttatctttgcgggtaaacaacttgaggatggtcgcacccttgccgattacaacatccaaaaggaatcaaccctccatctcgtgcttcgcctcaggggtggcatgcaaatctttgtcaagactttgaccgggaagaccatcacccttgaggtggaatcctcggacaccattgataatgttaaggccaagatccaggacaaagagggcatccccccagatcagcagaggctgatttttgccggtaaacaacttgaggatggaagaacccttgctgattacaacattcagaaggaatccacccttcacttggtgcttcgtttgagaggtggtatgcagattttcgttaaaactttgaccggaaagaccataaccttggaggtggagagttcagataccatagacaatgtgaaagctaagattcaggacaaggaaggtatcccaccagaccaacagaggcttatctttgccgggaaacagcttgaagatggaagaacccttgctgactataacatccagaaggaatctaccctgcacttggtgttgcggcttcgtggtggcatgcaaatctttgttaagactttgactggaaaaaccataactttggaggttgaaagttctgataccattgataatgtgaaggcaaagattcaggacaaggagggcattccacctgatcagcagaggcttatttttgctgggaagcaactggaagatggtcgtaccttggcagattacaatattcagaaggaatccaccttgcatctcgtccttcgccttcgcggtggtttttaagcgtgttttttttcaagtgttcttgttttaagcgtgtcttttttcaagtgttcttgtatgtcatgtctgttatgttcaatttctcccttgaacttgtttgctgttctggtttaggtgctgctttttatgttttaatatgatgtattgagctcgtttcgccaaaagaattaaatatcaatatcgtatcatagttaaattcaaaaaaagaattattaaaacaaatatatagtcgcgtgtctagttctctctctctctcc

SEQ ID NO: 1462 - DNA, 1446 bp, Glycine max
tttggtccggattccgggtcgaccctcccgtccgcgcctctaacctcgcagttccttgatctctcctctcaagatgcagatattcgtgaaaactttgaccggcaagaccatcacccttgaggtggaatcctccgacaccattgacaacgtaaaagctaagattcaagacaaggaagggatcccacctgaccagcagagacttatctttgcgggtaaacaacttgaggatggtcgcacccttgccgattacaacatccaaaaggaatcaaccctccatctcgtgcttcgcctcaggggtggcatgcaaatctttgtcaagactttgaccgggaagaccatcacccttgaggtggaatcctcggacaccattgataatgttaaggccaagatccaggacaaagagggcatccctccagatcagcagaggctgattttcgctggtaaacaacttgaggatggaagaacccttgctgattacaacattcagaaggaatccacccttcacttggtgcttcgtttgagaggtggcatgcagattttcgtcaagactttgacaggaaagaccatcaccttggaggtggaaagttctgatacaattgataatgtgaaagccaagattcaggataaggagggtattcccccagaccagcagaggcttatctttgccgggaagcagcttgaagatggaagaacccttgctgattataacatccagaaggaatctactttgcacttggtgttgcgacttcgtggtggcatgcaaatcttcgtgaagactttgacgggaaagaccataactttggaggttgaaagctctgacaccattgataatgtgaaggcaaagatacaggacaaggaaggtattccaccagaccagcagaggcttatttttgcagggaagcagctggaagatgggcgtaccctggctgattataatatccagaaggaatccactctgcatttggtgttgaggcttcgtggtggtatgcaaatatttgtgaagactctgacagggaagaccgtaaccttggaggtggaaagctctgataccattgataatgtgaaagcaaagattcaggacaaggagggtattccaccagatcagcagaggcttatttttgctgggaagcaattggaagatggtcgtaccttggcggattacaatattcagaaggaatccaccctgcatcttgtcctccgccttcgtggtggtttctgagtctgtctgttatgtccaatattagttgaattctctgttgttatgtccagtgtatgttgaactcgttggttgcagctgttatttaggtgctgctttaatgtttttagttttaaggctatgtctgtgacatagcttgctatgcacggtctcgtgcaaaagaataaaaaaccattatcatctcacaattactttttattttattaaaattactacgaatagtttctgat

SEQ ID NO: 1463 - DNA, 1453 bp, Glycine max
gcacgagagacaaagaccggatcttgcgtttgttgttggcagtttaccatcctaggaataggtacctcctccatcttgggagggatgccagggatgaggagaggcaggctctcgtgtcagctacgtaggcggtgccggtgattcgcactttcgggaatgtggatgtggttggcaaggctgattatgtcacctacttgggatcctccaatgttgccatcactctccgggctgccgccattatgctcaaattggatagtgggtggaattggttcatcaccttgagtgcacgggattatcctctcataactcaggatgatctgtcccatgttttctcttctgttagtagagacctcaatttcattgatcacactggtgaccttggatggaaagagagtgataggttccagccaattgtagttgacccgggactatatttagcaaggaaaagtcaaatttttcaagctacagaaaagaggccaacgcctgacgcgttcaaactctttacaggttcaccatgggtcatcttgagccggccctttctggagttctgcatttttggttgggacaatttacctcggaccctactgatgtattttacaaatgtgaaattatctcaagaagggtattttcactcagttgtttgcaatgtgccagaatttaagaacacgacagtaaatggtgacttacgatatatgatctgggacaatcctccaaagatggaacctcacttccttaacgcctctgtttacaatcagatggcagaaagtggggctgcttttgctagacagtttcaacttaataatcctgtgctggacatgattgatgaaaagatcctccaacgtggtcgccatcgagttactccaggagcgtggtgcaccggacggaggagctggtgggtggatccatgctcccaatggggtgatgtcaacactgtgaaaccaggtcctcaggctaagaagcttgaagggtctgtttctaaccttcttgatgaccagaactcacagaccaatcagtgccagtgaatatacacgagaataaaagcattttaggaagttgtgcaatctaagcaccacgattcatcgaccagtagaagttgccttttgctgaaatcacattctttggtaaccaaaatgtaatatcaatcttggagtcatagcagtgtttgtgagtgttgatagccacacatcagagttgcagtggggaaggggatatatatttaagctttgaaggcttgatatttgtagtggatcctccaataccttcaatcagtgggaggatattccctcctgcttccattttcgtcatgtatgttctgtatgtgtcctcattacctagggattctgaatgatcagagcagaaagttcattctttttagaaatgattgtcattttccattctcccataattgcactttttatcgtaattatatactatattgtatgattgctggatc

SEQ ID NO: 1464 - DNA, 1394 bp, Glycine max
tcagctacgtaggccccccccccatcttttccattgaattgatattaagcaaaaacaatatggaagtaaagaaagttttttttgttgctctatcctttgctttggttctgagagttgctgagagctttgagttcaatgaaaaggacctggaatccgaggaagggttgtgggatttgtacgagagatggaggagccaccacacggtttctcgaagcctcgatgagaagcacaaccgcttcaacgtgttcaaaggcaacgtgatgcatgtccacagttccaataaaatggacaagccttacaagctgaagttgaacaggttcgctgacatgaccaaccatgaattcaggagcatctatgctggctccaaggttaatcatcacagaatgttcagaggcacgccacgtgggaatggtactttcatgtatcagaacgttgacagggttccttcttccgtagattggaggaagaaaggtgctgtcactgatgtaaaggatcaaggccaatgcggtagttgttgggcgttttcaactattgtagctgttgaaggtattaaccaaatcaagacacataagctagttcccttgtctgagcaagaacttgtagattgtgacactacacaaaatcaaggatgcaatggtgggttaatggaatctgcgttcgagtttatcaagcaatacggtataactacagcaagcaattacccttatgaagcaaaagatggaacttgtgatgcatcaaaggtgaatgaacctgcagtgtcaattgatggccatgagaatgtccccgtgaacaatgaggccgcattgctcaaagctgttgcccatcaacctgtatcggtagccattgaagctgggggaattgacttccagttctattcagagggagtatttacgggaaactgtggcactgctctggatcatggggtagcaattgtgggctatggaacaactcaagatggaaccaaatattggacagtgaagaactcatggggatccgaatggggagaaaagggttacattagaatgaaaaggagcatatctgtcaagaaaggtctttgtggcatagcaatggaagcttcctatccaatcaaaaagtcctctagcaaaccaagggaacattcatcatatcctaaagacgagctttaaatatttcacatgaatattcaaccttgatctacgttgattgttgtttaatttgcttgtgcgtaagggattgcttcgtgccccctaattaataatatttgtatgcctagttatccatcaaattgttaggtttgtatcacataaatcttttagtttgattgcttgcatactactgtaacatttcaaatatcctgatttctactaaagaaatacaaatcacactgatttactgcctaaaaaaaaaaaaaaaaa

SEQ ID NO: 1465 - DNA, 2816 bp, Glycine max
gagaaatgtgccttgcagcaatagagattgtttatatctacatgatcatggttctcacgaggatagctttaccaaagatgaactagttttagcatttgccaggagtagagtccaacaaatcattggtgctacaaataatttgcatcggcgttcagggaatgttttacctccaccagtagatgatcctaaacatatgtcatcagccaccaaattagtgtccaaaagtcctttagataaatgtgagaaccagattaaaggatttgcttcaggtattggggctgccaattcaactgtgcttcctgcgatgtcctcttgggttaggtgtgtatccggcaatcttccacaggatacaatttcatcgtgttctgggtaatctggcaaatagaaaggttgaggcatctaatgatccgcaagcccttgtatcaggagttgcttgcactgaaaggtctattagtacaagatcaggggaagctgaaaatagctctgacgtgtgttccaatggtgccttcgtaccttcagagacgaacaaccataatagcggtggaaattctaaaacatcttttatggacaatgatcaagatactgtagcaccttctgtgagcacaggcttcctggagctctccaggcaacatgatttcaatattgatactgcagttggcattaattcaaatggggatgttcatggcttatgttcagggttatcatctattagcattaatgttcatctagaagattcatatttaactcctgattcagacggattaccttttactcgtaactcaatcgattcctctctagggcagcatttacagcaagataatgagtattcaacagaacattcatccacaccagcattttgggaagatatcattgtggatgacgtactaaacatagactctaaacaacaaaaattcagcaaaggcatcaattattcgtcatcatctgggctccattctagttgtctaactcagaatgtaaaccactcaagccatcaaccatttcagcaagatcaaatttgtcgccagaatcatttcagaaaaccttctactgagtcttttaatgaactcttggagacaggacatgttaagcatggggagagtaaagataatggtgcaggtgttgatagtatggttgcttcagacatgggagagaacaacattatatctgatattttgtctttggaattagatgcatgggaaggttcattagttaatttgttgggtgagagggatgaactgtacagaccctttaaagcagctactttgcggaaagtccaagacaaaaatcagtcaaggttttcctttgcaagacaggatgatttcatgaatgaggcatctaatttgcagcaaccatttgcggttactgggcatggtcctgaagggaacttttcatcaggtggtttaataggaaacaaagatacagtcactggaaaatacccacatgtcttcccatctggcaattctgtatcatcagataaatttgttggaagtcagtcttttgtgccatctaatttttccatgtcaaaagctcactcatcagggccgccaggattttcattgtccagcagaatacctccagggttttcgtgtgggagagtagaacaggatagtaatacttctgtgaaacatttgcagcagcagtatgtttcttcaactggaaatattggcagcatgggagatgaatttaacaatcttgcagtattgaactttggtaagggcatgttggctgaaaggctgaataatgcttcttttgacatgaggcaaacttcgcttccacagtttattcctggtgaagatgatcctagacttaagctgttaatgcaacaatccacacctacccagaatttaagatttccagatcatgttggaaataggtttctcccccaaaatgattcttatagaatttcctcaaggtttcttgatcaatttccgcctaacagtccatcaatttacgaacaattacattctcaacagttcagtagtaatactcttccatcaaataaccagtggggtggttggaatgatgccaagaatttcagtgacctgtccatatcagaagtattgaataatgagagagtgggatttagtaatttcatgcctaattatgagaatatcaagttttaaccacctgcagtcactgatctactactagatcagtgatggtggcagttttgtctgatctactagattagtgatggtggcagttttgtctcaactgaaattcctcgtcaatgcactatgagcctcagatgacagtcgatgtgaaccaaaccttgtctaaaaaatcggagattccttgatttgtctgaaattatgttctagtaatgtcatgtaagggtatcttgagacccgtttcaaatcagtttagaatttgaatactctgaattccatacacaattctgctatcaaatggccagtagtatcaaccaccctgtgcttagcttcattgccaagctctagaatctgtggtttccctcgttatggtaggcggacattactggcaaacggtgtcaatttttctctgggttacacatctggcttggcctcggaggattttatgttgggtcacaattagtttatgccatcaaactgcagaaattgacagagctaagatgataagcgttaatgaatggggaaattcctgcttagaatggtgaaagagcccatagatttgatgttttcatcatgcctgaaacagtttgtcctgaatttgttaccaatgtcgaacttggaattatacactggtaatgtacttaatgtatatgtgtgaatatatataaatatagattttaatttcttaacacacaaaaaaaaaaa

SEQ ID NO: 1466 - DNA, 1120 bp, Glycine max
catttcactttctccatttaggctgcgcacatagttggaaaggatattggtgcgggcctcttcgttattagttcacatggtgaaagggggatggaatgcgaggcgcattaattgggttactccaggggttttccagtcgcagcagcagtaaatgccggtcagctaatgtttatgtgattcattatagggcgcagtggggaccgggccccccctcgagtcagctacgtaggcccccccccccccattgtatcattgctagtaactctgcgactttttcaaaaggtatggaagtctcgcatcagattgcaaatgcgtacccctcttgagccacatcgtgtccccagtgataaattgatatttctttgtaccgtcaccatacatgtgatagggtatgtaattgttctaatgattcatggcacaaagaccagccagaaggctcttatagcaaagacttatttggttgatggaagaaattctcattcattgccgggttgggcaacagacctggaagaatatgtaggtcttgttgaagactttttcttgcttcctcaaattattgggaacttagtctggcatatcgattgcaaacctctcagaaaactatattttattggaatcactctggtcagacttcttcctcacatatatgactacattcgagctccagttccaaatccttacttttctgaggactctgaatttgtcaatcctaatttggatttttactcaaaatttggggatattgccattcctgtgactgctattattcttgcaattgtggtctatattcaacaaagatggggctatgagaagctgagtcagtttctgacatttgggcagtataagcttctcccaactttcagataccaaaggttgtcttctagggctggtgaatccgaactagttcctggtatcaatggtgctgctgtaaaagagaatgagcaagttgatgtagaatgatgtaaacactttagaattactgacaacagcttttgtacacccatatatgaaaagtaagtaagggtttgggtggatgtactattatgtatgaggttgctcacatactcaataatcaagtgaattttgttgtggtttcaaaaaaaaaaaaaaaaaaaaaaaa

SEQ ID NO: 1467 - DNA, 1200 bp, Glycine max
ctgcagcggcggaggcccccccccccggacttagacacgagagtggtttttgttagtgcagaaacagagaaagatggatgaggagaatggttacagtgggagtatcagctctaacttggagactacaaaagcagagagatctgtgtggctgatgaagtgccctttggtggtggctaagtcatggcagacccatcctccttctcaacctctcgccaaggttgtgctctcccttgatcctctccaccctgaagaagacgatccctctgctgtccagtttacaatggagatggcaggcacagaagctgtgaatatgtccaaaacttattcattgaacatgtttaaagacttcgttcctatgtgtgtcttctctgagactagccaaggtggcaaggttgcaatggaagggaaagtagaacataagtttgatatgaagccccacggtgaaaacattgaagagtatggtaaattgtgccgagagaggacaaacaaatctatgattaaaaatcgacaaatacaggttatcgataatgatcggggagttctaatgaggccaatgcctggaatgattggtctagtttcatccaattccaaggacaagaagaagacacagccggtcaagcaatctgatacaaagagaacgagaagagataggggagagctggaggatataatgttcaagctatttgaaagacagcctaattgggccttgaaacagctcgttcaagagacagatcaacctgcacaattcttgaaagagattctgaacgaactttgtgtttacaataaaagaggtgccaatcaaggaacttacgagctgaagcctgagtacaagaaatctgttgaagatacgagcgccgaataagtgctatgttctttacattatactcttaactccaccgaggcacagaccctccaaaaatataggctgatggaagaaagaatcttgggacaacaaacaagaagcaaactttgtatctgaaccgtgaagaataccttgtttatgactttttttaccgataaattatcaaacatgcagttgtatacgttcaaaaggaattttagcaaccgaaaaattaatgttatgttgcctggttacgcgtagaatatctctgccactgtacatggagttgttctgttgtaaagacctacctagtaatatgatgctcttctcctagtttacaaaaaaaaaaaaaaaaaatg

SEQ ID NO: 1468 - DNA, 1055 bp, Glycine max
cacaattgtagctcagattagattcttatcttctttcccactgaggaaacagaggatagcgtcatagcagcaatggcttctgcaagagaacaaatttattttctggcaatcgtccttctattctctcattcgaaactaatgttatcaaatgctgctataacaggggaaccaattcccgctgaatggccccatcagttccacgcgttgatgttcatgaaccaaagcggaactcttcagaaactggacttgtggtacgactggcccaacggccgcaacttcaacataattcagaatcagctcgaccacctcgtaacatacgacctcgaatggaacaacggcacctccttcgtctacactctcgacccctccgaacccacgtgccaagtcctgcacgtggaagtgggcattctccgccccaattggctccacggtgcaacctatttgggtcagcaacatgttggtaatttcctctgcaacgtgtgggagaaagttgatttcattgtctactacgaggatgtcctcactcgtaggcctgttaagtgggtcttctacacaggatacactgctcacgtgatgacatttgaggttggtgcagtgcttgaggatccaaattggcaggctcctgtgtattgttttagtgagaatgggaaggaaaacaatagccccattttaagacatgctgttcctggtggttctcttgggagtttgatgagagggataactgtttgggaaactatgtaattatgaaatagatagtggcaatggcatatgcactatgttcgataattttgatgcactagaggtgctcatgcatcattgtgttggaaataaactgtgatagtctttggaacttatgccagaccaagcatttagaaattttgttgaatttgttctgttgtagagtgggaagtatagaatgttttgttgcttttaacagcttgaatccggtaagagaagcttaattggttggtctaatatttaagcggtagagaggcttgtgcgtaatttagaagatattgttgaaagttaattagtttaaaaaaaaaaaaaaaaaa

SEQ ID NO: 1469 - DNA, 680 bp, Glycine max
cttccgcgcgaattgaaattccctcaaaaaaactcaacaacccaactcaaacctacccccttcatagcaaccaagccaaaccttctcctgctccacaatcaaattccatcaattaaacatccctataggcttctcttccatggaaaattaccattcttctaaatccttgcatcttccatgcaaaaccttatctctagttctcctttttgtttacttgctacttattggttcttgtgatgcaataagaataggccaaactatgaagctgaatgaaagaagagagattctcaagggaaagcgcaataaccaacatggttttccatacaaaagcatggttttcaacttcttccccaaagggccggtgccaccttcaggtccttcaaagaggcataacgcagtggtggattcaacacctaataattgaagtacatgagaagtcctatttgttcaatttttccatttttttcttccttttttttcgtagaattttttggttttgtaatatttatgggagggttgcaaggattcttatcagatcaaatgtcaagccccaatagatcagatccttaaaagggtctgagattttttggctcttattctagatcacacatgtatagaaaagattgttgacatatacaggaatatgtatattattgttcagtgcaaaaaaaaaaaaaaaa

SEQ ID NO: 1470 - DNA, 1325 bp, Glycine max
tgcaccgtcttaccctcacatctatctatcttaaaaacactttaaaaatccctcacctatccccacttccataaccattttcttttccaaacccctcaaactaactatatctatccattaagggatattcaatgcaattagcgaatgagagaatgaagagccggtggttcgtgtggcttttggcggtactaggcatcatcggagccacactcttcatagtgagcttgatccaaacctcggagaacaacttcctatgttccataacaagaacgatgcagcagcagcagcagcagttcaccgatggccccacatcgatgcaactcaaagccatcctccactacgcgacctctcagattgtccctcaacaatctctttccgagattacaataaccttcgacgtgctccaaagcctccaccgccccgccaacttcctcgtgtttgggctgggccgcgattctctcatgtgggccagcctcaacccccacggcaccacgctgttcctcgaggaggaccctaaatggttcgggatcgtcaccaaggaggcgccctacctccgggcccacacggtccgttaccggacacagctccgagaagccgacagcctcatgtcctcgtaccgatccgaacccgcgtgttttccggccaccgccacgctccgcggcaacgagcggtgcaaacttgccctacataacctccctgacgaggtttatgagaaggagtgggatttgatcatgatcgacgcgccgaaggggtactttgcggaggcgccggggcgcatggcggcgatattctcggcggcggtgatggcgagggacaggaagggatccggtgtgacgcacgtgttcttgcacgatgtggatcggaaggtggagaaggtttacgcggaggagtttctgtgtaggaagcacttggtcaaaggtgttgggaggctctggcatttcgagattcctccaatgggtaataacactcgtgactacgcacgtttctgttagggttcaggattattacagtattagtattcttttttttaccggtgtagtgaaatacattactggagaagaatagtgagaggagcatatatatctatatgttactacagctttattaaaagaaaaactctagattgcttttgcttttccaatttatgttgtcggttatggatacaaaaaaaaaaggaggaatgggattgtttgtggttgtgggttgcgagattacatgtgatgattccgctgcaatctaccgacactagatgataaccttgtgcattgtgttctcttactttttagacattgtcttcaatggcaaatttgattatttatcgtccc

SEQ ID NO: 1471 - DNA, 2824 bp, Glycine max
cagctacgtaggcccccccccccccccagcaacaattaaaaaatcataaaaagtggaaaagaaacaaagcccagatttaaaatcacaatctagagagagaaacaagcacagactatgaaaccatctatctcccaatttctctctctaaaaccgccgtctccttctcagaccagccgctgcagcattttctctgcgactctcgctcggaccagcacttggatgtgactggtttcggcatcggttagatcgaccatggcggaggtttccggcgagggagtagcggaggcgacggtgtccacgccggcgccgccgttggcggtgtctggatctttcaaggaagggaagagctcttcgcggaggcgcgcgcattcgatgaggccgagcctcgacgcggacgagttcatgaacctgttgcacggttcggatccggtgaaggtggagcttaatcgcttggagaatgaagtgagagataaggacagagaattatcagaagcgcaggcagagatcaaagccttgaggctctccgaacgactcagagaaaaggccgttgaagagcttactgaagaattgtcaagggttgaggggaagctgaaattaacagaatctcttctagaaagcaaaaatcttgaaataaagaaaatcaatgatgaaaaaaaagcatcgatggcagctcagtttgcagctgaagccactcttcgaagggtccatgctgctcagaaggacgatgacatgcctcctatagaggccattcttgctcctctggaggctgaacttaagcttgcgcggcaagagattgctaaacttcaagatgataacaaagctttagaccgtctcaccaaatctaaagaagcagcacttattgaagctgagaagactgtacagattgccttggctaaggcctccatggtggatgatctccaaaataaaaatcaagagctaattaaacagattgagatttgccaggaagaaaataaaattttggacaaaatgcatagactgaaggtggcagaggttgaaaagcttacccaaaccgtgagagaactagaagaggctgtccttgcaggtggtgcagctgcaaatgctgtgagagattatcaacggaaatttcaagaaatgaatgaagaaagaaaaactcttgaccgggagttagctcgtgccaaggtaacagcaaacagagtagctgtagtggttgcaaatgaatggaaagatgctaatgacaaagtgatgcctgtgaaacaatggcttgaagaacgacgattcttgcagggagagatgcagcaacttcgggacaagcttgctataactgagcgaactgcaaagtctgaagcacagttaaaagaaaaatatcaattaaggcttaaagtgctacaggagagtttgagagaaacttctaacagtattaatcgcggcacctcagagggaagatgtgttagcaatgggccttctcgacgtcaatccctaggtggagctgataacatctcaaaactaacatctaatgggtttttgaagagatcaccgtccactcaaattaggtcttctgtgtcttcaagcacagttttgaagcatgctaaaggcacatctaaatcatttgatggtggtacaaggtcattagaaaggagtaaaattcttctaaatggaaaacctccaagttactcattcaaccagtcttccgaaggaaccaaagtcagggaagaaaaagataaatggaaaggaaattcagatgataaaccaaatgacttcccaacagtggatacagacgatagtgttccaggagttttgtatgatttgctgcagaaagaggtcttagccttgaggaaagttggtcatgagaaagatcaaagcctaaaagataaagatgatgccattgaaatgctggcaaagaaagtagatacattgaccaaagccatggaagttgaggcaaagaagatgagaagagaagtagcttccatggagaaggaggtagctgcaatgcgtgttgaaaaagaacaagacacaagagcaaagcgtttcagtaatgtaaagggccctgtgaacagtgctcagcatcagcttgtttctggaagaaatgtggcacggggaggattaacacgcagcacgcaatgacaatcgtctcttgaagaggcactaaggagtgggttttcatagcatcgttcttctgcccttctttgtttactttattttttcttttgtcttttcccccccaattgattataagattgtaactggcattccgacaaccattatttatgttattggccatggattgatggtgagaagagcgtttaaggaatcggtatgcgcctgacagactttgtatttcctgcttagagagagatcggctaagaagccaggcaaaggaagaaaattaacttggagctaaccttcagcttttctttgagtggctgtgtggttgtataggtagccgctttatatcccccctttctcctttttgcagttgatatttgtaatacgcagatagtgtgattgtgtcctctcatctcaggtttgttaatatctttgtaatcagatcaagatctaaacttatttggttgtgttatacattaatagtttcgagttgatttataagttcatgtttgtgtgaaaacaaaatcattggaagaaaaaaaaaaaaaagggggggagaaagccagataaatatttttaaaaaaaaaggggggaccccttgtggaaaaaggggggggccccctaaaaaaccaaagcttccttccgcggggggccaaatcttttctttaatttgggggccaaaaaattaaatacttgggcgggtttttaaaaccccggggaaagaaaaaaaacccggggg

SEQ ID NO: 1472 - DNA, 682 bp, Glycine max
agggtctcgcgctgaaattgattatgtcaagtttctgtgtggagatggttatagtggatttatggacaaaattacaggagataataaaaccacttgtacaccagcaaatacaggaagtgttttggaccttaatctcccatcttttgctctatccacaactcgctcaaagtatattagtgccacttttagtagaactgttactaatgttggatcagctaaatccatatataaagccacagtaactacacctccatcatcttcttccttaaacatcaaagtagtgccagatgttttggtcttctcgtctttggaggagaagatgtcgttcacccttaagattgaaggaagcattaacaatgcaaatatagtttcttcgtctttggtttgggatgatggcacttttcaagtaaggagccccgtcgttgtttatgttcctccgtaagttctctgctgcgaacacttgtcaatgaagaagcaagcaacatgcatgaatggaaatgattaatgtgttatttataatcggtttgctttttcttcttccctttgaagtgttagtgaataaatattctaggtgtgttctaagccagaattgatggcaagtgcttttgtaagccaggaataaaatcaagataacgatttactattatctaaaaaaaaatatattagaataaaaaaaaaaaaa

SEQ ID NO: 1473 - DNA, 1345 bp, Glycine max
aattgatacaactggtcatgggagtcattgtgcttccactgctgcgggaaacccagttaggtccgcgagtctattagggtttggctcagggacagccagaggaggagttccatcagcacgtattgctgtgtataaagtgtgttgggcaacgggttgtgacactacagacatccttaaagcctatgatgcagccattgcagatggtgttgacatcctttccgtctcagtgggagctacacagcttacacacaacaagtattttaaagacgtacacgcaataggagctttccatgcaatgaagaaaggcatattaacatcaacatctgcggacaatttgggtcaattaggtccttactcaacctcaaagtttgcaccttggttgcttagtgtagctgcctccaccatagataaaaagtttttcactaagatccagttgggaaatggcaagatctatgagggagtttcagtaaatgcatttgatctccacaatatacagcatccattaatttatgctggagatgcatccatcatcaagggtaacagttccaatgctaggtattgccaagaaaacgctttggataaagctttggtgaagggaaaaatccttttgtgtgataacattccttatccatcatttgtgggatttgctcaaggggctgttggtgttataattagaagtaatgtttctttagctgtgtccgatgtatttcccctgccagcggctcacattactcacaatgacggggcacaaatatattcttatttaaagtcaacaagtaatccaacagcgactatatttaagagttatgaaggcaaagatccattagccccatatattgattcattctcaggtagaggtccaaacaaaatcactccaaatattctaaagcctgatttagctgctccaggggttaacattctagctgcatggtctccaattgctcctatctccggagttaaaggagataagagaatttcaaaatacaatatactatatggaacttcaatggcatgtcctcatgttactgcagcagctgtttacatcaaatcatttcatcccaactggtctcctgcagtgattaaatccgcattaatgacaactgctactccaatgcgtgatatacttaatcatggaaatgctgaatttggttatggtgctgggcaaatcaatcctatgaaggcagtaaaacctggattagtttacgatgctactgaaattgattaatgtcaagtttctggggtggagatggttatagtggatttatggacaaaattacaggagataattaaaccacttgtacaccagcaaatacaggaagtgttttggaccttaatctcccatctt

SEQ ID NO: 1474 - DNA, 2576 bp, Glycine max
  misc_feature (27)..(30): n is a, c, g, or t
  misc_feature (34)..(35): n is a, c, g, or t
  misc_feature (49)..(49): n is a, c, g, or t
catttcccccctcccagttccaacttnnnngtgnntaccgggccccccntcgcgtcagctacgtaggccccccccccccagccaaacaactcctgttatactgctccgaatctagtaaactctacctggcaataacaggggattccatactctcaaaattccagaaggcaagaaaatcattaacgcaaagcttagtccagattctgaatatggttccagttatgttggccgcagagatttctcgactaattggtgattttgagtgtgtgacatttgtcctcaactctgctgaacaagcagctgggaaggttatgaaacaattgctccagcaagatccttcaacatcagataaagattcaatggaggaatctgaactaaaagattttcagtttgtagcagcaagacttggtattacatccccaacggccatcttaatagagagacgatctattcagaagttgttagaaaaactcaaaccaaatgaccagacaaaagagatcatcttgaaaaatcttttgtttctcctgataaagcaccgaaaatcaatcacaggggaacaaatggaggtctactctcaaagtgaaggaccaatcacaactcagaactcagatcatgagtctcaaaaaaaccttcatgtcaagtcatacctgtacttgaaccatggtcagtatagaactcatgccagtgagttgagcagacttacacctcctgaggaatatacatgcccaatatctttaaggttgatgtatgaccctgttgtcattgcttcaggaaaaacatatgaaaggatgtggatacaaaagtggtttgatgagggtaatactatatgcccaaaaactaaaaaggaattggctcatatggcattgactccaaatgttgccttaaaggacttgatattaaactggtgcaaaactaatggagtctccattcctgacccgcgtaggcatgtgcaagattttcactcatgggaagcttcctccaactccattaggagttttggaagttctttgtatgatttgaacttcccaatggattttagtaacatgtctcttggatcattagataccagttataattcagattcctcccacactaaggccaaccatagcttaaatttgatgttgaacaagagcagtgacaattcgcgcaggcatcaatctcatgtacggatacatgacgctgatcggatgcatttgtctaaactccatgagcgtcaatgggaatctcaatgccaagtcattgaaaatatgaaaatagatttcaaatgcaattaccaagctttttgctctgtgtcatctgagagtttcattgacccactcacaagatttctgagcactgcatgtgagaggcacgatgtaaaagctctgcgagcaggaactaagttgctaatggaatttatgaagtgttgcagaaatggtatgaccaatttaagtgaagatacatgcattatgttggcaagtcttcttgacacagaagcgattggtgaagctctcaccataatggaagaactgacagggaattggtatgaaaaagctaacattgcagcttccagtgtgctcacttctgtttcaaagatccttgattcagaacccttttgagagacagtatacatatcttgaaaaacctttgtgatactgaagagggtagggttactgttgtagaaacaaaaggatgcatatcttctgttgttgaaatacttgggactggcagtgatgaggaaaaagaacctgcactgattattcttctctctttatgctctcaacgtgtggaatactgtcagttggttgtgtctgaggggattattccttctcttgtcaacatctccaacaaaggaagtgatatggcaaaggcttatgcattagaattactccgtcttttgaaggacgacgagtttcagtatgaagattgttgtgagccaaatctcggtgcctctcaagaacctaacaatcactatcaagaaaagaaatcatcaaagaaaccgtcaattttgaagaaactatcactgttctcaaaatccagttcagttgcaccaaaaaccaaaagatgaaactgaactcccatgcattttgaccttttgtatatatcctccagaacctttttatgtgcttggtaagagacattttgggttgctggatggcagataggatttttagatagggtcttttaatctttgtggtgggtatagtctactacataatcttgcacagtaactgctgactgtataaagtatagttctgttttatggtgtatagttattttgacatgccaagtcaggtatggagaaaatggtagagaagttctcctttttctcctctcctctcctctcctctcaagatgtcaaagggatgtttgatgcctgtgacttggtggtggtcacggattctagttataggaacagccttagttggtaaggcatggagctgcctttctatttgttattgtatattgaacaatatattttgaacagtgatttcaggggagatattttgaatggtttataattacattgttcccatatttaaaaaaaaaaaaaaaaaaaaaaaaagaaaaaaaaaaaaaaaaagaattcctgcagc

SEQ ID NO: 1475 - DNA, 1238 bp, Glycine max
  misc_feature (1021)..(1021): n is a, c, g, or t
  misc_feature (1194)..(1194): n is a, c, g, or t
gatgccaagtcattgaaaatataaaaatggatttcaaatgcaattgccaagctttttgctgtgtgtcatctgagaatttcattgacccactcacgagatttctgagcactgggtgtgagcggcatgatgtaaaagctctgagagcaggaactaagttgctattgggagtcagctacgtagggcccccccccccccccaatttaagtgaagatacatgcattatgttggcaagtcttcttgacacagaagcgattggtgaagctctcaccataatggaagaactgacagggaattggtatgaaaaagctaacattgcagcttccagtgtgctcacttctgtttcaaagatccttgattcaggtaatgaagagttccaacgaaaagctattaaaataatgtataatttttcatccaatggtcaaatttgtccctacatggtgtctctcgggtgcatccctaaattactgccattttttgaagacagaacccttttgagagacagtatacatatcttgaaaaacctttgtgatactgaagagggtagggttactgttgtagaaacaaaaggatgcatatcttctgttgttgaaatacttgggactggcagtgatgaggaaaaagaacctgcactgattattcttctccctttatgctctcaacgtgtggaatactgtcagttggttgtgtctgaggggattattccttctcttgtcaacatctccaacaaaggaagtgatatggcaaaggcttatgcattagaattactccgtcttttgaaggacgacgagtttcagtatgaagattgttgtgagccaaatctcggtgcctctcaagaaccctaacaatcactatcaagaaaagaaatcatcaaagaaaccgtcaattttgaagaaactatcactgttctcaaaatccagttcagttgcaccaaaaaccaaaagatgaaactgaactcccatgcattttgaccttttgtatatatcctccagaacctttttatgtgcttggtaagagacatttntgggttgctggatggcagataggatttttagatagggtcttttaatcttttgtgggtgggtatagtctactacataatcttgcacagtaactgtgactgataaagaagataaagtctcggtttatggggaaatagttattttgacatgccaggtcaggtatggagaaatggtngaaaaagaaagtcctcctttttctcctctcctctcctctcctct

SEQ ID NO: 1476 - DNA, 1349 bp, Glycine max
gtaactaggaagggaagtaacgtagatagatttagataactagataaggttgtcgttgatatctcccaacttgtcccattggccattgtccatgcgccatttgctgcctttcttgtcctaagccctcaacacaaacacaaacgctctctctttcttctatcttctcccaacttgagttgagattctgagtaacaatcaaagtttggaaaaaagttttgagggaagaaaagaccacgatgctgggtgtgaccactcttactctgggttcgtccaccacattggtggctcagaaccatgctcaacaacatgccaccactcttgcctcagccaatggaaacagaagggacagtgtttccaacaggactcaccccttgcctatgagtttggtatcttccaccgaccaaagtttcagctttctctcttccttcaaggaaccaacacatgcacgccccttcaccacagctgttgcatctgttgattctgacaagctcaattcatctgatcctcccaccaagaatgaagcctccaagtattattttcttgttgcaaatgcaaagtttatgttggatgaggaggagcatttccaagagcaattgtttgagcggcttcgtctctttggagagcgtaatcaagaacaggatttctggcttgtcattgagcctaagttcttggataagttccctaacattaccaagagattaaagagacctgctgttgctcttgtgtcaaccaatggtccctggatcacattcatgaagttgagactggaccgagttttatctgacagttttgaagctgagagcctagaagaagcattagctttcaatcctactgatctgaagtttgagaagcctgaaaaatgggtggcaccctatcctaaatatgaatttggatggtggaaacccttcttgccccctgttcagacagaggtgcagccttaagatattatttatccacactgtttcagtgcttggtattcttaaatcttcttttccaatggttattgttcaagtgcaactggatggtagttaaagttggctaaatttgcatccatttttgtatttttgggaggtagtatgattatttaaagttgaggcgttgtccttaggatctaagttgtaggaattgcattttatgtctctcgaatgagttaagtatagatattgttatcagattgatgttctctgtttctagaaatgtatgtgaactgtgaaggcccgcaacttattagatttttgtcttttgaataaaaaacttctaaggtactccaatttagattacatacagcttgtgtgtgaggcttgaaattaccgttcatccaatgaagttacctcctccaaaaaaaaaaa

SEQ ID NO: 1477 - DNA, 1277 bp, Glycine max
  misc_feature (18)..(18): n is a, c, g, or t
  misc_feature (27)..(27): n is a, c, g, or t
  misc_feature (29)..(29): n is a, c, g, or t
ttcgattgggtaccgggnccccccctngngtcagctacgtaggcccccccccccaatttgtcccataagccattgtacatgcgccatttgcagtcttcacttcttgtcctaagcctcaacacaaacacaaactcaaacacacacactctttcttctatcttctcccaatttgagttgagattctgagagtaacaatcaaagtttggaaaaaaaaaaagttttgagggaagaaaagaccaatatgctgggtgtggccactcttactttgggttcatccaccacaatggtggctcagaaccatgctcaacaacatgccaccactcttgcctcagccaatggaaacagaaggcacagtgtttccaacaggactcactccttgcctatgagtttggtgtctcccaccaaccaaagtttcacctttctctcttcctttaaagaaccaacacatgcacgccccttcaccactgctgttgcatctgttgattctgaccagcttgattcatctgatcctcccaccaagaatgaagccaccaagtattattttcttgttgcaaatgcaaagtttatgttggacgaggaggagcatttccaagagcaattgttcgagcggcttcgtctctttggagagcgtaatcaagaacaggatttctggcttgtcattgagcctaagttcttggataagttttctaacattaccaagagattaaagagacctgctgttgctcttgtgtcaaccaatggtccctggatcacattcatgaagttgagactggaccgagttttatctgactgttttgaagctgagagtctagaagaagcattagctttcaatcctactgatctgaagtttgagaagcctgaaaaatgggtggcaccctatcctaaatatgaatctggatggtggaaacccttcttgccccctgttcagacagaggtgaagccttaagatattatttatccacactgtttcagtgcttggtattcttaaatcttctttttccaatggttcttgttcaagtgcaactggatggtagttaaagttggctaaatttgcatccagttttgtttttttgggagttagtatgattatttaaagttgaggtgttgtccttaggatctaagttgtaggagttgtattttatgtctcacaaatgagttaagtataatagataattgttatgagattgatgttctcggtttctagaaatgtatgtgaactgtgaaggcccgcaacttattagattttttgtcttttgaagaaaaaaaaaaaaaaaaaa

SEQ ID NO: 1478 - DNA, 929 bp, Glycine max
aatacgtcaccgttgcagataacaggtacctcctaggataaggctttttcttcagtacttgctcttggtggaacaaccttgtaacaatggcttcctcagttacttcctcttttcgcatcagcaatttgaagtcggtttttgttggtgagactaataaactcagagtttcaagtgttcctggtgctcatgttggtttcaatagaaagactgtagaatgtaaggaatcacgaattgggaagcaaccaattcctgtgccatccaatgtcacagtcaaattggaaggacaggatatacaagtgaaaggtcctttgggtgaacttgcattaacttatcctcgagaagtgttggttgagagggaagagtcagggactctaagggttaaaaaggcagttgaaaccagaagggccaatcaaatgcatgggctttttaggacacttacagacaacctggtgattggagtatctaaaggttttgacaagaaacttcaacttgttggtgttggttatcgtgctatggtagaaggaaacgaagttgtgctgaatcttggattttctcatcctgttaagatgacaatccctgatggcctcaaagtgaaggtggaggaaaacaccagaatcacagttagtgggtatgacaaatctgaggttggccagtttgctgcttcaattaggaagtggagacccccagaaccatacaaaggaaagggtgtcaaatatgctgatgaaattgtaaggagaaaggaaggaaaagcagggaagaagaagtaatggggggtttcaattttcctttttcatttatctcctgttgtttttcctcatttgttagtaatggaaatattttaaccgagtaaaaaaaattcatattcattgagataagcttgagtcacttatgcttaatgatgagatttaaaagcatagcaatccataact

SEQ ID NO: 1479 - DNA, 2092 bp, Glycine max
  misc_feature (8)..(8): n is a, c, g, or t
ggtccggnaatcccgggtcgacccacgcgtccggtcgttgggaggggggaactcttggtctagctttggagccatcccaccaatccatcacccgatcacatttcaaagccccaacacatcacaatttacacatcagctacgtaggccccccccccagtgtacaacgaaagtccaacacacgaatcaaatcagacacacaacacaaacacaacacacactcactctccgttatccacacacaccattactctgttctgttctgttctgttctgctctgttctgtttcccaccacacccccccatggattgttggtactctcctcaccctctccatgatgaattcgagaagcttgtcattcgaatgaaccccccaagagttgctgtggataacatttcaagcggaacagacactgtcataaaggttgatagcgcgaacaagcgtgggagcttgttggaggtggttcaggttctcactgatatgaatctcagtgttagaagagcttatatttcctctgatggagaatggttcatggatgtttttcatgtcacggatcaaaatgggaaaaagtttatgcaagatgatgttgctgaccgcattcaacagtcactgggtccaagagcctctagttttcgatccttgagaaggtctgttggggtccaagctgaagcagaacatacaaccattgaattaactggaagagacaggccaggattgctttcagaagtgtttgctgttcttgcagacctcaaatgcaatgtggtagcagcagaagtctggacccacaattcaagaatggcatctgttgtttacatcacagacgaggcgacgggattgtccattgacgatccggatcgccttgccaagattaagcagcttctactgtatgtgctgaaaggagacatagataagaagagtgctaacactgctgtttctgttggttctactcacaaggataggaggctgcatcagttgatgtatgccgaccgtgattatgacgtagatgatggggattctgggtcaacaagtgacaggaacaagctcctagtaactgttgatgattgcatagataagggatacactgttgtgaacttgaggtgtccagacagaccaaagttactgtttgataccgtgtgcacactcacagacatgcagtatgttgtgtaccatggaactgtcattgctgaaggaccagaggcatatcaggaatattatataaggcatgtagatggaagtcctatcagttctgaagcagaaaggcaaagagtgattcattgtttggaggctgctgttaggagacgaacttctgagggtataaagctagaattatgtggggaagacagggttggccttctgtctgatgtaactcgcatctttagagaaaatggtctttcagtcaaccgtgctgaagttacaaccaggggcagccaagccatgaatgttttctatgtgactgatgtatctggaaatccagttaagagtgaaacaattgaaacagttcgaaaagagattggcttgaccatactgcatgtaaaagatgatgtctgctctaaacctccaccgcaagagagtggaaaattctctctgtctaatctctttcggtcaagctctgagaaatttctctacaacttgggtttgatgaagtcttattcttgaacctagagtatttccataattaggagctatatgtaatgctttaatttgtaaacagtagatcttagtttagcctaggtagtctgctttgaatcccattgcaatgctttacggtagatctttctagatttggtgtaagttgtaattagatgtcagattctagagtttgatctaggcatgtttctaagtgaattgtatattaatatgcctttgttacattcttctcagactctaattagatgtcaagctgtagagtttgatctaggcatgtttcttggtgaattgtatattaatatgcctgtgttacattcttctagtcgcaagcattgtggagtagaacaataatacagggtgtatatgttgtcttttcttgaaatgggggatgatttggttcttttgtacaaagaagaaaaaatcatcaaaagctgataatttaattgt

SEQ ID NO: 1480 - DNA, 964 bp, Glycine max
tgtcggctgcgagaagacgacagaagggggatgatcctttaatttcctgagttccggcgaattaacaagcttcaaattcaattgcttttcatgcaaatggatgtttatacacacatctcattaccatctttcatatcgcatcgcttctcttcttcacgattccaatgctcatcactttcttcttattctcctttcaagcttgtctgttccaacagagactccaaggaatctcaacgaaacgacgataacaataacaagggtgataaatcttcaacagactgggacaaggcatggtcaaaattcaaaaagcaagggggaaaaaaacccttctccaaattttcagataagtatgtgagctggaatcctaagcgttcagagttccctctttctgaggaggttgaccctatcaagagaacagagagatcaaacctcagtttctggaatagtccaactttcactttagggggtgcaattataattgtcttatttcttctgttgtacaccattcttgcaccaatcaagtgatctcttttaaagcaatataactgtaaaactgaaatattgtttcacagaaaatgtaaatcctttactaatgtaattgatggcttctctccaaaaaaaaaaaaaaaaaagttgcttcacccacttgaaacgatattcttcctcggatatgtcattggcttttcatagccaatcatatttacagatgactttcatgcatgctgaagtgagatatgaatacggaataaattgatcatattatgtgcttgctttaaccagtttttaactggggagaattctagaaaagtcaaaacaaggtaagtgttgaacttgagtagactagtaaatggcaattacttgtagtgaattaggtttatggtatgtaattgattgtaggttaatcattgtatgaacttgataaccacttgttattaatcatttgactatttccctccttaggacc

SEQ ID NO: 1481 - DNA, 1003 bp, Glycine max
gagtcagctacgtaggcccccccccccccgaacaaaccaaataaattgaaaaaaaaaaacagcacaataatacatgagcttatccacaattctaggagtgcattttccgcagttgtttgtttaacaagaatttacacaaacaaacataactggctagaatggccctggagaactgtttgcgagtgaccacagtaggcacagccacaccccaatgcttttctccattttttccatcttcaagggataaacttgtcttcccaactcacagaggtttcaagaaatccttgcaaaactcaacactgtcatacccttatctttactccaccggtgctgcctatagaaaatcccgttttgtttgcaatgctcgtgaagcagtaaatgaagttaaagtggtgactgactcaagctggaacaaccttgtcattgcaagtgagacccctgtgctggtagagttttgggcaccatggtgtggtccatgcaggatgatagcacctgctatcgatgagctagcgaaggaatatgctggaaaaattgcatgctttaagcttaacacagatgattctccaaacatagcaacacagtacggcatcagaagcataccaacagttctgttcttcaagaatggagagaaaaaagaaagcataattggtgcagttcccaaatccactctgtccgcaacagtggaaaaatacgttgattcataaactgagaaaatgataaccaattgcaagcattacagtgcaagaattgaaggagtggaatggaagaagtgacaacagtgacattgcaaatttcattctcttcaattcttttccatgccttaaatggcaatagatagtctgtttataagtttaaggaccaactttcctttctgtggtttgacacttttaagtaatacttgtacccttttttttaattttgtaaatgttacattggataaacaaacttcattcaatgtttgaatgttgattacttccttgtgcgaaaaaaaaaaaaaaaaaag

SEQ ID NO: 1482 - DNA, 954 bp, Glycine max
gggtttggtgatgggatcatgtctgcaagaggttacggctgcgaaagacgacatgtaggtgtgatggagcagaagaaggcaaagatagtggcagagctccaagctgtgaagcacaacagtggcaagtcctacaatcagttagcggaggagactggactcaccaacgtctatgttgctcagcttctcaggagacaggctcagctcaatccccaaactgcccctctacttcgggcagcgctgcccgacctgccccaagaccttgtttctgagatgatgagaccccctttgaggtcttatgaccctaatctcatccaagaccccactgtctataggttgaatgaagctgttatgcattttggggagagcatcaaagaaataatcaatgaggagtttggtgatgggatcatgtcagcaatagatttctactgctcggttgataaaattaaaggagtagatgggaaggatcgtgtggtattgacatttgatgggaaatatttgccacattcagaacagaaatctgagcacatggtttcaagaacaaggccactgggaaaacagtgagtatcttcattggaggaccaactacgcaatcttcaacaccagtctacctgcacatgaattatcattgatctgtaacaaccacaagttgtatttgatcagtgctattttgtgttgtctatagaaaaacattggaagagaaaaataaaagtgtttaagatttataaataataaaaagtagttggccatgcatatttatacaatgttttatggctttggatatttcatgacacttgcaccatgtattttaatgccagttaattataagatggagaagcttgtattgtgcttggttgagcaagtcaaataaacataataatattcattttatccatcaaaaaaaaaaaaaaacgcgagacgagggcgcgccgcgaaaaaaaaaaaaaaaaaaaaaaa

SEQ ID NO: 1483 - DNA, 1441 bp, Glycine max
ttcagctacgtaggccccccccccaaaaaaacaaacaaaacaaaaaaaaaaagacgcgagagaacgtaaaatcactattgctcctctggctattggaaatatcagatcatcgaaccaaccaaacgaaggcagaaacaggcaaagagctcatagaaattctcgtcctcttcctacataagtcttctcttatcataaacgcgtgttgctcggataaggttgtgctgcggtgattcactcgtactttgcttaatatggcggttgagaagttgagcattgcaaaagatgtgactgaattaattggcaaaactccattggtatatctcaaccgcatcgtggatggctgtgttgccaaagttgctgcgaagctagaaatgatggaaccttgctccagtgtcaaagacaggatagggtatagcatgattgtagatgctgaggagaaaggactcatcacaccgggtgaaagtgtcctcattgagcctactagtggaaacactggcataggtttggcattcatggcagctgctaagggttataaacttattataaccatgccttcttcgatgagtctcgaaagaagaaccattcttcgagcttttggagctgagttagtcctcactgatcccgccaaaggtatgaaaggagctgttcagaaggcagaagagattcgggataagactccaaattcttatattcttcagcaatttgaaaatcctgccaacccaaagatccattatgaaaccactggaccggagatctggaagggctctagtgggaaggttgatgctcttgtctctgggattgggactggaggtacaataacaggtgctggaaaatatctgaaagatcagaaccctgatataaagctatatggcattgaaccagtagaaagtccaatactgtctggaggaaaacctggccctcataagatccaaggaattggtgctggcttcatccctggtgttctggatgtcgatttacttgatgaagttgttcaaatttcaagtgaagaagccattgaaactgctaaacttcttgctttgaaagaaggtttgctggtgggaatatcatctggtgcagctgcagctgctgcaattaagatagcaaagaggccagaaaatgctggaaaactcattattgcggtcttcccaagctttggagagcgttatttatcatctgtgctctttgaatccgtgaagcgagaagcagagagcatggtcttcgagccttgaatatgaagttatacgagccatttgctgcttttcaagttgcattctctccttgggttgtgtatctattttttctcttatggatctgaaaaataaaaaatggtttatgtttggttgttaattgactacgatttaataaaaaatataagatgtttgctggaatgttcagaaaaaaaaaaaaaaaaaaaaaaaaaaaaaaaaaaaaaaaaaaaaaa

SEQ ID NO: 1484 - DNA, 1143 bp, Glycine max
tgaaaatggtgagacaatctcagatgagcgtaaaatcagaataaagcctttgcccaaaaggatagtttcaagaccacctgaatttccagctgatcatccgggtccggctcccggggcccccccccccaattcatcacatttagattcatttctggatcctgccttcatgtccatgatcaaagaccccgatcaacggcggatggagcagtgggagaaaactgctgaagcacaaagaggctggaattgtgctaaattgattggatatggcgaccttggtggaccctcattgtctgctgccgaagaatattctctacactctagatacctgtctaaagcaaattccttaaatctttctgaaattgcagaaatgaaaattgtctatcgtggtggggtagacagtgaggggcatcctgtcatggttgttgtaggggcccactttttacttcggtgtcttgatctggagcgatttgtgctatatgtggtgaaggagtttgagcctttaatacaaaagcctttttctattgtctacttccactctgctgcatctttgcagatgcagccagacctgggttggatgagaagattgcaacaaatacttggtcggaagcaccagcgcaacctgcatgcaatatatgtccttcacccaactttcggactaaaagcagcagtatttggacttcagatgtttgtggacagtgtggtttggaagaaagtggtatatgctgatcgacttctgcagctcttcagatacatacctcgtgaacagttgaccatcccagattttgtgtttcagcatgacttggaagtgaatggagggacgggtctcattgtggatcccagaacaaaatatgtgtacaacagaccatgacacacatgaacttctatcattagttgataaaggaggaccattcactgcagtttttaaattatttgccttgcccttattgtcgctgttaacaggaaaaggggcttgtatgaatttgaaatgtgtatggaagctttcttttttttttttttttggatttttggaaggagtgataagttcccccgtttgtatatgttattgattgtggaagctaatggttggatttctttaattgtttgtatattcaagggaaatatattgaataaaattagtctttg

SEQ ID NO: 1485 - DNA, 2178 bp, Glycine max
cgcaccgcctcccgcccaccttccgctccgcctccctcgaccccctcgtcacctccgcctgcaactccgtcgtcacctccgccggcaactccgtcgtctcctccgccggcgacaccttcttcgccacctccgtcaactccttcctcgccccctccggcgactccctccgcttctccaccgtccactccttctgcttctcctccaccgtccactccaaccacgccgtcaacttcgccgccatcgacttctccgccgtcgccgccatcgcactcgccgccgtcgcctcccagtggcggcggaggcggcagcactccgagtccaccgtcccggagctcgccctctcctccgtccggatcgagaccgaccactccgtcgcctccgcccgctcccgcggccggtcgcgcggccggtgtggtggtgggaatcgccgttggggctgtggcggttcttcttgtgttgagcattctctgcatatgttgccggaagaagaagagaagacgtgatgaagagtactatgctccgccgccgcaaccgccgcggggacctaaagatgatgcatatggtggtcccccacgtcaatggcaacacaatgttccccctcctcaagatcatgtggtctcaatgatgcctccaaagccatcgccaccacctgctccaccggcttatgctgctcagcctcccccaccaccgcctcctttcatcatcagcagtggtgggtctggatcaaactattcaggtggtgaatttcttcctcctccttcgccaggaattgcattgggattctctaagagcacgttcacgtacgaggagttggcacgcgcaactgatggcttctctgatgccaacctccttggacaaggaggatttggatatgtgcacaggggaattcttcccaacggcaaggaggtggcagtgaagcaattgaaggctggaagcgggcaaggggagcgtgaattccaagctgaagttgagataattagccgtgtccatcacaagcatcttgtttctttggttggatactgcatcactgggtcccagaggctgcttgtttatgaatttgttcccaacaacacattggaattccatttgcatggaaaagggcgacctaccatggattggcccacaagattaagaattgctttaggatctgctaagggactggcgtatcttcatgaagattgtcatcctaagatcatccatcgtgatatcaaagctgccaacatccttctggattttaagtttgaagcaaaggttgcagatttcggtcttgcaaagttttcttctgatgtcaatactcatgtttctactcgagtgatggggacttttgggtatttggctccagaatatgcttctagtggaaaactgacagacaaatcagatgttttctcctacggagtcatgctcctcgagttaataaccggacgacggcctgtcgataaaaatcaaactttcatggaggatagtttggtagactgggctaggcctttgctcacacgagctttggaagaggatgattttgattctattattgacccaaggctccagaatgactatgatcctaatgagatggcacgaatggtggcttctgctgcggcttgcattcgtcattcggcaaagcgtcgaccaaggatgagccaggttgttcgcgctctggaaggagatgtctctctagcagatcttaacgaaggaattagacctggacacagcactatgtacagttctcatgaaagctcagattatgacactgcacagtacaaggaagacatgaaaaagttcagaaaaatggcattgggaactcaggaatatggtgcaagcagtgagtacagtgcagctacaagtgagtatggtttaaacccatctggctcaagcagtgaagcacagagccgccaaacgacaagggaaatggaaatgagaaagatgaagaacagtcaaggtttcagtggaagctcttgatccttggcaactatttcttcctttatcttttgtataaatctatatatgcttcatttcttaccaatgtcacagttgattgctttactgacatctttggagagacttgccaattacaatgattttttcccatttttacatatgatcatcttttgaattgtatttatcagggtatacaacaaaataacacaattcgattctttcatttttaaaaaaaaaaaaaaaaaa

SEQ ID NO: 1486 - DNA, 1843 bp, Glycine max
ccacgcgtcagctacgtaggccccccccccccggttcgctgctattcttcgtcagctgttgtctttccttttaggtaaactaatgggggatgattcttttcctagtttggacaaattgagggctaactggactccatctcaagatcgatattttcttcagcttttgctgtcccatgttcacaaagggaataaaactgggaaagtgtttagcagacaagcctgggtaaatatgattgaacaatttaacaccaagtttggtttcaagtatgatgtagaagtgttgaagaaccgtcacaaaagattcaggaagcaatacaatgatatgaaaatgatagttggtcaaaagggattccggtgggatgggacacaaaacatgatagtagctgatgataaagcatgggatgaatgtattaaggcccatcctgatgctcaacctttcaaaaaaagagtcggtccgtattatgatgatctgtgcataatttatggccatgcagttgctgatgggagatacagcctttcatgttttgatgtagattttgagtacgaagaaaaagatttggatgacaagactatcactagtaaaggagtggatgatcaaactcccccagcagttgttaatcaaggtagaattgactggtctccaatgatggaccaattttttgttgaacttatggtggatcaggtgtgtaaagggaacaagattggcactacattcaggaggaaagcatgggtagacatgacagaatcatttaataaacgatttttatgtcattatggtagagttgtgttgagaaaccgttttaatgtcctgagaaggcattaccgttctataaatatcctccttggcaaagaagggtttagttgggataagacacaacacaaggttgttgctgatgaacaagtatggcaaaaatgcatcagggtacatcacagcttccggctctataaaattaaaaacatgcctttttatttgggcatgtgcatagtatgtcgcaatgaagttactgtgggttgcaagtcaaatcttgaaaaggaatcttctgggggaaataactccgtcccagatactcagccactacctaatgcagataaaggagcatcaaatcttgaaaaggaatcttcttcgggcaataactctgtcccagatactcagccactacctaatgcagataaaagagcatcacatataggtggtgaatataattttaccagagaaactcagcctctgcctaatgcagataaagaagtgttgcatattggtggagagaagaactctgccagagaaactcagtcccttgctaatgcagataataaagcattacaacatgttgaaaaaaatgtttctggtcacctaaaaaggcatcaacctaaaatgctcccgacctttaatgagtctaagaaggcaagacagcatatagctgttgcggttgcatcactaaccaagaaaaaaaaaaaaaaaaaaaatttttctgtagataatgttatcagggtgcttcaggctataccagacctggatgatgatttaatattagatgcctgtgattttttggaagatgagacaagaggcaggatgtttctggcactggctgctcctttgagaaagaaatggttattgagaaagcttcgttcgcagtgattggtgaacctcaggctggttcatttatagtcagacttttcaagttttgttagactgcatgcaaaccaagccataactttatgtgttcacatgtacatatttgaaactagaagaattattttttgtttatctttgtcaacatttatatgacaagagattaaagtcgaaagctaacttctgtctgttaaaataatgtttaaataaaaa

SEQ ID NO: 1487 - DNA, 1432 bp, Glycine max
taacgttataaatcgagtcagctacgtaggcccccccccaaaaaaaaacagtttctcagtcatctttgtcatattccaaaattaagcttgcattattcaccagaatggctaattcatatgaaaacaacttcccccctcagaagcaagacactcagcctggcaaagagtacctcatgaatccaccaccccaatacaacagctcccaatacaagccatcaaataaacttcagggaaagatagctgtagtaaccgggggtgattctggaattggacgagccgtgtgcaacttgttttcattagaaggtgctactgtgatcttcacctacgtgaaggggcaagaggacagggacgcgagtgacacgcttgagattataaaaaaagctaagactgaagatgctaaagatccattggctatacctgttgacgtgggttatgaagagaattgcaagaaagtggtggacgaggttatcaacgcttatggccgcattgacattctggtcaacaatgcagctgagcagtacgagagtgattccctggaagatattgatgatgcaagactcgagagggtcttcagaactaatatattttcccatttcttcatgaccaaacatgctctgaagcacatgaaggaaggaagtagcattatcaacacaacatcagtgaatgcatatcagggagacggaacactagtggattatacttccacgaagggtgcgattgtggggtttacacgagccctagcgcttcagcttgtgagcaagggaataagagtgaacggggttgcacctggacccatctggactccgttaatagtagcaacaatgaacgaggaaacaattgttcgatttggttcggatgtgccaatgaagagagctggccaacctattgaagttgctccctcttatgtctttcttgctagcaacatatgctcctcttacattactggccaagtcctccaccccaatggtggaatcattgtgaatgcttgatgaattgacggatatataaatgatacctcattaatcgagactggtatatgtaatgtcattgactcattgtggttcttgtctacgtcaacactatgttacgaatggcagtgaatgagcacggtactatcgatatgtatgaatgaataatatatgtctggatgaagattcgttgaaagcaagcataaatattgctttcaaacgtataaacctaagaaaatgtactacttgaaatatatttgaagcaagatctattatatatatttgttacggacagataacggtcattgcagacctcaatcgcagtctgatgctgttgccatagccgccgtcactgtcatgttatctattatatatttgttgcggacagatactggagatactgtcgtttgcaaaaattctgtaactatttttatatgacaaatttagtatggttaaaaatattt

SEQ ID NO: 1488 - DNA, 743 bp, Glycine max
  misc_feature (719)..(719): n is a, c, g, or t
gaaaaccctagttataaaattctacacccaccgacggcagaaaccctaatagcagttttggaagagagggaaagatgcagatattcgtgaaaaccctaaccgggaagaccatcacccttgaggtggagtcaagcgacaccattgacaatgtcaaagccaagattcaggacaaagaagggattcctccggatcagcagaggttgatcttcgccggtaaacagctggaagatggccgtaccctcgctgattataacatccaaaaagagtcaacattgcatcttgttttaaggcttcgtggtggtattattgagccatctttgatggcactggcgaggaaatataaccaggataagatgatctgccgcaagtgttatgcccgtttacatccccgtgctgtgaactgcaggaaaaagaagtgtggtcacagcaaccagttgaggccaaagaagaagatcaagtaaactcttctgattgcaagatggaattttgtgttgtcatggattattggatgtcttgtaatcctgataactccattagcttcttagtactctagtaaatctttcggaaatttgacagtcagttactcttatgatttttgttttcagtttgagacggattgatattgattatgctacagttgcatgtgatgatacagttttatttttgataatactgcatgtgatgtctttatttcctgccaaaaaaagttttgaataaanaaaaaaaaaaaaaaaaaaaaaaaa

SEQ ID NO: 1489 - DNA, 2124 bp, Glycine max
actttatgttccttttggatcctctcacatctctctttctttctccggtgtcatggaatccggtagtgcccgatgtttatattccctccggttctgaaatcatcaaatgcaactaccaaacctcgagaagcttccttcacacacttccttcttttccttgttcttcgaacaagctctttctcattccatcaccacaacttccgatattgcatcttcaactgttttggttacattttacgcgtaataactgattgtttctttcgattggaaccatcgctcgaagagaatctccggtgacgtcgaagcaatattagtttactgtatgtattagttcggattaataataataaagcgcataagtgataacaacaacaaaaaaagaatatctgagttgaaaaattgctagaagaagattaaacgcgatgttggatcttaatctgactgccgagtcgactcagaacgacgagttgctggtgctgttggacaagtttcctgaagcttcgtcgggaacttcgaattcctccatcgtgaatgcggaggggtcgagcaacgaggactcgtgctccacacgcgccggcgacgtgttcaccttcaatttcggaatccttaaggtggaagccgcgaatgacgtcgttgccgcggcgacgaaggagctgtttccggtgagctcggagaattggcaggggcagagttcgacgtcgttgtttcaggcgaggaagagtttgatggatctctcactagatcaacaacacggggaggtgaaggtggtacaggttcagccacagcctaaggtgaagaagagtaggagaggtccacggtctcggagctctcagtacagaggagtcaccttctaccgaagaaccggaagatgggaatcgcatatctgggattgcgggaaacaagtctatttgggtggatttgacaccgctcatgctgctgctagggcctatgatcgagctgctattaaattcaggggacttgatgctgacatcaattttaatctcgttgattatgaggaggatctaaaacagatgaagaatctttccaaggaggagttcgtgcacatactccgccgccacagttccggtttctcaagggggagttcgaaataccggggagtgacacttcacaaatgtggccgttgggaagctcgaatgggacaattccttgggaaaaaggcttatgacaaggcagctatcaagtgcaatggaagagaggctgtgactaactttgagccaagtacatatgagagcgagatgaaacccgaagctattaatgaaggtggcagtcacgaccttgacctcagtctgggcatagcgaccccaggacatggtcccaaagaaaacagggggcatcttcagttccagtccatcccttacaacatgcatcctggaagaagttcaatgatggagactaatattaattccgttattggtgatccttctttgaaaagactggttgtaactgaagagcgtccttctgtgtggaatgccgcatattccactttctttcccaatctggaaagagcagagagaatgggcacagatccttcaaaaggagtcccaaaccccaactgggcgtggcaaacacatggccaggttactgacaccccagtaccaccgttctctactgcagcatcatcaggattctcaatttcagccacttttccatcaactgccatctttccaacaaaatccatcaactcagttccccatagcctctgtttcacttcacccagcacaccaggtagcaacgcacctcaattctataactattacgaggtgaagtccccgcagccaccgtcctagcctatcttgtaatacaagtacaaatggttaatcgaaacaaccttttgcgcttaaaactcatcgtataattctgttactgattgatgtatacttagatacgacatctgattgcacttcttggtttaacaaaccattatgcacaaatgatgtatgaaggaaaaagctctttttgagtgctccagttctcttaggattattttttcatcaaaattagtatcaagttgtcagaattcgtgtattcacccaccaattttgtgaatatatgcctttgtgtatgcaaccctgaaaatgggaggaaacaaaaaaaaaaaaaaaa

SEQ ID NO: 1490 - DNA, 1503 bp, Glycine max
  misc_feature (2)..(2): n is a, c, g, or t
cntaaccaccgcaacgcaataaagcaagcaagcattcccttctttttttttttttatgtcgtgtcgtgccctttaatcttaaaggattgcttttccttagcgtaaaacttagtcaaagcacaaatgttttttgtttttatttcaatcaatgagcacataatacatccaattaatccctatcccccaccgagcgaaataatttaataatgagccaccaatgcaaatactttggtagataaaatagaggtagaggtgtggtagatttgagagcaacattgaaatgcatgccaagacagactcggaggtaacaagcctggatgcgtcgtccagcacaaggtctcctcggcgagcagtgtactacgttcagagcccttcccacgatggggagaaaacgacgacgtcgttgcactccacccctgttctcagccccatgggttcccctcctcactctcactcctcctccagccgcttctccgcttcacgccaccgcaataaccataataataaatcttggaagggcatcgacgtcatcgaagaagagggtcttctccaatccgaattagatcgccaacattctctctctcgtcgatactatttcctcgccttcctcctcggcttcttccttctcttctctctcttctctctcatcctctggtgtgccagccgacccatgaagcccaaaatcctcatcaagagtataaaatttgaccatctcagagttcaagctggttccgattccagcggagtagccaccgacatgatcaccatgaattccaccgtcaaattcacttatcgcaacactggaacattctttggggtccatgtcacatccacacctttcgatctctcctattcagatattgtaattgctacgggaaatttgaagaagttctatcagtcaaggaagagtcagagattagtgagtgtggcggtgatggggaacaagatcccgttgtatggaggaggtgctagcttgagtagctcaaccggtgtgcccacgctgcctgttcctttgaatttgacctttgtcattcgatccagagcttacgtgcttgggagattggtgaagcccaagtactacaaaagggttcaatgttccatcaatttggatcccaagaagattaatgttccaatttccctcaagcattcttgcacctatgattgattgagtcgcaagtgaggaaaggaattaagaagcagcacatgggaaagaaaaatatttttttttactactattccttcatgattcgttggttttctatcttggctgaggaaagtaatgtgtatacagctcatagggcaggattggaaggacgcgtgcgtcctttgttttttttgcacatttttggctgcctcaatagtatgcacagacgtgatggatactgaagataattaaaggcatgttggattttttctttaaataattttgtcccatcatgtaaaaggaagaaataatgttattatgtagtacttaatcttcaatgttgttttcatttttcagat

SEQ ID NO: 1491 - DNA, 959 bp, Glycine max
tcagggccgcgggtccccccggcgagttcagctgcgaaatccttgtgcaccgtaagggttgtgaagcaggcagagaagagccatggtgcacgtttccttctaccgaaactatgggaaaaccttcaagaagcctcgtcgtccgtacgagaaggagcgtttggacgccgagttgaagctggtcggtgagtacggacttcgctgcaagagggagttgtggagggttcagtacgctctcagccgcatccgtaacaacgccagaaatcttttgaccctcgacgagaagaacccgcgccgtatcttcgagggagaagcccttctccgaagaatgttccgttacggacttctcgatgagactcagaacaagcttgattacgtgttggctctcaccgtcgagaactttctcgaacgccgcctccaaaccctcgttttcaagtctggcatggccaagtccatccaccacgccagagtcctcatcaggcagaggcacatcagggttgggagacaggtggtgaacatcccatcattcatggttagggttgattcgcagaagcacattgacttctcactgaccagtccacttggtggtggtcgtccaggacgtgtgaagagaaagaaccaaagggctgctgctaagaaggctgctggtggagatggagatgaggaggacgaagattaaattattaatggctactgatatttaggccttgcggttgttattttttttatattatctgtgttggtagacattttagatttttgaaatggtctgacttgttataattttgccatccttgtttcttgttttgaggtaaagctgtgcctgagatatcatggttttgaactgttctttctaaactattcaagttttgttccaatgcctgtggtgatcaatggtattcttgcaacttgattcaactgctaatatattggtggttttaggcgaaaaaaaaaaaaaaaaa

SEQ ID NO: 1492 - DNA, 1302 bp, Glycine max
ctctaccatgcgcgcgcgacaagacggcgtgggaggcataccaggagggcaagggcgtctgccgcgactatgcccacctcgccattgcgttctgccgctgcatgaacattcccgcacggtattgcaccggctatctgagcgacgtcggcacgccgcagccttgggcggtgggcgatttccccccccgcttcggctgcgcagagtacgccacacgggtcagctgcgaaaacctagtgcaccgtaagggttgtgaagcaggcagagaagagccatggtgcacgtttctttctaccgaaactatgggaaaacgttcaagaagcctcgtcgtccctacgagaaggagcgtttggacgccgagttgaagctggtcggtgagtacgggcttcgctgcaagagggagttatggagggtccagtacgccctgagccgcatccgtaacaacgccagaaacctattgacccttgatgagaagaaccctcgccgtatcttcgagggtgaagcccttctccgaagaatgttccgttacggactcctcgacgagacacagaacaagctggattatgtgttggctctcaccgtcgagaactttctcgaacgccgcctccaaaccctcgtcttcaagtctggcatggccaagtccatccaccacgccagagtcctcatcaggcagaggcacatcagggttgggagacaggtggtgaacatcccatcgttcatggttagggttgattcgcagaagcacattgacttctcactgaccagtcctcttggtggtggtcgtccaggacgcgtgaagcgaaagaaccaaagggctgctgctaagaaggctgctggtggagacggagatgaggaggatgaagattaaattattaatggcttctgatatttatagaccttgtgctcgtttttttatctgtgtcggtagacattttagatttttgaaatggtctgacttttataattttggcattcttgtttcttgtttgaggtaaagctgtgcctgagatatgatgtttttgaactgttctttctaaagtattcaagttttgctccaaaaaaagaaaaaaaaacaaaaaaaaaaaaaaaacaattctacttgctaatattatcggtggttgtaggcttctttgcataagacagttagttagaagttaaaatgctcaaagatattgttttggtccatcaaatgacagaattagttcttgggggcctgatttcagctatggtttcatcgagtacaactaggtttcatggtataatgacgaattctagattttattctatgctaagcaatacttgtgt

SEQ ID NO: 1493 - DNA, 1200 bp, Glycine max
gcgaaacatgctctctctccacatcgccccttttaaaaaacacaaacctagtcacgtcgccatcctctcttctcatcctctaaaggctgcactctcttttatccctcaaaaaccaaaaccctaatggcagagcgcggaggtggcgaccgtggcagcgaccgtggcggtttcggacgcggctttggtgggcgagggcgcggaggtgacaggggccgaggccggcgccgaggtccccgccgcgaggaagaggagaaatgggtcccagtgaccaaactgggccgcctggtgaaggagggaagaatccgaagccttgaacagatctacctccactcgctcccgatcaaggagcaccagatcatcgacacgctcgtgggtcccaccctcaaggacgaggtgatgaagatcacgccggtccagaagcagacccgggccgggcagaggacccggttcaaggccttcgtcgtcgtcggagacaacaacggccacgtcgggctgggcgtgaagtgcagcaaggaagtggcgacagctattcgtggcgcgattattctggcgaagctgtctgttatccccgtgaggagggggtactgggggaacaagatcgggaagccccacaccgtcccgtgcaaggttacggggaagtgcggctccgttaccgttaggatggttcccgcgccgagaggttcggggatcgtggcggctagggttcccaagaaggtgctgcagttcgcggggattgatgatgttttcacctcctccagaggatccaccaagaccctcggcaacttcgttaaggctacttttgattgcttgatgaaaacctatggattcctgacaccagaattctggaaggagactcgcttctccaaatctccattccaagagtacacagatctactggcaaaaccaacaggaaagactctaatcttggaggaggaaagggtggatgcttgatttgctagttttgctttatggatgttttaggaactttattactttacatactttgttggttctgtgctttacttttggttttgatagacggtatgtctctgtatgcattttgattgtttccaagttttaattgactgcagttgagtaccatagatttctacctgtttaatttggttgttgcatccaaataacagaactgcattgccccgtctagcttctcagtggaaatataaaagtgattttttttat

SEQ ID NO: 1494 - DNA, 1120 bp, Glycine max
acgacctgcaggtcccggcgccgaattcccgggtcgcccctcccgcactgtgcttctcattctcttctaaaaacgccgcagtctcttctctctcagaaaccctaatggcagagcgcggaggtggcgaacgtggcggcgaccgtggcggtttcggacgcggcttcggcgggcgagggcgcggaggcgacaggggccgcggccggcgtagaggtccccgccgcgaggaggaggagaagtgggtcccggtgactaagctgggacgcctggtgaaggaaggaagaatccgaagcctggagcagatctacctccactcgctgcccatcaaagagcaccagatcatcgacacgctggtgggccccaccctgaaggacgaggtgatgaagatcacgccggttcagaagcagacccgggccgggcagagaacccgtttcaaggccttcgtggtcgtcggcgacaacaacggccacgtgggtctaggcgtgaagtgcagcaaggaagtggccaccgcaattcgtggcgcgattattctcgcgaagctttcggttattcccgtgaggaggggttactgggggaacaagattgggaagccccacaccgttccgtgcaaggttaccgggaagtgtgggtccgttaccgttaggatggttcccgcgcctaggggttccgggattgtggcggctagggttcccaagaaggtgctgcagtttgctggtattgatgatgttttcacctcctccaggggatccaccaagacccttggcaacttcgttaaggctacttttgattgcttgatgaaaacctatggattcctgacaccagaattctggaaggagactcgcttctccaaatctccattccaagagtacacagatctattggcaaaaccaacagggaagactctaatcttggaggaggaaagggtggatgcttgatttgctagttttggttttatggatgttttagagacattgttatttacctttgttggttctgtgctttacttttggttttgatagacggtggtatgtctctgtatggattttgattgtttcaagttttaatttaattgactgtagttttgaatacaaaaaaaaaaaaaaactgtttaacaaaaaaaaaa

SEQ ID NO: 1495 - DNA, 1085 bp, Glycine max
acataaacccttcgagtacgcttcgtaacgtcccccccctatcttctaaacgccgcactctcttttcttcctcagaaacacatcctaatggcagagcgcggaggtggcgatcgtggcggcgaccgtggcggtttcggacgtggattcggcgggcgaggacgcggaggtgacaggggccgaggccggcgccgaggcccccgccgcgaggaagaggagaagtgggtcccagtgaccaaactgggccgcctggtgaaggagggaagaatccgaagccttgaacagatctacctccactcgctcccgatcaaggagcaccagatcatcgacacgctcgtgggtcccaccctcaaggacgaggtgatgaagatcacgccggtccagaagcagacccgggccgggcagaggacccggttcaaggccttcgtcgtcgtcggagacaacaacggccacgtcgggctgggcgtgaagtgcagcaaggaagtggcgacagctattcgtggcgcgattattctggcgaagctgtctgttatccccgtgaggagggggtactgggggaacaagatcgggaagccccacaccgtcccgtgcaaggttacggggaagtgcggctccgttaccgttaggatggttcccgcgccgagaggttcggggatcgtggcggctagggttcccaagaaggtgctgcagttcgcggggattgatgatgttttcacctcctccagaggatccaccaagaccctcggcaacttcgttaaggctacttttgattgcttgatgaaaacctatggattcctgacaccagaattctggaaggagactcgcttctccaaatttccattccaagagtacacagatttactggcaaaaccaacaggaaagactttaattttggaggaggaaagggtggatgcttgatttgctagttttgctttatggatgttttaggaactttattactttacatactttgttggttctgtgctttacttttggttttgatagacggtatgtctctgtatgcattttgattgtttccaaaaaaaaaaaaaaaaaagaaagaagggaaaaaagagggggaaggggcg

SEQ ID NO: 1496 - DNA, 1248 bp, Glycine max
tataaacactctttttttttttaaccaaaatcaaagtagttcatcctttccggaatatttcttcaccatcactaatcagtacataacatgattctttccaaatggattcagaccaattcaattgttacagtatgtagggacacaacaaatgatattcgtctcatgtcataccaaagtaaaactgcaaggtattcctgaatcaattcacatactatgcatatctagaactcaataattatcttcccagttgcatggccattaatactcttagcccaggcatcttcagccttggttagaggatatttggagtccacaactgttttaagctttccttccttgactaaatgaataagatgttgaaggtcctcacctttaggaaataaaagcaaaggcacaagttgctttttggagaaggtaagttttttcagagcaaatgtcagcattgaagcagagcttggagttatgtctacaacctttccagtcacggtcaagttaggctcaaaggtggaccatggaaagcccattgcacagtgaatcacagcatcatatttcttaccagatggactcttcaaagcagcgccatctggggtcttatagtcaattacctcatcagcccctaaacttttcaccaattcaatattgcgagctccacatgttgctgtcacatgagtgtttcctagctttgccagttggacagcatagtgaccaacaccacctgatgcggcagtgaccaaaatgcttttcctttcaccactcccatcaagttttatccctatggatttggtgagagcttgaagagctgtcagacctgctacaggtagggcagcacattcagatgctgaggtttctgatggtcttgatgcagtgacactctccttagcaaccgcaaactcagccagtcctccgccattcactttgtcaccaggtttgaacttttggacaccttgaccaacctctgtgacctctccagttatatcagtgccaggtatatgtgggaacttgcgaggcaaaagtggccacaacatgcgtttctgtactttccaatcaaatggatttatactagctgcttcaaccttaatcaaaacctcatctttgctgggagtaggtatgggaacttcaacatgctttaagccagcaggtcctccaccgtagctatcatactgaaccgcatgcatgagtttcttccccatatccgcagttgagaatgtgagaaactatcagtagaagttgttgataatttgggtgtgt

SEQ ID NO: 1497 - DNA, 1552 bp, Glycine max
gcagattcttaatttcttactaagccttttttgttgtgattcagtatcatcatcatggcaatgtccgtgataagaacaaaaggaggcctagttaagccagcagaggagactcccttgagcacagttctggacctatcagccatcgatagattacctgttctaagatgcaatgcgagaaccttacacgtgttcaaacacggtggtcctgaagcgccaagggtcataagagaggccttgtccaaagcactggttccgtattaccctcttgcaggaagactcaaagaatccaaaccagggtgccttcaaattgaatgctctggtgacggcgtgtggtatgttcaagcatcttctgattccacccttcactctgtcaatttctttgatgatgttcactctattccttatgatcatcttcttcctgatgctattcctgagacccaatgcatcgaccccctcgtgcaaatgcaggtaacacaatttggttgcgggggtttcgtgataggcctcatattctgccatagcatatgcgatggtcttggtgctgcacagtttctaaatgcaatcggggaactagcaaggggactcgaaaaactcagcattgagccagtgtggaacagagacttctttccatctcctcaaacaccccaagaaactgcattgccaccaacaccacctacaatgccagattacaagctagaacctgccaacatagatatgcccatggatcgaatcaacagtgtgaagcgagaatttcaactagcaactggactcaattgctcagccttcgagattgtagctgcagcatgttggaccactagaacaaaggccattgatcaattcgaggccaacactgaattgaagttagtgttctttgcaaattgtcgccacctcttggaccctcccctacccaatggtttctacggcaattgtttcttcccagtgacaatcacagcttcgtgtgagtcacttagaaatgctacaattgttggtgtggtgaagctgataaaagaagccaaggccaagttgcccgtggaatttgacaagtacttgaagggtgagcatttgaaaaacggagaggacccttttgcgcctccgctcacatacaccactctctttgtatctgagtgggggaagttgggattcaaccacgtggactacctgtggggcccacccgtccacgtggttcccattcaaggatccagcatcatacctgtggccattgtggggtccctgccccttcccaacagagggattcgtttgatgacgtggtgcgtggaggaggcacatcgccttccttttcttcatcacatgcatggtgtcgtgaatcatgtaagcggaagaataattaaatgaagattctactttgccttcttttatgaacctgaaattgctatttcctgttccttttaatccctgatcttaccatttgagatagattgtaatttctgaattgtgttatgggtgggctgctgcacgagtgaaattgtaagggtgggtgttcaagagagcctcctttcataaataaattaattaactaaaaaaaaaaaaaaaa

SEQ ID NO: 1498 - DNA, 1603 bp, Glycine max
  misc_feature (1518)..(1518): n is a, c, g, or t
  misc_feature (1529)..(1529): n is a, c, g, or t
gaattggtccgccccacttgaattattgtgtcgcgaccactgttgtacgtgtcaccgttcaacttgttgagttgattgttatctgatgcatcccaaaattttatctcaccttctttctttcatatacataaaacgcctcatttcctgttaagtaacacagtgcattttgatctgatatagtgaatagaaatggctaaaaacgagttgaggcttttgggtgcttggttcagtccatatgccctgagggtgcagattgcccttaacctcaagggtctagattatgaggttgttgaagagaccttgaatcccaaaagtgatctgcttcttaagtccaaccctgtgcacaagaaaatcccagttctactccatggagataaagtcatatgtgaatctgcaatcatagtagagtacatagatgaggtttggtccaacaatgctctctccatccttccacaaaatgcttatgaccgagctaatgcccgattttgggtttcttacatcgatgacaagtggtatacgtccataaggaatactattttggctgaagcggctgatcaagatgatgaggcaaagaagccacactttgtgagaatggaagaagctcttgagaggatggaagaagtgttcaacaagtgcagtgaaggaagggcttattttggaggagatacaattggaattattgacattgcttttgggagcctttggggttgggtgagagtgatagaggagatgaatggaagaaaagtgtttgatgaagcaaaaaaccctgctttggctaaatgggctgataagttttctgctgatcctgctgtgaagggtgttcttccagagactcaaaagcttattgagtttgccaaaattcgtaagcaaaaatgggctgctgcagctgcaaagtaaatgaaattaattgctagattacttgggcttgaaattgtgaagttttacttttcattttttttcccttgtagactatgtttgttctaactttatgttggcttaaaagttactttaaaaggtctaggttgtctctgctagcaactgagtctctctctcttgtttgtagttcatgtctcctgtttttttatttagcaaaaaggagtgctaagatgcagcacaaccaaatttattataaaggcaagaaaataaaaataaaaaacttggtggcataaacctcacccaggacaagttacttgaacctaaagaaatgcaatacatacctattgcgaagaaagtcctcccatataaagctagggagggttttccaccaagtaaatttccgtacatgaatgtcaaaataggccaatttaattttcttctctaaaaatgtgagtatctaaaattaatctttctaatttaattctatatagtttaaccatctatttctaaatcactacgaaaccagattagtccatcctttttcgatggctaattcagtagcaagcatagcaccagtgagttcagcattgaagacaggagaaatccctagataagtacagaagcagccaaggaacacaacanctttgtctcanaaaatactcacaagaaagccaatccgtgttgcacttaatctaggtatgttgaggaagaagccaatctacttgaa

SEQ ID NO: 1499 - DNA, 2601 bp, Glycine max
aaaaccatccactgctagtactttggaagaattaagggaactgtcaatcaaggggaaactgtattggatgttcctgactcagctacgtaggccccccccccccaagttgacagatgatgttccttctgctgaagatgatatttctgaaaatgtgggaaccagtgcaactaatggctcgtcaacagctattgtggatgatgaaagtaacctagtcagcaatgtttctagcccaaagacaggtatagatagtgccattgagaaggaagaagaggtagcttttggaagtttaattcctgaagaggatctatctactgtaaatccaataattgaggaagctactcagacagatgtcacaacaatcgatttgaaaactgacgcacctgttgaaatagctaatgaaaatgtaatagaaactggagttgatcaaattgttgcagaagatgagaaacaatcacaaactcctaatgcaatggaagagtttgcagctgcagtactaacagacagtgatgtggtcgaacctagccctgataaaaatgatgcaattacagaatcagatattacatcgagtgcaccagctccccaagaaagtgcaggtgatgatgttggagctattactgagaacattgacagcgatactagtttgagtggacaaagtgacgagttgtctcctgagggaagcttgactacagatgcaacagaagaaactgatcaggttccttctcctgaaagttctgccactgaagtagtaaaaacctccattgatgatcctgaagaagaagcaaaaaaacaaactccggctacagagaatgaaaattcttttacctcacaagttgaagacaaagaggttgcaattgcatctgataaaaatagcagtttatctaattctgatggacaaactggtgctacttcaggagaaagcttgagtaaagcaactatatcaccagcacttgtgaagcaacttcgggaagaaacaggagctggaatgatggactgcaaaaatgcactatcagagaccggtggggacattattaaagcacaagagtaccttaggaagaaaggcttatcaagtgcagacaagaaagcaagcagggtaactgctgaaggaaggatcggttcttacatccatgacagcaggataggtgttttggtagaagtaaactgtgagacagattttgtctcacgaggtgaaatttttaaagagcttgtcgatgatatagccatgcaagtggctgcatgccctcaagtagagtttcttgttactgaagatgttcccgaggaaattgtgaacaaagaaaaagagatagaaatgcagaaagaagatcttttgtcaaaaccagagcagataagatcaaagattgttgaagggcggataagaaaaagacttgaggagctggcattgcttgagcagtcctacattaaggatgataaggtagcagtaaaggacttcgtcaagcaaactattgcaactattggagaaaatattaaagttaagaggtttgtgcggttcaaccttggagaaggtttagagaagaaaagccaggattttgctgctgaagtagcggcacaaactgcagcaaaaccagcacctatactggtgaaagaggagcctgctgttgcagatgcagaagccaaggagaccgagccaaagcaaataacagttgcagtctcagcctcattggttaagcaactgagggaagaaactggagcagggatgatggactgtaagaaagctctagctgaaactggaggggacctggaaaaggcccaagaatacctcagaaaaaagggtctctcatctgctgacaaaaaatccagcaggctagcagccgaaggcagaattggttcatacattcacgattcacgcattggcgttctaattgaagtgaactgtgaaactgactttgttggtagaggtgagaaattcaaggagttggttgatgatcttgcaatgcaagttgtagcctgcccacaggtgcagtttgtatccattgaagatattccagagactattgtgaacaaagaaaaggaacttgaaatgcagagagaggacctgctttcgaaaccagagaacatcagagaaaaaattgttgagggaaggatctcaaagaggcttggggagcttgctcttctagagcagccttttattaaggatgacagtgttttagtgaaagacttggtgaagcaaactgtagctgcactcggagagaacattaaagtgcgccgttttgttcggtttacgcttggggagacatctgaaaaagaaacaacagtaccagcataactttaggataagtaacatcaagcaagcatgaatggtaactggggaatccatatgcatgttacaaaagtccaagagactaatgttggaaacagcagcaattgattcttcataataaccaaatgtgcaatcggcagggacactttttcctaatctgtatctacattgaggatacacgaggactaaattttgtgttaattctctacagtttgtatgctgaaaaatattagtggatgcatttttgaattacaagttttattaagttttgaattactggtttcattaattattgactcgttgcttctcatgtaaataaaaaaaaa

SEQ ID NO: 1500 - DNA, 1263 bp, Glycine max
gcacgagttttaaacagaggtcaattttttcttttcaccatttacgtattcaactatccaaaaggccatgttgcgttgcttgttgttgttgagtccaaccaccctttccctccaataataactcactcctacaattgaccattgacttcaactatttacactcgattcaagtgcttagtgcttaccatcagacactagttaattaaacaaacaaagtacagaaattaatactatgagtcactaataatgactactaacaagtactaataactttaacctcaacactaatttcacctactctagagaaatatgaagcattccaacgacacaagagggttttctagtgactcaatagctgatgaaggccatttaccctccatgctcgaattctccattttccggccaccgctctccgccgtgccggttcttaccctagccggtgattgattcgtgtgcgttctcctcttcgacgggctctgacccaggatggatctagttgccacgctgtcggtgcgggtcgccggcgacctggatcggcgaccggaaatctcgccggagtcacgccggcgaggttggctcccggttcccccattgcccatttgaacaactctcaccgacccaatatttcttcttgccggagactgctccggcctcctcgccggagacttccccgccgtcatttccctccggcagccgaactcgccggaaaaggagcgtgctttgctcaccttcgccggggatctgttgaccctctgacgcgcttcttcttcggcgaatgtggaaacgctctcactcacgctgcaaacttcagaaacctcagagatctcatcgggcttgatgaaaagcttctccttctcgttctcaacttcggtctctgttggcttctccgcttcgaatttgggcttccatttgggtgtttcagacaacacttccttcaccgtttcttcctccggtggcggtgctctgttttctgaacctttcgcggcagatcttggtgtctccaaaggcttgcttgagggtgaagaatgagatctgttggtactgacgcagcaacccattttggaattgtgaagcagagtggtcgtaggttgctaatgtgtggggcgaaagagaaagaggaaggtttgttccattaagtatgttgtagtgtagtgataaagtagtagtagttgaagagggagaggacacgagagaggatgcacaaaaagaggaaatggtagttagaaaaaggggcgggccccttcggtgctcttcgcagccgta

SEQ ID NO: 1501 - DNA, 1979 bp, Glycine max
  misc_feature (64)..(68): n is a, c, g, or t
  misc_feature (88)..(92): n is a, c, g, or t
  misc_feature (292)..(296): n is a, c, g, or t
  misc_feature (336)..(340): n is a, c, g, or t
  misc_feature (411)..(451): n is a, c, g, or t
atttataaacttttcaagtagttaatggctatgttttccaggcattatttgtatggatactttnnnnnatgccatgtagagagggctnnnnnatatgtattctgttgcaatgatttggattggcctgaattagttttctaataatatgatattttctaccactaagtattcattcttttcataccaaaataaacacatttgcacttatatgactgtatctttaacaacacttgttccataattcatatcctaactacaaatatgtattttcttaattcataacaagttgggnnnnntgtgagttcacttcctgttctctctagttggaaatggggnnnnnccattattgtggtatactctgttttgggagagttcctattttctcttgcattgtattccatgtctctctcnnnnnnnnnnnnnnnnnnnnnnnnnnnnnnnnnnnnnnnnnatttcaaattcgggtcagctacgtaggcccccccccccaccagtattttgcatggttgttcttaaaagttgtattaacactatgaacctttgcaggtgcatcacaccttagcttcaaggcatcacaagttgtagatacaattaatactcaatatggagctgagtgctataaaagacgcttttgaccgtgttactaagaagcaaaagttatcttgttccaagactcaagaagcaattgatctgatcagacaggaaattgagagtgttttagacacgctgcagtcagtgaataacactgaccatgaacttgattataaaactgtcctgaatgagcttaaggccagtttacttaaaattgctccacttagtcaaatggaaggtacacagaaggagctaaatttagcactcaccaagtatgggaagcttcatgagaaacattttaaccctgatatatccaaggcttacagaaatgtcgacattgatatacatacattaaaccaaataattgccaaccatttttatcgccagggcctttttgagataggggaccattttatgagtgtggttggagagctagaatccgcagccattatgaaatctccatttctggaaatgtatcaaatacttgaagccatgcagaatctgaacctagagccagccctcaactgggctgccactaatggtgacaaacttgctcaaagtggatctgatattgtgttgaaacttaactccatgcaatttgtgaaaatacttcaaaatggaagtagagaggaagctcttcattatgctcgaacacacctttctccttttgctaccagtcacatgactgatattcagaaacttatgggctgtcttctatggacgggaaagcttgatcgatctccttaccatgcattactatcagcatctaactgggataagttggccgaggaacttaaaaggcagttctgcaatcttttgggacagtcgtataatagtccattgagcgtgaccgtagcagcaggggtccaggttttgccacctctcctcaaatttatgaatgtcatggcagggaagaagcatgaatggcagtctatgaaccagttaccggtgctggttgagttggaccgtgagttccagttccattctattttcgtttgtcctgtctccaaggaacaagcaactgaggataaccctccgatgttaatgtcctgtggccatgtcctctgcaagcagtctatcttgaagatgtccaagaatagcacaaaaatgtttaagtgcccatattgtccctttgatattgatgcagcacagtgcaagcagctatatttctgatgtttgatggatttgtatgaaactcttgtataaactgaatcatgttttagcaatagttgtaaccacgtttgcaaaggcccattccttgttgtgatttctgtattagtgtatttcataaatttgttgtaaatataaattattttttaatctggatatgactggcaagtccttcattaattaataattatcagaaatcgttggaataagctttgatc

SEQ ID NO: 1502 - DNA, 829 bp, Glycine max
  misc_feature (559)..(559): n is a, c, g, or t
  misc_feature (576)..(576): n is a, c, g, or t
  misc_feature (708)..(708): n is a, c, g, or t
  misc_feature (745)..(746): n is a, c, g, or t
acgtgaccacttcccatcttcgcacacaacacagccatccctttctctcccttcttttgctctctgccctaaccagcctcaccagatcttttacctccatttccagtgcatcacaccttagcttcaagccatcacaagttgtagatacagttaatactcaatatggagctgagtactataaaagatgcttttgaccgtgttactaagaagcaaaagttatcttgttccaagactcaagaagcaattgatcagatcagacaggaaattgagagtgttttagacacactgcagtcagcgaataacactgaccatgaacttgattataaaactgtcctgaatgagcttaaggccagttttcttttaattgctccacttagtcaaatggaaggtacacagaaggagctaaatgtagcactcaccaagtatgggaagcttcttgagaaacatttcaaccctgatatatccaaggcttacagaaatgtcgacattgatagacatacattaaaccaaataattgccaaccatttttatcgccagggcctttttgagataggggacncattttatgagtgtggngtggagagctagaatccgcagccattatgaaatctccatttctggaaatgtatcaaatacttgaagccatgcaggatctgaacctagagccagccctcaactgggctgccactaatggtgacaacttgctanagtggatctgataattgtgtggaacttaactcatgcnnattgtgaaatacttaaaagggagtagagaggagctcttcttatgctcgaacacacttttctctttgctacagtacatgactga

SEQ ID NO: 1503 - DNA, 2354 bp, Glycine max
tagcgcccgagcaatagcaagcgaacaggaggctactggtatgcctcaattggatttctcctgcagaatacttgttcttggtaaaactggagttggtaaaagtgctaccataaattctatatttggtcaagcaaaaaccaccaccggtgcttttcaacctgctactaattgcatccaagaagttgtgggaaatgtcaatgggcttaacctaacatttattgatacccctggtttcctgccttcctccaccaacaatatgaaaagaaataagagggtcatgctttctataaagagattcattagaaagtcctctccagatattgttttgttctttgaacggcttgattttatcaatgctggttatgttgacttcccacttttgaaacttgtaactgaagtgtttggctcggcaatttggttcaacaccatcatagtcatgactcattcttcctctgccattccagaaggacctgatggttatacttttaattatgagtcatatatttcttattgtactaatatagtacagcagcatatacaacaggcagtgtttgattctaaggttgaaaaccctgtacttttggtggagaaccattctcgatgcccacaaaatattatgggagagaaaattctcccaaatggacaagtttggagatctcaactcttgttattttgcatttgtaccaaagttttgggtgatgtaaattctcttctaaagtttcagaacagtgtagagctagggccattaaacagtccccgcattccttctatgccccatctcctttcgtctctcttacgccatcgacttgtatccaatctaagtgggactgatgatgaaattgaggaaatattactctctgataagaaagaagaagatgaatatgatcaacttccatccatacgagtgttgacaaaatctcagtttgaaaagttgcctgagccactaaaaaaagattatctggatgaaatggattacagggaaactctttacttaaagaagcagttgaaagaagactatcagaggcgcaaagagaaactactctcaacagataaaaagtttttgaatggtgataaccctgatgatcaacaggcacctactgaacctgttttgttaccggatatggctgttcctgcaagttttgactcagattgccatagccatagatatcgttgtcttgtttctgatgaccaattgcttgtgagacctgttcttgatctacaaggatgggatcacgatgtgggctttgatggtataaacttggagactactacagaaataaagaagaatgtatatgcctcagttgtgggacagatgaataagaacaaacaggatttcagtattcaatctgagtgtactgcagcttatgttgatccgttgggccctacttattctatgggtgttgatgttcaatcctccggtaaagatttcatttgtaccattcatagcaacacaaagttgaaaaacataaagcacaatattgctgactgtggtgtttctttaacatcttttgctaagaagtactacgtgggtgcaaaacttgaggatactgtgtttgttgggaagagattaaaatttgttttgaatgctggccgcatggaaggtgcaggacaaatggcatatggtgggagttttgaagctaatttacgaggggaagattatcctgtaagaaatgacaatgtaagcttgacgatgacagtcctctctttcaataaagaaatggtgttgagtggaagtttacaatccgagttcaggttatctagaagctcgaaagcatctgtaagtgctaatctaaatagtcgtaaaatggggcaaatatgtataaagataagtagctcggagcatttacaaattgcctcggttgcaattctctcgatttggaaattcctatcacgtagaaaggaaactaagaacttggtgaaggaagtaatggactgaagtctgctcttgttaggtttacatactggtactgatactttttgttcaaggaagatgcgaaaacagtgaagcattctacaagtcctacgtagatatagacctttttcccctgtaaaaggaagacagaaagttagaaatggactgtattttattttttgaagaggctagctggaattttcttttctgtgatacttcagatgccagtttttgtaagtctttttaggtaaggctggcttgcatcttgaacttatttctatctgtagattattgattaattatcagtatgagagaattaatattcatttctagtaaatgaagtcataattgtacaggaaagcacagaaaatgtcaggactttcttttctttttaaaaaaaaacagaatttaggaacaacaaaaaaaaaaaaaaaaaaaaaaa

SEQ ID NO: 1504 - DNA, 1661 bp, Glycine max
tcgaggggccggccgggccggggattcatcacataataacaacactataaacattcagcttcgctcgccccccccccgagaccaaaatgtctttcactgcaaccaagttttcaccttctcctctccctctcacttccaccacccccagatccaatgacaagcctctctctttctccttcgatcactccaaacccaacccttcttcctccttccttggatccactcgcaagcttcttcgcttcaatgctctcgctaggcctcatgctcaccctcgtgcttcttcttcccctgctgctgctgttcttctcgaacgaacctccaatctgcttgtcacaaaagaggaagggttggaactctatgaagacatgatattagggaggttttttgaggacaagtgcgctgagatgtattataggggcaaaatgtttggttttgttcacttgtacaatggccaagaggctgtgtcaactgggttcatcaagcttctgaagaaggaagattctgtagtgagcacctacagagatcatgttcatgcattgagtaagggggtcccatctcggcaagtgatgagtgaactgtttgggaaggcgacagggtgctgccgaggtcaaggtggttcaatgcatatgttctcaaaagagcacaacttgcttggtggatttgccttcattggtgaaggaattccggtggccaccggggctgcattttcgagcaagtacagaagagaggtgttgaagcaggcagattgtgatcatgtgacgttggcattttttggagatgggacttgtaataatgggcagttctatgaatgcctgaacatggcagctctgtggaaattgccaattgtgtttgtggtggagaataatttgtgggctattgggatgtcgcatctcagggcaacttcagatcctcagatatggaagaaagggccggcatttggaatgccaggggttcatgtagatgggatggatgttttgaaggtcagagaggtggcaaaggaggcagttgaaagggctagaagaggagatggaccaactctagtggaatgtgagacctatagatttagagggcattcattggctgatcccgatgagcttcgtgaccctgctgagaaggaacactatgctggtagggaccccatcaccgcattgaagcaataccttattgagaacaatttagccaatgagcaagaattgaaggccatagagaagaaaatcgacgagatcctcgaggacgctgttgagtttgcagacagcagccctcttccaccccgcagtcagcttctggagaatgtctttgctgatccgaaaggctttggaatcggaccagatggcaggtatagatgtgaggatccaaaattcactgaaggcacagctcatgtctaatctttcagtattgtatgagtgttcttttcatatggcttatttagtgatcaaatgttacacaatgtctaatataaacaggatttgttctttaggttggtaatttggttttacgtgtcttatatttatcattgtttgtggaactagtggcaagaatgacaatctccagaattagattgtagcctctaccaacgctgtataataaaattttagttgttcctctttaaaaaaattttctatcaatttaaaaagaaaaaaaaaaaaaaaaaaaaaaaaaaa

SEQ ID NO: 1505 - DNA, 1210 bp, Glycine max
ggctcgagatgtccttattttatgtttactgaataattggagagtagatagattgatgatttgagcgtgcatgggtgagatgataagcacgcaacgcaattaaaaagaattaatatgcaacgaatggatgtgtttgaagctggcctcatatatcaataatggatttgatctgattctggctcaacgttcatgacgatcaccacccactactccattccgggaagctctgggtatctggacatatacccagagaggaaagtctctgcctttcaaaacccttacattatgggcttcactgctgtcgctagcattggtggattgctctttggctacgacactggtgttatatctggagcccttctctatatcaaagatgattttccggaggtcaggcacagtaattttctccaggaaacaattgtcagcatggcagtgactggtgcaattgttggggcagcagcaggtggttggattaatgacgtttatgggagaaagaaggcaaccctcattgcagatgttatctttactctgggagcaattgtaatggctgctgccccagatccttatattctcataattgcccgtgttttggttggtttgggtgtgggtatagcttctggtactgctcctgtgtatattgcagaatcatcaccatcagaaataaggggagcattagtaggcataaatgtgcttatgataactggtggacaatttctttcctatctcataaatcttgctttcacacaggttcctgggccgtgccgggcgttgtcggcacttttcattaaacagcaataatatcaattatccagcattgttttgtatcctattaaacaagcctgctccataaaaggtagaattcagtttcttccaagtgggcgtgcatgtgttcattgttccacctgtgatttgaacttcatcactcctccttttgctccaatttcacatgattagtgtttctttttattgcccacatccattttctaatagaatcaacaattcaacacttcaagtcgtgaacatctctaaccccctcaatataaagatttaagaaaaagaaaataggcaaagcagagttcattatgaggagaaatgttatcatcttcctgtttcaaagttgagggtattatttcaatgattacccatattcttaatcaagcaggttcctgggacgtggcggtggatgttgggagtttcaggtgtgcctgca

SEQ ID NO: 1506 - DNA, 809 bp, Glycine max
cagcattattccgttgtcttccttctccgttgctcactctctttctctctctctctctggaattctaacctagatcaaagataacggtgctgtgagaaaagcgtgagagagaaggagagagccaaaaattcacaaagcatccgaggaacacgtgaattccgacatgtaacggtcgaaagttgtaacccacgacgacgaatttggatctgtcgtttacaaccattgccgatctccgccttaaacgacgcttcactgaaaccaccagactcttcctcctcaccgttacaacttcacagcttctgtgtagtgttctacttttcccgttactgtcagaagaccgttgaacaacgaggttttgaagtggttttctttcttcagctgcctgatgaggaattgatttgttgatctccgaggttgttgttctaatttatcgagcatggataaggtttcatcagactgtccgtacccgggatgcttcttttgtgtcatgaaggaagggaatccaagcaagcgcagagcaagtgtactgaaattctttagagaacttccgtgtcaagatgatgatggtcaggttctccctatcagcggcctttggaacactgctatggcacacccaaatgacccggagttcctagagctaggaatatttgaatgcatgtctgctctcatatggaagggactgaagaacaggcgctggctttctcatgaccaaaatatatatattccttattatgcagctcattatcatcggttcctacacaatgaatatggaagaatttgcagaaagtgccgtgcatgctggggtcatt

SEQ ID NO: 1507 - DNA, 924 bp, Glycine max
gtaggtgttgcggctgctgttctttcaagtgctggctacaaggtggccctcccggccgaaggaaactatttttctactcaggattattcatctctagaaggtccttccatgaatcaactatatgaaactggagggatccttgcttctgtggactcaagagtgctagttttggcaggatcaacagtgggtggtggctctgctgttaattggtcagcctgcattaagaccccacacaaggtgctaaatgagtggtctgagaatcacaagcttcccttcttttcaagccaagaatatctctccgcaatggaaactgtgtgtgaaaggattggtgtaacagaaaactgtacacaagagggattccaaaaccaagtgctgagaaaagggtgtcaaaatcttggcctcaaagttgactatgtgccaagaaactcctcagggaatcactactgtggctcatgtggttatggctgtccgaaaggagagaaacaagggactcaagctacatggcttgtagatgcagttgaaagagatgcagtaataataacaggatgcaaagctgagaggttcttgttggaaagcaacaggagtggaaatggcagaaagaagaaatgtttgggagtgatggcaaaagcattaaacagcagagtcacaatgaagttacaaattgaggccaaggtgacaatttctgcaggtggggcacttttgacaccccctttgttaatctctagtggactaaaaaacaagaacattggtaaaaaccttcatctccaccctgtgctaatgacatggggatacttcccagaatcaaatgattcagaattcaaaggcaaagtctacgagggaggtataataacatcagtccataaagtgccatcaccagactccaattcagattcaagggccataattgaaacccctttgctagga

SEQ ID NO: 1508 - DNA, 1280 bp, Glycine max
  misc_feature (1197)..(1199): n is a, c, g, or t
ctccctctctatatcctttttttttctttttcttttcatcattctgtgactccactcacacttccagagcacagttgcagcgctttttttgtcttttctttggttctgttttgccgcattaacaaaatggcaatggcaatggcagcaattgcttcttctctcggcgtgggtctccgtcctctttctctgtcttctccctcctcagcactgttccagtcccgccactccttcactataacaaccacaacacccaagtgctgcctcgcaccaaaacaagactcacccctggaactggaactagtgaaatcaacacagaacacccaaatcatcttacactctttctctccattcccattgctctgcgccgctgctctcttacccggaagtgaagcggtaacatctgtgtttgggcctttcgttgagctcgtcaagtcgtggaatctcccagactggctcgtccattggggccaccctggcaacatggccgttgtgctctttgccatgggtggctacggtacctatctgggttttcgcattcgttattctgataatctggaggaaaaggctaaggccaaggatttgcatcccaagcttttagctggtatgtttttcttctttgctcttggagctactggtggaattacagctctactcacttcggataaacccatttttgagagtcctcacgctgttacaggagtcattggtcttgctttgttgacaatacaaactatactgcctacactctttgagggaaatcctggactaaggaatgttcatggtatcctgggtagtggtatcatgacactttttcttgttcattttgcccttggacttcaactaggcttcagttactaattacagcttccatttgaactcttgttatgttgaggttattgtattttagtcatggtgtacattctttcctgcactggttcttagctccaattctcaactctgattaccatgatgttatgttctcctctatcattttgtttttaaaagtagttcagattggttacttatccacacactattatgggaaaaaatgagtatatcaacgcaaaaaaaaaaaaaaaaaaaaaaaaaaaaaaaaaaaaaaaaaaaaaaaaaaaaaaaaaaaaaaaaaaaaaaaaaaaaaaaaaaaaaaaaaaaaaaaaaaaaaaaaaaaaaaaaaaaaaaaaaaaaaaaaaaaannngggggggggccggttttaaaagaaaaaaattttagggggggggggtggaaagtaaaattttttttttgggggacccaaaaa

SEQ ID NO: 1509 - DNA, 983 bp, Glycine max
acttatggaaatagatgcaagatattttgcaagcaaatatggataaggacatgggataaggagatgaagtgtggttcaaaagaagaagagcaggatagtgtttagttggtcatctgtggatggcatattgcattccaaactcaccatcactccagggttggaagacaggtccatgttgtttattcggctggaacataggcaagaatagagttaatggcaaacctcagattaagtaccatgatattgatcttacattcccaacttctctggtcgacaaaacatttttgagagggaaggagctcaaatgctgctatagggctacaattgatggattcagtgcaaccaatttccacgaatgttgtgacttcaagggcccatgtgtgataatcggctatacaaacaagtctttcaagtttggtgcatttaaccctgaagggtatagaagcacagatgactactacgacacatttgatgccttcctattttactggatagacaatgaaactactaaacccatcatgttgcccaaggttggtggaagtggtgcagccctctttgattatgcacgtgggggcccacaatttggagcagatgggcttctcattgggcccccattggccccagttatgggtggctttgctgggcctgataccaattctggcattggtgatttaagacaagccaagtctagattgggattgtcttatgccaaaagagaggatgggaaagagtccatttttggtgatgagtcaagggcaacccttgaagaagtggaagtcttttgtagtcctcaaattgcaagcttatattagaattgcatattgaatagtgtgtgtgagttataaatctctaatattaatgtttgatttctacgaataaaaaatattagaattgcataaaaggggtaacagaggaaggaggcggcagctatatattactacctcgttgcctttcatgaatgcattccacgtctataacgagtc

SEQ ID NO: 1510 - DNA, 1962 bp, Glycine max
  misc_feature (1435)..(1439): n is a, c, g, or t
  misc_feature (1592)..(1597): n is a, c, g, or t
  misc_feature (1656)..(1661): n is a, c, g, or t
  misc_feature (1812)..(1816): n is a, c, g, or t
aagagatgacttccaaataacccttcttcgaattttcgagtctctcacagaggaatctcctgtgattattggcaatcctgacattttcatacgtgaaatcctccctagtctgacagttctgtacaagggtaacaaggacggtgatgccagatttttgtgccttaaaattctttttgatgtgatgatcattcttttgagtgaaccaattgaagaagagcaaagattgacggatctgaaattcgtatccaatacccgttttcttcctctctacccaaccttgattgaagatgaagatcctattcctatctatgcgcagaagcttcttgtcatgctaatggagttcagttttattacaattccagacattctacatctgaagacaatttcacaatgcttcgagttcttgcttggcgatctctcaaatgcaaatgtgaacaatgttaagctgtgtcttgctctggcttctgctcctgagatggagtccaaattactctctcagttaaaggtggttaggaggattggcaactttcttgagtttgtatatgcaaagggtatggaagatttgctggatccaactcttgggctgtgtaaggcttttctagcacgttcagtcagctgcacaaaaggcttcagctacacaacagaaccaattctcttaggtgactgtcctcctgagttgagtggtggtgctgtcgatccccagcaatgcataaaagatatagcggactttggaagcaatgtcggtgtcttgctagagttgagtgcctctgcagaaaccagtattgctgatatagcttctgaatgtgttgtcttactgctcaaggcagctcctagagaagccaccactggtatactaaccaatctccccaaggtgactgtgatcctagagagctggagtagaggcattcctcacttgatcatccagcgaatgcttcacgctttaggctatgcttgcaagcaatacttactgcatgcaatgatattatcaatatccaaacctgagatttcaagaactgaagtcatagtttctgaactcaaaaattcaggtgtaccagctttagccaaaacagctgggctggcagccttggaattgcagcggttgcctcgttgcatttgaataattgtaggtatcatgttctgttctgttcctctcattagaatgtgtaacttttctagttcaccgtttatccttatatttcaaggtattgttaaaactccagataaaggttgagcaatttggtgaattccactcaggcttcactgtatttctatgtaaagcatgtgtactctgtatcttcgtgaacattaaaatataaagtcaacgatttttttcctcctagaattttctataaattgattcttgtcaatgtaatagtctgtctcctttcattaatttaaacactaacgtattgtacaagtataaaattacccaggnnnnncccctttaaatgaatgaaactgcatgcatatgaatatgattgagattcctgtttgataggtaccatggtacacaaattacacatacttccaaagacagaaagattgtcagctatgtaagaaggcttatttcaataaatgctgctcaagcaacnnnnnnttccagcctagccacctttatgctcataggaatgttcatcacgagacaacctcgcattnnnnnnttgacatttactatgcaaaatagtaacatgaagacagatgagcattcatctcctttcgtaagagttagaatacgcaacgaattttgaatcattcttgttctccgggtatatttaaatcacccttgaaagatgaagcagtatgattgtaaannnnngtaatgccaagactacagtaagttttcccgtttgctaacaattaacaaattagcttttagggatcaacagaaaataaagagctgtagggcccaaatatcacgggcggattctctctcaccaaacgcatcacatggaaacctttccc

SEQ ID NO: 1511 - DNA, 690 bp, Glycine max
gtccggaattcccggctcgacatgtcagtgcggaaatatcttttccacctcgttgtccccactggtccatttcacaattgagattttgcattcagcttcctcccatgcttatcaccattcaccattcaccaccatgttgccatgcgattactgccattccaaacccgccatactcttctgcagaccagattccgctaaactatgcttgctatgcgaccagcacgtgcacgccgccaacgccctctccctcaagcacgtgcgcttccagatttgcgactcctgcaagaccgacaccgctgtcctccgctgctccaccgacaacctcgtcctctgccaccactgcgatgtggaaacccacggtgctgccgcttcctcccaccaccaacgtcaccgcctccacggcctctccggctgcccctccgtcacggagatcgcctccgcgctgtgcctcgatttccgggcccaggatcccgtggtccccaccgccgcctccggcggtcgcgatgaggtgtacgagcaggtgctggaaatcgcgcggcagaggaacgacgacctcggcgccgaacaactcaagttcgacgaatcccccataaacgacgtcgttgttgttgacgagatgctgatgcagcaaacgccgttcacgtctttgctttatgtgccgaattccgaatctgaattccactcccgaaa

SEQ ID NO: 1512 - DNA, 1610 bp, Glycine max
  misc_feature (730)..(730): n is a, c, g, or t
  misc_feature (744)..(744): n is a, c, g, or t
  misc_feature (746)..(746): n is a, c, g, or t
  misc_feature (756)..(756): n is a, c, g, or t
  misc_feature (775)..(775): n is a, c, g, or t
  misc_feature (794)..(794): n is a, c, g, or t
  misc_feature (855)..(855): n is a, c, g, or t
  misc_feature (857)..(857): n is a, c, g, or t
ccggaattcccggctcgacccacgcgtccgaagaaaagaaaaaaaaaactaaaaggaataatcatatataaattttggatttcgcacgtagctagctacagaagacaaaggggccttgagtctcgagatcttgtcagatcggaacgcaaccgccaccgagatcgttttgtttgtgggtgtcgtgcgcgagattaattcattggcgtcagcttagcttgggccacaagatgctttcaagcgttatgggaagggaagttactggcatacaggttatggaaaagaagccaaatggtgccataggggcttcaaatggcagtttaagtgatagaatgcgtgtttctcccaaaattgcggcaatggttcaagcaatggatcatgagataaaggaatctgctgaagctaattcgtttgagaaacatcatgagaggaaagatgttttgagtgccaaaaacatgaaattaaatgctggcttgccagaagaggagaatgagaaatctgatcaggttccaagcccctctgctccacagccatctgatcaggttactgaaaagcatgtcacccacgcacaggctgttgatactgaagctgacgcaagtggtctgaacttatctcctaaagctaacaatatacactcgcctaattcctctaagaattcacagccaaactcacctttttcaccaaggaagtcgtatcatgatgatgaagataattggtctgctgcttcctctanccgttgcttctgcncncactgccaantctaagtaactgaggtcancctactttagatgctcggntcgcgcagagaacggagggagtttatctgaaatagaggagaaacatcgagctcttgaagangnacttttccggccgtacgcctgcgagaaggaggaggaagatgcagcaattaaccagttgagaaagaacctggtcgttaaggcaaaaccagtaccaagcttctattatgaggggccaccccccaagactgaactcaagaagctgccactgactcgccccaagtcaccaaaactgtcccggagaaggagctgtggtgatgctgccggcatatccccagaaatttctactcgaggacgtcacagtgttggcaataacccaaaacatggtagccttgtccctcccaaaaacaaggacctggtcactggacgtaacagcaatggctctagcaaaaccaaagaacgaccaaaactggataaggaaacaaaaacagctcctcctaaaatcactgagcagacaaatgcggacatatcagtccaatcatgagcttatcaagattttactgacctccagctgagaagaaaataaccttcattttcctttgccttaccagatgggatactttgcagaaaagatggcctaattttcttttcatccggactgacatttttatgtggtttgtttttttttttttttttaacttgaagtgtatatgttttgtaagttatatcggcacacattgttttatatataaatagttattgatgtaagatgtatgtacgaaatttgatatcctcaaattgctccagacttagtaagggaaatttatatgaaatatattcctttttgtaggctctttaacttattttatcaatgct

SEQ ID NO: 1513 - DNA, 994 bp, Glycine max
  misc_feature (943)..(943): n is a, c, g, or t
tcgatatttaatttctaatggaaaagatcaaactaccaaattatgggatataaggaagatgtcttctaatgcaataaatctgggccttggagatgatgagtgggactatcgatggatggactaccctgaatatgcaagaaatttaaagcatcctcatgatcagtcattagcaacatataaaggtcactcagtgttgcgtactttagtgcgctgttatttctctccttcgtatagcactggtcaaaagtacatttacaccgggtctagtgattcgtctgtttacatatatgacctggtgagtggtgcacaagttgcaaaacttgatcatcatgaggcacctgtaagagattgtagttggcacccctattatccaatgatgatcacttcggcttgggatggtgatgttgttaggtgggaatttcctgggagtgatgaagcccctgcttctccaaataaaagagaaggtcgaattcataggagaaatttgctttatctatagttcatgctctttgtacatatgtgtctggatccatactatattttgctagttacatgggattcatgtctctttctgtttacttcttctattttcctacttacagaaagggtcccaaaaaaaaatgttacattgatttataccttgttctttacgttttgtaatcctatcatggatgaacataaagccttggttaatgcacaatgttgtcccctattaaacgagcccaaaaaaaaaaaaaaaacaaattttccactcttcctcaccgattgctagaatggaatttcgatgctcagtcatctcttttaccattctcttctctcttgctcttgcaggagagagccatgtccatgcatcgctacctgaggaagattattggggagctgtttggccaaacactcccattcccactgcactgcgagagcttctaaagcctctccctgcagntgttgaaatcgatgaactcccctagccaattgatgatacacagtacccaaa

SEQ ID NO: 1514 - DNA, 2072 bp, Glycine max
gtgggcttataccactctgccaatttgcctatacatacagggaccccaacgggtctcccccctcgacccacgccgcctcgtgacccctttctctgtctcttctctctctgctcctgaatttaacactactcagctttcatacacttcaatccctttttattggccacctttcccttcttcacagtgctactacttccttatccaacaccaattcccgtttctcttttcgggtttcggaatcaatcaatgccgtgtttttagatactagtacctgctttagctacccttctcatagaattggtaataaaatagcaagtcccagattttttatttctttcttctcctctgtctattttattcccaatcctctagggtcttggccttttcttcattccccccccttttcttttataaaaaaaataaggcaataacttttgttgcttgtactttttgggtttagggttttgcaccccctttagctaaaacacacaagtggcaagcctatgttcaacttcaactccatgcctctccaattctgaacattctaaatttccgattatataaatccaaacataaaaacaatgtcttcttcgtgtctgagtggagccgggggaagaacctatggattcgatttcgaattcgttaaatctccgtcttcatctactttcacatcacacacatcttcttcaccttcctcaacgatctccgaatcgagcaattcgccgctggcaatctcaacgaagaagcccagaacgccgcggaagcgacccaaccaaacatacaacgaagccgcggcgcttctctccacggcgtacccgaatttgttctccacgaagaacttgaaaactcagggcaaaggcaaaggcaaattctcgaggcccacatcggagaatttcgattacgattcttcggagctgttattgccgttcagagtcttcgacggaacggcgtcgtgttttcttttggaccaaacgggcccgaagcccatggagaggcccaaagtggtgagcgtgcaggagaaggataataataataaggcgtgtgagagccccggcgagataagctccatcgtgaatttcaattcagttgaattgaacgatgacggcgaagagagcctcgacgcggaatcgattctcgatgaggaaatcgaagaagggatcgatagcatcatggggagcagtattcaagaggtctcaaacgacgccgttagtaacttgccctggattttgccttttggcgggaaattggagttcccgagaccccgtgttagggctctccgccacgtcgacgacggtaactggtggaattttcctgccgtcgatattctttcaatatcgcccaaaattaacaccaagcctccgccggtggccgccgagaagaagatgaagaagaagaaggttgcggcggcgccgtcgccggtcgtcctggagttgaagaacacggaattgcccaaaccgaaacagggtttgatgttgaaattggattacgacggcgttcgaaacgcttggtctgacagcggaacaccgttcaccgacgatagccccctcgccgacgtcccggaaaatgacgtcactgcgcggttgtcgcaaattgatttgttgtgggacaatggaggagtgagagaagctagcgtgctgcgctacaaggagaagcggcgaacgcgcctcttctcgaaaaagatcaggtaccaggtgaggaaagtcaacgcagatcgacggcccagaatgaaggtacgagtcagttcacagttgagttgaggacacttgaagaaatttgatttatgtcagataaagaaaaagaaaagaaaaaggcaaatctgctttatgatttggtgatgataattggataatgaggtgcgtgcgtgggtgcgtcacagtttattatttttgttatggagagtggaccccgtttatggtggttggtcactttgtccaacttttgaggatctatctattttttcaccttagtttgataccatgccactaccaatgttttaggttttcctttttaatttcatcaacgcctcctaacgcatgtcttcgttgcacttttcagattctttcatcattata

SEQ ID NO: 1515 - DNA, 2834 bp, Glycine max
agagtaaggcgaatagattgttatctgagaggaagcataggaataatgaaacacatggtggtttggataatggagaatatgcttctgatagagaaatcaggaggcgtttatcaaagttgaataagaaatatttcaactcggagagtgagacatctgatgactttgatagatcttctgaagatggcaagagtgatagtgatactaccaccactgacactgaaagcgaccaagatgtccattcagaaagtcgaattggggactcgaggggagatgggtatttcacacctgatgatgggttggatttcattactgatgagcgtgaatggggggctcgcatgacgaaagcaagtttggttcctcctgttactcggaagtatgatgtcattgatcaatatatcattgtagctgatgaagaggatgtgcgaaggaagatgcgggtttcattaccagatggctatgcagagaagctgagtgtgcaaaagaatggcattgatgagtctgacatggaactgcctgaagtcaaggattacaaacctagaaaacagcttgaaaatgaggttgttgagcaagaagtttatggaattgatccctatacccacaatctcttactagattctatgccgaaggagttggattggtctctacaagagaagcatttgtttgtagaagacaagctccttcggatgttgaataagcaggttaatcattttactggaactggaaacactccaatgagctaccctttgcagcctgctattgaagaaattgaaaggtatgcagaggagcagtgcgatgtgagaacagtaagaatgtgtcaaggtatcttaaaagccatagcaagtcgtccggatgacaaatatgtagcttatagaaaggggcttggtgttgtttgcaacaaggaagaaggctttggtgaagatgattttgttgttgagtttttaggagaggtgtatcctgtgtggaagtggtttgagaaacaagatgggattcgatctctgcagaagaatagtaatgatcctgcaccagagttctataacatctaccttgaaaggccaaagggtgacgcttatgggtacgacttagttgtcgttgatgccatgcataaggctaactatgccagtcggatatgtcattcatgcccaccgacttgtgccccccccccttactgctgttgatggtcattatcaaattggtatttatagtgttcgtgaaattcaacatggcgaggagatcacttttgattacaattctgttacagagagcaaggaggaatatgaagcttcagtttgtttgtgtggaagccaagtttgccgtgggagctatctgaatctaactggcgaaggggctttcgaaaaggtactgaaggagtggcatggaattcttgatcgtcattatttgatgctagaagcttgtgaattaaactctgtttctgaagaggactataatgacctgggaagagctggtttaggcagttgtttgcttggaggcctgccagattggctagtttcctatgcagctcgccttgtgagatttatcaattttgaacgaactaaacttcctgaggaaattttaaagcataatcttgaagagaaaagaaaatatttttcagatatctgtcttgaagttgaaaggagtgatgcagaggttcaggctgaaggtgtatacaatcagaggcttcaaaatcttgctgtcactcttgataaggtaaggtatgttatgcgatgtatttttggtgatccactgaaagctccacctcctcttgagaagctcagtcctgaagcagttgtttccttcctctggaaaggagaggattcatttgttgaagagcttcttcagtgcctggcccctcatgttgaagagtctaccttgaatgatctcaagaccaaaattcatgctcgtgatccttcaagttctggagatattcaaaaggcggttcaaaaatctcttttgtggttgagggatgaggttcgaaaccttccttgtacatacaaatgtcggcatgatgctgctgctgacttaattcatatttatgcttataccaagtacttctttagaatacaggattatcaaactattacttcgccacctgtctatattagtccacttgacttaggtcctaagtatgctgacaaattgggagcaggatttcaggagtatcgaaagatatatggtgaaaattattgtttagggcaactggttttttggcataatcagagtaatgcggagccagattgtaccctggctagaataagcaggggttgcttgtcattaccagacatcagttccttttatgccaaagctcagaagccttcacgacatcgtgtttatggtccaaggactgtcagatctatgctggcaaggatggagaagcagccccaaaaaccttggcccaaagatcggatttggtcattcaaaaattctccgaaatattttggcagcccaatgttagacgctgtaattaataactctccacttgacagagagatggttcattggttgaagcacagacctgcaatattccaggccttgtgggaccagtgaagttttgcttgcatggtttggggaaagcccttgttagagattagagagtggttcatcattcagaacctgcctccctcttttagcgtggggagtctaattattaatccatagcataagttcttgtttcgcattgtccttcattcttgtgtacagttttcttgacctttgatttgtaattcatttggttgtagggcattgttttactcttatctaatgtcaaaagaaatgaagggaaaataggtttatttcaagccatctgtcttatctgacttgagtcaaaaaaaaaaaaaaaa

SEQ ID NO: 1516 - DNA, 1463 bp, Glycine max
  misc_feature (1449)..(1451): n is a, c, g, or t
  misc_feature (1455)..(1462): n is a, c, g, or t
cgtacgcggctcggagccccctccagccgctcgttgcgttggaattggataatagccaccaaccagaatcaaaataagaaaaacagagtaattttgcatcgtcgtcacacatggagatctccggcaccgttctccgtcaggtcagctacgtctccggctatgggacccacacgcggtcccgcggcctggctcctcgttttggggtgaggatggggatgggttctggtttctgtgacgaggggcatttgcggtattaccaggacaccaaaaaggttctcaccccaaagaagaagttgaagctgctcaagggtttctccaaattagggcttgcatcggatcccgagaaactcgccatgttctatgatcttcaacaaaacctcacctcggatgctggagatgtattactgagagagttagaagcagcaagagcaaaggagaaggaagtgaagaagaaaaggaaacaagagaagaaggccaaactcaaagctgccaagatgaattgtgaatcttcttcatcttcatcgtccgaatcaagtgacagcgattgtggttgtgatcaagtggttgacatgaacaccttcagagctggtgttggtgttggtgttggtgttgttgcccctggtctcctgccccgtgacaccccccgagggaatccccactgcccaagaccgcccccattgttgaggatgcgaatggcgcattgcgttgccatggaactgtgttctaagaatgatatatatgttagcagtgctagtaatggttttaagaacgagagtgctgtagttacctctgctcctcagaagaggattgaggtatgcatggggaacaagtgcaaaagatcaggggctgctgcattgatgcaagagtttgagaaagtggtgggtgttgaaggtgtagctgttgttgcatgcaagtgcatgggcaagtgcaaaactgctcctaatgttaaagttcagaattctgttgatcataatagcctggctcagggacttgatgattctgttaagattcctgctaaccctctatgcattggggttggcttggaggatgtggatgccatcgtggctagatatttttgggagagtcacacagatataggcatggcaggtgcaggtgcagctacagctacttgatgttgtgggaatggctagtgtgttatttgtaattatatatatacgtagccaggatgccgaggaaacattattgacaatggttttttttagttgttcatattgtataatataaattagttatgaagtttcttttccttgtttattgggaatgccattccattgtttcactcttatacaataattggctgcaattagccgttgtcagtgtggtttacattatacaaccaaatttggtcatttaaagtgaataatatcacgttcataggactaaactcgtaaagcgcttttacaaaattcaagttcttacaataaatannnaatnnnnnnnng

SEQ ID NO: 1517 - DNA, 1469 bp, Glycine max
tcagctacgtaggcccccccccccaaattgaccaaacccaaaacatcgtaagttaaattgcatttttagagcaaatctgtaagctctgacggcagcttatagaggtcgttgacggcaaagagagacacaaatgtattctgtttgagtttgaaacattgattcgttgtttcctctgcaaaattaaatcctcattgtgattgttgatgaacaattgaagtgtctctccgatttgaggattccggcgacagcaagcgatgaccaccggcggcgacggtgacacctccaaacaagagctcttccaccttatcaaacgcttcggagcttgcgtcactttcaagatctccaatctgttctctctctctctccacggcctcgatatacgctctatcggggcagttgctggtcttgctgttgcaattgttttcacatggaggctgttgagatctccttctgggtctcaacggaggcaacaaaaacggcaaggtccttcatctagtaatcctggagtcactacacattcaaatgtgtcagatgttccttcggatgcttgttcaccctcagatgattcaagggcgcaaaatgttgttgatgagttctttcagccagtgaagccaaccttggggcagatagttaggcagaagttgagtgaaggaagaaaggtaacttgtcgccttcttggagtgatccttgaggaaagtagtccagaggagctgcagaaacaagctactgtgaggtcctctgtgctagaagtactattggaagtaacaaaattttgtgatttatatctcatggaacgagttctggatgatgaaagcgagaagagagttcttgtagcattggaagaagcaggggtattcacttcaggtcgtctggtcaaggacaaggttctgttctgcagcacagagaatggacggtcatcgtttgttcggcaattggaacctgattggcatattgattcaaatcctgaaattgtcactcagttagctaggtttatcaagtatcaacttcatgtatctccttataaaaccgaaagaactgctgcaaatgtgttcagtgctccatctctggaacagttctttggatccatatgaaactaaaaccactacaaatcagatgttattcataaatgtctccaagtttgtttctatgttcatctcgatttccacattcaccataagtttttttccagttttactagatgtatgagaacaaggttagatttttcttaaagatttaaggttctctcactctaggtaggtgaaagaccatatgtgtatgttgatgctttgaagaagttttactattttcttttttcttctttgttttgaaatttgtgcattacattgtatcccatccagacattttagactggcaaagtgacaattttattagatatttgatcaagtttcattacgttataccatcatgaataatattagtgaccatcttccaaatgtcaggtggctatg

SEQ ID NO: 1518 - DNA, 1288 bp, Glycine max
  misc_feature (1262)..(1269): n is a, c, g, or t
  misc_feature (1271)..(1274): n is a, c, g, or t
  misc_feature (1276)..(1276): n is a, c, g, or t
cgtgagtcgtgtcgggacaggtcgttcaatcacgcggattcgtgcttggtagtttgaaatcctcaaatccacgatactgacacgtgcgactctaaccccggcacgtgcgactccaaccccggcacgtgcgttcaatccctccccggtctcagctacgtaggccccccccccacattgctcctcacggcacgacttgttcaccgaccagagctgattttcgcggcggttaccactcatcggagattctatccaaaatcgttttccgatgacgataaaaactgttaaagtcagtaacgtttccttgggagcaactgaacaagacattaaggagttcttttcattttctggtgatattgaatatgttgaactacagagccatgatgaacgatctcaaattgcttttattaccttcaaggattcacagggagctgagactgcagtactgctttcgggagcaacaatagtcgatatgccagttacaatatctctggatccagattaccagcttccacctgctgccttagcatcacctgtaagagaaactcgaactcctggtggcggtgctgactctgctttccggaaggcagaggatgtggtctccggcatgctagccaagggctttatcttagggaaagatgctgtcaacaaagcaaagacctttgacgagaagcaccagttatcctccacagcctcagcaaaagttgcgtctttcgatcagaaaattgggcttagcgagaaaataagtgctggtgctacagtagtgggtgatagagttcgagaagtggaccaaaagtttcaggtttcagagaagaccaaatcagcatttgcagctgcagaacagacagtgagtaatgctggttctgccataatgaagaatcgctatgtgcttaccggggcatcctgggtaacaggtgcttttagtaaggtttctaaggcggctggtgaagtaggacagaagacgaaagagaaagtggagagtgcagaagaacaacagaaacgaaaagtggaagatcaatatgcacaagtcctttctgagtccccaaaagcagcagaagcaagtgagcagaaatcttccaagcctgctcctgcccagggtttgatcctttgatttgcttcttgtattgataaatatacttcctcgtaccgacctttattttatccagatcgaaagtgaatgtaggactgatttactgttggacgtgcttgcaattatttattttgcttctataataccactataaaaaaataaaaatggtgtgggnnnnnnnngnnnnangggcggccgctc

SEQ ID NO: 1519 - DNA, 1034 bp, Glycine max
tacggctgcgagaagactacggcaattgatagaggttgttggttgttggtgtttaaaattaaaaccgagcctcttccccaaaggagacacagagcgagagagaatcgtaacaaaagcggtaaccggaataagttgtctctacgatttgagccatggcaacaacaacaccctcaaaccgatcatcagaggcgtttgctctcatggcaatcctcagcactctgctttgcacggcggtggcggcgaaggagagcgtgtacgagatactccccaagtacggcctcccgagcggtctgttaccggacaccgtcaccgactacacgctcgacgaggacgggcaattcgtcgtcgttttggcgaagccctgctacatacagttcgattacttagtttactacgagaccaagatctccggcaagctcagctatggctccatcaccaacctcaagggcattcaggtccagcgcctcttcatctggttcaacgtcgatgagatcaaggtcgatttgcctccctccaacagcatctacttccaggtcggcatcatcaacaagaaactcgacgttcaccagttcaaaaccgttcgctcctgccgcaaatccctctcttgcccaccttgccttccacgtccaattcagcttcctgctccggtcgatgaaattcccatgcttctcacggagtagatccagtttcatactagctgttgtatggcataatggaatatatgacgttttaacctgtcactgtccctctattgccttagcttatatctgtcaaagtgttaagactcgcaaaacccagtctggttacgttatattatatccacgggagacctttatgaacatgatattatgtacatatttaagttgagacttcaacttcatgtatgttgctgaactttcagttgctggtaaggtgtaaacgtgcttaataatgaatgccaaagtagggtcttgctaaaaaaaaaaaaaagaaaaaaaaaaaaaaaaaaaaaaaaaaaaaaaaaaaaaaaaaaaaaaaaaaaaaaaaaaaaaaaa

SEQ ID NO: 1520 - DNA, 981 bp, Glycine max
cgagtctcttcccgaaaggagacaaagaccagacacagagcgagagagaatcgtaacagaaacggtcactggaagttgtctctaccaccctctcagccatggcaacaattccccctagccgatcatcatcacacgcgtttgttgccatggcaaccttcacgactctgttgttgtgcacggcggcggcgaaggagagcgtgtacgagatactccccaagtacgggctcccgagtggtctgttaccggataccgtcaccgactacaaactcgacgaggatggccaattcgtcgtcgttttgccgaagccctgctacatacagttcgattacttggtttactacgagagcaagatctccggcaagctcagctatggctccatcaccaatctcaagggcattcaggtccagcgcctcttcatctggttcaacgtcgacgagatcagggtcgatttgccaccctccgacagcatctacttccaggtcggcatcatcaacaagaaactcgacgttgaccagttcaaaaccgttcgttcctgccgcaaatccctctcgtgcccccctttccttccacgtccaattcagcttcctgctccggtggatgaaatttccatgcttctcacggagtagatccagtttcatactagctattgcatggcataatggaatgacgttttaacctgtcactgtccctctattgccttagcttatatctgtcaaagtgtccaagactcgcaaaaccgagtgtggttgcgttatattatatcctcgggagacctttatgaacatgatattatgtacatatttaagttgagacttcaacttcatgtgtattgctgaactttccagttgctggtaagatttaaacgtgatttaataatgaatgccaaattcgggtcttggctaaaccaaaaaaaaaaaaaaaaaaaaaaaaaaaaaaaaaaaaaaaaaaaaaaaaaaaaaaaaaaaaaaaaaaaaaaaaaaa

SEQ ID NO: 1521 - DNA, 1540 bp, Glycine max
cccgtcgattgaacaagtctgaagccgaagtgcagagtaggatacttctttcaaatttatgtgatcgggaaccctaaacccccaaagcctttgactttgttcaatccttcgacatgagtatgacccaattcgccatggttgaggaattggcttttcttgtcaaggacaatcttccttgcaagcatctagttctcacaatggaagaatccctggttaactttcttcaggatgatgacactagttcagatgggatcttggaattggagccaatgaactcttacaatcgtcttctattgcatcgccttgctgaaatatttgggtttgcacatgaatcggttggcgaaggagatgatcgccatttgattctggaaagatgtccagatacgtccatacctccagtccttgttagtgatatcctatggaagtatgatgatgaacctcaatctttggttacatcccaccaaatattaaggagaagtgaatcctctccagtattgcagaaaaacacagcatccctttcacagtcactagaggagagaaaagcagcttatttaattgctcgtgagcgaattttctctatgaagttggaagaggtaaaagagcctggtgaacaaaagccacggagtgtgcctgtggttgcccgcagaatgattgcccatgccctaggtcaaagaatccatacaaagaatcagaatgacttggctagtgatagtatgaaggatggagtcctcacagatgaattgaatgctcatgataagaatatggaagagtccactctcaagaaagtttctgaagagtcttcacacctaagagggaattcaaacaacagcataagaaacacgagcagttctaatgcagcctcacttaataaaaggaatgatcaaacaacagttgacaaagatttgccagaattctctcaagaaagaaaacaagggcttagtgtaagtaaagactacataaaaaaggagcacttaggagctgcaaagagaatgtttgctcatgctttaggagtgcattctgggaaggatggttctgttcctagaagtagaagtggagaaataaagaagaattagatgaaaaggttgtgaaatatttaaaagcagaatggtattctgttgctccaaatggacctggataggtgctccccaagtttcaatcaagcacgaagatgagtaacgagcatgctttactcaggagattcatgcgaaagactatcgtagtataaagtgaaagggaattcttgaaaaaaactatccagaatcaagtttgacctgatttggagtgaacaggttatggtgttttggcccctcgtctatatgttgttgtaagacatgtagttccagtttcattctactgtgtttagtctattctgtcaacgtgatggtttttgttatggctgttcccaggggatgatttcccgtcatggtgggtgttatgtatataatatgtaaaatcacaaatttcttgtgtcgtgtttagaaattcccaatttcttcctcgtttcccttctatggtagaacaattatgacatttgttacag

SEQ ID NO: 1522 - DNA, 757 bp, Glycine max
tcagctacgtaggccccccccccgcccttctcattaggtttagggatctgctgtttgtgttgctttagaatctgggtgctgcggctgaagatctcgattagccgaaaattgcaagaacggcttcaggctcttgcgatcaacaaacgcagcgttttgatctcagatttgagggggagagaatggcaacaacagtgagaagtctgaagataaagacaagtacgtgcaaacgtatagtgaaggagctgcattcttatgagaaggaagttgagagagaagctgccaaaacagctgatatgaaggaaaaaggagccgatccctatgatctcaagcaacaggaaaatgtcttggctgagtctaggatgatgattcctgactgccgcaagcgccttgaggccgctttggcagacttgaaaggattattggctgagttggaggagtcggatgagaaggccagtcctgagattgatgaagctcggaacaccatcgtagaagttgaaaaagtatttgaaacaacagaagattaacaaggttgtttgattagtgctcttgatggaggatattggacctgtattgtacattttcctggtcacaaacaatcatacattcttcttgttccatgtgccctctcctccacagtttaattctgtacttttatagaacatctgaaaatgaatgattatggcattgctctacttttctaggcttgaaaaaaaaaaaaaaaaaaatcaaaggttttacatccaaatttctattattt

SEQ ID NO: 1523 - DNA, 946 bp, Glycine max
gccgtcacttaatatatatatcggtcccccatttgccgttgttcactcctctcttccaagttctctctctctgtgtatattcaaatccatactatcactttcgcatcggtacttctcttttcattgtcgcgcagacacaaatcagtaccatacgaagcccgacactacgtgaattaagcatgtcgggcagaaaggaaacggttttggaccttgcaaagtttgtagacaaaggcgttcaagttaagcttactggtggcagacaagtgacagggactctgaaagggtatgatcagttgcttaaccttgtcctagatgaagctgtagagtttttaagagatcctgatgatcccctcaaaactaccgatcagaccagaaatcttggcttaattgtttgtagaggaactgctgtcatgcttgtgtccccaactgatggtacagatgagatcgccaacccctttatacagccagatgggtcttaagtgtgaagtatttctatcttaaaatctgtatgctagctgatcaatagtcatcgcttagctactgagacattaatgtggagattctgattaacgttttgtctattttgtaagcttggagattctgacccatttcttgttcttgttctgatgaagtttatttctctgtgatgtgtcgtcagctacactttgaggacttaatatttatcatggattacaattgcacataaattagaagctaattctaacttgatcagagtgaaagttcttcttcatggcattttatgacacttcccttcctcaccattcttgttaatcaatcttaccacacatccacgcaatctagtctagatgttacaggttagaggagacctagtaatggagaatttggatagcttccactaagtcatagattctaaccttatactgtgtttaaaaaaaaaaaaaaaaaactcgagactagttctctc

SEQ ID NO: 1524 - DNA, 1705 bp, Glycine max
aaaaacgttcctcatttccttggcagttcacattcacacacgctctctctctctcttcactcccttttcagctacgtaggcccccccccccccccctcacacacactctctcccttgtttctctctcttcggtcagaaacatgaatttggaaacgcaaccaggaacggcgtcgtattggtgctacagctgcacccgtttcgtgcacctctctgtccaaagcaccatcgcctgcccccactgtcaaagcggtttcgtcgaagagatccgtgccggcgccggagccgaagcctcgccacgccatcgactaagtcctttccccgatgatcctcttttgctccggcgacagggcttccgccgccgtaggagagaagcttccggcaaccgctccccgttcaaccccgttatcgtcctccgcggccccggcgacgactccgccgccgccgaccacgacggcgtcagcacgttcgagctcttctacgacgacggcgacggcaccggcctccgccctcttcctcccaccatgtcggagttgctcctcggctctggctttgacagacttctcgaacagttcgcgcagatcgagatgaacggattcgggcggccggagaatccgccggcgtcaaaggcggcgatcgagtccatgccgacggtcgagatcggagaaacgcacgtggaaaccgaagcgcactgcgccgtgtgcaaagaagcgtttgagctgcacgcggaggcgcgtgagttaccgtgcaagcacatctaccactccgattgcatcctcccgtggctctcgatgcggaattcgtgcccggtgtgccgccacgagcttccttccgatttggaaactagggttcccagccagatcgacgaggagacgatagggttaacgatttggaggcttcccggcggcggattcgccgtggggagattctccggcggccggagaacaggcgagagtcatttcccggtggtgtacacggagatggacggtggactgaacacgaacggtggtgctcctaggagaatttctcgttctgttagaagcaatagggttagggaaagtcgagggtttggtagagttattagcaatttcttttcattctttggaagaattggttctagaaactcttcttctggacatgggtctgtaagtagaagccgtagtcacgtgagttcaatcttcaatagaagctcgcggagacatagcaggacttgggttatggatgattaattggtgaatggtgatggcaattttgcaaagaatagtaatactttcttttttttcagctttgggttatgagattcatttcatactgtaaatagcatgtaactagcaactatagaagcaagttttttagttttccctctctgggaatctttaatatggtttgattcaacatcaatggaaggaagagtgctattttttagctttgtggatcaaacattgtgcgttggcaccagtaactgtagcagtggaccgggcatgcattgggaaacaagaatgatgctttgttccccgtgaactgaattatttgatttggttatattatatctttcatgttagtcttattcttttattggtgagtatcctttcgggattatgttttttgagatgcctctttcaacttgcagcaccataatgttttgaccaatatgcttgataatgatgataagtataagtcacttttttctgtgtgatccacctttgaa

SEQ ID NO: 1525 - DNA, 1951 bp, Glycine max
gtttttcacattcgctgaggagcgaaataagggcgttttgggttgcgacggtgttgccaagggtggcggcggcggcgactttggcgacggtgtcataagttacgagagagaataaaaatatattttagcttataaaaaataatttgtttttaatacacgagtttcaaaattcctccaaaattcactttaaaaaaaatcccccaaaattaaccaaaataattttccgaacccaaaacgacacccagtcacaacccctaacgcaacgaagccaatttacatacgtctgggctccgggccccccctcgagtcggctcattaaccccagtttcttcatctctgcatatgaataatcgtattgatttcaatctttgctgtatcgaacatctctgtacacttcattcccaaagccactcttttctctgctgtttcggcactgttttgagtaggtagatgaggaaaaaggattaaccaaatttgagtgggcatcaaagttggcatagcagaagtggaatcagctcttgtttcaagcaacaggaacatggatgcacaagccaagaaaaaagcattgtttcgtgctaaattgaatgcccaaaagaagaaaaagcgcatagaatctccccttgtaaggtataatgaatttgatctacctgtttgccgggtttgtgatgttgttctaaagtctgagtctttatgggatgcacaccaagtttctcgtaagcatcgtgaggcaataagtaatctgaaagctaatgcagctggattaactcagcataacattgcaaagcctgttgctgatactagcttttccaaggctaaacctgaacattctttggactcacaatccaaagcgccagaagcttcacaagtagtttctaaacctcaatcatcatcagtgcttccaccaggattttttgatgacagtaattcaggaaaaacaagatctgaacatttagtggactctgatttaggtagaaaagctggggtttctgctcaaagtcaggtgttaaacttggagaaggagaaaggtcattttcatgacaataatgctgcaaagtcaaatgttggtcaagccgcaatggagagtagacagacaccagtcaagtctactgatacagagatccagcaaataaaagggactctgcctgaaggattttttgacaataaggaggctgatttgcgtgctcgtggcataaagcttgtgaagccagatgtcaaagatgagtccaaggaatttgagaagttgattcaagaagacttgcgggaggtggacgaccggttggaagaagaagagattgatgcggccgaaatgatagaagaggaggaagttgtagagcaaaagatacttagcgagaaagtggaaatgttgaagaagaggagattggagctaaaagctgctaatgctgcaaagcgtagtaaatcatctgagattgtagccaaggagtctagacgagaagagccatccagtgatgatgaaagtgaagggaatttggccgtggactggagagcacaacacttgtgatttgtgaatactttgctaattttttccttctatttctttaattccattactggaatataatatctacacaattatcagatgttgtatgtacaattctagttatcattctcttatctatgtttatccgatatttctttcctatttatctgattttgcttagagctttggacagacaaggtggttgtcaagactccttaccgaacctaaatttcattcgtaagccaggggtgtcaattgatgtttttttaaggttaaagtctcatcatcaatgaccataaagtaggcgttaaaaaaatcatgtttctctaaagcattgtataatgatccttcccctattgttctcacaagtcacaccagcgggccacacctatgtaaccagcttgtcattctcattcagaatgatcagagtaaaaaatgaatcgttgtggatca

SEQ ID NO: 1526 - DNA, 1797 bp, Glycine max
actatttttatgttttagaaaccaatgaacctagaggccataacttaagtccctctcgtccatcagcttcgtaggcccccccccccctcgtacctaaaattccgaagttctttttcttataatggggctcttgtggaaaactcacacgaggatacacgtgattagaacattttttgcaatccttttggttgcactgctgagttcagagagagtagagagcagaaaagccaaagttgtgaccacttccttggagtacaatgctataaactgcagagctcacagtgctgcattgacagattttggtggtgttggggatggaaaaacatccaacacaaaggcatttcagtctgcaataagtcacctgagtcagtatgcttctgaaggtggctctcagctctatgttcctgcaggaaaatggctcactggtagcttcagcctcactagtcacttcaccctctatcttgacaaagatgctgttctccttgcttctcaggatataactgagtggcctgtgcttgaaccccttccatcatacggtagaggaagagacgcaccagcaggaagattcacaagcctcatatttggaacaaacctcactgatgttatagtcacaggtgaaaatggcaccatagatggtcagggtgagttttggtggcagcaatttcacaggaaaaagttgaagtacactcgcccatacctgattgaattaatgttctcagacaacattcaaatctcaaatctaactctactcaattccccatcatggaatgttcatccagtttacagcagcaatattattgtgcaaggcatcaccatttatgctcctgtcacatctccaaacactgatggcatcaacccagattcttgcacaaatgtaagaattgaagattgctatatagtttctggggatgactgtgtggcggttaagagtggatgggatgagtatggcataaaatttgggtggcccaccaaacagctagtgataagaaggctaacatgcatctcaccatacagtgcaaccattgccttgggaagtgagatgtcaggtggaatccaagatgtgagagctgaggacatcacagcaatccaaacagaatcaggtgtcagaatcaagacagcagtagggagaggagggtatgtgaaggacatatatgtgaagagaatgaccttgcatactatgaaatgggcatttaagataactggtgattataactcacatgctgatggccactatgaccctaatgccttgcctgagatcaaaaacatcaactatagagatgttgtggctgaaaatgtgaccatagctgctaggtttcaaggaatctccaatgacccctttacaggaatctgcattgcaaatgtgacactaaggatggcagccaaggccaagaagcagccttggacctgcactgatattgaagggatgacgagtggggtgacccctccaccttgtggtctgttacctgatcaagggccggagaagatcacagcatgtgatttcccagcagataatctacctattgacatagtggagcttaagaaatgtactaccaccatgacatatgttgaagtgtagtagtttatgtaagttattgttttaggaatagtccttctcagattatcaaaaaaacatttctcaagttaagaaatgaatggtgtttcaaattatagaaatggaacggttatcttttcttctctcgtttatggaacttggtggcttgatgctgctacaagtttcatagctaatattaatcaaaatttactggttaaaaaaaaaaaaaaaaaaatttaaaaaga

SEQ ID NO: 1527 - DNA, 1305 bp, Glycine max
cccacgcgtccgtacggctgcgagaagacgtcggaagattagggtgcttgtgttgtgttgttcgcacgccttgttcggtgaagtgagtagtgagtgctgaatcgaatcgaatcgattctccgaacatggcggcgagcgatcgcacagtgttgcaattctcttcatcatcttcttcttcttcgcagatcttgtccgcgaaggtccaccctctggtcatcttcaacatctgcgattgctatgttcgacgccctgaccaagccgaccgcgtcatcggaaccctactcggctccgtccttcccgacggaaccgtcgatatccgaaattcctatgctgttcctcacaacgagtctatcgaacaggttgcattggatatagagtaccaccacaatatgttaatatcccaccaaaaagtgaatccaaaggaaatcatagtaggatggtattcaaccggtcttggagtaactggtggtagtgcattaatccacgagttttattctcgagaagtgcccaatcccatacacttgactgttgatacaggatttacaaatggagcgggtacgattaaagcatacgtgtctaacaatttatctcttggagaacgtcaaattgctgcacagtttcaagaaattccattagatcttcgtatggtggaagctgagcgaattggatttgatatgctgaaggcaactgcagttgacaaaattccctcagatttagaagggatggaagcatcaatgcaacatctgctagtcttgattgatgacatctacaaatatgttgacgatgttgtggaaggacgagtggcaccagacaacaaaatcgggagatttatatcagaagctgtaggttcccttcccaaattgtccccatcagtttttgataagcttgtgaatgacagtttgcaggatcacttgcttttgctgtatttatctagtatcacaagaacgcagcttagcttggctgaaaaattgaacacagctgctcagattctgtgattcttccgcttgtttatcgccgaagtcaaatttttctgagtttcttttcttgtcttatttccagaaacgtggaatgtcagcgttttatacttcacttttacttcgcttatttttttatttatgttttgtgctggtctttgctaggtaagttcacttattgtccaaggtatgcagtgtagcgttcacttgttatttttcatgtaatctgtatttgaaagaaaatgagcaaaaagctttctctccattatctatttatttcttatttattgagattggaaaaaaaaaaaaaaacaaaaaaaaaaaaaaaaaa

SEQ ID NO: 1528 - DNA, 1252 bp, Glycine max
aagcccatgtgtaaaaccctagttacagattagggtgcttgtgttgtgttcggtgaagtgagtagtgaaggtgctaaatcgaatcgaatcgaatctccgaagatggccgcgagcgatcgcacagtgttgcaattctcttcatcatcttcttcttcgcagagcttgtccgcgaaggtccaccctctggtcatcttcaacatctgtgattgctacgttcgacgccctgaccaagccgatcgtgtcatcggaaccctactcggctccgtccttcccgatggaaccgtcgatatccgcaattcctatgctgttcctcacaacgaatctatcgaacaggttgcgttggatatagagtaccaccacaatatgttaatatcccaccaaaaagtgaatccaaaggaaatcatagtaggatggtattcaaccggtcttggagtaacaggtggtagtgcattaattcacgagttttattctcgagaagtccccaatcccatacacttgacggttgatacaggatttacaaatggagcgggtactattaaagcatatgtgtctaacaatttatctcttggagaacggcaaattgctgcacagtttcaagaaattccattggatcttcgtatggtggaagctgagcgaattggatttgatatgctgaaggcaaccgcagttgacaaaattccctcagatttagaagggatggaagcatcaatgcaacatctgctagtcttgattgatgacatctacaaatatgttaacgatgttgtggaagggctagttgcaccagacaacaaaatcgggagatttatatcagatgctgtaggttcccttcccaaattgtccccatcagtttttgataagcttgtgaatgacagtttgcaggatcacttgcttttgctgtatttatctagtattacaagaacgcagcttagcttggctgaaaaattgaacacagctgctcagattctgtgattcttccgcttgtttattgccgaagacaaatttttctgagagtttcctttcttgtcatatttcaagaaacgtggaatgtcattgttttatacttcacttttactttgcttatttttttgtgttttgtgctggtttgcataggtaagttcacttattgtccaaggtatgcagtgtagtgctcacttgttaatttaatctttatttgaaagaaaatgagcaaaagcttttccttcattaaattgaaaaaaaaaaaaaaaaaaaaaaaaaaaaaaaaaaattttaa

SEQ ID NO: 1529 - DNA, 2158 bp, Glycine max
ccacgtttccacacgttctctgcgagagcgtgggagccagaaaactgctgcttctcgacccacttttgaagttcaaaacttaaaccctagttctctctctctttctttctcctgcatcttcaaccatgtcagcgatgctgcaacctcagatcattctgctcaaggaaggcacggacacttcgcaagggaagccacagctggtgagcaacatcaatgcctgcaccgccgtcgccgacgtcgtccgcaccaccctcggccctcgcggcatggacaagctcatccacgacgacaagggaaccgtcaccatctccaacgacggcgccaccatcatgaagctcctcgacatcgtccaccccgctgcaaaaatcctcgccgacatcgccaagtctcaggactccgaggttggcgatggaaccaccactgtggtgttgcttgcagctgagtttttaagggaggccaagccattcattgaagacggtgttcactctcaaaacttgatacggagctataggacggcctgctccttggctattgagaagattaaagatctagctgttagcatagaggggaaaagtctggaagaaaagaaaagcttgcttgcaaagtgtgcttctaccactctttcttcgaagcttattggtggagagaaagaattttttgcacccatggttgtggatgctgtaatttcaattggaaatgaagacaggttgaacatgattggaataaagaaggttcctggtggtaccatgcgggactcatttctagtaaatggtgttgccttcaaaaagacattttcatatgctgggtttgagcaacaacccaagaagtttctcaatccaaaaatactattactaaatgttgagttggagctaaaatctgagaaagaaaatgctgaaataaggttatcagatcctgcgcaatatcagtcaatagttgatgcagaatggaatattatttatgacaagttggataaatgtgtcagcagtggtgccaaagttgttctttcacgactggctattggtgatctagctacacagtattttgcagatcgagatattttctgtgctggtcgtgtagctgaagaagatctgaaaagggttgctgctgcgactggtggaaccgtacaaacatctgtgaataacattattgatgaggtccttggaacttgtgaagtttttgaggaaaggcaggttggaaatgagaggttcaatattttcagtggatgttcatctggccaaacagccaccatagttcttcgtggtggagctgatcagttcatagaggaagcagagcgaagtttgcatgatgcaatcatgattgttaggagggctttgaagaattcaacagtggttgctgggggaggtgcaatagatatggagataagccggtatctgaggcagcatgcacgtacaatagctggaaagtctcagcttttcattaactcctatgcaaaagctcttgaggttatacctagacaattatgtgacaatgccggatttgatgcaactgatgttctgaataaactaaggcagaaacatgcgctcccttctggtgaggggggaccatatggggtggacatagccactggtggaattgctgactcgtttgctaactttgtctgggagcctgcaattgtgaagatcaatgctataaatgctgcaacagaggctgcttgccttatcttaagtgtggatgaaacaattaaaaatcccaagtctgagagtgcacaaggagatgctgctgcaagtgccatgggcagaggtcgtggaggtgcattccgtggtcgaggacgaggaatgcgaagatgatgagaagtgcattctatgggttgagtgtctgttcattgtctgtctaattcgtgaggccaatgcatgcttgtttctgctacttgatgttgctagaagcatgccgatttttgaacttacaaatcatgaaatgaaaatgtaatggagactctgggaacatcatcttatcaacctaagatttgcagatagcaattttcaagcattgtctttctgacgatcattttatacatttggaggggttaaaactatcgcatggctgtggaggacttgagcttcgtgtgaaattttgcatcttgttctacaatttttaactatatatttattgcttagtttgcgtatagtaaacaaaaaaa

SEQ ID NO: 1530 - DNA, 1142 bp, Glycine max
taagccggtacctgaggcagcatgcacgtacaatagctggaaagtctcagcttttcattaactcctatgcaaaagctcttgaggttatacctagacaattatgtgacaatgccggatttgatgcaactgatgtgctgaataagctaaggcagaaacatgcgcttccttctggtgagggggcaccatatggggtggacatagcaactggtggaattgctgactcatttgctaactttgtctgggagcctgcagttgtgaagatcaatgctataaatgctgcaacagaggctgcctgccttatcttaagtgtggatgaaacaattaaaaatcccaagtctgagagtgcacaaggagatgctgctgcaagtgccatgggcagaggtcgtggaggtggattccgtggtcgtggacgaggaatgcgaagatgatgatgagaagtgtattctacgggttgagtgtctgttcattgtctgtctaattcgtgaggccaatgcatgcttgtgtcttctacttggtgttgctggaagcatgccgatttttggacctacaaatcatgaaatgaaaatgtaatggagattctgggaacatcatctgatcaacctaggatagcaattttcaagcattgtctttctgacgatcgtttcgacttgagcttcgtgtgaaattttgaatcttgttctacaattttcaactatttatttattacttggtatgcgtatagtataaaaaaaaaaaaaaaaaaaaaaaaaaaaaaaaaaaaaaaaaaaaaaaaaaaaaaaaaaaaaaaaaaaaaaaaaaaaaaaaaaaaaaaaaaaaaaaaaaaaaaaaaaaaaaaaaaaaaaaaaaaaaaaaaaaaaaaaaaaaaaaaaaaaaaaaaaaaaaaaaaaaaaaggggggggggcccttttaaagaaaccaagtttaccccccgggggggggaaagttttttttttttttttgggcccccaaaaaaaaattcccgggcccggttttaaaccggggggggggaaaaaacccggggggaccccaattaaaaagcttgggaaaaattcccctttttgccggggggggaaaaaaaaaaaaggcccccccccccccccttcccaaaaagggcccccactgggaggggaaaggggcccccc

SEQ ID NO: 1531 - DNA, 1143 bp, Glycine max
gcgtggctgcgaggacgccctcgagccggctcgagcggctcgagctaatcataatcacttccaattgctctcactagtcactactactactggagatggcttcaactgcctcttgcacttctatttccccttctagtgatggttgcctttgctggtgacttaaacaaagactttgacatcacttggggagatggccgcgccaagatactaaacaatggagagttactcactctttcattggacaaagcatctggttcaggttttcaatcaaagaatgagtatctctttgggaagattgacatgcagctcaagctcgtccctggaaactctgctggtaccgtcactgcctattatttatcttcaaaaggatctacttgggatgagatagactatgagtttcttggaaacttgagtggtgatccatacatccttcacacaaacgttttcagccaaggcaaaggggacagggaacaaacaattctatctgtggtttgaccccactgctgatttccacacttactctatcacgtggaacccccagaggattatattctctgttgatggcactcccattagagagttcaagaacttagagcctattggggtccccttcccaaagaatcagccaatgaggatgtactctagtttgtggaatgctgatgactgggccacaagaggtggccttgtgaagacagattggacacaagctccattcacagcttcctacagaaacttcaatgctgagacttgcatatggtcttctggagcatcttcttgtgctaaaacttcttctacttccaccactagcagtggttcatggctttcacaggaactggactctgcaggccatcagaggttgaagtgggtgcagaagaactacatgatttacaattattgcacagacactaagcgtttcccacagggccttcctccagaatgcaacatctctggagagaaaaacaaagcaacgcattcctcttatattttctatgatcagaatgtcataccaatattagtttaattcttgatgtagctattgtagtttaattctttcatttgttcccctgtttgtcaccactgtgttaacaaatacggccatttttattataaaatagattcttttcaatagtaatttttcgtacc

SEQ ID NO: 1532 - DNA, 1212 bp, Glycine max
gtccggaattcccgcgtcgacccacgccgtccgaacacacaacaacacaacacatatatagttctttcttttgtaacaaaccctcatattataagctgatccaggattagctatttggaatcaccaaatatataggatcattccaacatgggtttttcctcaaaagaagagaagtccaaaagaatattgaggggcttgaagactctgttcttcttgatcactatggttatatcgcttcttcttttctctgccccggttctccttgttattgccgatgcacttgttccttctgctttgctctccacgctatctccttcttctttctccttggaaactctcgcttcccatttccacaactacgattttagatactctctcattgatattccccttgtgtcaataatacgatccttcatcatcttctgtgtttatagtttgtgtgatggaccaaggctttcccgtggaccttatttggggatcacgaccatgtgctctgttttgtctctgatgtttgtgtcgttcaaagccgtttacatcttcagtgtttcgggtattgatcgaagtgggtatgttcgtgccaccgaaatagctctgttcgtgtgctcttgtgcgttggccgtggggcatgttgtggtggcctacagaacaagttgcagggaaagaagaaagcttttggtctacaaaattgacattgaagctatttcagcttgcaaaaatgggtatcccaggtatccgaagattcctcaagaagaaagaatcaaatgaactcacatgtgcctctacaagattaaaggatatatcaatatcaactatacgtatatatgattttcaactaacacaaacagcttctgctattcatcatattatgttcttgcgtgcgtcaaaggatgctacggtttatccaaaggatgccagtaacctttgacgcctaattttctaacctcggatactgtcatagaagtttacactctaccgctaccaggatacataaagttgttgaatggtgtttaggtataattaatagtgattaatatatgtacaatagtgcttccatctttggcgatttatgtataactattttaatttgttttgttattcttgttttccctttgcaattgtttcgtgtatatcttcttgtatatataaaaatgaatggtttgttatatgttccggattcttattaagatgtaaagttattattattgttgcact

SEQ ID NO: 1533 - DNA, 1958 bp, Glycine max
  misc_feature (69)..(69): n is a, c, g, or t
  misc_feature (290)..(290): n is a, c, g, or t
tcagctacgtaggcccccccccctgttacttttaatgctcctccacctccttgtctctcggggaaagtngcaggttctactatagcaccaccaccaccaccaccaccttcctcagatcacattaattcttcattgcaaaagtctccacctcctcctgcagcacctgctcctccacctcctcctggggcacctgctcctccacctccccctggtgcacctgctgctccacctcctcctgctaaaggaggtctaaaatcaggcagtccatttccattgtctctttctgtgantggtgatgggaataatgtgtcaggaccaactagctcaaagggacgaattctatcacgtacgatcagctcaaagaataacaccaaaaagttgaagccattgcattggttgaaactatctagagcagtgcaaggaagtttgtgggcagagacacagaaatctggcgaagcttccaaggccccagagattgatctttcagagcttgagaatctcttctcagcagcagtcccttcaggtcctgccaaaaagtcaaatgtccaaagctcagctggccctaaatctgataaagtgcaactgattgagcataggcgagcatataattgtgaaatcatgctttcaaaagtgaaagtgccattgcatgatttaatgagctcagtgttagcactggaggagtcagcactcgacactgatcaggttgagaacctcataaagttttgtcctacaaaagaggagatggaattacttaagggttataatggggaaaaggagaagttgggaagatgcgaacagttcttaatggaattgatgaaagtaccacgggtggaatccaagctcagagttttttcgttcaggattcaattcaacgcgtccggttctgctattggattcagattggatagccttcttaaactcacagagacacgtgcacgggacaagaagatgactcttatgcattatctttgtaaggtgctagatgaccaactaccggacgttttagacttctccaaggatgttgctaacctagagccagcagcaaagatgcaattgaagtttttggctgaggagatgcaagctataaacaaaggattagaaaaagtggtacaggaactatcaacctctgaaaatgatgggcctatatcagaaactttctgcaagaaattgaaaaaattcctcggttctgctgaagctgatgtccgttctctggcttcactatattccagcgtgggtaggaacgtggatcaattgattctctattttggtgaagatccagctcgttgcccatttgagcaagttgtgtcaactttgctcaactttactaggatgttcaacaaagcccatgaagaaaaccgcaagcagctagagcttgaaatgaagaagacagcagaaaatgagaaaaagaaatgtgaatcagaaagaattttacctacagctatccgtactggcaatgccaaatagatgctactagctttgagaatcagtatatactctaacatgactaggatttgatgggacaaaaatgggtctggtgtatggtgtttttgaagagcatgtatagttacacaagtagtagtagctgacattgataaccaaaacgaagagaactgcattacactgcaaagtttagaaatggtgtagtttgcacgagttgtgttatttaccggccaacctgtatatatcttcctcttccctctccgctcagcaactgtatgattgtaagtattttcaggaaacctgggcattcgttattaattttttctctctccctcaggctctgttagcaacactgatttcacatctgtaatgcaatgcttgatttcttcttgtatagcttatatatgatttttttccccctagcaaaatatcttcttaggtgccccaaaaataagggaaatttcttgctcggtattattgaatgtgtactaccccagctataacactaaaatattgct

SEQ ID NO: 1534 - DNA, 1141 bp, Glycine max
gaaagcgattgtgcctgaactcagccaaagggtggccattttcctttcttttatcttctctctctctctctgtctttatactctcaccccaaataaatgaaagggcttgccccattgcacttccttacagcttagccttccctagcccaaccccataagcctctttctttttctctctctcacttgcatacgttcctttcactgtactttttgacacacacgtaacacattcatcagaggaagagagaatgagttcatcctcaggtcagagcagtggctatgatctctctttcaagatcttgttgatcggagattccggtgtgggaaaaagtagcctactagtcagctttatttcaagttctgttgaagatctttcccccaccattggtgttgattttaagatcaaaacgctcacagtgggtggcaagagattgaaattgacgatttgggatactgctgggcaggaaaggttcaggactctaaacagttcttactatagaaaagcacaaggaatcattctcgtttatgatgtcacaaggagagaaacctttacaaacttatcagaagtgtggtctaaggaagtggaactctactcaactaatcaggattgtgtgaagatactagttggaaataaacttgatagagatactgaaagggctgtgagcagggaagagggtttagcacttgctaaagatttggggtgtttgcttcttgaatgtagtgccaaaacaagggaaaatgtggagcagtgctttgaggaacttgctctaaagataatggaagctcctagtcttttggaagaaggatcaacagcagttaaaaggagtgttttaaaaccaaaacaagaatcccaagcatcccaaaatggtggttgttgctcttaaattgatacttgctggcgtggacattgaatcttcttaactagcaatcttggacaaatcttgtatatgtaagcttcttccttagtttcttctgccattgtcttttgattgcttaattacttgtattaccggaaggaggaattggcaacaatggtgtctattagcttgtgtaaatttgtttgcctatgaatgactgtatcatttatgtgttgctcccaagtcacaagtcaatcctgatactacaactacagtttcataca

SEQ ID NO: 1535 - DNA, 826 bp, Glycine max
tacggctgcgaggacgacagaaaggtaccacattaattactcactcttcactcaaaactcttgtctttcattttgataattcccacactatggctgagcttcactaccaacaacaacaccaataccctcaccgataccctaatgatccatacgaacaacaaactagctactccactcaggtcgtcaaggcggccaccgccgtcaccgcgggcggctccctcttgatcctcgcctcgttgatccttgccggcaccatcatcgccctcaccatcgtcacaccaccgctcgtcatcttcagtccggttctcgtccccgcggtgatcaccgtcgcgctgctgagcctggggttccttgcctccggcgggttcggtgtggcggcgatcacggtgctggcgtggatctacaggtacgtcaccgggaagtacccacctggcgcggatcagttggacagcgcgcctcacaagatcatggacaaggcgcgtgagatcaaggactatggacagcagcaaatcagtggggtgcaggcttcttaatcgtgtgcacgcacgcacccgatcaaatccatctcgtggatttctctctttgtctagttagttatatttacgatttatgaatgaatgaatgcaggaatgagcgttaaagttgaatttgaatctcctcttttctttgtattttcgtttattgtgggtgttcgatcatcatcacttgttgtagttgtaatgtcttaattttgtgtgcatgctgcgactattcaaggacgatccatttgtgtatttattctagttttttctttccatttttatgaatcggtttgcttgttttttag

SEQ ID NO: 1536 - DNA, 2019 bp, Glycine max
attttccaaacttctcattctcaccatattaaagaaagaaaagaaaaaaaagtttaacttttgttaaccgaagtgttcgcctgcacaatccattattggatcgccattgcaactttctgttttttattcttttcagcagctatccaaacaaaacaggttcctcgttgactgagtgtgtcaggtcggaacagtgagtagagaataagctatgcagttcaatatcacatcacaattccttcatatcttctctcttaccttcttccttatcattacctcttcactttcacaatccaaccagttttgtgatgctgggactgaaattccatcatccaagttgttgatcaagggaggcacggttgtgaatggtcaccaccaacagatggctgatgtttacgtggaagatggcatcattgttgcagttaatcctaacttcagggttggagatgatgtcactgtcattgatgccaccggcaaatatgtcttgccagggggcattgatcctcacacccatctagatatggatgttggttttactgcaacggttgatgacttcttcagtggtcaggcagcagcattggctggtgggacaacaatgcatattgacttcgttataccacttaatgggagtttgacagctggttttgatgactatgaaaagaaggcaaagaagtcttgcatggattatggttttcatatggctattaccaaatgggatgaaactgtttccagagaaatggagctcatggttaaggagaaagggatcaactcttttaagtttttcatggcatacaaaggaattcttatgatcaatgatgagcttcttctgaaaggatttaaaaaatgcaagtctcttggtgccgtagccatggtccatgcggaaaatggagatgctgtgtatgaagggcaacagaaaatgatagaacttggaataactggtcctgaagggcatgctctttcaaggcctgcagtgttggaaggagaggcaactgctcgtgccattcgtttagcagattttgtgaatactcctttatatgtggttcatgtaatgagcattgatgcaatggaagaaattgctaaagcccggaaatcaggacaaagggtaattggagagcccattgcctctgggttagcccttgatgaatcttggctttggcatcctgactttgagattgcagcaaagtatgtcatgagcccccctattaggaaacgaggacatgataaggcccttcaagctgccctttcaacaggagttttgcagctggtaggaactgatcattgtgcctttaattccacccaaaaagctcgtggaatcgatgacttccggaaaatgcctaatggtgtcaatggtattgaagaaagaatgcatttggtatgggatatcatggtggaatctggccaaatatctgtcactgactatgtccggataacaagcactgaatgtgctaaaatcttcaatatatatccaaggaaaggagctattctcccaggatctgatgcagatattatcatccttaatccaaattcgagctttgagatgagtgcaaagtcccaccactccagactggacacaaatgtctatgagggaagaagaggaaagggaaaaattgaagtgactattgtgggaggaagagttgtttgggaaaataatgaactaaaggtcactcctggaactgggagatacatccaaatgccaccgtatagttatctgtttgatggactggacaaaaaggatgccatttatctaaattcccttcaggccccagtaaagagagccaaagccagcacttagaaaatttctgatatcctttctagtcaaatttcaacatttgatagagtggaaaaacaaagatgttaatccagttctgtgcaaataaagaaaaatatgtatattctaataaatatatttcgtattaccttttccactaatgtacatgcaattgcatagattctgatagcatccaatttctgttttataaaaaaaaaatttgttatgacatagaatctctcttgcatgtaaaa

SEQ ID NO: 1537 - DNA, 656 bp, Glycine max
tctttccggctgcgatccaaacagaacaggctcctcgttgactgagataacaactccgactcttgagttgagtgtgtctggtcggaacagtatgcagttcagtatcacatcacaattccttcatatcttctctcttaccatcttcattatcattacctcttcactttcacaatccagccagttttgtgatgcgggaactgaaattccatcatccaagctgttgatcaagggtggcacggttgtgaatgctcagcacccccagattgctgatgtttacgtggaagatggcatcattgttgcagttaatcctaacatcagggtaggagatgacgtcactgtcattgatgccaccggcaaatatgtcatgccaggtggcattgatcctcacacccatctagatatggatgttggttttactgcaacggttgatgacttcttcagtggtcaggcggcagcattggctggtgggacaacaatgcacattgacttcgttataccacttaatgggagtttgacagctggttttgaagactatggaaagaaggcaaagaagtcttgcatggattatggttttcatatggttattaccaaatgggatgaaactgtttcgagagaaatggagctcatggttaaagataaagggatcaactctttta

SEQ ID NO: 1538 - DNA, 1359 bp, Glycine max
tcgagtcagctacgtagggccccccccaaaaaaaaccgcatctacctttcacttcacttgtggttcctcactctctctctctccacaccacactgaggagggagacagtggaaggaaggaacactcaaatcactgaaccagccatggctaccttctccaaggaacgcgagaactttgtatacgttgccaagttagctgaacaagctgaacgctatgatgaaatggtggatgccatgaagaaggtggcgaagctggacgttgagttgagtgtggaagagaggaacctgttctctgttgggtacaagaatgtggtggggtcacggagagcttcatggagaatcttgtcatcgatagagcagaaagaggattccaaagggaatgagttgcatgttaagcatatcagggattacaggaacaaggtggagttggagctgtccaacatttgcagtgacattatgataattttagatgagcatcttattccatccactaatattgcggagtccacagtgttttattataagatgaaaggagactattaccggtatttggcagaatttaaagctggcaatgaaaagaaagaggtggcagatcagtcacttaaagcatatcagacagcttctaccactgctgagagtgaactacaacctacacatcctattcgtttgggtctggctctaaatttctcagtgttttattatgagatattaaattcacctgaaagggcctgccatcttgcaaagcaagcctttgatgatgctgtctcggagctggataccctgaatgaggattcttacaaggacagtaccttgattatgcagctgttgagggataaccttactttatggacttctgatatccccgaagagggtgaggacctaaaaatggaaagcgcagccagggttgatcaaggagaagatgagttaggccgctaacccatcattctgtcatatgtctaagatttgatgcattaatttttctcaatcatattttctccattgtagtgaagcctctatctgaatggtgcactgcacctcatcaactttgagtcattcttatttttgagtgatggcctatttgagtcatctacttcatttttatgctattgttgagtagttttattcatgtgtttgtgacacaaaaacaccattggtttgcaatgcataatttccctatttgtatcctgttatggttaagatctgttcttgggttggcctttcaagaactgatcacatgtgagccactgtaatattgcaatatttagacttttgttaagtctcattttattaagacagacaaattaggttaaagacaagccccccctagtactattggtaataataaaagcaataatataag

SEQ ID NO: 1539 - DNA, 1315 bp, Glycine max
tcgagtcagctacgtagggccccccccccgtcccacccgtccggtttcttattacagtagttgacgcggcactgcacagtagtagagaaaagctaacgcgtgtaaatgaagtagtgagtagagcaagagcgacaaagagagtgccaggtgtgtgaaggagctcgttacttgggatccagttgttgttattcttaatcggagatcgcagcggcggattgcatgagcggcggatcggaggcggtgtgagcagaggatcgaaagatgtctgcgatcatagtgtgcgggaagagatcagcgctgttccaagaccttcctcccaagaggatccgttgttcctcttcttcttctcccgttcacctctctcctcctccttcttccctcctccaccacctcgccgcccttttccctgacatggaccaccaccttctcgagaaagctctccaagattgcggcaacgacatcgactccgctatcagaagcttaaaccagctccgactaggagcaccaccgcctccttctcttgattctactcccatcgcatctgatactgctcctcctcaattgcaaggtggagcaaaatgtgatgcagaagtttcaggttctgatgatccagcagctggactaaagtatcctacaagcggtgccgaatgggtagagctttttgttattgaaatgatgaatgcttcaaacatggatgatgccaaatctcgagcttcaagaatgctagaggcattggagaagtccatttgcgcaagagcaagtgttgaaacagagcgaaacattcaccaggaaaatatgatgctgaaggaacaagtggaggcccttattcaagaaaacgtgattctgaagcgtgctgtcggtattcagcacgaacgccagaaagaatatgaagacagaaatcaagagttgaagcatttgaagcaattagtgtcacagtaccaggaacaggtaagagctttagaggtaaacaattatgcattgacaatgcacctaaagcaggctgaacaaagtagttccatccctggccgttttcatcccgatgttttctaggtaacatggctgtttctgtagtttaaataatcatgattgaagaagaaacgaggtaatgaatttatattactccacatttttaattaatggtggatattgaagatttatactatttaatgatgcgtggatgtggcaaaaaaattggtcctcccatatattattagctcttttgatgctgatacccatgtgataaatattttcgatgtgttagaattttgatttggcatgcttcatgcaaaaaaaaaaaaaaaaaaaaaaaagaaaa

SEQ ID NO: 1540 - DNA, 777 bp, Glycine max
  misc_feature (16)..(17): n is a, c, g, or t
cggtcctaaattcccnnagcgccgaggcgtgcgcccacgcgtccgtacggctgcgagaagcgacagaaggggagtgtaagataacacaaaaaaggttcatagcatcctctgcaaattaatccagttactgttgaagatcgagaatgaagcttgtggtgattgcactactagtgttgatgctggcaagctattctatggctacaaataggatgaaattggtgccaaaattggacgagagatcagaactgggtaatgaatctgatgataatgatcaccaccaaatccctcgaaagaagtatggaaaacctggatctgtcgaacgtacagtgagtgaggagtataatcaccattacatccctcgcaaggactatggcacacctggccagggtggaaattaaatattaaatgtttatttagtactaatgtattaaggatatatatatgcatcataaagctgtatatatgcacaagtgttgcagtgttggatgtgattgagtaatgaatgctagctgagtgtgtgttggtaagatatttatctatgtaagcaattactgagactattatttatcaacttaagtcccggaactacgtttcaccacgtacgatgtacgtgtccacatatattggtatgtaagaatgtgtgagttgtaccctaatgctatgtttgtgattctacatatgtgtgtgtgtgtgtcgcaatcacacaatcggatagttgagttaatagtaaataaaaccaagagttggtttgatcaattctatatttttcggtcttcc

SEQ ID NO: 1541 - DNA, 1422 bp, Glycine max
gaccaacatctgctgcttctgttttctgggatgctggtcttcaacaggctgacatggcacaaaaaaatgttttggcggaagccttccggtcggacagtactggtacatggcatcatatgcaaactgacatgaatagtaaaagcaacagcggcaatgctatgttaaggaatcagacagaaggaagttggctatcttctccgcattctagttgtccgtctcatttgtttcaggacgcaacagatgatagcaagagtgtctcagcctggcctgtttcaaagcctcactcatccagattgaacaatgatcacgtgcttgaccaagttgacaaggagagcaaagttgagactgctacaagttatcggttgtttggaattgatcttattgatcattctaggaactctccttcagtagagaaggcatctgcacaagcaggaaatgcacccaaagttactactgaaggctgcaccagtaccttgacccgaactgatgctggccatctgtcggatgtaccaatggcttcttccaaggagaggaaacaagaacagcagcaagtatcaccaaaagagactcagagcaagcaaatttgtagaagtcgaaccaaggttcaaatgcaaggtgttgcagtgggtcgtgctgtcgatttgaccatgttggatggatatgatcaacttataaatgaattggaggagatgtttgacataaagggacaacttcaacaccggaataagtgggaaattgtcttcactgacgatgaaggtgacatgatgcttgttggagatgatccatggcctgaattctgtaatatggtgagaagaatcttcatttgttccagccaggatgtgaagaagatgagttgtggaagcaaactgccgatctcctcagtggaagacgggactgtaataagctcagacacaaccgaaacctgaaacttttgacattctttcctgtggttttgcgtttgtttgtcagcagcacccaaatgctgatccttcttgttgcttcaaattgtttgtgggaaggaagttggtctatttgggctggggtaagtttcatgttatcagatgtgagacactagctaattgtaacttaatttgtagagacaccaccaccaggcattaattgtgctagaaaaaaaaagacctaaacagatttctttaataaattagtaagtgggaagatggcaaatttaggcttagtatatgtgaatattcatgtcaagttggaagaagaatgttgggggttttgatgttttgaaagacttgccttttttggttaaggggcttattcattggtgctttgtatgcatataatgtgcactttgttattaccctctaaaaattctaatattggtgagtcaagacttgttccccccccctgccgccgtattcggcgccattaaattgcttcaattgtaatgttcag

SEQ ID NO: 1542 - DNA, 1357 bp, Glycine max
tcagctacgtaggcccccccccctttttttatctttattcttaagaatttcactaatttttagacaaaagttgtttataattaacattaaaacgaatgttgaagccatgaagtgtaaaacgttacgtttaaacctctgcactgcattggcatttgatcctgatggacgattcaaaacagcagcaacgaaagaaaaactaccgtaagagaagcgctccaacagacaaagatgaacttcctcaatctcaaagcaacaatgaatccgacgacgaacgagaaagaagaatggcattggaggaaattaagctcctccagaagcagagggaaaggaaatctggaattccagcaaaccctagtttgcaggtgcagagtggaaccggcggcggtttagctgctaaagccgccgaaaagaacgacggcgatggcggtgagaaggacgagctcgttcttcaagacaccttcgctcaagagaccgctgttatggatgaagaccccaatatggtgaaatatattgagcacgagttagcgaagaagaggggaaggaaaattgatgcagcagatcaagttgagaacgagctgaaacgtgctgaagatgaactatataagatccctgagcatcttaaagtaaaaaggcgaaattcagaagaaagctctactcaatggactactggtattgctgaggttcagcttccaatcgaatataaattaaaaaatattgaagaaacagaggccgccaaaaagcttctacaggaaaagaggcttatgggtcgaacaaaatcagatttcagcattccatcaagttacagtgctgattatttccagcgtggcagggattatgctgaaaaacttagaagagaacatccagagttgtacaaagatagaagtcaccaggatgatagttctggatccaaacaaaatgattccagcactgatgcagctggagcagtacagaggcaggctgcaactgatgaattcatgttagagcgcttcaggaaacgagaacgtcaccgtgtaatgcgaagatgacatgaatgctctatatatggcatactttaccagacatcaaaagattggtgcaagtgcatatgcttgcttattcaaacttagcaagaagatcattgggctgcttgagcgttaatttttgttggttcatacttttttcaagaacaactgataagatttatcaagaatattttattttaatcaaaaggcagcaaaagaattgtgacgctgacggcaccaggttccttgtaacaggatctctatgtattttactgacattcaaaatattttactgacagtttacgataaaccgccatttgaatccaaaaaaaaaaaaaaaaaaagtaacttagttg

SEQ ID NO: 1543 - DNA, 1776 bp, Glycine max
tgaatgcttaaaggaattagaaaaggcaacaaagaagaccactatgcttttatcataatctttataagcgcataaacactggcgcaaatgatttatcatcctaattaaacaaacaacttttcacacatgaccatgctacctcattcattaactatgattgcaacactaataatcatttttcttgcacaaacacttgtgggggtgagttcacttcctgaagctgataaaataaccaatttgccggggcagccacgggtcgaatttcagcaatattctggttatgtcaccgtggatgatcaaaatcaaagagctttgttttactactttgttgaggctgaagaaaacccttcttccaagccattagtcctatggttgaatggagggcccggttgttcatcgattggagttggagcttttgctgagcatggtcctttcagaccaagtgacaacaatgttcttgagataaatgataaaagttggaacaaagtggcaaatgtgctatacttggaatcaccagctggtgttggattctcttactctagcaatgaatctttttatgccttagtgacagatgaaatcacagctagggataatcttgttttcctacagcgttggttcactaaattccctgagtactcaaataacgacttcttcatttcaggggagagctatggaggtcactatgttccacaacttgcacaacttattgttcaaaccaagaccaacttcaatctcaagggaatagcaatagggaatcctcttcttgagtttaatactgatttcaactcaagatctgagtacctttggtcccacggactgatatcagattcaacatacgaagtcttaactagagtctgcaacttttcctcaattaggagacaaatgcaaaatgggaatcttagaggggtttgtggaaaagcaaataagctattggatagtgagattagcaactatgtagatgaatatgatgtcactcttgatgtttgtttgtcatcagtaaatcaacaggcttatgtgctgaatcaactgcaagagacacagaagatagatgtttgtatcggtgataaaacaactacatacttgaacactaaagaagtccaagaagctctgcatgctaatcttgttggagtcgccaaatggtcaacttgcagctcagttctgcattatgattatcagaatctagaaataccaacaattcctattctagggtcacttgttaactctggcatcagggtcctagtgtacagtggagatcaagattcagtgcttccattattaggttcgcgatctctagttaacggattagccaaggaaattggacttgatacaaccgtggcctatagagcctggtttgagggaaaacaggtggcaggatggacacaagtatatgggaacatcttatcatatgccaccataagaggagcatctcatgaagctcccttttctcaaccacagagatcactcgggctacttaaagcctttttggaaggaaagccactacctggtgttaaataaaatacgaatagatttaattaacgctaggcgttcttatttgctgcaataaatagaaatgcttccaaaatccacacagaagcttattattgctataggattacgattatcttatgattgttatgttcgtgctctacatttctatgctttgctttctttccgaacaatgtgctaaaggtgcacaggatgaagggaagtacaaggattaaaaattacaatcagccaaaaataaactaaatccagataattgtatcgtgtttgtgg

SEQ ID NO: 1544 - DNA, 1054 bp, Glycine max
  misc_feature (7)..(7): n is a, c, g, or t
ggcgacngggcattcgccccctctcagctacgtaggcccccccccccagtgctagctagctaccccatactttcatcaaaacctagcaagaaaactaacatatatagaaagaaagaggttatagactattgaaccacacaatacaagttaaagggatgatggagaaaggaagtgtggttgaagctgcagtaactagatctcccatgcagatgaagatgggggatcatgaattagaaggcaacactaccagtgccctacgcactgccgagacgtttctgcgtttgttccctgttggtctatgtgtttcagcacttgttctcatgcttaagagctctcagcagaatgaatatggatctgttgattacagcgatcttggagctttcaggtacttggtgcatgcaaatggcatttgtgccggctactctctattttcagcggtgattgctgctatgccatgcccttccactatacctcgtgcttggactttctttttgcttgatcaggtgctgacatacataattctagcggctggagcagtgtcaacggaggttctatacctggctgagaatggagacgccgcaacaacgtggagctcagcatgtggctcttttggtcgattttgccataaggtcacagcatcagtagctatcacatttgtggcagtgttttgctatgtcttgctttccctcgtttcctcctacaaactcttcaccaagtatgatgcaccagcaagcaggcccactgaagccattgaggttgctgctttccctggctagctagctcacccaaaatatataaataacaacttcatgcttcatatgtgtgtgtttgctacaattaatatattaatgtaatagcatatactgttgttgtgtacgttaatttaggacttaggacagacatgcattgccattaagtttgagtttataatttagtagttatatataactcctgacctccttcttctttgtattataacactggtgttcatgcatgaatcacggatggctttagctttttctactaaaaaaaaaaaaaaaaaaaaaaaagaggg

SEQ ID NO: 1545 - DNA, 1876 bp, Glycine max
ttcccgggtcgacccacgcgtccgcccacgcgtccccccccccgtccgtacggctgccagaagacgccacatcattgatccaatcaagaatacaataacatagcatagagtgagaagtgagaagagaaaaatggcaatctccatacccagtagacaacttttcatagatggagagtggaaagtccctcttctcaacaatcggtttccgatcatcaaccccgctactgaagacatcatagggcatattccagccgctactaaggaagatgttgaccttgcggtggatgctgctaaaagagccttttcccataacaaaggcaaagattggtcttcagctcctggctctgttcgtgctcgctatcttcgagccatcgcttcaaagataacagagaaaaaggatgaactaggaaagcttgaagcaattgattgtggaaaaccactagatgaagcactggcagacctggatgatgttattggttgttttaactactatgccgagcttgcagaaggattggacgcaaagcaaaatgctcctgtatcccttcctatggaaaccttcaagagttatgttctcaaggagcccatcggagttgttgcattaattactccatggaactatcctctattgatggctacatggaaagttgctcctgctctagctgctggttgtacagcaatattgaagccatctgaattggcatctgtgacctgtttggagctggctgaaatatgcagagaagttggccttcctccaggggtattaaacattgttactggattaggcaatgaagctggtgctcctttgtcatctcatcctgacgtagacaagatttcctttactggaagctctgcaactggaagcaggattatgacagctgcagcacagctaacgaagcctgtttctctagagcttggtggaaaaagcccaatcattgtttttgaggatgttgaccttgataagactgctgaatggaccatctttggctgcttctttacaaatggtcagatatgcagtgcaacatctcgccttattgtgcatgaaagtatagcaacagaatttgtgaatagacttgtgcaatgggccaaaaacatcaaaatttcagatccctttgaagaaggttgtaggctaggtcctattgttagtgaaggacagtataaaaaagtgttgaattgtatctcaactgctaagagtgagggtgcaacaattttgattggagggtctcgcccagagcatttgaaaaaggggtactttgttgaaccaaccatcataactgatgtgactacctcgatgcaaatttggagagaagaagtttttggacctgtgctatgtgtgaaaacattcagtaccgaagaagaagctattgaactagcaaatgacacacactacggcttagggtctgctgtaatgtcaaaagatctagaaagatgcgagcgcatatcaaaggctattcaggctggaattgtatggataaattgtgctcaaccaagcttcattcaagctccatggggaggcgttaaacgtagtggttttggtcgtgaactaggagaatggggactcgagaactatttaagtgtgaagcaagtgaccaagtacatatctgatgaaccgtggggctggtatcagtcgccttcaaagctgtgatatgaattgctgttctaaaatctggcatgaataagttgtgggggacattaatttgtgatgatgatcttaattcgagaaaataatgtgcatatgtataacactgaaattgttccatggccttgttaatgacgggctgagttgattttatcttatttgtgatgatgatcttcacgttagaaaaaaaaaaaaaaaaaaaaaaaaaaaaaatgattcctttaccggattcctggccta

SEQ ID NO: 1546 - DNA, 1697 bp, Glycine max
ctttgaaatccgccatgaattgtagctacgttaaagactacgagtttgttgcaatttttgatgcagattttcagcctaccccggattttctcaagaaaaccgttcctcattttaaggataatgatgatttggggcttgttcaagcgagatggtcatttgtgaacagggatgagaacctgctaacgaggctgcagaacattaacctgtctttccattttgaggtggagcagcaagtcaatgggattttcattaacttttttgggttcaatggaaccgcgggagtgtggaggatcaagactttggaggatgccggtggttggttggagaggacaactgttgaggacatggacattgccgtccgagctcatcttcacggttggaagtgctttttcctctacggtgtggagtgccaatgcgagctaccagaatcttacgaagcttacaggaaacagcagcatagatggcattctgggccaatgcaactgttccgcttgtgtttgcctgatatcatcagggccaagataagtgtgtggaagaaattcaacatgatattcctcttcttccttcttagaaagctgatattgccattctattcattcaccttgttttgtataatcctgcctatgacaatgtttgtgccagaggccgagcttcctgcgtgggttgtgtgttacatccctgctgccatgtcttttctcaacattcttccagctccaaaggccttcccttttattgtcccttatctcctatttgagaacaccatgtcagttaccaaattcaacgccatgatctcgggcttattccagcttggtagtgcatacgagtgggtggtcaccaagaaatctggtcgttcctcggagggcgatttggtttcattgattgagaaaggaccaaagcatcaaagagggtcctcagcacctgatctagaggaaatgaaagaggaacttcgaaagcaggagcagcaaaaggcctctaagaagaagaaaaaacataacagaatatatatgaaggagcttgctttggcttttcttcttctaacagcctcagcaaggagtcttctctctgctcaagggattcacttctactttttgttattccagggaatatcattcttgttggttggtctagacttgattggtgaacaggtggactgaaagaaaaataaaatgaaaagaattgacaggactgtgtacttttacatgcacggaaaaagcaaaaaggggggaaagtcatgccttatgaaattactgaagacacttatttggggcaatggagagtgtagaggacccatagtgctgctttttcttgctcatgctcctccctccaggctcgtaaatcaaatcccacccaatacgatactttattgtgttataatggaccgaaaaggacttaattgggaaatgggtgcaattgaggccaaattcaatgtgtaagtttagccttgtttttttgttagtttgattcatttttgtaattttatgtggaatcttttctcgccggatcaattcttttgtaagaaaatttgtggttcagactttaaacaccccacacccattgggatttttttttactatttattttatagcgatagccagtagcaacattattctccttgtcatggttccagctacttcctccaccgcttggtattcggtagtgcaaattcaataattaaaaaattcatattttgtcaaaaa

SEQ ID NO: 1547 - DNA, 1929 bp, Glycine max
tgatgatgcaagaaagaaacaaagagaagggaaatatcaggagctagtgctaggtgcgagtactggagcaaaacgcgggtgtgtgtgactttcgttggagagagatgcagttccattcagaaactccaaacaaacatccctcgcgacaaccttaggaatctcgatcgccgaaaaaacctatgcagccccgaacacacacactctgcattccaacttgtttaaatcatgcctctcgattcacccttctctctcaataaatcttttggcctatgaaatcagattcttcgccaccgccacagtcataataaagttttatttttccaaataaagggaatggcgactcctgttgagcctcctaacgggatcagaactgaagggaagcattattattccatgtggcaaaccctgtttgagtttgattcaaaatacgtgcccatcaagccaattggccgcggagcatatgggattgtgtgctcttctgtgaatagagagacaaatgagaaggttgccatcaagaagatacagaatgcctttgaaaaccgggttgatgcactgaggactttgcgcgaactcaagcttcttcgccaccttcaccatgagaatgtgattgctttgaaggacatcatgatgcctgttcacaggaatagtttcaaggatgtctatctggtttatgaactcatggacacggatttgcatcagattattaagtcttctcaagctttgtctaatgatcactgccagtatttcctctttcagttgctccggggcttgaaatatcttcactccgctaacattcttcatcgtgacttgaaacctgggaatcttctaatcaatgcaaattgtgacctaaaaatatgtgatttcgggctagctcgtactaattgcagcaagaaccagttcatgaccgagtatgttgtcactcggtggtatagggcaccagagctcctactctgctgtgacaactatgggacatctattgatgtttggtcagttggatgtatctttgcagagcttcttggccgaaaaccgattttccctggttcagagtgtctcaaccagctgaagttgattatcaatatccttggtagtcagagggaggaggatattgaattcattgataatccaaaggcaaagaagtatatcaaatcacttccttattctcctggaagccccttttcgcgactttatcctaatgcgcatccattagcaattgatcttcttgcaaagatgcttgtttttgatccaaccaagaggattagtgtcactgaagcacttcaacacccttacatggcccctctgtatgatcctaactgtgaccctccagctgtcattccaattgatcttgacattgatgaggatctaggggaagagatgataagggagatgatgtggaaagaaatgcttcattaccatcccgaatctgcgatggagaatgcagggttgtgctaatgatatttacttcttttcacggttatgttcccttttgttggtgccaggatagttctaatatcataacttgcttcaaataattaggagggctttgtcatcagtgagctcattatatgttcctgttttctatttattgaaagcagagagaaacagcaaaatattatcttaaaaaaaattgtgttattgctgatgatgcattatagtctttaactgccatgttgagagattgattttttactgaactctgtattgtagttgcctcgttttgctgtacataaacatgttcctgtgtctttcataaaccattttgtaaattaagtctaatgtttatcaatagtgtgttaatgtttgaactttgaagttattttattttatttttttcctgcaagcggaacataaaaaaaaaaaaaaaaaaaaaaaaaaaaaaaaaaaaaaaaaaaaaaaaaaaaaaaaaaaaaaaaaaaaaaaaaaaaagggggg

SEQ ID NO: 1548 - DNA, 1152 bp, Glycine max
aattcggctcgagggcagagaaagatgttggtggtggcggcttgactcgagacatctgttggtatgtcaatggcaaagaaacccgtgaaatactatgtggtggacgcgtttactgagtcagcattcaaggggaaccctgcatctgtgtgtttcttagaggaagagagagatgaggagtggctgcaagcagtagccgctgaattcaatatctctgagacttgttacttatcacgcatcacccactcgctccatggaatctctaatccccgttttcgtctcagatggtttactcctgttgctgaggttaaactttgtggtcatgccacattagctgctgcgcacgcactattttcatctgatttggtggataccgatgttattgaatttgtgacactatctggagtattaactgccaaaaagattccagccatccatatcaccagtgcctcagactcacaaaacggtgaagctcaggatggattttatattgaattggattttccggttgatcctgttacagaattcagctttgatgagagtacttcactactttctgaggcattgaacggtgcatccataattgatgtaaagaggacacaaattggagatgacttacttgttgaactcacatctgtaaaagctgtctcagaactacagccaaaacttgatgcaatagttagatgtcctggaaggggggtaattgtttcagcgattgctcctccaggctcgggatttgacttctatagtcgattcttctgcccaaaattgggaatcaatgaggatcctgtttgtgggagtgcacattgtgcattggcatcttattggagcaacaagcttgggaagttcgatttgaatgcttatcaggcatcatccagagggggagttctcaatattcatcttgatgaaaagatccagagagtgcttttgcgtgggaaggctgttacggtgatggaaggctgtgttctggtctagtcgggttcttagcattgcaccaaagtatctttcagatgacaagaactgtaattgaaatactcaacttttacaatatttttatcacataaaatggacctctgagcattatgcttttgacatacacaaataagaatgttcaatatagtgcatgtcttgtttcaatttgctcgagaaaaaaaa

SEQ ID NO: 1549 - DNA, 2060 bp, Glycine max
  misc_feature (1822)..(1825): n is a, c, g, or t
  misc_feature (1828)..(1829): n is a, c, g, or t
  misc_feature (1849)..(1855): n is a, c, g, or t
ttcagctcgtaggcccccccccccccccgaaagtttcccttaaccatgcttctccttgtcctatacacccacacgggaatattatcatcaacattttcccatccaaaaattagtccacttttccatcaacatgtgcctcctttcaatctctctcatgacactatacaaccccagatcttaattatctcatttatctagaccctcttattatgtgtcattgagtccactgaaaagatcagatttttcagtgaaacaaggaaaaagaaccaacccctccatgttgatactagtgcttggactagcttcagctacttttttagtttttgttgcagtttatgtgttctattgcaagagaagggtgtcaaagtatgatgagagtaaagacattgagagttcagaacacaaggaggaggatgtggcacagaaggaggatttgatgatctttcaaggtggagaggaccttacaatatgtgacattttggatgctcctggtgaagtgattggaaaatccaactatggaacactgtacaaggctttgttgcagaggagcaacaaggtgaggctgcttaggtttctgaggccagtgtgcactgcaaggggtgaggaattggatgagatgattcaatttcttggaaggataaggcaccctaacttggttcctcttctcgggttctacactgggccaaggggtgagaagcttcttgttcatcccttctataggcatgggagtctcactcaatacataagagatggaaatggagagtgctacaaatggtctaacatatgtagaatatccattggtatagccaaaggattagagcatcttcacacatcacaggagaagcctattatccatggaaacctcaagtctaaaaacatccttttggaccgctcctaccagccatacatctcggattccgggctacatcttctgctgaatcctactgctggccaagaaatgcttgaaaattcagcagctcagggttacaaggcacctgagctcatcaaaatgaaggatgctagtgaagtgactgatatatatagcctcggtgtgatcttgctggaattgctttcaggaaaggaacctatcaacgagcatccgactcctgatgaggatttctatctgccaaatttcatgagaaatgcagtccttggacacagaattgctgatttataccaacctgcctttcttctcaggaacagcagagatgataacattccagtgacggaagaatgcattctcaaagtctttcaacttgctatggcttgttgctccccttcaccctcagttagacctaacataaagcaagtcctcaagaaacttgaagaaattatgttctagaatccatgagggcttttgtgatttttttgtgtagtattggccactttggctgcagtgatactgcacactttaaaattcttcaagttcatcattaacaatgatgtggttggagacaatataacatttatatatgagaaattaggaagagaaaacaagtaagtgttgtgcttacaaaatgtgcaattgactaccaaacaaagatttcaggacagttgatgttgatgtcaagggttaaagtcaaatgaggaattatagcttgaaactaaaggtgtcaatttctagaactccaaatctggctcccaaattactgacttcatatttgagatttgtgagactgtttggtaaaacaagtgagcatgtgacatggacaatgtcaaaagaatttctttgatgccactcatcctgatactaattgcagaggtttgatgggaaattacagagatccttttgctgtcaagaatgtgcttctgttccaataannnnggnntagtatttgagtttggctgnnnnnnnataaaccacaggaactgtgatgaaaaaaatgctctttatccacagtgaccctctcaaattccatgttctggccatagaattgaagctacaaaagtgaaaaggaatctgaataattatgtaggccaggaagtgggataatttggtgtcagattttcaaaatttcacctgcaagaagttaggttgtttgttatggttaggtctcaca

SEQ ID NO: 1550 - DNA, 2097 bp, Glycine max
tcgagtcagctacgtaggcccccccccttaggccacagagagctgtatcagaaactgactatatcctgaaatgctccattacaatgcaatcaaatggatcattggatctttgtgtctatccatatattggtctacatgggccagaaagttcttctgcctttctgataaacattcacgaacctattatttggcgccttcatgaaatgatccagcaggtgaagctcagtaggctgtatgattctaaaacaactgctgcatcagttgatccaataattcaaattggtgtccttaatatttcggaagttcgattcagagtgtctatggctatgtcaccaagtcaaagacccaggggtgtgcttgggttctgggcatccttaatgactgcattgggtaacacagaaaatatgcctgtcaggataaaccagaggtttaatgagaatgtatgcatgaggaagagttctatgattaccatggctatctcaaatgtccgaaaggatctactaggccaaccacttcagcttctctcaggagtcgatatattgggcaatgcaagtagcgcacttggacacatgagtaaaggtgtagctgcattgtctatggataaaaaatttattcaaagtcgacagagacaggaaaacaaaggtgtggaggatttgggtgatgttataagagagggaggtggagcattagctaaaggtttattcagaggggtgactggcattttaacaaagcctcttgaaggagcaaaatcttctggtgttgagggttttgttcagggtgttgggaagggaattattggtgccgctgcacaaccagtgagtggagttttggatcttctgtcaaaaacaaccgaaggtgctaatgctatgagaatgaaaattgcatctgctataacatctgatgaacaacttctcaggaggagactgcctcgtgttataggtggtgataatctgctaaaactatacgatgagtacaaagctcaaggacaggtcatactgcagttggcagaatcaggttcattttttggtcaggttgatctgttcaaggttcgcggaaagtttgccttatcagatgcttatgaagatcacttcatgcttccaaaagggaaaatcctcgtggtcacacatacaagagtcatactattgcaacaaccatccaatattattgctcagagaaagttcagccctgcaagggatccatgttcaataatgtgggatattctgtgggatgatcttggtactatggaactgactcatggcaaaaaagacaagccaaaagctcccccatcacagctcattttatatttgcaatctaggtcaatggatatgaaagaaaatcatcgcattataaaatgcatccgtgaaacccatcaagctcttcaaatttactcttcaattcagcatgcattgaacacttatggtccaggagtatcaaagggagttctgaaaaataaagtggcaaagccatattcaccccatgttgatgcccgtagtgttgacctatccccccaacagatgcctggatcagtccctctctcctcaacttttggaagcagtgcccgtgactaggactatacattgttcatcacattcaacatagtcaagtccctatctaaacagccctgtgctctattgaaattctaccgattagtccacctgatgacttccgttcaacccatgcagacagtcacatgagcccactcatatcaggactcagattgtaatgctggtttcaggaatgcaaccatatacctacccgaagataacggttacagttagttggagggaattggttcgaaatctatctattgctatgagtctcggagaaggcccatatctccaattttttcttagaatatcatataaatccaatacttcttgtataatattgagtgaaatagttttctttgtacatatacagaatcacacagctcatataggatcctacttgctctcatcttgcccctttcacatatagaattttttatttttgaactttttaacaaatattcgtgtaacacccatatctagacccaaaataatttcaaaactttataaaaataattcttattttcatacgaaaaaaaaaaaaaaaaaa

SEQ ID NO: 1551 - DNA, 1747 bp, Glycine max
  misc_feature (16)..(20): n is a, c, g, or t
ggttagaatgtgtttnnnnngaaagttgtactagtaaatcaggtggtacaactcaaatgagtattgagtgtatcgaagtggttaggttagctggttcaacaaccaaggatgctaacgacaattgtgaagttaagtcatctgatgcactcccaggaagtgcacctacctcggcccccccccccccccagattagtgaagcaggctttgttaacactacacatgatatgttgaaatcaaggagtgttgaagttccaaatgaggtaagctgctgaaccagtggaggaacctttggaagttgtttggttcatgtgaagttccttaattagaagttggtgatacatttcagaatgaagttgtcaatggggacaaagctcaggatctagctttagattgcttggaaagtgcagaaactgaatctactaacagcttgtcaaactataaagagggagacaatgatacggatcagcgactagacaaagaatgtaatttcatcccaagggctgaatgttcagattatgtaccaaatgccagctcccagaacctcaattgcgaggtgagttatttcatttgaggacttttttggattaggaactgttgtggatggcagtgaaaaaactggaagtctgggagatagtgagtcagggatctttgcagggtgatgtttgtgtggctgatccagatcagttctgaagagtgggtgttttcttggaaatagagtatttcaaaatatcggggctcaggaatataaggttttgaattttctaatctcattgttttctcggtaataaagactatctgatcttataataatatactttttacctcatctttctttgctttatgcctttatggccgttaccaaaattttatatttcatgggttttcagaataaagagtctaatcttgtttttctgatttgattttttttttcttttcttctgttatagctttgcttgcatatcatagacaattcagcctaatcttgttgggtcttcttactataaagaactgtttttatcttgtatattttcctgtttctttcaagataatttgactatcaatttccatggtaattgaatatcttggttagttttctgactagtgaatatgtggtcgcaggtcctgcaccactatacgtgctatgtttccagtaactgtgcttaagaacctaacttgttttgtgtataaagacgctcagagaccagaccttcctttttttcattttattagttttttgtttaatacttttttcttcctaattgttattattctttctattttctatattgggtatagccagatgtcagtctcggaagtgttgtataaattgaagatggggctaggtcaggatgagtttggagtaaatcacatgatatttgggaggtgaatggctgaaattgctgctcacgctgctaccttgtgctatgttgtggctgttgctgtgctgagatcctgtgaatgggactaaggttataattgaacagtgaggagctgatacaaatgatggcagtgaaagagattggggtttgtggtatggagttgcgatggatggtcgtatgtgtacaatagatgaacaacatgatgtgggaaacatgggcttgtttaagaaatggagaagaagcataagcaagagaaaaactgtactagcacatggtggtgtgccagaaaccattgttggttcatcaacattcagcattagcatgatgactactagagaagatgtaaccagtgtggctgtggaagatga

SEQ ID NO: 1552 - DNA, 1496 bp, Glycine max
  misc_feature (1031)..(1031): n is a, c, g, or t
actagtcctcatctctctgaaactacactccactccatctccatggaggaacacaaaaaagaagggttttttttgcccacaccagttgcaaaactaatatcctttcaaacggatttgatctataatggcctggtttctctcttttcccctatccactctcttttctccgtggcttctaagtcctaccaccgtgctgaggagaccaaagacagtgttgaatcagcagtgcaacgtgctctttctcatcaaatcactcatggcagcgcactcttgctgaagaaactaggactttgctttctgagtgttgcgtatgtgtgcatggttatgattttggctctcattctggctgctgtggtgggtgttgctttggttcggttgtgggtggaggaacccgtgtctgtcaaggataatctgcattttgattacactgaagctcaccctacggctgtgttttcattcaatggagttagaagtttaaagggtcaccttaagaaaaagcacataagtgtcccagttggccactcgtttttcgcttctttggtccttgtgatgcctgaatctgacttcaatagggagcttggcgtgtttcagttgactgcagaactcctatctgtgaatggaaatgtgatagaaaaatctagccagccatgcatgttgaggtttagaagctcaccgattcgactagtccgaacccttatgatgggagtgcctctggtgctgggaatctcaggggagactcagaatattaatgtggatatactgaagcacaaagaagactacagaagaagcaattctattagggtaactctgcatccaagagcaggaacatcatctcttccacagctatacgaagccaaaattgcgataaactcccatttgccttggactaaagagttggttcgaaattggaagtggacattttatgtttgggtgtccttgtatgtctacattgtgctacttgtgtctctcctatgttgttataggccactcatctttctggtgacaccagagtatttcaatgatcatagggntgagtgaacttacaagagaagaaccaggacaattaggagatgaaagtgaggtttctgagttgttgaggaaatggagaagaagcagaagtaagagaaaaaccgtcctggcacatggtggtgtgccagaaaccattgttggatcatcagcatccagcattagcatgactgctagagaagatgtaaccagtgtggttatggaggatgaggttgaggactctgaaccagtgtgcataggttagagggctaattttaagagggataataaattggtcttgagtgagtttatattatggtttgattataagtatgtgaacttttgtaagcttccactgcattttattatggtttgaagaagtaacattttgaactatcatgtcacctcaatctcactcttttgttaatattaccagtgtatctagaaacattgcattacatacataactattatatgtgttggcttgtgta

SEQ ID NO: 1553 - DNA, 1986 bp, Glycine max
cggcctcgaatctctctcatgctagaaagcacttcaatgggttggtggatttgcagataaacactgtttcgtgatatgtcttcctcaccctttactgtcttcaaagaagcaagcatcctcagatatacttcatacagatacccctcctgaattgctctttaaatgtaaaactccacctaagatgcttgtaattttaaacccacgatcaggtcggggtcgttcaagtaaagttttccatggcattgtggaacccatattcaagcttgctgggtttatattggaggtagtcaatccagcagctgccggtccccccccccctcttgcatcaagtgtagacatcagctcttgccctgatggaattatctgtgttggtggtgatgggataatcaatgaggttcttaatggtctccttagtagagacaatcaaaaggaaggaatatctataccaattggaattataccggctggttctgataactcgttggtatggactgttcttggagttagagatccagtttctgcagcaatggctattgtaaagggtggtcttactgctacagatgtctttgctgttgaatggattcagactaataaaattcactatggattaacagtctcatattatggttttgttggtgatgtgttggaactttctgaaaaatatcagaagcgctttggcccgctgcggtattttgttgctggattcttcaagttcctatgcttaccacgctacaactatgaagttgaatatcttccagcttcaaagactgagagagaaggaaagctttctggtgaaaaggaagtagttgacatgtcagatctgtatactgacatcatgagcagatcaaataaggatggaatgcccagagcatctagtctttctagtattgactcaataatgactccaagtcatatatctggtgtagacctggatacctgtagtagtacccatgctagcactgaaccttctgaattggtgcgtggcttagatccaaagtccaaacgcctatcgtctggaaggggcaatgtaatagcagagccagaagttatccatccgcagctgcctctgtcaacaactccaaactggccaagaaccagatctaagtcaaggaatgataaaggatggactggattgaccacaacacatgatacctctagacggggaaatactgtgacaaatgatagagaggatatatcatcaacactgtctgatccaggtcctatctgggatgctgaaccaaaatgggatgctgaacctagtaattgggatgtggaaaatccaattgagttgccaggaccatcagatgacacagaaataggatctgcaaaggaggttgtgccccgttttggagataaatgggttgcgtcaaagggacaatttcttggcattctggtttgcaaccatgcatgtagaactgttcagagttctcaggtggttgctcccaaagctgagcacgatgataacactctagatttgctcttggttcatgggagtggaaggctgaggctgttgagatttttcttacttctacaaatgggtcgacatctttcactgccatatgttgaatatgtcaaggtaaagtctgtgaggataaagcctgggaagcacactcacagtggatgtggtattgatggtgagcttttcccactcaatggacaagtaatttcttctttgcttccagaacagtgcaggcttgttggtcgctttcgtatatgataaccgagttcttttcaattctttcatgggttctgggaagttcatgtaccttctcatatatatgaatccagatgcccaatttgtcttgcaaattccttatcgctgtaacagctgagctttgtaaatcttttgttccggttatatgtatctgttgttgctagcttacctgtctttactttgctttcataaaaatgaaaaaaaaaaactgcacatttcctgcaacaagaagctgaatgtattgctgatcaccatttccttgaattggtcaa

SEQ ID NO: 1554 - DNA, 1222 bp, Glycine max
gagaaaagatggtttgtgtcctttaacaccggaggagactgccctcacacttagggcccttgacattgatcaaaacattcaaatctacattgcagctggggaaatctacggtggggataggacgagggcaagtcttgcgaagaactatccaaaattggtcagaaaggaaacactgttggaaccatctgaccttcagttcttccaaaatcattcctctcagatggcagctttggattaccttgtctcattagagagtgatatctttgttcctacatatgatggaaatatggccaaagtagttgagggtcatcgcagatatcttgggttcaagaagacgattttattgaacagaaagctcctagttgatttgatagatcaataccatgatggaatattgaactgggacgaattctcttcggctgtgaaggaagttcatgctgatcgcatgggtggtgcaactaagagattggtgatccctgacaggcccaaagaagaggattatttctatgccaatccagaggaatgttttgaactatcagatgttatgttgagtagtacgtgagtgatgcatttggaaataagagaatttacttgtgccctctcctagtgcgtgcacttggtcttctaccacagatacttaagataggtctctacgcagtttagcaaagatgatgacagcttttttgtatcacagaggcagtcatatagtgacagttagaatggggaagggggaatgggcttttcatgaaagctcgagaaggtagccgacggatactttatatataaaatatgcaaataatccatcatcaccacattcatgtatagaagccacaccctgccattacaggatgagagcagatcaaactgcattgtacacggaggggttcatatacaaatttggattctggaactgcagttcgtggaagctttgttcctttggtacctttcattttttccttctcgacaaatataaatatatatcataaattgttttttttttaccacacctttttatttaacacgaccattgtgattttgaggattgagtcactgtaaaatttgtttgttcctgattattgcctccaaaattcttagcttttggtcattattaaagagaatggtaggttggacttctctttccctcgggctttctcttatctttatttatttatacctgacagagtgctatcttaaaaaaaaaaaaaaaaaaaaaaaaaaaaaa

SEQ ID NO: 1555 - DNA, 1745 bp, Glycine max
gaggtagataagaataacgggtacttgacggtgtcgagcaatggaggactcaaccaaatgagggctgtgatatatgacatgaggagaattgcaaggcttataaacgtgacgcttatagtgccaggattggataaagcgagcttttgcgctgacctcagagagttacaagatatctttgatgcggaccatcacatgacatgcttgagggatgcagggcggatattgaaagagctgtctgctagactcaagacgagagtgggaagtgggttcctttacagcatgccaccgattacgtggtctgacatatcatactataagaaccagattctacctttgatacaaaagtacaaagttgttcatttaaatcgaacggatgcccggctggccaataatgaccaacctttggagattcagcggctgcgttgcagagtcaattttagtgctcttagattcgcccccccgcgcgtccggttaggcaaaagggtgatcaagcttctcaggcaaaatggcccatttttggtacttcatctgaggtatgagatggacatgctggcattttctggctgtacacaaggttgcaacagtgatgaagtggaagaattgacaaggatgagatatgcttatccttggtggaaaggaaaaataattaactctgatttgaaaagaaaagatggtttgtgtcctttaacacctgaggagactgcccttacacttagggcccttgacatcggtcaaagcattcaaatctacattgcagctggggaaatatatggtggggacaagagaatggcaagtcttgcgaagaactatccaaaattggtcagaaaggaaacactgttggaaccatctgatcttcagttcttccaaaatcattcctctcagatggcggctttggattaccttgtctcattagagagtgatatctttgttcctacatacgatggaaatatggccaaagtagtcgagggtcatcgcagatatcttgggttcaagaagacgattttattgaacagaaagctcctagttgatttgatagatcaataccatgatggaatattgaactggaacgaattctcttcagctgtgaaggaagttcatgctgatcgcatgggtggtgcaactaagagattggtgatgcctgacaggcccaaagaagaggattatttctatgccaatccagaggaatgtttagaactatcagatgatatgttgaggagtacgtgagtgacacgtttggaaataagagaatttacttgtgccctctcctagtgcaagtacttggttttctaccacagatgtttaagatgggtctctacgcagtttagcgaagaggatgacagctatttgtatcacagaggcagtcatatagtgactgttagaatggggaggggggaataggatttttcatgaaagctcgagaaggtcaagccaggtagccgagggatactttatatatataatacgcaaataatccattaccacattcatgtatagaagccacaccctgccattacagggtcagagcagatcaaactgcattgtacacggagggattcatatacaaatttggaattctggaagcttaaaaaaaaaaaaaaactcattttttccttctcttctaaatataaaatatatattataaattgtttttttttttacccaccctttaccacacctttttatttaacacgaccattgtgattttgaggattactttcactgtaaaatctgtttgttcatgatta

SEQ ID NO: 1556 - DNA, 615 bp, Glycine max
tggaggttttgttttgaaacttcgtggtttgaaagctagtgtgttggaagatttattaagggctattaatcttgtctatattagacgggatcttgttcaaagtggtgaagccttgttgaatcatgccaacctcgttcaacaagaatatgaaaagacaacaaaattttgtttgagtaaggctgacgaacaggagaaaactatcatggaagaatggttgcccgaacttaagaatgctgttttgagtgctcagcagagcttggaagattgcaaatatgtcaggggtttgcttgatgagtggtgggagcagccagcatcgacagttgttgactgggtaacagtggatgggcaaaatgtaactgcctggcataatcatgtgaaacagcttcttgcattttgtgacaaggagctattgtgattagaattgtaaagcacacggagtgagcaaaattttgtgaagtctcttgttcatcttgtcattttagattttaggtagtgcggtggtttgttcatgttaattggcagtgattaatggcattgaatcttatgattgtagagctttgtaatgtaatttgatttattatctggcagtgattacttaaaagtttatttttaacc

SEQ ID NO: 1557 - DNA, 1680 bp, Glycine max
aattgcctaaagagtcctccccaattgcttcaggcaattactgcatacactttgcggctgaaaagtctaatctccagagaaatagagaaaattgatgttagagccgatgcagagaccttgaggtacaaatatgaaaataacattgttatggatgtttcgtcatctgatgggagctctcctctacagtatcaactttatggcaatggaaagattggggttgatgtgcctccaggagggagtcaaaatcagcttcttgatagacagaaagctcatgttcaacaatttttggctactgaagatgcactaaacaaggctgcagaagcaagggatatgtgtgaaaaacttatgaaacgtttgcatggaggcactgatgtttcatcacgctcacttggtattggaagtaactcccaaaatgttggaagtctcaggcaacttgagctagatgtttgggccaaggaaagagaagttgctggtttaaaggcaagcttaaacaccttaatgtctgaaatacaacgcttaggccccccccccgctgagaggaaagaagctgaagattctctaaagaaaaaatggaaaaagattgaagagtttgatgctcgtagatcagaacttgagactatatatatggcactccttaaagcaaatatggatgctgcttcattttggagtcagcaaccattaactgcaagggagtatgcttgagcactataattccagcatgtgctgctgttgccaaggcttcaaataatgcaaaggatctcattgagaaagaagtgtctacattttatcgaagtccagataatagtctctatatgcttccttcttccccacaggcactgcttgaggccatgggtgctagtggaccacctggccaggaagcagttgcaaatgcagaaataagtgcagctatgttgacagcaagagctggtgctcgggatccatcagcaattccatcaatatgtcgcgtttcagctgcacttcactatcctgcgggcttggagggttcagatgcaggtctagcatctgtgctggagtccctggagttctgtttgaaacttcgtggttctgaagctagtgtgttggaagatttattaagggctattaatcttgtctatattagacgggatcttgttcaaagtggtgaagccttgttgaatcatgccaaccttgttcaacaagaatatgaaaagacaacaaaattttgtttgagtaaggctgaagaacaggagaaaactatcatggaagaatggttgcctgaacttaagaatgctgttttgagtgctcagcagagcttggaagattgcaaatatgtcaggggattgcttgatgagtggtgggagcagccagcatcgacagttgttgactgggtaacagtggatgggcaaaatgtaactgcctggcataatcatgtgaaacagcttctggcattttgtgacaaggagctattgtgatttgtgattagaattgtaaagcacgtggagtgaacaaagttttgtgaagtcttgttcatctttagatttttggtagtggggtggtttgttcatgttagttggcagtgattaatggcattgaatcttatgattgtagagctttgtaatgtaatttgatttattatctggctgtgattaattgaagtttatttactgatggcttcatttactgaaaaaaaaaaaaaaaaaa

SEQ ID NO: 1558 - DNA, 1237 bp, Glycine max
accataaatatgtttaaaataatgataaaatattgagtttcttttagtggaactatttgtcaaaatgtgaacacctggatatggaaaggcatctttaggtagatgatatgatgcgatagaccgtaaaagaaaaatgagaaatgttgatgagaggttaaaaatacccttcataacaagctcgcgccgataagtagtcttattcacccaacaacgttgcttattcacgcaactaaataagaaatgaagagtactatcttctttgctctctttctagtttgtgccttcaccatctcatacctgccttcagccaccgctcagttcgtgctcgacactgatgatgatcctcttcaaaacggtggcacatactatatgttgccagttatgagaggaaagggcggtggaatagaagtagattcaactggaaaagaaatatgccctctcactgttgtgcaatcacccaatgagctcgataaggggattggactagtctttacatctccattacatgccctttttatcgccgaaggctatcctttgagcattaagtttggttcatttgcagttataacgctgtgtgccggcatgcctactgagtgggctattgtggagagagagggtctacaagctgttaaacttgctgcacgcgatacagtagatggttggtttaatattgagagagtttcccgtgaatacaatgactataagcttgtgttctgtccacagcaagctgaagataacaaatgcgaggatattgggattcagatcgacgatgatggaatcaggcgtttagtgctgtctaagaacaaaccattagtggttcagtttcagaaatttagatcatcaactgcatgaagcgtgaaaaatcacgtgctttcttgttaagagagacaagtgtacgtaagactaaataaatgctttggctaataataaattggttacagactaaataaaataatcaaagcttatgccttcccccaaaggctgaatgcaaaaaaaaaaaaaaaaaaaaaaaaaatatccactttaggaggagaattacttttgccaagtgtacgtaagactaaataaatgctttggcttgtaataaattgaaaaaaaaaaaaaaaaaaaaactcgagactagtctctctcctctctctctctctctctctctctctctctctctctctctctctctctctctctctctctctctctctctctctctctctctctctctctctctctctctcctcgt

SEQ ID NO: 1559 - DNA, 1560 bp, Glycine max
gtcatgcattatggaacatgttgggagcagtattttagtcggtaatggtggcaactgtcaagtgtcaggtttaagttaagggaatttgttttcgtcctggaattccgatttatgttgttgttgggttgggagttactaggattaaggagtgaataaccaacgacttgcggaataggtggcccctatcttaatgttcagctacgtaggcccccccccggtcaatccacaatctttagttgttgccaacctcctctagggttcctctgtttcttaactttcttcacatcaatggcaaagaagagaaccgcacctcagaagaagacccagatgatgaatcccatgccaaaacattctcaacagccaagaagctcacctcctaaacgccgcactgatttctctttcttcacgcgctctccctcctccttctccaaccctacttctggttcctcaccagattcatcttctggtgaagtgaggttgtccaatgttgcttcaagctgtttgcaggggaggagaatggcaatgaaacaattttctgaagatatgctggttcgatgcagcttttaccaagagggtagaccggtatgttcatctgagtcttttgatactccagttgtggaagttgattcagctgttcaagatgaaagtctcaaccttggtggacatagggatgcttgcaatgaaaaaattaatatttccaagatgtcagaatctacccctcttgaatcatctgtcagtgatagcagttctcttgctgcaactcctggaaatgttgtatgggcgaggacagatggtcaagtgtggtggcctgctgagatcctggaagaaacatctgcattatccaaccctggcagtggtggacatgttttagttcagttttatggaaatcttcccagtgcctggattgatccaatgacagatatttcaacttttgaggattcttttgaagacaagagcaacaacccttcagaagattttcaacaggctttaaagaaggccttacagaggaaggcacaacttagttcttgccaaaagttgactcttgataggtctgctcactctgatatgcaagaacgttcatctgataaatgcacttcaactagcacaagcaaaacaattgatgatgttcaagagaaacgaagagggaaaagggaacgtaaaccgaaagttcactttgatgaggtaacatacccaatgaagtctgaaagaaaggttcgtcggttgaagataatgcggtacctcggccttgctcctccagttggttctcccttttgagttttgaccatgatcacgagtaatgcatatttcaaatgtttgcagctttacagctgtagtcgattctccctttctttaaccataataatcatgaaatatgcatatttctaaaaattgcttctacttcttgccactagctctgtaaaattttgtaggattatatagtctcaaatagtattacattactatctgtaaaatccatataagaatttcatggaatatcagattagttctccaataaaagttccatttagcacaaaaaaaaaaaaaaaaggggcggccgcc

SEQ ID NO: 1560 - DNA, 1233 bp, Glycine max
tcgatcagctacgtaggcccccccccccggttcaacctcttcctttatctcattctttctgttacactgcagattccctaaaccactagctcttctcatccatcatcatccgcattcaacaagagatgaaaggcatagacatcttctgtgcatcacaggcctcaacagccatatgtcttggcatggatcaaccctcttcttcatcttccatttccatttccaacactgctcaatttggtggcagagcaattgaccgccacaaccccatcatcacagatcctagaagaaccccctcaagagacctcatttccccttgctcttcttctctgtcccccattgaccccaaacctttgcatgatcatctccaaaaggccaagaaaaactccacttccaagccaagtggccagaagaagaagaatgcttcaaagggtcatgatcagaagaagaaaagtgctgctggaaagttgactgaacacatcactaacaattactcctcaaaaccaattgatagcattctgaggaggagttgggctagaccaccttctgatttgatcactcctcctggctcttcaagatatttgctcggtgatacgccttcgtttgattgtgtgtcgtcggtctatgatcctgttttggctttaactaatgttgagaaggagaaagctcaagttattcatcatgatgaaaccaaccattcatctaaaccctctagctcaactcttccaaagactgattcctcagaccaggttgtagaattgagggtttctctgcactgcaaaggttgtgaaggaaaggttaggaaacatctctcaagaatgcgtggagttaggtccttcaacatagactttgcggcaaagaaggttacagtagttggtgacgtcactcctttgagcgtattggcaagcatatcaaaggtgaagaatgcacaattttggccagaacatgcttcagtaattggatctgctaccccagaaacaaagagaacaaattttatctaactagagaggaagtagcctattggtattgttgtaccattttttcgtgtcaccacttcaaggttcgaactcgtgaattgggtagttatttaattagtgtaaatattagagtgtaggtttggctttgaagaaatattagtttgtttcgaaggaaccttatttttgtacaagggttggtctaatttctctggagaaaatttactatatgtaaaaaaaaaaaaaaaaaaatcctttaaaa

SEQ ID NO: 1561 - DNA, 1794 bp, Glycine max
tcagctacgtaggccccccccccgagtggcagtggcacattcagctgcacaaagaatcccaaagtagagaaacagcacactctcacctcactcacttgtccttgttatttttgttttacattttgtcacaatctgtgactgttcgagttatccgaggcccctcttttatatggtcgttaataaaaatggcttcgacccttttcacaaagatgcttttgggccaacgattgatccatccttattcgttcctcactcaccagccacagattctctcttctctattcagtaaacggctgttttgtatacgagctgtcccagtctcagcctatacatcccaaaacatcaaaacaactggttgggctccttgtatggcttcttcctcagttggtagaagggctacatattcaacacaatctgtatcaacaaatgagccagttgtatctgtagattggctttatgataacctgaaggagccagatatcaaggtactagatgcttcgtggtacatgccggatgagcagaggaatccaattcaagaatatcaggttgctcacattcctggtgcccttttctttgacgtagatggaatagcagatcggactacaaaattaccacacatgctgccatcagaggaagcttttgctgctgctgtttctgctcttggcatagagaacaaagatgatttggttgtttatgatggaaaaggattatttagtgcagctcgtgtttggtggatgttccgagtatttgggcatgacagagtttgggtattagatggtggcctgccgagatggcgtgcatcaggttatgatgttgaatccagtgcttcaagtgatgctattcttaaggccagtgctgctagtgaggctatagagaaagtatataagggacagacagttggcccactcacatttcagactaaatttcagccacatcttgtttggaacattgatcaggtaaagaaaaatatagaggacaaaactcaccaacacatagatgctcgatcaaagcctaggtttgatggagctgtacaagagcctcgaaagggaatcagaagtggtcatgtacctggtagcaaatgcatcccttttgcccagttgttagatagttcacagacattgttaccagcagatgagttgaagaagcgatttgaacaagaaggcatctctgtggaaagcccagctgtgacttcatgtggaacgggcgtaactgcttgcattcttgcattgggtcttcatcgtcttggaaagtctgatgttgcagtttatgatggatcttggactgaatggggagcacaatctgatacacttgttgacacttcatgaattcaatacagctaaatttgcatgccaccagaaagtatctgcaagtgaaggggctgtatccatttgtcaaacattttgaagacaccaatttttctatgctttactgtttgtttgttgttctggtttagttgtggttgagattcttgagaatcgcaaatatgttccatgtcaaatgttactaatattaaatcctatcatgtggcttataaaaataatgatagggttgttaaaaaatgtctcatagaaatgggaaatggttgggtttgttaaaaattacaaaataaaatttacgatcataccacacacacttatgcactaatgattaatcagtgctgttgggacactgttttggggtgtgtttacccgtggaaacttaatccacacgtgccatcttgatagaaatttgaatgagacaattgttactcaatgaaaagttcttgttatagtctgatttgactataaaatctat

SEQ ID NO: 1562 - DNA, 1294 bp, Glycine max
tcagctacgtaggccccccccccacaccctttcaatcaaacacaaacacttgaagtactaagttagtgtgtttgagcaaattaactatggcttcgttttgttctagattgacaatttgtttggctctgtttgtcctcatatgggggagtgccaatgcacaactttctacaaacttttactaccattcatgtccaaacctcttctcctctgtgaaatccacagtgcaatctgccatatctaaggagacccgcatgggtgcttctctccttcgcttgttcttccacgattgctttgtcaatggatgtgatggttcaattctattggatgacacatcaagcttcaccggagagaagaacgcaaaccccaacaggaactctgctcgtggattcgaggttattgacaacattaaatcagccgtggagaaagtgtgtccaggagttgtttcctgcgcagatatccttgccatcgctgccagagactctgttcagattcttggaggccctacatggaatgttaaacttggaagaagagacgctagaactgctagccaatctgctgctaacaatggcatccctgcacccacttcaaaccttaaccaactcatctcaagatttagcgctcttggactttccaccaaggacttggtcgccttgtccggtggtcacacaattggacaagcaaggtgcacaaacttcagagcccgcatctacaacgagaccaacatagaaaccgcatttgcaaggactaggcagcaaagctgccctagaacatcagggtcaggggacaacaatctggcaccacttgatcttcaaactccaaccagctttgacaactactacttcaagaacctcgttcagaagaagggtctcctccactctgatcagcaactgttcaacggtgggtccaccgactccattgtgcgtggctacagcaccaacccgggcaccttctcctctgatttcgccgccgccatgatcaagatgggagacattagtcctctcactggctccaatggagaaatcaggaagaattgtagaaggattaactaatttaattcagtcttgaatattaagggtcctacacatacgcaagcaatttaattgtgtttaataagttgttaaaacatgttttggttgtattttggattcctagtgtagtttcggtgatcaatgccgtctactttaaaaaaaaaaaaaaaaaattatttttgtttcttttttactttttccttaactatattgtagggaaaaaaaaaatcctttatcaagcatttatcaagaacggagtttgcttt

SEQ ID NO: 1563 - DNA, 1362 bp, Glycine max
agaaatctcatcctcaaaagtcttatagctcaaaggaaccttcgcttctgctcattcagctcttccctccaacctctaaaatcaagcttccccccaacccctctgctctccaacatgtgattaatccccttcaacgccagcttcaaatcagcgcaaaccgaaacatgcggctgcttgttctttccaatctctgccgaatcaatatcaatgtgaactatcttagcccggctcgcaaaagcctcgagcttccccgtgacacggtcatcaaacctcaccccaaacgcaagcaaaatatcagccttgtccacagcataattagcataaacagtcccgtgcatcccaagcatctgaagagaattctcatcagcaatgggataagcaccaagacccatcaaagtgctagcaacaggaacaccggtgagctcgacaaaacgccgcaattcctcactagaattcaaacaaccaccaccaacatacaaaaccggtttcttagattccataaccaacctcacaataagctccaaatgtttctcattaggagacttaggcaacctagacgtgtaaccaggtaacctaattggttgatcccaattaggaatcgcaagctgttgctgaatatctttaggtatatcaattaacacagggccaggtctacccgaagtggctaagaaaaacgcttcattaacgattctaggaatgtcatcaacatctagaacgagatagttatgcttagtgatggaacgtgttacctcgacgatgggggtttcttggaaggcgtctgtgccgatcatgcggcgggggacctggccggtgatggcgacgagggggacgctgtcaagcaaggcgtcggcgaggccggagacgaggttggtggcgccggggccggaggtggcgatgcagacgccggggaggccggaagagcgggcgtagccctcggcggcgaagacgccgcccctgttcgtggcgagggaggacgttgcggatggaggatgagcgagtgagcgcctggtggatctccatggaggcgcctccggggtaggcgaagacgtccgtcacgccctgccgctccagcgcctccacgaggatgtcggcgcccttgcggggctcatcgaggccgaatcgggaggcgaaagcttcagcggcggcggtggaggatttcgtggttgcatcggatagggcgctggagattctgagagaacggcgctgggagtgatgggggctgtatgggattgcgaaacgcacaaagggattcggggaatgggatgatgaagggaggacgctgaacgcagcttttggggcagttatagccgccatccgcccgcgccgcaataatctaaagccaggccctaatcggacgcgtgg

SEQ ID NO: 1564 - DNA, 2180 bp, Glycine max
gtaatatattactgtccaaagacaattgcataaaagtaatgaattcaaaggaagaaagctttatgaaaattgttttgacttagatttcattggaccaacctaacatgcatcactaatcattcctattcagtgataaatagaaaacttaagcaagaaagtcccttgatcacgccccttgataagtataattaattgacttgagtgtctaacaatttacccctaggcataaatatcattggttgttctcttcattcagaatccgattgaatttccccattacaatcaaatgaatagaatcatgcactcccgtaggcataaatatcattggttgcttctgatcgacgtgtgatatgtttgacttcttcggattgaaccccttttgttcttagcttcaaagcttctaagatttccctagtgtagttacttgtgaactcttttccacttgattagaattcaacaaagttcttacaaatcataagcaaacaatccaaggatcaagcacaaaaggaataaactaaaaatcccaaataaaataaacttttatttaaaacttaactaaagtgaacacaagcaaagctcaaaagcataagatgtatggtaaaacttcctcatatgaacaattgaactatagcataattagatcccttcaaacaactaatgaccaaacatgttttagggatttctaacatagtttagttacttaccactattcttcctgatattatactttctctcagtttaatttctaattgaccaggtaagaatggaaaactaagtgaaagatgggggatagagtttgatgagaacctaccagctaatttaagagaagtcaatggccaaggacggttggatatgcaattgggacgaattggggaaatcaattgcatgatttgtaaaaataactttaagctttcttatatgttaattcttattactgtttttacttgctatgaaagttatttttcactagtaattgaacacaatcctcaactattgattgaaaaaaataaattatttagtttattacaaattaagttattacgggaatgatacaatacaatatccagacttagttcattgttattatgtgtagtgtgttatattcaagttaacaagtatatggaatgaggataaaaagatccgaattggtatttatccttaggaaatcaataacattatgtaggaatgtgtgtgtgagagttgcatgtgtatataaatgataaaaaatgtcaaggtctagctcataacgtgtcttcaatttgtttgaataaaaaaaataattgatttgatatataaataattattttttaatataaacggactctctgagagtacaatcaaatataatatgaataaaaaatgaattagaatagtgacattcactcgacttgacttgcaatgtgagacctcgaaaagttgtgatgaattaataatggtcatgtgtttcacattaggtaaacttttcatgttattattaaactttccattgaggaattaaaaataaatagatagaaataaagtgttttgtaagcttaaacatgtttttaatttctcaaatttaggtcattttttttgtctttcaaatttaaatttatttttttagtctctaggtttttaaggttgttttgtagtccctcttgttagtgtgggtcaaattgaaaataatgagtcttttttttaccacatttgtgcaatttttctaattaatcacataagtatgtaaatttcaaatgagttacgagaaatgagtgatttgtgtttaggaacacgatttcatatgtgaaggaatcatcgttgttgtaaagatgactttatttttatattctttcttaaatgaaaaaaatgtcatatgaaagacgatttcattattttatatgtcaatcagctaaagtcttctttttcaaaggtaatttcagtataaccatgcttcttacttttcaaaaacaaaaagatgatagcaacatgcagataactcaggattgggatgaagatactgataattaggagccgtgagggcggggaggttccttagaatggttgagaagcatgagaaggattcagttgttgtagtttcaatgaagcaaatatggtatgatgtgagggaaatactagaactgaatttagttaaacccctctaacaatattcatgtgatgcttgacatccttaccggacgcgtggg

SEQ ID NO: 1565 - DNA, 1315 bp, Glycine max
ctgcgtaatccactgaaacatgaaaataaatgtctagcagagtttttggctgattgagcctagcatttaaatatttaattatccaaactctgatgtctatcaaaaagatcgtgactcatgaaacgtgaagtaccaaaaaacataagcaaaaatgtataaaattccgggatcatgatgctgcttaaaaattgtgttacctatgggtaaaaaggacctacaaaaagaaagatgactctcatgcaagctttggtatttcacatagaggcaactaactataagtatagctaagttaataaatatctgggattgatttgctatattatgaatgaggtgcaattgcactctaacctcaaaaacttgtctctcttcaagtaggtgctggaatactaatgtatctggttataagaataaccttcatctatccaactcttccatctccaaccacaaaagtcctcaacaggatctatttacactgatcctcaccagatttagccttcaaagttagtcccgcgacaaggcgatgaagcctttgagaccccggacccggtttgagtttataaatgttcccaatctcagaacatttgggtttgccggtgcaccaaccaccgagcgggaatagtccatttctcttacggagaatctttttatcaatccaatccaaggatggatcatcttgcttaaactttcttgcaaaggcagcaccactttcaaccattttgtctgtgtcattgatgttaaggacgtgagggtgctgtttaggagggacgtcccaggaaatataatgcaagtcactatttacaagggttttagcccattctggtgcattgcatgcaacagtctgaaagtagccttcaggggaagacagataattagtgtagtacatgagaagggtccttggcagattgtcccatccccatacaagatattcaacaaagtcgtgtgataataccgtccatgctgaaccagtgaataatttaaatgctgttggcagaggtctctttggattgacccaaaatacatcagatttggttgacatgtaaagcccagggtctacaattaacggcattgctcgtttatcaaacttccccccctacccgacttgtgtgctcaatgaagttaaggcctctatctaaatctgcaaaagtatatagcagatcatcctgtgtcacaagaggatagtctgaagcactaagattaataaaccaatcccagtctttacttctcttgagaagaatggctcaagcatgaagagtattagcaaccatcgttggtcctcggtaagtgaccatgttagcctttgtgatccccaaaacgt

SEQ ID NO: 1566 - DNA, 2017 bp, Glycine max
ttttttttttttttttgggagacagaacacagtgtttaagctataaatcatgaattaaaacgagcaacacatgaagaattattaacttctgtaagccctcttttgaaacaataaatggataagttaattcgttaaataaaatcaagttgaggaaagaaaattttagaattacatgtagaaagctaactacatcctccacctcaaaaacacagactcctcgggaaaaactcggcctggcaagcaagtagaaagggaaacctacaacggaatactatcaaatccttttagcgtcttacaggcagtaactcactccagctttataccgtccatctcattgatcaccccttcaagcttgacaatctgacgcaaaaagtaatccccataacgtttggcaggcttagactccataacatgaattgtgtcatcatcaatatagaaatctaaatcggcattggatgtaattttcccatcactatcaacagcatgtgtcttgtgcttgtatgtcatcaagatagtccttaaggtgggttcatccacttccatgtaacttgcaagttttgtgagggagattgttgaatacactttcaagaaggtgcggacacctgatagcaactgttgttgctttgcttcataaaggaacagtttcaactgaagtctataggcatcctgattgtaatttactagaggctcctcgaaactaggtgctgaaggggtaatgaacttggggcatgcatatgagaagagctcatcatagatagcaaatgcctcatcatcatacctctgcattctaaccatcttttcaccatacttctcacgtaactgagagttcacagtttcatcaacaagcctgctttgggggcagagtgaaaggctaattgccagtaaggcatacatttgttcatttttcttcagtatctgctcatattggggtgatttctgatgatactgctttgtcttaaagatgtacaagagaattttgttaaattcacgaattgcttccacatatctgcggagcatgagattggcgaaaccatagtgataaatggtggtgatgtgactcccaataacactggtataaaccccttgctgagtaatatcaataggaagcaagcacttgagcccggtatgataatcccccaaaagacaatgaaccctaagcaagcccaccatgctaaaataccccaacaccttcagcacattgctccccccattgtaatcataaccatcggtcgcggtaaactgctcgagcccctccttctcctgctccagaatctgaataatggcactcttctccaccagcgcctggaggaagttgaggaccccgaaaacattccaggcctggtcgaactggcgcaagagggcgatttcttgttcagtcttgctcttcatcttggcacggtactggcagaagctctggaactggtagacgaactcgtcgaccatgtcccatagccactggttggggagctgcatgttgacgaccccgtggaggacaacctggaagaggctgcagtagttgtcccacgagtcgatgcgctggcggagcgtcggagtgagacgagcgtagaggtggcggaaccacatctcgcggtagaggaggcagaagacgtggtcgttgtcgacgtagtgcgcgacggcgtccacggagggccacggggtatccttgaagagacgctccgagagggtctggaaggagctctcgtacatctggtggatctcgtacacgttcttttcacggatgtgacggtacaggtgaaccacaaaagattttaccgagtcggggacaaagttcgggtcgtaccctagctcctgcggttgctgcgagcgctcttcgaagtcttggttcgccatggttggaagatggaacagggttcaggggatagaggtgccgatatagaagaactaggttagggtttgcgcacgcacaccgtcatagaggactgagtaagttaacgaaacgctatttaccgtaacaaaaatctgtcgtcttctcgcagccgtaccaacacgtacgcgt

SEQ ID NO: 1567 - DNA, 1003 bp, Glycine max
tcagctacgtaggcccccccccccgagaccgttatacaagtgtgagaaaaattccatgtcttagattatactctccagtgagagagttatggcaaatgctggaaatctgatatcatcaaggaactttaatccaataatattcaatccataccactatgcaactaagctcaaaaccttgaggttgctctctcggtttcactcttacaacaataatgccactgtcactgcttccaaaaaaaaggatgacttgcaatctccattgattgggaagaacacgagcagggctcctcgccgtctgatcacaatatcaccaggtgatggcaaatatcatggggattggacttgtgactatcgcgtctctttgcacgacctagagttacaggatttgattgaagatgataataactcacgtaaggatgctcaagttttcatcaatctctctatccaaaagcatgctagctttggtttatcggtggatggaagagtcaccacatccttcactagaaaatgtagcacctgttcttctccgtattgccgacagattgatgcaaaatttaacgtatgggttcttatagcacgtagagatgaccgcaagataccgctacctgatattggaggtgaccctaatgtgatttatgttagaccgggatacgaagttgatcttgattctcttgtacaagatgccatccgattaaactctgtagtaaaagatacttgctcagaattgtgcgagaaatctgagggtacaatacaatatataactggacaaggccaagcttctgttgataaaaggtggtcaagactattggaactaaagaaagaaaatttatgatctatagtacaatgtaagaagttttatatatagaataatagtcagtttgcaaatagattggataatttgtcttacttagttttgcatgtgtatacctctgcagacattggataatatattttacgaaacaattcagctttttagaccttcaagcaaaaaaaaaaaaaaaaa

SEQ ID NO: 1568 - DNA, 866 bp, Glycine max
ccacgcgtccgtacggctgcgagaagagacagacgggggggagcggaagcatattcctaaaactttcttcaaaacagcgttgtgtcacgcacgccactgctcatccaacttcttcttcttcttcttcgctctctgtttctgcgtgtgcgcgaaaaaaaaaaagcaaaaatgcattccagtcacttacttctcgaagaacccattcgcatggtttccatcctcgaaccatccaagcccaatttctttcccgcaatgacgaagatcgttggtaccctgggtcctaaatctcggtcggtcgaggttatttctgcttgtcttaaagctggaatgtcagtggctcgtttcgacttctcttgggatgaccctgaatatcatcaggaaactttggagaatctgaagaatgctatcaagactactaagaaactctgtgctgttatgctggacaccgttggtgcagagatgcaggttgttaacaaaagtgagaaagcgatctcgcttgaggccgatggccaggttgttctgactcctgaccgaggacaagaagcatcgtcgcagatactgcctatcaactttgatggactggcaaagtcaatgaagaagggagacaccattttcattggtcaatacttgttcactggaagtgaaactacttctgtatggctagaggtatccgaagttaaagggcaggatgtcatttgtactataaagaattccgcaacattggctgggtcattggtcactttgcatgcctctcaagttcatattgacttgcctaccctcactgataaagacaaggaggttataagcacctggggagtaaaaaacaaaattgattttctatcattgtcatatactaggcatgctga

SEQ ID NO: 1569 - DNA, 2859 bp, Glycine max
ccacacccattattcgcgtgatattattttgatataaaggggtgttttgcggttttcgccctattgggtgaaaaaaaaaagaggtgatttacacaaaaatgtttacgggggtttttgaacaaaaatttgtgagggtttaaaattttgcatgtgcgcctatagaggggtgtgcaaactgtttggggaaggggggtatttgggtgggggctctttttccttatattacgccacaccttggggaaagagggggatggtgttgtccaaaggggatttaaagtgtggtaaaacccgcaaggggtttttcccaaggcccggggcgtgttaaaaaaaggacgggcccagggaagccggcgttaaatttcgatctcccttttagggggggaatgtggggggaccgggccccccccctcgaggggtttgggggaattgaataaagcttttttttttttttttttgtttttttttttttttttagggtgacaaatctgaacaatacacttgcttattcttttgtttatgcaaatcgcataatggaactgtatgttcacttcccaaacaccaaaaatagtaagaatgaagatgtaataacccaataaaaagaagaatgtgaagagaccatataaacggatattacaacttcagagcagctattgcttctgatttaaaatcaactcgcagacccaatacacgcctaacctctgctggagttaatctccaggtcataggtccagagttttcaccccagaaatctagaatctcagaaaccttttctaaatttaggattgttgccatttgagtaagacgtgcaaacttgtccctaacagttctctgtgtcatggcactgaaatggcttaccaaagctctagcatctcggtcaagctgaagaccacctagctgactaaatcttttctgcatcataatgacttctagccttttcacaatgaagtcaataatcaaatgaacaaacgtgtcataattgttagcagtcattagtggctgcagccatgccacatttgactcaacggcatggagaagtctctgaacccatgggtcattcacctcattatctgcatactcagcctctgaaagctcatagctgattgttcctacactgtctaataacggtcttatgcgaggtgtgatggttgccacaagttgttctatgccagcattcaaagcttgcttgaaagcattgctgctatctgccaactcagtcaaacaagattttaccttttctcgatcagccggtgcaggaaatacctcagcacactgttcttcaatttcatgttttagcttcagaacatattcactgctaacatccatattattcaaagctgttgcaatttctgtccccgtcttttgcacgccaacaccaccaaagaacaactttgcaccaaggtttggctctctagttttgtgctgcaaggcttcatgatattcattaccaagcaaactactagcaccactcaaaactgcgacaacagaactgatattggaagtggatatagccctccgcaggcaactttgcaatacataaaacacatcatccaccatagaagtggtaaggctgtcaggcacctgttcatcgatctttatcgccttcctaacattctccaccatgaaaaatccctccaaaatgacataaaagcctgttaaatcctgcgccaccttgctgaaactgccactccggaaagccttggtggcgcgagggagcaattcggggtcaacagaagtaagtgctttgatcttggaaatcatgaactcagtgtaatcctcaccaagctgcataaggttgagaatctcttccaaatacaactcaacctcccgtggatcaggaccctcaggacctcctccaacagcaagcaaattggtgttgtgtgcatttatctcagaggacaacttagccaactgcctatactccatatacttgttcaaaatcacagaaccgcgagaatcacactcctcctgaagctcacagatggcatacacaataccatcctccccacaaagaccactcaagatctcactattctcctcaatcgccggcgcgggggccttcgtcgctgtggtcaaacacccaacaaaattcacattctgctgatccatcatctcaaccaactgctcaaactccatcctcgacctcatcgcaatcaccttcttcaagtagccaacatacacctgcaaaccctcctcctccacacccagcggtgtgaagagccgaatgatcctgagaatggcggggtggtcgcgctgatcgacggcggcggagagcttcttccttacaattccttccaactgcttcttggcggccaacaagcgatccctctgaagctgatcggagccggaatccttgtactgggcgtcgatctggaggaaggtctggacgtagcgggcgccggactcgtagtcctcggcctcgagggcgcggtggacgccttcgagggagttggcgcgttcctcgatggcgtcgatgcgcgggcgcgtggggcggacgcgcgactgggctagatcaagctcgcggaccttgcggctgacctggtcggcgaggtcggaggtggaggcgacgttggagagcatgtagtcggcgtcggagttgacgatgtcgaggacgtcggaggagcgctggagctggaggaggtggcggtcgaggtcggtgcgctgcgacagaagctcgtcgagttcaacgtccaccgctctctggtgagcgatgcattcgtgaaggaggcgcgtcatggcgccaacgtcggtgagggagcgaacgtattcgacggcctccgccgtgccgaaatcgattgagccacagacgttgctcccgttttcttcgtccgcgacatttccgttcgcctctggagtagcccc

SEQ ID NO: 1570 - DNA, 777 bp, Glycine max
actatcatagaacaagtatggtatcatattaattagcgccttcttgtcgttcatatcaaatctatggtttcaagcttaattcataaaatgcatcatcaatacaaattatcattttaagcggtgccagataatgtttgtcacaaaaagtgtcaaacacatatgatccccatttatccttgcaattaagcaagttacgtttgcgcttaggctaccagaaatcccgagtgtacttatataatgatacaaacatagacataaacacgggtgaaacataatgaacactccatccaacattcaaggtaccacaaccaatgtaacatggaattcggatttcagaatgtagatccattccatccgaagttggaacccttggtgtcatagaatttcaagaagaaccgcgacttcggcactgacaatttggtttccagaattgaagcaattgcagcactaagttccttgtttacactagggttaagaccaccaatggaaaccaattctccataagctgctggctgctcattcccaccaaaagctatgggtactgatcctttcagtacaatcatcacataggcttcgggtttgccgattatgctggcgacggaggaggtggcttcggcgaggatggaagaggtgtcgacgccttcgagggacacgttggtgctgaggttgaggcacggcattttttcttctcttcagttacttcactcactatctttctttgctcacaataacttgaaacccttccgccggcgtggcgccgccgcatggctgactcga

SEQ ID NO: 1571 - DNA, 895 bp, Glycine max
tttttttttttttttttttcttttttttgcgagacaatacaataaggatgcataaaaaaacactgatatcttttgtggtgttctgtttacattttaagtttgaaccacacaagccgcagtaaatatctgtttaggtgtgcgaattgcgattacattcaaacatggtaatagcatacttaaatataatacaaaagacacgagaacaaaaaaattttcgacgccgcaagctttggctttacctcaaacagtctctaaagtagcatccaaaaaaccaaccagaatgaccatctttcgcagcatgcaaactagagatggtatttctcaaacctcatctttggctatcttaactttcttgttagcagaatccttctgctcaataatctctgggatggtgtcttgcattatctttggggaagaaaaatcaaaatccgaagcagacacacctttgaattctggattatcttttagaaacgcagcaatctcattgcgggttctcagttttttgcctgcaggtgtgatgtagtaagcgtccaatttggagtagtcttttctaagcaccaagctcctcttaaaaccttgtggagtcttcgggaggttaggcttgtcaatgacccacgtccgagtggaatcatattcaatatcaccaggttcatcacaggaactattagcctttctgctgcaaagaaaaggttcctcagtcactttacttctaatctcttcaaactcttcctgtgtatcaatctctctccatttcaaacaatttttgcactgagcagcatatatatcaactgaaccctggcttagtgttctcttagaagaggatggtgtttttgagatttcttgaccgctcttcatgtcattcacataagttacttcccttttccggacgcgtggg

SEQ ID NO: 1572 - DNA, 1354 bp, Glycine max
aaaacaaaatttgagactatctctaaacttgaatggattcaaattcagacatctctacactcgattagaaaggtcaaaaaggcagaagagtattcttttagttttttacaaaacacttctgcttttttttttttttttttgatgaaacaaaaccatcttatttcttctacttcaaattgagttgtctaccctaagttactgatttcaagcaattcaaggatgatgactacaaataaaagatatttcttttatatgaaacagtgtttaagtgaaatacaatatcacacatcaaacacttctgtattgtatcttcgataatatcataaaaccaaatcctccagtcttagaaagatggcaaaaactcccacaaagtcagcgaggcatactgtaaaactctgcctggtatgtgacatattcaatttaactagccctcatagaagaatgtgtggataaatctgatttttcggccagataatgctcaagcatatcctcttcttcatcatcttcaaaatcatcttcatcaaagtcaatatcttcctcatcctccacatcagattcctcagcgacagcagccacacctttcactcttccactttcaaaccactgtctaccactgagcttcttttccttaggagctgtgagcacagactctggcattagcttggctagttccaatgctagttcagcttcaaacctttctctccatgccaaaaatgtttcaacggtaactggttccccgtggggtatcactacatcatctttggctgcttcttctgcttcagtactcccaacatcatcttgagaaaaccggtcagccaaccactctttagctgaggtaacaagtgtgtagatcatagccataccaagattttcagatgcctcttgttgaagtttttctttcaaaatccttagatcttcagcagatattccttgcaaacttttcaaatttaaaagtggaggttcatcaggatatgtttctgtgtgtgaaaagatcaaagccagttgtgctggattagttattggcccatcttcatcgtcatcctgcgcaacaacctttatttggaagcaccgattggaagtacttaggccactttcaccagagtgtatttctttgaactcatccatgagtatagcttctaatgcttcaatctccatatcctgttcttgtttgtagtccgtcatggttggaaattgattcctattaaaatgtagagagagaaagagggaggatgggattagcaaggcggtgtcagggcaacagtgggaagggaagacctaaccactgaaacactacgttttgacggggggggggggcgcctacgtcgctgacccgcagccgtaatttcgattcatt

SEQ ID NO: 1573 - DNA, 1301 bp, Glycine max
gaaaacaaaatttgagactatctctaaacttgaatgaattcaaattcagacatctccaaactcgattttgaaaggtctaaaaggcagaaaagagtattcttagtttcttacagaatacttctgcatagatacacacgttcataatgaaacaaaatcgtcttatttctgctacttcaaattgagttgtctatccctaagttactgatttcatgcaattcgaggatgatgattacaaacaaaagatatttctttttatatcagacagtgtttaagtgaaatacaatatcacacatcaaacacttctgcattgtgcctttgataatatcataaaaccaaatcctccagtcctagaaagatggcagaaactccctcaaagtcagcgaggcaaactgtaaaactctgcctgatatgcagcatattcaatttaactagctctcatagaagaatgtgtggatgaatcggatttttcagccagataatgctcaagcatatcctcctcttcatcatcttcaaaatcatcttcatcaaagtcaatatcttcctcgtcctccccttcagattcctcagcgacagcagccacacctttcgctcttccactttcaaaccactgtctaccactgagcttcttttccttaggagctgagagcacagactctggcattagcttagctcgctccaatgctagctcagcttcaaacctttctctccatgccaaaaatgtttcaacagtaactggttccccgtggggtatcactacatcctctttggctgcctcttctgcttcagtactcccaacatcatcttgacaaaaccggtcagccaaccactctttagctgaggtaacaagtgtgtagatcatagccataccaagattttcagatgcctcttgttgaagattttctttcaaaatccttagatcttcagtagacattccttgcaaacttttcaaatttaaaagtggaggttcatcaggatatgtttctgtgtgtgaaaagatcaaagccagttgagctggattagttattggcccatctgcatcgtcatcctgcgcaacaacctttatttggaagcatcgattggaagtacttaggccgctttcaccagaatgtatttctttgaactcatccataagtatagcttctaatgcttcaatttccatatcctgttcttgtttgtagtccgtcatggttggaaattgatgcgtatgagagagagagaggattagcaaagcgatgtcacggaagtagcagtgtgtgtattgtgcagggaagggaagacctaaccagtgaaacaccccccag

SEQ ID NO: 1574 - DNA, 1617 bp, Glycine max
  misc_feature (1)..(1): n is a, c, g, or t
ntttttttttttttttttttgagaataaaatcactagactacaaaaaaagaaacgtgaatgttataaatggaaaaatgaaatcagcatcactaatataaatagagagaaataattccaagccagcagtataacttgaaaaaagcaatatttctacacagcaaaacgtgtctgctaatatgtagggaacttagggtccacattgtgggcccaagactctaggccaccaacaatatccttggcagaaatgaaacccattttgtgtagatactgaacagccctttgagaatcatttccccttctgcatactacatacaactgtgcacttgatccagaaactacaccaccttcctcttcctctttcttcaaagctgatgatacttcaggcagcctagcctctaatgttgagagtggaatgttcagagactttggtagagatacaatcttgaaatggtgagctggtctaacatcaaccagcacgtgtggttccttcttaagaattacttcactgtactccttgctgctgattcttgattcactgggaagtagatttaatttcaaaggaggcacacgcaagggagtctgagtgaacttctcataatcaaattctcggaattgctgctgggtaaatgttgcattttctccacaagcttcacactgcatagaccttcctctaattttgacaatacgaatccgtccagacaatgcatccaagataagcatccttcctgagagtggttcaccaacagaagctgcaatcttaatagcctcaagagcttggagacagccaattatgccaggaactactcctagaactccaccctcagcacaactttggcatgctgttctaggtggtggagttggaaagaggcaccgatagcaaggaccaccattgtaattgtagacagtaagctgcccttccaatcccaatgcagcacctgatacaagaggctttccaaggaccacacagcaatcactgatcaagtaccgggtaggagcattatctgttgcatctactattatatcatatttgctgagaagttccaaagcgttggaagtccgcagagcttcttcatgttccacaacttgaatagtggagttgatcgagcgacaagcagcagcagcagatttcactttcggcttaccaacatatgcttccgtgtggataacctgtctgtgcatattattcagctcaaccacgtcatgatcaataactcccaagcgcccaacaccagaagctgcaaagtataacaatgcaggagcacccaaccctccagctcccacaactaaaattgaagacttcaacagatttgcctgcccttgaacaccaaaggaaggaagcacaaggtggcgactgtatctgtgaatcatgtcctgcgtcaatccgttgggtggtgcggcgtcgttttggagattaatctctctgagttgagcttcaagcgcagagattttctgctcaattatggtcttttcgtccttcagcgaatccagttcccgaacaatctccgacgccgacatggcaacgcaacgaacaaactatctatcctctgctatgtgttgttgacttgggcggcgggcctacgtagctgaaactaaaccagggttttctagtccaacat

SEQ ID NO: 1575 - DNA, 632 bp, Glycine max
cactatagggcgaattgggtaccgggccccccctcgaggtcgacggtatcgataagcttttttttttttttttttgggcaaaacatttcgatctctattgattaacggttctaaaatgaaattattactcttgacaagacatggtacaaaacagcagcaaccaactgatgatgaagtttcaactttcaagaggaattcttgggaggggtaaccggcttggtaaaccaagtggtgtagagaaactgtttgtgtgctccaacgtggttgcaaaggagccgaatcttctgcctctctctcatccatttcagcactattttcatgtgattcttgcttgtcaaatctttcaatccaacttcctggacacgttcccaggtgttagcaacagtgatgggaccatgctccttaattatatcgaagagggttcttgtgattgtctgcctctgctccggcggcgttttcaggatcacgggtcccatcttcggcttcggtttcttcgccaaacatcgaatcgccgtcccaaacattctactctgcgaaatcgaatcgaattgcccccaacaaacaatgaaggcttcgctgacgtcgaactgagagaagatgatagtggaagaaatttagggtgaactgaactt

SEQ ID NO: 1576 - DNA, 1078 bp, Glycine max
  misc_feature (1056)..(1056): n is a, c, g, or t
  misc_feature (1063)..(1063): n is a, c, g, or t
  misc_feature (1069)..(1069): n is a, c, g, or t
gagtgttgaaggtcttttttatgtttaaccataatcaggtgaaaaactcgagcttttttttttttttttttgccaagtaaagaaccaaatgaataaaaaataggaaacacaaatccatgtgacaacgtgaagatcaagcttagttcaatagcaactgcaagtgccagacttcacctttcgatcaaatccgttggacagaacgaaattgacacccagtctgaatgaacaggctatgatcatttttccccctcttcgtatacaagtttagtaatcgaaagacagtttctaatgtcaagcaaacggaaaattagcatacatatattaataattataaattatacataatccatcggacagaaggtacattcgttctgaaccagacagagaccaaagccaaatcctggagaaatggaaaatgggtataatgagcaaccaggaacaatccgagaagtcctttcaactaatatgtttttgttttggcagccttcttcttgggttgccttctaggaatagagtttttcatcccaatgaaaaacaacaatgccccgaagagagccatattctgagtaaatttgatgaaaagttggataaattctttgtcctcactgtgataattgtagaaatcatacagtattggagtagtgatcacttgatgcaaaagcaaaaggaaagctccaaaagagctgctgagtatgaaaagaatccctccaaggcccttgagagcaatagccccagccactaaaaatttcatatcaatatctggaagttgaaagccaactttagaatgtacttgatgtgcaaaggcatcaaacttcggtctgagtgcttttgctgcgggtcccccatcaactccataagaattaaattcttggtaagcggagaggatgaaaacggaggcgaagaggactctgccgagaaaagaagagaacgccatttagagagagaggaaatctaggtgcttgaagaaagctggtttttcttttcccggtcagagcgagaacgaaagagaagggcgggcggccgaagtaattgaaaaaagggtgagggaagggtagncatagtncttttngtccccgcg

SEQ ID NO: 1577 - DNA, 1137 bp, Glycine max
acgcaccttttttcttttttttcttttttttcttttaaaggaaaagattaaggacgtaattttacccccctaaaaagatcaatatctcaccaaaatattaataatcacaaggtaataaaaactgaaatcaacagctcaaaattgtaatataaagtttgatacaaaactatgctcagtcatttcaccaaaaatcctatgctcagacagccgaagagataaaatagctaaattttaccagcaaaatcatttaggcaactgtttcattttgtgcagcaagcctctttctagcctcctcaatgatagacaacttgatacccttgcctttgggaagagacacccaaggttttgtccctttgccaatgatgaagacattacccatacgagttgcaaattcgtgaccagttgcatcctggacatggatggtctcaaaacttcccttgtgtttctctctgttcttgatgacaccgacacggcctctgttccttccaccagtgaccataacaacattccccacatcaaatttgatgaaatcagtgatcttgttgctttcaaggtccagcttgatggtgtcattggccttgattagtgggtcaggatagcggatggtgcgcccatcgtatgtgtttaaataggggatacccttttgcccaaattgaacagatcgaaccttgcagagcttaaactttgactcttcatcccttacagagtggagacggaatcgaccttttgtgtcatacagtagacggaaattttcatttgttttgggaatagaaacaacatccatgaaaccagcagggtatgtcttgtctgtcctaaccttgccatcaacaagaacatggcgctgcatcaagatggcaataacttctctatatgttagagcatactttagcctgtttcgtaggatgaggatcagaggaagacactcccgggacttgtggggtccagatgatggcttgggtgcaaaggcaccaccaagcttgtcaagcatccaatgttttggagcattgagcctcttcaggtgtttctttaaccctctcgccatgtttgaggcttaggcttctgctcctctgcgtctgagcgggtgaagaatgagagagacccaaaactcccaaaaaaaaaaaaaaaaaactcgagact

SEQ ID NO: 1578 - DNA, 1212 bp, Glycine max
aggtaccggtccttattaattcccgggtctactagctcactttcgtctgccgccctttttttttttttttgagaaaatatactgaatttaatatatgaagaggtcaaattgcaactaaagtaaaaagattagggaagtaaagtaatttttaccccctaaaaaaatcaatgtcaccataatattaataatcataaggtaatgaaaactgaaatcaacagctcaaaattgtaatattatgtttgacacaactatgctcagtcatttcaccaaaaatcctatgctcagacagccgaagagataaaatagctaaactttaccaccaattcatttaatcaaatttaggcaacagtttccttttgtgcagcaagcctctttctagcctcctcaatgatagacaacttgatacccttgcctttgggaagagacacccaaggctttgttcctttgccaataatgaagacattacccatacgagttgcaaactcatgaccagttgcatcctggacatggatggtctcaaagcttcccttgtgcttttctctgttcttgatgacaccgacccggcctctgttccttccgcctgtgaccataacaacattccccacatcgaatttaatgaaatcagtgatcttgttgctttcaaggtccagcttgatggtgtcattggccttgattagtgggtcaggatagcggatggtacggccgtcatatgtgttcaaataggggatgcccttttgcccaaattgaacagatcgaaccttgcagagcttaaactttgactcttcgtcccttacagagtggagacggaatcgaccttttgtgtcatacagtagacggaaattttcgtttgttttgggaatagaaacaacatccatgaaaccagcagggtatgtcttgtctgtcctaaccttgccatcaacaagaacatggcgctgcatcaagatggcaataacttctctatatgttagagcatactttagcctgttccgtaggatgaggatcaaaggaagacactccctggacttgtggggtccagatgatggcttcggtgcaaaggccccaccaagcttgtcaagcatccagtgttttggagcattgagcctcttcaagtgtttcttcaaccctctcgccatgttgaaggcttaggcttctgctcctctgcgtgctgagcgggtgatgcatgcgagtgacgcacagcttacggacgggtgc

SEQ ID NO: 1579 - DNA, 1422 bp, Glycine max
atggaaacccagactggggcagtcagccagtaaaatttttttttttttttgaaaaataagtaatacatttttttttaatcacaatcagttacagaggtgtgctgctgaaataagttagctttaaaagaaacggttttctcagaaaaaagcagtatttgttctgtgactcggaagtattggtattgggcatgcttcaacttattcaacctttttgctagacttgtcgtcagcactctcttgaggtgaattggcagtctttgactcatcgaactccaacaactgtttgacatcaccattccataagcaatgagcagccaaaaatccaattacagaaggtacaatatacaaaagagcaggctgtgcagcctgaaaccagttcatcacaacaattgtaaggaccaagccaacagtgtatcctacaaatgcactcttgaaatactggggctgttttcctctagatacatcaaatcgcaaagccaatgctacaaaaataccagggataacaatatcaccaaggccaagcattgaaaatggccttgctgaatctgctgtggggaacaaaagctttattggagcatcaaatgattttgcaacgctgaccatcactggggtgaagaaaacccagaaaatgtcatacacaaatagaccagccaagagaatagcaccagtcttgaaagacccaagagaaagcatttcaattccctgaatacagaaagcaagacccaatatattatttgctagccaatgcttctgcaaagcataccaggcacaaaaaaatgtcccagggattccagcaacgacctgtgactttgtaaactcaatctccaatgaacggaaatatggaaaacgccagactatgaggtcctcattccaatgctttggcagaaaacgtttaataaatggtaataatgttgccgaaagggcaacaatcccaagtacaaagaagtagcctgtcaatacagtgttcaccaagtccttggatagaaacttgaagagtaagaagagtgacaataacattgcactcccaacaaagggaaaacgcatggcatgttcattggacattgtctcagttggtggggttggtttaacggagcggtaacagcccacaaacacagtgagggaagcagtcaaaataacatttaaattcggatctactttcacaacaagaggcgctaaggttaaacctgctaaagccaaattggcaattcgttccgtattcttcattctcctaaacctgttttctgaaaaattctggatctgctgaactcaaacgttgcgagaatggccttccactccaaccgcaaaagaaaactgcaggagcgggtggctcctgaaacaaaacagatcagagagcgagagagagagagagagagaaattgatttgggaaaaagaaaataaaaaaaaagaagaaattgaagagt

SEQ ID NO: 1580 - DNA, 1552 bp, Glycine max
gaaatataaccagatactacacgctcaataaattttaagaaaaaaattgtcccataaagccgtacttttgtctttttctaaaacaaaatactgagaattctttgcaaaattctcctcataaccgctgaaccattcatcaagtaacatttaatgtgtgactgcagaaaaatttccaatgcaaaaacagtcataagtgacagttagcttccagagacaaaatctaaaccaaaccttatccctccctctctagcctctatcaaggataccaaaactttttatccttcaggagaatctatgattgttttaaatacttaaaaaaaaaggtacaataggaaaagcatattatccaacaagacaagctcagcagttccgtccagccccagacaaagcaaatcttaactgaatcagcttctttgtcttcctaagaaatttttccagttacctttgggcacttctcaaaacaattcggtatgtgcaagacagtgaggccggggatcacatggtgttggatcaccaaagaatgatgagaaacataaatactttagaatattgtagaattagagtagagttggatcaatctatcctgagtttctgggaaaaacttcctggcaaatagataacatgatcgtttcgagccgttcaacatgcaaggtgtaatcaccactgttctctttgcatcacttgtaaaatgtggactttcgtcaatatatgctatgtttttcatgacttgataagtaatatcccgagctctgaatgaccttggatgccattttccttcagaccaatcaacatatgttaccgaccaatttgcgattcccccaggatcaagcatagtaaccagggttggcaggtaatgctcatcagcataccagttccggtttccctcccatatttggctggcagtggtgcttgatttttgtaaaatagagactttctgcccatacctattatagcatgctgccgtttcattgagaaccaactgtgaaccctttcggaaatccttcttttctacttcaggcaacatatgttctatatatctgccatttccatgaggaccaggatccacatagctgtcaataaagctgacatttgttaataataagtagttgtacacaaattcaaagcggcgcacaggtatacaactttcagacaataagacaaaatgttggttatcagggtctaaaagtgcatgtgccaaaagtctcctttctgcctcaaccatagaaatttttccccagcctaccggttcactgtgaatctctcggccaacaaagaaggagctgacatgtgttggtttttcctttgacgaatgtacataaacagagaattttccctcatgaccctgaaagaacatgtgccagagcttctcgaagggcaacgaacccggactcaaaaacaaaaaagcaactttaggtttcttggtgtgcatagaataactgttcaggatctcattaataacaacccgggactcaacctccgcatcagtcaattcgcgggtatgagcagccggaggcagatcaaaagcaccactaccacaaccatgggaggaaaa

SEQ ID NO: 1581 - DNA, 1164 bp, Glycine max
tttttttttgaaaaatatagtaaaacttattattcatttaatatcacacatatatagaaataaaataatgaaacacagaccaaacaattatttcttacaaattttcatttcacaccttcaaaagcagcacaaatgcttcccaacaataagtagctcaaattttgccaactagttcatgaaatcaaaagtttcacgggtgcgtaaacacctgcgaatgtcgagtggaaattcatgcagaaaaaagaaagagaccaaaattcaaaataaatagactttttgattcatcaaagttggtcttcgaatgtgggtttgagaacagccggcatttgcagtaaagctgaaaggtaagcggatttcagagtatattaaaatacaaattggcaacgaaaagttttcctgtagcgaaaaaagaacaattgcggttcgagccccaggatcgaagggtgatctccatttaagacagcactttctccacttcaactgtcacctctttgggtggtttctcagcatgaagattagcaacaaggcccttctttgaatagtaatcaataaccggttcggtttgcttgtgaaatgcctccagtcttgacttaagaacagccgcagtgtcatccttgcgctggataagtggttcaccagtaacatcatcaacaccaagaacctttggaggggaaaattttgtatggtaagttctgccactggatgggtgtatccagcgaccagtaattcgctcctcaaggattgcatcatcaattgcaaaattgagcaccttatcaactttaactccttgtttttgcagcatctcatcaagcttctgtgcttggaccacagttcttggaaaaccatcaagaatgaaacctttctgacatgatggtttcttcattgcttcatctataatgccaacaaccaagtcatcagaaacaagttctcccttatccatagcttctttagccttgacaccaagaggggtcttagctgctacagctgctcttaacatatcaccagtagctaagtggcataagcagtactcatcttttatgattggtgactgggtgcctttcccagatccaggtgggccttctattgtctaaaagcaagccacacgaatttctcagcgttttctctatggggggggggccctacgtggctcaagccacggcaaac

SEQ ID NO: 1582 - DNA, 994 bp, Glycine max
gaccgcagatccgccgggcgaccatgttgactacaaaagtcattcgattgcgaaaaaaaaaaaaacaattgcagttcaagcccgagatcaggggatgaactctgttttaagacagcactttctccacttcaacggtcacctctttgggtggtttctcagcatgaagattagcaacaaggcccttctttgaatagtaatcaataaccggttcggtttgcttgtgaaatgcctccagtcttgacttaagaacagccgcagtgtcatccttgcgctggataagtggttcaccagtaacatcatcaacaccaagaacctttggaggggaaaattttgtatggtaagttctgccactggatgggtgtatccagcgaccagtaattcgctcctcaaggattgcatcatcaattgcaaaattgagcaccttatcaactttaactccttgtttttgcagcatctcatcaagcttctgtgcttggaccacagttcttggaaaaccatcaagaatgaaacctttctgacatgatggtttcttcattgcttcatctataatgccaacaaccaagtcatcagaaacaagttctcccttatccatagcttctttagccttgacaccaagaggggtcttagctgctacagctgctcttaacatatcaccggtagctaagtggcataagcagtactcatcttttatgattggtgactgggtgccttttccagatccaggtgggccaatgagaataagacgcttgtcaggtttggaagagcacttgagacgacgaaggagctcagtcatgagatccagagagggaacatcttccaagttagtgttggccattgttgtttctgattctgatgttgttgtgagtagaaagaagaacagaacagaaccagaatcactatctccaacttcggaccctcccacgcacacgctttcaaaactcaactcgccgtctcttgccctttgtttagctacaaatgttaggtgactggctgt

SEQ ID NO: 1583 - DNA, 848 bp, Glycine max
gaccaaaattcaaattcaattgatttttttattcatcaaagttgctcttcgaatctgggtttgagaacagcccgaggatcaaattggcaacaaaagttttcctatagccaaaaaaaaaaaaaaacaattgcagttcaagcccgagatcaaaagatgaactatgttttaagacagcactttctccacttcaactgtcacctctttgggtggtttctcagcatgaagattagcaacaaggcccttctttgaatagtaatcaataaccggttcggtttgcttgtgaaatgcctccagtcttaacttaagaacagctgcagtgtcatccttgcgctggataagtggttcaccagtaacatcatcaacaccaagaaccttaggaggagcaaattttgtatggtaggttctgccactggatgggtgtatccagcgaccagtaattcgctcctcaaggattgcatcatcaattgcaaaattgagcaccttatcaactttaactccttgtttttgcagcatctcatcaagcttctgtgcttggaccacagttcttggaaaaccatcaagaatgaaacctttctgacatgatggtttcttcattgcttcatctataatgccaacaaccaagtcatcagaaacaagttctcccttatccataaattctttagccttgacaccaagaggggtcttagctgctacagctgctcttaacatatcaccggtagctaagtggcataagcagtactcatcttttatgattggtgactgggtgccttttccagatccaggtgggccgaaaagcaaattgtctctcattttctcctccagtaactgaagaacccagtacatcgtcc

SEQ ID NO: 1584 - DNA, 797 bp, Glycine max
  misc_feature (9)..(9): n is a, c, g, or t
  misc_feature (15)..(16): n is a, c, g, or t
  misc_feature (24)..(24): n is a, c, g, or t
  misc_feature (29)..(29): n is a, c, g, or t
  misc_feature (31)..(31): n is a, c, g, or t
  misc_feature (37)..(38): n is a, c, g, or t
  misc_feature (40)..(40): n is a, c, g, or t
  misc_feature (50)..(50): n is a, c, g, or t
  misc_feature (58)..(58): n is a, c, g, or t
  misc_feature (66)..(66): n is a, c, g, or t
  misc_feature (69)..(69): n is a, c, g, or t
  misc_feature (77)..(77): n is a, c, g, or t
  misc_feature (101)..(101): n is a, c, g, or t
  misc_feature (104)..(104): n is a, c, g, or t
  misc_feature (795)..(795): n is a, c, g, or t
gcccccccncccaanntttccgcnacaanangtaaanntngattccttgnaagggttntcatcctnggntacccccnacacttaaggtgtcaagttgcctnttncaccaaacttttaaaagcatgaacactctggggtctttttcgttcaaattgcatgtagcttggatagggaaaatgcgatggcaccaaaccggcaaacttacagtcccggactccaaagcttgaatgatattcgacacaatagtaacagtgtcagggtgcgtgttaatgggaaaggtaaggagaagcaacccattcctcgtgagcttaaccaaagaaagattagctattccgtctttctctgcctctgctttaacaggacttgaaagtttaccatcagctccagagttagcagtgggagactcgtcgaaacattcctcggcagcatcttgtgtgcatatcttccttctcttagaagtagtatcttcttcattagggttgtttaaagtgtgataatgacccgacccaaggaacttgtgaaggatagagattgcttcttttgtagcgcttttctctcgcttgatagtacaagtgatgagaaaaccggaatgggagttacggagaagagaagagggagcgttgtaatcaaaccgaggcagcttgataacagccgagtgctgctcccacggactcatccccttctcttccgccattttctctctctctctctctcaaaacccctttcaattaaagacaagtgttcacccccttctgtcgtcttctcgcagccgtaagggggggcccggtacccaancg

SEQ ID NO: 1585 - DNA, 1341 bp, Glycine max
ttttagtaagaaattttatcaattagtattaaacaagaaactttttctaacaattaccatatatcatttgcagtaataatcatactaccgcatattatttgactgtcttttctttcgttttctgttgtcttttgaaataagaaactggagtccgcttcacttcaaacattcatgcttatttcaactaaagactgaaattgaaatagctcgataccgccaaagttgatagttatccaaattaaactgcaacagaaatacacccatagagcaccaaaagcacaaaaagggaacttcaaggataaaaggaagtgcacaggtgtgtgatccatgtacaacaagtgcaagaatcattaccttgaacaaacaaaatttgttggcgaaccaagaaaaaaacaaaaacaaaaagtcacttttttctcagttgggtttctcacttcccccctactcactccaaaatataaaaatttatggcacaacacttcccgcaagaattttgatggcaaacctttttctcctgaactaattaatttccagagcttcaaacaaaatctatttgccttttctttttttaccatttttaccaaaccttttaccctttgtcgacttgctctttatataagaaaccctgttggcctttgtctgcctctcctttcgaatttgatccatatctttgagttctgaacgcacatgagcattgggcattgaatgctgcttcttgctgcctttaaaattactacgacctctttggtaagatcctgtcaaacttgttgaatcctgaggatcaccattatttgtccctttaagtgatatcctaacatgtgagcgttctttccacttcttatatataccagtcttgtttgcctttgtttttgcaccactctctgtctttatctttccatttgcagcaacacgatcaccattgtttaacttgatgtactttttacccctcttatcccagtgatacatagatctttgcttctgaatgccagcaccatcatctgccactagatcgaggacagctgcttccaatctattagaagcaaagtcttcattagcttttactgaaaggccagcctccatatgttgattttttggaattgaacttatatagtgatccttatccttgaaacttcggcgctttctcttagaaccacgtgctgcttttcttcctttctccatggaaggactgatttccgattgaatttcctccagtatatgtcagcatgctgagagaagcctgaccacccccagaactgctgttagatatgagggaggcagcttgtgttacaagtccatggttgcacaattcatctaatttgacgcaaaagcttcactcgagcc

SEQ ID NO: 1586 - DNA, 1322 bp, Glycine max
ccacgcgtccgctcccctccctcgaccccctcaagctccaaccatcacttcccttctccaacatgccaaacgacagcgttctgagtcttttcttcttcgttaccctcttcacatgccttctctctgctaattcccacgatgaccatattttcctaccgagtcaactccatgacgatgactcagtgagttgcactgctaccgacccaaaccttaactacaagccggtgatcggaatcctgacccaccccggcgacggtgcctctggccggctcagcaacgccaccggggtttcttacatcgccgcctcctacgttaaattcgtggagtccggtggtgctagagttattccccttatctacaatgagtcacctgagaaccttaacaagaagctcgatttggtcaatggagtgctcttcactggtgggtgggctgtttctggtccatatttggatactcttggaaacatttttaagaaagctttagagaaaaatgatgctggagaccatttcccagtaattgccttcaacttaggtggaaacctcgtaataaggatcgtaagcgagcaaactgatattcttgaaccatttactgcgtcgagtttgccaagttctcttgtattgtggaaggaagcaaatgctaaaggaagtctatttcaaagatttccttcagatttgttgacacagctgaagacagattgtctcgtcctgcacaatcatcgttatgccatatccccacgcaagcttcaatataataccaagttatctgacttttttgagattctggcaacatctgaggatagagatggaaagactttcgtttccacagcacgtggtaggaaatatcccgtgactgtcaacctatggcaaccagagaaaaatgcttttgaatgggctacatctttgaaagcccctcacacagaggatgcaattcgggttactcagtccacagcaaactttttcataagtgaagctaggaaatccacaaacacacctgatgctcaaaaagtgcgagataatctcatctacaattacaaacctacttttggtggaacggctgggaaaggatatgatcaagtgtatctctttgaataattctatctgtaggaggtgtccttgaatttgattttatgcacaataaattatgaactggggatgtagtttgaagaaataaaaatttgtgcacagtgatgtttgtaagatgcttaatttcagggcaatgctctgcttatcaatgtgttatatcttgttattgccccaaacttggtatattcttcattttgctataattctattaattgcacggataatggccgtgatacatgt

SEQ ID NO: 1587 - DNA, 1511 bp, Glycine max
ttttgaaactcaccaaacaccaataattaaattcgcccaggtgaacagagaggcatgtaaaatgtactgtgaatacacatccgaactcaaatgttataacttcaaacaaaataactgaaatttgaagagaaaaaagaataatgagcaaatacgcaaaatactcacaactcactcacaatcctctatttatagtaagcaatacacctttcagaaactgaaaaatacgatgccactaaggataaaccactttatgtcttacgcaaatataatgagcctgtcgagaatatcaactgttttttactggcaaaatacacgctagagaatcaaaaacaaaactcagccaaactaggggcacgtgacagtaatataactaatgaattcatcactacacaacgttaacaggttgcatgggggccatcctttgagttttgcacctgttacactgtagtcttgaagcataattatgattgttgcaatttgagcacatccaatctccactacgccattgctttgctccttttccaatgagagcaggtgtagaaacttgaggtggaagcaatgtggccaatggcaaacttggagctgtacttgagttcatgctgggataagaggggaagactccaggttttggatctgcaccggtccctaccacttgctctaaacttgtatatatttgatgctgatcatttgtagttcctatattcaatctcttgttgtcccaatcataaaccaactcttctgaagctaaccgctttgtcccaagtgcaggaggaaaagcattgcactttttacactgagagcgggatgagtaattgtggaagccacagttacagatccagtccccattgcgccatccctttggaacagataggttctggttggtagaattttcatgatgatgcacagtgccataatttccaccaggtagccatatggaaagtggctggacaccgtacttatctgctccaggaacaggccaattggagtttaaatgcagtgactgtgatggtgcaccattgccaagcaatccaatattcatcttttgttctggtactcctggggccctggaaaaatagtgtgaataagtggggaaagatgctccggtcatcgcaattgctggcatggctgctacctcctttggttgtccgcacttcttgcacttctctcggtgcagatccaatcgccgatacgggggagccacttggaatcagcgggggttttggaatcgacgaggaggcggggttgcttgcatctgttgcagaatgatctgaaggcgtagttcctgttgttgcaactgctgcactcccaatccccttctctccctccttctccacccatttcacctcctttcaacatactcattcttcgctacttccccccactcgctcaactcaactactaccctctgtctctgtctctgtgtttttctctcacaacaacacaggagaggggttttgattttgggagaggaaggaaggaaaagggaagatatgtgccagtttactcgtgtc

SEQ ID NO: 1588 - DNA, 658 bp, Glycine max
gtcgcacgcacgcgtacgtttggatcctttactagcgggcgctcgttttttttttttttttttttttttttactcacaactcacccacaatgctctatttatagtaagcaatacacctttcagaaactgaaaaatacgatgccactaagcataaaccacttatgtcttacgttgttacgcatatataatgagcctgatgagaatatcaactatgttttgctggcaaaatacacgctagaaaatcaaaacaaaactcagccaaactagggcacatgacgtcaatttaactaatgaattcatcattacacaacattaacaggttgcatgggagccattctttgagttttgcacctgttacactgtagtcttgaagcataattatgattgttgcaatttgagcacatccaatctccacttcgccattgccttgctccttttccaaggagggcaggtgcagaagcttgaggtggaagccatgtggccaatggcaaacttggagctgtagttgagttcatgctgggataagaggggaagagtccaggttttggatctgcacctgtccctaccacttgctctaaacttgtatatatttggggggggggccttccagctgatctcgtcaatctcttgttgtcccaatcataaaccaactcttctg

SEQ ID NO: 1589 - DNA, 1615 bp, Glycine max
  misc_feature (1468)..(1468): n is a, c, g, or t
  misc_feature (1514)..(1518): n is a, c, g, or t
catgcccaatgatgatatgaaaagggagatttctgctatcacctatgaaagataagtttgctcttctatgaccatctgatacagttctgtattgatgattgaaactccccactccacaagccagggttcagctgcgtcggcccaaaaattacattgaacaatccaggttcaaaagcaggtgcatacattttgaggagttaccctactactctgggaagaatgtttctgatttactcttcccgcaggagcagttttctcaacactatttttctgtttgtgggaatggggttgacaacactgttttgcaagatgtgacagatacaggtggtgacttccctcttgatgaatcatatggacaagatcctgataatgatattggaggatatccaaacaccagtgaaagccatctgccttgtactttaacagaagatactaaatttgtcaatggattgaattctttagacacaccatgttcagacatcaatgttgaaaaaatagagtctgttaaaaatgacacatcaagcaacaatttctgtcaaaatgatgatcatttggagactcaatatgggagtgctgtgtgggacatattccggaggcaggatgtacccaagctaacagagtacctaaagaaacaccacagagagtttcgccacataaataatcttccagtaaactctgtgattcatcccattcatgatcagatcctttatttaaatgagaagcataaaaagcaattaaagcaggagtttggtgttgaaccttggacatttgagcaacaccttggggatgctgttttcgtacctgctggatgcccacatcaagtgagaaatagaaagtcttgcatcaaagtggctctggacttcgtttcacctgagaatgttcaagaatgcattcgattgacagaagaatttcggttacttcccaaaggccatagatccaaggaagataaattggagataaagaagatggcactatatgctgcggatgttgcaataaccgaagccactaaactgatgagaggaaatgatatgtcagatgaagccaaggaagtcccccagcaacacatttttactaaatgactctcaacgaaaggcttctagtttatttactcttgatttacaaagagcatagcttgtattctgttctgttttgcactgtatccttggcaactccatggaagtttgaaatgaatgttggttgttgcactagcactacacaccagcgagatatagattaatgctaagtacttgtaacaacaatggaaaatactaggtagtcgctataatattggcataataaattgacatgcattttgactttcatgaatgagtgcatcatatcatttttatctcatcaaaaaaaaaaaaaaaaaaaaaaaaaaaaaaaaaaaaaaaaaaaaataaaaaaaaaaaaaaaaaaaaaaaaaaaaaaaaggagaaaaaaaaaaaaaaaaaggggcaaaaaaagngaaaggaaatgagaaaaaaattataaaagaggggaaaggaaaaaannnnnaaatggataaaaaattaaaaaagttgagaaatgataaatatttttgtcagctggaataataggggggtggttttaaaagaattccccttcccaccgt

SEQ ID NO: 1590 - DNA, 1238 bp, Glycine max
gtatgagatctttcggggaatacaatttagttgggatttccctttcgtctctcaccactctaaccttaattttataataataaaaaaaagctttgaggctataattagaagttctgaatcagaggaaattagtttctgaattatactgcatgataaattaagtcattaggaatgaagggttcgaacatttgaataacttcaaaatctcattaccaccattttaccataaaaaactaaactacatgaccaattggcaattgtcgattgaatcgaccctattcataaattttatatacgagaaatgagggggaagaaaaaaaaaaaaacaagtcaatttaatgcgacaaattcacaactttcatgagttatacacacacaacagtgacatttatttaaataaattgctcttgaacaaaataaaccaagcaccaccagtggccgtgaaggaaaaagtattgtgcttacatacattatttgtgggttgtaactttgaaaataaaaaagtaaatgaaccttaaaccacaaagtcagctaggcatgcagaaaacaatattatgaattcttaagaacatttattttccctgttgctgaaaagatttatgtgcactgctatttaatcggagccaacgattgagatcagtgtttgtgctttggtttcttcacgatcatgacagtgcagtgagcatgatgagcacaatagtcacttacactacctaaaaccgctctttttaaagtcccataaccatgactacccacaaccaacattgaagcttggtgcttttccactgcctcgcaaagaacatttctaggatcaccttctagcacttccactgctacgtcatttacggatttcttcttgcatagttctgtagcacgttcagtgattttggcagctgtttttctcaaatcggcctcaacaacaggtaacacctcagcggctccagggccaacaaaaccgacagcagaggcaacagaaggcttggcataaacaagaaaaatcttgaacttaggaacatttgcaggggatagcaagtgatccagagtccattggagagcgtacgtgctgaaatcactgtcgtcgattccaatcaccatcacttgctttgtctctgacccactcgtcgccatggaattccagttgcaatacctcttggattctgtgtttatgttaattacggaagggagttacttgcgtgctacgctaactttactaccacggctcgagctccgcgcgagcc

SEQ ID NO: 1591 - DNA, 1877 bp, Glycine max
tcctgcaccctcttaatctcggaatcgggggcgagaaataggacaaaatgaaggagtatatggttgtgcttcggcgtcgtcactacatttctaattcataataaacggtggttggagtttgtttaattgtttctccctctttctttctcttttgacggctcctactaatcccacttctccatcgccgcctcagagtctttcgtcgaatacgatgctgttttctcggatatcgagaaacctcagaggcagcttcaactcatgtcggtggtttctgtccatcggagaccacaaccaccgcttcctttcgctgcacaattttcattcacgtggtggagactctactcaacaggttatgagaagtttaattatttcaaagggcctgccagcattgcatagtagtagatatctgatccatcatcaaagcagctccatagttgaggatgaacatgatccattttcactggttgcagatgaactgtcacttcttggtaacaagttgcgagcaatggtagttgctgaggttcctaagcttgcctcagctgccgaatacttcttcaaaattggagtggaaggaaaaagatttcgccctacagttttattgttaatgtcaactgcattaaatctatcaatacacgaagcacctcctcctgttgaggtaggaggtactttgacaactgatgtacgttcaagacaacaacgcatagctgaaataacagagatgattcatgtggcaagccttcttcacgatgatgtactggatgatgcagattctagacgtggtattggttcattgaattttgtaatgggcaataagttggcagtgttggctggagattttttgctttctcgggcttgtgttgctcttgcctctttgaaaaatacagaggttgtatctttattggcaaaagttgtagagcatcttgtaactggggagaccatgcaaatgactacaacatctgatcaacggtgtagcatggaatattatatgcaaaagacctactacaagactgcatctttaatatcaaatagttgcaaggcaatagccatccttgcagggcaaacagcagaagttgcaatgcttgcttttgagtatggaaaaaatctgggtttggcatttcaattgatagatgatgttcttgatttcacaggcacatcagcttcccttggaaagggttctttatcagacattcgtcatggaattgttactgctccaatattgtttgctatggaggagttccctcagttgcgtgcaattgttgatgagggcttcgaaaaccctgcaaatgttgatcttgctctggagtatctaggaaaaagccgaggtatacagaggacacgggagctagccgtggagcatgctaaccttgcagcagcagcaattgattccttaccggagagtgacgacgaggatgtaagaaaatcaaggaaagccctgatagatctaactcacagagtcattacacgaacaaagtgaaaggaagactctcccctccctttttttgtttttgtgggtagctaaaggataaaagatcttagtaaaatcaagactaaaaattgttttgttaccatcaatttttctataatggtccccccaagcccgaatgtgtgggggaaaataagctgtttctaggattaatgtcgtcattcgcttttcttatttatttagattaaatctccttccctctgtttgttctccattgttgtaataatgactttgggctagttttgcctcccttgattttcttactagtttatcttgctgctgcttgtatttggatttttggagcattgaacaactgtggagtttttattcataaatttatcttgtaaaacgtatggttataatcaattaatccgtgaaactaaaaggatttctc

SEQ ID NO: 1592 - DNA, 1406 bp, Glycine max
  misc_feature (1392)..(1392): n is a, c, g, or t
attaaaccctccctaaaggggaccaaaaagctggagctccccccgcgggtggcggccgcctttagaccttagtggatccccccgggctgcagggaatttttttttttttttttttcttttttttttttttttttgaacaggccaatgcatcgttaaattttaaaataaatgtaacatgtgaatatgctacgaacgcaaacgctaaatgtcaaatgcaaatatgtatttgacaaaacatgaatatacaagataagagacatcttcaaacaaatcaacttatatggactgtacagtagaattgtctcactttacaggacggacaccaactgttcttacacgaaatcggtactgaggcaaagattcttcatcttcatcgtcatcgtcatcatcactagaatcatcttcaacactgtcccaccgtgcatagtctagagctgaatgtccttttggttttggaattgtttgccacccttttgaatgttgctctgttgtttccctgtttggtgctttaggagctatagcatctgctatggacttcttaggctcatggttttggtttcttccttgcttggatgaaaatttgaggtctgtttcatggggagcacaatcagcaataataatacctttgccaagctcaaccttttgatctgtcctaatattagaaatcgatgaatatttctctcccatctcttcattttcattttctccttgtgatatcacctcaggttcctcatcttcctgttcttgaaactcctcttctgattctggtattggagcaagtgcctttccaattgcgtcttcaaacgagcttgaagattttgataaacctctgaagatggattcaactctaaaagtctgctggcatcaaaaagtgctgaatggtactccttcagggtaactagcgtttgagcccgcagcatcaatgccccactgtgcttgtgatcaagctcaagcactgaagtacactcttctgctgcctttttgaaatcgtgaagcttgagatagcacgcggctcggttgctatgcaaagcgatcttctgagggttggtcttggccaaggcgattgcttccgtgtagaaccctaacgcctcctcgtaacttccgtcgcggtacatctggtgggcgcgttcgatcctgttcggcgccgccatctccgtcacaattcgatcgcaacaagaaaaaaaaaaaaaaggcttcagattatgaaatggttcaaatctatctgttcttggattgcactgtgcaaagaaaattgagttttggagagttttgaaatttataggttgagctcctagctcagtgacagctcgcgaatgaagggagatgggggggggcctacgtagctgactccagggggggcccggtaccaattgccctaagagaccaattaantccctgccgccggt

SEQ ID NO: 1593 - DNA, 754 bp, Glycine max
ttttttttttttttttttaacgtaacaaaaaagaaaaagtattattagggttcacttagcccaagtcaaaaaacctcagcaactggggaacctagccacagttgtgggatcaaaaggatcaaaaaatcaaaaagaaaagaaaaggcagactcgttatatcccattaattagcaacatattaggagtccctaataatccattgaacttggagttctctcttacttaattagtcttggtctcttcatacttcgtttgtgccactggttcttccgttccgaaccccaagccacgggaaattttgtcataagcccatgaagcaaaagacccggacttctgcgcagcagcatcaatggtcggtgcagcggcatccatggcggatttaaccgtcggtgcggcagcatccatggcggagtcaaccgtcggtgcggcggcatccatgacggagtcaaccgttggtgcggcggcatccatggcggagtaaaccgtcggcgcggcggcgtccttggcctgttctgctttgcctgtggtatcatcaaaaaaatgaccccaggaagtgcccacgcacacggcaaggcacaccaccaacacaacaaacatcatgttctgggtcttcatctttttattcttaaaaattaaaatgatatattcttctattgctcttttatttatttattggtgagagaatacgtactcttttattctttttttattttttatttcttttgtgttggggggggggggcctacgtagctga

SEQ ID NO: 1594 - DNA, 1765 bp, Glycine max
ctctgtttctttttcttctcccaattgcaaaacacacacacacacactgactctgtctctctgtgacaaacacaaacacaatcaatggcgaagcctcacagcggcacccccgcggtcgcaccgaagcccgcgtgggtcctcccgtaccgaaccgagaatctgcgcgaggtctacactctgtcccgaaaactagggcagggtcaattcggaaccacgttcctctgcacgcacaagggcacggggcgcacctacgcctgcaagtcaatcccgaagcggaagctgctctgcaaggaggactacgacgacgtgtggagggagattcagataatgcaccacctctccgagcagcccaacgtggtgcgcatccacggcacctacgaggacgccgcctccgtccacctcgtcatggagctctgcgagggcggcgagctcttcgacaggattgtgcggaagggacactacagcgagcgacaggccgccaagctcatcaagaccattgttgaggttgtggaggcctgtcactcgcttggtgtgatgcatagggacctcaagcctgagaactttctctttgatactgttgaggagggtgctaagctcaaaactactgattttgggctctccgtgttttataagccaggtgaaaccttttgtgacgttgttggaagcccgtactatgttgcaccagaggtcttgcgtaagcattatggtcctgaagcagacgtgtggagtgctggtgttattttgtacatcttattaagtggggtgccaccattttgggctgaaacagagcaggggattttccgacagattttgctaggaagactagatttccagtctgagccatggcctagcatttcagacagtgccaaagatctaattcgaaaaatgcttgatcggaatccaaaaacaagggttacagctcaccaagtactctgtcacccttggattgttgatgacaacattgcaccagataaacctcttgattctgctgttttatcacgcctgaagcagttctctgcaatgaataaacttaaaaagatggctttgcgtgttattgcagagaggctctctgaggaagaaattggtggtctgaaggaattattccggatgattgatgcagataacagtggtactataacatttgatgagctaaaagaaggcttaaagcgagtaggatctgaactaatggagtctgaaatcaaggatcttatggatgctgcagatattgataatagtgggacaatagactatggtgaattcattgctgctacggtccacttaaataagctggagagagaggaaaatttggtgtcagctttctcctattttgataaagatggaagtggttatataaccattgatgagatacaacaggcttgtaaggagttcggtttggatgatgtccatatcgatgaaattgtcaaggaaattgatcaagacgatgatggacagattgattatggggaatttgctgccatgatgagaaagggtaatggaggaattggcaggcgaaccatgaggagcacgctcaatttcagagatactctgggaattaaaggccatgggtccgattaagtcattgtaccttaaataattattacttggtgataaaattttgaacaatgaaaactacaactatttattcatgaatggactcaaaacgtcctttagggaaaaaaaaaaaaaaaaaaaaaaagggcggcaatggaaataaaagaaattacttaagttaaagtagaatgtaaaaagtgagtctcagaaaata

SEQ ID NO: 1595 - DNA, 1156 bp, Glycine max
cttttttattttattttttttctttttttttttgaccattaaactaaatatgaatatattcaatgggacaaaataactcccatgggagaactaatccactctcccacgtcaaccagcgtccgagtctatattctgatggtcaaaaaatacaaaacaaactcaactttcccttgaataataaccattttacttctcacgtgtattttgttttttcctcaaacaataaccatttcacttctcacgtgtattttgttttttcctcaaacaataaccatttcacttcttcagtgccggatagttctcaacatggctctcatcacaatataatttcaaggtatactcaatgagctcaatgtggtcaaacccctcagtcttcaaactttattttctttggtgcaggttggatgttgcccacaatctcagggcattcataatcaatgccagcagcctctatccttttacgtcgtttttggtcatgtttcagaaccttatccaccaacttctggtgctctttcaatgttctttccttgtcatgacgcttccgttcaatttggactgaatccaatggcttgtaatggtaattgaatcctctccatattcttggatgaacatgctctggaggtattacataaacttggagaaggtgttcaaaaaggagataattatgcatagtatcagccacaatttttgctacctcaggagattcaaattctatgaaaccaaaatgtcttgattttccagactttttattccttgcgattctcaacctcttgatggttccaaattgcccaaaataaccttccatctccttctcatagaatccatgcggaatccgaccgacatacaaaaccgtggcggtgttctccggcggcttctgctgggaggcggcgagcttacgagcaggaccaccttccaagggcaagaaatcagcaccctcagatggcttattattaaaggaagcccttttcaaattattcatagctttcttcgccttcttccccatctcactatgcgaaccccaagagagtattgaaaataacgtgggaggcgcagaagctttgataaattagaggccggcgagcagtctgagcagtggtggtgagtcgcgagtctgaggcttgagagcggcgcaaacacaaaagggttttatgctttt

SEQ ID NO: 1596 - DNA, 1397 bp, Glycine max
  misc_feature (1332)..(1332): n is a, c, g, or t
gggcaaattaagtagtttccattaaatagccaaaagcaaaattcccattgcttctcccatcatcagtctatgttatatgcatactgaagacagagatgaagtggttgatacaaaaaggcataaatcataaatatgaaaagcttattgaatgattacaaatcagctcctcagacaatggagtggctatgtgtgactgcattgaaattaggtaatcgatttcctgtttatagttttattaatttaggtaggctaaaaaagagattataacactcaagatgctggtttgtctcggatccttaagctttggtgaagctagcatcgaaaggaacgccagcagcaggcaaccaagtgctagcttggagccaaggctcagcagtgaattgtgcagcctcctgcttgctaatgagacctttgccaaacttggctcttgcttgagcaacggaacctggtccagtgttgccaaactcagcgaagtagcaatcctgtgtgtttggttcaattgggttccatggaatataaccatctggctgaatcaagtccccgataacattctcgatgaacactgcccttgagaatgccttccatggcctggccaagtaagtcttcacgctcaagcggtctgccaagagggtagggtccggcatgatctcgcagttatggaggactattcctgtgggcatgttcttctgccctgtgccatctgccaccactatgttctgctgatttgccatgggcttcctcaccaagatcttcgagttttggatcaaggtggtggagtatccgaaaatgaaatcaattgttccagagatttcgcaattgcggctcgagccgacgatgggcgtgggcatacaatgtgtcttggtaaccgcgcatagcacaatcaaagaacactgaacgatcaccttgcacgcgaagtgccactgcttggtgtccttctgcaccagcggtgttctcaaatgcaattgacttcgccatgaaatcctcggcaacagtagagaaggtggcggttctcattgtcttggtaccctcgtgaaagttcttgcggccagtgatgatggtatttgtggggccatcaccgtagatgaaaagattgggcttcttcttgtcaacggtgatgtactcgtcgtagataccagccttaacgtagataatgtatctgccttggtgtttcttagggtaggagttaatagcgtccaaaacagtggtaaattgaccactgccatccttagccacagtagcatggggcaagactgcaccgtcgttgagttgagccaagagcttgcgatcagcagcggagacccaagtgcggtagccttcctggtccacctccancagtctccaatcctgggctgagagcaaggttcaagtccaactcgagccgaattccgagcttacgt

SEQ ID NO: 1597 - DNA, 1929 bp, Glycine max
  misc_feature (22)..(22): n is a, c, g, or t
  misc_feature (74)..(74): n is a, c, g, or t
  misc_feature (1190)..(1190): n is a, c, g, or t
tagcttaaaagagattatacgnctcaacatgcacatgcaattaacgtgcacgtacgccttctctctctgatccncaagtttaagcttaagctttggtgaagctaggatcgaagggaacggcagcggaaggcaacctagtgctagttgtgagccaaggctcagcagtgaattttgcagcctcttgcttgctgatgagacctttggcaaacttagctcttgcttgagtaacggaacctggtccagtgttgccaaactcggcgaagtaacaatcctgtgtgtttggctcaattgggttccatggaatataaccctcgggctgaatcaagtcgcccataacattctcgatgaacactgcccttgagaatgccttccatggcctggccaagtaagtcttcacgatcatgcggtcagcgaagagggaagcgtcaggcatgatctcgcagttttggaggactactccagtgggcatgttcttctggcctgtgccatcagccaccactatattctgttgatttggcatgggtttcctcaccaagatctttgagttctggatcaaggtggtggagtagccgaagatgaagtcaattgttccagagatttcgcagttgcggtagaactgacgatgggcgtgggcatacaatgtgtcttggtaaccacgcatagcgcaatcaaagaacactgaacgatcaccttgcacgcggagtgccactgcttggtgtccttctgcaccagcggtgttctcgaatgcaattgacttcgccatgaaatcctcggcaacagtagagaaggtggcggttctcattgtcttggtaccctcgtgaaagttcttgcggccagtgatgatggtctttgtggggccatcaccgtagatgagaagattgggcttcttcttgtcaacggtgatgtactcgtcgtagataccagccttaacgtagctcgagccgctcgagccgtgatgcttggggtaggagttaatagcgtccaaaacagtatgaaattgaccactaccatccttgccaacagtagcatggggcaaaacaggatcgttggccaagagcttgcgatcagcagaggagacccaagtggggaagccatcatcatcaacgtcaagaaggcgacgagaggcgggcttgagagcaaggtccaagtccaaggactggagaatgtgtgtaatccctgacacgacatcngagtgccaagcctgtgagctttccaacgttgtcaaggctaccagattgtagctgctcctgaaccttcttctcgccgtcggtgtcgaagccgtcgaggcaagattgctggtaggcaacaacagctcccaaccagttcttgagctcggcggtccgctggtgcacgtcctggaggctgctctctttaaccaagacgcctgaggcctccaggtcgtgcattgcggactgcaacaagtccttgcaatcctccagagccatcttcattccggcgctgctgttgccgtgttccaccgtcagcctgtcgctcatattcaatgctttgataacactgtccatcgagcttctcaccacggttgcgatgtattcctttgggtctgtgctgtttgaagaggacagaacatcgtggcacagtttcttgtcgtctgagccttggcacaacgctgtcactgccctgttggtgcttttcacttctcctccattgctgttgttgacgccctttggactttgaactacagcaaccacgccaattacgacacccaccactaggataagagaaacagtggatcctagtactttacctttcatattttattttatttttggttttttgggttataatctttttgtgggttttttttttgtttctccccgacgatgacaaccgaaactgagaagccaaatcggagagaaagttttattgaggaaggtacggttccttccctttactagtgtttgaggagcc

SEQ ID NO: 1598 - DNA, 808 bp, Glycine max
  misc_feature (5)..(6): n is a, c, g, or t
tctanntatttattttttgaagtgttgtatgattcaactaattaaatctctcttgaagctaaaaagaagtaaaatctgatgcataaacgaatgagtttcattacatgatcaccttagcctaacaggttcctcatttatagtctccaaaacaggcttccttgacctacaataatttaacctatactgaaaccctgactccactccttccaaactcaaccttggaatcacacttaaactttcatcttttgaactctcttcttcttcttcccgttgttgccatgctttgccgccacagttgtccggcagaacacgcgccttactgccggacaatcttttggcggcagagttggcggccaagaagagtactgccatgtcaggggcggtgacaagagagttcactctcctcatcgggaagaagatatacacgttgccaaactccaactcttcatcagcaccgagagcagagaatcttcttcctatatgcaaagaacgagaattgaccaaaaaatagttggggtgttcgagcatgagttccgcagccttcacgatctctttgaattgcttgacttcaccggtggggatgataaccctcgtggccttggaattcttcatcaaaggaggcgccaaggtgcatgaaacgtagttgcccattacgtggaattaaaattaataataaccgatacgaggatggaatgaaggttgttaacgttggagagaattgaagaacaatatgggagatttgattttggagggtttgttttgagggtatatatagagagggagaaaggtgaagaacaaaggtagtcgg

SEQ ID NO: 1599 - DNA, 611 bp, Glycine max
actgaaaccctgactcgactccttccaaactcaaccttggaatctcacttaaacttccatcttttgaactctcttctttatgttgccatgctccgccgtcgcagttgtccgggagaacacgtgcctttccaccagacaatctcttggcggcggagttggcggccaaaaagagtaccgccatgtcggtgggggtgacaacggagttcactctcctcattgggaagaaaatatacacgttgccagactccaactcttcatcagcaccgagagcagagaatcttcttcctatatgcaaagaacgagaattaacgaggaaatagctggggtgttcgagcatgagctccgcagccttcacgatctctctgaattgcttcacttcaccggtgggaatgatgaccctcgtggccttggagttcttcatcaaaggaggcgccaaagtgcatgaaacgtagttgcccattacgtgaaaataaaattaataataaccgatatatatataacgttgattgaaggtggtttataacgttggagagaatttgaagaataatgggagatttgatgatggatggtttgttttgtggggccccttctgtcgtcttctcgcggccgta

SEQ ID NO: 1600 - DNA, 781 bp, Glycine max
agctacccgttggcttgaatgttgtcctagttgtggcaactttagccaagcacaaatagttcaccttaactgctgtatagacttgattggctctagcttcaacatttgctcttgctcccatcatttggctccctcctgctccctgcaaaggggtatcctccataaatggaacaaaagttgcaaaattgcaagctggctgctgatcagtgtcactaagaaagtatgaagagaactctgcaagcttttggtaatcactattattgaacatttctagctgtcctccttgatacagtttcaacacacatggagaagccacatagtctgaggttatgcctttcaagctctccactaaacctaaaagctctacgaaggagaccggaaaataagttgtatccacagaatagtttgacaatggtatgacaaatgacttgattcttgatgtgcaatatttagtccttgatgcaatccttgaattattctggagaagaaggtagctctggccatcagcagaattcttaatgactttgaaggtctggccatagtagatgtggaagtttccagcatcttccacctttgaaaagttacctactttcactgctggggaggctccatggacacatccacagttaaataaccaaaccaatgctaagaaggagaaggcttgcagccaagaactagaaggagctgaatccatgagctgaatgaggtacctcttgctatataaaaataatgtgatcattcattggagctgctaattatattaagcatgcttactcattat

SEQ ID NO: 1601 - DNA, 786 bp, Glycine max
tttttttttttttttttctttgttttttttttttttttttttttttttgatcgtagagcgaatttcctttccttgtttggataacaatgtctatattgttaatggacattacaagagcattatgatttaccttatcgggagatggtaatgttcccattaaattagaattttaaaaccagttgatttatacagcaacatcaatcgacggcatcagagtcttgcaagctgagtctaacagtcactaaattatacaaattacatatatacttagttccagcaaggacatagtttcagtggcaacactaatacgctgatttccctttgaatgcccaactaggcaatagttccattatgtggccgaagaactatcacccttggggaagtcaaaatgctatgtatggaggtaattggcagccatcattagctccagagttaattcaggttcaatgggaaattccgtctccttcccactggcgaattggagatgccaataaaagtactggcaaatcttctcgagaatggtggtgctgatctcaggaaaggtaacttcgccgtgctgcctctcagcgaaactccctggagaagtaagcatgttatgtatggtctgtgaaaccattgcagcttctttgtcgaccacaaattcaaaaccttcggcactgatcagcttcactgtgtcttccttcttcatcttctgattctcgctctcacacccgaacccctcctctcgttctcgttgcgaatattggaacctaacctcggcggaggcgggggggcctacgtagctga

SEQ ID NO: 1602 - DNA, 1000 bp, Glycine max
gatgctagatgaagagcttgatggatcaatgttcaatatcattggatctctggtcctttcgtttggtggtatatattatcaggattcggtgacacttacaagcaaaggtttacggatggagtttgttaaaatcctaactgtcttaacatctgttgacttctcatccaacaattttgaaggaacaataccagaagagcttatgaattttacaagacttcatttgctcaacttgtcagataatgctttagcaggccatatcccttcatctatagggaatctaaaacagcttgaatcattggacctgtcaagcaaccattttgatggagaaattcccacacagcttgcaaatttaaatttcctctcgtacctaaacgtttcctctaatcgtctggcgggaaaaatccccgtaggtaaccagcttcaaacatttgatgcatcttcctttgttggtaatgcagaattgtgtggagcacctttgcctaaaaactgcagtaatgaaacatatgggctgccatgcccatttggttggaaaatcattatggttgaattgggatttgtttttggccttgcccttgttattgatccccttctgttttggaagcaatggaggcaatggttctggaaacgcgtggaccccattctgggtcgtatcttcccccagctgaattttgaatatgaaagcagtggagggccttgctatcaagttttaaggtggaggccttagtcatgagggagttctaaaatgctaatagcaaatcagccagacaagccccggtgaggatgcctttttcaacctgcatttttttgttgcattgattgcttttagggttgattttatttttacttaagttgagaaaataaaaagcagtggatgaataatgatcgggtttggaagtaaatacatatgtatgatttttcccaagtcctaataaatataagagtgtgtaggattatgcagattattcaagatcctgctttcatttaataatccctattaatc

SEQ ID NO: 1603 - DNA, 1712 bp, Glycine max
tcggccggtcgagccgggggcacatgttcatcctttgattatatcacatactcaccatggaggctaagttggccaccaccataatacttattttctccgtaatttggcttatgagggtgaatggcatagacccttgtgcctctcaagcggataattccgacctgaacgtgattcccatctacagcaaatgctcaccgttcaaaccaccaaagtcagactcatcgtgggacaacagaattataaacatggcctcaaaagacccactccgattcaaatacttgtccaccttagtgggccaaaagaccgtgtccacggccccaatcgcttcgggccagaccttcaacatcggcaactacgtcgtcagggtcaaattgggaacccctggtcaacttttgttcatggtcctcgacaccagcaccgacgaggccttcgttccatgctcgggctgcacgggctgctccgacaccactttctcgcccaaagcctccaccagctatggcccattggactgctctgttccccagtgcggtcaggtccgcgggctttcgtgccccgccacaggtaccggcgcgtgctccttcaaccaatcctacgcgggctcatctttctccgccaccctagtccaagactcgttaagattagccactgatgttatccccaactactccttcggctgcgtcaacgccatcaccggcgcctctgtcccggcccaagggcttttgggcctgggccgtggcccgctgtccttgctctcccaatccgggtcaaattactcgggcatcttctcttactgtctccccagcttcaagtcctactacttctctgggtcgctcaagctcgggcccgtgggccagcccaagagcattcgcaccaccccgcttcttcgcagccctcaccgtccttctctttactacgtgaacttcaccggaatcagcgtgggacgtgtcctggtaccctttcccagcgagtatcttgggtttaacccgaatacaggatccggaaccataattgattcgggcacggttataacccggttcgtggagcccgtttacaacgcggtgagggaggagttcaggaagcaggtgggaggcactacattcacgagcattggagccttcgatacgtgttttgtgaaaacctacgaaactctggcgccgccaattacgctgcacttcgaggggttggacctgaaactgccgttggaaaacagcttgatccacagcagcgcgggttcgctggcgtgtcttgcaatggcggcggcacccgacaatgtgaactcggtgttgaacgtcatcgccaactttcagcaacagaaccttaggattttgtttgataccgtcaataataaggttggcatagcccgtgaggtttgtaactagctggttggctacatttttatttatttatttattaatatgtaccagtggctttcttgattagctaactaggtttggatctttcgttgggttcaaaaacgtgatggtgtgggtgtgtggccacggtgaataagcttgccttgtgtgcctttggaagatatgcaatgtgaaataggacctagctagtactattttatcttagatcgatcgttgtcgatcattgtaatgatgtttgattaaattaataatgtaagatcaattaagtagcaaggatgtatgttgtttagtttggaataataatatgggatgaattactactgccaaaaaaaaaaaaaa

SEQ ID NO: 1604 - DNA, 1287 bp, Glycine max
ttttttttttcaaaataaaaaagttggtttttttttttttgctagtctgggagcatcaaatcattaatatatcaacaaaatgaaaataaaataaaaacactgtatacataacaaagaaatgagaatgatactttggtagaaaacaaaactagtttaataatagctcacagaccattattattattattactattattttctgaatatgtctgcttttctatggaaacccttttgactttgccaaagtgtacaatcttgtacttcaggtttactatgttgctggagagaatcttaaacggatatagtgggcaaaagtttgaagttcaaatcccacagctcaaaattgccattaacgaaatcataatgtgctcctttcaaagccagagttttgttaacaacaccatctctaacaaatggatatgttaataggttaccaagtgatacattcacagcttccttctcacagttagtacattgctctgaaaaacttaagtcactttttcctgctttaaccttggactttgctggagtacaaatttggacccattgctctatgaattcacttgcagtggtcccgtcatctgggatagacatgagcccctttatacctccacagcaactgtgtccaataactacaatattctccacctttaaatgcaacactgcatattctatggcagcccctgctcctgaatacttcgtcttgtcatatgggggaaccatgttggcaatgtttcggaccataaaggcctcacccggttggaaatccagaatatgagatggacaaactctcgaatctgagcatgcaaataccataaactttgggctctggcctttggcaagttcgccatatagatcaggatttttctcaaatttctcattcttaaattggatgaagccggttctgatcctctcctccgggttaaacggcttcgaaccggcggcatcaagctccgccgtcagatccttgatctttgcggcggcaacaccaccgaggtcagctttttcactgagaagcttggtcagactcgcgatggcttcctcgtatgattctcctgccatttcttccttctgtttcgctcccaaacacaaacaacacaaatagattcagacggtcgacattcacttaaatccaaacattaaaacaacgtatgatgaatctcttcatataatgctaattaataataattcattctgcgacatatatatataatggaaatcataatcgattaatagatcaatataactagtatatgcgaattcgggggggggggcctacgtagctga

SEQ ID NO: 1605 - DNA, 1349 bp, Glycine max
  misc_feature (1327)..(1327): n is a, c, g, or t
aatggtaagcattcacttctttattaatattaacggtaatttattcaaggggctttcatgctccaagattcttgggggcattcaagaaaaaggatctaaaacatctcatactaaattaaatgcattgctcaagtttaatggcaagatcagaattaaagtttgccgttttttttttttttttttaacataaaacggtaataaaacagaacttattgagttggtccaagaccattattttagctgagtgttcgttctttcttctggggatttggggaaaactactaggggaagggggtatcttatacaatttgaaacacttgcaaggggaagctaggtcatgtacatcccacagcagggtcaagaacactttcgtttattgcttcttcagtggtcttaaacggatacagagttagagattttgaagtccagatcccaaagctcaaatgtgcccttaacgaaattgtaatgtgcacctttcaaggcaagtgttttcttcttcacaaccgcatccctcacaaagggataagtcaataggttcccaagtgatacattcacagcttccttttcgcagttggtacactgctcagaaaattctaatgtgcttgcttctgttttaaccttagactttgctggagtgcaaatttggacccagtgctctatgaattcacttgcagtggtcccatcatctgggatagacatgaggccctttatacctccacagcagctgtgtccaatgaccacaatattctccacctttaaatgtacgacagcatattcaatggccgcccctgttcctgaatacttggtcttgtcatatggtggaaccatgttggcgatatttcggaccacaaaggcttcacccggattgaaatccagaatgtgggatgggcaaactcgagagtctgagcaagcaaacaccataaactttggactctggcctttggcaagttcgccatataattccgggttcttctggaatttctcgttcttgaagtgggcgaacccggttcggatcctctcgtctgggttaaacggcgtcgacccgtttgcggtggcggtttctagctccgccgtcaactgcttgatctttgcggcggcgacgccactcaggtcggctttctcgctgataagcttggtcaacgctgcaatggcttcctcgtatgatcctcctgccatttctttcttcttttgttttgttcttgagaacagagagtagtgatcagagagattgtgatagaggtggtgataggagtgtgagtttatatggatgatgaggtttttgttttgttccacgcgctatctagctagaggaagaagagggaccagnactcacgtattgtgtgtcatcg

SEQ ID NO: 1606 - DNA, 1332 bp, Glycine max
cccacgcgtccgacggctgcgagaagacgacagaagggtacggctgcgagaagacgacagctctctgagttcgatccttttccgatgtacggaaccgagaataaccgagatgattcggagcgaacggcgttcagaagagcagagaagaagtacaagctctactacgactacaatgcttcttccaagaacaaaaagaaaaaacaacctaaacccgtggacttagcggaggtccttgactttagatctattctagaatgctatcaccaaaacgctgtgcttccttcgggtgttatcgttcttcacgacaagttcacctctccggtttttgctttacaaaatcgcccaggcttttattttattcctggggcattaagcatagagaaacaatgtagtttgataagggagagtttgactgattttccgcagccacctaacagaacaaatcacaatgccttgtatggtcctattcaggacctgttcgttgcagctaaggaagggaaacttttggttgaagacaactctccaattacttcttctgaaacttatgctgatattgatcatagagatgataaggaatggaagtttactactgaaaaggacatgtcgttgagaaagtgcagaacagtttctgcttctgtgttacttagaaagttgcgatggagcacccttggcctacaatttgattggtccaagcggaattatgatgtatctctcccacataacaaaatccctgaagcattatgtgagctttccaaacaattggcaaaacctgctttgcctggtggtgttgagttcagacctgatgctgcaatagtgaattacttcggcctaggggacacattgggtggccaccttgatgacatggaagcagattggagcaagcctattgttagtctaagtctgggctgcaaagctatatttcttttgggaggaaaatccagagaggatactcccttggcaatgttccttcgaagcggtgatgctgtacttatggctggagatgcaagggaatgctttcatggggttcctcggatcttcacagataaagaaaatgctgaaataggccatcttgagacacggctgacgcatgaagatgatatttgtttcttaaaatacattcaaacatctagaatcaacatcaatatcagacaagttttttgagtagtatgttcttttctttcgaagtgaaatttgttttattagctcaaggaacaaaaaaatgatgtatgatttctatttaacgtgattattgctttatatgacaagcgagtcctatccagcaaacctggcgctgctaaggtacttttccttctgttaaaaaaaaaaaaaaaa

SEQ ID NO: 1607 - DNA, 1481 bp, Glycine max
gttacaatggtgtggtgactaataatgatgttctgccgatggcagacagttcagagtcaactgctgaacagcagattatgcggtctaattccatggaagcatctttgaataatgaaacatcagatagatccaagtccccggttgattcaacggaaccaaataaagctcatggtaggatttcatcagcacatagtaacaatactgagaaagaccataaaaaatctacatctcaggctctttattacaaaggtgttggttatcacatggtaaactgtggcttaatattgctgaagatgttgtcggagtacattgatatgaacaaccttttgccaacactatcttcagaagttgttcaccgtgtagtagaaatcttgaagtttttcaacacaagaacatgccaacttgtgcttggggctggtgctatgcaggtgtctggtttgaagtccatcacgtctaaacacctggcgttggcaagtcaagtcattagttttgtacatgctattattccagaaattcggaagattctttttcttaaagtacccgagactagaaaaacactattgctttctgagatcgatcgggttgctcaggattataaagtccacagagatgaaatacatagcaaattagttcaaataatgcgagaaagattactggtacatttacgtgggttgcctcaaattgttgagagttggaatagacccgaggatgctgaccctcagcctagtcaatttgctcggtcccttacaaaggaagttggatacctccaacgtgttctatctcgaactttgaatgaagatgatgttcaagcaattttcagccaagtggttgttatatttcactcacaaatttccgaagcattttcaagatttgatataagcactcctcaagcacagaataggctatatcgggatgtcaaacatattcttcaatgcatacgatcattgccattgggtgatttgagtaaatctgataccccaaactggggtcagctggatgaattcttggtgaaaagatttggaaatgatgctgctcagtaaactgtattgtaaagtagcaattcaattgcttccgtgggaaggctaacatactttggaagatatgggggtgatttaaaccttcttcactctgcattttcgtgtaacattaaattgaggcctttggttggtctgtagtagatatacaaggtaatatatcatttctgagcattgtgcagccgtggttggtcatttaacaagttttgtagcagtcgatgtcaatattcaaattcttggtttgtctccataattgtaatgttaagtcgaaaatagatatgatttagtgaatgaattaagttttgaccccccccacccccccgcccatcaatcccttagcgtcttcagccatggatatcgatgcatcaatatgtacacaattcgagaaatctatagtgatattaccgatttgtgtgttaaaaaaaaaaaaaaaaaaaaaaaaaaaaa

SEQ ID NO: 1608 - DNA, 944 bp, Glycine max
tacggtgcgagaagacgacagaaggggatcatcgtgatcatcacaattctaattcattcaccaaaaagttcttcgccccttctttgtccccattctttctctttaatatactttgtccatattttcctctttctcttcctatcaaacatccatggcttccttgtcttctagtacaaaacagagcaataataaccaagaggttgatgagaaaccaataccacacgatcaaaacgttctgcaaaagcacgttgcgttcttcgacaggaaccacgatggcatcatatacccgtgggagactttccaaggatttcgagcaataggttgtgggtacttattatcgtccgttgctgctattttcatcaatggaggtctcagtcagaaaacccgcccgggaaagtttccttcaatactgctaccaattgaagttcaaaacatccatagaagcaagcatggaagtgactctggtgtctacgatagtgaaggaaggtttgttctttcaaaatttgaagaaattttcagcaagcatgctcgaacacacccaaattctttaacatctgatgaattgatggggatgcttgtggcaaatagagttcctaaggattacgctggatggcttgctagctacacggagtggaagatcctatatgttcttggcaaagacaaggatggtttactgcacaaagagactattcgagctgtttatgatggaagcctctttgaaaaaatggaaaaggaacactcagacaagaaagcgaaataaataaagattgacatgaattatataagttgggacatgcgtctttgtgaatttcttgttgagtgccttgaaagtgttatttatggtgtatattcctattggtgtatgaacttaagttacgtattaattgtttaatgcaaatgattttatatttatttgttattattacgtaaaaaaaaaaaaaaaa

SEQ ID NO: 1609 - DNA, 1683 bp, Glycine max
  misc_feature (1655)..(1661): n is a, c, g, or t
  misc_feature (1663)..(1663): n is a, c, g, or t
agaatgaacttgtccccgcggataagaatgaccacacaatacgcgtgtagtcaattttctgcatcagataatctctatcaattaactccaacagctgctggaaaagccactcatgaatcagtggtttgaattaatcaattatccctagtgatgggcatgcaactagtggatgaagacccttcaacccgtgtgtgcgctaccttacaagtcacaaaacttcatcaaactcatgaacttactcagtcccttccagcgaggaatttgcaacgaccctcatcgattttcctctatatatattactcctcagctcttttatttagactcacacaagctctagggaataaaccaagaaattatatacgtatacccattaattatgatgaaatcttcttcacatctttctgcaatattcctattgttctttctccttactgccctatccccttcggatggagtttcattctcttcattcctaaagcaattaaaacagaagctggagaagagtcccaccctaaaagatttcctgaaacccaccactataggggatatttattatacgttgaatttcacagaaatcttctcttccgaagagagaagcgcaccaccggtgtctctcatcaaagattacttatcaaactacggctacattgaatcctctgggccattgagcaattcgatggaccaagaaacaataatatcagccattaagacctaccagcaatatttcagtttgcaacccaccggcaaactaaacaacgagactcttcagcaaatgtcgttcctacgatgtggcgtccccgacattaacattgactacaacttcaccgacgacaacatgtcatatccgaaagccggtcaccggtggttcccccacacaaacctcacatacggttttcttcctgaaaaccaaatcccagccaacatgaccaaggtgtttagagattccttcgctcggtgggcccaggcctctggggttttgaatctcaccgagacaacctacgacaacgccgacatccaagtagggttctacaacttcacttacttaggaattgatatcgaggtgtatggtggcagccttatatttttgcaacccgattctaccaagaaaggggttatacttctcgacggtaccaataagttgtgggctcttcccagtgaaaacggtaggttgtcgtgggaggaaggagttttggacttggagagtgcggcaatgcacgagatagggcatttactagggcttgaccactctaacaaagaggactctgttatgtacccttgcatattgccttcacaccaacgaaaggtgcagctctcgaaatctgataagaccaacgttcagcatcagtttgctaacgtagaggactctgcaggccacgtagggcgtttgggagtgagtttaattaccactttgtctcttggattcgcttacttacttctccttttgtattaattaggtctactcgtgcgtcacgctttaccttggttgtaataattttatgattgttgaatgtgcatcagtgcatgttcccccgcgcatgatttctttttgttttactcgtacgtgtcgttgtttcttattggtctttggacatcttgtatatcttaataaataaaagattgttgtttttttatttcaaaaaaaaaaaaaaaaaaannnnnnnanaaaaaaaaaaaaaaaaaaaa

SEQ ID NO: 1610 - DNA, 2706 bp, Glycine max
cacgcgtccggttcagaaaatgccggtgaaggaagcgttcacgttgacgtgttgttaagttgagttagttttggtttaggatttggttgggtgaagtgacgtgtgcacttgaactgttctttcttctgtttctatggcttccaaagttagttagcaacacgcatttcgatgacggtggtcggactcttcctcactgccacgaagctcgccggagctctattcactctcaccgtcgccgccaacgccttctcctactcccgctttcgcaagaagaaccttcgcggtttccgctctcccatcgatgaatcccaagacactctcgcacactttaacgtcgctgaaggggaagatgggtttttctttggtttggcgacagcgccagcacatgttgaggacaggcttgatgatgcttggatccagtttgctgagaaaaagagtggtgaaggtggtggtgactctgaggggaagcagagagtggatgctgtgattggttctgcttctggcgatggtggttcccagccggccataacatctccgaggagcaggaagcctctcaaggtggcgatggaggccatgatcaggggaattgagaagtatatggaagtggaagggaaagaaagagaagaagaagcccgtcctaatgtaactgcttggcataatgttccatgcccggaggagaggttaaggttttggtctgatcctgaaacagaaataaagttggccaaggatactggtgttacagtttttcgcatgggaatagattggacaagaatcatgccagtggagccagtaagcagccttaatcaatctgttaactatgctgcattggaacggtataagtggattatcaatagggttcgatcgtatggaatgaaagtgatgctcactctttttcatcactcgcttccaccctgggctggtgagtatggaggttggaagcttggaaaagacagtggattatttcatggactttaccaggcttgttgtagacagtgtctcagatttggtagactactgggtaacatttaatgagccccatgtcttctgtatgcttacttattgtgctggagcttggcctggtggtcatcctgatatgcttgaggctgctacttctgcacttccaactggtgttttccagcaggccatgcactggatgtctattgcacactcaaaggcatacgactacatccatggactaagtaacccattaaattcaatagtcggtgtagcacaccatgtgtcatttatgcgaccctatggtttgtttgatattgctgctgtttcactggctaattcattgactctcttcccatacattgatgaaatatctgagaagctggactatataggcataaactactatgggcaggaagtggtttcaggtgcaggcctgaagctggtggaaaatgatgagtacagtgaatctggtcgtggggtataccctgatggcttataccgcatgctgcttcaataccatgaaagatacaaacatctaaatattcccttcatcattactgaaaatggggtttcagatgagacagatttgattcgccggccatatctcttggagcatttgcttgctatttatgctgccatgatcatgggtgtgcgtgtacttggttacctgttctggactatttctgataactgggagtgggctgatggatatggtcccaagtttggacttgttgcggttgaccgggcaaataatcttgcacggacccctcgcccctcttaccatctattttctaagattgtgaatacaggcaaagttacacatgaagatcgtgaaagagcatgggatgaacttcaaagagttgcaaaagagaagaaaacaagaccattttatcgggctgtggataaacaccgtttaatgtatgcaggtggacttgacaaacctgaacagcgaccttatatagaacgagattggcggtttggtcattatcagatggatggactccaggatcccttgagccgcttctcaagatccatttttcgaccattctccctcttctcccttaaaaggaaaccaaaatctcaaaagaagaatgccaaattgattctccagcctcttgaaacttagcaattgatttgtcttgtcccagattctatatttttgagtgatgagcactttccatttcaatattcaaccccagacacatctgtctaactttcattatatgtgtaatattgtactgggtgtattatggtgcattcttgttgtaaagcttatttgtctcatttttaccaagaagtcaacgtattaatataatcactggacggtaatatgtgatgcctgtccctgttagcggaatgtcatgtattgtataccctggacatacacaaagaatgtaaatcgctgatcaccactttatgtgagcaagagccttcccttttttctttctttttttctccctaaggaaccttgatctcctattttctatggagtgagatattttgcatctaagttttcccaattcatactggtcatggcatatcagtatcagtatattatacaaatctcgtctccttattgaagagaaagatcaagatcagggaatttcccgcttccgggaaatggacgagaattgcattgtctcacagtcggagccgcattagttatcacctttgtataacatgtattccagttttgctgcattattcagataatatataatacataaatatatgaaagattttccaaaa

SEQ ID NO: 1611 - DNA, 2307 bp, Glycine max
  misc_feature (9)..(9): n is a, c, g, or t
ttttttttnttttttttttttttttttttttttttttttttttttggttttttttttttttttttttttttttttttttttttttctgttggctttcttgttaactgattcacgaaagccgttctagtcatgttatgtagtcatcatcacatcacaattcacatgagtacaataatttgttcagccatcttaaacatgatcagtatcttccaaaaacaagtgaaacatctctattggcatgggcacaacatccagaccaggcaagcatcattgttttcctgattcccaaacaattcttaagatcaatctattcagcacccaccatacaaggtacaagtacatacaatcaccatgtgacagaatatatatacctctcaattaccaaacatgtaccagacaatgtagactgcagcagagcctaaaatatgttaaatgatggtttgttggtagaatcaactgagaaagaaacatagcaacattgtatgttaaaaatgctctaaaatcctattacatcagagatgcactacggttacaatttagtcatacaaaagctgagtaacaacaattgcctactcccatgatactgataatgaaaataggaaaagaaaagaaaaacaaagggaaatataccatcaacatcattgtttcattagctcacttataacccttctgattcatgatttatcttattcacaagccaatttggtgtcaaagctgctcaagcatattgcaaaagcttggaatgcagataaagggtaccgataatccatggtgaacatgtccttcccaactttgccaaactgaagaatgatcttatcgtgctccggtggagctggttgagatggtgtaggtgcaccagcagctggttgggtggcagcaatcaactgaaagtttttaacagacgcaactgttactcgtccacggaaattaaggcaccaacattgtaactgttcatgccatcttggaggcttgtttttcagaaccaagggtctcatcttgccatcatcatcttcgatgcaggattccccaatctcagaaaatcgcgaactgctgaactcaatagaatgatctagagactttgaaaacgagatgctccgaaacgagtcctccagggaacggggaagaagctctggctggccaggaacagtgccacctgcatctagtgctgaagctggtattgaatgcataacgcagtgcatctttcttggtcctcgagtcccaagcacatttaattcatatgttacctgagctatgttgtaactcccagatgggaccttaggcgagacctttttggaataaaatctgcggctcgtcttcccagtcccaggagggcatatatgggcagaagagtatggaggctgtgtatcgtatataatgaactttgtaccaagaaaatttgatctcagctttccaatgtaagtgttacttgatctagagatgttgtcagcatccatggaaataacgtactcagtgtaagttgttctccttgtcctcttagcagaaaggaggaattttccattttcaactaacaaagcagggctgagacaaaggaataggtggtatgttaaattagatttatctcttttgataaaacattgaatgattccatcccgtggcccaggctgcttcaaggacacagggaatgtaagtttgccacaaaactctgggctcttaacgatgtccttgcacatattcctccaagactggcaaactgcagcacatgcaaccgagccggttcgagcaggccatgtattctcactctcctctagccgtctaatgatatcaaatagtaattctgggggtaagctagcccagcggctattttgaattactagaggctggtcatgcaaatcctgcactgatccttgagattttcctctatgatgcccagtaagtctgacatcaaaactacgcctagataagctcccgaaactatcccttacatcacgaactatgctgcggaatgacattctgcaggtggtacccaataataattatatatatatcttgtgtgaacttctgacgtactatattcaaccactgtgagcatatggtcttaaaagttggagttaaaatcaagtcgatcaaaactcccaagccggatcaaaagcaaaccttcatccagaatatagagatcggtagatgaagtattagccctagtttcagagacgaaatttacggaagaatcagaaagggatcctctttacgcagcagaagatacaaacgaagcagaaagacacaagctttaggtcagaatgccaacaacacctactccttccagtttcttacacctccctcatctctctc

SEQ ID NO: 1612 - DNA, 829 bp, Glycine max
ttttttttttttttttccaaaatagaaactgatgactatatcacaattcacaacaatagatacattgactaaccaaaaacaaattgaagataaaagcacataactaatagtctactagtaagatattagaggaataaaagttcaggggtattacattacactgccttgttctaaatctagggtgagattttgaagtaatcattatagaattaaaggcaaggcacatcaagcaatagcatctggttgaacagcaccattggctttggctttactcatgttggctcggcgagtgaccctcacatggtagacccccaatgctaaaagcacaacaaaagcaacaccaaagataatgccagctacgctaccagctcccaattgtttcttacttccttgaggggttgaggccttgctttcatgaatttcagtagcttccacttgtgctgctaaaggcattggtgagcattttgatgcagcacaagggtcttttgtctcgggctttcgttcattggggtgaaagaagttatatgctgatggtgaaaaggcttctgggttctcgtaaacaagcccgtgaggggctctttcttgggctatgacaatcgagacaagtgctagagaagcgaggctgagaagagagaaaccaatgggattcatgtttagtttgttttgtctccttgtctttgtgtgaaccacttgtggctgggttgaactggcttttataatggtattatggtcctgaggaagtggttgttccttggacatgaatttttgtgttgggacaaggaggaaacagaattatgaggtttgctttcagcactccaacattgaattt

SEQ ID NO: 1613 - DNA, 1678 bp, Glycine max
  misc_feature (24)..(24): n is a, c, g, or t
  misc_feature (1439)..(1439): n is a, c, g, or t
  misc_feature (1445)..(1445): n is a, c, g, or t
  misc_feature (1560)..(1560): n is a, c, g, or t
  misc_feature (1562)..(1562): n is a, c, g, or t
  misc_feature (1599)..(1599): n is a, c, g, or t
  misc_feature (1606)..(1606): n is a, c, g, or t
  misc_feature (1609)..(1609): n is a, c, g, or t
gatcgcggtggtgctccttgtctnggtcgagctgggtgctccaatgatggtggcatcgaccaaggtgccttgagtcatcatgacgcctgtttcggccagccagcgattgatggtcttgaacaattggcgggccagttgatgctgctccagcaggtggcggaaattcatgatggtggtgcggtccggcaaggcgctatccagggataaccgggcaaacagacgcatggaggggattttgtacagagcattttccattgcgccatcgctcaggttgtaccaatgctgcatgcagtgaatgcgtagcatggtttccagcggataaggtcgccggccatttccaaccttggggtaaaacggctcgatgacttcccccatgttttgccatggcagaatttgctccatgcgggacaagaaaattttttttttggtttgacggcgctttctgctgaattccctgtcggcgaaggtaagttgatgactcatgatgaaccctgttttatggctccagatggcaaacatgatttcatatcaggggcttgtttgccccttccctagtggatcccccggggtgcaggaaatccttttttttttttttttccttttttttttttttttttttttttttttttttttttttttttttttttttatcacaaaaaacaacaactattaagttaaccaaaaccagagaatcagcatcattatttgattagtccatcatcgatttacattggctatatcgtgatgaggaaaaagctttaatttaaatacattccaattcaatatccaagattgatacaatagaatgcgtgcaaacttatatgataacattggtcttgagatgcaggtgttcttccaaattggagcggataacttcataagcacaagaaagtgtatggaatgaagattcttatgatgctagaataggcttgtgaatttggcagaggtggtaagagtggtttcttgaatttggtaggaagtggtatttaaggaagaatagggtttttgaagtaaaggcttaggcttaacaaatggatttgctattggtataggcttaattacaaaaatgagaaacgactatggaataggtttagaaacttgaacaggttgaggcattttacccactgggaatgactttggtataggtttaaatattgaaataggtaaaggctttttcaccattggaaatggctttgggataggctcaaatactggaataggaatgggtttaacaagtgggactgactcaggtataggcttaattattggaataggtagaggttttttaactaatggaaatggctttggaataggcttgaatattgaggtaggaattggcttaacaattggaactggcttgggtatagacttaggaattggcttaaggggggggggcctacgtagcggactcgagggggggcccggtacccaatcgggantatttngaagttgaggagggtggggaggggagtgtttagggagggaggggatgggagatgttgaggataaaagggtggagagagtttaggtgatattgatatgagagggaggcgaggaggnanaaaggggtaaagattgaaatttgaaggattgagaggngggagtnggngagggggatggggagggagaggagggggattgattaggggtgaggagtgagaggtgggggcgagttgtg

SEQ ID NO: 1614 - DNA, 1117 bp, Glycine max
agtatagtaatactcgtagtaataccaatacattagcaaaacacaataattaagcactgtatcaaaatctcaaaactcaaaaaataaaattattaacaaagatgaatgaagttactataatcgggggaaagggggggctaactcaaaaatattactgtaaaaaaaggatgatctcaagaagatctactagatatagaatcatgataaactcttacagatagagacacaccacaagacagtcattgagaccaagtttagagtgtataacccggttgctcaggagagtgcgggtaaataaaataaacatatcaggaaatgcaggttactcagaatctgatgagtctgctctggagctctgtcgaacacttcttgtggttttggcactagacctaacatgattgaacgatgattcaccctcataaaagatgacttgagctttagccaatctttcttccagctcctctgtgctaaactcatcagtcccaccaagctcatcaaaccccaccacataatcatcgactttggcgtttttgatgagggcaagggttggaagaacaatgatcttgagcttctcagcgagaaaaggactcttctcagcgttgagtttcacaaaccgagtctcgatatgctgctttgccaaaatatttaagtgtttgtccataaccttgcagggccagttttcgcggaagaagtggcagacgacgcgttcgctggccttgacgacggagaagaagtctttctcggagggaatctcggaatattcggagtggccgagggagatccagcgggagcgcttctccgccatcttcttcatctgctggaggcggcgctcgcggagggcttcgatgtcgtcggcatcgaggcgttccagggcggcgatctcatcgtcgatcttgtcctcgacggcttgcgccaccgtcaggacttggttctcgatcacctcttggatcttacccttatccatcttccgctaccagatgcctctcaaatggatgaacaacgagtcgatacgacgccgtttgagttcgccgctagtcccttcttctcctattgtttgaattgatttacgatgatctaagtttttccgcacatttcacttaaaacacaaataagaaaa

SEQ ID NO: 1615 - DNA, 1349 bp, Glycine max
tttttttttttttttttttttttttttttttttttttttttttttttttttttttttttttttttttttttgttcctttttcaaaccacaatatatatagccatatatatgttcccaccgaagaaacatcttcagccagcgtttactttatgggtacacactagacactccagaaagcacgggactgtgtatagtaataccaatgcattagcaaaacacaataattaagcattgtatcaatctcaaaactcataaaataaaactattaacaaagattaatgaagttactataatcaggggggagggcgctaactcaaaaataggcactgtaaaaaaaggatgacctcaagaagatctactagatctagaatcctgataaattcttacagatagagacacaccacaaagcagtcactgagaccaagtttagagtgtataacccggtcgctcagggtgcaggtaaataaaacaaactcatcaggaaatgcaggttactcagaatctgaggagtctgctctggagctctgtcgaacacttcttgtggttttggcactggaccttgcatgattgaacgatgattcgccctcataaaagatcacttgagctttagccaatctttcttccagctcctctgtgctaaactcatcagtcccaccaagttcatcaaaccccaccacataatcatcgactttggcatttttgatgagggcaagagttggaagaacgacgattttgagcttctccgccagaaacggacttttctcagcgttgagtttcacaaagcgagtctcgatatgctgctttgccaaaatatttaagtgtttgtccataaccttgcaaggccagttttcgcggtagaagtggcagacgacgcgttcgctggccttgacgacggggaagaagtctttctcggagggaatctcggaatattcggagtggccgagggagatccagcgggagcgcttctccgccatcttcttcatctgctggaggcggcgctcgcggagggcctcgatgtcatcggcgtccagacgctccagggcggcgatctcgtcgtcgatcttgtcctccacggcttgcgccaccgtcaggacttgcttctcgatcacctcttcgatcttacccttatccatcttccgctaccgctaccagatctctctctcccttcaatccaatcgatgaacaacgagtcgatacgacgccgtttgagttcgtcgctactcccttcttctcctatcgtttgaactttgaattgattctggatctaaaggtttgccgcacatttcacttaaaaaaccaaataagaaagaaaatatcgacggtgcaggtccagtgcaagatctgggggg

SEQ ID NO: 1616 - DNA, 1162 bp, Glycine max
tttacgcacgaagagaatcagtgcacatcaaaatatcaatcgatatgtacattagatacacaacctacaccctgtttactacaaaattaaataattcaaaggatactccatgttacacaacactatttatttaagaaaaccatcattttataaccatgagttcatcaaatcctcgcacaacttctcaattatgctatatggtacaaatgagcatcaattttcccagtaaaactagagtccctgatatcatagaggaaagattacatctttcttaaattgtctaaccttgcctgtaaatcactatctatccctccatcatcattcccagtcgtttcaacttgtggtacctttgtctttgcagccggggcagcaacagctgatgatggtgcatttacaagctcttggttaatgtcaatgccaatctcatcaagaacttggttaactaggtcttcagtttcctcttcatcttcttctccttccaaagcatcatctattgcatctcccatcatctcagatgtcaattccatcttctcattctgtctctcaaattcttgcatgattttctgcaatgatggcaagttcatctgcctattcatttgccccatggcctttgtcacgcctttcatagcctcacccattgcttgtgttgatttcaaagtctgaattctgagtgatacaccttggagctgagattttagcttataaaatttctcaacctgatgccttgttctaacaagatcttttgccataactctaacagctcccatctggccctgtttggcacttttctttatctccgcaatcaatttcttctcttgcgtttgcaagccttgccgctcgcgctcaatttctctgattgatttgtccagcatcctcttattttcccgcagaagctctgcgggtgtttttcgctttccgaagatgaaactcatggcggtggaaggaacaaccttggttgagatcgaacagaaaattttgtagaagacgagagaacagcgcctaatagattagcctccgatcccgttgttatgatatgcgtttgggatttggtgatgatgcttttggtttgatcacaggttgaggttgcttacccggggggccctgacgcggcggacccgcaacgaaccatgatctccgtcgttttccacacgtgctgcactcg

SEQ ID NO: 1617 - DNA, 1776 bp, Glycine max
ggggaaaatttaaagtgcattagaattggcgctatcacagtttagatagccctagctagtacatgaaatttagggaatgtttgaattcccattcaaaccttggttgcgggaatttcaatgcatttcaacggagaagtaacaaaagagatgctttagcaaaagtgtacattagcgactaaccaatcggcaacccaaacagcacttatttatgctatagagcgcctcattttgaggcaatcatagcaaatagcatcagcatagagtgatatccacattttacctcaacaaaagctcgtaacagatctaacatgaaataataaagcatagtatttgatattatttctattccttttaccatcttccatgcatgtataataactaactgccaataatttgagttgaaaacagaatgatggaaaatttagaggggggagggaattactcaacattcctattctatttacatgttgtaacagctaaaacgagctccgcaaattcctttacacctttagaacgaggcgatccgattcaactgaaccatgtcaccacctttgatgtgtgacccgggagaggccattatttgagaagcagggaggaaagtacatataaccaaaaaataatcaagtctcaagagtaaaccctgattcatcatcatattaacatacagggccgggttggttagttccagaaactcacgataaatcaaaggatccctggccttcactgattgcatagagtagcttcttgtacataatttccttggtagaataaggaggaagcttaaggtaatttgcacacgtcatcacacttggcaagtcatcatccgctaattctgaaggaccgttcccattagatgaagcattagctgcacttgatgaaagcttcctcacaatcgttaattttggatttagaactgccagtccaccaggaggcaacctaggtgcaccagtaacaaattgacagaaggcacgctgttgctctggtgtgaattctcccataattccgagtaaattaactatggcagggctcttggcagtataaccatggtcaaattttatatgatcggctagtgtctcagtcttccacaattctctccggccacaaagcaagtaatccagttcttggggagaaaaaatttgtaaagatgagatgtcaaaaacctgattgaaccctgctctaaatgcttccatttgacgcatgattccagtcttaaccgttgcctcaaccaccatggatatgtactcctctagattattgatgtcaacaatttcatctccaggtttcaagatgtactctggataaccaggaagtgtgaagtccaagcagagatcttctattggggccccacgaaaatgcaaattagcaaaggtatcagtgtagctaccaccaatagattctataaaacatttccggcaaacaagggcatttaactcttgcaaagttttcccaagttcagcatcaatgaaaagaatgtcatgcaaatcaagctcttgaccaagaacaagcttataaaatgccactgacaatggtaaatccaataagcgtccatcggggggggcggcctagccgttgctcggcctaataatcggaaatattcaatcactttgaaaatttgggtaccctctgatgcatcagcatttgcaggccaaggtcgaggaaacagcccaagaggagcttgaacgagttctccatctccaacacaagacgccttcactatttttcaccctcttttcatctccatcaatttccattaaatatttctctgaagaacctgat

SEQ ID NO: 1618 - DNA, 1851 bp, Glycine max
tgagattataaagcataatattttaaattatttcctttccctttaccatttttcttcgtacatgctaattgccaataattggaattacaaacagaataatgaacttttttaaaaagaaaaaagaaaatcaaaatttcatcattgctattctatttacaagttctaacaggtaaaatcaaataagagctccgtaaattcccctacactttgaaaatgtggcgacccgattcaactgaataattccacaaccttgcaatttgcattgagcacggaaaatgagacactattattcgagaagcgaggagcaaagcacatccaaccaaaaaaaacaactgaccctcgagaataaagtcaataaaccctgatccatctattaacatgcagggtaaggttggttagtttcagaaactcatgataaatcaaaggatccctggccctcactgattgcatagagcaacttcttgtacataatttccttggtagagtaaggaggaagtttcaggtaattagcacatgtcatcacactaggcaagtcatcatctgctgattctgaaggtccattcccattagatgaattattaactgcagttgacgaaagcttcctcacaatcgttagttttggatttagaactgccagccctccaggtggcagcctaggtgcaccagtaacaaattgacagaaggcacgttgctgctctggtgtgaaccctcccataatttcaagtaaattaataatggcagggctctttgcattgtacccatggtcgaattttatatgatcagcaagtgtctcagactcccacaactccctgcagccgcaaagcaaattatctagttcttgaggagtaaaaatttgtaaagatgagatatcaaaaacctggttaaaccctgctctaaatgcttctatttgccgcatgattccagtcttgacagttgcatcgatcaccaaggatatatactcctccaaattgttgatatcaacaatttcatctcctggcttcaaggtgtattcaggataaccagggagagtaaaatctaagcaaagatcttcgattggtgcaccatgaaaatgcaagttaacaattgtatctgtatagctaccaccaatagattctatataatgtttccgacaaacaagggcattgaactcttgcaaagtcttcccaagctcagcatcaatggacagaatgtcatgcaaatcaagatcttggccgagaacaagcttataaaatgccactgacaatggcaggtccaaaagtcgtccgtcttgaagagctttagccataacacgacctagcagccggaaatactcaacgacttttgaaaaccggctaccctctgatgcatcagaatttgtaggccaaggccgaggaaacaaccccagaggagcttcaacaagttctccatctccagccaaattaggcccagagccatcacttttctttttcttttcatctctatcaatttccatttgatgtttttctgaagaataagatctccacatttgcaatccaacttgttgcaaatcatgacttagaattgtataaaactcaagggtgggacccaggccagtcccaacttcaccaaaatattctacttcaagtacagctttttgccggggccgcatccccataacttttgcagcaaaatccaagacacgatttcgagagacacgaaccttttggcgctgaaatttcccaactctcacctacctctcagttgatgaatcatgaccatcagcgccttgctgctgctgaagccgatacaatgcacgaaaataacccaaatgcggtataataaaattacatgactgcggtgtcaaaaggaaacaagaaagggcctgctttagtc

SEQ ID NO: 1619 - DNA, 1523 bp, Glycine max
tttttttttttttttttccatgtaaagtgcatgtcttgatcatttcataatgttacacgttttattgtccgagtacagcttgaattcaatactacttcagcaagcaaataacattactagaaatcccacattgctggaaactcatttgaagatattctcagactcagacatcactcgaattttataatatccctatgcacgaagggaatcagtgcacatcaaaatattaatcgataagcacatagaaatacaacctttttttttgtctataggttggggggttggttgagaagggacatacactattgctacaaaataaataattaaaagcgtactccatgttacacagcactatttttttatttttttttaaaaaaccatcatttttatataattatgagttcatctaatcctggcacaacttcccaattatgctatatatggtacatatgagcatcaatttccccagtaaaactggagtccctgatatcatatagaggatagattacatttttcttaaattgtctaaccttgcctgtaaatcactatctatcccgccatcatcattcccagtcgtttcaacttgaggtacctttgtctttgaagccggggcagcaacagctgatgatggtgcatttacaagctcttggttgatgtcaattccaatctcatcaaggacttggttaactagatcttcagtttcctcttcatcttcttctccttccaaagcatcatctattgcatctcccatcatctcagatgtcaattccatcttctcattctgtctctcaaattcttgcatgattttctgcaaagatggcaagttcatttgcctattcatttgccccatggcctttgtcacgcctttcatagcctcacccattgcttgtgtagatttcaaagtctgaattctgagtgatacaccttggagctgagattttagcttataaaacttctcaacctgatgccttgttctaacaagatcttttgccataactctaacagctcccatctggccctgtttggcacttttctttatctccgcaatcaatttcttttcttgtgtttgcaatccttgccgctcacgctcaatttctctgattgatttgtccagcatcctcttattttcccgcagaagctctgcgggggtttttcgctttccaaagatgaaactcatggcggaggtggaaggaacaaccttggttgagatcgaacagaaaatcttgtagaagacgagagaacagcgcgtaatagattagcctccgatcccgttatgatatgagtttgggattttggagatgatgcttttgatcacaggttgaggttgtttacgcggtaagcgttgaaacgaggaatcatcaacgaaccattgtcaccgtcgtttcccacacgtgccgcactcggggtcggacccaccgttgcgtagttactcagtttcctcgaaataacccaagccctaatgaactgagttagggtagcttgttttaggagaaagatacgcggcccgcggccccccgcgatcg

SEQ ID NO: 1620 - DNA, 1322 bp, Glycine max
ataaaaaagccttgaagtctttctgaaggaaacagaggcttgcattaattgcgactattctaattcaataaaatgcatgttgcttctgatacaaatacagtcccccaccatcaaatgaaactcaaccacacatacacacaccactttgtcacaagagataattttattccaaggagaaaatatttaatacaagtgggaattttattgattgatcccattgatcctctcaataacagagataatcccttggctgccaagcttcccctgaccattagccagcatgctagaaaacaactgtttagacaaggaagcccctggcaagacaacaagatgagcatcatctcctccttccacaacatcaacccccatccccaaatccttaacctgatactccgcaaaaccccctggtcgaaaatccctctcaatcatcctctccccgaacaattcaagcgccttcgaacccgcagcaccgtcttttatggcttccacgaactccctcaggtccagccccgcacgcttggcgaacaccagcccctcgctcagcccgatcaagttcgcgccaatcgtgatctggttcgcgatcttgcagctctgcccgcaccccgcggggcccatgtaagtggctctcccgaggatcgagaacagagggctcagccattcgactacggctttttctccggcggctaggatggcgagcttgccgtcgcgcgcgccgatgtcgccgccggagacgggggcgtcgacggaccaggcgccgagggagcgtgctgcggagaagatctggcgggcgaggtcggggtgggagctggtggtgtcgacgacgacggagttggggcggagggaggagaggacgggggagtcgaggaggagggagcgaacgtcggaggggtggcccaccatggtgaagaggacgtcggagagttgggccagttgggccggggattgggccagggtggcgccttgggattggagagagagggcgttagggttggaagggttgcgggcgtagaaagagagggtgtagccagcagaaaggaggcgagaggccatggcgaagcccattacgccgatgccgatccagccgattcgggtttcggagggtgagatcggagttgggtacggcgttcccatggtaatgttgctgcctgagacagacactcagtgaattattagtttcctttttttattccatgcctctttctaaccaaaagaatctgctttttgagctagagaataataattcataattttatcctccaattattatttttttctatatttttttagaaaaaaaatattcagacccaaaaaaaaaaaaaaaa

SEQ ID NO: 1621 - DNA, 1833 bp, Glycine max
ttttttttttttttttttagaataagaattacattattacctgctcatattttcaaatgatttactatcataaatttcatgggggaacattaactgcgatgttagcagtcataagacacccatcagtaagaaaaaaaaaattgagggaaaagattgaaagactagaacgaatattattgaccttcgtctgaaatatgatcagaatgaatatggccaaaaatgtcaggacaagagttccaatttccttgttttcgggcctcccaataccctcctaagtaacggtaggtgccgcttttatccctaccaaaccaccgtggttcccacccgctctcttgcattttccgagcctggcgttgccgctgttctagccgcaacttttctgaatttgccatgtcatactccccattttccaaatgcctttgatctggtcttaacctggaatcggtaggtggcagcttttcctttaatccaggggtaagttcatttaatgtgatggcaaaccgagtgaagttatatctagtgggaaacttgggaggcttactccgcttccatagtagatgggcatctgacatcgattcataacccttccctttcccactatagtctccattaatataatacatgctgtcatcccattttccgagtaatgtagacaatattttcccatttctatcctgaacaataccatgaacctggtgaggatttcggtcaattatagattgttccttgaatttcagtttacatgagtagtcttgatttccctgtatacgcattgtaccataatgatcacaatacagctttcccaatatgagattgtatattgatgttgtaaccttactccactggcatacttcaccatcatcaaattccaaagtcaaaatgccaacaggatcaagctgaattgaccgaccccaaaatttactctttaagttgctatctccccaaaatttccaacctgtaccctcacagtgacatgctactatcattggatgatgactgaccttctctgagaaaaatcgaattcctttatctggaaagtcagcctcatatgtttcccctagtaatgggttaaatggtttgcaaattctcccttcagttgaagcataggcagatatagcaaacgcagcaacattgcgcgtgcccatgtggctattaccccttcttccccattcatatgctcggtctagaagatatgaatactccatttcttcacaacatttttgcagagacgagagaggctcattaaaataaacaggaaggcaaactttagttagatccttcccgatattatccttaatcattgaccaaaggctgacgcctttctccttttcaacagggttgggcaatttcctacgccgtttaacataaggatagttggttacaacagatctaattgaaggatctacatcctcctctgattcaactgtatagagtccatcatcaactgaagagaaagaagagaccctaatatcagatccattacttttaaaagaattggatgatgatagaaaatcacgagtgtcaaaaaaggcagtgtcatcttcatctgtttcttcctcaactgcatcatttctctcattatcatcctcagactcacttgcacttgcttcgctagattttcctgccttaatctagaggatgcctcttgatcattcaactgtctttggctctcgtcaacaacagtgttctccagatcaaccttttctgtctctaattgccgcagagtgtcaatcagtgtcacctgcttctgcttaagcagcagaagctggttttgcagcgcagcatactcatttctcataatttgctcactgtcctgaatagctgcctcactta

SEQ ID NO: 1622 - DNA, 1142 bp, Glycine max
gattacgtgtgtcgcaagtaataaggattctgtgaatagacttggaacggaaagaaaaagaattacattattagtcgctcatgttttcatctgattgggttacatgaatttcatgggtgtaccataacagcgagatcgcagtcataagaaacacccatcagtaaaaaaattgggaggaaaaaaatttagaagaactaaaatgtaatttgaccttcgtcagaaatatgatccgaaggaatctggtcaaagatgtcagggcaggagtcccagtttcctcgttgtctggcctcccaataccctcctacatagcggtatgtcccgctcgctttatcctttgcaaaccaccgtggtttccaaccactctcttgcatcttccgagcctggcgctgccgctgctctagccgtgacttttctacatttgccatgtcatactctccattttccaaatacctctggtctggtcttaaccttgaatctgtaggcggcaacttctccttcaatccaggggtaagttcatttaatgtgatggcaaagcgagtgaagttatatctagtgggaaacttgggagccctgcttcgcttccagagcaaacgagcatctgacaaagtatcatgacctttccctttcccagtgtagtctccattaacataatgcatgctttcatcccattttccaaacaaagttgatacagtctttccgttactatcttgaatgataccatgaacctggtgaggatttcgatcaattatagattgttccttgaatttcagtttacacgagtgctcttggtttccctgtatacgcattgtaccatagtgatcacaatatagctttcccaatatgagattgtatattgatgtagtaaccttgctccactggaaaacctccccgtcatcaaattccaaagtcaaagtaccaacagggtccagttgaattgatcgcccccagaatttgctctttaggttgctatcaccccaaaatttccaacctgtaccctcacagtgacatgcgacaatcattgggtgatgactgaccttctctgagaaaaaacgaaggcctttatcgggatagtgagcttcatatgtttccccaagtaacggattaaatggtttgcaaactcttccttcagttgaagaatagcc

SEQ ID NO: 1623 - DNA, 1239 bp, Glycine max
tcgagtcagctacgtagggccccccccccatgtttttattaatttgattttctctttcgtggttttttttttatacataacttgagagaattgttttttgttttggcattatgtggctttaaattgtttgacatgacaataattgagtggtaattaaatttgatgtgaacgagtgtagatttgtgatacacataaaagccggggcatacttcgagaatgtggaggtaatcaggaagaagaccaatctgatgttcgtcggagatgggattggaaagactgttgtgaaggccagtaggaatgttgtggatggctggaccactttccaatcagccactgttgctgtggttggagacggattcatagcaaagggtataacctttgaaaattctgctgggccaagcaaacaccaagccgtggccctaaggagtggttctgatttctcagccttctataaatgcagcttcgttgcctaccaagatactctctatgtccactccctgcgccaattctaccgcgattgtgacgtttatggcacagtcgacttcatcttcggcaatgcagcaacagtgctccagaactgcaacttgtacgcacgcaagcccaatgaaaaccaaaggaacttgttcactgcacaaggaagagaagaccctaaccaaaacaccggcatttccatcttgaactgcaaggttgcagcagctgctgatttaatcccggtcaaatctcagttcaagaactacttgggtcgtccttggaagaagtattcgagaactgtttatcttaattcttacatggaggatctgatagaccccaaagggtggttggagtggaatggcacgtttgcattggatacgttgtattatggagagtacaacaataggggtcccggttcaaacacaagtgcaagagttacgtggcctggttatagggttatcaagaacgccactgaggcaaaccagttcacagttcgcaatttcattcaagggaatgaatggttgagttccaccgacattccattcttctctgatttcagttgaatacgttatggttattagtggcttcatgctcttttggtatccccatttaataaagtattagatgtttgttgtggaaatagaattcaaggaatgttattgttccttgcgacaaaagcactaactaaaataaaaaagtattttatattaattttttatcgataaaaaataatttattaattttattaaaaaaaaaaaaaaaaaaaaa

SEQ ID NO: 1624 - DNA, 1442 bp, Glycine max
tcgagtcagctacgtaggcccccccccccaaatcacagtatcacttaccgtcttcttcttcttcttcttcttcttcttcttcttcttcttcttcttcttcttcttcttctatatatatatatatatataccatgtatagccccattagcagaaaaaaaccaccaatggagtctcacgtagacaccattctctctgcaatttttgttctactcctttcttcgttaacccatttcagcatcaccgcaaatgcaacaagaacaccccaagaaaacagcctccatttccaagtagcaaactccacatgcgagggaacactctactccgacctctgtgtctcaacccttgcctcattcccagatctcacctcaaaaaccctcccacaaatgatacgctctgtcgtgaaccacacaatatacgaggtcacattgtcggcctccaactgcagcggcctccgaaggaacctcccgaaactcgacaaactcgaacagagagccctcgacgactgtctcaatctcttcgacgacaccgtttcggagctcgaaaccaccatcgcggatctctcacagagcacaataggaccgaagcgttaccacgacgcacagactttgttgagtggcgcaatgaccaacttgtacacgtgtcttgatggctttgcgtacagtaaagggcacgtgagggacaggtttgaggaggggctgttggagatttcgcatcacgttagtaactcgctcgccatgctgaagaaattgccagcaggagtgaagaaattggcgtccaagaatgaggttttccctggatatggtaagatcaaagacggctttccaacgtggctatcaaccaaggatagaaaattgcttcaggctgctgtgaatgaaacaaacttcaatcttcttgtggccaaagatggcactggcaacttcaccaccattgccgaagcagtggctgtggctcccaactccagcgcaactagatttgtgatacacataaaagccggggcatacttcgagaatgtggaggtaatcaggaagaagaccaatctgatgttcgtcggagatgggattggaaagactgttgtgaaggccagtaggaatgttgtggatggctggaccactttccaatcagccactgttgctgtggttggagacggattcatagcaaagggtataacctttgaaaattctgctgggccaagcaaacaccaagccgtggccctaaggagtggttctgatttctcagccttctataaatgcagcttcgttgcctaccaagatactctctatgtccactccctgcgccaattctaccgcgattgtgacgtttatggcacaggcgacttcatcttccgcgatgcagcaacagtgctccacccctgcaacttgtacgcacgcaagcccaatgaaaaccaaagggtcttctcttccttgtgcagtgaacaagttcct

SEQ ID NO: 1625 - DNA, 1663 bp, Glycine max
ttttttaacagaaacaatgaagcaaatttgaattatatacgggaataaggaatacatgatcgcatttaaacaaactttacaggcataaaagtatatcaccatgcaaacagacattaattgtttcatgtacaaatgaagcccgtccagataatgatccctccttcgcccagtcaaagcagcaaaggttttatccaattccaaaaaccaaataaagaagacaggaaattactgtaagcttttaatgaaatagcccaaacccagacttgaaacaaaataataaagcaaatgaagaaaagaagaaccccgtatgaaagaattaagtccctcgccccacccaccaatgttgttgtggttgtaatgatgaatataacagtaacagtaacatccttattcaagttactctgcaatgggtttggtcttggacctgtagaggagtttcttcttcttggatgtttggttgtctatggtgagtacaatcttgccaggttcaccaattttgaaaccgttggtaagaacggtctcatcagcgggagcaattttcctgctcttgtgtactatgacagtgtatccatcctcagcgctgggcacaaattcagctccatagctgacatcccaacccaccactcggatttcccaaacaagatggcttttctcagaaacagggaactcaacagaatgtttggtagcgggtttaatagtaaactccgtaacagggtaagcagaggtgaattcctgttcagcctctctgctaagaccaccgtattgaaccgggaccagctccggagctatatatctgaaaagggtatcagcagatttggaagggccagcaaaaacaaatttactcttggtcctctgtgtgaagaagggactgatcatcctagaaaaggcaaggtaccaccaggggacattgatgaatatctgcttggcaacgaactcagggtagttgtcctgaagcagttgaagggcctgattggtggcctgcctcagttccctcttgcccagtccgggagagttcttaaggtcgttcacctgaactattgtcgatatcccattcggagagaagtcaaggcttctaacgctcttctccaacgactgaatcctccaccttatgaacttgttcctcttttcctcgtccaaaaacgtcttgctgtacaactccttgtcctcaaactccccaaagacgttgtagtacaccgggtgcccttctttgtcgtatccatccttgaacaccaccttctcccaatcacttccaagatcttcctccactagaccctctattccaaattcctttctccatcgcaccgtgtttcttatcatgttcaaggcctccttcaccttgaaatcccttgccctaagaaactttagcagaatcacatcgctcctctcgtcccccagcaggggaattccccatatctcaacttcctctggaacaacctcccgacctttttcttcttctttcacttcactttccttcttctcttccctcacttctacttccacttctttcttttcttctgtcacttctgtttccttcttctcttcgatcacttccacttctttctttccttcggtcacttccacctcctgcctctcttccgtcacttcaacttccttcttctcttctactatcacttccgcttccttcttctcttccgctcgagcc

SEQ ID NO: 1626 - DNA, 517 bp, Glycine max
gcgctcaggctaccaaaccatttcattcactaaaaaactagaagatggggatggttgtggtgatttctcttcctttcataatcttctgcttagttcttggttttggatgttacttctttggaagagccagaggaaggagagaggttcaaaccaacccacaagtttatgggatgccagctccacccccaactgcatgtgcttcacatccccactccaagccagacaacactgataatgtttgatctcaaattatctactcagcttcgcttcgctgttgtgttgcgcaaatacatatacgtcatatatattgggtttcgtttggtgtaattattcactccaataagattaacctctatttactttttgtctgttatttactaccccttgtttcgaggttgaaagttcaatcaacttttattcttttttattgtctcaattcaattttgctcaagttgtgtttatagagccgagcattccatagtgtcactggcctttggttacaaaaaaaaaaaaaaaa

SEQ ID NO: 1627 - DNA, 1625 bp, Glycine max
gtgcccacagacaataaccctttataaaaaaaaaaaaaatctcggtctgttttttttctcttctttttctctctctctctcacaaatttctttcccttttgttcactcaaaagagcagaaagggacaagatcccggaaaggcgtgccagcgtcagagagactcatcagttctcactcgtacggcgcttttgctttgctttgcttcatttctttcatcgtcatcataaagttcgttcctttctcagttttcacccatacccagatgagtaacagcaccatctcggatctgtgtccctcctttgagtgaaaaaggttcaatctttggtctctggggctgttggggttccgtcattgaagaagaagaagaagaagggtattattgttattataatcatgtacccgaggctcatacacccccacgatgggattgtgacgcaggatgagttgcagggtggtgctgcttccaacctctctcacgctcacaagggtgacccttgtctcgttttaacggctgatcccaagcctcgtcttcgttggactcaggacttgcatgaacgcttcgttgatgcggtcacgcagcttggtggagctagtaaagctacaccaaaagcaatcatgcggactatgaatgtcaagggtttgactctgtttcatttgaagagtcatcttcagaaatacaggcttggtaagcaatctgggaaagatgtgggcgaaggatgcaaagatggttcatatcttttagaaagccctggtgctgataacacttctccaaagttgccaactcctgatacaaatgagggttatgaaatcaaggaggcattgagagcacagatggaagtgcaaagtaaattacatttgcaagtggaggcggaaaagcacttgcagattcgccaggatgcagagaggagatacatggcgatgctcgaaagagcttgcaagatgctggctgatcaatttatcagtgctacagttatagacacagacagccaaaagttccaaggaattggaagcaaagcacctagaggtaccttggttgatcctcttggtttttactccttgccatccactgaggtagccggagtgaatgtcccggaagaagaaatactgccaagtctcccaccccaaagggccgattgttcaaccgaaagttgtttaacctcgcatgagagctctggaggattggctttagaaggatctccaggcgagggaaaaaggaggatgctaggcatggactctatggcagcacctttgatctggagtgaagctaagatgagaactcaagccatcaatgtagctcaaggtaatcatcctcaaggaataactaggtatggcatgtagggatggaaggtcttcttgatggttcatcccctcataatatataaacctttgagcttcatgcattccctttttttatgggtacttgaactcttcatgtcttgtaagttagtgagacataggtggaatcaattttacccctttgtaaattcaatctactctgtggctttaaacatcgcaaaaaactagctttgactatacacaaaattgtgtgctttggtgacttatatggattccttattgctcattgcatcatgctgaacaaagaagatgagagagtcattagtaaa

SEQ ID NO: 1628 - DNA, 1681 bp, Glycine max
ctcgcgcgcgatttttttccttttcttttctttctctctcaaatttctttcccttctgttcactcaaaagagcagaaagagacaagatcccggaaaggcgtgccggcgtcagagactcatcagttctcactcgtacggcgttgtgctttgctttctcaccttcttcttcatttctttcatcatcatcatcatcacaatataaagttcgctcctttctcagttttcacccatacccagatgggtaacagcaccatctcggatctgtgtccctcctttaagtgaaaaaggttcaatctttggtctctgaggctgttgggttttcgtcattgaagaagaagaagggtattattatcatgtactcgaggctcatacacccccacgatgggattgtgacgcaggatgacttgcagggtgctgcttccaatctctctcacgctcacaagggagatccttgtctcgttctgacggctgatcccaagcctcgtcttcgttggactcaggacttgcatgaacggttcgttgatgcggtaacgcagcttgggggagcaagtaaagctacaccaaaagcaatcatgcggaccatgaatgtcaagggtttgactctgtttcatttgaagagtcatcttcagaaatacaggcttggtaagcaatctgggaaggatgtgggtgaaggatgcaaagatggttcatatcttttagaaagccctggcgctgataactcatctccaaagttgccaacttcagatacaaatgagtaagaatttgcattaattcataaaaaaatatttttttcttctggctgatgtctcaatggatttgaattaccaaattgagtgagtgattaattttatgcctaggggttatgaaatcaaggaggcattgagagcacagatggaagtgcaaagtaaattacatttgcaagtggaggcagagaagcacttgcagattcgccaggatgcagaaaggagatacatggccatgctcgaaagagcttgcaagatgctggctgatcaatttattggtgccacagtcatagacacagacagccaaaagtttcaaggaattggaagcaaagcacctagaggtaccttggttgatcctcttggtttttactccatgccatccactgaggtggctggagtgaatgtcccagaagaagaaataccgctgagtctcccaccccaaagggctgattgttcaaccgaaagttgtttaacctcacatgagagttctggaggattggctttagaaggatctcctggcgagggaaaaaggaggatgcttggcatggactcgatggcagcacctttgatatggagtgaagctaagatgagaactcaagccatcaatgtagcccaaggtaatcttcctcaaggaataactaggtatggcatgtagggatggaaggtctacttgatggtttatcccggcatgatatataaacctttgggctttcattcattcctttttttataggtacttgaactcttcatgtcttgtaagttagtgagacataggtggaatcaattttacccctttgtaaattcaatctactctgtgactttaaaaattgcaaaaaactagctttgactatacaaaatttgtgtgttttggtgacttctatggattccttattgttcattgattcatgctgaataaagggtgtgacgtcctttccttc

SEQ ID NO: 1629 - DNA, 1543 bp, Glycine max
  misc_feature (28)..(32): n is a, c, g, or t
  misc_feature (119)..(124): n is a, c, g, or t
  misc_feature (195)..(201): n is a, c, g, or t
  misc_feature (524)..(528): n is a, c, g, or t
gtaaaataaatttaggaagttcatgaannnnnagaacactttaaactcaatatgttcaattgattattaacatggaaagcaattttaatacatggttctatgtgtatgctagcattcannnnnnacaaaatgcttgctggctagcacttactcccaatgttgaccatgttttgttccatggatctgaatgttgtnnnnnnncgttgaagtgaacggagactagatattcataacttaatcctgtatgctaacttcatgcataagaaataacattgcaggggcaaaagttgaaagcatatggcttacttgcactttggaggagcttggcccagatttctttggaaagccactatccattccaaagtctgcaaagaagcttgatgactttggtggagacacatgactaagcaaatgtgaacctccagtgttcaactcagatgattggacattttctacatactcaaaccgagacgttggagatggcccagcaggcatattgtttgttgaagatgaaactggagcannnnnttcctcaggcttctgctcatagagagactcacttggctgcatttcattaggataattagtcatcaaatgaaaatagtgaacaagattaatgaaaaaccaaccaaccaacagggcggcttttaggccaggcttctgcaaacaaagataactaattggcatacccttttagggaggttacgaagcgccaagccccccactcttcactgctttcttagcacccaataggtttcttaacggtacttgaaattactgtatgtgaagctctaggggaagaagtgctctcaggcttttctggcttctccagaatgttttcttttggcacttcattggtcttgacttctggtagcccattaaccccctgggaagactgagaagcaacaggtgatgaaggcaagcctccatcctcagccatactttttgcaacttcctttgaaagaatttgcctatacaagtctgcagctctagatgtgtacttagcctctattttaccaccatcattccaaccatgttgcttaaagaaaacctgtgcacgattgtttcctccaaagctcattgtttttagttgctcaggactccatgagtctaaatttgtagacctcacgaagctgatgtgcacgccgagactgcggtgtacggcggagcaatcgatgcagagaaagatcccatacgtgacggacgcccaggtagggttcttcgcattgcaatcgaaacacatcttattttcagacttcgccttgagctttctgaacacggtgttcttgtcggtaaagccatcggacgccattggaagatcaaatcaaaacagaaaacgaaaacgaaaacgaaattgaaatgaaataataacgaagaatattatttttattttttgttcttattaagctttttgcgaacgaatctcaggggtgcttgggggggaacaggaacaccacctgagcaatatacgattgaggggaagaaaatttgcaggcagaaccgcaaatgttgttggtcttctcgcagccgtatatatttattt

SEQ ID NO: 1630 - DNA, 1203 bp, Glycine max
aaaaaaagggggcggccccccttttttttttaaaattattttcttttttttttttttttattttactaaaatttaaattttcttataaattactttcctcacttaaaattctctatccaaacgtactcgagttcacgagttcacccacaatctggtgtcgtctaacccaaaaaaagaaagaaatctaaaacattagcaacatctaattgtacctgttatacaaaatagaaacacccgcctatatgacaagcctgaaaatatagcatcttattttctaaaagaattgtatattgaactcttctattacatttgaaacataattggctggcatatgtaacaaactccaaagattctcttaaatacagagcatacacattttagaggattcggtcctgaagatctgtcatcaatgtggaggccagtgagctgagcttctttccagtctctcctgcaatgttcttaagggaagagagatcctgttgtgcctggaaagataatcgattgatgaggtcaccagcagtaagatcgatgttgttgtctcttgagtcaccaaaaagatcagcgctggagatggcacttgaacccgaaaacttagacaaagtagcttgagaatccacatctgcagctttgttctgatctccaaaaaattgagatgaagaaatagatttagcatttgagaacttccttcttgcttcgtcagtttcctgaatttgcactttggaggaacttggcccagatttctttggaaagccaccatccattccaaagtctgcaaagaagcttgatgactttggtggagacacatgactaagaacatgagaacctccagtgttcaagtcagatgattggacattttctacatattcaaaccgagatgtcggagatggcccagcaggcatactgtttgttgaagatggaactggagcagggggttcctcaggcttctgctcatagagagactcacttggctttttagtgagtttacgagcaccaagccccccactcttcactgcttttttagcaccgataggtttcttaacagtacctgaaattactgaatgtgaagctctaggtgaagaagtgctctcaggcttttctggcttctccagaccctcgcctccgcgcacgcctggggtcttgacttctggaagcccattaaccccctgggcagactgagaagcaacaggtgatgaaggcaaggct

SEQ ID NO: 1631 - DNA, 1890 bp, Glycine max
  misc_feature (1770)..(1770): n is a, c, g, or t
ggcaaagcctaaaggtaagccggtttataaatgtaaacaagaaaactatttcactgatagaagctgacgtaaacactcttttagagttcacgagttcaccacaaactggtatcgactaacccaaaaaaaaaaggaataaatctaaaacattagcaacatctaagcagtacctgttatacaaaatagaagcacccgtctatatgacaagcctgaaaatatagcatcttattttctcaaagaattgtatattgaaaactcttctattacatttgaaacataattggctggcatatgtaaaaaactccaaagattctcttaaatacagagcatacacattttagaggattcggtcctgaagatctgtcatcaatgtggaggccaatgagctcagcttctttccagtctctcctgcaatgttcttaagggaagagagatcctgttgtgcctggaaagataatcgattgatgaggtcaccagcagtaagatcaatgttgttgtctcttgagtcaccaaaaagatcagcactggagatggcacttgaacccgaaaacttagacaatgtagcttgagaatccacatctgcagccttgttctgatctccaaaatattgggatgaagaaatagatttagcatttgagaacttccttcttgcttcatcagtttcctgaatttgcactttggaggagcttggcccagatttctttggaaagccactatccattccaaagtctgcaaagaagcttgatgactttggtggagacacatgactaagcaaatgtgaacctccagtgttcaactcagatgattggacattttctacatactcaaaccgagacgttggagatggcccagcaggcatattgtttgttgaagatgaaactggagcagggggttcctcaggcttctgctcatagagagactcacttggctttttagtgagtttacgagcgccgagccccccactcttcactgctttcttagcaccaataggtttcttaacggtacttgaaattactgtatgtgaagctctaggggaagaagtgctctcaggcttttctggcttctccagaatgttttcttttggcacttcattggtcttgacttctggtagcccattaaccccctgggcagactgagaagcaacaggtgatgaaggcaagcctccatcctcagccatactttttgctacttcctttgaaagaatttgcctatacaaatctgcagctctagatgtgtatttagcctctattttaccaccatcagtccaaccatgttgcttaaagaaaccatgtgcacgattgtttcctccaaagctcatcgtttttagttgctcaggactccatgagtctaaatttgtagacctcacgaagctgatgtgcacgccgagactgcggtgaacggcggagcaatcgatgcagaggaagatcccatacgtgacggacgcccaggtagggttcttcgcattgcaatcgaaacacatcttattttcggacttcgccttgagctttctgaacacggtgttcttgtcggtgaagccatcggacgccattggaagatcaaatcaaaacagaaaacgaaaacgaaatggaaattaaatttagaatttgaattgaatagaattttttaagctttttgggaatgaatctcaggggtgcttgaggggaacaggaacaccacctgagtaatatagattgaggggaagaaaatttgcaggcagaaccgcaaatgttgttgtttcgagcgtttgcgtatatagtatccgggtttgtncccgtccccgggtaccggcgctcttactagcggaaggaaccgaatttgaaatgacgggattgccccccagataaatgagggaggtgttgttggcccctgggttttccggagtcggtgaat

SEQ ID NO: 1632 - DNA, 2439 bp, Glycine max
  misc_feature (27)..(27): n is a, c, g, or t
tcgagtcagctacgtaggccccccccngaacgaagagagaaacaaaaaagaaaacgagaagcatcaccgccatgatcgcatttgctgaggctaaaaagataagcaacaatcaaagcgtgtcgaatcgcaaaatatcaaatcacaatcaacagtgactacgtttcgttcctctccttcgtttcgtcttcgatcttcggtttcattctgcgtttgttcacatcatggccaccgcttcagtggcatttaagtccagggaggaccaccgcaagcagattgagttggaggaggcgcgtaaagcagggcttgcgccggctgaactcgatgaagatggaaaggaaatcaatcctcacattccccagtatatgtcttctgcaccttggtatcttaatgctgagagacctagtttgaaacatcaaaggaaatggaaatccgaccccaattacaccaaatcatggtatgatagaggtgctaaaatctttcaggcagacaagtatcggaaaggtgcatgtgagaattgtggagctatgacacatgattctaagtcatgcatggaaagacctcggagagtgggagcaaaatggacaaacaaacacattgctcctgatgaaaagatagaaacttttgagcttgactatgatggaaaacgggacagatggaatggctatgatgcatcaacgtatgctcgagtcattgagaggtatgaagctagagatgaagctcgaaagaagtacctgaaagaacagcaactgaagaaattggagaagagcaaccaaaatggtgaggatgctgcaagtgatgaggaggaagaggaagatgaagatgaagatgaagatgatttaagggtagatgaggcaaaggttgatgagagcaaacaaatggactttgcaaaggttgagaagcgtgtgcgtacaacaggtggtgggagtacaggaactgtgaggaatctacgtattcgagaggatactgcaaaatatcttcttaatcttgatgtcaattctgcacactatgatcccaagaccagatccatgcgtgaggatccacttccagatgcagatccgaatgaaaagttttatttgggtgataaccaatatagaaatagtgggcaagctttagaattcaaggaattaaacatccatgcttgggaagcatttgacaagggacaagatgtccacatgcaagcagctccatcccaggctgagttactctataagaatttcaaggtcatgaaggagaagttgaagtatcaaacaaaggaaaccattatcgagaagtatggcaatgcggccgatgaggacaaacttccaagagaacttctgctgggccaaagtgaaaggcaagttgagtatgatcgtgcaggtagaattattaagggccaggaagcagctctccccaggagcaagtatgaagaagatgtttacattaacaaccacacgactgtttggggctcatggtggaaggatcatcaatggggctataagtgctgcaagcagacaatacgcaatagctattgcactggtgctgctggtattgaggctgctgaggctgcaagcgatcttatgaaagctaatattgcccgtaaggaggctgctacagatgatcctgcacctgtggaggagaaaaagcttgctacatggggtactgatgtccccgatgatctagttctagatgaaaaattgcttgctgaagcactcaagaaggaggatcaaagaaagagagaagagaaagatgagaggaaacgcaagtataatgttagatggaacgatgaggttacagcagaggacatggaggcatacaggatgaagaaagtacatcatgatgatccaatgaaggattttctgcattaagcttggaaaggataaaatggcctgcatctctttccttagaattaaagggcaatctttctttgctagtccacgagcctttctgttatgttactgccagcagctggattgggcagaatggattatcagtttggcatccttgatcctttgacctgtagtgagaaggaggaactagggtggaactatcaaaaatgtttgtacagcttttgtgtgcttcatttaatcacttttgacttggttcaacttgaaaatgtttgctttaatagcaagtttacattttctcgacccttaaaagaggttagtttccttttttgaggggtgatgtgtaaaagaaacagcaactttaaggggttagattgaaaaatgttaactcgctgtggatgatgttagaataaatagtattagattattgtaatagagttgcaattattcaagtgcactcttggggagttcaatctagttgatattagtattatgttagttgactgagttagtgagagtttgttaatgacagctgttgacagctgtcataactaattggctagcctatataatcaaaactataatcctcaattcagctggcccaaaaaaaaaaaaa

SEQ ID NO: 1633 - DNA, 1915 bp, Glycine max
  misc_feature (1723)..(1723): n is a, c, g, or t
  misc_feature (1821)..(1821): n is a, c, g, or t
tcagctacgtaggcccccccccccatgatcgcattttgctgaggctaaaaagataagcaaagcgtgaaaaatcgcaaaataccaaatcaaaataacaagcacaattacagtgactccgcttggttcctcttcttcgatcttcggtttgattctgcgtttgttcacatcatggccaccgcttcagtggcatttaagtccagggaggaccaccgcaagcagattgagttggaggaggcgcgtaaagcggggcttgcgccagctgaactcgatgaagatggaaaggaaatcaatcctcacattccccagtatatgtcctctgctccttggtatcttaatgctgagagacctagtttgaaacatcaaaggaaatggaaatctgaccccaattacaccaaatcatggtacgatagaggtgctaaaatctttcaggcagacaagtatcggaaaggtgcttgtgagaactgtggagctatgacacatgattctaagtcatgcatggaaagaccacggagagtgggagcaaaatggacaaacaaacacattgctcctgatgaaaagatagaaacttttgagcttgactatgatggaaaacgggacagatggaatggctatgatgcatcaacgtatgctcgagtcattgagaggtatgaagctagagatgaagctcgaaagaagtacctgaaagaacagcagctgaagaaactggagaagagcaaccaaaatggtgaggatgctgcaagtgatggggatgaagaggaagaggaagatgaagatgaagatgatttaagggtagatgaggcaaaggttgatgagagcaaacaaatggactttgcaaaggttgagaagcgtgtgcgtacaacaggtggtgggagtacaggaactgtgaggaatctacgtattcgagaggatactgcaaaatatcttcttaatcttgatgtcaattctgcacactatgatcccaagaccagatccatgcgtgaggatccacttccagatgcagatccaaatgaaaagttttatttgggtgataaccaatatagaaatagtgggcaagctttagaattcaaggaactaaacatccatgcttgggaagcctttgacaagggacaagatgttcacatgcaagcagctccatcccaagctgaattactctataagaatttcaaggtcatgaaggagaagttaaagtatcaaacaaaggaaaccattattgagaagtatggcaatgcagccgatgaggacaaacttccaagagaacttctgctgggccaaagtgaaaggcaagttgagtatgatcgtgcaggtagaattattaagggccaggaagcagctctccccaggagcaagtatgaagaagatgtttacattaacaaccacacgactgtttggggctcatggtggaaggatcatcaatggggctataagtgctgcaagcagacaatacgcaatagctattgcactggtgctgctggtattgaggctgctgaggctgcaagtgatcttatgaaagctaatattgcccgtaaggaggctgctacagatgatcctgcacctgtggaggagaaaaagcttgctacatggggtactgatgtccccgatgatctagttctagatgaaaaattgcttgctgaatcactcaagaaggaggatcaaagaaagagagaagagaaagatgagaggaaacgcaagtataatgttagatggaacgatgaggttacagcanaggacatggaggcatacaggatgaagaaagtacatcatgatgatccaatgaaggattttctgcattaagcttggaaaggataaaatggcctgcatctntttccttaaaattaaagggcaatctttctttgctagtccacgagcctttctgttatgttactgccagcagctggattgggcagaatggattatc

SEQ ID NO: 1634 - DNA, 898 bp, Glycine max
tttatgaagttggtcgatatgaactcatcgggaagtcttgccttgcagtggcttttttttttttttttacaacagaagcatttaggactatttcttttaaatgatggcaaagtatcacaaacattcaaaaatattggtaatacatttagaactggaaaactataacttttgaaaaacatccattacataaaacatccaaataagatgtgcatgtgacttttatgtggttaccaagcatcatcttctcatcaatgatcatcaccatatgctctgaaactataacgttcttgatatggaccattgaaccataggtcagcttcaaaccactttgggtaccggaccaagtctccggccacaaattgcatgaaacgcttgcttccttcaggcacaactctcacttccccttcttctacgtacaccagttggtctacctgccagtcccaaggtaacctgcttttcccagtcttccacactgaccattttgaaactccaagctcggctagtctctcaggaggaacttttctttccaccttcacattgtacaattcctccaaggatttctctatcctcattgcttttatgcaaccccttcctttagaagcattaacagactttctgaaacccctggaaccattgttgacaggagaataggtaatggctaatgttgtcaaagagcttgccatgcttgatgagctccgatgttctgacttctgagttgaaatgaacaccgactaaagagcaaaaaatgatcgaagtttttaccagttcaaaagaagcgcagggttgaagatgaagttggaagtttcgcttcgtttcaaccgttaaacgataaaccctgtgacaaccggtgaggtttatcctcaaagttgaaacctttattaattaagtagacaaagtt

SEQ ID NO: 1635 - DNA, 1904 bp, Glycine max
ttttttttttttttttgaaagattaaattcgtcgaataaccccttgtattgtattggattggattgggaaataaaatacacaacaagcgacaaacagaaacattctccttttgttgaatcctagttttctccttcagatctagattgagatctccccctccttctctaatctaaccttgttttttaatattaaaaaacaaaagaagaaagagatggcaacaataattgatattcataattagagaacagcagggaaagagttgctcccatttcctaagaaaactcaaacgcaacctctcggtgcaaacccgacccgcgaacccgtcagatcatacgagatccggaaaccttgttgctggatgttaccaattatggacaaaccactcatagttccggcaaacgcgaagcagaagctcccactgttgtccaccggaatcaagtaattcgtcgccggcaaggacacgtcagcacctcggaaatgcaacaccaccgtaggtaccttcacctccgtgagcccggacagatcgaaacacgtgtcgaagagcgagaactccggcgcgcgcttcagatgcgaggccccgatgcggaacgcgtcccggagggcaatgtaggcaggtcgggtgaggcgggtcactgaggtgccggagtcgatgatgacgccgccgtttcccgcggcgtcaaggcggaagagcgaggcggagaggccgcgcaccggcgctccgccgacactgatcccgaggagctcgaggtagtagaaagtgtcaagcttagggtttttgatgagaggagtgaagtgcgcggttcgggaaacagcggaatctccgaagatgacagaggagggtttggccgaagcggaacggtcgacgaggcagtaggagaatttgtggttgaaacggcgtccggtctggaccggaaacgataacctcccacggcccaggcccaaaaggccagcagcgcctgtgaaaagtccttcattgtcgtggccacagccaagcgcgacgcgcgtgactctgtttcttcgaaacgtgagcgtttcggtggagaaatcgccgaatgtgaaggagccgtcgccgtaggaaacctggtattggcaaaccttgtttttgttgctgcaaccgggggagtctaagcggcggcagagaggggccccacaggggattccggcgtaggttcgggacttggtggggtcaaagacgtggtcggtttgggtgtaacatttgcggcaaggggcgcattggagccaaacgacgtcgcttccggtgtctaaaaccatgtagacgtatctggcgggtgtgccaactcctatgcgcgtgaagtactcgccgctgccttgtgctaggcccgaaatgatggagctgctgaaactggagccggcggatctgcgcgcgtggatttggatgaggagggcttcgactctcttggcgtcgcgttggagcctgaggtggaagagctgctctggggttttgttggaggagagggcgtctatgtggtggaggtggaggtgaagtgagagcgagagagtttcttggggttctgagagggtttctgagaggatgtgtggctcagggagggtgtggaggggcaaggtttcggtttggatttggaatgcgccggagacacagaggctgatggccagggttaggaagagaacccaattcccttcttccattcttgattgttgccaccagtctcactcagagaataaataagcaaagttcattatgacgttgcctagggtagcctaacaccctcttcctcttctgttattaaacactccacactcatttactgtcaacaatttacatactttacttaccactgggacttctgtttttcctaacaataaatgaaattatgaattttgcctccaaaaaaaccccagagcagctcttccacctcaggct

SEQ ID NO: 1636 - DNA, 993 bp, Glycine max
acggctgcgagaagacgacagaagggggcctacttcatctctcttataatcacacacacacctaccttaatagctatggaaactggaggctttcacggctaccgcaagctccccaacaccaccgctgggttgaagctgtcagtgtcagacatgaacatgaggcagcaggtagcatcatcagatcacagtgcagccacaggagaggagaacgaatgcacggtgagggagcaagacaggttcatgccaatcgccaacgtgattaggatcatgcgcaagattctccctccacacgcaaaaatctcggacgatgcaaaagaaacaatccaagagtgcgtgtctgagtacatcagcttcatcacaggtgaggcgaacgagcgttgccagagggagcagcggaagaccataaccgcagaggacgtgctttgggccatgagcaagcttggattcgacgactacatcgaaccgttgaccatgtaccttcaccgctaccgtgaacttgagggtgaccgcacctctatgaggggtgaaccactcgggaagaggactgtggaatacgccacgcttggtgttgctactgcttttgtccctccaccctatcatcaccacaatgggtactttggtgctgccatgcccatggggacttacgttagggaagcgccaccaaatacagcctcctcccatcaccaccaccaccaccaccaccaccatgctcgtggaatctccaatgctcatgaaccaaatgctcgctccatataaaattatataattatgactaggattcagaacaagacttgatgatgattagcttaactctcagtaattggtgctagagtactactgttgttgaggatactttattttataattaagggctgggaagggagttagtatattcctaatcctaactatgtgcatctttaatttatgaaatcactttgttttaagcaaaaaaaaaaaaaaaaaaaaaaaaaaaaaagcggccgctctagagga

SEQ ID NO: 1637 - DNA, 1849 bp, Glycine max
gtcagaattgtgaactacttttacatacaatcatgcatagagagagagagagagaattcagaaggaaatagagcaaaaaggaaactgttgtagcagaccataacaacttcagaattttgcagtataagcacattagcagaaagtctgccataagatgggctctcacataccctgaaaacctaatatgttaattggcaatatttgaaaggaacacaaaacaatgttgaaacaacaagctaatagacaaaacaaatgaatgttttttccaattacatactgaaaccaaaactgaatagtatcaaactacaagagcacaagtccaagtccagatggtttcaaggcactacgaatcctataattgtacaagtagtaatggagctgtccatctcccggtccaaacttgagctctttgaggaaactctcattgtgcattacatccaatgcattgaaaacatcaaaatccttttgctttgctacaatcagcacatcattcatcaactgagtcagtggagttttggtggagacattataataagaataagcagctttcaaaattgagtaattttgatttccaaggatggaagaaggaagagtatagaagctgcagaagtctgtgatctcatgattctctggactctccaccaagaaactatccaccacattctcattgggaagaagccaatgttcaacatcattttcatcaaaatcaggtgcaacaacaaactggctcaagtagttcctaagcagccgagtaacagcagggacatcccgaagctccattttcctgaatccaggagtaaccgttgaatcaggcaatttgtaaagttttatagtgcggctcatcgtcatcctagccccaagccttgaaaacccaacatcaattagcttcttcggattcaacgatcggtgccaatactgacaagtcgtgattggcgttggaagaacaactccagccgtataggccgcctgccaaatattctccaaatgaaccctcctggtgacttccttgatcataacaggcgcaagtctctttgacctgagcttcttatgaacacacaagaaattgatctcagccatcttcacaacctcctcattaaccctgatcctggcggggatgccactgatgaaagcaaccaacttcttcgatgtcttggctctcacgccaatgtgccaactctggtaatagccaggaacccgcaaagcccaacttagaaattccttggaatagttgaacctgaacatgttctcatccccttctgccgtcttctccctgccctggacataaacttcatcacagatttcctcagagtccatgtcacatgttgtccactcataagcattaggaaggttgtaaggctcctgcttgacctcagataaaggagttgggggctcaatcgggccctcgggcaaactggagtccccaacatccttgtattgccccacaggctgagtttcccagaacttgtgtctcttaccaagagacattgaatcttggaaactttgaacaatggtttccaatgtcgcgttattggaaaccgccgagtctccgtcaacaagatctggttttgcatttggagacccagattgaacactgctatcacccattatcagttatataaaaaaaaacccaacttgtgccgggcgaaaaaaaatgatttcgatctaaggagtggcgagggtgaattggaataagggttacttggtgggctagcgaaagtatctatgcgatgaagaaaggggattccgagatgcgtgtggaaagaagcattggggaagacgaaggtgcggcacgagtgtttttattatcggctacttctccctcgcgacgggttaaccaatgactcattct

SEQ ID NO: 1638 - DNA, 1825 bp, Glycine max
  misc_feature (228)..(240): n is a, c, g, or t
  misc_feature (289)..(293): n is a, c, g, or t
tcttaagttacacatcgtgtcttaaatctgatattttaggaaaatcccatcatcccaaatgcatcccggacacaaaacttacctaatccgtaataaatttaaagaagccattaagattaacggtgagggatttaaatggtttatacgatataataacaaactcaacctcgttacaacattgtaccctaaaagcacattgtctgccgggactagacaggcatgggtttnnnnnnnnnnnnncaaccttgtcaaccaaataaaacaagacattgcgcaggagaacccagcnnnnncttctttcaggaaactgattctattctatgattttattgaacaaatcaaactagaataaacaggtatagcgctggacatcaaatatctgcattcttctgcagagtcatcatcaccaaggcccctaacctaatcaggaagggagcatggaaaattgggggcacatctatattacaatgtacagggaaggaggggggcgagggttaggtacaatttccaactcaacctaagagcagtccactaaaaaggactccatgctaaatcacaaattacaatattttctaagattactactatgtcaaacctgcacagtctcaccaggatgaacggctagcatgatggcggttgaagttgcttaagccgccgtacaacatgtttcattgaaggtctggttgagagagagtcaaccgtacacacaacagccaggtgtaggacctctaccaaatcatcttcaggtcctgcatcccataaagccgccggcaaagaactcttttgcctggccttgtcgcagtagcatgcatgcccatgctactatgttgaaaccattcccatatgacgaaaatgaaggatccaatgccttcttgtcagagagtaactccagaagcaccacaccatagctatacacatcagccttgtcggaaacacgacaagtcatggcatattcaggagctacatagccaaaggtccctgctacaccagtggtagcatgagtttctgaggttcccagaagtctagccaatccaaagtcagatagataagcattataatcatcatccagcaagatattactgggcttgacatcccgatgtagaactcggggtacacactgatcatgcaggtatgcaagtgcacgggctatatccaatgcaatcttgtgaagaatcctccaatccactgcccttgtggatctctcttggataaacttttccagattgccacctggcaaatagttgtatatgagaaacatctcagtctcgctggcatgataaccaatcagagtgacaagatttggatgacgaagccttccaagggtcttaatctctgcatggaattgttgaacaccttggaatcgtccaactgccagacgttttattgccaccaagtttcctggtactatctctgccttgtaggttgctccaaatcccccattcccaatgcagttgctagcattgaaatttcctgtggcccgaacaacattttcaaatgtcaatggaaccccaatatcagtgaacactgtaacttcttttctcatagacccaacaaccctggacctaggattccacttccgtgtataaataaaaaggacaattagggctagaagaacagaaacaatggccgatgcagatgttatagatgctatttcaatagaattgaaaccattcccaccctttttgcctgtaacttctggtggtgcagcagtataagaactggaattatcaacctgcccttggtcagctgatggcacagcaagagaaacttcattgcaagaatgtaaaaacgcggacgcgtgggtcgacccgggattccggaccgg

SEQ ID NO: 1639 - DNA, 845 bp, Glycine max
caagggtttgttaaattgggcaaaccaaggaccccctttttttttttttttttgaaagaaataacaatatcgtaatccattttcttttcaaagccagaacaaggagatgatggttaattagcaataaagccgcacaatatctgaaagcttaacataaaaggtaacataaataaacttattaataaacatatatatatataaatatattttgcacgctaaccaccacggcgaccttgtttgagaataaaatcagagttccttgacttgcacaggctcagcggtatccggcacgcgcttagtagtgtccttagcctcaggctcctcctgaatctcgaaagcggagacaggaaaagacctaaataggccggcaggggtcttgaaggtgattttgccagtgggagggtcatcaacatagatatcactgagcgtgatccagagcaagagctccttggtcttaaccccggtgagtttggtaattttaccttgttggacatgagcagttacctcgggcgcgtaggagacaagctttccgatcttgtcgaacttgtgggtgtaactcttcttttgtttgagccagacgaagccggtttgtctgtcgtagccgcactcctccatgtccttgaggggaagaaggccgttggggagggcgatttccttgagaagctccttggacttcacttggcacatttcgtccccgtggtacacctctgatctgctcttcacatcttctgctatcagagacgacatcttgatgatgaatctaattcactcgtccaagctagagagagaaaccaatgcctagtttccttttctgtcgtcttctcgcagccgtacggacgcgtggg

SEQ ID NO: 1640 - DNA, 856 bp, Glycine max
ttttttttttttttttgatacaaggctaatgtgcccatcacactgaataatattggaatacatgaggacatgtaaaaaaagacattacatagtatatcacatcaccctatttgggtattacatggtatataatattcctttggcattattacatacttgtgcttagcgtaatgcatggcaaatatgctgatatggcttggtaaaaacaaaaatatgttctctgtttctcatgtttggtcaatgtcttggcattgagctatacacaacaggaaaagaataccaacattttcaccttgcctaagcacatccttcaaaattgtaacatatatcaatcataaataagcaaaagcaaaaacaacacgattatctcatcttctcatatccaggaaaaaaaaaccatgtacaaacttcaacacttgcaattcttttttttttttttttccattcaggaagacatgaacatgatcatcctcatggcttctccgaacgcattccggaacagccactagagcctagcgtgtcatagttcacgaatctgcttggagctgagttatgcctatacccttttggcaagcaattcttgacttgtctcccttggaagacattttgttcgtgaccaagatgtggcttcaaataagtttcagcttctgatagaaattgaggccttgtaactgtgctaggagcactttggggaatgatccttgcagccatggtcatgtgaagggaatttagagataggatgaggtaaagggacagaagggagacatgtgtagtagtagacatttaatttttattttttttgaactttgtatagtctatggttttaatttgtcccggaaagaaaggagggaggggt

SEQ ID NO: 1641 - DNA, 1385 bp, Glycine max
  misc_feature (1094)..(1094): n is a, c, g, or t
atcagcaaggcatgtgaaccttatttttctttcttgttgtctctgttctttttcttctatcaatatccatcaccaatcatggttgaaacttcttcaactgtcactagcaaggtaaataaatacgatccaaccaaacaaaataccaatctctaacctctctacagtaccaaatacaaagaaatgctgttcaccataaaaatctcccctaccaaaggtcaatatttgataaaatcacttcaatttacattttacctgcatcatgcgacatactaacgctacctaccacacaacctacagtgttgtacaaagccagaatgaagcaaaagtgggatatccaaggcaggtattattgatcttgtgacatacaatatagatctccactgtctaaggtatcgtcgtctcagtagtttaggatgtcctatctgatgaggtttgatcatttttattagaattaagattgatattggattgtgatttgtcagctgatgtcacatcatcatgctgattctcgtctttctttgaattcagaaaccgaccaccacatcctcttggtcttctcagtgcatgcttgtgtcgagattcatgcaagtatggcttcctattccttataactttattttctgattcagcttttgcacgggattgtctacgtcttaatataccgtggtattgttttgcattgacaaacacaggctcctcaactgcatcagttggcagaggaacaccagcttgctgaattcccattaactgaagatggaccattggctgtccactataggcttgcgggggataaggttgtgtatcatagggagcaaagatgcttctatagtaaggatctggatatggatacacaggtggtaccattgcatgcccagttccaagctggccaggtgttgcatactgtacattgacattctgggtactaatatctggatcagaaattccatttgcagaaggggactgaatttgtgattctgactgctgctgtccatcatcttcattatcagtaaggtcgtgagcagaggtcatgtttcgtgaagcacgtaacactgtccaaacctggaaccagaacagagattgttaacagaatttanaagtatttcaggtacatgcaatacagataaaaaagagtgatagaaagagaaatgaaaacaaaaacagcagaagccaactgtatatacatttatagttcttcaactgaatatatattggctatacaattatgataatatatccacaaagccagaatatagagagacaaaagaacatatccaagtacatgtgagtcaagggtgaagaaaaaatttcacatcccaagcacaaagccaaaatccacgttcattctgattaataaaaaaatcgggggggggggcctacgtagctga

SEQ ID NO: 1642 - DNA, 1001 bp, Glycine max
ttttttttttgaagaaacagtttataatacgagaatttatgacacaagtgtttaactaagaataaagtacgagaagagtgtgcctacatttttacagcagtgatgaccaaggcaggaggatttctttgatgcaaagagttgtgggtaccattaatgaaatcatggagataccatgaaaatatagaactatttgctgatatacctttaccatgaaactatgttgagttcgtgcagtagtggaatttcaacagttaaacatagccgttttccaggcacaattggattttgtagaagcattcacttggccacagactcaaaataatgtgcaactttatacaattccatgcgagtccaacctagtctgagcataatatctaccttagcaagcgaaattaacccgattatcctatcgttggaaccatgaaattgtacgagttttaagccaaatcgcgaatttggcatcctgttgctctatctaggcaaacggctaaccacagtactcatcaatttttttttttttttttttttttttttaaataaaataaaccactatgggcaattcatttcaattgtgctcaatatcaaactttcacatttcgtaccaatttaaaacaaaaatgtcctcgtaaaaatcaccaacatataaaaccaagccacaaaatctagagcatcaggtaacaaaaagagaaacaaacgcatgctgccacactcaacagctctacaggtcttgaacactcaaaccgggaggaagagattgcttcaacttatcggctttctcagggtcaaagacacaaagcgtgtacaagtacttggagcatcgaaccttaaacttaacgacatccctgctcctcttgattttcaccgacctcgcatccttcctccgcgccgtcagaagaaaatccttaatctcgtggatctgcttaggcattgtggtttgcgagttgtgacttgtgacgacgacgaaagaacgagcttccttgggcacttcttcaatatgtcgg

SEQ ID NO: 1643 - DNA, 1002 bp, Glycine max
tttctttattttttttttaatatataaaaatatttatatagcattgctcagaaattaaattatttgcaatggaaggaatgagctttctctggatacatcagctagaaaaggaaagcaacaaacagcaaagaaaacaaacagaacagaagaagaaaaagaaactaagaactctatgtaagagatgcaacccatacataatctggcataaaaaggaataaggtttgtttgttctatttagtctggcaattaaaaatttatttattacaaccaaaccattcatttagtcttacacttgtctctcactcactcactgacagagagcacatgatgttttttaagggccagtgatgcctcatccggtgctgatgatccaaatttctgaaactgaacccttaatatattctcctcagacaccaccaaacgcctgtttccatcatcatcgaaatgaatcccaatatgcccacatttgctttcttcgccagctggacagaacaaaagggtatagtcgttatggaaagggttagctttctcaattttaaactcaccaggcactgtgttgtcgtacccagtgagtttaaccgcgggtgattctggtaaaccctccacaatggtccacttagaaggagtggtggcgcaccatggcacaatacggaacaggatgctgaagagttgtccttcgccgatgaaagggattcgtaaccgggacgataatattgctggaaagcccctcccgaagagagtctgcacgacagtgagagggcaagtttcgtttccagtggcggcgaattctactccgccgccgggtcgaaaaacggacaagataaagtatgtgccaggattctgaagaatatcaccgtcggtatcgaccaccgcggtggttgaaggtaggtatgaggtggtgaaggcacaaagtagaaagagagcagagaagatagtattcttcatttttatgggaggctatggaatgctttatctttcttgttcagtttgttcggctcgaga

SEQ ID NO: 1644 - DNA, 1270 bp, Glycine max
ttcttctttcagagaaaattgatggaagataacataaaatccctaaaacttttggggaagttgcggctgtttcaccattgacactattgacagtaaccagtaacattaacatacacatgaaaataactaacttcccgtacttcatcagaaaagaagaatttccactaacaaaagctgaagtaccgttcacacttaaacgaattgtacacagatataagtttgttattttcgctttaatttttttgaggaccttccactttccacctttctctgtgcagcttcaaattcctcttcagagggttctggcatttgacccccaccatactttgaaattagagatgagaacatggaatcaaagtggtctttcctctcatgtttgcgttgtgatatgatagcataaagctctttttctggttgcttctttgatgattttgccctccttcttaagggactagttggtggcttgatttctgatattttctttgtccatttcttgtaggcttttgtttcctttagttctccagcagctataacctcatcaataatatccttgaatcggtgtgagtcaagtttaggatctgaacaaagcattgaacagaatagcctgttcatattaccgttgcacttcttgtacagatcaatcaaatcatttttctcaatgtcagaccccctatagtttgcttcaaattcctcaatatcagcttcagtgaccttcttgtacattgctctgaaatattctttaagattctgaacaacatcccctgcaagttcagcatcatcaacaaaaccagtctgatcataaacggcccgtttttcttcatccccaagaatagcaataacgttttgcaattgctgaaactttgctttagcttcctcatcaccagggttcttatcaggatgcagcctcaatgccaacttgtagtatgccttctttatttcctgttgagatgctgttttctccacaccaagaacctgatagagagagttttcgtttttatcgaaggggttggtatcggattcgatttcctcgtcttcggaaaccctacttctcttcttcttcttccccattttcctaactcagtgatattagttttgctttggtaagtttagtttaatagcttaaaccaattttgtgggtataaataaagcggtaaatttaaagggaaatattaaaaaaaaaatattgagatttggcggttcgtcaatttgttcccgctattcgcttccggtcagtctttttcccgccccccttctgtcgtcttctcagccg

SEQ ID NO: 1645 - DNA, 926 bp, Glycine max
ttttttttttttttatctgagtgaaagtaatatccactaatattatttagagtagtgcatgaacttcattgttttgcttgaaaatattacctgatcatattaccacataatagtcaacaaaacaacaaggacaaatattatggcttacatacaactcaaagaagccattgaacaacctaattctttgtctcctgttgaaggaattcacattccttagtaggagcacacatatcacataagccatgaaagtgaaagcctaaattctcagcagtgtacaaccaagaatggtaccaccacaccgtgtcattggagctgcttggcgccacgtcggtctgtcgctcgcaagtgtaagaacatcaacatcagacagtggcttgatgtcccaattccacctgtcagggccaatgacacctccaatcacatataattcatcacctaaacctatcattgcaaatccaattctccttcgaaactcggaagctgaacctacaaccttcctcatttttttgtcttgcttgatgattaatccatagcttattacataaagggcatccctgataactgccatttgaccatggagccacccatattcctcaaccgtccactgacctgcattgtctaaaacttgcaccgttgacatatccttgtgcagtacatgcacctttcctccaatcaccactcctgaacaggctgaattatgggtgcgatgaagatcaggcattggaatccaaacatctttctcagggtcatacatttctgcttgagatattgactttctgcagctagtgaagcccccagccacaactatttttccattcataacacagcatgcaaacatagaacgggggacgagcattgccgcacggggggacccacctgccgtactactgggtcatacgaccagacttcatttgttgcaaaacaac

SEQ ID NO: 1646 - DNA, 810 bp, Glycine max
ttttgtttttctttaatgctgctgtagtagaatgatattccccaccaactccaccagatagtgaaaagttttactttttacagtaacagtggccaattcaatcacttaccattcacctattattaggactttccttttcacaataaataaatgaggtgtaagtccagttccttccttcttgagaagttcttagaagccacattcatcttcatttgatgtggatataagcagaagagggaatttgcaaattcaactctagcttaaacacttccacagatgtctcctttcaatacagtaaattgaatcatcaaataatttaagatcccaaacacaggacaaacttcagtccgtcagattaatgcactgaaccacaaaagtcgatctaagtaaaatgaaagagacaagatgtgaaagtcgcgtaatcgatagggttcgtaaacgaggggaatgaatgcatatgagtagaaattagggtttcgaaaaatgaaagggagtggttaaggaaaagatagcagcccttagtttgcgctgctcctccttgtaaatccggtttcgtcgttgaaactctttggaatggtggaggcactcgaggtagtcttcgcggagaaaagcacagtccttgggctcacggcagcgagacatgcactcgctgaaatccatccagaaatcgtagcagcgacctttgtttccggtaattccccagcccgacgccatctctctctctctctctctttctctttcgctgtttctacacccaatttctcctctcccttctgtcgtcttctcgccccggctcgaccgattccgagc

SEQ ID NO: 1647 - DNA, 714 bp, Glycine max
ctaaaagaagaaaaagatcaaattgattttgatgtatttttttttagaaatagaaatgtagtccctcactcttcctcacaatcaagatttgaatctgttgatctttttcatttagagaatttcaatccttttaacccatgtttgcatctcaaagacatttaccaaattcactcagcaaacttatagtgaaatttgcagtcctaagttgacttctgaatttattgcacagggaaaagaagcccgcaacatcaaaagtataaaatatgggctcacagaacatgcaggaataccgatccaagcaaatcacaaacattttatcaaaataattgttcagaagcttagattgaaaattaactccaggttctaatgatgatgttcattaaccccatcctcctggcctttcctggtagcagcccttagtttgcgctgctcctccttgtaaatccggtttcgtcgttgaaactctttggaatggtggaggcactcgaggtagtcttcgcggagaaaagcacagtccttgggctcacggcagcgagacatgcactcgctgaaatccatccagaaatcgtagcagcgacctttgtttccggtaattccccagcccgacgccatctctctctctctctctctttctctttcgctgtttctacacccaatttctcctcagctctctcgttgatgtgacaaattgctcctaaaagaggaatatttcat

SEQ ID NO: 1648 - DNA, 1338 bp, Glycine max
ggcgggtctgaggtgggtccaaatcaaattgtcatcgtggccagatcttggacctgacttgcacgcacacgcactctccttcattccttcacacacacacacacaaacataggcacagacacagaaaaaatagtgatggaagaacaagagtgccaagttgtggaaaataaggaaactccaactcctcctgttcgagtctatgctgatgggatttatgatctctttcacttcggccatgcccgttctctcgagcaagccaaaaaactgtttccaaacacttatctccttgttggatgctgcaatgatgagatcacacataagtataaaggcaaaactgtcatgactgagaaggaacgctatgagtctcttcgccactgcaggtgggttgatgaagttattccagatgcgccatgggtaatcactcgggagttccttgacaagcatcaaattgactatgtggcacatgatagtcttccttatgctgatgcaagtggagctggaaaggatgtgtatgaatatgttaagtctgttggaaaatttaaggaaacaaagcgaactgatggaatttctacatctgatatcataatgagaattatcaaagattataatcaatatgtaatgcgtaatttggaccgtggttatacaagaaaggagctaggtgtcagctatgtcaaggaaaagaggttgagaatgaacatgggacttaaaaaattgcaggagagagtgaagaaacaacaagagaaagtaggaaagaagattcaaacagtgggaaaaatcgctggaatgcaccctaatgaatgggtcgaaaacgctgatcggttggttgctggatttctcgagatgtttgaagaaggttgccacaaaatgggaacagcaatcagagacagaatacaggaacaattaaaggcacagcagctgaaatctcttctttatgatgagtgggatgatgatgaattctatgatgatgatgatgaatactacacagactaaagtgacaaataaactcgtgtttctaggttccgaacattcccataagtaagctatcctttctgtaatgacaatgtttattcgaatgttactagaaataaagacagtggataagtcatacatatgcaagatggtttgtaaattatttgccattgtacatacatagtttgattgatatctatttctagttaaaagagaaggtagctttgagagtaacccggtgggggcagacttcaactaatcatgtttttattttacttttttttcggctatgacaaggttttcttcacgaggaaggaaatcacatgacaagtttttttttttttttttttcaaatgttaattgttaatt

SEQ ID NO: 1649 - DNA, 1650 bp, Glycine max
tacggctgcgagaagaagaaaaagaggtggtgctggcgatggaaactatgctcacaacaagtgacagagacagagtagaaccaaaagattcataataactaacattagaaactaggtgaaagtaactgcacagacacacaacacatcttccttaatttctccgtccatttccctcccataaataaatctttcatttccatctttcttgggtgatccaatggcgacccttttccagggattgggagttgtgaacccatcattggcttcttcaaactccaacaagttccatcttccttctcgtacatccctctcagagaggaaagatggcatttttgtggtcagatctgatgcaacaagggtaagcagccaggttctgaaggctggagctcgtaagcatgaattgttagttactaatgcagttgcaacaaaggaaggccgtcctgcggcttctacatcaaaatctgggcatgaacttctcctttttgaggccctacgtgaaggtttggaagaagaaatggagagggatccttgtgtatgtgtcatgggcgaagatgtaggtcactatggaggatcctacaaggtgactaaaggtcttgccacaaagtttggggaccttagagttttggacacccctattgctgagaactccttcacgggcatgggcattggggctgccatgactggtctgaggccagttgttgagggcatgaacatgggattcctacttctggcatttaaccagatctctaacaattgtggcatgctccattacacatctggaggccagttcaagataccaatcgtcattcgtggacctggtggagttgggcggcaacttggagcagaacactcgcagcgattggagtcgtattttcagtcaatccctggaatccagatggtggcttgctcaaccccttacaatgccaagggcttgatgaaagctgcaatccggagtgagaaccctgtgattcttttcgagcatgttttgctttataacctcaaggagagaattccagatgaagagtatgtattgtcactcgaagaagctgaaatggttaggcctggggagcatgtcacgatattaacctattccaggatgaggtatcatgtcatgcaagctgctaagacactggtgaacaaagggtatgaccctgaagtaattgatatcaggtctttgaaaccattcgatcttcacacaattgggaattcggtgaagaagacacatcgtgtgctaattgtggaagagtgtatgcgaacaggtggaattggtgctagtttgacagctgctattactgaaaatttccatgactatttggatgcccctatagtatgtttatcctctcaggatgtgccaactccttatgctggaacattggaggaatggacagtggttcaacctgctcaaattgtgactgcagtcgagcagctctgcaagtgatttctacaaaacactagcaattaggatatggtttttggtaaagctattgtgcttgttaaattaagcttgaattttcattataattttctcttttcctattatttctgaagtctaaagcccataactttaaattgttgtttaatttccgatattcttttgcgtttttttatttataaaaagagtatttagaactgccaaaaaaaaaaaaaaaa

SEQ ID NO: 1650 - DNA, 1575 bp, Glycine max
accaaattgtgttctttaatttctccgcccattgcattttgcatttccctcctataaataaattcccattctttccgtctgtatcttcattttcatttccatctttcttgggtgatacgatccaatggctgcgacccttttccagggattgggagttgtgaccccatcattctcttcttcccactccaacaagttcatgctttcttccctctcagagaggaaagatggcatatttgtggtcagatctgatgctgatgcaaggattctgaagactggagctcgtaagcatgaattgttggttactaatgcagttgcaacaaagggagccagttctgcggcctctacatcaaaatctggatctgggcatgaacttctcctttttgaggccctacgcgaaggtttggaggaagaaatggagagggatccttgtgtatgtgtcatgggtgaagatgtaggtcattatggaggatcttataaggtgactaaaggccttgccccaaagtttggggaccttagagttttggacacccctattgctgagaacgcctttatggggatgggcattggagctgccatgactggtctgaggccagttgttgagggcatgaacatgggatttctacttctggcatttaaccagatctctaacaattgtggcatgctgcattacacatcaggagggcagttcaaaataccaattgtcattcgtggacctggtggagttgggcggcaacttggagcagagcactcgcagcgattggagtcttattttcagtcaatccccggaatccagatggtggcttgctcaaccccttacaacgccaagggcttgatgaaagctgcaatccgaagtgagaaccccgtgattctctttgagcatgttttgctttataacctcaaggagagaattccagatgaagagtatgtattgtcacttgaagaagccgagatggttaggcctggggaacatgtcacgatattaacctattccaggatgaggtatcatgtcatgcaagctgccaagacactggtgaacaaggggtacgaccccgaagtaatcgatatcaggtctttgaaaccgtttgatcttcacacaatcgggaattcggtgaagaagacacaccgtgtgctaattgtggaagagtgcatgcggacgggtggaattggtgctagtttgacggctgccattaccgaaaatttccatgaccatttggatgctcctatagtatgcttatcctctcaggatgtgccgactccttatgctggaacattggaggaatggacagtagttcaacctgctcagattgtgactgcagttgagcaactctgccagtaattgctacaaaacactaccaattgtgcttgttaaattaagctagaaatttttatcatggttttctctttaccttttatttctgaagtctaaagcccataaatttcaattgttatttaacttctgttaaactttgcaaaaaaaaataaattattaaaagaagaatatagtagctatggaattgcactgctgctaaatattcacctgcacaagacaaaccagctgtaaaaaaaaaaaaaaaa

SEQ ID NO: 1651 - DNA, 1189 bp, Glycine max
tgaaggtatgttaacttacttatatcagactcagttatacatctctcttttccaacttggaagtcaagttctgctataactttttccaatacaataggatttctcaatatcaaacatactgcccatgtaagagtagtagtgattgattcagttcctcctgaaattattgtcagtaaattggatttgatgatggtatccgcatctatgccataaattgtttttccatcaaacaaggaaagcatgacgtccatgaagtcttgaattccatcaacgttgttctcaccaaaagccctattttgtttgtgctcctctaaccactcaccaaaaatctcatccaaatccttggcagtttccttcatggccttctcatagccaccaaaatcaaaccatctcaagaaaggaatagcatctgccaccgtgaacacccccatcagacgcatgaactccttcacagcctccacacatctctgagccttctcatcatccatagttctagcaccgaaaagtcgctttccgacgaccattcgaagaaccatgttgtatgtcaattgagaaaaccattgcttcagctccagcaacgcatagccagactcattattcttgttgcttgaccaaacattgaagagctctttgatcgaactttgaacttcggagacacgaacattctctagttgctctactcggcgattggagaggatttctaagtttacaatctttcttagttcgcgccaataaggaccatagggtgcaaacccaaacatggcttggttgtagcacatgagttcaatggcaagaagcttggggcgagacgaaacgacgatgtcgtttttggtgaagcattccttagcaatttcccagttgctgattaccaaaacctttttgacaccattgttgatggtgaatatgggtccatacttatcagccaaagcacccaaaaccctatcaggtgtctctgaaccactcaatagtggtaggtgaccaagtattggccatgcacctgcaactttgggagcctcttttttacctaatgcaaatttgaagggattatacaaaaacaaaaagaagagggttagagaaagaactccaatggcagtggcatttaggtaatttagaacaaactccattttagatagagaagattgtttactatagtggctgcgctgcttctacagggcgggcggggtcatcc

SEQ ID NO: 1652 - DNA, 593 bp, Glycine max
ccacacaatatcacacaccaacacctccttaatatccatcactgcctagctagctagctcgcacatttaattatattacacatattttgctagccaagaaatactatcattgaatatatggggagtgtagattatgagtaccctttaggcatgaacaacgttgagagagtgcaccaagtggaggttccaccacctcaaccgtttttcaagtctcttaagtactctttgaaggagactttcttcccagatgaccctttgaggcagttcaagaacaagccagcttccaagaagttcatgcttggccttcagtacttcttccccatcttcgaatgggcacccagatacacctttcagttcttcaaagctgacctcatagctggcatcaccatagctagcttggccattcctcagggcatcagttatgccaagctcgccaacctccctccaattcttggactatgtgggtagttcattcatactcatcatcaactcttaattataagaagttattacatcatataagataactatgtatctattatcttgattattttttttattagtatgacattgatataaaaaaaaaaaaaaaa

SEQ ID NO: 1653 - DNA, 1318 bp, Glycine max
gacaaggttgaaatgcatttatagggatatattgctttaaagaccagatattttcaccgtgaagaacgcaaaaatatctcacttaacatcatcaaacaactaaacacaacatcctgtctttttaaaacacaattaggaaaataattataatttataaggcatacagcacgtaagaattcaaccgaatcagacaatttctgtttcttttcttatgcctacaaattggtagatccttataataacaatttgctttcgactttcacgtttcaacttcacggtcaaagctcattttcttggctggaaactacttctatgcctcattacatgaccttccttctggacataagcccaagaacctcatcccaaagcccaacacttcccacactccccagcccaaccacacttgggctacaagcagccacagtccaatacccagcccttatctcatctctcaattgctccttctcccacccacaatacccgtcaaagaacctaaaatccccaagcccaatcacattcctcttcaccatctcagcagcacaaccaacactttcctttgccccataatacaagcccttcatcacttcctcaaacaccccacttttccccaccccatcaccaccaccaccaccctcttttgggctcaacaaaaaaagcccttcctccaagggccccccaaagaacaagggactattggaaaacgtgccctccacgtccagagccgttgatctagtctccttgattgacatcaaggatggacgattcaggatgatccctgatgggcctaagggcccagttgacagcagaaggatcaccgttcgttcgaaaatatggaccccatcaagcttttcggtggcaattagtatacaccccttttcgggctcgtggattacgtgggcccatttgtcaccaatggtgatcagtggagggtgatccacaacaatgtctagatcgttcaccgaagaaaaagaaacctcctcaacaggccttgtcaattgttctccagccaccagttttgctcggaaagatcgccaatcaccacttagggtagatttttcatcatcatcaaatggtgatggtgatgacatgtggcagcatgatatgggaagtggaattctagcttttctatagtggaaatgttgagaagatcgtttggggtgtggtagagacccgtttctgattgtggggatgagttgatcagtggttttggtgaaggaattgtgggagagaaaacatgcttccatgttagttgagttccttgtaaatgcagataggtggtgaaatgaaatgaagtgacgagagtttggtggaatgtgta

SEQ ID NO: 1654 - DNA, 2021 bp, Glycine max
cccacgcgtccgtacggctgcgagaagacgacagaaggggagagtggagtaaaaaaaaagagcagtgtaagaaattagaaagggcgaaaggcgcactttatctgaaagcaaaaaccctacctagggtcaaccgtgacgccacaatcgccttcggcatctttgcaacgggatcaggtgctcctcgtccttcacgatggcgggaactgaagccaaaaaaactgaatccaaaaaacctgccgctaagcaatccggtgcgaagaagaaggaggtgaagaaggaaactggcttaggtctcacgcatcggaaggcggagaacttcggagagtggtattccgaggtggttgttaatgcggaaatgattgagtactatgatatttccggttgctatattctgaggccttggtcaatggcaatatgggagatcatgcaagagtttttcgatccagaaataaagaaaatgaaaatcaagaactgctacttcccattgtttgtatctcctggagttctgcaaaaggagaaggaccacgttgagggttttgctcctgaggttgcttgggtgacaaagtctggggaatccgaattagaaattcctatagctattcgtcctactagtgaaacagtgatgtatccctactactctaagtggataaggggacatcgtgacttgcctttgaaacttaatcagtggtgcaatgttgtaagatgggagttcagcaaccccactccattcatcaggagtcgcgagtttctttggcaagaagggcacactgcttttgcaacaaaggatgaagcagatgcagaggttcttgagattctggaattatataggcgtatatacgaagagtatttggcagttcctgtcataaagggtaagaaaagtgagcttgagaagtttgctggtggactctacactaccagtgttgaggcatttattccaaacactggtcgtggtatccaaggtgcaacttctcattgtttgggccaaaattttgctaaaatgtttgagataaactttgaaaatgaaaagggagagaaagcaatggtctggcagaattcatgggcctatagtactcgaactattggggtcatggtgatggttcatggtgatgacaagggattggtactacctcctaaagtagcatcagtacaagttattgtgattcctgtgccttacaaagatgccgatactcaaggaatctttgatgcctgttctgcaactgtgaatacattgaatgaagcaggtattcgcgctgagtcagattctagagataattattctcctggatggaagtattccaactgggaaatgaaaggggttcctctaagaattgaaattgggccaaaggatttagcaaataagcaggttcgcgctgttcgacgtgataatggtgcaaagatagacattgctagtgctgatttggttgtggaaataaaaaagttgctcgatactattcaacagaacctgtttgatgttgcaaaacaaaaacgagatgaatgcattcagatcatacacacttgggatgaatttgtgcaagctttgaaccaaagaaaaatgatcttagctccttggtgtgacgaggaggaggttgaggctgatgtcaaagcgaggacaaagggtgagatgggagcagctaagactctttgcagtccctttgatcagccagaactcccagaaggcaccaagtgctttgcatcaggaaagcctgcaacaaagtggacatactggggaagaagttactaggctactggctgttgattgtggtattttctggaattaatttggtatttaatggtaccttgtacgaatttgtggatcacacagatattagttttcttctcttgggaatatttttcaactgatagttttactttgatttttatatggtgcaatatttattttggattaaaagatgagtattacatttgttgccgtccaattattgttggggagcgtattggactcttggttgtgatgatccaaaatttcggataaaatttcactcaaaaaaaaaaaaaaaaaa

SEQ ID NO: 1655 - DNA, 743 bp, Glycine max
tcgcactgcacgccgtacgtaagacttggaatgcctctagagtcggccgctctgtttctttttttttttgctaggaacaaaataaaacttagttaattataattataacattcatagactacgcagtctaccttaactaatcaatcatacatttctaaataaacttaattctagagatagattgagcataaaaaaaatactaataataatttgacattttagtagaacaataagggacaaaattagtccaaacccggtacctggtcccttggcaagtggacctcatgcctctaaataccctattttcttgttattggctttcacacttttctcttcttagttaatgcataaaacaacagtatcgatactttatctccctggttgactttttcaggtcatctgaagacatatcttggactgcatcactgtttaattgcttgttatcatatattgtttggtccagagttgtcccatttttcaaagaatatgaatcagcctggtttgcttccattggtcttgaaagattctgctctggtgaagctggtactactttcttatagtttacttccttgttagcatttgttcctgtgtgtctgaagctttgtatcgtcccaggttcttctaaattttcctccagcatattgctgcttgatactttgacactaacctcatttttcaaacatacttcaataacttttgcagaatctgaatcacctgtgccaccattttccatgcagtggaac

SEQ ID NO: 1656 - DNA, 1530 bp, Glycine max
gcctgcagcaagtatctccattcacgtagacactcaggttcagctgataacccttgcacaaagcaagaaacaccaaaaaaaataccaacatgttttgctttttcttccttcttttttttttttttttttttgaatcggcgaaataaatgatatataactaataaatggtacaggggtaccaaaaacccttttacatcagattcaatagcgaagcatatgcctgcaacaaccccacatggttataatgtatttatattccaagaagccaatacaaaataaagtataaccttaactacccccactttatacccctgcaaaatagccctacaatgacaggttaacccttgtgcacagtacacaagtttttcaaacttatgcaccatttgattctccttccttcaaggaatttaatttttcctcgcagactatcttcttggctgtgtccttatgagcaccgccatccttcaaggaattcaaaatttccttgcagactatcttcttggctgtgtccctaagagcatcacctttatactcgtacttgtgaatgatcccatcagcttctacctccattctataataagtcagaccatctttgcgggacacgtcctctagtataatcttataacttcttttttggcatagctcattcaactctcggatgggatggagctttaatgtttctggtgtcacaaggggttccaaaagtggccttatgctttgccacacaacctccttgttgtatcctgaatcaacaagaattgctccagccagagactctacaatgtctccaagtaccttagggagtgatgtctctgcctcgtaaccaaaagtggacaatgaagatagcttatcaaatttgttgagtgtagcagaaacatgcatatgcagttcttgtgaggcatggagtacatgtttgtgcaacccatgcttaatggcggaccatgcataacaatcattattcaccgaagctgacctcatgtcagttaactgcccaggtgtcatgccagggtatttattgtacaaatgccaagtaatcagataatccaatactgaatctcctagaaattctagtcgctgataacatctaggaacttcaggcagcatgtatgaaccatgggtcacagcttccactaaaagggaacggtcatggaatgagtaatttaattgcgattctagaaaactgacatttaccagcttctccggttgaatgtcaaagtgtctgtcatacggtattttattaaaactcactttaataccaacccaatccataaacaacaatgcagccttttcaccaccagtgctgaggaaggcaccaattaatgcctcgacaacatcagcaacaatcttctgtcttaattttctttttccactaacataaattgttttccccggggcggccggcgctcgcagcttaaaacttctaggcttatcaccaggaataatccaggtattaggatcaaaaggctcattccgtatgaaacccggaagtccagaactgcaccccaacttacagagggcagcattagaaat

SEQ ID NO: 1657 - DNA, 2107 bp, Glycine max
  misc_feature (58)..(62): n is a, c, g, or t
  misc_feature (72)..(72): n is a, c, g, or t
  misc_feature (121)..(125): n is a, c, g, or t
  misc_feature (212)..(216): n is a, c, g, or t
atatgtgaatgaatgttatgcatattgatactttatgacttattagctatagttggcnnnnngtaagaaaanagtttattgcattttgatctctccagtgttaggagcgttcaaatttagnnnnnttaatttaatttggaatgttatctcctgggtttataagttgatgcaaaattatgcttccctgcccataatctgttcgaagtggctannnnngctaatgggtcattttggcacatggactctgcatcatcaaaactagaaactgattggtacttccctagggtttcactttctttgtaccatcaactgtaccatatcaggtgtagctttaatatatttagagtgggagacagtgatgactcacataaccaaggtgctacacatttaatattacaagagtaagaaatcaaatttaaagccatgtgagcaaaagcagtgtgacgagtcttgattgcttacatacagaaactacagggtaatgtagcaattggaactagaggaaccaaagtcatttttggtgaaactaggactaaaattgtaactaagcttaaaaaaggaaacagctggtgtcttctcaggctcttcttaaatatttgccattcttattccagttattagacacactaaactgaaatgctgtcttttcatccttctgcaggcgatatgtatttgctgttagtgtccacagagttcagcttcttcttcaggtattaagtgtaaaacgctttcaccaacagcaacagcaacagcagcaaaattcaaatcccgcaccagaggaattaagtcaatctgaaataagtgaaatatgcgactacttcagccgtcgagtggcatcagaaccctatgatgcttctcgtgttgcatcattcataactatgctcactttacctgtatcagtactgagagaattcttgaaattaattgcttggaaaaagggattatcacaggcccaagttggagatgttgtttcagctcaaaagccacggattgaattatgtcttgaaaatcattctgggttgaatgtggatgagaactctgagaactcatctgcattcaggagcaacatccattatgaccgcctgcataattctgttgattttgcgcttactgttgttcttgattctgctcacatccctcatgtcaatgctgctggtggtgccgcatggttgccatactgtgtttcagtaagattgagatattcatttggcgaaagtaccaatgtatcatttattggcatgaatggtagccatggtggtagggcatgttggttgcgtgttgatgattgggagaaatgcaaacagagggtggcacgaacggtggaggttaatgggaactcagccgcagatgtaagtcaaggtaggttgaaattagttgcagatagtgtgcaaagaaatctgcatatgtgcattcaagggctaagagatggtagtggggtcacggccagctctggagcaacgtgattttgttaatagcacaaatcatatccatctatctctttattttgggttagtgctgtcaatattgcgttttagtttaccatgatatgaaatggtgcctcactcagtttaagcacgtccccaacatcccagcatgtctcttctgctcgtaggttatgcttatgcagttctattggagatgagctttgctgtaatggaagaagtgcacaggtgattacagataattttgatgaaaaaaaatacttttcatagccaagcttagatttgcgggcaccaattttagattactaaccaaatatataaaacgagtattcaacgtttctatcttcagatcattaactaggttgtacaatatctttgctgatagtgtagtatcatggtataacttcttgggtggtggctattgttattgtacagatgacatcaaatgaatagattagtaaaggaaatttgttacgctcgatctccatcgacaatgaacacttgcaagataaagaccttgccgtgtatttaattttgaattcatcttgtctttggcatgctgtctcaaccccggttgctttaatgtaatctgtaataaccccatttgccagctgctccttaattgtgtaacgtgtatcgttttctgaccgttgaaatatctgcag

SEQ ID NO: 1658 - DNA, 1904 bp, Glycine max
gctttattgatgcaatgaactttgcatctggttcgagatttcataaacattggacacttttccatcgtgatagtttagctaatggtagtccatataacttttctagctccattagcaacatggctaacaatataggtgctggagcaacagaagcctctgatggcaggcatattcagggaatgggctcaactgggaactacggctgcgagaagacgacagaaggggggatacgcccacatcatggactttatcatatgtggaacagctccaatttgcaacagcaaacttcatcaagtaccatgctttggcagaaatcaccatcatttgttaatgatgcttcttctccgggccttccacagatgtcaagctttgctagaacaccgcctcatatgctgagaacaccacatatgacggaccatcatgttggatcagcaccagttgttacagcctcaccatgggaaaggaaaaattcttacttgggagggtcccctgaggcttctggttttcgcttgggttctctaggaagtggaggttttcatggttcctggcaaatgcatccactggattttccttctcataacatgttttctcatgttggtgggaatggcaccgaactaacatccaatgctggacagaactctcctaagcagttatctcatgttttccctgtgagacatcctatgtcttcaatgtcaaaatttgatgcttccaatgaacgtatgagaaacctttatcaccgtagaaatgaagcaaacaccaacaatgttgataaaaaactgtatgagcttgatttaggtcgcatattgcgtggggaagacagccgaactacacttatgataaaaaatattcccaacaagtatacttcaaagatgcttcttgctgcaatagacgagcaatgtaagggaacttatgattttctgtatttaccgattgatttcaagaataaatgtaatgttggctatgcattcataaacatgattgatcctggtcaaattattcctttccaccaggcttttgatgggaaaaaatgggagaagtttaatagtgaaaaagtagcctcacttgcctatgcccgaattcaaggaaaagcttctcttattgctcattttcagaactcaagcctgatgaatgaagacaaacgttgccgtcctattctcttccatacagatggcccaaatgctggtgatccggagcctttccccatgggtgccaatattagactgagacccggaaaatctcgcactgctggcaacgaggagaatcgaagccaagggagcccttcaactttgtcaagtggagaagagtctgctaatgggatagactcttcaaaaatctctaactgatttagccttccttgggcactaactgttcaacattgcaccataatgccatgtcaaccccccaagtctgtatgtatattgacattttctttttatgagagaagagccaggaggaaaaggggctcacaatttttttgcttatagaggagccttaaacacaagttttctgaggctaaggtacataaccagaatgaagtcactgattgtagtaacttttctttatttcctaaatttttgcatgtagtcctgctacctaccttctcacgagtttagagaatggatttaactgaagctcaaaatttttgttagctttgaacagatgatgtctcaccatttgcattaaattcccttcagagttgtggggttctaggggacttaactgcggattttgttgttcattattgttgtacttttctttatggacagaatattgttgtactgttgttcatatgtgtattttttctttaattctataaattctggggcttttgtacccttgttggatcagtttttgtctataaaagtgaacgttgaggaacaaaaaaaaaaaagaacgaacgctat

SEQ ID NO: 1659 - DNA, 1525 bp, Glycine max
  misc_feature (1502)..(1503): n is a, c, g, or t
  misc_feature (1505)..(1505): n is a, c, g, or t
  misc_feature (1508)..(1514): n is a, c, g, or t
  misc_feature (1518)..(1522): n is a, c, g, or t
acgtcggacaagcagaatcaaacatggtatgtcttaaatactcaacaaaacatgacataattgtagttttcgtatctttttttgctgcggttttttttttttttttttttaaatgaacacaaaaaccgcgtttcatcattcaaatgtaaaggttatgccacgttcattgaaagttgaaacttacaatgctgataatcgaacacactgacccttctacagaaaaacatggaagttcagacgaatttatagaattcctatgtcaaaggggataagttaaagaggaaagctaacaacacattttctaatactttttttatctgctttctttcattgactgaaattcatgtgagtttcacttgtttgtggatgagagtcacatatttagcaagactcacgcgaatttctatcaatagaaagtatgtcagaaaaaataaatattagagaatatattgctagtattttttgtaaattaaaaataacttaaaccaaggcaatgctgctctctccaccagggggtttccgggcacctcgcacagggtctttgatttctgtctttccatcagcaaatatgtcactgccagtcatttctctgagcttagccctgctcagaggcttctcagctgagcctggaggaacatctccttggaaaatattattgcctgtcagctccgcgaacttctggttatgtatcttctttgctgtcttctcaacggatgcttcaccaaataagatgttactttgaccacctgcaggatttgaaactttcactgatgttcgcagatttctgggaagaggctctcccatgtctttactttcctttgattccaaagtgcgtgcagctgccactgaacggggcacgatttcaggaggagggccaaatatgtcatttccactgagctccttggtcttggcatttgatatttgcttcttactctttgtgtccgaatcactttgcatagtcccactcagttcacgctgctttgctacctcaggtattgaggtaggttttttaggagaaatgctttcgtcagtgctgaatgatatctgactaattccattcatcgcttgctgacacatgcgtatgcttgttctgttattcaaatttgcagaattggcttctgatgcagaatcttccccattggcagcaaatataccacttccagtcatttctttcattttataccctgagcatggtttgctcttggctagcgtctgagcttcttcgtcggtgagctggccgccgtggagaaccttactgattctatcggaaggctggccagagcgagtggtggcggcggcggcggaatccggcggaggagtttccgaccaagtgaggagatcggaggtgttggtgtgtggctttctcaccggcgtgcctctctgcattctgcttgtgttctgaatgtgaatgtcaaagtaagtgaatgagtgggagatattacttactcaagatggggggggggggcctactagctgacgtgggggggcccggtaccaatcgnntnaannnnnnncctnnnnncct

SEQ ID NO: 1660 - DNA, 1806 bp, Glycine max
ccacgcgtccgagaagagaacgggttaacagaagttccaagcaacatcaagttggagcatatggaggtgaaagacagaatcctagggactatggggcttttgtccaaccacctagtcaaactgagaaagtaccgaaaggtgctgtggtgaggctgaaaggggatcatcaagaagaggcaaggagattgaggactattccaaagccccaggccgcgccggagggccccccccaaagaatggaaacaatcccaaagctgttagagcatgagatagatatgagttcactagatgtattttcaatgccttctccaccgccacctcctccaccacttcctgttgagagggttattgttgaatcagcctcattccacaaagaggctaacatcaatcctcccaaaaaaagtcctgttcctcccacttttgtgaaaactttcaccattgcatcccttcaacagtatacaaatagcttttctcaagacaatcttataggtttaggcatgctggggagtgtgtatagggcagagcttccagatggaaagatacttgctgtgaagaaactagacaagagagtttctgatcaccaaacagatgatgagtttcttgaattgataaacagtattgacagaatccggcatccaaatattgttgagcttattgggtactgtgcagagcatggtcaaaggcttctgatttatgagtattgcagtaatgggtcgctgcaggatgcactccattcacatgatgaattcaaaacaagactgtcatggaatgctcgcattcggatagcactcggggcagctagatccttagagtacttgcatgagcagtttcagccaccagttgtacacagaaatttcaagtctgctagcattctcctctatgatgatgtttctgtgcgtgtatctgattgtggtttgtctccactaataactaaaggttctgtaagtcagctctcaggacaactgctaacagcatatggctatggggctccagagtttgagtcaggaatttacacataccagagtgatgtttacagctttggagtagttatgttagaacttttgacaggccgtcagtcctatgacaggacacgccctcgaggggagcagtttctggtgaggtgggctattcctcagcttcatgacattgatgcattatcaaagatggttgatccttctctaaaaggaaattaccctgccaaatcattgtcaaattttgcagacattatttctagatgtgttcagtcagagccagaatttaggccagcaatgtcagaagtggtcttgtacttaataaatatgataaggaaggaatctcagcaaagtgaatcaaatgaataaacaatggaaatggtaatgatatttgaacatgcataaatgtgcaaagaataagaattacatgcactgattgctgaatctctactagttgagatatgcttgattgcatttcacccaaggaggggcccaattagatgcccccatattccgaagtactgacccatccaacattcacatgccaggggttttgaccaatcatcttcagagaaattatagctaccgacactcctcgcactcgtgtagtttatattttattttgttattatacatatatgatcatttaatggttcattgaaccatgccatgttgcagtgccctggaaatgatttgaacccatttgtttgatgattacttccttattgttgatttagaaatataatttcattgtgcatcctagtgattttttatatcaatacttgatgatgaaattttgataagccttgaatacattcaagcattgtaattaaaa

SEQ ID NO: 1661 - DNA, 3043 bp, Glycine max
  misc_feature (3)..(3): n is a, c, g, or t
  misc_feature (7)..(8): n is a, c, g, or t
  misc_feature (20)..(20): n is a, c, g, or t
  misc_feature (2094)..(2094): n is a, c, g, or t
ggngttnntttttttttttnaaacgccctctagtgccgccgcttttttttttttttttttttttttttttttttttcgatctaataatgactctgattactgcaataagtcatttaccattattttctttacagacaatggacctcatatacatgcacaaaaaatacacattgccgtctattgttgacatcctaagttaactctccgtatggagatttctgtcaagttgtagtaacgaaatcaagcaaagtaagaaaagtaatttattctaatggccaagctgaccgcatttatctccaatgctttatataaagtaaagcttgcaggggaaacttggtgatataaacattcatgttagctgtacaaaaggaaaagttgggacagtaggaggacttcttgtctccaagaccttcattggatgcctgaggatgtatgaattagaccaacaaccctatgcgcttttctccagtggttatgagcttctccacacgagaaactatatgtttgccataagtataccgcttcagtgcatttaagtgaaccttgatgcgagaaaggatcagctcaagacttcgatcatcacaagtctcaagaaccttttgcacaacataatttccaaaagggtccttcatcatagcctgtaagggttcattctcatcagaagtaccaagcatttcattcaccaaaatctgacgttcttcaggactaccaaaagccaaacacttctcgataacatttgaagcaaacttttgctggctcatcttaacaatctgcccggcaagcttgctgataatggcagtccgttcatgtggtttaccatgctccacaatatgctgaataacataatttccatattgatcctgtgctaaagtgccgacagattgcatgatttcctccatgataatttgttgtgtatttagatcatcacaatgctctagaaccctctggataactctgcacccataaggatgagtagaaagtaaaacaacttgcccataaaaggatgaaacaataaactgaattttatcttgaggtacacactctatacacttctgaataacatggtttccattttgatcacgtacacatttcattattgcaccattgagctcagacaccagttgaccctgctgatccgcatcaaccacctccaaggcctgtcaataaagttagctaagatttgatataatgcattaatttcagcttatctaaaagcaaataatggagagaataaatacgcaggagggagcccagttccttaaagcttgaccttgtaacaatacatgtttatcaatgtcaccataaaccaaataagaactaaattaacattgttttttaattcttatatagacctaattacctaaagatgataaaaccttataagtttgatgagataccactgaataatatgaaataacaaactgacaaatttcagcaccgcagaaattgtaaggtaatacacaagaacatctcaagtgcttcattatttacttgatattaaaataaacattcattagtttgaaaaagaactgagccaaaattacagatttgcataacagaagtcacctgtccctataaacacaggactaaagtttgacaagggaaaaaggggatcatcttatggaaaaattgaggaaatgggattctaagagtcaggcataaattaatgttcatatatggtgaataataggataacataaagcttgaaaggcaccttttgaatcactctgcaaccatacatttgcagactaagaggtaaaacatgacctgtaagttggctggctaattcctttctttgactatctgtaccatgctcaaaaaactgcaatagagcatgtcaagcatgaatttcttaaatcaataacccaataaaaagggggggggggcctacgtagctgagctcgcagttgtacaagctaattatacttttgggataacataatttccaaaaacatcagtcatcaaggcacgagcatgaggaatgatctcaggaaatatcttggtcttctcttctactgatgctgtttctaatttctgctgaataaagcggctaccatactgatcagtactgaattgaaccacatgatcaatgantatctggaagttcaaaaggcctggttttcttgttcttgaactcatctagtaaggatgaagcaaatcttccctctatattattgccaatatcagcatgccatgagccaccagaacctcccactgaacttctcatcatagaatttaagcgtgatatacgttcattctcaaagagtggatttccagatccaagagaaggaagtgtggaatttgcaatctgctttccagaatatggcatgccaagaccatatggctgactcccatagaagccattagtaagcccagatttgctcagaagtgggagctcatactgttgcttttgttgagtaagaagtgtctcaagatatgctttcctaagtccctccaaatctccatgtgaagcatcagggaaatttctcatttgaagaggatggccagaactactcatcccttgcatcgagtaatcagcactttgctgcaagcattggatcaagcgtgggtccagagttgtggaatgaagttcaggaccaacatggtttccttgtgcatctaaactttgtccatctctgcgaagcctcatagctgtctcgagattattatcgtaaacagaattcaatttcgagtttacaagatatgcactaggaacatggccagtgaagtctgcacttggcaaacttgctgcatttccagtagaatgcacttttgagcgaagattagcagaagaagcagtttttttcagtagattgacatggtcatttgaactaaaggtgttaaggtttgtcacaatatcattatgtctgggcaaattaacattgctttgcgtgtttagtagaacatcagcatggttatcaacatccatttgtagcttagatttcaaaagaccggccgcctcggcatgtctaacacctgacaaatttaacccagctaaagaagacaccacatcagtaagatcagtcatattgcggacgcgtgg

SEQ ID NO: 1662 - DNA, 1770 bp, Glycine max
ttaacgcaagaaaattcgcagcatattatttacatagatgaaatagaagtttagagcctgatctaataatgactctggttactgcaataagtcatttaccattattttctttacagacaatggacctcatatacatacacaataaatacacattgccgtctattcttgacatcctaagttaactctccttacggagattttcagtcaagttgttgtagtaacgaaatcaagcaaagtaagaaaaagtaatttattctaatggccaagctgatcgcatttatctccaatgctttatataaagtaaagcttgcaggggaaactttgatataaacattcatgttagctgtacaaaaggaaaagttgggacagtaagagaggacggactacttgtctccaagaccttcattggatgcctgaggatgaacgaattaggccaacaaccctatgcgcctttctccagtggttatcagcttctccacacgggaaactatatgtttgccataagtataccgcttcagtgcatttaagtgaaccttgatgcgagaaaggatcagctcaagacttcgatcgtcacaagtctcaagaaccttttgcactacataatttccaaaagggtccttcatcatagcctgtaagggctcattctcatcagaagtgccaagcatttcattcaccaaaatctgacgttcttcaggactaccaaaagccaaacatttctcaataacatttgaagcaaacttttgctggctcatcttaacaatctgaccagcaagcttgctgataatggtagtccgttcatgtggtttaccatgttccacaatatgctgaataacataatttccatattgatcctgtgctaaagtgctgacagattgcatgatttcctccatgataatttgttgtgtattttgatcatcacaatgttctagaaccctctggataactctgcacccataaggatgagtagaaagtgcaacaacttgcccataaaaggatgaaacaataaactgaattttatcttgagggacacactctatacacttctgaataacatggtttccattttgatcacgtacacatttcattattgcaccattgagctcagacaccatttgaccctgctgatccacatcaaccacctccaaggccttttgaatcactctgcaaccatacatttgcagactaagaggtaaaacatgacctgtaagttggttggctaattcctttctttgactttcggtaccatgctcaaaaaatttttgtataacataatttccaaaaacatcagtcatcaaggcacgagcatgaggaatgatctcaggaaatatcttggtcttctcttctactgatgctgtttctaatttctgctgaataaagcggctaccatactgatcagtactgaattgaaccacatgatcaatgatatctggaagttcaaaaggcctggttttcttgttcgtgaactcatctcgtaaggctgaagcatatcttccctctatattattgccaatatcagcatgccatgagccaccagaacctcccactgaacttctcatcatagaatttaagcgtgatatacgttcattctcaaagagtggatttccagatccaagagaaggaagtgtggaatttgcaatctgctttccagaatatggcatgccaagaccgtatggctgactcccgtagaagccattagtaagccccccttctgtcgtcttctcgcacccggacgcgtgggcggacgccggggccggccgcggggtcgagccg

SEQ ID NO: 1663 - DNA, 805 bp, Glycine max
actgataattaaattgatgaatgtactgatcaacaaaatgtatatggtattactaccacccaattctcatttcatagcatagatgtttctcaagataaatgcaaatcatctgagaaagaaaacattgtgatatgaattgatgaaacaaagcatgtaattaagttggtatctttattcatgaactatataggcaaatgattactacttaatttgcttcttttgcagccttgtttttgttgagataattcttggcaagttcagcaatggttgccactggctggatagtaacaagtgaggcattggccgcgttctcttccttgacttcatactcgattgtagatttgattatgctggactcttcacctttctctatcacttccaaacgaactctaaatagagtgaatcctaactccaagtaccctccttcaactacctctgtttcttttatgcgcttctcattatcaatcttagtgaacttctctttgtaaccagctggcccaggtacacctggagcaaaagttagtttgaggacagtcccaacccctccatctccttctgttagctccaccttttgaaacaattccggcagctcttgggcaacaagttttcctatttcaagggcaccaaacagatcccatgcctcactcgccggcacgtgcagctctagctcatgctcaagttggccaaacatcttctatcttctggagaaaagcctaccttgaaaatcacaatgtttctggtgtgcccccttctgtcgtcttctcgcagccgtatggagggcagtaagtgcgtaccaagacaaaat

SEQ ID NO: 1664 - DNA, 613 bp, Glycine max
atccataacacatcgacccgtgcatggtctcagtaatcaaacccttaccgcgttccccactctgccatcgcaaacccttcccctcacagagttgaagtttattagttgaataatagaacagtccatggctgaagaaatgacaatggtagaacctggaagaggtaagaggaaattttttaaaaagcaaggccataaaatgtcaagtaataaagcaaaagtgatgccaccacaacatggacagaagaaagttaaaatagacaaaaaaatgaagaaacttttccgcaagcgtgcacgagagtataattctgatgatgaagaagatgaggaggccactgtacctgctacctcagagcctaaaggtctggcatctatcaccaataaaagaaatgacgaggatgacacagaaagtgaggatgggtctgaggatgaaggagctgcaggaccacaaaaaacatggaataagaatgctactgatatgaataaccacagctctgatgatgaaggagaagatgataatgaaattcagccaggaattacaaaattcactgaaggatgtagagcattcaagatggcctttaagaatattatgcagaagagtgttcctgatgacatg

SEQ ID NO: 1665 - DNA, 888 bp, Glycine max
  misc_feature (13)..(13): n is a, c, g, or t
agctacgtaggcntcccccccaggatccaccacactacccgatccataacacatcgacccgtgcatggtctcagtaatcaaacccttaccgcgttccccactctgccatcgcaaacccttcccctcacagagttcgtcaattctttcggtgccttatttgttctttgttgctgttattgtgttgtacaagtacaagttcaatttcaatgttgaagtttattagttgaataatagaacagtccatggctgaagaaatgacaatggtagaacctggaagaggtaagaggaaattttttaaaaagcaaggccataaaaagtcaagtaataaagcaaaagtgatgccaccacaacatggacagaagaaagttaaaatagacaaaaaaatgaagaaacttttccgcaagcgtgcacgagagtataattctgatgatgaagaatgaggaggccactgtacctgctacctcagagcctaaaggtctggcatctatcaccaataaaagaaatgacgaggatgacacagaaagtgaggatgggtctgaggatgaaggagctgcaggaccacaaaaaacatggaataagaatgctactgatatgaataaccacagctctgatgatgaaggagaagatgataatgaaattcagccaggaattacaaaattcactgaaggatgtagagcattcaagatggcctttaagaatattatgcagaagagtgttcctgatgacatgttgggtccaatactgtcagggcaaaggaaacttgttgtagacaaacttgcagaagaggaagcagaaagcaaggtcaagggagaggccaaaaaagaaaagaagatgttggccagaaaaggggcatgtcaaacctgctacatacttggattcacatgaaaa

SEQ ID NO: 1666 - DNA, 1824 bp, Glycine max
aaaaacaaatttataaagttaatatcaatcaatacctaacgaccgctcgcccaagcatagaaccgttcaccttcgcacaaaatagaatgttgcagataaaacaaaatttttttttttttttttctattttgtgactttagttggtattccaactcatgctttaattttctcggaatagtaacacgcatacaaaggaattcgtaatttaagacaacagaataaagtgtatataatgcatccatctcaacactgcaaagctatgtaaatgcgtcactactacaataaaattaaaacagacaattcagaaagatccaaatttgacaacctatactatatcaactgaggagacgttttagcagcctgttgaacaggctgtgcaggtgctccatcataggctccacgagtagtcccacctacattaccatcgctggaatatactggaggctgagcgtaaccagcagcaccataagaactgttgctgtacgatggaggagcctggccataaccaggttgaccacctgctggggcaccaccatatgacgggggaccataccctggctgcactgcaccaccataaccagatggtggagctttttgagaacctgattctggttgggcatatcctcccgaaggtggaggctgggaaggaggatatccagattgcaaatgaccagattgaccatatccccctgctgtgttaggtgattgggattgtccatacacaggaggtgtgccactaggcttttgggtctgagggggtccatagccagatccataaccagactgtgctggaggttgactgccataagtagccggctgggaggttgggggcaccccataacctggttgagcttgtggtgcatagttggcagcatttgggctaggttgttggccagtcccataaccttgacttggaggctgggcaggtggagcttgggttgaatccccttgggatccgtaattggcagtgtggccctctggggctgggttgctaccatagctagcagctgagctataaccttgctgctgatcatatgatggtggctgaccataccctgattgaggtggcgcatgatatccaccatagccatcctgagcatagccctgccccggttggctataaccagaggaaggtggttggctgtaattgtaagcagtcccatcggatggaggtgcaggattttgctgctgctgctgttgactatagtaatcatacccggcatgggcagactgctgctgtggggcagtggactgatcccagttggcggcggaatatccaccagatgactggggaggatagcctgcatatggttgctgaggcacgttatactggggtggaccagagtatgctcctggctgcacatagccataaccagattgttgcattggagcagcagggggaccccagctagtcggtggcctagcttggtaaccttgctgagaataaccaccagacatagatggatttctctgacgattctgcaaaaagaaaaattgtaaccacaaataaaaaaaagtgaactcacccaagatgacagtacatacaggcaacagatacacaaacaaatagacaagtaaaacatacatcactaaaagtcaacatataaattacacaagatgaaagaatatatgctacatttaacatataaattacacaagatgaagaatatatgcttcatttaacatataaataacacaagatgaagcgtatatgttacattgacatattccatacagcatcagaaaggagtataaaggcctacataccgtactggttcgagatataaccgagttactccagggggggggggcctacgtagctga

SEQ ID NO: 1667 - DNA, 1110 bp, Glycine max
  misc_feature (135)..(141): n is a, c, g, or t
aaatttgttcatctcacagtactgtcttttcaatgtttcttccgaactttcttcatctttatatatatttttctttgctatgttctattaatcgattttaagctcatagaaagcatttcaatcagagttttttannnnnnncaacaggtacaactttccaatgtacttattcttcaatatgttagattctaatattgatgataaaactatgaagaagttttttttttttttttttattaaactaacccatatattatataaatcgaacaagagaacagacaaatcagcggaagcgattttccataatttttacaaattcaatgaaatctattcttccatcctgatttgtatcaaagatcctgatcatcttgtggcagttctcaagttttgctgcttccttcaatcccaaaatgcaaagaactctctgcaactcctcagcatcaataaagccatctttgttctcatcaaaaacatcaaaagcctgcttcacctcctccaaacttggctcctgctcctcaaacagttcagaaagctccttggaaccatacttctcctgaagttcctcactttctgagctgcaaaaaaatccaagtttagccatcaccattttgacctcatccctctcaagataattctcactatctatgctgccctttgactcattctcttggtgactaaactcccctggttttgatacctgctcctctgccctcacctttgagtcattaggaaaaagttggtacagaaggaaacaccagaaactaaggaaaaaactctggagattgtagaaacatgtatagtacaaggaaagatctaccagaccaaacaagggagaagttgagttaccatcattctgagatgccttcccatcagaaataaggtagccaatttctctaagaataaccattgctgcagatatgtgcaaatattaagggggtgaaatgaaatttgttaagttgttattcttatttagcctatgaagatgagaaatgttgttcggggggggggcctacgtagctgaagggtcttttatacaatttttgaatttggaaaattgaagcagccaggagggtcagcttagaaagatgaaggaagttgcttgacaagttc

SEQ ID NO: 1668 - DNA, 1089 bp, Glycine max
  misc_feature (999)..(999): n is a, c, g, or t
  misc_feature (1005)..(1005): n is a, c, g, or t
  misc_feature (1032)..(1032): n is a, c, g, or t
  misc_feature (1057)..(1057): n is a, c, g, or t
  misc_feature (1075)..(1075): n is a, c, g, or t
  misc_feature (1089)..(1089): n is a, c, g, or t
ttcgggcagtttagactttattgtcatagcttactaaaaaagggttcagtttaagacttttttttttttttttttttggaacaagtaaagataatttcttccattaaagtgaataattgcatagctgaagtactaagatagaggtgaaacaagtaaagagagtttcttccattaaagtaaataattgcaaaggttcagccacacaagattagctgataatgcatagaattcctatataacttttgcaataaggtgaggataatatcctttacaataaaataaaaaagaaacgcaaatgattatagattcatcatatcatgattctgtcaaagccagagaaagcaacttgctgtccacaacccttttgattactgtatagttcttccatataacaaaagatggactatactgctaaactaccttgctatgtaccttgagaagcacatgccttgacaagagtgatcttaataatagagacccccttggcaccagtctcctcttgaagcaaattctgaaccatcttctccatcaacattcctgtgcatagagttgaatccctcattctgtgtactctgaggactagaatagatgtcctgaccaccataataaattgatgaactaaggtgacatggttggactctttgatcctgatagatggaactcatatccttgttcacagcattctgagcctcgctaccattacccttggagaagttatcttgaatacaaattttggagctccaggtttcattggcaattttgccactcaattcagagcgcagagactctctccctaacaccttagacgatggaggagaaaaaatggagccaaaaatcccagaagaagaagagggacgagactctttggacccaaagagctcagaggtgaatgaagaagaagtacccttttgcttattcccttccattcttctctaaaacttaaaaacttttgtatcaaaatcaatactttggatttttccgatgtttcttttttgtaangttggncttgggaggggtgaaatgatttttttncattaccgcgggggttttcccaagnaaactttgtttttttctntttttttttttttn

SEQ ID NO: 1669 - DNA, 1960 bp, Glycine max
tttttttgttcagtaaattaacaaactgtcattttccactttctcagcaagcagtcggttcagtactctcacctaattttgtgctggaaatcacttgttttagaagcaaacatgactcaaaatgtgtgattattttaaaatatctttagcttttccaatggtcagatgcttccaaaacatctttacaaggtaactaaccatattataattcaacttgtattaaagttttctcccgatacatcattcgtaaccatcctttccttttaaatggtcccactccccactgactaaaaatactaaaccaagaaaagaggttccactacaaatattttggtcatccaccaccaaccccaccacagatatttgcaagaaaaacttgaataaggccattgaaaatattaatcttcaccatgaaaaggacatttgcttggctcctccgattttacttaataggaataacaattactccttctttgacaaaacttgagaagagtgaaccagctgctgcaccgactagatccttctccatccaatcaggaaaattaaattatacaagaaagtagaatattacccttgtcataaattaaggatgaagaaatttaattatctagtgtctgtcatgatactttttgtttcggttctatcgctaatatcagtgactgttagattcaggcttgatgcctgttgatgcttctgattgaggcatacgaaaaatggctgaggctagagatatgggcatgatacaaagtgccttggactgaagaaattgcatagctgctcccacatcttcttccataagcttagccacctgttgttctgtgccatcattggaccacttgtcccaggcttgctcattggctccaccttctatgtcctgatccccctccactgcagaaaggggaacatcagccacaagctgagcaacagcaccagctccacccagtctactcatgctcaggaccttaacctgaagcctaaggaacttcacatagtccacaatttcatcaagcatcgccgctctgtccgtcttattgatgctgggaactaattcctgcaatgccttcattctttcagcgattctttcacgacgcaaccgctcagcaatactgtgaggatctgtagcttgccctcttcttgctctcacacgagggcggatcccaggtggttgtggcatagcagccattgacgctggagctgcagctgcctggccctgaaactgttggttatgatggtggaggtggagttgtggctgacgaggtggtggaggcaatggcagcgtggggcggataggagtatgcagttgtccaaacgcggaaaataaacccctcatatgcatagaatccctatcggtgattggtgcagtggaagagggtgatgaggagttgttgttgttatggagagtgaggtgatgttggtggatggtggcatcatcaacattaacatgaacaacgtcgtcgtcaacgttaacttggtgtcttaggaaggcagcttgttccaaattcaagcccagaggcattaacccagaagctcctctgaaagcaccagttgtggaccccaattgcaacattcccactgtgccggcttcaggcactgctaagatctgttcgaagaaatcatcgcccaacccctctgaaccactattacctgccatctcaactttgcaataaccaccgattgtgtcaaattaagccacccgttttttattgccacatttggggggtgaaaaacatcaagagcagaaaacaaggtctgtgaaaatggtcggaattctgggcggttacgcttcccgagaatgttttgttttgtgtctctcgtgttgaatttgagagagagcacgaaaaggaagaagaaaaaagagagtggtgggattggatttcgtatagtgcttttggatcggggggggggggcctacgtagctgacttttcagcttttgcttcgtctcagttcttctattctgac

SEQ ID NO: 1670 - DNA, 1854 bp, Glycine max
ttgtgcccaataattaaacctatttttaaaaatttgctgtatttccatgttcatatcatattacatccatatctcatatatatcatatgcggttcctagcttttagcaagtaggaactagttattccccaatcaaaaaaaaaaagaaaaagtaggaactagttactatttggtgcaagacctcgaaggcagtttcttttacagaaaagggtgaggaatcgaataagttaaatacatagcaattggggtgcttataaaaataaaaataaaaacatagcaattgtggataagtattggctactcattccggacaagaaatcttcacgtatggttgtactgtaaccacagtttcacaccttaattaggcaatttttaaccaacttgtccatttatgcttttccagattcttgtgttggcataattatcttttacattaagcaaggttgtcccagtgaaggaatccaccatgtcccctagcgtttgtgaacttataagtggcaccagaaacttcatagccttcaagaactggatcatctgacaacagaagtggtgtgtctaagtcaatgaacttaaaacagccaaggccagcagcaagttggccagcaaaacccatagcaagtctagtctcaaccataccaccaatcatcaaatctaaacctgctgcttttgccttctcaataatttcaagggcacccataaccccaactttggcaagctttatgttaatgacatctaaaacattcccttccacaattttgtaaacatcaactatgcttctgcaactctcatcagctgcaacagatactccatatctctctcttgctatattaccgacataccgaagaccatcccaatcatctctatgaactggttgctcaaatagaacaggagtcaacctcatatcatgtagtttctcaagaacttcaactgcttcctcagagttatacccctcattagcatcaagaataaactgacactcagggtgtgcaacacgtatagcttgaagcacttctatatctgcattcagattcttgcccactttcagctttaaagtcttaaatccttctttatagtacttagaagccaattcagctgcttcagctggagaaacaattgggattgtaatatcagtggttatggtatttgaagccccaccaaaaagcctccacaatggcacacgaatactatttgcaacagcatcaattattgccatctccatcccagccctaactgaagcaaattgatgccctggaagaataccagcaatctcccccaacatggaacccaaagtgagtgcaggacatctcctcaagaaggcacatgcctcagaagccttggccatggcagtggtctggtcctctgcagtaacaaaaggcaaaattggtgcctcgccccaccccacagaaccattgctcaactcaacccttatggccacgttctccaccttggccaatctagaggtagcaatggtaaaaggggctattaagggcacattcagtggcctgttctctgctctatgcacatcaacagtgaatgtttccaacaaattcttgaatccaaaggtgataggagctgctgtgggtgtagcagaagccatgatcttgataaaaacaccagattttttggcaaagtgccttgtgaatgcggtggaattggcgttttttggattgtgggacagtgacttgatcatagttgagtccattggttgtagtgttctgcagtttagtgtttgagccatgttggatcctaggagtggcagcatatgattgggttgttgtgaacccccttctgtcgtcttctcgcagccgtacggacgcgtgggcggacgcgtgggtcgaccctggaattccggccc

SEQ ID NO: 1671 - DNA, 1427 bp, Glycine max
atgataactggcaaatttcagctatatgaatgcaatatctaaaattcacaatattgacaccccacacaagaatacaacacttgctcaacaaaaatccattcaaggcatacaactacaacatatcctgaatggcaggatgtccttacatttcataatgtaaatattctacccgggatctaaaatgaccaactgtatccatgtcccacctaaatctccttcaaaacctcccaaagattattttagaaagaattggaaaaagaaaagcagtttgcttcaactgctgagataataataaggaggattcattcatgaatgtatacaaaaatcttaaattagaaattctgtgtaggcaaatttaaatagttggcctcttaccacaagccaatgaatttccaccaaactcctcctagtcctagccagattataatgttaacaatactaatgaggaatccatagccccaccatttagcaaggggaacatagttggcaccgaaaaacacaggagctgatccaattccataatgagtaaggccacccataaggttggagaggaaggacagcactatggctccaaagaatggcggagtccccagagcagtggccacagacaaaaatgcagtaaacatggcaccaatatgagcagctccactcgcaaagaagtaatgagagtaaaagtagagaaggactagaattccaaaagataattgccatgatagacccaatccaccgacaaacttgactacagtttgactgaaccaagaaatgagaccatatttgttcaggtacccagccattgctatgagggcagcaaaccatgtgagggtatcccaggcaactccttcagctaagcactccttccatgttacaaccccagtgacaagaagtacagataatccaagaattgcagcagatacagcatcaacgttaagaagccctccaaatacccaaagtcccaccgtgagaaacaaagtagcagtcatgatcttctcattggtcgtcatgggccccatcttctccaacttctccttcgcaagcttaggagcatcaggactactcttcaatgtcggcggatatataacatacaaaatcaacggcaccaacaccaacgacgccaagccaggaacaattgcggctttagcccaatccaaccacccaatagtttgattaatggaattcagagtaagagtcgcgcacagcggattcgccgccatcgccgtcaagaacatcgccgacgtaatcacggaggtctgaaagcacgtgagcacgggccccgcccccgtcctgtgctctgtcccgtcgccggcgttgctcccgcaagccacgcacagcgccttcaccagcggtaggaaaatcccccccgccctcgccgacaccgagggaatcgccggcgcaagaagcgcctcgctaagaccaagccggacgcgtgg

SEQ ID NO: 1672 - DNA, 2277 bp, Glycine max
gaagtacaaaaacaagtatgatcattaaaaaaaaaaaaaactaccctgctcgtacaacttctatttgttttttttttttttttttcttttttttgaaggaatccagtactctttgcatacacgtaataacagtttaattacataacgagtgggatgtaacacaatcaaaggaataatacatacaacggcaacagaagaggcaaaggccaaagttgcagcactagcacccaactaatgattcgaccgtatcagattattctactcagatgatgatcagcttgctctatagctttcaacataaaacaactctaggccaaaacacatccaaatattaaaaacactctaaaatgatgcaaggaatccccgatggctcactccagaaagtgcttttccaggctacgccatacctcatgtagacaattggaacctgccactaggcttttttcttctccatccaaaggcagcgtaatacacaaaggtcaatccagccaaaacaacaaatgcaatttggaatacattgtacttgtacaaatatttaattcctcgaagagactccaaagtgtggccaaatatttcctgggctgcagttgcttgagcatagtaggcaaatgctgtggagcagaactggatcacactaatggaacaaagaagaataaggcccacattaaacagaaaagagttcatgagagttcctccccacttcatgggatgtatagtaatgaatactagtctcagtccaagcatcatggcaccagcaatcacagcaaggagaaggtagaagcagaaaaatgcaaatgcagcagtgccaagaagaccccagacatcatctagcttaatgaaaacttcattcaagaaaggagaaagtggaggatcaattaataggtagataattatatgagtgacccacgccactgaaacaatcaaccctaaaattcccaaaacaaattttgccaggtaaccaagaactgttagagcccatgttgtctcagccttttccccttgtggatacatctcttcaagaagctttacatcttcttctaattgaaacaactccttctcaacttccttcacatttttacgaaactttctaccctttgaaccacttctttcttcctgatgtagtgcctcagctgctttttttagttctcttgtttttttacccagttcagtggcttccttgatatactgcgagcgagtgataacagcctttggacgccgaataaatgaaaatataagtcctaatggaagacaggcaataccaacaccaccaaatatagcaaaaagcacagatccaacaatagtagcaagtgcaacaacatattctggaaaggtagtacgcatggtccatgttttctctgatgaaggactagcagagaatgctgaacactgatgggcatcacttccaatacaaggttgaccactactgaatgtccatgtgctaggaaatgaagttgtggatgaagagagatgcctaatagtaaagtccaccttaccaaccagcccatacaaaattcccagaacgagggcgcacactatagccgtggtgaccatccacatcaacgcactcttaatcctcttccccacactcttgtcctggtcgccctcgtagaagaacatggcgaaggggataacgaaaaagacgaggacagcgtcgaggatgtagacggcgagccagaggtccttcatggggagcgtgaggctgcatgcgccgttgtagatcgcgtggcggcaggcctggcgattcgcgacgtcggcggggagcatgaggatggagatggcggcgacggagaggcccaaaacgacgacgaatttggggaagtaggcctggttggcgtcatcggggtgctggtagttcacgaggaggtacacgttcaccaggaacacgatcacgcacaccaccaccgccacgatcaccagggcgaggttgaaatcgcccatcttcgaaacgatcgtatcagaggaatgagtgggattgggaattagggttagggcttgttcggatctggtttagagagagaaaatgaggagagagggagaggaggtatttggtttttggggggggggcctacgtagctgattggttttgttccggtggtggttttttgctacagttagcggtggtggttttgaggtgtgaggtcaaatttactgttgtatcctcgtgaccgttggcgatgggagaggggtgaggaggaaactgtttggggtatgggagtaatttcgaatggggtggtttgctgttgcaagcgaaattcaaaccaggctgtactccaaatc

SEQ ID NO: 1673 - DNA, 2114 bp, Glycine max
aggaatgacacacggtcttgaatattaaaatgacaactggtacaattatgtttgggaagagttgcattatacatcaaagggttagtagaacccagtagtctcttgtgcacatatattcaattacataatcagaagaatgtgctgcacaaatcaaacgaatgaataatacatacaagggcgaggaaagaatcatcaaagacctaagtggcaccacaagcacccacctaatgatgacaccacaggaaaatgattctattcggatgctgatcagccaacttgatagctttcgacattaaaacaaaactaggccaatgcacatccgaataaaagccacttgaaatgagattttgcgataagaatacccgatggctccctttagaagacactcttccatgccataaaccataacctcatgtagacaattgaaacctaccactaggcttctttcttctccatcccaaggcagcataatatacaaaagtcaatccagccaatgcaacaaatgcaatctgaaagacgttgtacttgtacaaatatttaattccacgaagagattccaaggtgtggccaaatatttcctgtgctgcagttgcttgagcatagtaggcaaatgctgtggagcagaactggatcacactaatggaacaaagaagaataagccccacattgaacagaaaagagttcatgagcgtcgctccccacttcatgggatgtatagtaatgaaaactagtctcagcccaagcatcatggctccggcaatcacagcaaggagaaggtagaagcagaaaaatgcaaatgcagctgtacccagaagaccccagatatcatccagcttgatgaaaacttcattcaagaaaggagaaagaggaggatcaattaatagatagataatgatatgagcaacccatgccacagaaacgataaaccctaaaatgcccaaaacaaattttgccagataccctagaactgttagtgcccatgttgtctcagccttttccccttgtggatacatctcctcaagaagcttgacatcttcttccaattgaaacaactccttctctactgatttcacatttttacgaaatttccttcccttcgaaccacttctttcttcctgatgaagtgactcagctgctttcttcagttcttttgcttttttacccagttcggttgcttccttgatatactgtgaacgagtgataacagcctttggacgccgaatgaatgaaaatataagtcccaatggaagacaagcaataccaacaccaccaaatatagcaaaaagcacagatccaacaatagtggcaagagcaacgacatattcaggaaaggtagtacgcatggtccatgttttttctgatgaaggactggcagtgaatgcagaacactgatgggtgtttccaatacattgttgaccactattgaagtcccatgtgctaggaaattggcttgtggaagaagagagatgcctaacagtaaagtccaccttcccaataagtccatacaaaatccccaaaacaagagcgcacacaatggcagtggtcaccatccacaacaacgcgctcttaatccgcttcccaacactcttgtcctggtcgccttcgtagtagaacatggcaaaggggataccgaagaagacgaggacggcgtcgaggatgtaaattgcgagccagaggtccttcatggggagcgtgaggttgcaggcgccgttgtagatggcgtggcggcaggcctggcggttggcaacgtcggcggggagcatgaggatggagatggcagcgacggagaggccgaggacgacgacgaatttggggaagtaagcctggttgacgtcgtcggggtgctggaagttgacgaggaggtagacgttgaagaggaacacgatgacgcacaccacgatcgccacgatcaccagcgccaggttgaagtcccccattgttggtgggtggtgggaggggaattagggttaaggcttaatcggatctgaatgggaattggggaggaagaggaagaaggagaaaggttttggttggttggctccgttgttgggaatgtggaattactgtcttgcccttgtgagaggagagtttgtatgtttgttgttgggtgtgag

SEQ ID NO: 1674 - DNA, 2378 bp, Glycine max
gaaacacaaaaataatccatatcccataaatctatcaatgcgcgccagttccctgattgaaatcaaaatgctagagaaggctcgagctattgtggcacttatggtgcgtttggataatgattgaaatgtgcaattcattgcctagcagaatattacaccaaggaacaaaaaaaaatctacgaaaaatacaatcaggaaaaaacacataatatatggaaattagcatataatggaaactaaatcacatcaatggtcaatgactgaaaagcactaaacataactatgcagtattatttatggtagttggaaatattagcatctcttctgacgtcttcaacctaaatgcgtgtggaaccatttctgcctagcaagacatcatgacatgatcaattgcttgtagtgcttggttggagaaaaatcgcacgtcaacatcaggatcctcactgagctcaaccagacatggacgaatagtcttctccacgaccgactgatcaacgatggggaagatggactctaatacctttgccacattgaactttatgttgggcactctgtctttagatgcagcaagaacaaccggtaacaagtttgaacaagtgatttcagggcccatcacaggagcaagcagagagatagcacgaagaatggtcatccgatacaaatagtgtggattgttgttcatctccaaaacctgaggaattatgtgctgcatagcccactcaggtccaaattcttcagcaaggcgtttcaagttgttagcagctgcttcgcgaattgaatgaaccttatcctgtaaccactgcatgcaaagagcaccaagtttgtcatcaaaaaacctaacccccaattgacttgccaataagggtatatattctataattgcaagccggaccctccaatgcctatcctcagcaagctcaacaatggctggtaacaaagactgagataacagatcgattcctataacctgattcacttgatcaagcttgctgataatgtttaggcgtacgtcaggaaattcatccttcaaaagggaaaggaaaataggaagaagctgctcaattgttgcttcctttcccaacactggagccattcccattattactgaagccaaagcagaccggacatgctgtgaagaatctgatgacaattccttcacacaaggaagaatatgctgaattgcaagatctggatttaaaatccggcaaaacttggtcacttttccagcagctgctatgcgtacttcagcctcattatcacgaagcaaccgcacataagcaggtaccaattccgttctggtaggttcagggcctacagcttcgcaaagctcatacaattgatttgcaaccatgtaacgcacacgccaagacttatcctgggagaagttaacaataaccgggagtatatgtgcaacacaatcttgtggctccaacagcttgccaagagcagcacagccctccacagccaacaatctgacagaatcttgatcatcttgagtaagatcgtcaaaaattgacatgacatcagccttcaaatgagcatattcaacagttgcagcaaatttcccaagatttgatgcagccgaccttctaaccataggcatatcatcctgacataactgactgtatattgatctcaactctgtctttgatgtttctggtgcgctagggtatgcaatatgaaatagtccacatgcagagactcgggcggtaaaccattcacctgctgccaatctcttcaccaatgggatgtaatattcaaccaaatcactctccctcatttgagatccaattctacaaagtgactccacagctttatctctcacacaggtttcctcaacagtgcaaagtgtctccagcggtggcagcaacacactagcatgttccactcccccaacataaggaataaacactcccaactcttctgccattgcaagaagtacttcgtcatcatcatcattattttcacttaaaaatggaattaattctcgacgggttcgctcctccccaagagcacgtgcaattgttgatagcctacgaattgagtttaaccgcagctggatgtcatcatttttcaactcatctataagcaccgctattggatataatggttcgtcagccatagatattttgcttggttcccaatatttcgtgtcgcgcgaaagtgtcgataacttttgatttcacgtgctagcgaaatgtgaagatggagaaattgcgacctccttctagtaaatcgttggatacagatgaacacgggtttcaaaagcgcattagtgcgagctgctacgcatggacaccggaaaccctaagaccattgaagaaggagggagaagacgatagagggaagcagtgggggcgcggggcctacgtagctga

SEQ ID NO: 1675 - DNA, 1450 bp, Glycine max
atatccaaaacacgcacataatatatatgatgcctacaagatgcaaaagttataattgatgacttcaatgggacgtgaaaattcacgttagattgtccggggaagtagtgattttccttccctgatctagcaacgtaataaaaaaggacatggtatttttccatctaaaattaagcatatgcacaaacaacactttcttgtataccagcattcaacacgcaaaattttgaccgcaccagcaaaatgaaagttcccttgtgcaacttcaaatccactatccaatataatgcatataatattacagatatcgcatggacagttgctattgacattcttccgagaaaccaactccaccgaagtatacctattcttttttctcatcttttccattattttgaggattaagctcgtcatcatcataatattcttcaaaatattcttcatcactatcctcctcatcatcataataatactcctcgtcatcgtcatccttatcatcctcgccattttgtagacgaagtgtgccatctcttgactgctgacctcttaacctctcttgaattcgatccctaattgctgttcccatcttgtgacagccttcttcaaacatttccagaaatccagcaacccagcggtcggcattttccacccactcattccgatgcataccagcagtctttgcaacaatttggatcttttccccaactttttcttgatgttccttcactttctcttctaacgttttcaaccttctattcaccctcagtcgcttttccttcacatagctcacgccaagctcgtttcttgagtacccacgatccaagttccgcagcacatattggttataatctttgacaatcctcattataacatctgacgtggatattccttcagtccgttttgtttccttaaacctcccaacagatttaacaaattcataaacatcattggcagcaccactggcatcagcataaggaagagagtcatgagccacatagtcaatgttgtgcttgtcaagaaactcttgattgataacccagggggcatcaggaataacttcatccacccatttgcagtggcgcagggattcgtatcgttcggcctctgtcataacagttttgcctttgtatttgtgggtgacttgatcgttgcaacacccaacaagcaagtatgtattcggaaacgatttcttggcttgctcaagggagcgggcgtggccaaagtggaagagatcgtagatgccatccgcgtatacccgaacgggacggtcctggtcctccggaggcaacgccgttttcgaatgctcgctctgatctgccattcgtctctgctccgccccgcctctcctcttttcctctctatgacatgaaatcgcaatttcgcaaacgccgtatgcgcttttccttccccctccttccgtcgtctccccgcagccgtacggacgcgtggg

SEQ ID NO: 1676 - DNA, 1278 bp, Glycine max
aacaacaatgtaggacgttatttaacttgattttagccaacatttatacaacggtgtcgggggtaacatggatggttttcgatttttacaactataacatacgcaagacacaacatatcaacttaagaatacaagttaacccaaacttgacaaatgatatttagctacaaagctacattccggctagaattaactcaaacataaggcaactactttgaaccccttcgggtccctctacctatgtacataataaaaaaagcagaaaaaggacaatgcaacttcatgggtggattacattgatatgactttctcaaagtgcttgtagttggcccttgtgaatccttgcgtcatattaatcaaatcatattctgattatcatgataatcttagtcttagtagtatgcttagcatcttccaagccattttacacaaaaacctgctattgttgtcatttcagaggcgcgactcactgatttccaagcaaaagaaaacaactctaaacaggaatgacatcagcattttgactatcgtcacatgtcaagattaggccttcaacataggttggcaaaaggcagcggatccactggcagcccgttgagacaggctcggatgcaggaacaatcatgagcacgttttcatgtcgttggacaactcccatcacacttacggtgctaccttctttgatgtacccttccttgaggcgcattatcctatcatcactggagagtttgtggtctgcaagccagcctaagaaatttggagataactctctgttatcctttgttatatcaactacagtagttggttccacaaaaggagcaaccttggcaccatagcctgctttcactaatgctcttaatccggactggaagtctgatacgtagaagtctgctacgtatttctcagaatatctagaaccccaagtgaagcaacggtgtttagaattcgctgattttccacccaatcctttatattcatataattcggtggagacatatacacatctaggtactctttggtaggatgactccaaaggaatactgccacaggttacaaccccggtaaccttgacgtactgtccatcaatggcgcctctaagttcagcatcagggtaccttttcacaaaccctaaaagccctcgtctcccccaaacgcagttccacgcgatcaaaacaacgacgggcacaataaccgctccgagcgccaccaagatcactgctttcttcaccgccaccatgagaaacaccccaacgagcaagctcattgctcgacccgcac

SEQ ID NO: 1677 - DNA, 1108 bp, Glycine max
ttttttttttttttttatcaggaactaaatacaatattatacttcctaagtccatggtcacgtcgtttgagagtacaaggaatggaattagacaattagtagtgtatgatgtagtattacacaaaccccaaaagttgatagcacaatacactaaccaatgatttatatgtacaagttcttggcttgccatgcattcatcccaccaactgtagaaataatatttgaaagcaagatgaaatcatacacttagcacacaaaataaagctccttcaatccgatttactttttgaggttgatttatcttcttttccaggctgcactagaaatttgaatgtccacactgctaaaatagttgcttctatgggagcaagccaatatacaaggaagtgctcctttgttatgtgatcgcctcgagcatatgcccatcccattacagatgcagggttcatgcaaccaccagtcagatcagagccaagtatatgaagtgttaacttggagaggctggagatccaagtcttcatgaagaaattttcacggatttttgaggcgagtccaagtgaaatggttacaattgcaaatgttaataatccttctgtcagcgcaccccgatgaatgtcaacattcagacgtggtcccagtcctacttcaggaatggtatcaataagaagtttaactccaacaatcgatccaaccacctgagtggggattctggcaccagcgcagtagaggaagttgttaaaatccctggagatagcatcggccagaacggtgagggggttgtaggcgccgccacgtgtaaccttgacgaggaaggcgaagaagaacatgttggcgatggagaaggtagttttgataacctcaccgagggggccatgagcgaagccaaggtggttgaagacgatgatccgaaggagaacaccggaccatacccacatgaaagacagaacgaagtctgaaaccagaagcctggctcgtcccatcttcttcaacgatgatggggttattggggtatgtatgtgcctgtctgctacatgcccgtgtttgtttatctttgtttaaggcaaactgggaatgctcctgtctggacaaaggaacctgattgccatat

SEQ ID NO: 1678 - DNA, 737 bp, Glycine max
atatttttcttttctttgaaaagagtatcaaaaagtgtggtattattattattattattattattatcattatcacttttataaaaaaaatgcaatacaggaactaattactacccttgagtaataatcgctgtaacttctgaacagcttaaagggagcttgcctccattccaccaacccaatggaccggtaactcactaggcactagctccacacaaattatcatgaaccacttcactctatttctcccagaaaacatagcctcaattcgtcagcatcttctaggctttcaatccccactacataggaacagcctcaataagcctagcgaagtaaaattgggtagtggttaagcctctcttccttatggtccagccaaccttttgcaatgctctctctacatctgcctcagagtgaagatatgctcttgttgcctttgaaggaccagggaacaactctccaaccctctttagcagatcataataaaacgtctttggggcaaaactcagaatcaatcggttgttggccaatgatgcaaggtgtgcaatcatcccatcggctttatgttgtgggtaatgaatcaagacatcgaggcagaccaccgtatcatacttgccatccaagctctctaaatccttcactacaaacttaggcatcacgggcacagatccatcttcactggttgcaagctgttcttttgcctgtttctcagcctcggcaaccatagcggcggagat

SEQ ID NO: 1679 - DNA, 1761 bp, Glycine max
acggtatcgataagcttttttttttaagagtatcaaaaagtgtgatattattattattattattattattatcgttatcattgttataaaaaaaatgcaatacaggaactaattactacccttgagtaataatcgctgtaacttctgaacagcttaaagggagcttgcctccattccaccaacccaatggaccggtaactcactaggcactagctccacacaaattatcatgaaccacttacactctatttctcccagaaaacatagcctcaattcgtcagcatcttctaggctatgaagaaatatacacaatagaattatatgtggtccatgtggaggataatagcatacaaaatcacttaatagaaggcctaacaatttacactaagaatttcctctaatcatgcaaaactcacctttcaatccccactacataggaacagcctcaataagcctagcaaagtaaaattgggtagtggttaagcctctcttccttatggtccagccaaccttttgcaatgctctctctacatctgcctcagagtgaagatatgctcttgttgcctttgaaggaccagggaacaactctccaaccctctttagcagatcataataaaacgtctttggggcaaaactcagaatcaatcggttgttggccaatgatgcaaggtgtgcaatcatcccatcggctttatgttgtgggtaatgaatcaagacatcgaggcagaccaccgtatcatacttgccatccaagctctctaaatccttcactacaaacttaggcatcacgggcacagatccatcttcactggttgcaagctgttcttttgcctgtttctcagcctcggcaaccatagcggcggagatatcactggcgaacacaacagcgccctctttggcaagaggaatagagagagaaccggtaccgcacccagcgtcgcaaaccgtaacgccctgaagggaaccttcgtccttcaacatgctcagcgtgttctccacggtcttggcgtggcccaacctaatgtcgcgctgaacccggttcacctcgtcggtgtcgccgtagatcttcttccagcgctggaacccggagttgttgaagtactccctcaccacctccttgtcgccgccgcccacctcctccgcctgtaactgccgccgccgctccgggtccgtcagcgacagcaccgccgccagtgccgccacgaatcccccgctcaccaccgcgatcgtagtcccgtcgatggcgcccgagacgtccgccgcagtggccgtggagagcggcgggatggcgaacgccggcgagagagggagtttgggcggtttgtgagagaatcgagtggaaatggcggttctgtttgggtttgcaacgaagagggaagaccatagggacgatgagaacgccattgtgattttgggtttgtgtgacgttaccggccggtgatagcgtcgagtgtgaaggactcaagagtggagtaagtggttgaaatgttatccagataagataacattccagtttccatgtctcgagctgattctcgtgggtcctacttctccagatgggttccgctgtgcaccaaactagacgactgcatctgtacgcctatagcattttaccgttgatttaataaggaaatatccacggttgagattaaaatggtacttttttttgtgtgtgtgtgaatgaaacaattaggtaagactcactgtgatcagaccatttttcaaaagattcatttagtatttacaaaaaaaaaaaaaaaa

SEQ ID NO: 1680 - DNA, 1753 bp, Glycine max
aaattttttttttttttttttttttttttttttttttttttttttttttttttttttttttttttttttttttttttttttttttcttttttttttttttttaacatgaaattcccaactaaggggaagacaaatattaccagtaaatataggacaatgtctgcatagagttgtactcaacagatttactcagaaagcatcatctatccatttccgctgccagcattaaagatagatgacatcaaacatttaccgatgaataaataaacataacatttgcaaaaccaagtttcttaaacaagctaagatatttctcaataagtttttaaagcataaaacaacataaaacttggatgtgatgcatttagttattcatgcccttctttgctttgagggattcaagagccttgttccgcaattcaatctcaagcttcttttgctcagatggtgtaactacactatcactttgatgataatccattcgtttagcctcctcatcacctgaaatatcatctgttttactcttcattttcagcttctccgcacgccgttcttcccttctgcgtcgcttctcttcacatcttcgacgcttctcctccttctgcagcttcttctcctcttttctcctcctcttagcctctttcctgtcctctaactcagaatcatcactataatcctcatcagaagatgtatactttttctcagaccttttatgccttttcctatcctttccctcccgtctatgcttaccactatcctcagaaacagaatcatgtgaagcattgtgattgacacgatcaccttttccaactaaatcttgagtggtttcggatttgtgatgccgataactgcttttggcatagtttgaatgggattggtccttgacatctgattttttaatatctacagcataagattcttgaggcttctccctggaaaaagtttctttgttcattgatgacttttgagcaggaaattcattgccctttccggaagatttatcacgcattatctcctggcctttcttactccaatcattgttatcataatgatgttcagaagctggatgacctgacaccctttcaggagagaactcctcgtgacgatattttgcaggtgaaccttttcgcttactaacagggaaatgttttgatatcttttgtgatgaattcatttttggatctctgctttctctggaatagtgcgtttcttctgcttcatctcttgtatctgggctgtcacggctaggtctttgggttctttgtttcttcagaggattcgtgtttatttcattggacaacttatctcttctttgtttcatagggctctcatgaggacttcgaccttcactgctggtctcactccttgcttcttgagatacagattgaattggagacttctcaggtgtggacattgaatcttgtgatttatagtgtgaagctttgccacatttatctcttattgccgaccccagaggactagagggttgacgagtcacggattctgttctgactctccccatagaagaatgcaagggacttttttggtgtcttggagaatttttcctaattggagatggagatacacaccgtattggagattgagaactctgttcatcttgaggagacctctgtggggagatattgggagatctttgcttactaggaataggtgatctacgttgcaatggagatggagagagtgaaggagttctactaccatacctttgtcgtatgtgggagggggattgcat

SEQ ID NO: 1681 - DNA, 1887 bp, Glycine max
  misc_feature (4)..(4): n is a, c, g, or t
  misc_feature (792)..(797): n is a, c, g, or t
  misc_feature (836)..(840): n is a, c, g, or t
  misc_feature (1872)..(1872): n is a, c, g, or t
tttnttttttaaaacatgaaattcccaactaaggggagacaaatattaccagtaaatataggacaatgtctgcatagagttgtactcaacagatttgctcagaaagcgtcatttatccatttccgctgccagcattaaagatagatgacatcaaacacttaccaatgaataaaaaaacataacatttgtaaagccaagttccttaacaagctaagatatttctcaataagtttttaaagcataaaacaacttaaaacttggatttgatgcatttagttattcacgcccctctttgctttgagggattcaagagccttgttccgcaattcaatctcaagcttcttttgctcatcttcactatcactttgatgataacccatttgtttagcttcctcatcatctgaaatatcgtctgttttactcttcattttcagcttctctgcacgccgttcttcccttctgtcgtcttctcgcagccgtattcgacgcttctcctccttccgcagcttcttctcctcttttctcctcctcttagcctctttcctgtcctctaactcagaatcatcactataatcctcatcagaagatgcatactttttctcagaccttttatgccttttcctatccttttcctcccgtctatgcttaccactatcctcagaaacagaatcatgtgaagcattgtgattgacacgatcaccttttccaactaaatcttgagtggtttcggatttgtgatgccgataactgcttttggcatagtttgaatgggattggtccttgacatctgannnnnnaatatctacagcataagattcttgaggcttctccctggnnnnngtttctttgttcattgatgacttttgagcaggaaattcattgccctttccggaagatttatcactgccaaaggagtttatcattatcagatatgtatgcagtgtgcaggcattcaaattagttagaacagctacagtatgccaatcatattcccgcattatctcctggcctttcttactccaatcattgttatcataatgatgttcagaagctggatgacctgacaccctttcaggagagaactcctcgtgacgatattttgcaggtgaaccttttcgcttactaacagggaaatgttttgatatcttttgtgatgaattcatttttggatctctgctttctctggaatagtgcgtttcttctgcttcatctcttgtatctgggctgtcacggctaggtctttgggttctttgtttcttcagaggattcgtgtttatttcattggacaacttatctcttctttgtttcatagggctctcatgaggacttcgaccttcactgctggtctcactccttgcttcttgagatacagattgaattggagacttctcaggtgtggacattgaatcttgtgatttatagtgtgaagctttgccacatttatctcttattgccgaccccagaggactagagggttgacgagtcacggattctgttctgactctccccatagaagaatgcaagggacttttttggtgtcttggagaatttttcctaattggagatggagatacacaccgtattggagattgagaactctgttcatcttgaggagacctctgtggggagatattgggagatctttgcttactaggaataggtgatctacgttgcaatggagatggagagagtgaaggagttctactaccatacctttgtcgtatgtgggagggggattgcatggggggggggcctacgtagctgacattggttggcggtattcggcgtactggtgaaggtgacctatgccgagtaacaagtgatcttcgtcgtctaggtgagagtgacctccgttgtccaaggggggggggnggcctacgtagctga

SEQ ID NO: 1682 - DNA, 1090 bp, Glycine max
ttatttgaacacaagacagtgttcaagcccaaagtgctagaactgacattgaagcagagccaagagtcaatgcaataaaagacaccttttctcaagtacaaattagagttcataagcttgttatgaaagaaatcaactgctataaggtcaacaagagccatgtaaattagtatgcccgatgaaactgaacctagtaacccttccattatcaaagctttagggttagtatcatcataaccagtcattgagaataacaccatccccagaattatccccattggtgttgtcacagagaacatgaagcacatgtacgctgtagttccaaagctaaatccagcctgagcaatgcagccaccaagacccaagccttcgaaaatctgatgaaaggacaaagcaacaacgagtggcctaatggtgcaaacgttctgagacatccccatagtcactcctatgataacagagtgaaaaattataccaatctccaacacttgggacaccagtttctgcttcaacctcatcaactcttcaaccctctgcacttcagcaccaccaccaccaccaacaagctcaatgctccatgtgccgccgccgccgccaccctccttctcctgcgtctccaccggcgtgtagtgtgcatgctccatgtgcgagctagcaacagtgtctaccagcagggccattagcaccccaataagggtcaccaggccagcaaagggaaagtccttccagggatgctgggatgccacctggcaatcggagagtgcagcaaaggcgtccggcaacacgtggaccaatgaggttgcaagaattacgccggcagcaaagcatttgattaacaagatggctatgttgtagagggactttccctgaaagtatcgagccagtgtgacaggcgcacatacgcctgtcacgctggtcacaaaaatcataaagatggaaatcacttttaagtgtgccgccgtcgtgccgtttcggcatgcggcagcttgagccaagtccgtcatgcactccgtcatattgggaacgaagagtagatggaattgagagtgttgcgttgaacggtagagaatcttaaagagagatgatcaat

SEQ ID NO: 1683 - DNA, 1662 bp, Glycine max
tgctttttaagaaatttaatatcatttaataaatgataactgaaacaaatacaaaaggaacaaaattatatttcacaattccatacactattttttttatctttgatctgttgaggtcatctttcctcgtggggcgtttccttgtttaatttaatacaatgaacaaatgagttgtactactcagctaagcaggtggtcttgtcctttgttgtatcacaccagttccataatcctgagacggtgtccactgtcaactcccttggcatttaaaacaaaacaaaacaaaacaaaacctgctatcattatcaagtgagccaaccacatttaatcatgcatcaccaggtttggagttggggactttaaaaaaaactgaaaagaggatgtgaagggaagggaggaggggtaatagatatctgttgttattgtctgatcagtttctgagaaccccatctgatgtgtaccactgttccgtacatccagagaaatgctgcagaagcagggaccgtctaaacaattatgatgatcaaaaacaaaatttgatatttacagcttgagcatctgctcaaaattcaacctcgtgaagatcttctccataactgctacttttcacaggtttatgcattaaagattcatcaggcgaaaatcttgacgggggcatgcccaaagcttcccctaaaggcttaatattgcccattttttgaggggtaaatgaatcattaaaactcccactccatgaagctgttcggcgtgaatgaggtaaatgagagttatttccatctgctgctacctggtttgagatgttacccatacttggaaacctttgtatggtcgttgatgatacatgttttggggattggtatgaccactcatttgtggtagagattgaaggatattcatttgttgcattgtcttcttgcttgctttctactatagcctcaattgtccgctcatttgatgatggtgcaggagtaggaacgaaaaacttcgcattggcagccagaactggtttcacggatggaacagaaggggactgaaacaagtttgcagaggttccaccaccttggttgaaggtgtcaacataccttgacctaacacccaaacgaccccgggccgagaattgatttgagctgggtggtatcggtggcatccctggactgagttcagggctagcagttcttatgttagagccctcaataggaggagaactttcagtcttcaatgcagatctcaagttgtattcagttgaaccattctggaaagcagcagttgttggaggtggtggcagagcagcagcttcttcagctggaagttcagcaccttcctccacccatcttttcagcttctcatcataatagaacttgtttttctcacccaatttagcctgtcgaccagagcgaggtttcaagactagccctactgtcttttgcaaaagttgtgagccaaaaccaaagcgggaaaagcgagatgtacctcctgatgcctgtgcttttccttgtatatcaggtgacgttgtttcctgtcttggggttcgaccaatatctggctcagaaatacttctattaggctttgccatttgggggggggggcctgcgtagctgcctcgcggttccattgaagcagatggagccaatgacattgttgattggctagaggatacctcgt

SEQ ID NO: 1684 - DNA, 1019 bp, Glycine max
ggtacagaaatgaaatgagtcggattaaaccaaaatatggacatacaccaattttattcataggcaatacccaaacatagataggaatcattcatacaacttttacaatagcaaagagtacatagcttcagttttttattttatttttaattttcctatactagtagtgcagccaaacaaagatatcaactgcccccatatagataagactagtgatggaagcgagttctgttcatcatcgtgatgaactcctccgcactaacctctcgatcattatcttggtctgcttcctcaaccatctcctgaatctctctgtcagtgaaattttgacctagctcttttgcaatgcgcttgatgtctaatgcggatatctttccatttttatcatgatcaataatatggaaagctttcatgagctcctctttagtgtccctttctcctattttggctgtcatcatgtactcaaattcttcataatcaattgctccacttccatccttgtccacatctgctatcatttgattgatttgctcttctgtcatctcaaatccaagggccctcatagcaacattcagctccttggcatcaatagtacctgagccatcagtatcaaataactcaaaggcttccttaatctcttgcttcttctgcgttgtcaaattatgacgtcctcttggtttattgttgtacctcctggattcccctctatataaagatgacatcgtcgtctgagatagggcaccgacaggaccacaattgaattgaaacaacgttaacgtcccaggatcgaattcaatctccctttccccgctttttgataattctatgtctactctgcgtttgaggattttaacgacacgcggttagggtcagaaatttctttccctgttgttttctgcaaaatgaaatggactgggttttggtgttcttcactgattgtattctaacatataaaccagaccgacaaaaaccatttccgaaacggtctgctattttggttcagtttcacggacgcgtgg

SEQ ID NO: 1685 - DNA, 1624 bp, Glycine max
ttagttttaagtacggttctccacacacacctctacgggtcctaactcttataagctataatcgcctagctgcgggggccggacgcgtcggcggacgcgcgaacaaccacaagtgttcttcctctgtaaacacacaaactctgttcctatttcagagtactgtccctttacctcgtacacatcaaacaatggaaggagatgggtattgtgggagtttctttcagaggtgcaagccttacatagccatgatttctctgcaattcgggtttgcgggtatgaacataatcaccaaggtttccctcaaccgtgggatgagccactatgtgcttgtggtttatagacacgcctttgctactgcagctattgctccttttgctattgttctagagaggaaagtgaggcccaagattacatttctcatgttcatgcaaatattcgtgttgggtctccttgggcctgtgattgatcagaacttatattatgcggggttgaaatttacttcccctacctactcatgtgcgataagcaacatgctccctgctatgacatttgtgatggctgctattttcaggatggagaagttaaacgtgagaaaagtaagatgccaagcaaaggtgattggaactgtagtaacagttgctggggccatgttgatgacattgtacaaagggcaagtaatcagtttcttggggtctaagtacatgcatcacccaagaaactatgtacctgaaaacaacactgattctggtgaaaaggattggttcaagggttctgttcttctcgtacttgccaccctttcatgggcttctttcttcatccttcaggcagtgacattaaggaaataccctgctcagctctccctcacagcacttgtgtgtgccttgggtacactgcagtcaattgcagttacctttgtcatggagcacaaaccctctgtttggaccattggctgggacatgaaccttcttgctgcagcctatgctggaataatatcatcaggtatcacctactatgttcaagggattgtcatgcagaaaaaagggcctgttttcgttactgctttcagccctttgatgatgattatcgtagccatcatgggtaccttcatccttgcagaaaaaatatatcttggaggggtcattggagctattctcatagtaatgggactttactcggttctgtggggcaagcacaaggagaacaaagagaaagaggcagagataaccattgaggtattgaagtgttgttcagaaaatgggatgaggttggagactgtggtagaagatgctgaaacaaacaacgacattgagatgcaaaagggtgaagcctcaagagagttaagggtagccattggagttccaaaagtttaaagtggttaagattagaaaggaaagggatgaataataatagaggctgcaatgaaaaaaggggtctttaattgagagcagagaaattgaaaggggttttgttttgtgtactcaccatctttcttcggaaaattaactaaggcttatttttttctttcttttttgtattttgattaggaccttatgtgtggaccttactgtccataatgtaacttaaattttgcaccctttggtgaaaggaaaattgacatttgcag

SEQ ID NO: 1686 - DNA, 1561 bp, Glycine max
tcagctacgtaggcccccccccccccgaggagacacaaacaaccacaagtgttcttcctctgtacacaaactctattcctagttcagagtaccgtccttttaccttgcgtacacatcaaagaagaaaaaaaatggaaggagatgggtattgtgggagtttctttcagaggtgcaagccttacatagccatggtttctctgcaattcggatttgcgggtatgaacataatcactaaggtttccctcaaccgtgggatgagccactatgtgcttgtggtttatagacacgcctttgctactgcagctattgctccttttgctattgttctagagaggaaagtgaggcccaagatgacatttctcatgttcatgcaaatatttgtgttgggtctacttgggcctgtgattgatcagaacttatactatgccgggctgaaatttacttccccgacctactcatgtgcgattagcaacattcttcctgcaatgacatttgtgatggctgctatttttaggatggagaagttggacatgagaaaagtaagatgccaagcaaaggtgattggaactattgtaacagttgctggggccatgttgatgacattgtataaagggcaagtaatcagtttcttggggtctaagtacatgcatcaccccagaaactatgtacctgaaaacaccactgattctggtgaaaaggattggtttaagggctctattcttctaatactagccaccctttcatgggcttctttcttcatccttcaggcagtgacattaaggaaataccctgctcagctctccctcacagcacttgtgtgtgccttgggtacactgcagtcaattgcagttacctttgtcatggagcacaaaccctctgtttggaccattggctgggacatgaaccttcttgctgcagcctatgctggaataatatcatcaggtatcacctactatgttcaagggattgtcatgcagaaaaaaggtcctgttttcgtaactgctttcagccctttgatgatgattatcgtagccatcatgggtgctttcatccttgcagaaaaaatatatctcggaggggtcgttggtgctattctcatagtaatgggactttactccgttctatggggcaaacacaaggagaacaaagagaaagaggcagagacaaccatggaggtgatgaagtgttgttcagaaaatgggaggttggagactgtggtagaagatgctgaaacaaacaacgacattgagatgcaaaagggtgaagcctcgagagagttaagggtagtcattagtgctccaaaagcttaaagtggtacagattagaaagggatgaataataatagaggctgcaatgcaaaaatgggtcgttaattgagaacagagaaattgaaaggggttgtgttttgtgtactcaccaactttcttcggaaaattaactttagattattttttttcaaaaaaaaaaaaaaaaatttgaataggagcttatgtgtggaccttacttgtccataatgtaacttaaattttgcacactttggtgaaaggaaaattgacattgc

SEQ ID NO: 1687 - DNA, 887 bp, Glycine max
aggttctaaatatggcattctacaggatacaacacgacagatctggctcctttttttttttttttattactaaataatgacatgaaacattgataaagcagaataattgccaggaagtgcagttgtgcaagaatgtaaattctggagaggaaaaaattcttctgtaacagcatagttatatggaacctttatttttgaaataacagcacaatccagttgtaatctctgcaacatgcaacaagacaggatattacaaggggaaattacgacaaattcatccttttcaccgataatgcttgtggcaagttcagcaacactcacttaggtggggtagagaaatgttggaggagatcatcataagggtccctcctcccggccacttggctaatctgtgcatcccaagcaagctgagaattgtggcgttcgaatgtccaaaacccatagggtcgcatagggtagctccacatctccttcgtcttctcgcacctgtccttcactctataaacgtgctccctgaacctccgatccctttccttcggatcttccatcaactttaataccaagttctccgcaaattccattatgaaacccatcttctcctctcttctattccctgtttgttccgatcagcacccaatgaaaacaaactgtgctttcccttcttgcgttttcaacgtttctggatccccctttctgtcgtctttcgcagcccacaatcatgacaacaaaacaacggtaaaagccacgaatcaggaacattccgaaaaaaatataggaagaagcctatgtgagaaagtgcaattgaaattgttgaaacgcgaaaattgagtgtgagaaagtgctttgctgcattacctgtttgttccgatcagcacccaatgaaaact

SEQ ID NO: 1688 - DNA, 780 bp, Glycine max
tttttttttttttttttttttttttttttttttttttttttggttctaaatatggcattctacaaagctataacacgacagaaattaatcatccacaaaggcacaaaccttgtaaatactaaataatgagatgaaacattgataaaacagaataatttccaggaagtgcaattgtgcaagaatgtgaattctggagaggaaaaaattcttctctaacagcaacaatgcaacaaaatagtgatagaatagttatatggaacctttatttttgaaataacagtacaatccagttgtgatctccgcaacatgcaacatgcaacaagacaggatattacaaggggaaattacgccaagttcatatcctttttcacctacaatgtttgtggcaagttcagcaacactcacttaggtggggtagagaaatgttggaggatatcatcataagggtccctcctcccagccacttggctaatctgtgcatcccaagcaagctgagaattgtggcgttcgaaagtccaaaacccatagggtcgcatagggtagctccacatctccttcgtcttctcgcacctgtccttcactctataaacgtgctcccggaacctccgatccctttccttcggatcctccatcaacttcaataccaagttctccgcgaattccattatgaaacccatctttttctctcttatattccctgtttgttccgatcagcacccaatgaaaatttactgagctttgtgtcgatcgcgggaaaaggagggaaggggcttgtggccg

SEQ ID NO: 1689 - DNA, 726 bp, Glycine max
ttggttccaaacaacagtagtactactatatattactattaaacatattaatacaagtttcagactccagagcataccagtagggactggttgccctaaatttgcttcaaccttaaagcaaaaatacaacagtgctttcctgacagcaaacattaacattcagcaatgatagcacaattccttaatataaccttaacggttactagtagttgataaacatgaataagttacaatctatcagggaaaaagaaaggaagatgcctagtccaaataccagggagcaccatcatccactcactaattacaaagcacaacactagacactagttaatgatgaaacttctattcttgaccaaaggcaagatcgtgccaagcatccacattaacttgttgaatctcctgatttgagtcctcagtatcatctgtcctaacaaccagtgttgggggcagtggaagatcatcatcaggaagagtgtctctcatccattcctcatcaacaatatcaattagaattcccaaactcagttctgccatttctttttcactttttactaacgcaccgtgttcctgagactgagaggatcaatttcagagtaccaccgctgccactgtctctcaaagtaagaggtttcaaattattattaagctaacattttataagaccgcgttagcgttaacgtttcacgttggtgattaacaaactgaactattttcccccttcatccc

SEQ ID NO: 1690 - DNA, 1696 bp, Glycine max
gatgcttactttttgtttggtctgtcgacacgattttttttttttttttggaacaaatcaaattcactcacctttattctcaactcaacaaaaagtttacaacaacttaacgcactaaaatgaacttactaagttagtaagtaaatctgtttatttactaattcataatagatattcttataactagggaagagttataattgtaggggcatggcgcaagaaatcaggtggccgacttagagtccctcaagcgcatgagatcagcaatgagggtcgttaacctgttgtgggatgaacctccttcctgaagggattgtttagccttttccgcaagctcttccgagcggcgtctgatgttttgagcttcatcgccaccgcccatcaaccttttgatggcagtctcaatggtatctctggtgaccagcttctccctctccccataaccaacgagtctccactcggtggcacccacctccaccccaatcccccgcacctcagttatgagtttctcgttgtaaaactgatccgccatgaccggccacgtgatcatgggaaccccggcggtgacggcctccaaggaggagttccagccgcaatgcgagaggaagccacccacagccgggtgggccaggatgaggagctgcggggcccaccctttaacaatcatccccttctccctgtttctctcctcaaacccttttggaagccatttttccttctcctcctcgctctcattctcgtattccttccctttcttctctggaacaatccatatgaatgacttcccactctgttccaacgcacatgcaatctcgtaaagctgtttatctggaaaatgacagacgcttccgaaggatacgtagacaaccgagttagttggcttggggtcgagccaagtgagacactcgttctggctcaccacgctcttctcgcccctctcttgatccctttttccaaccagacaagctggcccaagatgccaagccttgtgacccgtgcttttctcgtagtgctggatgcactcttctccgtccagctcggcgaagctgttcacgatgaggccgtggctcttgagctctattttgaggagatgatccatgaaggcggtggccatcttgggtggtctggagggcatggtgacgcggtgaggaaaatcggggatgacgaaagggcccgtgtcggaatggagttcggggtgtgatatgacgcacttcatggcggcgccggagaagagggggtatccgttgaaggcaagtcgtgggatgcggaggttgttggccacgtcatccgcccaggaatacatggtgtcggcgacgatgcaatcaggtgggtgctggtccatgaaatgggagatgggtctgcggaggagcatggcggcttggtagaactttgcagtgtcagcgaggtcggtgacagcggacttgatttcgacgccgtcgggaaggcccacatctttggcgggaaagtcaacgacgtggagttggagggaggggcttgacttgcggaggatttgggcgtagtagggagtggtgatcaccgtcacgtgctgcccgcgtgaggcgaagagtgttgcaatgccgcagagagggatcacatgccccggtgacaggtaaggaataaagtgaagtttcagtggtcgttgttgaagatccattctggttctggttcacgtttctactctttcctcttatcgagg

SEQ ID NO: 1691 - DNA, 1154 bp, Glycine max
tggaacaaagacaaatttattaagaaatatgttttacatcctatacaaaaagaaattcttattcattagtacatgaaagtggtgcgatcatgaattaagtacacggaaaattatcatatctataaagcgtaagaagggaagacagaaaattaaaacagagaaaaagagcataggcgcgatttcaaacccaaaacgtcattgttaagctttattacgaagaaagaattatataaagcattgaagtctctattttttttgtagtttatgatgttgttcaaagcctcagtcaaaggcacataatttccaccatgaataaaaatgtccatctctgcaattgatccttgagacgaggttcagttatccatgggtgacattgtttatattagtaggggaaacagtcattttaagtggtgatggcttcaaaggatggtttaactccaaaactggccttaggagattgcccaattagaggagttttgagaacaaaaaaacatgctccaatgacaatgtaacagagagtaagaatcactcctttcatgtagtgtgaagttccatcctgtaaagtgaacgctgtaattataattgtaaaagcaagacatccagtttcaagaagactgaagtccaaatccattcttatacccattatccatgcaacaactacacttaatggaaccacaaacatagaaatttgagttgcagatcccatagcaacacccaacgatatgtccaacttgttcttgtaagcaaatatgattgaaccagcatgttctgcggcatttccaacaattggcagcaaaattatgctaatgaagcttacagaaatgccccaagaatctgaagcagcctcaatagttcccacaacatattcagaaagcagagatatgaccaatgtcatacccaccaaccacgtaaatgcactccaaaatcctataactgccttctcttcatcatcgtccacctcttgtgcatcaaacaatttacgatgggttttcaattggaagaagtatgtaagcagcgtatgctagaagcataacaacgctgcttgctcttgacaactgaagagtgctagtggctatagaatgatcgggggggggcccgccgtagctgaacagcaatggcagcaaatggcacaacaaccccactcgagccgaatt

SEQ ID NO: 1692 - DNA, 1563 bp, Glycine max
ttttttttttttttttttgtatgtggaccatatctcaaatcgaaatatcgtataattagatacacttgcaaattcctggtatcatctgtaggctgacaaaaggaagtttgataggtacctttgtcttttattgctgctgttacaccttgacatttagttatatgcaacatcataatctattttcaaagtttcactactattttttagttatctacctgccttgttgagataacttacaacacgttaaaaatctatgctctcgtaaatcgtaattgaaagattaaacaactaggaacactggcatagctggaatgtcctagaatagttgaattttagatagtaaatggtaaagctttcctcacactagttcttcatttctagtgattccatttccaaaattgttgacgttgatgacttcgtgagtgcaattgtaattctccttcttagcattgtcctcatttactatttgttttgccggtaatgtgggctcttgagtatttgggtttggtgggctataatctttgcttttcccccacaccacaacgtataggcccaaacaaataataacggcaccgatcattcttccaagaaacacttgttcggccagaataaagtagctcatgacagccacgattaccatgcagaggggactaaaagctgttacgaagactgggcctctagttttcatcactactccttgcaagtaatagcccattcccgagcacactatgccagtgtagactgcacatagcagtttcatgtccaattttagagaccaaactgaagggttgcccctttccataatcaaagccactgcggcaccttcaattgtgcccattaagcatatccacgcagaaagagagagttcagcagggtaggttttaagcgtaatagcttgtaggatcacgaaacaagcccaactaaagcatccaattgtgatcaatatgaatcctgttattgtatgtcgcatacttgtcccattatgctggctgtgatcattgcttccgtgtgacccgaaaagtactggccctttcaggagtgtcatgaccatggctcccgaaacagttgttagggttcccaccacctttgcttggctccgtatacttcttattttaatcttctcaagcctaagaatgcatgcgaagataaaggtaatggcaggaagcatattggttatggtaacggcaaaggttgctgttgtgtacttcatccccaaaaaatacaaattctggtcaataactggctctatccagctgagcaccgctatcttcatgaaaattgagaatgtcatctttggccttactttcttgtcaaaaaaccatgccaaaggggccataacaaagaatgcaacagcatgacgataaacgacaaacacatagttgctcatccctttgttcattgcagccttggatagaacatccatagctgcatatccaaactgcattgataccacagctgctaaaggcttcactctttcgaaccaattttgtgtctccatctcttgttagagctcctccaacaaccttaaccactaatttaatttgttgcccctccggctcgagg

SEQ ID NO: 1693 - DNA, 1404 bp, Glycine max
ttttttttttttttttttttttttaataataaaatcttacttctttaagtgaaatcgattatatgcatcacatcacatcattcagcttttttcttttctgtttgggaaattttaaaagactattataagaaaaccagaccttaattacatatttaaagtttattatactaatcaaatatcaacaacagtaatttaaaacagaagtacacactctcacaacaaagatacagaactcataaaaaacacactctaaatagggaaattaaccaaatcacagcacacgaatccaacataagcaaactaaagacatgtccttggctagagcaatcacttcaatcttccttccccaacagagtgaggatgaatttcttgtagtcccctgagatttccttggccactgcatcctcaaggtgaacactatttctcttataataaagctctttgatgtccctgaggtccttctcagcccttgagaccaccacacgggtgagtgcatcctcatcagttccaaccccttttatcgcattgcgcagaaccttttcatagtactttttgtggtcattgatacatctaatagcagtgtgcaatgccttctggaagtcagtagatgcattatccaacaatttcttagttatggaagcgccatggtcatctctgtagcggttgaaagttgccagaagttgtgtcttgctccttgtggtgaggatcctgatggcttcttcatggttgccctttttctccttgatagattcatgaagaatatcagcttcagttttggccaattttgcattgacctcatcaccatcatacctatatgctgtcaccaacccaaccaacagctggcgaatatcaccagtggtattagtagccacatcttcttccaaagatctcttgtaacggttgtgataggcacgcttcactgccaagacctcgtcagctgaaagcacacaagcaatttccacaatcacatggtaacctttgctgccattcttgatggcaacattggccaaaacagcatcacgatctgcaggttccagcatccaacggtacacagctctctcaaagtcaccagagagctcagactccaggcgtttaatgaggtcctcttggtaaatttcctcataaacctttctgatttgttgcctctgatgaacatttctatgacccagtattgcaataacggttttctcatcggtcccccatcctttgaaagccttatgtagagcctcaacgtcttcaaccggagatttttggtttggagcaacaagggtagccatagaattagcagcactcaattaagctagctcttccttaatttctctctcaccacactataagtgctgaagaaatatatgtgatatcggagattgaattggggggggggcctacgtagctgacccgcga

SEQ ID NO: 1694 - DNA, 1326 bp, Glycine max
gaaaattgatccaagtataaccttttgtaatatctacaacgtcttttttatttaaagtttattgtattaatcatacatcaaaaacagtaatttaaaacagaagtacacactgtctcacaacaaagataatagatagtgagatacagcactcataaaagcatactcaaagtaggaaaattaaccaaatcacagcacaagaaaccagcataaccaaatactataagatatgtccttagctagagagcaatcacatcaatcttccttccccaacagagtgaggatgaatttcttgtagtcccctgagatttccttggccactgcatcctcaaggtgaacactgtttctcttataatatcgctctttgatgtccctgaggtccttctcagcccttgagaccaccacacgggtcagtgcatcctcatcagttccaacattttttagagcgttgcgcagaaccttttcatagtactttttgtggtcattgatacatctaatagcagtgtgcaatgccttctgaaagtcagtggatgcattatccaacaatttcttagttatagaagcgccatggtcatctctgtagcggttgaaagttgccagaagttgggtcttgctccttgtagtaaggatcctgatggcttcttcatggttgccctttttctccttgatagattcatgaagaatatcagcttcagttttggccaattttgcattgatctcatctccaccatacctatatgcggtcaccaacccaaccaacagctggcgaatgtcaccagtggtattagtagctacatcttcttccaaagatctcttgtaacggttgtgataggcacgcttcactgccaagacctcttcagctgaaagcacacaagcaatttccacaatcacgtggtaacctttgctgccattcttgatggcaacattggccaaaacagcatcacgatctgcaggttccagcatccaacggtacacagctctctcaaagtcaccagagagctcagactctaggcgtttgatgaggtcctcttggtaaatttcctcataaatctttctgatttgttgcctctgatgaacatttctgtgacccaatattgctataacggtcttctcatcagtcccccatccttggaaagcttttctaagagcttctgcatctaaaccaggcgaaaaggtgatgggagcaatgagggtagccatggttgatttgattatgctttcctcagtatggtgtttggtacattggggggggggccctagcggctcgactccaaagtacaattaatacactatacagttgtgaactcgggggggggcctacgtagctga

SEQ ID NO: 1695 - DNA, 500 bp, Glycine max
ttttttttttttaataattttgagatcaagtcctaaacatatatgtttattaaaatacttagagagagaaatttatacattttaatttcaaatttgttctcatatatacgtgacttaatctttttaaacatgcttataatttaactccactgtcactccatcagccatgtctataacactaagtcttcaatcatcaagtgggggaggatgaggggagaaaggataatgtatagggttaggccctggtccgggataatcttcttcattgatctgcatctttcggttccctagacgtggtggacgagaaatgcgaggatcgtattttggattggcccctggatagtgatgttcatctatgttgtggttgctatttaggtccctcatcaaaggttgttccttgcaggtgactacagaggtgagcaaaagaaagagcaagcacacccgagcgatgaaagccatctctcaaactctagaaagtcaaattttgttgtatgacggta

SEQ ID NO: 1696 - DNA, 1017 bp, Glycine max
  misc_feature (4)..(4): n is a, c, g, or t
  misc_feature (32)..(35): n is a, c, g, or t
  misc_feature (39)..(40): n is a, c, g, or t
tttntttttttttttttttttttttttttttnnnntttnntttttttttttttttttttttttttttttttttttttttttttttttttttaagatgataaaggttattcattattgatcactgatcaaattaactttttctttcacaaaatgtgaaccaaaggaagggcttacacttcaacaaagtgcatatgctgtgcagcacaattattatatattaatgtaatcatgtccttcccaaaagaaacgtctatatagtctgattaatttgactagttttattcattctagcgttaatttggttggaacttattaagccctcttgaacataaccttgaaggatggaactttatcactcaaagacaaatgcttgttcccatcatcaccaacatacaacccaagttccctgcacaaagtctgtgcaaacgagggacagaaagaaagcacatagtctttctcagccttctcaatcttgaaccaattgacaacagtgttaacccctggattcccttcaacaccaccagtgctcaaaaaccacaccccagttagcaccttgaggagcttccacactgggggtttgtcacaagtggtggttttcccataagacttgatgttgagatcggttgaggttagtatgacaccacttttggcattgtagggtgtgaaggtaactggggtgccctttgagacttcaagcttctcttgcaccacaaagagggggcatgtgttgttgccactgcttgaaactgttaggcctccacctttgcctctgaacactggcagaatgtagtacttgacacctgttctcagcttctggcctgaggtgtcaagcactgcttctggtgctgctgcagcaatgccaataaagggttctatggtgaaggccaaaaagagaatggaaaatgccaagggtgaaaccttcttcatgtttctcaatagatagatatggttgttaattgatcggtacccccttctgtcgtctcctcgcagccgattcggctcgagttcggctcgaga

SEQ ID NO: 1697 - DNA, 946 bp, Glycine max
tcagctacgtaggccccccccccgaaaaaacacatcgtccttttaagaaggagaacattaacatcacactggttttgcgatcaaagagatcgaagccagtgaagagcgagcgagagagctaggaacgtaacataacataccacaatgaatcatcgaccacctttccaagaccacatgatgctcatgtctcagttattccctgctgatgcatacactcaaattatttctcaacaaggagagactaataagaagccaagacgccgtcgtaacaagaagaacaaaggaggagaaaacggtgcctcggaagccaacaagaagaggaagcttagtgaggtgcaagttaatttacttgaacaaaactttggaaatgaacgcaaacttgagtccgaaagaaaggataggctggcaatggagcttggtttggaccctcgacaagttgctgtgtggtttcaaaacagaagagcccgttggaagaacaaaaagttggaagaagagtactccagccttaaaaaaaatcatgaagccaccttgcttgagaaatgttgcctggagagtgaggtgttgaagctcaaagagcaactttctgaggcagagaaagagattcagaggctgctagagagtgccgagagagtcccaagcaacagttctagttcgtcacagtcacaatcaatggaagcggtggacccaccattctttggggaatttggagttgatggatatgaggatgatgtgttttacgtgcctgagacccattacatcaacggcatggaatggattaatctgtatatgtaaaactaccaataggaatttagaattttgtagataatgtgaatggtccaatgtatattaattggttggcttttgttctaaaaaaaaagaaaaaaaaaaaaaaaaaatttggaaattggaaagtatccattaacataataatttgcaatttgacccg

SEQ ID NO: 1698 - DNA, 961 bp, Glycine max
gttaagcgaataatgttatttacacaaactttcgtacataaccaatctgaattctcgagtaagtttttctagtcaaaacatagatgcagtcaacagagttattctcagttataaccataaagggtttcctttcctgtatgctgtgagttcaaactactgagaaaacgaggggtggggggaatcttcatagatgtcaacaccaagcgactgaaattggtaatagatcttgatcaactatacgaaacaagagagataaatctacccagaggctcaagattgttagcacaatttacatttactgatttacatgaagccagcgacttaacatcacataaaacaaacaagacaatacatgggtgggcataacctggtatagtttgaagctccgagtcatatcttggtgcaacttattcaggatgagaagtccaatataccagtccactgatcaagacaaaaacacactgcaaaacacctgcaactccagtccaaactgaaggggcagatttatcaagtgaatcttggatcagtaggccagctgatccagctaaagaaacaaaggatacaacatatgcaatgaagagccacagcttcagtctccactcgccttcgtcatatggagaataatcgatgtcttcttttctaacgcaattgaacatcaaagccgcaaaagatgcgaaaattccgggaaggtagtgaaggaagggaacggtgaccaagctgcagacgaccgcgtcaagccagatccaccatccggcgccgaagacagcgccggcgacgccggggccgaaaattgcccataactccagtaagtccatcttcttcccttctgctgttctgtcacacctaatcaacaatactgtttagtttttatatgcaattattatgcattgggcatttcactaacacgttcgattacatgaggatataaagggaaaagaagagtatcagtacacaagaccaa

SEQ ID NO: 1699 - DNA, 1459 bp, Glycine max
ttttttttttttttggacaggatctttcaatggacaggatctttcaatttttatttactcgttggtcttatcagaatgtaaaagatttttagaatatttatatacaaccagaaagctgtaaatgctgtattgcacaaatgaaatgtatggaagagagaaaatacataaacatcatcagaaatacagctgtttgcagtttgcaacagtagcttcggctggacagtatggacacttgaatgttcgggtgctgttttttgatagcttcataattgattgtttgcaaaggacatgtaagcatggcagcagcattggaggattttcttcacttccttgatccctactcacagggcaaacaaaaatcgaatggaactgaaactccttacccaattcaaccggcaccggcaactgcttcatttcctgccactcctgcttctttgctgccattacatttgccagctttaacagtgtaggcaacccctcaactcctgctgcaactgctacactcagtgggttctcataggactgacccaggagagtgcagaactgccgtgcgagctcttcggttgtcatctcccaatgaattggggacaacagctcagaataaggagagctctccagccttcctgcatacaagaggcaacccataagctttgggaactcacccttgttgagggaagcaaaaggagcaaggtaagttcgggcatattttaaggcatcagctcgggttccattttgcaggacctctacaaactgcagcgtgtgaatcttaagctcaagattggaaccaatctggacaagtttctctcgattagcagacacccatgtgagagcaggctgaaggtttctctctctcatagctccaataatctgatgcatttccaaaaattgagatctaagtgcagctgcatcaggctctccagcctcatttatgatgctatctccaagatcaaacaaaccttgacggtaaaagtggtttgcaattatctgattgacaatatgagtatcaaagtccacatttctgtatgcctttgatatgtcagggtttaacaatttttcaaggagtttttgatacttggtaagacttatgttcaattccttatttgatccttccaactgttgaagtggtccaatagcattaagcttaaacttaagttctgtgagaacagatttctggtcaacaggagctgaggggtcatgtgatgactgaattgttgccaatgcttgctcaatttcacaccccacctggtcaacaacttcttgagacttggaagaggataatttttgcttcttggctacacgatcaaatgcatctttgatgctactcagctccatctttatactcagatcacaaactccagagaaacagtgagagaaagaaagcgaaagcgtgtgcgatgtgagggagacggggggggggggcctacgtagctgactcgagggggggcccggtacccaatcg

SEQ ID NO: 1700 - DNA, 1361 bp, Glycine max
aatcactttcacccctcccagttcccaactcctctgccgtcaagctcacatccggagcgataaaactatttcagttgttcggctggctataaaatcctcttaaccagttgttgctgctgcgttgcacttcagtttacagctcccgaaaatggctcctccaagaggtcgtggtggttttggtggtggcggtgggttcaggggtggtggtaggggtgacagaggcagaggaaggggcggtggaggaagaggaggagacaggggcactcccttcaaagctagaggaggtggcagaggtggtggtggccgtggcggaggcaggggtggtggccgtggtggtggcagaggtggaatgaagggaggtagcaaggttgtggttcagccccatagacatgatggtattttcattgccaagggtaaagaagacgctcttgttactaagaatcttgttcctggtgaagctgtttacaatgagaaaaggattactgttcagaacgaagatggttccaaagatgagtacagagtttggaatccttttcgatccaagttggctgctgccatccttggtggagttgacaacatatggattaaacctggagccagagtcctttacctaggagctgcttctggaaccactgtttctcatgtatcagacgttgttggccctactggagttgtctatgcagtagaattttcccatagaagtggacgtgacctggttaatatggcaaagaagcgaactaatgttattcccattattgaagatgctagacatccagctaagtataggatgctggtcggaatggttgatgtcatattttctgatgttgctcagcccgatcaggcaaggattttggggctgaatgcttcatattatctgaaagcaggaggtcattttgttatttcaatcaaggctaactgcatagactccacagtccctgccgaggcagtgtttgaaagcgaagtgaacaagttgaaggcagatcaattcaaaccattcgagcaagtcacccttgaaccatttgagagggaccatgcctgtgtggttggtggatacagaatgcccaagaagaaaaaagatgctgctgagtagattgctttccggtagccagtaggcttaatgtcatttcaggagattgtgttaattttgttttgaaacctcggttatcaaacatactttgtaccttttctatagtagtaatgtagtcaagtttgccttcaataaaaaaaaaaaaaacagtaaagaaataacataatctacccaaattacggtcttaacggatcgagatgagacaacagcgatgcttgtacgttctacttctgaatctagctcatttctgaagtaaaaaaaaaaaaaaaaaaaa

SEQ ID NO: 1701 - DNA, 3093 bp, Glycine max
aacttaaaaggacacttctcattcctttggcattgccaattgaaaaatcatataaagacatgatacaattttctagtaatattttgtgactcgacatattcaatggtaaaaaatgaactatatctttggctaaataacaggcagaacatcccgtgaattctccctccctgttgtggtatttgttgtacattactcttgatgtttctttacacttgcatggaacaattgctgctgtaaccaagatccccccgccatcccccttctaatttacagatacaaacctgctttctcactaccagggactaaataaacatactcctagagctggatgaaacaaacagacattctaacagcagcaacaacattcgtgaacactcccatttatgccattatgaaaatgtgaatcttgagaaaagcgataggccagatcctgaagtatcgcttgcaggatttggtggtggaacatctgtggagttgtgatatgcctgttgacacttctgtatctcttctggactaaactgaagcagcattccaataactggtagcaatacctcaacttcaccagtctcaagcagctttaagataacatttttcaaatatgtcatatcaacaccttcccttttctttgatctttccatactgcgaagctcatcctttaacattgcctcctgttggctgtggagacgattctcacgttcaagctcctcaatttcttcttgaagagctaaaatatggcgctgtgacagtgctagctcttcctctctttgggcttgttgtctagccaaaatcagaatttgctgttctgctgctgaggggcttaaatttgttgaatcccatttatgcatggctgttgtataattatcattctgatcgactggtggtcttgattgaagagactgacgaagattcttattttcatctataagtctggatatttcatagtctttctcctcaatcattctatcagccagatcactgaaatgaagcatgttcttccttcagttttttacatcgctgtttgaactcttccaattccttttgcatatcttttgtagcagtagcttcattttcagccttcattgcctcgcatctgattctccatgtttcttctacattttgaagacttagtccccattcctctttctcttttaggtgtttaacattagctgagtcaagctttatttcaaagctccttatctgttgcttgacattttcaagggctgtgtctctttctgcaatctctttctcatgattagccatagcagattgaagatcttgaagaactctatccctttcttctgttattgataatacttcattttccacctcctggagaaaattaaggatgcaattggtgattaatttatatacactactcaaacaacgtcttctacaaaatactgatcaaatatactctcagagtttcctctagagctttgagttgttcagaatctttagcagcagccagctcagcatccttcttttgaagaagtgcatgtgcacgaactttgtatgaagaaaattccttctcaagagagctgatctcttctttggcagccaacaattcggcatctctcatattgaggattcttgtttgggtggatacctctgattccagttcttatttttgctacttcaacttctgcacgtatgcagttgctctctgcaatttcaagttttgctttaagtgcctgagaagcagtctcccagctttccctttctttttcatgctcctcttttaggtgagaaagctcccctttcacactttccacagctgctctgagtcgtgcagcttctcctgttgatgccgcttccatctctgcaattctggattctttttctgcaactagaacctgcagtgaagaaatggattcagttgccttacttctgtcagacaatgcatcattaagttgagcctccaaactctgtatattcttttgatgtttagctgagagctcagctagtgccgcttgccttttttcttcagcagcctgaagcaaccctctcatatcttccaacatctgttccttttctacaactgattgttgcaatgcctcaatagcactctctttaggttgcaatgaacgccttaaatcttcaatggtatctcgaagattgttgtttgcacttcttagttgttgtctgtcaacatccatggctttcaatgcctcatttgcttgcttcctagtgcgctctaattcttgttgcaatgctgactgttgggatgatgctcgctctgcaatttcattcacctcagagaagcgggcctcaagatcatctttttccttttgaacttcttgaatgcgctgttttgctcgtttgtgaagcctattaaacttggaatcaagttcaaggtacttctcttcacgctcttttacttcttggtctaacttcgtttgagcttctgcaagcttttcagagagctcttgggcctttgcttctgcctctgagtaagccgtttgaagatgcttcaaagcctcttctgatgcaattcttgtttgtttttcttccagaaattctttatttaacaattgtatcttatcctttagttatttcacaatgtcagattccccatcttccaagccaccaactcctttggggggggggggggcctacgtagctgagtctacatttttaaatccctcaaactgggacttcaagaagtcattctgaaacctgaggtccataaccatttgtagaagctgatcatgagtatcagcaggaccttgattgccatcagacaaaccattttccaatataagatttccgttgcttccatcttcattatgatgagtcacatcaggaaaattctcctcagatctagcagaatcttctgcgtgagtatccatcattccaccagtatccccttcaccagatgcaatcaacctcttgcagcacaagtctgaccagcataagctgagtgtggggaaactgtgctgcagaacgaaagtggaagagaaatcagcaaataaacgagcttaatcgatttgaacgcgggaagtgccggtggaggtgggatcggtggcggaatggatctcacgccggcgtgcacggtaaggagagtagaaaacgctccgcgttttcgactctcct

SEQ ID NO: 1702 - DNA, 2584 bp, Glycine max
cacttttttgttttagaaaacacaattaaactggtctttcccggtatttgaataccagtccaatcacacgttttgtttcttctagtttttaacttgtcttaccttggtactgttgaataaaatgacagcaaatagaaacaacagcagaaggtgatcttcaagatcagcggacaagaatccaaaaattaacgataatatatacaaatatcaacaagacttcatattgtgataagaattacacagctaaagagaacatgtattctatacaagctccttgtataaagaatcaaagaatgatcttctgttgtggtattattttgaatctatcatttgactgatgatgcaaatgtacactggcacatagaaaacgtatttaaggaatcatgatacacctgcaaggtgaggagtgcttgaaatcatatgtagtagaaatttgtgctcagaactgttatggttaccctgaaaggcacctgaaatggttccaaagggatcaaaattgcacatcctgttgaaaatagcactcacttccttgttaagttgcctagtagtcttcatgtcacaaacttcggtgttaatttgtaaatcaggattgagcattggagtcattgcacatgcactcaggaataggaaacttggtaacatccctcccagctttgatagttctaagttctggctgccccaatgagtcttggtgcaactctttcataatcctgttgaactcttcttcagggagggaagaattgtgaaaataagggagcatgtgtctcttgtttggggttatatatttcttgtgcccggcaaatgctcgatgaccctgaattgcatggcccatatttcccccatgagatggcatgaaaacatcactcttctcagagactatgtaatctatggcagccattatagaagccttatttgcaaatggttgtagttctcctggcaaggcaagatcttccttgctataaaaatgaggaaactcttggatcaatggaagcaaggctttttttccacccaatggttgtcctccagcccagtaaattcttgcattctttggagctcctagacctttcaaaagcctagtaacctccacagcattcaaggggcatagaccagccatcttcctttcatggtaagtcatgcttgatcttgcagtcaagagctccggccgttgtatcctctcattgttaacaatctcatcaaattcgggactcaaaccggggaggcatccggtcctcacccacacatccttctccattcttagatgaagaacaaggtaaggtcccttgctttgcattctctctgcaatgcctgtcaccgagttcttgaatcggctgagcaaaccgtagcgcgttgaaagcaaccttgcatctaagcttttgaagatcagaagggagatcctttgacagccttgaatccaaactgcgtaagagcaaaacaccttctctgttgaatcttctgagatatcttgaacggatccaactaggagtgacatgaaggggaggactaccctccactggttttgtcattagatgtgttgatggcaatgctgaaactactcgaacatcattggcaagaactctcttgaagtgcttcaagtcaaatatatcaccaaactcactttcatcaccccaaatgacattgacttgcaatataggaacaaccaaagcagctccaagaatcctagcaatgacaacagcatcaacaatctgattcctctgctgattcaaccccccagaaacaaccaccatcaggtactttctcctatccctcagaaccctttcacttgctcctctgtaatccctgctgaaactcaagcaaggcttgtatcccaacccatctggctgctcccaaaactcactcttctcaacaccctcatcaccttccaccttctccaatccctgtgctctcagctccacatgagccaacaaaacctcatcttttttttggtcattattctctctcacaacagcaccaaggcttggctttgaatgtggggtggttgagatcatgttccgtggcagaagggctgtggtggcacatgggtaggggggaaacggggtgtgaagtgtgaggccaaacttgagcatgccaaggaaaccaaagagaaagagtgtgaggaaccacatccttggttttctgaagatgatgctgttggtgttggtgaagaagataaagaacctgctgttggtgttccttgaagacttcttgggagagtcaagaagagattgcagagaagaagatgatatggagttgatgatctgagatggaactgatatgtaggacaacttgttggcattgttctttgacttagccattgaagagaacaacttcacaatgagagaaagagagagagagatagagagaaagagagttactgcttttcttttattgtgtttttgttcttaacttcttctcttcctcgggggggggggcctacgtagcagagattataagtttggtttggttttaaaagagcctcaatcaagttttcattcaaagtctttttttcttttttctagagagagagagagagaggagggtcggcgggaacacccagttagatcaaagtttcaacgcgtaatttatg

SEQ ID NO: 1703 - DNA, 1618 bp, Glycine max
  misc_feature (33)..(35): n is a, c, g, or t
ttttttttttttttttttttttttttttttttnnnttttttttttttttttcttttttttttttttttttttttttttttttttttttttttttttttttttttttttttttttttttgatcttgaaagggcaaataatcaatacaaaactagaatttatacagatatgtacaatagtacaaggcttcatactgtaatataaagaattatacgtaagtaacaagagtaatatatatcctatacaaactctaaagaatcaaagaatgatctgctgttcattgttttagcctattctgatgaaaatctacattgcctcacataacaacatacagttacgtatatttaaggaacaaggtgaatacacatgtagggataggcatgcttgacattatggctcttaaaagatggtgctcttaagaactgtggtttctgaggaaatgacctttcaagcaaaattcgcaagggatcaaaatcatactcgtagcatcgcttccgtgtttgtttatccattttcgtgtaatcttcacaccaaaagctttggtatcaaatgtgcaatttaggaagaatgatgatgagagtcatcattgcacatgcactcaggaacaggatacttggtgacatccctcccagacttgctagtcctgagttctggctgacctaatgaatcctgatgcaattccttgataatcctattgaactctttttcagggagggaagaattcagaaaataggggagcatctgtcttttgtttggggttatatatttcttgtgtcctgcgtaggcccggtgaccctgaagtgcatggcccatattgcctccatgagatggcatgaaaacatcactcttctcagagactatgtaatcaatggcagccattagagaagctttatttgcaaatggttccagctctccatgcaaagcaagatcttctttactgtaaagatgtggaaattcattgattaatggctgtaagacctcctttccacccagtggttgtcctccagcccaataaattcttgcattttttggagcacctagacctttaagcagccttgtaacctcaatagaattcaaggggcagaggccagccagtttccttccatggtaagtcatgtttgattttgctgtcaagagttcaggccgttttatcctctcgttgttaacaatctcatcatactcaggactcaaaccgggtagacaaccagttctcacccagacatccttttccatccgtagatgaagagcaaggtagggtcccttgcttttcatttgctcagcaatatcgttaccgagttcctgaacaggctttgcaaaccttaatgcctgaaaagcaaccttgcatcgaagcttctgaagatcgggaggaagatcctttgttagcctcgaatccaatccacgtaaaagcaagacaccttctctgttgaatcttctgagatagtgtgaccgaatccaactgggagtggcatgagggagagggctcccctccactggccttgtcattaggtgtgttgatggtaatgcagaaaccacccgcacatcattgacaagaacactcttgaagtgctccaaatcgaatatatcagcaaattcactttcatctccccaaatgaaaaagtc

SEQ ID NO: 1704 - DNA, 1546 bp, Glycine max
caaaacacgtactaaatcccactactatgctaccaaaaccgtaagtacttgttgtacagaaaatattttttttttttttttgtagcaaaataataatttttaatttagtaatcaacgtttgcaatgttcgcagactcagtatctaaccagggctaggaagcatcctggtaaggagatactctgcaaacaagcacattctgaaacaatgtcatcaaattctgaactccatgctatcgtggaatacattcctttctgtccaggtcttccaaacttacatttgcatcaagacccacgctcagtaactcactaaccatgacaaggatatcagatttcaaagaggctgataatgcctttctgtcctcttctttttggtgcttaataacttccaaaggccactcggatacaagcttctgaagttcacccttgatgcctgatttctttgtatcagacaaggtctgatttagaacttgaatgacagcaactgcatcactgggtttacgttccaacagtagacccttgacacaagaaaacccagttatcaaagtgtgctgcttcattgattcagatctcaacttttctattttccataatgactcagtgtgtcctcttttggcagcaaattccatccatgtttcaaatgaggtttgtcgtagttttacgccagccatgacaaacctttttgcatacttattaatcaactcccaatcatctgtattataacaaatgctaaaaattatatctgctgtgcctggttgcagtggtaaatcattcttcttcagaagcttcattacttccaccaacagtttagtatcattgtggttcttagcatacgtcagtaaatggtgaacagatgcaatatttggagtcagtccatagacattatgcttccacaaagccttcattccaaaatcaagagctcctgcatgaacacatgccttagcaacttctcggcaaagattgcaattaaaattgtcatgaattcgaagattcgacaacctaaatctgcggaggttctgcaaaatgtcgaacagaagtctaatatcgtgctgctgtttgcaatttgcaatcattgaccataaccaagcatttggaggcattgatcgtttaacttttacagagtcaagcattttatcgtataattccttcacatcctctgatggagttgcttcaacggtatccattccggaagagaaaaaagccttcgacaaacagtgtaccggatcggtgttcacttgccgggaatcacgttgcgcgagccctgagaagagagagagcgcggtggagtgaggagcttccgaggttcggagatgaggaaagaggagaagccaagaggctcggcgagcgttagagaaaacttgcatggttcagtgtgaaagaaccgagtcacgactcagttgtgggttccaggtggcgaactcggtatgtttagggaggaagaagctataaacgaaccctttgggttcagggttttcgagacaacaacagagaaagacagagagtgcttcggtggaacagtctacacctttgttaacatgaactcgtatac

SEQ ID NO: 1705 - DNA, 1410 bp, Glycine max
tttttttttttttttttttttttttttttttaaaccaaagccaactggtagaactaccaccaccatccattattttattaaagcaccttaacccgaattaccaaacgcacttgtagttcataaacgttattattgttggagaaagggcaagtacttaagtagtaatatgcccagatacaagataacactacaaaatgctgttacaggttataggtttcaaaaggatggatagtactccatgctctagtccactatatagctgaagacgatgcaacctctttgattattggaaaaccaggtgcagcattgatggcacaaacaccataaggccactcgtcgctaacattccttttgattaagaggtaaccttcttctccccagtcttttccccacgagttcttcacaatccaatagtcttcgccacccaccgaaccataacccacgattaaacaaacaagagtcgcttttgttgaattctttgagcagttctcaccaccatagactccacccgcataaaattgaaggccagttgcatctatgctcacgctaacaggttgtttgctaacacggcacaagagagcttcttctggtccaaccacaactagaagattatcaatactaacaaccttgtttgcattcgccttgcaagtaccgttttgggctgtgtaaggataatgagcttctgtgtcaatgccaccattttctataacgtaaccaaacgcattgaagtaaaagcctccagcacaaccatggctagcagggtcacaatccacgacttgttgtacagatagggaaacaagattcccagtaactattttgtttattccttctatggcccccgtgacactgaaagcccaatggctttggcattttccttggtctctaacttcagtgacagctcccttgtccctccaatctacagaatgaggaagattatcacagtcagcatcatcacccttctgcagcttcttcctactctccaagttggagtagggcatctctatttctttcaagtaggttttcataaactcctcaggactcatatcagcaaacttgttcagacccaaacgatgttgcgtcgtaggtgacttcctcttcgcattcatctcgttgatgtacctcaaattactttggaatatctggaacctctttgccttctcctcttggttgccatattcacgcttatgctccttctgccacgcttggaatagttgaaacacttcttcctccgaagcaaactgctccaactggttactggacatagcaagggagagactacatgtgaaggaaacaaggacaatgaaaaaaggaaacaacttggtcctctgcaaagacatcatttgcacaaatcagtgaccttgttaatggataacgttatcggggggggggggcctacgtagctgactcgaa

SEQ ID NO: 1706 - DNA, 3705 bp, Glycine max
tagggagagagagagagagtgcgtgtgcagagtttgcaggcttgtagcagaaatggtggcagatggttttaactttatgtgtgaaataattttcttctatctctcttctcttttgtgttttcttttctctctcttccccgcgtccgcttgcatcttcttgtgttagggagtgatgtttgtggcagaagaacgatgtgattgcacagccaaagctgtgaacttgttctgttactactttgtaattgtgatcaaaggctagagggtatgcagagtgcacagaagaatactagtctcaaacaaaactcacctcactagttactactacccttttaatctcaagccatagttgagtcaagtggtgcagtgtcactaagcataacacccttttttggttcttgttctgtggtttcttgtgctttgaacaatagcttttggaaagagcttgatgatggtggttgttgagtggtttcatggttaggctggtgtgaagttgaaagttctgcagttgcagctatggcatttcgatttggagtccttattcttgctttgctaatttgtttgagtgtcaattctgtggaatctgatgatggagcaacgttgttagagataaagaagtcattcagggatgtggataatgttctctatgattggactgattcaccatcatcagattattgtgcctggagagggatagcatgtgataatgtcaccttcaatgttgttgcactcaatctttcagggttgaatcttgatggtgaaatttcacctgcaatagggaaacttcacagtttggtctctattgacctcagagaaaaacaggttatcagggcagataccggatgagattggtgactgttcttctttaaagaacctggacttatcatttaatgaaattagaggggatataccattttctatttctaagttgaaacagatggagaatctggctcgggagaatctgattttgaagaacaaccaattgattggaccaattccttcaactttgtctcagattcctgatttgaagattctagacctggctcaaaataatcttagcggagaaataccaaggcttatatattggaacgaagttttgcaatatctaggcttgagagggaacaatttggttggttcactatcaccagacatgtgccagttaactgggctgtggtattttgatgtgagaaacaatagcctgacaggaagtattccagagaacataggcaattgtactgccttccaggtcttggatttatcctacaaccaactaactggagagataccattcaatattggattcttgcaagtagcaactttgtccttgcaaggcaataaactctctggacatattccaccggtgatcggtctcatgcaagcacttgctgtcctagacttgagctgcaacttgttaagtggatcgatccctcctatcttgggaaatttgacttacacagaaaaattgtacttgcatggaaacaagctgactggcttcatccccccagagcttggaaatatgtcaaagcttcactatttggaactgaatgataaccatttaagtggacatatcccgcccgagcttggaaagcttactgatctgtttgacttaaatgttgctaacaacaatctcgaggggccaattcctagtaatcttagctcatgtaaaaatctcaacagcctcaatgtgcatggcaacaagttgaatggatcaattcccccttctttgcagagcttggagagcatgacctctttgaatctttcttccaacaatcttcagggcgcaattccaatagaactgtcgcggattggcaatttggatacattggatatttcaaacaataacttagttggttccatcccttcttcccttggtgacttggaacatcttctgaagttgaatctaagcagaaacaatttaacaggaattattccagcagaatttggaaatcttagaagtgttatggaaattgatctttcaaataatcaactctctggcttgattcctgatgaacttagtcagcttcaaaacatgatatccttgagacttgaaaataacaaattgactggcgatgtggcatcactttcaaattgcattagtctctctctacttaatgtgtcctataacaaactatttggtgttatcccaacgagtaacaactttaccaggtttccccctgacagtttcattggaaaccctggtctttgtggtaattggctgaatttgccgtgtcatggtgctcgcccttcagagcgagttacattatctaaggctgccattcttggaattactcttggtgcccttgtgattcttcttatggtattgctggcagcttgccgaccacatagtccctctccttttcctgatggatcatttgacaaaccagttaatttctcccccccaaagctagtgattcttcatatgaatatggcactacatgtgtatgaagatatcatgaggatgactgaaaacctgagtgagaagtatataattggatatggagcatcaagtacagtttataaatgtgttcttaagaattgcaagccggtggctatcaagaggatctattctcactatccccaatgtattaaagaatttgaaactgaacttgagacggttggcagcatcaagcaccggaatctggtcagtctccaaggttattccttgtccccatatgggcatctcctgttttatgactacatggaaaatggcagtctatgggatcttcttcatggacctaccaagaagaaaaagcttgactgggagctgcgtctaaaaatagcacttggagcagcacaagggcttgcttatctacaccatgattgctgtcctagaatcatccacagagatgtgaaatcatctaacattctattggatgcagactttgagcctcatctcactgattttggcattgccaaaagtctctgcccctcaaagtcccatacttctacttacataatgggcacaattggctatatagaccctgagtatgctagaacttcacgtctcactgagaagtctgatgtgtacagttacggtattgttttacttgagttgctaactggaaggaaagctgttgacaatgaatccaacctccaccatctgattttgtccaaggcagcaaccaatgcagtgatggaaacagttgatccagacattactgccacatgcaaggacctaggagctgtaaaaaaggtttatcagcttgctctattatgcacaaagaggcagccagctgataggccgacaatgcacgaagtgacacgtgtactcggaagccttgtgctgtcaaacaccccaccaaagcaactagctgcactaccacctgcttcaaatccatctgccaaagtgccatgctacgtggatgagtatgcaaacctcaagactccacacttggtgaactgcccctcaatgagcacctcagatgctcaactcttcctcaagtttggagaagtaatctctcaaaacagtgagtgaaagagtgagcggggattttgaaatgaaaatcaagtccaagaatcatgtatattatttaaaaaccaaaaaagagaagcgaaaaaatggatgaggggtaatagttaatgaaaatgtttataaaaagttttagtactagttttttttttttagtgttggttgatttgaacaaaaagaaagatattatgtatcatcatcatcacaatttgaaaggtgaagtaaatccaattcttgtc

SEQ ID NO: 1707 - DNA, 686 bp, Glycine max
aaactaaatttatttaaggctggtgagtccctttaaatcagggaattaaatacaacttatttcatcttaattaaccacaacaaaatatgggaaataatcattaatcattaaatgcttgttcctcataaattcaacaaactattttatttttttacatgaaagcaacttgcaagcatccattctgttaatcggactatttcctcctctgccttctcctcaagatatgctgctacaagtgaagttcttggggatgggaaagcccacatcaacaccacattccttaggaagtgcaatggctctgtcttgcttgaagttaggaatgggagttagtgcttcttcaatgcactgacattcagcaattttttcatcttttgttggtgctgatgctttcaattccttgacaccattgcaacatgcagctgaagggctatcaacattaccagtgaggtattccatgcaagactttagtgacctttttgccttttcacaatcgtagcccttccctgctggatctgcagccataattgtaaggactaacacaacttgcagagctaagaatgctacgaaaacttgtttcattttgtcaagatagtttatgtttctcaatgagcttaatttctaggatttgcttgtgttttgatgtggatggatttctgtcgtcttctcgcagccgtacggacgcgtgg

SEQ ID NO: 1708 - DNA, 1502 bp, Glycine max
  misc_feature (1502)..(1502): n is a, c, g, or t
ttttttttgccaaatgaagtttagataggagacagagactcgaacgagatacactatcgataatttgatataattccttttacctttaaaatgcatctttatgcagagcaatattggaattgaatcaagatctattggaaggatagagaccaaggaaaagataggaatccatgtaacaaaaaaatttgttcagcatctcaagaagcaatgagaaaatatcctatatcttggtccttttgcttattatcccacgaataagttgtccaacttcttcgccacaatcttcctgcacatgatgaccagccgtaggaacatcaatgagtttatgattggaatccttgcagaaatcctccactccatcatagctcaaccagcggtctctttggccccaacatattgtggtttgaactttccaatttttgtccttcagtattgtttgcatatcctccacatatctcttgaggtctttgttcatgttcctgctaattgcatttagagcaaagccagaggaaccagatgtaagatagggtcttctatagaccattgcatcttcttctttcattttataggggccacagcttgttagagctttgtcactggcccttaatggatcctgtgaaaatatttcacctagtagaaagttgctgaatatggacaatgttggtggaagcttggcatgttgggctgttagaggcggattaaggagtattaagtttctgactttttcctggtgaatgctggcatacttggctacaacaggcgaaaaatatccctggacaacaagtgagactttagtagcagccagttcatcaataagtgactccaatgatgagacatactcatccagtgtgtagtcaaacccatatctgggttgaggcttgtcagaaaacccaaatcctagccagtcaaaggctatgacgtgatagtccttggagagtactggaagaactttgcggtaagaatatgcctgtgaagggaaaccatggattaatatcactgaaggattatcagcacttccgctttcaacacaaaaccatctgaaacgatcgccagtagcttgagaaccggaacccatagcaagtccaaaaattggatcttttgccttttcaccagtgccaggtattgaataggctttaacctttttcccttgcttaaaccattcatcacttggactagggccatctgaatacttccctccactgaaagagaatccatctccaacagaaactggagcatccagaaggtaatcttggtcaccattattgccacttgaactgcaattcaacttgagagattttcttgttgaagggcatgattggaacctcctcgaagcaaggaatggtggagatgaagcggtggaagaagaaaagtgaagaaggtgggaacggaaacaacatgcagagccatgaaaagcttgaagggtcatagcaatgataacatgaagtggttggttttggttgagagggaacgaacgagaaagtaacttactcctcgagccgtcn

SEQ ID NO: 1709 - DNA, 1354 bp, Glycine max
ttttttttttttttttttttgaagagaaagagaatgtattttactcttaatcccaaaaggtcaacattttttaaatgtagtatgaaagaaagaagatcgacaaaaacaaaagtgggacataaaccaaagcagagtaataaaatgccatctagagatacgtaaaactacgtttttgctttgtcccaattagtcttcactatcgtaatcttatcttcctggaccaaaacacgatcactgaaacctaagctacataaacatgtcaccttttgagatattacagctattgcagcactaaatcatagcaagttagggtatagccaatttttgcagctcttcatctttaagttacttgcttagtcttccttcttatccggttcgtccagcacagccaatctttcaacaaggggaggatgagaatagtgataagcagagtaccaaggatctgtattcatagctgacagattctcctcctgtagtttcacaagaccaccgcgtaatccagatgcatatccaagcttcttggcaaagccatcagcctgaaattcaaatgatcggctgactaggttcagaccaaagctgaccaattgctgaagtgggattacagtatgctgaaatatgatgagcccaatgaggactggctgggtatcaaacccaaagcttcgatacagatcagctgaatttcgcaccagtgtatatcctccaaattgtagaagtgtaagaatctgcatagcaacaaatgtgtacacagtatggttgagcttccagtgtcccaactcatgggcaataacagcaacaatttcctcatcgtctttgcactgttgaattaatgtgtcataaaggacaatcctcttgttcttgaagaatccatacatataggcattgctgtgacttgatcttgtggatccatcgacaacaaatagtttctttaacggatagttgagggaggaagcaagtttctcgattttctccctgagttgaccatctggaagtggagtgaacttattgaagagtggagctattagtactggataaagggtcatcatcacaatagaaagaccaaacgtaaaaacccaaagatagatggccaagtatggacctcctttctgtactattacaatgattgcagccacaataggtggaccaattattacagaaaggaaaattcctttaagcatgtccctaaagaataaccatggtgtttgcttattaaaaccatgacgggcctcaatcacaaaagttgagtacagcccacgcgtccgcccacgcgtccgtgaccaaatcatcagccctgctaagaaggcaagggtatgcagtatttcattctcagcattgaaaccagccggtcgcgtgggat

SEQ ID NO: 1710 - DNA, 1433 bp, Glycine max
actacttttgcagctacacaatactaggataatcttctaaataaaccagagaagatgagatagtctgaaaatcatgtttacagagtatagatttgccttagtattatgctataaaactaaatctagctcttcagtagaatacaggcaactaaatattggcacaatgaatgagaaaatggggtctaaactttcagctctgttcttaaaaagtatctattcaattaaaattacaaatattcttttgcagaaacctaaatctggttcattgaaccttgtaagggcaaattagctaaagatagtattaacgttttgacttcaaaattgctgaagggcttcacacagcttttcttttcttctgcaatctctgcaacttctgccacttgaggtagatctgataagacaatcctgagaacaccatgaaaacacacccccattgctttgtagagaggggatttccactcaatagagaagataccacaatgcttacaaatttgcgagtggtagtgatggtagtgttagccaaagagccaaaccggcttatagtcaagaagatgaaattttggcccacagcaccacagcagcagtagagaaaaatatcccatgctgcctctggatgctgctggcaaaagcgaactgcctcaaatccactggcacggggccatccaaacatgtaaatcatattgtatatggttccccataaattcatgcccagcataatatcccaagcacttgtttttggataccttgcttttaaagaatcctgagttgcattggtaaatccatcaaaagcaaggttcaggaaacacaacccatatccaaggggagcatttggatgtgccagcttgctgatagtctttgagctagtctttagaagtgcaaatgttgatacccctccagcaacaagaaaagtacaaaggtattctggaaaagtgtatcttataccatataccagagtacccatcagcataactggaatcattttggaggactttgccagcacctgagcagggtaactaatatacttcaaagcttcaattcccatagcaggaccaatggtgttggtaattccagcgctccaataactccaccaaggagcaccaccagaatttccactagcccacatctttatcatgataaacgaccagattaaacacacaacattctgcgccaagttcagaaacgcaaggtgctcgaacctttcaccgttgaatcgcttcgtcgacacattttcctgaagaacgccttggtagatgtacgcggaccagattccggcgacgcagaaggcgagcacaaggatgcgacggagccctccgccatgagcctccatgaaaccaccgagatccgccggttcggtttttttaatttaatttattgaaccggaaaatgggaggaaccgaaagttacgaaacggagatgggcccgagaagcaacgt

SEQ ID NO: 1711 - DNA, 1542 bp, Glycine max
  misc_feature (1494)..(1494): n is a, c, g, or t
tttttgtttgaagaaacaattgtctgcaaacttaataaataaatagcattaaaatttcatatggtacaacttcatgctgtctgataaggaaataaaaccaatacaataggccaaaactgcaagaattgccccacagacaaccctatattctcacgcaatatggtaagaaaaaacaattgaggaatagaacgagaagctcccacgccacaattccctaacctcctcttttggactcaatcgcactattaacactcataatatacacattctagagaaagttccctttccaatcacaattgactctgcattctcaaaactgatatagaacaccatgcaagaatgaatgatggaaaccatcttatggcaaaaagaatgggtacaaatatagagaccaccaaactggaaaaagcttgttcccaaaaagagcaagacaccaactgccaagccagatgctatgaagaaatgatggatatgcagcaaagcaatgacaactatgtagaaaggatagattgcaatgcaagttgttgctgcggctgcaaagatgaccaagtagaagcgagtgtagagggtggtaaagtttgctggagctgtctgagtaaattaaccatacgaccagctgtttgttctgtagcaaggtctttaccagcacataaaacctcagcaaacactgaaactatttttggaaggtactgattgtttgggcccaacagctcactgtcagacctctcagccattgaacaaagttgatcatgcacaactttggcctcaatcaaatcaccttttattggcaaacagtttagccatgcaggaactacctgggcagaatcaatactgtcacgatgaaattggcaaatttttcccaaagcggaaacagcattgtcatatgccattacattatctgaatgaagagcattaggatgctggatcacagcatttaacctcgaaagagcctctccaaccagaggtttgaacacagatccaccaaactctgcacaaacaccgagaccatacacggctgcctgtctgacatcaggagtctcatcattacaagcctccaacaggaatgggagataggtatcataatacttaatagcagcttcacgacactgctctgcaacatcatcaaaaatacaaattgcaattcttctctcttcaggagtcttgtcccttccccacataggtgtcagatatgatgatagttcatcaaagaaaggcaagaagttggctttgaaggttttgatcaaagttcccaatatctcacccacttgatcaaaaacttcctcctcttgttcattttcctctttaatcagttccccctcttcagcatcaaaatcttcagctcgggtcctctctgctctctctcgttttctacttgaactagctgtgatcacctgttttatctcatccacgatggatctgacctggctttcatccaaaagcatcccagagatctgtaagcattcatttaatgaatccaacatgcttgcacagatntcagtgtcaggttccttgtggggggggggggggggcctacgtagctga

SEQ ID NO: 1712 - DNA, 1799 bp, Glycine max
atcaaacagcttaaaactaaactatcataccccagtgtccggaggctcctcgctaagcaaagatatgggggagggtaattgtatgcatttccggattcgaacccatgaccaatcaatcaccaaggcacaactttactgctgtgccaggtcttgccctctaacagtcaaacagcttatgcaataaaaatggtattcaaaatgtcaacaaacagagggtgcctaatgcttacctgtctgacatcaggagtctcatcattacaagcctccaacaggaatgggagataggtatcataatacttaacagcagcttcacgacactgctctgcaacatcatcaaaaatacaaattgcaattcttctctcttctggagtcttgtcccttccccacataggtgtcagatatgatgatagttcatcaaagaaaggcaagaagttggctttgaaggttttgatcaaagttcccaatatctcacccacttgatcaaaaacttcctcctcttgttcattttcctctttaatcagttccccctcttcagcatcaaaatcttcagctcgggtcctctctgctctctctcgttttctacttgaactagctgtgatcacctgttttatctcatccacgatggatctgacctggctttcatccaaaagcatcccagagatctgtaagcattcatttaatgaatccaacatgcttgcacagatctcagtgtcaggttccttgtgcaatgcttccaccagagctgggatgatactgtcagtcaaaaatttcaaataggtaacatcccgaccacgagattgccccttttctatagctaattttgcagatcgtaatagctccggcattgctgaaacagctgctttcctaacctcctcgtggaaataaaatttaaggagtggaactaaagttccagcaacctgatcaatccatggaaagaatccttccttcagctcatcagcatagcaacaaagcatgttacatgctgtagctttttcctctagaacactagtcttgattccaattcgcttgtccccaagagtaatagtctccatactttcatcatcagaatcctcaatctcattgtctgaatctgctgatgtaatggttacatcgggcttaagtgcagcagattgaagtagtggaggcatgacaaactccatgtaaggaagaaaatcttgtcccagacatttgcagagtctagcccatgcctgtagcatgtaacttgttgttggatcatctgtctccatttgagatacttgaagggacataagaacttccataacctgcttagcatcagccctaaacttctccttcccaacagccattccaactaaacttatacactccatggacttagcacgaagcatacggttagacttgtcggttgcattaaccaatatagctttcagatatggcattacagcatcataatatttttggaagtgttcctgagaagaatcagcaactgatgccaaagcagttaaggcaccttcttgcaccatctgcttaccattctgaagaagtacaagtagtttgctaactattccatccaagtatggcgttaagatatcaggtgtgcagttctcgctgaagttgagaactgctgaagcagcatgtgcctgcacacgagggttctgaaaatcatccatggcaccagctagtgctggcaacactccttgatgatatttaacttgcaaatcaggacccaaatcagtagacagctgcccaattgcattaatagctgcccaccttacacgggggtgttggtcagggaaggaagtcaggacccggacgcgtgg

SEQ ID NO: 1713 - DNA, 1943 bp, Glycine max
gatcaattaactttacgccactgttttgttttgaatattttcttttgttttggtttacaagcaaactgcaccagtggtctagtggtagaatagtaccctgccacggtacagacccgggttcgattcccggctggtgcatttaattttaaacctttaaaccttttatctctgcagtcgcattaccatgacaaacttagctttttatgtttacatgggacaatttttattcatgaagtataccaaattactaatcaacatttacaagagaccctgcagcactgaaattctgagggtctgcggtttttaaatgctgcaaaatcctataaacctttatttctttctcttttttttttcctacaaacaatttggcattgtaataacaccaccaaattttgactacgcagcttcagcaaatccaatacggagattgccataatcaaacactgtgtgataagcccccaagaaaagatctccaagaacccagaggggaccttgtggagctggcacatctagaggaacaaaaccaccatagcagacagtgttgcaaccttcttcaattcttagcatatactgttctggagagagaggaaatgatttgtttccaatggtgaatgtaatttgtggcatgtttgcaatatcattgcagtctataaatgtttgtcccacgggattgggaagcttctcacacagctcatccacatattttaatattttttcctttgtattcttttgcttaagctgaacttgcatccaaaagacaatcatgtcacaaaaagtacacaaggggctctcctttgttcgtgactcgccccaactttcattatgtgtagctgtttcaataacatcatttgttataaatgttctattacgcgagcagagtccaatgtcaacacaaataatttcaggctttaacccagaaattatatattcccatattgaatcaccgtagttatggatgatgtttttacattcataactcacatatccttctgctccaatggcacggttaatttgagtcacaatttttgttggaccggcaatcaaagaggtccctgagtcaataatagcagcacagccaccctcacatagccctgttggattgtttgcaattagaatatctcccacctcaatctgccaataatccttttgagtaagtggaacataagtgtggtcacccttaaagtgcctccagtcaatgccaccaaagacaatctcaccccctacctttgccacagggtcttggtttagccaaagggagaaaatcttttgactcacgtgcccttgttctatcatattgtaccacactggtgtgacttgtcccactgacttattctggaatccaagtccaagtatcccatcaaaatgcattgctaaaaacgccagcggtccttcctttgtaatctcagcaaattgttgatctttgatgatgatgtccccaactcttatattatcttggctgatgaagccaggaatgtgcccacggccataagggatcttgcaaggtgttcctattttcgtataggtgttagatagcttcgatctatacttggaatggaaatagcaagcaatagacaagacacatttggcagaagggacccacaggttcgagcttccagtatcaaacacaactctgaagctttgtggaggtgacccaataccaatttcgccaaaatactgtgcatcaagataattcttcagatacactccatctgcttttaaatgattaacaacctccttgatctttgcagaattaagactgctaatatctaaactcctcctttttagactaaccctcattaacccatcaccagaagaagttgtaacaaccaaggatccaaaccaagcacacacacacgtcacaaccagcaaatacttgaaacccatgttctcaactcatctgatagcaatgattcttaaagcaagggtattgagaatgagttacg

SEQ ID NO: 1714 - DNA, 897 bp, Glycine max
tgctaaaatttataatctcgccaaagaatattagaatactatgatttctagttttctacaaccaactcccaaataaaaacagcttaatattaatatggtcatttagacattatacacattattaagcttctctacgtaaacatttttaccaataaataaataaaataaggaaatttaaaagaaatacgagaaacattaatttcatgtagtttgctcaactaatttgcacaatgcagtaaaaatatacaaaatatggtatgccacgggtcatctaacaagttggcattgagtctttgtgttttgggagcaatttctcagtcattattcagctatactcagccaaatccaagggcttgaaatattttccatctacaagataagttccaattcttagccgcactgcccacacgtctttgggttttcttgaaacaatccttccaacatcaccaggtttgactagaccagaattgaccctgaggcagggcatagtagctgcagtcttgatcatcttgggagcttcaatgaaaataatgggtgaccctatctccaacttggaatgtttttctggcaactctgatgatgactcttttgattcacaccttatcaaagctacaacaccatttttgggtctctgaagttcacagttcatgctgcttctgtcttggaccctcaaaaatggctttgtgattgcataagaaagggacaaagccatggtatgctcacttttgtagtccttcaaacacggttgttgtagcgtggagtcgccggaaatggtggtgatcggcgccggcggcggtggtggaagttatggtacagacgtacagtgcgatggttttcactctttttcagtttattcgttactgcaagatcggagggggggggggcctacgtagctga

SEQ ID NO: 1715 - DNA, 2472 bp, Glycine max
aaaagtagatatactgatgtcttttgttaggggacattgaatcagaaaactgtgcgaccaattttctcagccatgtatgatgaagaagcagagttggccatataacatgtattttaactttaagcataagtatgcttgagttatataagtggacattatccaccatctatacagaaaccatttagatcatgggacaagacatttgcaaaaggtgcctagttaatccaagatttctagataaaatgtaaaggctttcagctatttgatcaaaaactttgatggttgctctcttcgatttctgcaggctgcttttacgcttccaagcgcttgacaaatttggtcattgattttgttccttctttctttttttttccttttaaacttgtatggcttatatagcatacaccttcattgacagcattacattcttcagtcaagaattttctctccggttgaaaagatattccagaccaatgtgcctattatgtacagtgcaacagcaaccttaaaaacatcatcccaagaacctcgttggagtatgtatccagttgcagctgtaccaaagacaccagcaagcactcctgcagtatttgatagtcccagcaatactccagcatagcgtggtccaatgtcttggtgattggaatatagaccagattgtgagaatgcatcagatccctgactgcaagccatacaaagtactgccatggcaggtgttttcacatggcttagctgtgtaagaaaaaatgcaggacccagaaacccgatcgattgcataatctttcgaacagaggttatggaaaggcctttgctcacaagtgtatcagcaatccagcctcctatatttgcaaaaatagccatggttaaccatggcaggacacaaaatagcccagattcagtgagattgaacttcagaacctgattgtagtaggtaggcatccaggttaatagaataaatgtcccccaattatggcagaagtgagagattattaaagcccaaacaggtgcttttgataaaattaatttccaaggaataactgatacaggttcttttgatacattgcctccaagtatgagcttcttctcttctgccccaagatccgggtcttcttttggtgagctgtatgctttactcaaccataaaacaaaccagatacttccaagggatccaaatgaataaaacaccgatggccacccaaatttctggattaggataggcgagaatgccaagccagtgacagaaccaaggtacatgccactatacactagcgctagtgatctgcttctctctgacactggaatccatttggaaagtatattattcattgcaggcatcgcaacaccctcaccaattcccatgaaggcacgcataataagaagacatggcaacccaaattttgcagcaatgggtgttaaaactgttgcaattgaccaccagacaactccaaaacctagtactagcttcccaccaagtttgtctgcccatatgccaccaatgatctgagtaagtagataaccccagaaaaaagatgattgaattaggccaactgttgcactgttccagttgaattcttgtgacattggaagtattgctatgctcatatttacacgatccatgttacacagaagaaatgctgtaaaacacagcagtacaataacccagcgcttaggaaactgctgccaccaaggtgatgctcttccttccaaaagaatggcttctccagtcccttcagttgattgcagtggatccatctttgtttctgaaatgtcatactcctcagacttgtaacaaacacggaacttatttgttttaccaacttcagtttgtgcatgctttcttttgctcaaaccaagtcgatatacttccccatgtccaacattgttggtgccataaggagctgagcaaaggaaggaacaacgacttcttccactagcctttagtttaaagttgcactgactggactgctgggatacaagagaacgatgctcccctttgttgttggatgtttgcatttgttttgaaactctctcttccaatggcaaatacatcttatgctgccatcttggaaagggatccttagcaacagatacaccagaaatagaaattccccctctttgaacggatatatcctttcccgatctatatacatttcctgaggcaaagaaggaagcgaagttgcggtttgaaattaaaccagtcatagtcattggtgaagctgtaggtagagagaaagataagataagaaggtgttagaacttcaaagttcaaagtgcagaacgacgacgtttcttgttctcttctgctctcagctcagaggataagcaacggcgcagaacctctctccgttcctatttgcaactgtcacctcggggggggggggcctcgtagctgaataataataaaatcccagtgatgacgttgtgaccaagacaaaagtggttaaaagagtgacacgtggcacgtcatccggt

SEQ ID NO: 1716 - DNA, 1304 bp, Glycine max
ctatttttttttttttttttttttaaaagctggaatgtgctaattaatattatatcttgagagctcaaataaataagaatgtacagtacaacagttacagcaaaggccatagagtgggtaacctattaagtggctatataaattaaaagttacaatcgaactctgcttatttctaaaacatttttccccagactttgaccgccattattaacagcttctctaggtgagggttgggtaagaaacaatgggaaaaaagttacctatacaaaaattttatgttcttacttgttaactatcagcaagcacaatgaaatacagaattgttaaagcatcttgcttttgttgtaatctttctcacacctgtttcattatgagagtatcctccaataacaggagataagtggattctgtccattatatttattttaggggcctcaagaattgccttgggccgatttattgcatattgcatgccccaaatagctaggggcctcatatacataagggacctgtagtgcccatccattgtccatgcctctggtgtctgaaaccagtacccatatccatcttctgaccagcctgctagaaatattccctcggcagttgcgaaggcctcttcttccattcccgcaagtatcattgtagcagcaagaccataggtcacacctgtccatacttctcgagactgcatacaggtctcgtccaccttaccgttgggatgcatgccatttacagcacccattctgcctcctttaactttcattacattgaaatcataaaccttccggagagcacttttgatttttgaatcctcaaaaagtgggggcagtcctgaggacgctgtataccattgcccagccaattgatcagcttgaatggatttactgttaccacttgatccactgtcatagttaaaatacgtaccattccacagtttttcttcaaatgctggcttagccttcaaaaacttccgtttgcatttttccgcaaattctctgtcacctaaatcaagggccattgcagctgcagcttgtagagcagcaagccaaagacaaccacagtaagtgctcacaccatggactgtccatgtatcgtatgtttgatcagggaacccatcattctcaataagaccatccccatctctatcaaattgttccatgtactccattgcagcacggacagcaggccacacatccactccaaattccaaatcacctgtggtagcaaaatcgcggggcgcccctacgtcgctgtttgggttcaggtccttccacttgctagtatcatggatgttataggcattc

SEQ ID NO: 1717 - DNA, 1834 bp, Glycine max
  misc_feature (804)..(804): n is a, c, g, or t
  misc_feature (843)..(843): n is a, c, g, or t
tgtgctataaattaatattatatcttaagagctcaaacaaataagaatgtacagtacaacagttatagtaaaggccaaaggacgggtaacctatgttgttttaaactaagtggctatataaattataagttataatcgaactctgcttatttccaaaacatttccctccagaccttgaccgccattattaacagcttctctaggtgagggttgggtaaggaacaatggggaaaaagttacctatacaaaagttatgttttcttacttcttacatgttaacgatcagcaagcacaattaaatacagaattgctaaagcatcctgcttttgttgcaatcttcctcacacctgtttcattatgagagtatcctccaataacaggagataagtggattctgtccatgatattgattttaggggcctctagaattgccttgggccgatttattgcatattgcatgccccaaatagctaggggcctcatatacataagggacctgtagtgcccatccattgtccatgcctctggtgtctgaaaccaggtacccatatccatcttctgaccagcctgcttgaaatattccctcagcagttgtgaaggcctcttcttccattcccgcgtgtatcattgtagcagcaagaccataggtcacacctgtccatacttctcgagactgcatacaggtctcatccaccttaccatggggatgcatgccatttacagcacccattctgcctcctttaactttcattacattgaaatcataaacctcccgaagagcacttttgattttagaatcctcanaaagggagggcagccctgaggatgctgtataccactgcncagccaattgatctgcttgaatggatttactgttaccgcttgatccactgtcatagttaaaatacgtaccattccacaatttttcttcaaatgctggcttagccttcaaaaacttccttttacatgtttctgcaaattctctgtcacctagttcaagggccattgcagctgcagcttgtagagcagcaagccaaagacaaccacagtaagtgctcacaccatggactgtccatgtatcgtatgtttgatcagggaacccatcattctcaataagaccatcaccatctctatcaaattgttccatgtactccattgcagcacggacagcaggccacacatccactccaaattgcaaatcacctgtggtagcaaaatctcgatacacctgaagaacaaattttgggttcaggtccttccacttgctagtatcatggatgttgtaggcattcatttcatgccatggatcatgtgtccccaaatcatgtggcaccgctccataaaccttgcgaatgccccaatttccctctgccagaaactttacttttcttccatcttcacacaagacagctctagcaaagtcacgctgtatatttaattcaatcctaggaaagagctcaagaagggcaaatgaggcatagaagtgcacatcatatgtacaccacatgatatattccactccttccaagtacaagaatcttccaacatcatcatcatcttcatacaatttttcatctgcacgatcatgtcctgtaataacagcagaatcataggtactatccgttgtactctccacaactgtcctttttcggtcgctcattttatcttcagtttctttcacaactgcactttctaactcccttactcgatcctggtcattccgcatattcgaagatagcacaggagagtcaatccaaattgttcctccagcaacaagaaagtacagctcattaaataatgtaaatttggggggggcactacgtagctgactcga

SEQ ID NO: 1718 - DNA, 901 bp, Glycine max
ttttttttttttttttttgtaataataaaacatgacacacacccattatttaatcattatttgccacacacccatttcatacactaggaagccaaaaagaaaaaaaaatatgtaaaaataacaatcataattctcagtcactctcttaattaatgaaccaaatcctttaacttcttccaagctggcctacttgaaattttctcccaccaagcactcacattcttcctctcagtgaccaagtgccccaatttggcttcctcaatgaggtgtccaagccctggaaggtggctaagatcagccaaagtgaagttatctccagcaagatatgtgctttgagagagcctactttcatacacatcaagcaccttttttagatcttgctcacatttgtgtgccaaggccaggtccccaggcttacccatctttggtaggatcacaagctgaaacatgatattgaagcacaaattgttgaagttgtgtgcctctacttcaagccactgctccactagggccctctcctctaaggttttacccaataggtcagggccacggtctgcaaattttgatgcatagtaccttataatagccctggattcgaagagcctaaaatcaccatcctccacagctggaacttgaccaaagggctgtctgagaagaaattcaggtttcttatgctctcctagatcaagatcaacatgcacaagttcaaactctactcctttctctaagaggcaaaccaacaccctttgaggacaggctgcacttgctggaccatacaccttcaccaccatatttctctgcctaattaattatactttgttgtaataattgaagttggtgctaaaaaatagagtgattttggttttggcatattaattggggggggggcctacgtagctga

SEQ ID NO: 1719 - DNA, 2242 bp, Glycine max
tggtcggcggccgccctttttttttttttttttaaaaaacaatgtaaattcaaaattcataacataataagatgtatatagttaaatatacaaaataaatgggtactattacaccatttaataactcttaactgaatcatatttttttaaaaattcacagtcaggttaaaagttatttccacatggatagaagctaattctcaaactttaaccgtagatgccgtactatatgaatcacgtgtgcaacaaacataaatacttcggataaacaagcttggtagattgttagatatcaaccatcaggaaaaagaaaaattcaatttctcaaagaagctcatcaaagatcaaacagatgtgtccaggcaaaagggctcatcatatgaaacgtaaactcaatcaaatcaaaggaagttcctctgaaaatttccagaagaaaaccttgaagataagttcttagtcatgctttctgaatcaaaatttacagttttccttccagctgtcagatccttttcacggtcccatggcttccatggatgttgacccacccagtcttccttctccggctgttgcttcacttccttcagttccttggactttttcttggatttgctagcaacctcttcttgatacttctgcaccaatgtttttgaccgttttgctttattgtatttgtccaccaattctgcatccgcactagcccttttcttatcctcttcatttgaagctagtgcagtagcttcattgtatgcttccaaataattcatctttgctttctgggccctgtccaaaggggtgtctgtccaaacactagtatcacctctaccttcctttgggccccggctaaaagtggttgattgcatagtcataccaccaggtttcctttctggaggtagtgttgtcatccactcatccctttttggttctactttaacctctgtttgtgccagaagctcttcatcaccctccatggaaataccttgagatcttctccacagtgcagcctcacgcatggttttaagttcagcctgaaattgctcttgttcttgtttgagtttgattttctcatccattgctttcctcttttctggatcttgtaactctttgaaagctttatttaacttaataaaagcctggtgagcttgtggatgagagcatttatctggatgaaccaatagtgacatcttccagtactttttcttcatgttgtcactggacatattatggttagctccaagaacatcatacgggctgtctgcctcaacttccatgatcctggttacctcttcaaagcgttctgcttcattagctgattctgcttcagaaactagagctggtggtggaggtcctacaaatagttcagaatcgtcgtccaattcggcatctctgagctcagtctgtgcctctgttaatttcgcagcagcagcgagtaattcagctgatggcattgcagggccaatcacccttcttcgaggaccaacagaatgatcctctggagctgccgttgcatggtcatccaccatctgttcatttccagaatctattggaactgaacttgattcaggcaatggtgccgaagtatcagctagctcattcatgggattcatattcatataggattgaatcagagggccaacaacatccaaagtagggcgagctttagaacgcagcaagaaaaccctatctccattctccttaaggtttaacgaaaggaacagctttttcaaacgcttcgctaaagatttttctgatataccctttatgtcaacagcttgtccatcatcaatcatttgcaagagctgtttcaaatcgttgccgacatcgggaaactctttcatcatttcggttaagacagtttcaggctgaaccctaggttgttcgtgttccccctcctccgaagagtaggagtcatcggaatcgtggagcctcctcttcttctttttgcgctctttgtctctcttcttactccttcgctcatcctttccctcgctctttctgcgccgctccttctcgcgccgcctcagccgccgccgccgccgcgaagagtggtcggagtccgaggacgaagaggatgaagaagacggcgagtcttgcacacgacggtgcttctttctgctgttacccattttggggattcaccgattcggaccaaaatccgcactgcatatgattcaggagaagagaggaacaacgaatcaaaatcaattcaatcgatttttcggggggggggggcctacgtagctga

SEQ ID NO: 1720 - DNA, 980 bp, Glycine max
gaacaaaatactcaccttttatagaaatttaaagtcatttttttaaaagacggtgtctgaatcatcacttggatatctgacgcactaagcttatatatataaatgcattatacttggtgatatttcttcgaatatagaggcactaggggaaagaaaaagaaatgcagttacaccagtatcatttttgtcacattaaaactggacaaagcttccaaaagaactaaaaggaaaagccaatacagttacataacctttaacatctgaaaagagtttccttctgaagtaggaaggttaacatccaccttatgtaagcccaccgaattctcataaataagatacatcacaaaatgaagacactaaccgccccgggcttctcttcttgtggcatcgtgcaataattcaatgtccaccccttctggaggcaattgcacatatctcactaccgaacctctgatgaagcagtttcttacagaaagcatgtgagggtacttttcttgattgacgacgctagtgttttcgagcttgatgttgaggtactgatcaacagaatgcaatgttcctttgatggccaaatcgttcttcagctccacgattacttccctccccaccaaatccttgaagtacgagaagaacaacatgtctgcacagagggagagcaaaagggggcgatgggaaacaaaacgctgctacgagaatttatttaaccttattctctttcggcgggccgggggggccccatcacaccggaccccggggggggccccggaacccattcccccctaaagggagccaaataacaatccctggcccgcctttttaaaaccccagaacgggaaaaccccgggggtccccaatttaaacgccttggaagaaaatccccttttccccacgggcggaaaaaacaaaaaagcccccacccgattcgcctttcccaaaagtccccacaccctgaaatggcaatggcaaaattgaaagtgtaa

SEQ ID NO: 1721 - DNA, 893 bp, Glycine max
  misc_feature (796)..(796): n is a, c, g, or t
  misc_feature (798)..(798): n is a, c, g, or t
  misc_feature (821)..(822): n is a, c, g, or t
  misc_feature (824)..(827): n is a, c, g, or t
  misc_feature (837)..(840): n is a, c, g, or t
  misc_feature (846)..(847): n is a, c, g, or t
  misc_feature (851)..(857): n is a, c, g, or t
  misc_feature (868)..(869): n is a, c, g, or t
  misc_feature (874)..(877): n is a, c, g, or t
  misc_feature (883)..(883): n is a, c, g, or t
tttttttttagacgcttaaaaaagattaaactaacacagttttttttttttttttttatgacaacctaacctatcctaagcagaaagagctttcggatgtttaacaatgtataaaaaaagcgtcttatactgtgcatctgtgtcattgacttttccctcctattatttaggcatatttttggaatgtccaagtcataaaccacttaagtggaagtgtggaactacaaaatttcttaaactaatctatgtagttagcttatttgatttcttctagcaccgttggattttgagtcaatttgaactgtctttgccgagatgcagtggcgcacatggatttgttggcatgaagtttggacggaagaactgccttgtacatgaacaaccagaatcacttccttatctcgggtgtcttcactccaccagttctgcggtatgccatttgcagattcttctgagggatgaagatcttcgtgacggactgaaacctctacactttgctcaggtttaattatgcccgcagctggagtaacctcaagccatctaggaaagccaaagccacctcttgggctataatcaggtgcctgtccatcattcttgactatagactggccttcacaagtgattttatatatagccttatcctttgtacttctgtttgtaataagcaacaatggaagtgtccaggttttgaaggactaaactgtttgggctgactgtggcttctggaacatcacataaatcttctagaatagatctgattttctcacttgatgtcattactaccccaaactccttncnccttactgatctatcaacgtgannannnnttacattgannnnacaccnnacannnnnnngatcactatcnntcacnnnnatgcangcatcatact

SEQ ID NO: 1722 - DNA, 1224 bp, Glycine max
gaggtgcaccaatccacgcaatgcaatagcactttccatttttcccccactaaggtttgtgtcccaatttattaaccccttctcttctttcatttcatttatgtaataaatttatatagtcccttctttataaaccacaaaatagtctctattcaaaagccatcccaaccccccacaaaccgcatttcatttcaaggcttaaaattgcgtgcagcttaatttcaagaatggccaaagcagcagaacaaagtcctgattctgggaatgtgtacacgctagcttctgtgagagaggatttggttaggcaagaggataccatcatttatggtctcattgagagagccaagttccctagcaattctcacacctatgatgaaaagtatgctcaaatccagggtttttgtggctcattggtggaatttgttgttaagaatacagaggccattcaagctaaggctggaagatacaaaaaccctgaagaaaacgccttcttcccagaaaatttaccaccatcaattgtgccatcttactccttcaaacagtttttgcatcctggtgctgcttcaattaacataaacaagtccatctggaaaatgtatttcaaagagttacttccattgcttgctacttcgggtgatgatggcaactatgcgcaaactgcagctaatgacctttcattattgcagtccatctctagaaggattcactatggaaagtttgtagctgaggtgaaattcagggatgctcctcaagactacgagcctttaattcgagctaaggataaagaaggattgatgaaattgttgacatttacaagcgttgaagagacggtgaggaagagagttgaaaagaaggctgtggtgtttgggcaggaagtgaatcttaacagtgatgacaatgacaatgaaaaccgtaaatttgatccatcagtggcttctagcttgtacaaaaattgggtgatacctctcaccaaggaggttcaggttgagtacctcttgcgccgtctagactgaaggcattacaatgcagttagaatttagaagaatggaagatgaatatgatgttgttgttcaaatgattaagctcttaagtgatcctttattgccaacttcatgtagctgttgattcagaaatattatttgtagctatagattgttacctttattttcatcggctttattaggaaaaggcattattatatcatgatcttccaaaaaaaaaaaa

SEQ ID NO: 1723 - DNA, 1472 bp, Glycine max
atataatatgaaattttgaatcatatgattaaatgggtggcgctgaatttgacttgaacaatttattattacttatattgataatctccttgtgttatataataatgtcatcagcaccatcatcattcatatcataatagtcagaatcagaatcaaaatcctagtgtgatctttttttgggtgctgcaattgtgctgcaatttcaatttcaaccacttgggttgatagcatgatgatgattcgatttccattggtggtggttcttgtgttgatgatttgtgccatgagatgcagaatggccaaagcagcagaacaaagtcctgattctgggaatgtgtacacgctagcttcagtgagggaggatttggttaggcaagaggataccatcatttatggtctcattgagagagccaagttccctagcaatcctcacacctatgatgaagagtatgctcaaatccagggtttttgtggctcattggtagaatttgttgttaagaatacagaggccattcaagctaaggctggaagatacaaaaaccctgaagaaaacgccttcttcccagaaaatttaccaccatcaattgtaccatcttactccttcaaacagtttttgcatcctggagctgcttcaattaacattaacaagtccatctggaaaatgtatttccaagagttacttccattgcttgctacttcgggtgatgatggaaactatgcacaaactgcagctaatgatctttcattattgcaggccatctctagaaggattcactatggaaagtttgtagctgaggtgaaattcagggatgctcctcaagactacgagcctttaattcgagctaaggataaagaaggattgatgaaattgttgacatttacaagcgttgaagagacggtgaggaagagggttgaaaagaaggccgcagtgtttgggcaggaagtgagtcttgacaatgaggacgatgatgaggaaaaccataagtttgatccatcagtggcttctagcttgtacaaaaattgggtgataccctttaccaaggaggttcaggttgagtacctattgcggcgtctagactgaaggcattataatgcagttagaaatttacaagaatggaagtgaatatgatgttgttgttcaaatgattaagctcttaagtgatcctttattgccaacttcatggagctgttgattaaaaaatattaaattgtagctttagattgttacttttattttcatcggctttattagaagaaaaaaaaaggattagatcatgaacttcaatatgtgtcgtgagaaaacacattttcgaactagaatctcagcccttttcctggcctagtttatcaagggattagattcctttcccatgatgggaaacatgccttgttctcccatgctagccaaatcctcaaatctaagcctttgatagtggtttcacttggtgtcttcttaataaaaaaattatccc

SEQ ID NO: 1724 - DNA, 881 bp, Glycine max
ggttgggtattgaaatgggatttcattgcccaaagagtttaatatattattcataagtaccccatttcatttagaatagaagtacacacatcatagacgaggaggggcacgcaaagtgcacacgccttatgtaattttattgatctttattttagtgcatatattatatattatgtaaggttattgggttcaaggacaaaagacaaccctatagtcagtcccaccattacaagtgaaggtgctagttggatcatccttggggtaactataagcatcggggcacctttgcttgaagaatctggaataatcagtgggcccacagctaccggaattgcaacagtactggtcggttttgaagacagtgcaagggttgttgcaacctccttgagtctttagctcactagggcactgtccgttaatgtccgcagtgcagcttatgccacgtgtgcatccattcgaggttggactaaagtccatgggcacgttaaaaccgtcgacgagggagatgtcgaagaagtccaaattgttgaacccgttcaggccgtattcagccagggtgttgggaggcgcaccgtaagctttgcagtcgaggacacccccgcagtcaccggtctggcatccaccgcggcccgaaccgtcgaagttgcagccggttcgggcccaaacgcgggcccctttcgttcctgcaggcacgtccacggaccatgactggcccgggtttaattgcacgccaccgccaacaggcacagacgcagcccagacagtgtatgtgcatcggtttgtgatttcaaaccttgcagcatatgcggaaaaggtgaagcattgagcgattacaaagaacacggcttttctgagagccgccatttagagagtgttttttt

SEQ ID NO: 1725 - DNA, 2039 bp, Glycine max
  misc_feature (1809)..(1823): n is a, c, g, or t
  misc_feature (1940)..(1944): n is a, c, g, or t
  misc_feature (1957)..(1961): n is a, c, g, or t
cattacatagaacatcctaatcgaaaaaactatactcttatctatcattcgatcctcttgtaatcaccttcgagtgagtgtagtaatgacgagttctcgagagcgtttggtgaaggcggtgaagcagttcgtggaggttcggtacaaggttttcagcaaccgttatggccaaaacatcatcgacatcctcgacttcccgattaaggttgtcttgtctcctttcactctcgccttcgacattgccggctctgctcctcgcggcttcggcgtccccgaactcatctccaagctctccgctacctccgtcttcgctatagctgctctgggaacttatgacattgcatttgagctggggaggaaggtgatatgtcaaaggaattgtaactcatgtaatggatggcgggccttacgctgtacaatgtgtcgaggaagcgggagggtgcattatcaagttaagaattgcaacttgaagagtggagaaaaagcgactgctgaatctgtagcagatgccattgccaacaaccgggctgagttggtgcatataccatcgtccttggattttcagaaaccattaccttcaaaagagtgtccaacttgtgatggaacgggtgtaatgagttgtcctgaatgcaaacacagattgctacatgttaggatctcagcagatgatattatggagcccccatggcaagcttataatgtcttgaaaaagattgattatccatatgagcacatattgcacagcatgaaagatcccagtattgctgcattttggctgattacatttcctcagattatgggtggatttacctatgacgatgatgtgaagcagaaaatatggtggcagtacaaggaaaatatgcggtatgatcaactccgagatgtggtggccaagagaaaaccagggtgggagtatctgcaggatgccttgatatctattgatcctgcccgtgcaagggatgatcctgtcatagtgaaaaatgtcccttactataaggctaagaaggcactggagacagaggttatgaagattgatcctccaccaagaccgccaaattggggtgagctagaccttccattgaatgcatcatcttggagtgaggaggatctccaagatccagataagttctatgaaatgactgttcttcttaatgcccaaagagaaatctctgataagatcttggatgcacagtgggaaactaaatggcgtcaggacaagttgaatgagatgttggaggcaaaagtgaagccgtacatccaggatatagacaacgcagttcttcctgagcctattttattaaagccacaaaatcaggaaaagagacaacggcggaggtggttcttcttttgacaacatggataaagttactatatgcttgaacatgcttgtttgtagtcctaattttttgttataaatctgtaactatttattcactgttggatccccccacaagcacacatgttgtgcctctgttgtggccatcatttttgtggaggaaacaattgtttgtgacacaaaaaatacagcttatgaaaaggaaaatctagagaaacatagtagaacaagcaacacaagtcttcttcacacggccaaacctttgctgatgttacatttggtattatgtcaaatacattccgaagataccctatttagattattcctttttaattccgtgttgctgaaattccctgaaaatcaatccgtatgtgttaactacaaactcctattctgatcaatgaacaatcttcattcttcactgtgatgaataggtgaacgttaaaataatcaagttgctggtttgctttgannnnnnnnnnnnnnnccgttgcacggaataacaaatgatgttggacattctacctattattattgcatctcaagtgactaaaagagaggtggtagaggttacagtcatacgattacttgatatatgtcaagnnnnngccaccggactannnnncaaaatggcattattgaagaagtttatgaaagacaccctcaacgtttgaggattaaatctttcctaaacatgtggttt

SEQ ID NO: 1726 - DNA, 676 bp, Glycine max
atttataatgtttttttatatttttttgaaaatttttatttttttttttccaatccctttttcttcgttggatccatccaaaatacgtcctcccaaatctcggaagttgaaatttggcataatgttcttattaaatcataatctaaggtctccataggctcaaaacttcacagtaaacacaatattatccatacaggacatatagtttggttattataacattgaatgtttagacgaagttatctgggaatgaaaacagaacagaatgcaacgataataagccatcaaatccttctccattacttcagtttggtgaatagcttcggtgcaacacatttgtcaatacaagaccaataatcaaaatattgtccagtgcagtgtttctgcccagaatcatcaccatgtatccttttaatgcacgcctggtattccagtaatggttttacacattttggtttgcaagactcttcaagatatctcttctgatcaacaggttcctcgtcggccattgcagagcagagcagtaggggtggtccgtggagctgttgtttgggttttgaagagctttgtacttctgatcaaataatacccccacttcccctgcttgcttggattcaattagggttgcatccgatttgccagttttggtcaaattatacttcaattacctttttgt

SEQ ID NO: 1727 - DNA, 1142 bp, Glycine max
  misc_feature (1108)..(1108): n is a, c, g, or t
ttttttttttttttcgagtaaatgagtactttagtgtaaatatgtcaaatatattattatgtcatacattagttaaataagtaccaaatttcagtagttaagttacatgtgtggtaaatctaatgaatagtgctacattagctaacaggcaacgcctcagttaaaatacaaacaaatcaagggatcacttgtgttgaagattaagtgattaccataatctgattacaaccaaattaagcacgattaactaggaagctgatgctccactctaccagtttgatcgatcaaagtgtcaacttccacataatgctcttgaaacattccctggttcaagcatgttgaagactacaacaggtattccattctcttcacaatatgccagtgccatcatgtccatggaggtgacgttcctagaaacaatttcccctcaggagctctgagcgcggctgccgtttccgtggtgaaatgtggatttccagtgccagcaccaacaccaccaaatatgacccttcctttctcaagatgtctaatagctcgttgcctgcgatatggttcagcaacctctggcatcgagaatgtactctgaacacgtgcctgaacacccagcttttccaaagcagattgaagcaaaatagaattcataactgttgccatcatacctatttggtatgccgtaggtctatctaacccggtagcagacacccatgcatctccacaaaagaagttacgaccaccaacaacaatggccacctccaccccaaggcggcaagctgttgccacttccctagcaatctgcattgccaccttggggtcaatgttctggcagtttccagccaatgcagggccactaattttaaacaaaactctatgccattttagatttgacgctggctttggtttgaggttggttgccacggtagcattgctaggtgcatatctgttcttaccctggcgtgccgtaggcggggaatgagccccaccaccactactgccagccttatcatcatcagaaacagttttcacagacagagagttgccaacaatagcttcaatcttcttaaaccaatgccagtgactagtggcaatgccaccactcccaattaccctntctgtcgtcttctcgcagccgtacggacgcgtgg

SEQ ID NO: 1728 - DNA, 627 bp, Glycine max
ggggggggtggggtttgtgggtggggggcgggtctcctgcgtcctctctttttttttttcttggggaccatttttttgtttaataattgattacattgtaacatatttttgtagggaactaagttgtaacgatttacatgtatgaccgacttttgtatactgttgaaatattaaaagaataagagaagaaaagagggtaataatagaaaaaataactacacgatgttgcaaggcgtagtaaagttgaaatatcacctagaattcatcaaagtatatgagaaagattgcttccatgatcaaaaccccgttcaaatggaaaaaggagtaactgggtgatgaggcgtggaacttgcagcatactttcagcagccatgttgcatttaatattttttattaaattcattcccaatctgagatgttcttgaatggctggtatgctcagtgaaatcctgctgattgagctttaactctgaactcttgtctctatgtagaaactgacaaaattgaaccattgcacagggaacccttcttttgctcaattaagcaagttttgctgcctttgctctagccacagactttaagtagagctcccccttctgtcgtcttctcgcagccgtcgcgaggcga

SEQ ID NO: 1729 - DNA, 785 bp, Glycine max
tttttttttttaaaggacaaggaaaatcatgatattattgttacttcattaatgtgaagacaaagatgcaagcttggttgctatatatgaagatgaaacgttgtttacgctaggagtagttacatgaaactattgacagtatataatcttatggtattcattccaaatctactattccaaaattcgagagaaggatctttacttgatcaacaaaatctgatcccgttgcatactctgttagcaatccaacagcaaaaccaaacattgcccatcttccattgctaatctcatttttgccaatgaatccaaagaaaggaccctgatttgcatcttcaagcttcttctgtttgaaatactcctgaagctccttagccttctgcctctgaaactctaatgtaatgacattattatcatccccagcaacaggagaagccttctggggcggaacctgagaaggaggtgaaggcttcagtggctgagggacactacttgatggttctctcacaggaggagccactggtcttctcagaggcccttcagtctgagagttccttatagaaacagcagcataaggcttggaagaagaaaatctaaatgatgaagttgatgaagatgtgcatgatggagaggaggaacaagctgggattttgatgcatgggaatgaagatgccacagacattttttttgttggattggtgatacagatactcaatcctttagattttatttttgttagtttttgaattttttttatgcaattaactttttcaacaacaattggcgtt

SEQ ID NO: 1730 - DNA, 1024 bp, Glycine max
  misc_feature (984)..(984): n is a, c, g, or t
  misc_feature (1018)..(1018): n is a, c, g, or t
aaaaataaaattatccattttcaaactacagatatctaggcatattttcaacctagtttacactgatctaacgaccaacttttccggagcaagaacaatgcagtaccttaacaaaaaagctggtatgcagtcagaaaagaaaaaaggaaatagctggatagttattaattaatttatgacaatcttacatatttgatctgctatctaatgtattaactataaaattgtaatgcgcatgaaatttttcaatctcgagggagtccagcataatgggaaaggaaaatcacattcttgagatgtcatcaatgtgaagagaaagcttgtatgatataaatgaattacagaacaaattactcaacattgtttacaccaaggacagcaacaagaaaatattgacagtatcttatattgatgtattcattccaaatctactatcccaaaattcgatagaaggatcttcacttgatcaacaaagtctgaacctgttgcatactctgttagcaaccctacagcaaaaccaaacattgcccatcttccattgctaatctcatttttcccgatgaaaccaaagaaaggaccctgatctgcttgttcaagcttcttctgtttgaagtattcctgcaactccttagccttttgcctctgaaactccaacgtaatgacgttcttatcatctccaacaacagtagctggcttctgtgggggtgaaggggatggtggaggctgagaaggaagtgttggcttctgaagctgaggggcacttgatgatgatgatgatggttctcttattggaggtgccactggccttcttataggcccttcagcttgagaattccttatagtgacactgtgaggcttggaagaagaaaacctcaaagaataggatgaagttgatgatgaagtgccagatggggaagaagaacatgttgggattttgatgcatgggattgaacatgccattgacatttctgtttttgttttttnccggacgggcgtggggtcgacggccgggtaattnccggcc

SEQ ID NO: 1731 - DNA, 1748 bp, Glycine max
ttttttttttttttttttttttttttttttttttttctacgatttgtgctctttccttccgtttatctaggaaatgaagtttctaatcttcacatcgtcttaaacacaagaataattctgaagttatcatcatacaactggagtacatgacaacttgaatatgcttaaggtatagtacaatcctacacagaagacatgtacattttgaatcttcaaaagtcgtccaaaagccatccaagtcgcaaaactatatatagcactgatcactaatcaaagtcatttcacagtttgatgtttacataccccatatgccacgagccgctgccactttgttacttggtctagatgttagttcatacaatatcctcgcaaatgtatcggaatatcttccatcagtgaaaactatctctgcaaaagcattctcatatgctagcagcaaacttctgttttgcggctcagacacaagactctccaatatcatggcagatttccggcaaacttctggaactggatgtggcatctttatcactttaagcaaccgatcaatagcccatctctcgttagcaatcttcaatctgcagtccatattaacttcagcaaggttatagagtgcacctatagcagctgcctgagcatctagagctggcatgctgatgagatcaattaagcgtttgtgtatctgtggaaaaaatggaagcaagaaaggttcattgtcaggattaatgatcaaacgcccaagtaattcagcagcagcacaatgccatgctttgactgcagattccaacatccccatgatggcctgaactgcacgtttttctgttattttaataaatgaaggtttggaagagctaaatattcgaagatccagaagtggagctaagttaacaattgtctctagagcatttgttacaagttcctcatcctctacaaagatgatcttctatgcattggaaggctgtttccaaacaatggcgatgttgggccattataacttcattatctggcatgaaagagaagttcctgatgatatttgaagcagcaacagcacattgctgcttttctgctcgcccttcatcatctaaattaaataaactatcttcatcaagccacaactcagaaaaacgagattttgccatgccattctgttgcgttgattctataccagcagagccagatcctacaccagggcggtggggagtaccagttgagcccagcgcctgatattcactcccaaatccacttacaacagaatttgcacctaaagtcctgatcctcgttgtcttggcaaattccttcgggagtgctatatcacgccaatcatctataacttgtaggagcgcatcaagcaagccgggaattttcgcaaggggagtcgcatccttgcgcatgtcatccttttctttaaaggagagcagcgtaagtgtattcaaagcccatgttagctcattcttcagaccactttgaagagccaagacaattcttttgttgttctgatcggcgaaggagttgtgaacgtgaagggaaggaccaaggagggttgacggagccgccgaatccgcggctgaagcagcggcagaggaactgttgttaccgctgccgaagggacggcctctcttcgcaggtggcgtcgcccctcctccggcggatccgccggacttgccctgctctctcttctgcatctttctctctgtctgtccccttctgtcgtcttctcgcagccgtagcggcccgggaattctggaccggta

SEQ ID NO: 1732 - DNA, 1080 bp, Glycine max
ttttttttttttttttttgctcattctacgaattgagcatttcccttctatataggggctacaacactttccaaccatacatctaggaaatgaagtttctaatcttcacatcgtcttaaatagaagaataattctaatattatcatcatacaactggagtacatgacaacttgaatgcactcaaggtattgtacaatcctaggcagaacacatgtacattttgaatcttcaaatgaatcagtcatccaaacgctatccaagttgcagaactatatatagcactgatcactaatcaaagtcttttcacagttcgatgtttacataccccatatgccacgagccgctgcgactttgctacttggtctagatgttagttcatacaatatcctcgcaaatgtatcggaatatcttccatcagtgaaaactatctctgcaaaagcattctcataggctagcagcaaacttctgttttgtggttcagacacgagactctccaatatcatggtagatttccggcaaacttctggaaccggatgtggtgtcttaatcactttaagcaaacgatcaatagcccatctctcgttagcaatcttcagcctgcagtccatattaacttcagcaaggttatagagtgcacctatagcagctgcctgagcatctaaagctggcatgctgatgagatcaattaagcgtttgtgtatctgtggaaaaaatggaagcaagaaaggttcattgtcaggattaatgatcaaacgcccaagtaattcagcagcagcacaatgccaggctttgactgcagattccaacatccccatgatggcctgcactgcacgtttttctctgtaagtaacaccagcttatcaatcagtaacagaataataattgcatgcaaaaaagaacattcaagatagatcaatcacttacgttattttaataaatgaaggcttggaagaactaaatattcgaagatccagaagtggagctaagttaacaatggtctctagggcatttgttacaagttcctcgtcctctatcatcatccacattatgagcattttaagaggcaatttataacaacat

SEQ ID NO: 1733 - DNA, 2056 bp, Glycine max
tattcactcgtgtgcttttctcgtgctttttgaaggtaagaaatattcatatagaataatgaatatacttgaatgtgtgtgaatcgaaaggattaatactatatacattagattcaactatagagcctagatccctctaaaaagatatacaatttgattatggaaaatgatcattaaacattccaaaaagaaaatagagcccctatgataaatccaatatcttggtagctatttgtgaactcctcttttacctattgccattaccattctctttagttggtctttcatcttgaatttcttctaaatcatcatactcaagtgttctaccagcttgttgtttccaatatgcaaccaacttcttcagccgtgctacctcttttgaggaaacatttttgttggggtcattcacaatggatctcactcgtgaggcatacatgagagagttatttgtctcatccaaatttgattctgtgggagcaacattcacaaacatgagagttttggcattaccaccaagtgaatcactcattaacatggttaatttgtgattcctgtatggtgtgtgttgaccaccagaagacaaagagctaataacatctccaagtgctgataatgacttgttaatgctctgagcttccttaagctgactcccggtagaacctgactttttcactctttctgaaccagcaagatccacaaaacttagctttccttttgcaactgactgactttgaaggttggtactttcaattacaattgatagaatgagatgagatcttgaactttcatcattcatttgggttcctgatatatgtcgccgttcagatcctctttgtattatactattcaattcttcaattgtagaaatagacataactgtcacattttccacaactaccattcccgttgaatccttcttgatatccaattttaaatgctttccattctttggtaacagatctataagggtatcctgatacaactccaccatgtatgcctttaaggaaaaagaatacttgttattatctcttcttaaaattctaaaaagttctgcaattgcaaggggggtaagtccagggttgttgtcagatccatagattgtaaatgtctttccagagccagtttgaccataggcaaatatgcaaacattataaccatctacagcagactgcaccaaatactttgtatcctcaaatacgctttcttgagttgcattagcatcaaaaactcggtcatatatgtactgcttcagtttttcatctttccatgggtattcaacagtaaattcatcaactgcagtaagaacttctctttctttctcaacaatctctttttcactaagaggtcttagtcgacagtaaactctgatcttgcccttcatgtcttctattacattaaaatagcgcttccttaaaacctgttcttccttataaagtgattccatttcagctaattgagccccttgtattttcagtatggcagctgtctgttcattctttctatcgatatcctctttcatttctctcaattcttctagctccttcaaattattctgcaatgcatcaaattcagagtccttgactgaaatgatagccttagcagtcaataattcttgcctacacccttctagccttctttcaagctcgtacgcttcagacttcacaactttgcgttcttgctcaagtttccacttaagggaactaatctctccagcattcctcttttcaagtgcagataacttctgttccaaaatcaatttttcactcttcaagctttcgatagtttcgttggctgatagcagctcatatttggggggggggggcctacgtacctgcttttgagtcacttgtctatttccagcattagcaagatcctttttggcagtgttctctatcaccgcattatttaacttggacatcctagattccatattccttttgtctagaatagcagcctgtagttccttatctttttcattgccccctgatcccagtctattacggtcacttgtaactgcatccagattttgcttataagcttttaaggattctttcaa

SEQ ID NO: 1734 - DNA, 714 bp, Glycine max
tgcccaccccctcccccccacctctttctatttattcccgcccaccccccccagttttttttttcttggccaataaagaaaaattcaactccaatgactacaagggtatcgtacgagaaataatccaatgtgcaaatactataagcctaccgttacataatttttgaaggccagaatgtctacatattcgtttgtcaagaattcaagatataacgaaaaggcaaatactacagagccatttacttatacaagttgatgacagaatctcatttgggattcctaagaacaatgatgacagaatctccacggagaaacattttgctgatgaatctatccttgttgactggctgggactttttctttcctttaccagtctttggcacctcagtccacatctccctgacattttcaagaaccatgttgcagtgcctgtcaaaagcccttacacgacccagaagctttttgttgttccgacaatttatcagtacctgagtattatttttaacactcatcatgagtacagatagtggtccggtgttgaactcctcttcctcattcttacctgcagtatcttcctccattggccggctcattttggaaggaaagagcaaaactactcaaataaagtcgaaacttgattcagaggacgaagaagatctgaatgtccgaaatgaagcaccacactcacatgggaagcgtgggcggacgcgtggg

SEQ ID NO: 1735 - DNA, 1072 bp, Glycine max
tttttttttttttttttttctttatatactaagattagttttagaatcgcagaagatgagtccattacaatttcaataaataaataatataaatattcttttcctacttaaaaaaagattattcttaaactcaactttttttctcttctttttcttcattttctcttttgtatttcaaattttttatttcttctctatcttatttttctttatccaaacatagggtaaaaaacaataatagtcgcagcttcacaggctacaaattctgaagtcaaaattatcaaccggttcataagaatggagtcaagctgaggtctagtcttcaggtagctacaacttgcagaagctcaacatttagttcaaatgtagctccaggcggaatctcattcattcccttttgaccatagccattttcaggaggaacaatcacagttcgctttccaccaactcgcattccttcaactattatatacacagcagggggaggttttggtgctgcttgagcagagaataaaccatttgggttgtcaacaaattcgcgcttcctttcctttcccggtggagctcccactttgaattcatatggctgagcaatgatacgatttccagctaggagtttagattctcgactggagacagctgtgattccgcgatataagcaatcaaagtgtacctgaacagttgttcctttttcagcgactggacctttgccctcaaccaaatcatagtatttcaatccatcagggctagtaatgtattggtcttcggggatggccttcttgttgcgtctggcctcagctggcggagataggaaaaggaagccgaaaggcaaggatgaaatcacaagtgcagtggaccttctcgaaccacaaactgaatgtgccatggatatttctttggacctcctgcttcttacctttgaatttgaaagcacgccaccacctccataaccataatcaacgctccaattagtagaagcgcaagcgcaactgcaaggggaactcattgccactacccccctccgccgccttctcgcgcttcgttttagcctatccactccctacaattaccc

SEQ ID NO: 1736 - DNA, 1432 bp, Glycine max
ttttttttttttttttagatcaagcaagagtagtttcatataaaaaaaattatgcaactagactaatactgtcggttaaattacaacaattggaaagagccaacttcagatatgttaaggattacaaaaaaaacaagtgtgaccagtgctaatggaatctaaaatcatgggtgccagtaatcacaggatgctcccttcttacagtacccactttcataaaatttacaaactcgctgccctttgggcagaggcctatatgatcctccatttccaacaccatatgacggttgcctgttatatggaattctgcttctactaaaacctgattccctaccatgaccttgaaaaccccgatctctggacacagaaaatcgatcactgccatatcttgtttggctatccccaaggcctggagttactgtagaagtgtacgaacttgaacttctgttttcctgcactgcagtctgtcctactccccaacccacatttgcatttccttgatctattccactccatcccaagtgtgtattctctaagccaagtctccaagtggtgtctatagccaggcccaatgttccaggggatggaacaatgggtgaattttctgagcctgaatcccattgattacctgaaacaccgttctttgtacccacctcaactttagaacttcttgaagaatcctccgcagaaattctttgatgatgatggtgatgcacatctgcttgtcgtaatggttcctcagctgctgtcgggtgagatggtaagtttaaatcaccagtggagctcagggcatcacctttacccgcatcaagaattgggctaagctctgcaacaaaactgagacaatcatttttagaaccttcagtcaaatcctcgccacatttcatgattgaagtgggagattccaagccaccaagtgactccattgcttccacttctgccaacagatctgaaactgattcatcaaaatcattgggctcaccaatgattgcctgccatgtagatgtattacatgctggaggggaaggaggattatgcaaatcaaatcccagcttatgcggtgatgtttttgtagaagaaacatgagttgatgtggtaactaagcaattggaagaactatttatatcagggtgtctccaggtctgtccagaagatgtattacaagcaggaggggaaggaggattttgcaaatcaaacccaagcttatgtggtgatggttttgtatcagaaacatgggttgatgtgttaaccaagcaattggaagaactatttacattagggtgaatccaggtcagtccagaagttgtattacatgctggaggggaaggaggattatgcaaatcaaatcccagcttatgtggtgatgtttttgtaatagaaataatggctcgaacaggacatctgtggctcgaacaggacatctgctcgaacc

SEQ ID NO: 1737 - DNA, 849 bp, Glycine max
taaaatttttttttttttttcaaattattgacggaaatttactaacattttttttttttttttttatgtcaaaatatgaagcaacttatatactaccttaatagagtcttgaagggttagaaactaaagcactcaccttttgagaagcgttgttttcttctagattgtactggatttctaagagcatatacttgtatatggttcattataattaattaattgaaagaaaaaaatgctctcaagactcttggcattttctttaatctacatttaacagggcatatataaattcatcatagcttccacctccaatttagaattttcgcttgattagttgctaaaagcacccttaacaccctcaaggctctctcccatggacaacttgtgcatgcagtatttgtactcttggcttcgaataaagtccttttctccctcttcgagcgggtcactctcgtagatgagctcgtaacaagcgggtgaaaggcatcttagagcacaattctcccttgctatcaccgttgatttgcatgaccaaccccacaacccactgtcaatatcagcatagcactgaagcttgttcttcctgacttgagcatcggagattgggtgagaagacttggcaaggagtgttgtgcaaaaaaatgaggatattaagaaaagagatacgaagaaatttcttgttgcaatcaccattgtgaaagtgattgctgtttgaaaatcaaagaacaatcaaacaattccaatttggtggaaaccagcaaggttaatcaatcacgcagtgaaagtgtcagcgaatgcgcgtttgctcaaaccaagtttgacatcgacgtacgcttatttgggaaaaac

SEQ ID NO: 1738 - DNA, 2002 bp, Glycine max
tttttttttttttttttccttttttttttttttttttttaaaggtatccttgtacagtgcaaatattagcatatataacttagcttagccctggtgaaaaactgacgggctaaaaagtgccaatgactctaaaatacaataaatcaatagcttacaatgaagatatgccagatgtaaaacacatcactttatggctttctcttaatttttctttgagcctttaagtctatcacaattacagagatgttatcttggcttcccctgtggatggcaagcttagttagatactctgcagctgactgagctgcaggatccgctccttcactgcgtcctgttgtgccgttgtcaccatacttcttgtgccaaagaaggattcgcttctttgcaacctcgcatgcttcttcatttgtcattacatcccataaaccatcacttgctagaataagacactgatcatttttttctcgacgcacaatattgacttcaggttctggaattatccatggtttcaggtatctatcacctatggaccttgacatcgccaagacaccaagaactcgatatcctttccaatgtatgactcttcctcccgcagcttctatcctagcccactcgtcctctctatttggtttgtggtcagaagacaatggcatggcttcttttccacggtataagacagttcttgaatctccacagtttgcaactatgatgtgggtttggcttaaaatggcaaccactgcagtggagccagcagtctcaggagcaacagttttaatattagactcagacccaccactgttgtttcccctgttacttgcaccaattcctcccacatcatcatccattttctgaaaacaattgataaatgctttcttccattggtcctgccaatcacctctcccatttgtttcagccgaagttgattgtgcagtctctatctcctcaatcaattttgaatgaagacgttcctggcagtaattggcaacctgaaggcccccatgtccatcatagacagcaaaaaagtgggctagtgactgtttttcgttctcattcacatggtcattcactagcatctgtgaagaaacttgaaaaagtcgaggcttaacagaaatagcatcttccatctcctgcctcattccacaaattgatgaacaaccccagagaggtccactattcaattccaaagcatttgggttgcctgttctccatgttttactctcccctggcaactgatcaagaagcacagcagatggtttaggatcagactcatctgatccactttgatcctcactagtaatatccatagcaacagaaactgtttcctccactggcggcttcattgatggacacagctcgcttattccggacttaccatcaacatcatcatcaaccttgatcatgattggtgaatctatttcagaaaaactactcttcaatgctgcagcttcctccctacaaggatcacttttgccattagccacagattgagagcttgaactatgcagagactgaaaatccactgctaacatcaattcatcttcctttattgcggggggggggcctacgtagctgacccaattactctcacattcaataaccatttctgaaacaagagcagctccaacttgattctcctttaaacactccactgccggatttaacatcaaagcagcagctgctgtatttgccataagcttcagcccagttatctccatgtgagtggtcactgcagactccttttgaatcaaatttccaacaccaagtgtaaaaggtactgcaacactagaagatatttcctccattggtttactttgccttgtagcaatagtcttcttatcctctagtatccaataagttgctgtcccttttaaccactttttttccacccttttccctcaagcctcctcctttctatgatataattccaatcgacatcaaaacaccaagaaggctccttcgtaaaatgaaaatagtgcatgaaaagtgaagggagggcgggcgc

SEQ ID NO: 1739 - DNA, 658 bp, Glycine max
atcacgttggccataagcaccagatcgagagcttgacctatgcagagactgacaatccgcggctaacatcaattcatcttcctttattgcctggtcatggctttcattcaagacccaattactctcacattcaataaccatttctgagacaagagcagcagctccaacttgattctcctttaaacactccactgcaggatttaacattaaagcagccgctgctgtatttgccatgagcttcagcccagttatctccatgtgagtcgtcaccgcggactccttttgaatcaaatttccaacaccaagtgtaaaaggtactgcaacactagaagatatttcctccattggtttactttgccttgtagcaatagtcttcttatcctccagtatccaataagttgctgtccctttaaccacttttttctccacccttttcccccaagcctcctcctttctaaaacaccaagaaggctcctgttttggactttttataagccaagagaagaggtcccaaaaccttgtatttcttcctccttatgatcgatcccttagcaaaatgaaaatagtgcatgaagagtgtaggaagggaatgaaggaggaacagaaacctcaacaaactatatgcagtacgaacacagtacttctcgttcatgaattt

SEQ ID NO: 1740 - DNA, 2575 bp, Glycine max
aatatgatgatcattctcagtttaataaatatacctattcttacaaaagggggttttttttttttttttttaaagtttataacgcaaaaataaattaatctttttctaagggaaaaaaaattgacacccccgacaagagccttgtaacggtttttccttggttctactacgcgtctttgacttatacatgccaaagtgttctatttacatttctaccacaaaaaaaaacggatatcaccattcaccaccactgtttgaataatatactattcccccaccactctcacagtagcaggtaaccactcttgggagccccagcgatcggagtagccatcatcttcgagcctaaacagcatcgaagagttatggtcatgtgtggttgaattcaaattctttttcagttggtggaaactgggaaccaacgctttgtccatccattcatcaatggtggtttggcctaaccacactccgctggtgatcttgtcaagagcctctccctgcacttcaattgacaccccattcccaaccacagcagagaacctcttaatgatggatgacgagaaattccggcgtaggagatcgaaattcaagggcttgaagacaatggcatcgtctacagaatccaacagctcccgcggtactgctgagagtgaccctcctacatcatgattgttgtcttcatgttccactgtgaagtcgcttgaattgagggaaccatctcccctgccgtcctctgcatcatcagcagcttcattaagatcaaacgatagacctgaattcacctctttacggggcttcaaggacctgtcttcatcggatagccaactgggtcttcgttttgatgctctcttacccactgatatgcgtaactgccaccctccttttgctaaattttcaagcttttcttcgtccagtggagacccgtttgagaggcacctgaagtcttctggcaaccaattagcagtgaggataaacatgacatttccgagactgatttcacggccatgagaatccgggaaccggccttgttccatggctcttcttatgctcccacgaagaagaatgttggcttcatcaatgtcctcaagcacgatgacagaaagtgggttccttctgatggcctctgctattcgatcaagtgctgtttttccacgcagatgaggggcatcagagtctccatccgcacggcgttgcgccagaggtattattattgggttggtggacccagataccagctcagaaagagctgctgccattttcttcttgccaattctatcaggacccacgaacagtaaccatgtgtcacccttggagcgtctttttccatggccgagtttgcactgggtcactgtggtgcccactgcggatgctgcatcctgctgccaccataccttttctgtcaggcctttcaggagcttcttgaaagagtctgcatcaagtagctttttgctctgtaattcatcgaacttgtcttgtgactcggaagagaggcagctcaagaagtcattaatgccttctttgtgtgtttcttctggagtggcatcagctggctttgtttgcccaaggaccaggtcggttgttaccggaatttgctgtgggctgaccacatgctctgatgggtggattggcgttggatttgagctcaattgcaaagaggttccaagatttttattcagtggtattttgggttggaattggcgccccagcaaattcatattgtataggccagtcattgacaaagaagttggaacaagtctctctgtgctcacatttagctgatgaaatttaggatgtaaactcaaacaggaatcatgccatttcttctgtatttcttgagtcctcttcttcacattcacttcttggttctgagcctgatccattactttgccgttatctttattagttttagcattctgtaaccactgtggaagggacggtttagctgcctctgatttgagctcagtatctgatttctcagtttctttcaacatttctgccacttcttgctcgcagctctgcatacattgtgggcaacaaattgatactgcagcaggatctacgttctcagaggcacgcctcagtggagggattgttgtagtggacaaggtctttaacggggacaaagactcgagcgaagtaccaagaaaaccattggtcccaagcctgggaaagattccagggagggatgctctggtggtaattggcactgcctgaagatcccaatcattttccatggtaggatgataaacctgacacctcaaataagtctcacaagtagcagtacctaacaaccaaagccttccagcgccaccctcgccgaacttgctgaccaacctccccatctcagccaccgccgccctgccagcctcggcgagggtcagttgctgcatgttacccaaaccaccgccaatcccaaaccccacaggctgctccaccagccacttcaagtcacccaagtcaacgaaaacccctccacacccagaattcccgatcctgctctcaatcaaatcccccaactcctgcagcctcgcaggtctctgcgaagtaggcaatcgctccagcgccacgctgaagc

SEQ ID NO: 1741 - DNA, 1342 bp, Glycine max
tcgttcagcgccggaagccccccccccggcatgcccaaattgtcatcataacataactctttcaatattcaatattccagaagcatggtaacttcaccaccagccatgcccaccaagggtcgtgttctcatcatcggagcaacaggtttcataggcaaatttgtggccgaggaaagcctcatctcagcacaccccacttatttgcttgttcggccaggacctcttaacccttccaaggatgccattgttaaaaacttccaagacaaaggtgccattgtcattcacggtgtgataaataacaaggactttgtggaaaagattttgaaagagtatgaaatagacattgtcatttctgctattggggccaagagcttgctggatcagcttatacttgttgaggccatgaaatcggttaagactattaagaggtttttgccttcagagtttgggcatgatgtgtacaaagcagatcctgtggagccaggtctaacaatgtacaaggagaagcgactggttaggcgtgtggttgaggaatctgggattccatataccaatatctgttgtaattccattgcttcttggccttactatgacaattgccacccatcacagcttcctccacctttggatcagttacagatatatggtcatggcaatgtcaaagcttactttgttgatggcattgatattggaaagttcacaatgaaggttgttgatgatgccaggacagtcaacaaaaatgttcattttcgaccatctaacaactgttacagcatcaacgagctagcttctttgtgggaaaagaaaattggccttacaatccccagagtgaccatctcagaagatgatcttctggctgtagcagcagaaaattgcataccgcgaagtattgtggcatctttcactcatgacatattcatcaaaggttgtcaagttaacttcaacatagatggacttggtgatgttgagattagcactctctatcctgatgaagcattcagaagcttggaggattgcttcgagggctttgctcttatgatcgatgacaagattaataaaggggaaaataaaattaccggcacaaaatctgtagtggaagcagtgccattcacagcttcctgtggagaagaatcacctcctcaaaaatgttctaactttgttgttaccaattactaggctttggtgaggtggaaatgtattgagtcattagaaatggaccttttatgttgatgttatttcgaagactgttttatctaaagtgttttattgtattcctagagtatgttcttaggtgcaacaaattcttgttagttgttacctgttactctgctttggtgtcaaa

SEQ ID NO: 1742 - DNA, 1534 bp, Glycine max
ttttttttttttttttttacaagtatgaagtttaacttaaaaataacggaaagaaatgtatgagggataactgaatgatacattgctacaagggaaagaatgcttcccactgaaccaaagtaagtgatgctatgaagaaatttgatttgttttcccaattaaataataataataataataagggagaaaccaactaaagagaaagtaaggggaaaagaataccaccacaatttcaggtagtattttatatgctaattctgtaagtagataaaatgctccctaacgctaaaagatcgtttcttagtaacaatcaatcattctgtggggacaccaccaagccgttgcatagcaacaacaggctcactgcacctggaacacctaaatgatggagcagcagcacatcgtgtcctaagacagtagtaacaatatctgtgctgacaaggtagagcaacataaggaattgttggagtagcctggcaaatgggacatgctgtgccatcctcggctgaacccgatgatttatctttagagaaaggtcgaagaagatttttcacagatgatgaattaagtagggggagaagcaacaataacatttccgaaaattcattccaaactaattgccggttcatatattcaaagctaacagcacgattcatatttgggcttccatatacaagcctagctcgtaatgctctttcaataagatttcgatatcttcccgtgcaaagaaatatcaacaggtttccaaacgaagcagctctatatattccttctatccgctgtatcaagatccataaacgtcgagccaacggtctctgctcagtatcaccccatctacgaaaagcagagaaggattgtaagcgagcccatatatactggccaccaacagtggcaacacaataccaaagcttctgagcaacagtgagtccaggtccctccagaccagttctgactttatctcttggttctactgcacgttcatctctgtacctcaggttcatgagagcaatgcctggggttggcttgtccacccaaattgagaaccgccaaataagaaactcaaggaaagcatcaagctcggcttcatactgaaataacattcctggcttcattaataagaacactttaaccaactgctctttcaacatggctgacatttcaacgtccaatcttgctgcatcaacttggttaactcttgatatagaaattggaagagttgactgatgagagaggagggaaagagatttccatctggggaggagggtgtgggaagtgtgaatccaagcatcgtgtgaagggagagtcattgcgtggtggtgatggtgatgatgaatttggttgggttttgttgtgtgtccatgcaccgcttctttctctctctgtctctctgccactactactgttttgtttagagagagaaagggagattaggatgttctggtcattaggggtagcactgttgttgcattacattccaccatgtcacggaatctaactttcaattcagtgatagagatcccacaacttttttttc

SEQ ID NO: 1743 - DNA, 882 bp, Glycine max
caatcaacaaaggcaatcatatttaatctaccaagttcccaggaaaaaaacgacagaaaagtatcgaaaaaaaaaaaacaagcgattttttttttttttttgttaaaccatgcaattctttggctttttgttccgcttaatgttttgcatacatgtatgctaattactcaaaggaatcccagaagactgagaaccacaaaataataaaagaaatggaaaaactccacactgttatttcaaacccccccctccccctaatttctccatttgacaattgaatcagttctttgccttgacagagttattctccttgatccttgctcgggtatccagcttaacaaagcgttttagatcttcataagatagtgtatcaatattcctcctacgcagttcactaagtgcagggcgtttatcaagcagatgccacaaccagtcagggtattctgaatcaggctggatttttggatcagttccttccttgagaatgttggcacctacaactgtactagacttgacttccttgctaagagttgatgctttgggcgcatcagcagctgcaccccctttagatcctttctttgctttaccggtggcaaaagttcgttggcatgcaaccccaactacctctttggtggtaagaatgtgtctaatatacctggcacggttcattgccatgacgttcttctgaagaaatgaacgggagaagcgaagactttacactttgaagaaacggtggaaaaagatcggcgtcgaacggtggtttccgccgccgttgcttgtatgctatgatgcgtcgaccctctgaactcgaagcttcgtaacggcgtgtggttcagttctgaagggatccaaaaatgggaacgaaacccgaatctgaaaatt

SEQ ID NO: 1744 - DNA, 2507 bp, Glycine max
ccacgcgtccgcccacttctctttcgttccacgctgctatcccaaaccgaaacacgtctcttgcaccgaatagcttcttcaactatctaacttctcttcttctctttcacttccttcatactctctctcagattctttgttttgaggttctcttctttatacggatggcagcaccattggcatgtcttgttgggagtggtttatctatacagagtaataaattaactcttggcaaggacgtcaatggaagatatctcttctcatatcataggctttcagcacagagtaaggagtcaaagacaatatgcataaaggcatccttggatcaaaggaagcatgaagggagaagaggatttctgaaattgttgaatgtgggagttggcttacctgtattattaggaggtgggaaagcgtatgctgatgaacaaggaccttcctcctccagaatgtcttattccagatttcttgagtatttggataagggtagagttaaaaaagtggatctgtttgagaatggaacctcggctgttgtggaggctgtttctcctgagttgggtaatagggtgcagcgagtgcgtgttcaatttcctggacttagccaagagctccttcagaaattcagggaaaagaacattgactttgccgctcataatggccaagaagagacaggttctccattagctaacctgattgggaacctggcttttcctctgattttgattggaggattgttccttctctcgagacgatcatcaggagggatgggaggtcccggtgggggctttcctcttgcttttggtcaatctaaagccaagtttcaaatggagcccaatactggagtgacatttgatgatgttgctggagtggatgaagccaagcaggattttatggaggtggtggaatttcttaagaagcctgagaggttcactgctgttggggctcgcataccaaaaggtgttcttcttgttggtcctcctggaactgggaagacacttttagcaaaggctattgcaggtgaagcaggtgtcccatttttctcaatctcaggttctgagtttgtagagatgtttgttggtgttggtgcttctcgagtccgcgatttattcaggaaggccaaagagaatgccccatgcattgtttttgttgatgaaattgatgctgttggaaggcaaagaggtactggaattggtggagggaatgatgaaagagaacagaccctcaatcaacttttgacagaaatggatggatttgagggtaataccggtatcattgtcattgcagctactaacagggttgacattcttgattctgcattgttaaggccgggacgatttgataggcaggtcacggttgatgttccagatatacgaggaaggactgaaattttaaaggttcatggtagcaataaaaagtttgaagctgatgtttcacttgaggtaattgctatgagaacacctggttttagtggagcagatctggcaaacctgctgaacgaagctgctatattagctggtcgtcgtggaaagacagcaatttcttccaaagagattgatgattccattgataggattgtggctggaatggaaggaaccgtaatgacagatggaaagagcaaaagcttagtggcatatcatgaagttgggcatgctatttgcggaactttgactcctggtcatgatcctgtacaaaaagtaaccttagttcctcgtgggcaagctcggggtcttacttggttcattcctgctgatgacccaactcttatctctaaacaacaactctttgcaagaattgttggtggacttgggggcagagcagcagaggaagttatttttggtgagcctgaggttacaactggagcagctggtgatttgcagcaaataaccagtttggccaagcagatggtaaccacatttggaatgtctgatattggtccttggtcactcatggactcatcagctcaaagtgatgttatcatgagaatgatggcaagaaactcaatgtcagaaaagcttgctgaagacattgatgctgctgtcaagagactctcagatgaagcatatgaaatagcattgagccaaataaggagcaaccgtgaggcaattgacaaaattgtggaagttctattggagaaggagacaatgtctggagatgaattccgagctctcctgtccgagtttgttgaaattcctgctgaaaatcgggtccctccttcaactccctcaccagttgttgtttgaatagcctatatgccactgcaatgtagtgtagctctccacatactgaatttttctaaaattgtaaaatatttgtaatatacccttgactcttaattttagtaatgacaaaagatcctagcttgcttctttatttcttttttcttgtgttggcaacagaaaatgtatgtttcttcacaattagtacataatgtaaccttagtgaatagtaatgatattaacacattgtatcattgtaactatatggtgagatgcaatgtttagtttgagtat

SEQ ID NO: 1745 - DNA, 1269 bp, Glycine max
  misc_feature (1001)..(1001): n is a, c, g, or t
gtttcaatattacttcttcccaaagtttcagataggatagctgctcgctacaatgatgtggaggatacactagccagggcaaatacgtggctgaatgcagctcaagcttcaggtgtccctattgtctttatgaatgtccaaaccgagtccctacttactaagatctctggagagacagcttcttccactgtaaatgcaggatcattatccgacttatctaaccttgcaaatgcaagcctttatggctctaacaacaccatcgccttcctatgcaccaccaataagctccataccttctaattctctactctctctcacttctctctatcacatttttcttacaagatggcagcatcatcagcatgccttgtagggaatggtttatctacacggggtaatagaataactcttaagaaggacttcaatggaagaagatatctctactcatcttggagattttcattattgaacaacaataaggcatcaaaagcattttccataaaggcatctttggagcaaaggcaagaagaagggagaagggggtttctgaaactgttgcttggaaatctgggagttggtttgcctgcactattgggaagtggcaaagcttatgctgatgaacaaggggtttcatcctccagaatgtcttactccaggtttctggagtatttggacaaggacagagttaaaaaagtggatctttatgacaatggaaacactgctgttgttgaggctgtttcgcccgagttggggaaccggtcacagtatgttagagttcaactccctggacttaaccaagagctccttcagaaattcagggaaaagaatattgactttgcagctcatagtccccaagaagagtcaggttctcttttagctaacctgattgggaatctggctttccctttgctcttgattggaggattgttccttctctcgagacgatccggagggatgggaggtcctggtggccctggatttcctcttgcttttggtcaatnccaaagccaagtttcaaatgggaacccaaccacccggagtgccatttggatgatgttgcctggggtggatgaagcccagcaggactttatggaggtggtggagtttttaaagaagcctgagaggtttactgctgttggggctcgcattcctaaaggagttcttcttgttggtcctccaggaactgggaagaccttgttagccaaggctatggctggtgagctggtgtccatttttctctatatcaagttctgagtttgtgagatgttt

SEQ ID NO: 1746 - DNA, 1416 bp, Glycine max
  misc_feature (40)..(41): n is a, c, g, or t
ttttttttttttttttttttttttttcttttcccctctcnnctttttttttttttttttgtaggcagaaactgaaagtatggctaattaattattgattagataagcaatcagctgcagtagtacttggggaattgaagaacatgaaagttaataattaaagtctaatcataagaagagaactacatgcatgcatgcacaaccccaagagctaatcatcatagtgtagtagtagtagtagtccttagttatatcaacataaccgcccttgagccataaatagatgcatatataagttaattaaggaatcagatcgttgctgagcttcaaaggttggtgaacttggaaaatttttcctctttgcataatttcttgaaagagaaaatagactggtgaattagtagggtgagacaccaacattagccgaagcataaaacccatctttcatgagaacctcctctccttcctgctggcacacatttgtcttcttcacagtctgatcaggcatgagaccaaagtggatgtgtgggaagtgagcccaattctttgcagctgcactgaaggcttccctgtgagttatatcgggattgacagacttgatgcgttggatctcgtccttgataaagcgattgtacgctgaggggactctctgtctcttctcaggaggtctattcatgatcggtcgtggaagctcatcagctgcaatcctagcaggcatagagaactcatttgatgcacttaaatttgtttggttcatcagaaaatttggagagggatttggtatctcctccagaaggttatgagatggggagaagaaagagtgacccaaatgaaattgagtgggagatggcataagcaaccctcgcatgttcactgggaggaggttagtgcaatggccgcatcggactgtgacggtcttgaacaagcttgtgcaaggaacacttacagcgaggacggtgtcacaaatgttgcagtgaacataacatagctgttcggaaggagggaggtggtccagtgataatgtgctggaagaggatgacattttgggtagcccccttttttcgttctcttatattcggttgatgattggtctcttgattgattggattgattgatagatggacagcttaaccaccacaccttggatatgctttttttgattatgagttgtgaaagaaaggtgcagagagacagagagagagaaagagagtgagagggaaagaggctgatctgatctggtctggtctggtcctctctttgatagttatactacaagagagggcaaaggcacagaattgaaaattcacccctctctttctctgtatataattgctcttgtttatagaccaacaagaccttcttcacatgtatatatcatgtatgtatgcatgcatgcatgtaccttgtatgtattcat

SEQ ID NO: 1747 - DNA, 1596 bp, Glycine max
  misc_feature (20)..(20): n is a, c, g, or t
ttttttttttttttttttcntttttttttttttttttttttttttttttttttttttcaaaccataaaatccagcaattgcacctttactaactgaataaaattggccacaatcacaaactgctctatcagtgtaaatcgatagtctaagaggacctttcagagcaaataaggtcatttccacagcatctacaacacatatatgtacatattgtgttgcagaataattatgaaacaaggaaaaaaataaaaataaaaagataaaagcctttgcttttatggccatccaatagtgcttaatatctcttgtagtccctcatgctctctgcctgactggatgttatagcagtaaacttgcctcttcatcatcatcacctagaatagatggaacttaagaccattcaatctaaatcttcaggatttaatttaaccccacgaatacatcttggttaattacttgacagtgatgtcccaaccatcacatcttgtttgacatcacaaactttgattttttctctgcaggcttaagaatctgaaatgagcacatcaagttttcatccacactcatcatcgcaccagcattgtcaaattcaccacaatagtttggagctgaaaatatcgtaacaagtttcctatcagcaaagaattcatacccatcctctacaacctggtgagcacgacaaacgaggtccaagtcatgctttgtcaagaattcagcgaccttatcagggccaaaggtgtaggacactcctctgtcattcataccccaacccttcacatccctaccaggatcagaccaaagcaaatcacaaagcaagccggtgtcgggaatcgcagtaggacgaggtagattcctgatttcatccaagtttgtgagttcaggggaaagaccaccatgcatgcacaatattttatcatctataagggctgccacaggaaggaagttaaaacagtcggtaaaggctttccaaagcctcacgttaaaccttcgcttacattcatcataaaacccataaatcctattaatggaagcacactcatgattcccccttaacaggaaaaagttttctggatatttgattttatacgcaagcaaaagacatatggtttctaagctctgcttcccacggtccacatagtcccccaaaaagagataattggcagtaggaggcaaacccccatattcaaatagccttaacaaatcactgtactgcccatgaatgtcaccacaaatcttgatgggggcttcgagttcaagcaaattgggctggttaatgaagatgtctctggaagcgacgcaaagttgcttgatctcagactcggagagctgaacctgctttccgggtcgggccaatcggacctccgttaggcgccggattatgtcatccagaaccgcctcatcaatcacttgtccttgtgtgctcatcgcatccgatcaaaaccttcttcttattcttcttctttgctctttctcagcaacaaaaaataagcacaagggtgaaccaaccaagagctttatttggtttggttctctttctctctctctgtctgtctgtgtttgctcgctctcccccttctgtcgtcttctcgcagccgt

SEQ ID NO: 1748 - DNA, 1556 bp, Glycine max
ggcagaaatagtatatttacatacatttcatcaaagaactaaatatatcatccaatgctttacagaggaagttttctgtgatgtccaacggaaaatgattttttgggaaaactagcatctacatgataatatgatctcataaaactattaacattttattaaagaaacatgcaaattataggaagtcagtaaccatctttcgaggagctagaactagcatgtaaatctttcaactaggggttatataatcagcaacgagggttgtcatgtcatgtgggacataaaaatcaccacaaaaaagtataagaaaaatataccacccactacaatgttctcatcatcagcataaacaaactaggaccttcacacctgggtcaatgttgttgttgttgttgtaccagactctatcttgtaaatctctaagtttgaagtagccacagcagacaaactataaatctcaggagatcgaaactcatcacaatctgtggagccattcttggtgaaaaaagcaatcagagtattcatcatcctactcacagctgactcgaattctttctgggcgttagccgtagaactattgccactacttggagctagattatgtacaaccgacccgaccggagccccctccgtgtatgatttacatgctctcagtatttcaaatgctcgggtacggaaatgtcccgcaaccagctcctcaaagtgctttgggggtttacgcagagtatacatcattgtctttaaggataaaataaatgtactctcgttgtactccttagatcttctttgcccctcagcaccaggatatgttgacgtatacccaggctcattaaaaaaaggcttctcatttagaattagagcttgtatcgaaaccaacacttgtagcatggttgatttttctggtatccaattttcactattactaccatgccaagtgcccaagagactaaggcagacttttccacaattatataaatttggatttagccttaggccacctgaatggtagtgaactttcggtggacctgcagggtaggtagaaggaaagaggcaatcgaaaaagaaaagaccatcatggtatggggtgccttgaggtccaattataacagcccttagaagctccatccttgattcactaactctcacaaagattgtctctggcagattttcctctaaaattttccattcctcctggatctttttggcccaatttttaggcttctgtgcatctttagttccctctttatcatagtgatgatcgggaaaagagtcaacagtatcaaattgcttaaattgttgaaacttttgcatgactatatcatcagtttcatccacttttgccttggaactagattctgtacgggaaaaagcaatagcctgcttgcattcactagaagaaatgtccttcaaccaaggcagtgatgcctccaccccagggggcaaatccacattgtcaaattggtcctgcatacttgaataatcatctccgtcgcgtgcatcatcattgtaatcaaaagcataatcagcatcttcatctccgtcatcgtcaatcatag

SEQ ID NO: 1749 - DNA, 1184 bp, Glycine max
  misc_feature (38)..(44): n is a, c, g, or t
gataacttaccataaattgcccttgtagacccaataannnnnnnagtcatcactggcataataagagaacaaatagcacagatccacagacagatgactatatattgtttcatgttgatactatgcagaaattatgttctagttttacccatggtccagtgataaaggctcctctttatgtgatgtgatagtaggaaaaagaatcacatttagtgacttgcgccctttcttatgttataaggaaactatatacagcactgactagaatactagcctagagaagcatgaggggattgcctttaagttctaacaataaaattttgaattgtgatcatcccttgcgatgagaaataaatattaaatacactcgaaaaagtggaaggaataaatttttttaccaatcctacaaaacttcaacacctgcctagttgagcatatgatttgataataactctgcaatattttcaaccagaagcagatgcaactctctgtttatcaaaatctccttgctcttccttggcaaactcttcaatcaattcccgctgtctctctgtcagattgtttggaatgctgacgttaaaatgaacatattgatccccaaatgtgtaagaatttttagtcttgatccctttctttttcagaaccaccttctgaccaggttgggtgccaggacgaatcttaagaacaacatctccagtaagagttgggacctgaatggttccgcccaaaatagcctgagtgatacttaagacagcatctacatgaatattagatccttctctacggaagacaggatcttccctgaccttgatggtaacataaagatcaccaggattatctccatcaggatctgcaccaccacttctataaacctttatagtttcattgttgtcaatcccagccataatatccaatttgacagatttcgttcctttgataacctttgtacctttgcatgacttgcagaaattcgatacaattttgccagttcccttacatgtaccacaagtactctccatcctaaatatgccagtttgtacaaatgtcactcctgaccctttacagcgcctacaggtttcaggtcttgtaccaggaggcacaccctcgagccgaatcggctcgagcggctcgagctcgagccgacttccgccacaggtgttacaaagcacttctgtttgaaatgt

SEQ ID NO: 1750 - DNA, 844 bp, Glycine max
  misc_feature (3)..(11): n is a, c, g, or t
  misc_feature (13)..(15): n is a, c, g, or t
  misc_feature (20)..(22): n is a, c, g, or t
ttnnnnnnnnnannnggcannntaagagaacttttagcactgatcaatagacagatgaatatatatatagtttcatgttgacactatgcagaaattatattctagtttacccatggtccaatgataaaggctcctcctttatgtgacgtgatagtaggaaaaagaatcacattgagtgacttgcgccctttcttatgttataaggaaactatatacagcactgactagaattctagcctagaggagcatgaggggattgccttctaagttctaacaaaaaaattttgaattgtgatcatcccttgggacgagaaataaatattacatacactcgaaaaagtggaaggaattaagaaaagaattaccaatccttaatcctacaaaacttcaacaaccgcctagttgagcatatgattttgataataactcttgcaatgttttcaaccagaagcagatgcaactctctgtttatcaaaatctccttgctcttccttggcaaactcttcaatcaattcccgctgtctctctgtcagattgtttggaatgctgacgttaaaatgaacatattgatccccaaatgtgtaagaatttttagtcttgatccctttctttttcagaaccaccttctgaccaggttgggtgccaggacgaatcttaagaacaacatctccagtaagagttgggacctgaatggttcccccctgcattgcctgagtgatacttaagaaaagcaagcgtttaaataattttcaagaaacatttagcacccccataatgcaacacaaataactagcaagatgtttaagatcctaaacatgcacaaaaacaaaatttatagcacaac

SEQ ID NO: 1751 - DNA, 1159 bp, Glycine max
ttttttttttttttttttaaaaaataggctttttttttccctgctaaacagatttaatatatatagagatcaccctactacaataacttaaaaagttctttatttgtcaaggtagatgagccaacataacagaacatgccattaaataatgacatcaaaattacaaatttcagtggcactactcgtaacccaagctttgttaacaaagaatgagcttattgatcgttatgaagtagtactagataatgctgtgaagagactgcttccaagacaacaattaggtggcatgggtaggaaaattagtggatttctctatattgatcacaaaatgatgaaatgaaatgatatcttttgtacattgttttccctcaaaggcccttaagctgagcagcaaggcctgtcatagaagtccacttctcaaatgcagtggccgaagagacaaaggcaattttggaggactcaacatctttcttagaaactgatgaaattagtgaagctaatgaggaattgaatgcgtccacctcagtcttctcttctgaactgattaatagagtgattggtacatagtttgtcatttctttattgaatgctatattagctctttggacccaatctgcatcggtgcttcctccaaggacagaaccagcagcagatagatcattcttttcaagtgcttgaccaactgcgcttagcttgtacaccagatcttgaagataccctgtttcttgtttggaagaactgatcacaccttgcttctcaagtctcttctttctgtcacgctttactttctccaagagttcttcatcatcatctgcctcgagtattgctgcatttgcattcttcttaccagccaatgaaagcacaaagctggtgatgaagctgatggacaagcctctctttgtcacaacaattggagagtgtggtgttgctttgcaaagagttaattccctcttcaaagtgcttttgattatcggattggagcaaacatgtattggttttacaaatgatgatgaggatgaggatggtgatgaactaggtagtaggatggggtttgaggttgagagaatattttttgccatttctctttccaatctttctctgtattttattttcttattttgctggtatttttttcgggggggggggcctacgtagctga

SEQ ID NO: 1752 - DNA, 1187 bp, Glycine max
gcgcgtaattcgattcacatagggggaattgggttcgggcccccccctggagttttttgttggtttggtttggggttgttaaaacaaaataaatataaagcaaggaataaaaaatgggccttgtagttcccctgctaaacagatttaatatacatagcgatcaccctacaataaacttaaaaaggccttgtttgccaaggtagatgagcaaaaataacagaacatgccattaaataatgacatcaaatttacaaaatttcagtgacactgctcgtaacccaagcttaattaacctaacaaagaatgggcttgttgatagttatgaagcagtacaagataatgctgtgaagagactgctcccaagacaacaattaggtgacatgggtagaaaaattaatggaattctctatattgatcgcaaaatgatgaaatgaaatgatatcttttgtacattgttttccctcaaagccccttaagctgagcagcaaggcctgtcatagaagtccacttctcaaatgcggtggccgaagagacgaaggcaattttggaggactcaacatcattcttagaaactgatgaaattagtgaagctaatgaggaattgaatgcgtccacctcagtcttctcttctgaactggagctcagtttattgaatgctatattagctctttggacccaatctgcatcggtgcttcctccaaggacagaaccagcagcagatagatcattcttttcaagtgcttgaccaactgcgcttagcttgtacaccagatcttgaagataccctgtttcttgtttggaagaactgatcacaccttgcttctcaagtctcttctttctgtcacgctttactttctccaagagttcttcatcatcatctgcctcgagtattgctgcatttgcattcttcttaccagccaatgaaagcacaaagctggtgatgaagctgatggacaagcctctctttgtcacaacaattggagagtgtggtgttgctttgcaaagagttaattccctcttcgaagtgcttttgattatcggattggagcaaacatgtattggttttacaaatgaggatgaggatgaggatggtgatgaactaggtagtaggatggggtttgaggttgagagaatattttttgccatttctctttccaatctttctctgtttttatttctattttgcc

SEQ ID NO: 1753 - DNA, 870 bp, Glycine max
  misc_feature (827)..(827): n is a, c, g, or t
cgcgtccggcgggctgtcggcgggcgggaaaaagagagagaggaagagagaaaaagaggaatcaagatagctcctttgaattttctatcagaatctgaggacccaaaatctagggttttctgttcttctctggggatctgaagacatgcagtccaagtctgaaactgcaaatcggctgaggtcagatcctcattcctttcaacctggcggtgtttattctgagccttggtggcgtggtattgggtacaatcccatggcccaaacaatggctggggcaaatgcgtccaattcgtcatctcttgaatgccctaatggtgattctgaatccaatgaagagggccagtctttgtccaatagcgggatgaatgaggaagatgatgatgccactaaggattcgaagcctgctgctcctaatgaaacaggaaattatgagcaagaacagcaagggatgcagcatactgcatcatctccaccctccatgcgtgaagaatgccttactcagacaccacagctggaacttgttggtcattcaattgcatgtgctacaaatccttatcaggatccgtattatgggggcatgatggcagcttatggtcaccaacagttgggatatgctccttttataggaatgcctcatgccagaatgcctttgccccttgagatggctcaagaacctgtgtatgtgaatgccaaacagtaccaaggaattctgaggcgaagacaggctcgtgcttaagctgagcttgaaagggagctcataaaatctagaaagggcataacatgctcacaaacattggacagaatttggttctactattactagtgtncttcttaacgttttgggatcctctattgggctatatgctgaca

SEQ ID NO: 1754 - DNA, 1491 bp, Glycine max
tttttttttttttttttttttttttttgtttttttttttttttttttttttttttttttttttttttttttttttttttttttttttttttttttgcagaaaacatcccaataattaaacattggtcgcatcagaagatttaagggaatattgcagaaaatatccatcaaatcaaatcagaagatataaaatttctcatgtcaaaacctcaataaagagtgccaatcctcattcaacaaaagaggcttgctaagctttgggcatttaaaaagtcacatgtggtttatagaaagcctatttatttttacaaggttgaattgctcaaatgcaacgaaaactccatgaacacttcttacccaagaagagaaccaacttcaaggaaataatttagtctcacagactatacgcttcctaacacctactcaatgctcttgccaggatggatcaaaattcttagggtttgagaaccaaacccaatccaaccttagcactcttttcaatggccttggtgtctacctcaccagatatggtaaagaacgatttgggacgccactcatgctggatcagagcacttgtcctgccaaagttgttcacacgtgccttcaatgtggtcaatggatccaattgatgttgggtaccaagagtgagagtgttctcattagttgagaatctatgggtcacttcagcaccaacagcagtgttggtcaaggggttaactacatggtaatatgcagcattcaaagcatcacctttgtcattcagagtcaatgaggcaatcaagtcatctttggtgaagctcagtccagcattggattttgttaactccccaattttggtgtcaaaagaaagatcagcaccaagagcaagaacattagttcctataacaccagagaagttgacaattgggtttgctgtcaacccaacactggtgcttattccagcatagtcatgcaagtactgaacttccacctttccagacctttggtcaggaactttgaagctaaaaatagccttcagaccaggagcaggttcattaacagtgatagttgtgaagagattagaatctgtatcaactttgatatcagtagtgatgtttttgttcttcaactgggtgttgacatcagccacaaacagttcacttttcctggttcctgatgctgttatagcaactccagtgggtgagtaggtggtgatggtgaacttctggtcactgtggtagtccttgaacagcagatccctggctttcttgccgatgtcagagtagagaccgggacccttagccatggcttttcttaggagaaaaaggggatctcgataatttttttgtgaaggcagaaccgagtgtgtgtctgtctgtgaaacccaaacaccgtcttttgccaattaaataaatacctcaaaccctaattttcacctttcttttcggggggcgaccttcgtccccgactcggctatctccgccgtttgcggacgagtgggcggacgcgtggg

SEQ ID NO: 1755 - DNA, 799 bp, Glycine max
attcataatcatcataataacaaaacccaagtttgcaaatagttatccatagcgagccaataaaaggcacgggagtctaaaaccaccaaaaatataacaagaagaaaccaatacaagcttcaaccacagttctgctatgtttccaaaggttcatggatcacattattgagccataaaaataaaagaggttcgctttggacttaggaagtgtcccagggcctaggttcggggagagcaacgaccataccttcgaggtcgtggtcgaggaggacctggcatccgagcctggagtgcttgttgagggctctggctcgggaattgcggacgaggacgtactcctcgtcgtaggagcgaggggggagcttgtcgagccactcctgggcaatgttgacctcgcagtgggccgcgcaggcgtcgatctcctcgaggcggtgggactccgggtcgaccaggcccgtgttgatcagggccttcagcaaggtctggccggccaggcccaccacctcgtgcttctttcccacgaagtcgatcgccgagagccgtacgatgcggtcggcgaccttcttcgtggaagaggaggtgcggcggtagatcagggatttggagaagaacgagagggaggggaggcggtgcgcttgcgaggacagtctctgcagattcgcgactgccattggtgcttcttgttttgggaagctcgtcgagagtggtcttttggttgggaaatcggaacaaaagaaatgattgggtttggccgtgaaatgggcggaatacaaggtagcaaattcctaggtgcacccat

SEQ ID NO: 1756 - DNA, 3064 bp, Glycine max
  misc_feature (121)..(122): n is a, c, g, or t
ataaaaaacatgtgatacattctcccaaatgatggataaattggcagatcaacctaaatacggtgctagaccctgatttatgtcaaacaaatgacgtggcttagaagaaatacactatggnnaatcaactgactaaaataaatcgacactcagcataagaaaatacgcggatcaagaaaaaggcagctaccggtttttttttttttttttttttttttttttttaatctaacgccaaatttttccataaaatttcaggtaaaggtttgctcaagcctagttcaaacagtggggaaaatctatccaaccccagtagctcttagttcacgacttctaaaactaaataaatttaagtctcaagatacattagcaatgacaatttcttcccgagacaaaacaccaccagatctgccaacaagacgcattcaaaataatcccatagcactaataaaaatatccaaatcagttaaagggctgcaagggaagatttgcaggctaatggcctatctactgcctcccgcttttaccctgtgttgaaagttttgcggcaacttgctcttcagacaaaggtagatagtagatccgaggagttgctgtggttttgcggaagagatcatccagagtgacaataggtgggtcaactttctcagggaggggtggtggagatggaagccgttctcttgctactggtgggggttttgacaatggtggtggaggtgggagaatgactggaactggatgctgctccctgtgcagatggggggaaggctctggctgtgagaaggggggagcaggaggaactgctcgatcagtgctgtccgatgcagcctgagtaggaggaggttctaacttcattttcacttcttcaggatcaacatactctgcaactaagagacgcccaccatttggtggccattgcaaattatatacagcattccgtgtctcaatagcttcttccacagatgagtaagtaacatagcaatgggtctttatttggtccatccagaagctgctgacattcccagtcttaccaagaagttcttgcactgcttttagggtaaatggacggaggaaacggtcaattctgagggaattagttggggacctttgtgatggtggaacaatgtgttctttaggtgtatcatcagttgcagaggaatcagacctagagaagctgcgtttcaaagtaattggctcatctctaggtgtagtagcaggcctgggagtagtgctttgtgcatctggacctttaactgtttcagtgttccacctgcgttgccttttggcaggctcactgttcccaacttcattaaatttccgtttctcagtcagggcagcaggactaatgtcaatatcttggtgggtatcatcttttcctgcagatagactatctccaacagctatagtactactttcctccttcacaataggcttttcaatctctactttgtctttaagttcatcaacattaaacttagaatcaatttgcttagtctcaggcaaatcctcttccatagaatcatcaccagaacttctgtccaagttcaacttttctgaataccctacatcatcactgctattggtcttgttcaagtctggacttgaaacattattgatattttcttcaacagatgcctttttctcatgcagccctccaacatccattgaatgtgattcatcataagaaacaggaacatcatttctggatgatggttcttccaccatctccggcttaacaatatcttgttctaatttgacattatcagtaattatagtatcctttagttcattcttttaattaattgacagagaatcagtagaaatggggggggggcctacgtagctgcctaaactagggttgacctcagatacctggttttctggaacagaagagtcgggcacaggatcctcgtgcaagggcttgatgtcacaatccagctggggctttgagtcctcaccatccagctgcgcctttgactcctcattctccagctttgctgctgaatcctcattattcttttctgcacgataagaatcctcagcactggccactacttctgttactacactctcattaactgtaatggtagtcttctccacagtagaaccatgggcaattgcctcctgtcccacatttgcagaatctccaccagctggcaagcccttaggttcaacctcttgatctatggctgacacactattattaatgtcaacttggttggtaacaccatcctgcttgtcattcttattgctgtcgtgatccacaacctccggaatcttttccacattttctatttcaacaggatcaactacaccgctcttgcccttttcagcagtctcaaatgttttggcattgtccctgtcagttgaatcaaccatttcagcatccacagtaaccgcctctgaatctttttccccatctacatgaccatcgaaaccattggcctcatccttctcagaagcctcgtcagcctccctttcaagacgaaggacttcatccaaacgcttgaccaaatcatccttcaaacccttgatacttaacttcctcctcttcagctcatcttttagctctgtaaccttccactgattaatagggcggttgtcaagaatctgatattttgacgacattatgtccaaacgcaaatcaccttccctaacaatgataatagtttgcggagaatcgagaaaaaggaacgctcacggaaaccctaatttgagaatagaaaaagaggcgccagagaagaaaaaacagagaggcatcgaagattcgagtcccgaggcgaagaaccaaaccgaatgcactctcttttattactcctatccctttctccctgaaaacaacgaagcagaaaaaaaaaacccccgcctcgagacgagtcctctccaagagaaaataaaattcagtatcagcaaaatgttttatccaaaacaaatgtaaagaagaagaggatgagattttcaggagtgagaaattgcttctccaaaatcttttctagggctttttttttgtctgccgctgttgctccgttgagggttctttttctctttggcgatcggacgcgtgg

SEQ ID NO: 1757 - DNA, 1005 bp, Glycine max
aagttttttttttttttttatataacaatgctattcatcatatcataatcatcataataacaaaacacaagtttgcaaatagttatccatagcgagccaataacaggcacgggagtctaaaaccaccaaaaatataacaagaagaaaccaatacaagcttcaaccacagttctgctatgtttccaaaggttcatggatcacattattgagccataaaaataaaagaggttcgctttggacttaggaagtgtcccagggcctaggttcggggagagcaacgaccataccttcgaggtcgaggtcgaggaggacctggcatccgagcctggagtgcttgttgagggctctggctcgggaattgcggacgaggacgtactcctcgtcgtaggagcgaggggggagcttgtcgagccactcctgggcaatgttgacctcgcagtgggccgcgcaggcgtcgatctcctcgaggcggtagatcagggatttggagaagaacgagagggaggggaggcggtgcgcttgcgaggacagtctctgcagattcgcgactgccattggtgcttcttgttttgggaagctcgtcgagagtggtcttttggttgggaaatcggaacaaaagaaatgattgggtttggccgtgaaatgggcggaatacaaggtagcaaattcctaggtgcacccattccaatctctggtacatccagcattttaagtgaactgactaaattatcctttacttaaaattttgaaaaactctccctctccctaagctgtgttattgtgtttttcctcttcttgttcttcagttcttctcgttgcgtcgccgcgtataatttatatagattgtcaatatgtatgcattatacgaaatctcaacccgtataattatttaattttttaaaaatttattaattaataaaataataattgaataaattattattatttaaaaataaattaatatttttgtagttataatatttatttaatcacttatattttgct

SEQ ID NO: 1758 - DNA, 1241 bp, Glycine max
ttttgaagttgcaagaataatcaaatggttgagttttacatagaaattacaatcaacaagctgtttcaataaattgaatataacgatgtcacaactaaatgatagttgcaccactgaggctaaagcctagcccctcctacaatcaatttatacaagctcaattctctaaaagttaacagttacatgggtcaaagacaacacttttatcccatccaaagcattacaaatgacagttattttggttatggataatgagtgtggcctctcttttagccgttgctcaaacgagaatcaaaggaccgtgtggatgtctgacgccgcggaataccaatctcgcaggcattcactccagcggcaaatcgaagagagcaaagtgactctccagttgaagatggatcaggtgagatgttcacaaacatcaaagttttggaatccccaccaagacatggctggagaaggtatgtcaattttgaattcctaaagggtacatgctcctgtttctttgccaaagcaaatatgacatcactcaaagaggagagacttttgttgatagcctgagtttccttcaaccggtccccggttgccccactcctggacagtctttcacttccagccaaatcaatcaggtttaacacaccttgcacttgttggtcagtgttcgaattggtcccagatatacgcaaagtaaagacaaagtgacttcgtgatgactgttcattcatgtgtgttcttcctacagacctgctttgtgctgcctgttgcagaagagatgaaatctcacttgcactagaaacgttctttatagtgaggtctgaaacatgtgtgtttccgttgacatcgtgcataatagtgtatggctgctttccagaaacaggaacaccgttttctattcgtgttgagtcaataccacttgaccgatttgatgataacaaatccctgagggtctcgttatatatttccaatactgaagcctgcattttgaacctccacccctgatccttcagggactgactaatctcgaatatctgttctagagaacgtggtatcaaccccttcagatcgggggcatccggcctacccatcattgtataggtttttcctgaacctgtctgtccataggcaaagatacagaccttgtatccatcaagcgcactttgtaccagctgtgatatctcagtgaaaacatcttgctgagaagcctcatgattaaataccttgtcaaatgtaaaagggtacttctg

SEQ ID NO: 1759 - DNA, 861 bp, Glycine max
  misc_feature (13)..(15): n is a, c, g, or t
  misc_feature (19)..(19): n is a, c, g, or t
  misc_feature (704)..(706): n is a, c, g, or t
  misc_feature (793)..(795): n is a, c, g, or t
  misc_feature (804)..(806): n is a, c, g, or t
  misc_feature (825)..(829): n is a, c, g, or t
  misc_feature (836)..(839): n is a, c, g, or t
  misc_feature (854)..(857): n is a, c, g, or t
ggttttttttttnnntttngcaagaataatcaaatggttgggttttactttgaacttacaatcaacaagctgtttcaataaattgaatataataatgtcacaactaaatgataatcagttgttgcacccctgaggctaaagcttagcctctacaatcaattttatacaagctcatttctctaaaagttaacacagttacatgggtcaaagacaacttttatcccatccaaagcattacaaatgacagttactttggttattatggataatgagtgtggcctctcttttagccgctgctcaaacgagaatcaagggaccgtgtggatgtctgacgccgcgggataccaatctcgcaggcattcactccagcagcaaaccgaagagagcaaagtgactctccagttgaagatggatcaggtgagatgttcacaaacatcaaagttttggaatccccaccaagacatggctggagaaggtatgtcaattttgaattcctaaagggtacatgctcctgtttctttgccaaagcaaatatgacatcactcaaagaggagagacttttgttgatagcctgagtttccttcaaccggtccccggttgccccactcctggacagtctttcacttccagccaaatcaatcaggtttaacacaccttgcacttgttggtcagtgttcgaattggtcccagatatacgcaaagtnnngacaaagtgacttcgtgatgactgttcattcatgtgtgttcttcctacagacctggaacaagagggcacattgaatctgatatattnnnagtcacatnnnctaatgcagtcaaatatannnnnatttatnnnnaatttaatttagtannnncatg

SEQ ID NO: 1760 - DNA, 1463 bp, Glycine max
ttttttttttttttttttacatttacatcctctgatactcccgaaaatttaagggcactatatattattaagaaactttctcactctcccaatacatgcaaattaacaattttttttggataggccacacctggtcattaaaagagactatcctacctgagtcgactagttcagtagaactactaatattgtaggcaacaaacaaagttcttcgtccaactctgagactaggaatgataaaccacttaccaaaactcgaactcaaaattattatttaagctgaaacaaactcgattaattattagtgcaacaaataaactatatatatcaaaacccttaattaagcttctctgaatactatagcaactccggataaccgatccattcagtgcttctcaatgaactccttgatcctagaaatgagagcatcggtttgagcactaacattggggtccatatccacagcaatcttattcagataaaaactatgtgtcatccctttgctaacataaagttccacatccttgttggccttcttcatggcctcatagtactccatctccgtgtccctcaccaagtccatctccgccacgcatagcagcaccggaggcagtttcagcccttcgagtggcggtgccgcctcacccatcgggcacgtaaaggggtggtccttggtggccccaacaggaagcgccaaggctaagaacttgtccagcatgtccaacgttaaaaacggtgtctgtggcatttccatctcggaccggctccggttggaccggacaaaaccggggtgaaccggaattgcccccgcgacccggaccgggcttaggtccgccgaaccggccctcgcggccacctcatgcaccgagtttccgccagaactgtctcctatgaggaaaacccggttgaagtcaccgtgttgctcgagccacggctcgagtgaaccggaccgggccacggtttggagccagaggagggtgtcaaagccgtcatcgatggcggcggggaggcggtgctctggggcacggcggaggaacggggaaaccacgatggaccgagtggaccgggcgaaccgggtgtagacttggtagtacatgaaccagtccggttcacttatgcaaaacccgccgccgtggaaatggaggacaattggtagtttttggctgtcttccggctttatctctggcagataaagtcggacatggtggccactctggccaccaccgtgagtaacggcgacgtcgcgaatggcaacgccgtctatgaattgttcatggggaggggccggttcggccatgaacttgaattggtccggtccggaccatgtccggtccactgaaccgtcgtcataaattttgagccaaccggacacctcgtcaactagtttcttttcttggaccatgttttagcaagtaaagggaaatgttagtgtggtggcttggggggggggcctacgtagctga

SEQ ID NO: 1761 - DNA, 804 bp, Glycine max
tgtaaattgtagtatattcattggaaaaaaaaaatagatgttattgaacatgttacatacaagacatgttataggatattataggacatgttataggacctaagaaacttagtatacctcaagtggtgacagtacccaggctcatacggtcaaacctcaagcccagttattatcccccttcccatctaacatggtcagaggggagaatagaaaaacaaagcacattttatgttgcactatcttatggatgtgtagaatctctagtgtaggttttgaaaattccattctatagacgagatcgaatgaataccctccttccattgccctgcacaagattgatttccttaaagccgccatcagatttgtttggcggctgtgattcttcaacacgtttgattgatgcttcgtactgctgctttaggttattcatgtcttccttcacttcctccatttttgtctcaaaagggaggtcatttgcaacctttaaatcagggtgtttcttggcctttaaaggggttggcaagggtatgtttattaatccttctggcaccatcttatctacctgcttcctaccagggatgattctgcgtgagccgtcgatggcggaaccgacggcgaacttgacgaggtcgaccagtatttggctaatcgtgtgacggcgggccatatcggtcacggcggcggccatgtcgtcggcggtgtcttgcgattccgatgagcttctttcggattaaccgaagtgtatgtggttatgtgttctgagggagcagctttcaattttggggggggggcctacgtagctga

SEQ ID NO: 1762 - DNA, 1387 bp, Glycine max
ttttttttttttttttttatcaaaataactgagaagaaagcatgttcgatagtcataaaattgtcagaaatgaaagtgaattggcaaaataaataatttgatgtgaacttaaacagattgacagatagcaaggaaaattgcaatgcaacatcagagaaaccaaattttcattgtcagcctagaaaggtgacaaaataatgaaaatggtgaaacaagagcatatggctaagacctaatgtcaagatatgcataaattgagatgattcaaatcttattagctacaaaggtcttcttcagatcagcccattcatcttcggttttcctcttatcggttagggccactttgtaagaagtctcagactccttcaaagctgtgatgatactcttgcattctggcacccattttgcaacctgagtctttagcttgttattttcagcatcacaagagtccaaggccctctttagcttgtctctagtcacaaccaaagcacataacttgtgctctagttcatcaatctcagaattgatcttttcaaattgtgtcttaccttctgagactttcaaattaatttggtcctgttgagctttggcactttccaattgctttgatagaagagaccttgactcgagcagctgatcataatcttggatagttttttgggcagtcacatatctgatatcaacatcttcaataaaactttttaacttgtaaatcacagcatgaagcctgacagggacttgatctttaaattggctaagttgctccaaaacatgatggaattgttgcttgacttcatcatcagaagagagaatttcatgggaggtctccaaaagggtctccaatttttcaaggatagctgccacatttggaccatggacttcaatttctgaaacagttgctgagtgagtggacatggaagacatattataactatcagataagatgctatcaagttcagcaatcggatcccaatctggttcaagatgcagattgtcaatctccataagtgtatgaaatctctccaacatgactggctcagaaaatgtatccacttgattgtcagctgagtccttttcttttgacatttcactagtctgatttaatcaatgttggtagtacttgaagtgtcaaagggataatcttgtggagatcaagccatgttgatcacgagaggctgatccctccaaaatcaagcccaaaaaagatgagaattgatgattagttctcttggtgttgccatctcctcgagttttttaaggaatagtgaataggtattcctagaatccacatagaagtttcatgaaaatttccttcatcaatttggtcaaggggactgatgcaaggacatttcttggcaattggggggggggcctacgtagctgactc

SEQ ID NO: 1763 - DNA, 1381 bp, Glycine max
tgatgatgggaaagatcaatgcttattgcaaacctttaagcctcacctattcactaatccaaaatccagaaaatgatgtgagaccaactgtcaatggaaagtggaaattgtgcgaacgtgcacaatactattggaaaaagaataacacaatcttcaatacaaacttttcgacacttccattagctggaatttgttgggactcgttcaaaagaagtgagacacacataatattgtactagtaagtcctaataaatttcaatcactgggataacttgtgtttgaaagaatgtattagagaacatgttgctctcatttctctgactagaacgctatatcccacgcttatgatagagtttttcaattttgacaagagccatggaatagtgactaatcttcacgccatttctgtttcgcttatggttttcatggttcttctggcttaaccatgttcctagtgttgtccttagcagaaatttttctcagcacaatgataattaaatatcatattagttcaaaactaaagatggctgcaatttgataacttaacaggaatgagaaatgaaacgtttaatgagagatgaccattttaataaggcaatctaattattgacaaggattagcctacgcaaccttggaatgtcatcaacaccttatccaccttccatcagaagaactccttgcaaaagtgcgaggctgtttcttgggaaaggtttctgtccagtgtggatgctcgatcaaataattccactgcctttttaaattctccacaaaatctgaggcttcagcagtaggtgatgtagaacatattgaaagaatttcggaatcagaatagttcagaagtgatgaagcaatatgattttggcgaagagtccagcgacaaggagcgattttgaaacagtcaatgccagaatcatatgtttctagtaactttccgttccagttggcatcttcataagacacggatactcgtattcttctgacaatttcatctggacatctagaagttctatcaaagatagctgggatgatgattcctgttgtagtctccgccacaaatccattgaaaaaggggtatgtgtttccatcagaatcccttctggtattatgtccaagaacacagatagttcggatgtgaaacttctcctctcttgaccataaagtgtgaacaatctttaaacacagaggaaaggaataaccatccaaatctgcagggctttttgaaactggggtaccatttgcatggtgcagtgagacattttccaaccccccaataagaagcacatccaaatcagtttcccaactggtgttgacgaatgaataaaaccattgggaaaggccccattttaccaattttggtgaatccataagggcaactgacgtc

SEQ ID NO: 1764 - DNA, 1771 bp, Glycine max
ttttttttttttttttttaaggattttgtctcatcgaagttccatttaaacacagaggaaaacgtacacagtacattaaggaaatgcaggcctaaaacgacaattcaaggaaatccaaatgagacattgtagataacaaaaaacttcatacagaggaattagaaccagtaaacaaaacatgcatctcccaaagggtacggacaaaacagaatcactagatgcctgcatatacgatggaaccaattttcgtgacatgaaaaaaactaatgctcacaattttcatttattcatcccatttaaactttaaaaggattcatgtcctccaacaaaaagggtactaaaagcttccatctcacgttgacataacatcaaaccaatctcaattcctccactgttatccctactttcactaagagaaaacgctcccgttccatctatggaagtcatgtccactttctttggccttccccaaccaaaatcagtgccataaacctcaaacaatggcgatccagcaatactgaataatcgaggcacactctcccctctttcaagcattaacgaaacccaagtttctgctccactcagcactccctcacccttcactatattcaaagcctcacttatcccttccaaagcactgataaaaccatcgcttattccaaccaagttctttgtcacagccacaaccttttgccccgcgacgcagttcccaaaatacgttgcaggaatcggaggattcaagcgggatctacagtccacagaaaatacgaaacccacatcatcttcctctggttgttttgctttgaccaagcaagtcaacacataagcacacgtaacagcaaacgtcgaaaacgaaaagtccttcgttttcataagcttagactttgcatgttgctttagcttctgaatttgtgaaggtgttaactcaaatacacctttgcatccatcactcggtatttcggtgaaggattcccacaccttgaggcttcgattgtttggtccgctactctcctgccacgcgtccacgtaggcttcagcaattccagaagggtctcttatcactgatctgtcaaagaacggtgtgagatgctgaggtaataaaaataacggtgtgttgttgttttgaattaggttggagcatgtataagcccatgatttgatgaacatggttgaagattttccgtcgaaagctgcatggtgtgtggttattccaatgcaaaaaccagcgtttgggaacactgttacttgaagtgccaacacagacgctttgtcatgggaagcggtcaagtggggtatcaaacggtgtcgttgcgatgcttcacacagacgagaagtgaggttgttgaagttttggttggattcggcgacagtgaatgaaacggcgtcgccaggggtgtagttgatgatgggtttgggagagtgagagggccatgtgagggtgccagcgaaagggaggaagtgatggaaagtgagggagagagagtgttggagagtggggagaagggagtgaagaaatgaagaggtggggtgtgggaaggagtagaagaagagacgctcaacaggtgggaagcgtagccacaagaggtcgaagaaggttagtgtgagagagtttggaacaacgacggtggaaagggatggttcttgaagcggtgccactgaacaaacttgaattactttcaaagctgttgctgctgctgctggttgcgtcgtcatggcttagacataggaagggttgctagtgggggggggggggcctacgtagctgactcga

SEQ ID NO: 1765 - DNA, 1999 bp, Glycine max
tcagctacgtcgcccccccccccgactggttcttccaaatggctattccttcactaataaaccagccacaaagaacaccctctctcacattctccttcctcctctttctcgctatctgcaccccattggatgctgctcacaccgacttcgcaggttcagcctgcctcaaagtttcccctagccacttcgccggctcggtcaccgaagtcatcgctgccatacgtcaactcgcttcgatcctctcacgcttcggctctcccttggccaacttccgcctcagcaccgccatcgccgactgcctggacttgctcgacctctcctccgacgtcctctcctgggccctctcggcctctcagaaccccaaagggaagcataacagtacggggaacctgagttcggatttgaggacatggctaagtgcggcgcttgcgcatccagagacgtgcatggagggattcgaagggacaaacagcattgtgaagggtttggtctcggcaggcatcgggcaagttgtgtcgttggtggagcagcttcttgcgcaagttcttcccgcacaggatcaatttgacgccgccagcagcaaggggcaatttccttcttggattaagcccaaggaaaggaagctgctgcaagcaattgcagtcactcctgatgtcactgtagctttagatgggagtgggaactacgctaagatcatggatgcggtgcttgcggctcctgattatagcatgaagcgttttgtgattttggtaaagaagggtgtttatgttgagaacgtggagatcaagaagaagaagtggaatattatgattcttggacaggggatggatgccaccgtcatctccggtaaccggagtgtcgtcgacggctggaccaccttccgctcagctacattcgctgtgagtggcagagggttcatagcaagagacatatcctttcagaacacagcagggcccgagaagcaccaagcagtggcactaagatcagactctgacctttccgtgttcttccgatgtgggattttcggttaccaagacagtctctacacccacacaatgcgccaattcttcagagactgcacaatcagcggcacagttgattacatcttcggtgacgccactgcagtgttccaaaactgcttcctaagagtaaaaaaaggcttaccaaaccaaaagaacacaatcacagcacacggtagaaaagacccaaatgaaccaaccggtttctcattccagttctgcaacataactgcagattctgatcttataccttctgttggaaccgcacaaacgtacctggggagaccctggaagagttactcacgaaccgttttcatgcaatcgtacatgagtgaggtgataggggcagaagggtggttggagtggaatggaaactttgcattggacacattgtactatgctgagtacatgaacactggagcaggtgctggagttgctaaccgtgtgaagtggccagggtaccatgcattgaatgattcgagccaggctagtaacttcaccgtgtctcaatttattgaggggaatctatggttgccttcaactggagtaaccttcactgcgggactcacagtttaacagaaataaactactgccacgccttggcactctcttgtacttaattatataaagttattatatatttatagtttatatcataggaagaaaaaaaaggtattataagaaagaggtgaatgggtccgtgttcactttaattaattggtacttgattattaaagattttccattttttggtaaagccgtacttggggagttcggtgttttttttcttcttttttttattaaagggaggctatagccattacaaacgaataactctagggaaacaagttcccatacaatcactccaaagcaaacccttacaatctacaggaagtagctcgaaaatgtgcactcctatagggatgtcaagacccttggctgccaaacaatcagctacattatgcaacatttgtttcctg

SEQ ID NO: 1766 - DNA, 1295 bp, Glycine max
tttttttttttttttttttttttttttttttttttttttttaaaattcttaaaatttaaaatttctcaaaattttaaattctctcatccaaacgcactctagaagtcgttacatttattacaaaatcttttaaaatccaaaagatttttttaaacaaaaataatcttttaaaatcttagtccaatacaaccatctaaatgtatttagcactttatttaaatcattacatcattagaagggggtcactatcatccatatcattcatctgaagtccatcaacgttggttacagtgggcttctgttcgcgtctttgtatataagataacgtgttcttgtttttcccagggcagcataccattgtgggacgaatggtgccatccaaatgacatcaccagcctgaactgggtaccaactatcacccaaacgataaatgccttgcccttccagtagcagcaaaccatgctggttataatggacctccttcacattaagaaattctccaggttgaaaatccattatgtggatattgaagtcatatgccaaagatgttggaattagcttcctcagttcaaaaatctcgcctggagtctcaaggagtggctgcttatcagttgaaccaaccaatggctctgggatatgatttggtagcggagaatatctccgttcaaataccacaatagtagcaggtgtatcacattcaattgaatgttcaaaatttggaggaaaataagcataagaatcaaccttcagtagttggctaacaccagcagcattagtgagggtgacagcaccttggagcacaaagataaatctctccacaccaggcaggggtagtcctgattttgatttttctttcaacttagctaggtacattacaaagtgtgaacccatttctggtgaaattaaatatgcgcctgacgtgtcgatccaatcaggcaatgggccatatacatgactttctggtgataccaaagcatgattactcttataaacactgcgtgtgaatccaggcaaatcttgaaggtggataggtgagagagtggggttatccactttccaataaagaggctttgatttcgattccgaaggagcagagcaaaacccttcttcagcaaatgcatacttaaacaaacccagaacaaggagaaggacaaagatgctcctcatttttcagatgagaaaacgagaaactgttttggactgagaagagtggctcaaatgaaagtaggtggataagtgtgtcacggactcacactcacactagcactggggggggggcctacgtagctgaaaac

SEQ ID NO: 1767 - DNA, 1624 bp, Glycine max
gggcaaataacatgtctcaaatttaaagaaattccacacaattctcatgaacatagagaactgcttcccagggtaactatacagcttaccataaaacagtttaacatgagttacagccgcctttgctttcacctatgcgtgtaaagcaaagaaaaaaaaaagggaggacgggtggggaagcttctttgaaaaaccacatttaactcattttccttcctagggccaaaaagctacaaaatccacccacagatctacccatttatgggagttctgcaaataatttttaagtgtcacgccttacaagcataacttctatataaagtcagatctcaatgaatagaaccacataaaaagttttcatgacagaaatttaattccctttcttcttcagtacgtgtctaaaatgtgccatatattactgtaagaatgagagtacatctatcaaagacaaactatttacagaaaaccaatgagggggcaggagaggacatcgagcacaagtaaaaaaaatggcattaagcagcaacctttcaccaactagaatcattagttttcttttgatacttatatatataaatttgtgagaagagatcactacctgatccttgaacaaattgcatacgagtgaacttccctcaaattctcaaccttggacttggcttgtcaaatagccaaggcaagcatcaccaatttaagaaagattaaaccagcacctcaaccaaaaactactgccaagaagcactctgtccacttgacatggctcgagcttcagccaaagagacagccatggcgagcatcatctgctcctcaaaactctcgggaacaatgggttctgtggcactttgaaggcttccatcattgtcatcagaccgtggcaaagatgatagttcaccacgatcttctgctgcgacagagtttgtatagctggttgctgtttcagtcaactgtgtcccatggtccatgtcccattcaccatgactcctagtcattgtcacagcttcatccagtggctcctcattgaggttgtcaccaggcggataattagccatatccctaccaagtctgttataaaatcttctggaacccggtagggtgttgaatgatggcatattttcattggtgaggctcatagatgattctccagccatttgctggcgctcagcaagagctgcaatggcacaagcgagacccccagatggagacgaggatgatcccgttggtggacccatgacggatgagacagatgagacggatgaaacatagcgaccgtcagctacatagtgtccagaagtagcatcgacaaaagataaatttctccgcctgccattctcctgaatggaaagccaaattgcttccatgaccatgatgtcctcaaggtcaacgtcaaattcatcatctctgcagttttccgcatttgggagaacatacaatgtaagcccacaacatgtagtttccaaaatatatgaaagaactcgtgcaattatttaccccgacccgcatgtatttaatatttgtttaataggatgtccacctaaacgaccaataacatagagacaaggctccacctgtgtcgcacaagtataggtgtggtatcacacccaacacaaaaatatggctacctcgt

SEQ ID NO: 1768 - DNA, 1016 bp, Glycine max
  misc_feature (17)..(17): n is a, c, g, or t
ccaattcccattcaggntgcgccactgtggggaaaggcgatccgtgcgggccttttcgctaatacgccaactggcgaaaaggggattttctcgcaagcgatttaatttgggaaccccaggggttttccaatccccaccttgtaaaaccacgggcaattagggcgggttaaaccactccctataaggggaattggggaccgggcccccccccgaagttttttttttttttttttttttttttttatttttttttttttttttttttttttttttccttaagaaattacacacacacatatatatataatgaggcactagcagtagtaattgaaagcaacgaatacaaccagcattacagcatgcttaaatttcattccaaacaagaaaagagcagagaggctctgcatacgaatagcagataaagtacacacagagaactacttacttattcacggatacaaaaaaacagtagactagtacttctatttgtcaaaagcataacgggcttggaaactgcacaaccttaactagtgcaatcatgcaaaaaatgcatgatgcctcatcatgattgagagcactcacggattaactggaactggaactggaactccaccaccactcccagggtttggaacctcaaaaccagggtttgggacaaacgtgtcatcaccacctggaacgtaaccacgaccagctggtcctgaccctagtccactaccaccagtgtttgggttttgaggtgtaaacccaaagaaaggtggcaaccctactcccccaaagccaggaaaatggaaattaccttcaggagggaacaaaaactgaggctctttcttgtccccattgtttgagtgttttggaccaatgtggcgtctagcaactgcttgccatgtagtggcaagaaggatagtggtgatgagaagaagtgcaaggaaagaagaaggtctacaagccattatatgatgagattttaaatgagattgttttgtgggggggggggggcctacgtaccggctcga

SEQ ID NO: 1769 - DNA, 1158 bp, Glycine max
  misc_feature (88)..(92): n is a, c, g, or t
  misc_feature (108)..(112): n is a, c, g, or t
  misc_feature (264)..(268): n is a, c, g, or t
tagattgtatttgtccgttatctgctgtggtttcaacgttttatgctccctatgcttcataggtattgcgatacacatcagaaaatgnnnnngtacccttaacagttnnnnnaggaattagagatttcacagattcaactgggaggtattattactgatcattatggagattatgctattgactttcttgcattctttcccctctattgaaattattcagtcttatagttttatcaattgtgttccctcagaattttcaaatcnnnnngatccgatcaattatattctcaggtactattctagtttggaagttgcttctgaatactttaggtctggggctgataagatttccattggaagtgatgcagtttatgctgcagaagaatatttaaaagccggagtaaagactgggaagaccagcttggagcagatatcaagagtttatggcaatcaggcagtggttgttagtatcgatccgcgtagagtgtatgtaaaggatcctaatgatttgcaattgaagaccataagggtttcaagtccaggtccaaatggagaagaatatgcatggtatcaatgtacagttaatgggggacgagagggccggccaattggtgcttatgaactagcaaaagcagttgaagagcttggtgctggtgaaatactacttaattgcatcgattgtgacggtcaagggaaaggatttgatgtagatttaattaagttgatatcagatgctgtaagtatccctgtcatcgcaagtagtggtgccggtgctcctgaacacttctctgaggtgttctataaaacaaatgcatcagcagcacttgctgctggcatttttcacaggaaagaggtgcctattcagtcggtaaaagagcatttgttgaaggaaggcatagaagttcgaatctgatcatatgcatttagtggtaaaatttttgagatgcacttcataataatcaaaccttgtacgttatccctttttgtgtaatctaacgaagctctcaaaatgtcaaccttttggatcatgaaaagattttcacaacgagacctttcctttgtaatatttttaagaaaaatatatttaccatgtgcagcactatctctgaacatttgttattacaaaattatttcatgtgtcccctgtaaaaaaaaaaa

SEQ ID NO: 1770 - DNA, 581 bp, Glycine max
ttttttttttaaaagaataaaagatccatattattctctatataaaaaaactatacaacaatcctaatccatcaaaacataaaacataagaaagactatatccatcaatagtacaaagtaaacctaacacctcaacaataaatgaatagaaaaaacatactacaaacatagataatcaacagaaagaaaaaaagaaaaacatatgaagacaaagattattataaatatgtacagaaggaatcaaattaagataagtaagaagtagtttaatgcttctgggtggtgttgtgatacttggtcttgatccaatggaggccaacagaggtaccctccttcaacttcttcacgccggtggaagcaactgccttggtcttgccgaaggccttgttgttctttttctttgattcattggagacagtcactgggtcaggcccgttatcccactggtcagcccaagatgttccgttggatcccatttcttcttctttcaagatagatagctgaaaagttggattgaggacttagaacacaacacaaggatttagtactatttatgtttatgatgtttgtgtgttgtagat

SEQ ID NO: 1771 - DNA, 1971 bp, Glycine max
tccggctgcgagaagacgacagaaagggggcatgaatcctttggggtcttgctatctgcttcctcgtagtacttcattgagagagacatggacactgtactaagtactacgctgctactcatgttggcatgctccatcgtgcatgttcttcgttcactacaagcaagaatgagaagaaaatcaaactacaatcttccaccaggaccctctcttctcaccatcattagaaactctaaacaactctataaaaagccacagcagacaatggccaagcttgccaaaacctatggccccataatgcgtttcaccataggccaatcaaccaccatagtaatctcctcaatagaagccacccaagaggttctccaaacccatgactcattattctcggacagaacaaaccccgacatcacaacctcgtacaaccacaaccgttacagcttggtttttctccctgtctcacccctctggcaagaactaagaaaaatctgccacggaaacttgttttcggcaaagacccttgacgcaagcacggaccttaggcgcatgaaaatgaaggagcttcttaccgatatccgccaaagaagcctcaacggcgaagtggtggacattggaagagcagccttcatggcatgcattaactttttatcgtacacgtttctctctctggattttgttccctctgtaggtgatggcgagtacaaacacatagtggggactctgttgaaagcaacggggacaccgaacttggtggattattttccagtgttgagggtgtttgatccacaagggatcaggaggcacaccaccaactacattgacaagttgttcgatgtgttcgatcccatgattgatgaacgcatgaggaggaggggagagaagggttatgccactagccatgacatgttggatatcttgctggatatttctgaccagagtagcgagaagattcataggaagcagatcaagcatttgttccttgacctattcgttgcggggacggatacaacagcctacggcttagagagaacaatgacggaactaatgcacaatccagaagccatgagaaaagcgaagaaggagatagcagaaacaataggagtaggaaaaccggtggaggaatccgacgtggcaaggctgccatacctgcaatcagtgataaaagaatctctgcgaatgcacccaccagcaccactgctactgccacgaagggccaaaacggacgtgcaagtctgcggctacacggtcccacaggggacacagatcctcatcaacgagtgggccataggaaggaacccggccatatgggaagacgcacataggttctcgccagaaagattcttggactctgacatagacgtcaagggtcgccacttcaagctcacgccgttcgggagcggaagacgaatttgccctggctcccccctcgccgttaggatgctgcacaacatgctcggttccttgatcaacaactttgactggaagcttgagaacaacattgaccccatcgacatggacttggatcagtccctcagggctatccctgttctcgtaaatgccaactaattcaacatcatctgtatgttggcatgccatcccatgtacctttttctcagaaacagcaaacagaagcttgattctttggtttgaatgtttctcgtatgtgctagctttgatccagcttgtttcttccagcctgggtttaggataaataaataaccaggctttgagtaacatgatgatcatttattatgtttattaattgttgcagaagataggagtcgtctgagtgtagctttaatctagctagtttgatttggcttgtagtgcctctttgtgttagcctttgtatgggatgtaaaacagtgtcctcttgaaggaaagaaaaaaaatagttgttctctattgtttcaaaaaaaaaaaaaaaaaaaaaaaaaaaaaaaaaaaaaaaaaaaaaaaaaaaaaaaaaaa

SEQ ID NO: 1772 - DNA, 2447 bp, Glycine max
gtaataacctcaaagcaaccattaagcaaaggttgcttagtggttgtgtgtgtgactcttctctcctcacaatgctgcctcacaagcacactctggtggttgtggccactgtggccacactcgcgctggcggcggtgctcgcagcaccacaagcagatctggcctccgagcgagctgcattactctccctccgttcctccgtgggaggccgtaccctcttctggaacgccaccagggacagcccctgcaactgggccggggtccaatgcgagcacggccacgtcgtcgagctccacctccccggcgtcgctctctccggcgaaatccccgtcggaatattcgggaatctgacccagctccgcaccctcagtctccgtttcaacgccctcagaggttccctcccttcagatctggcctcctgcgtcaacctccgcaacctctacattcagcgcaacttgctcaccggccaaattccaccctttttgtttcatttgccggacctcgttcgcttgaacatgggcttcaacaacttctccggcccctttccgtccgccttcaacaaccttacccgtttgaaaactttgtttctcgaaaacaaccagctctccggcccaatccccgacttgaacaaactcaccctcgaccagttcaacgtctccgacaacctcctcaacggctctgtccctcttaagcttcagacattccctcaggactcttttctaggtaactccctctgtggccgaccactctctctctgtcccggagatgtcgccgatcccctctcggtcgacaacaacgccaagggcaacaacaacgacaacaagaagaacaagctgtccgggggcgccatagcggggattgttgtcggatcggtggtgtttcttctcttgcttgtgttcctcttgattttcctgtgcaggaacaagagtgccaagaataccagcgcggtcgacattgccactgtcaaacatcctgagacggagtctgaggttcttgccgacaagggtgtctccgatgtcgagaacggtggtcatgccaatgtcaaccctgcaatcgcttctgtggcggcggttgcggctgggaatggtggtagcaaggcggaagggaacgcgaagaagttggtgttttttgggaatgcggcgagggcgtttgatttggaagatttgctcagggcttcggcggaggttttggggaaagggactttcgggacggcgtacaaggcggtgttggaggcggggccggtggtggccgtgaagaggttgaaggatgtgacaatttccgagaaggaatttaaggagaagattgaggcggtgggagcgatggatcacgagagtttggtgcctctcagggcttactatttcagcagggatgagaagctccttgtctatgattatatgcccatgggaagcttgtctgcccttttacatggaaacaaaggagctggtaggacaccactgaattgggaagtgagatcaggcattgcacttggagctgcccgtggcattgagtacctacattcacgagggcctaatgtttctcatggaaatatcaagtcatcaaacatcctcttaaccaaatcatatgatgccagagtgtctgactttggccttgcacaccttgttggcccctcctctacccctaaccgtgtggccggctaccgtgcgccggaggtgactgatcctcgcaaggtgtctcagatggcagatgtgtacagctttggtgtgttgctcttggaacttctgactgggaaggcacctacccatgctctcctgaatgaggaaggagtggacctccccagatgggttcaatccgtggttagagaagagtggacttctgaggtctttgatcttgagctccttaggtatcaaaatgtagaagaggagatggttcagttgttgcaacttgcagttgattgtgcagcacaataccctgacaagcgcccttcaatgtctgaagtggtaaggagcatacaagagttgcgaaggtctagcttgaaagaggaccaggaccaaatccaacatgacaatgatatactattatagaagaacatgtatcttctccctcgactttgctttgtcagagtcggagcccatattttacttgctaaatcctgtgcgtatgttgcttgcattctgttggcttgggccgtcctcaaatttctttctttggcaccaaacttttgaattttcttcctttttttttcctcctcaaatctccattgtgccatctcccccctttttcttcccaatcaatacattgttccattagttattgttgttggattctggttgattgtaattattacttctgctttaacatgccttttacttttgttgaaaccgtattatgtctgttgaaaacttgtaattgagatgttatagtagctgtcgttggttgcgatgtctcgtcggtggcgtcttttattattgccaaaaaaaaaaaaaaaa

SEQ ID NO: 1773 - DNA, 1397 bp, Glycine max
tacggctgcgagaagacgacagaagggtaggaatcctttggggtcttgctatctggttcctcttggtgctttttattgagagagacatggacactatactaagtacaacgttgttcctcatgttgacatgctccatcatgcatgttcttcgttcactgcatgcaagaatcagaagaaaatcaaactacaatcttccaccaggaccctctcttctcaccatcatcagaaactccgtacaactctacaaaaagccgcagcagacaatggccaagcttgccaaaacctacggccccataatgcgcttcaccataggccaatcaaccaccatagtaatctcctcaatagaagccaccaaagagattctccaaacccatgaatccttattctcggacagaacaaaccccgacatcacaacctcgtacaaccacaaccgttacagcctggtcttcctccctgtctcacccctctggcaagaactgaggaaaatctgccacggaaacttgttttccgcaaagacccttgacgcaagcacggagcttaggcgcatgaaaatgaaggagcttctcaccgatatccgccaaagaagcctcaacggcgaagtggtggatattggaagagcagcgttcatggcatgcattaactttctgtcttacacgtttctctctctggattttgttccctctgtaggtgatggcgagtacaagcacatagtggggactctcttgaaagcaactgggaccccgaacttggtggattattttcccgtgttgagggtgtttgatccacaagggattcggaggcacaccaccaactacattgacaagttgttcgatgtgttggaccctatgattgatgaacgcatgaggaggaggcaagagaagggttatgtcactagccatgacatgttagatatcttgctggatatttctgaccagagtagcgagaagattcataggaagcagatcaagcatttgttcctcgacctgttcgttgcggggactgatacaacagcgtatggtctagaaagaacaatgacggaactaatgcacaacccagaagccatgttgaaagcgaagaaggagatagcagaaacaatcggagtaggaaaccccgtggaggaatccgacgtggcgaggctgccatacctgcaagcagtgataaaagagtctctgcgaatgcacccaccagccccgcttctgctgccacgcagggccaaaacggacgtgcaagtgtgtggctacacggtcccagagggggcccagggctcattcaccagtggccctagggagaacccttgcttagggaacaagcccagtggtttcccccaaaagatttctggcctttgaacttgaacggtaagggtcgccttttaacttccgctcttgtggggagtggga

SEQ ID NO: 1774 - DNA, 1006 bp, Glycine max
tgaccagagtagcgagaagattcataggaagcagatcaagcatttgttcctcgacctgttcgttgcggggactgatacaacagcgtatggtctagaaagaacaatgacggaactaatgcacaacccagaagccatgttgaaagcgaagaaggagatagcagaaacaatcggagtaggaaaccccgtggaggaatccgacgtggcgaggctgccatacctgcaagcagtgataaaagagtctctgcgaatgcacccaccagccccgcttctgctgccacgcagggccaaaacggacgtgcaagtgtgtggctacacggtcccagagggggcccaagtgctcatcaacgagtgggccatagggaggaaccctggcatatgggacaaagcgcatgtgttctcgccagaaagattcttgcactctgacatcgacgtcaagggtcgccacttcaagctcacgcccttcgggagtggcagacgcatttgccctggctcgccactcgccgtcagaatgctccacaacatgctcggctccttgatcaacaactttgactggaagcttcagaacaacatggaccccaaggacatggacttggatcagtccctcatggctatccctctcgccacagcttaattagcgcctccttggaatctgttcacacccatttcaatgtactgttctgtaacaagtaacaacttcgtaaattgttactctttctttaaacttatgtttgtagctttttcagattgaataattccagctagttggtggcagctttggtcgagcttgttgagcctggttttaagatgaataaatcatcgtaaggctttgagttgcagaagatagggtttgtgtgagtgtaactttaatctagtttgatttggctcaagtgcctccctcctgtgtgtggtgtttcaggcctttgtatgtatgggatgtaaaatagtgtactcgtgaaagaagaaaaatcaccgtattaagtacttattcgctctaaaaaaaaaaaaa

SEQ ID NO: 1775 - DNA, 1032 bp, Glycine max
ttttttttttttttttttctttagacacaacattttattttatttagtactagtaaataaatagcgacacgcccagtttcacattagagtcacaccatagggcataggccccagagtcggaggtaaatcaaattataccacaagttatcacgtaaatttagtaaaccccccactcccaaaagagagaaaaataaaacacgaaaacatagtacatgaaattaacttgaatcttaatacaacattggcagatgatgttcaatgagcacgcctgcagatagtgaagccatcacctattgaaacaacagaaatttcaacacgagaatcatcagcaattgctttgttgaaagccagtgtagcctgcctgagtttcctttttggtacaggaacatcctcttcaggccaggcaacagttccaccccagagagtgttatcatagatgattaacccaccaatctttaccagtttaagaagcctctcgtggtaattccaatagttatctttatcggcatcaacgaaggcaaagtcaaaactttccttatttgaaggatcttctaagagtttatcaagaaccggtagagctggagactctatgaagtcgatcttgtgctctacaccagcctttttaatgaacggtaatcctatctcataagcttctctgtctggatccagggctataatctttccatcatctggaatggtaagtgcagtgaggagaagagagtacccagtaaaaactcccacttcaattgtcttcttagcattcaacaacttcaagagcaaggtcattagctgacccgcatcgggagcagcgcccataaagccccaagggtggcctgcagtggctttccttagctctttgagagtctcttcttctcgtggataaacgctggtctccagtatatacttggtcaagttcacactctgcagtattactggattagaggacattttgtgctttgttaagcctttcttcgacttcgggggggggggggcctacgtagctgactcgagggggggcccggtacccaatcg

SEQ ID NO: 1776 - DNA, 1365 bp, Glycine max
ttttttttttttttttttctttggaaggaaatgaaatttgaactttattaactaaattaaacttacactcaggaaactatatcacttgttagtggctaagtgtgtgtttggaaacccgtttcagcatgactggacggaggttttacacattccaaagcaataaaataaaaggaaggggagagttgaataggtcaaacacaccctaagtctacataactcttacaagctggtaacctactgcacacatcacacacacacacacactagagttcaagcttcatacaattctcaactcttttagccattgggaatgcaaagggcatgggtctggcttgccttgggcattagccttctcagagagagaacaaaaccaaccatttctccatttgaactctttaactgccgtgggaaagtgggctacagctcgagaatatgcacacaagcgctcttccatggcttcttcaaatgttaaccccttttcacttgctgctgctgatgccagttctgttataaggctggacaattcagtgcggaattccttttccacgacacctacagaaacccctccatgccgtgctccaacaagcataacggaacaaatccatataagcttctccaacatctgcttttgaaacgcctccttgtcaagaaccttgcaagagaggcctccagcatttaatctagcagctacaacagaagcccacttgccatatgcagcagtgagtccttcaggattggtatcagtcctaccatcaatagggctttctccaattttagagacagcaaaataagccaacacctggtttgcatcttccaaacctttgctctcaagccacggctccatcattccgttctggaagaacaccaaatctgcacgccatctagaagaaggtgtagattgaagcacggattcaagatcatcgttccttgtgcacacaaaaatgggaccctcaaaattgggaggtacggactctcctcggcgaacgaggaggtcttgaccggtgcccatgtcctgcaaggccctacccactcttccgccgccgacaatgacggcgggagccaccttggtagaaggggcggcgatggtggtagccatggcggagactttgaatcggaaggctgaggttgtggcagtggttttgggagaaatggagaaagagagcgaagtggccatgaaggagtgagtaataagtgttcagtgaaaagtggaggcgaacaaggagaagaagaagaacatcaacatgacttttgggcagacacagttgttgagctgtgtttgtcgatattcccgcgcccacgcggcgccccgcgccacttgggaagcttctatcctccacaacttttccctgcgtgcctacacgactt

SEQ ID NO: 1777 - DNA, 1721 bp, Glycine max
ggaagaaaacaggaacagaataaaacttcaaattgtaacaccagcccgtaaaccatgcacctttctcacaagtcatagataaagagattaacacagctggagccgaaatcaagtctcgacattagcttaaaaaatccggttcaataattcaataattagctctcagcgaaagtctaatctaccacgtgtcttaaggaggcaccaaacaatataaagctacagatggcgtccttggtttttaattttaagttgggggactccagataagccgttttcgataatcattcttcagtatattcctggaatgattctgtaaggtaccttgtcgcaatatagtttccagtacttgccatacttggatctgcaacgatcatcatctcgttttgctcgatcaaagagaaggatggtaagaaatatcacgtagaagtaaggcaaaaaatgttcgaaaagagctgggactgtccagaagaaagctgccagtatttcagggacataatgaaagtgacgagataatccccaccatccagaggttaaaagaaggcttcttttagtttccccagaagtagtagtatatgtggcctctatctttgaaggagcttttccccagactgtgccttttccatttgtcctacgaaattcttgcctttgcctgtcacaatcatagttgatgtatatgcaaagaatgccagctactaaaattgagagcgctagcttgatgccaagatttacaggatggttgacaaggtacattccaggagacgtataaacagatggaacccacaccaagcaaccccagcaaatataaaatccagctcgatcatgtgcaatatccattgtgctccaatatccagcttcccaccagaaaaacttggtaacatataccagcattaatgcagtatttacaagcattgagtccgctacttttccattttcttcatactgctttatgcagtaggtcagtgcaagaacagcccatgacatcattccaaatctgcagtttgtgaagacttttatgtcaaaatgttttccaatgcgtggataaagttccatcccccagtaaaaatcaatgattaagtttccagatgagccagaatctgtagaagacggtgccaaatgacccttgatgtacaagaaaacacagaagagaaagctgccgaagatgagagctgaataaatttctcccaaatgatgataaacaatcgtagggttgaatatcccaaaccaccagagagcaaaataagtaatcaaggtgacaaaataggcttgcagaccatttgccttgtagacaggtcggtggccggttggagaaatagggccgtaaacggttttcccgggaagaagaagctgaagtgctgcctcaaatgcagcatagactgcaatgattttgcaggcggtgggagtgggggtgggccatatatgtagcaaaccctgcaacccattctgccttaaataatggaatgtctcggaaacagatccgtcagcaagagtcatggtgtaccatagaagtatgacaaacggaggacagagtgtaagcagagatatgacggaagcataagtgactagcggcgagtgaacggtggcccccatcgaatccccacaaccgtcttccctctctctctctctctctctctgcaaatgcaattaactcacagatcttcagactcagagacgaccataccatatatcagtctctgccccctcccccacgcttccccggcccg

SEQ ID NO: 1778 - DNA, 1212 bp, Glycine max
agagaactagttcgagtttttttttttttttttttcggctgcaaaaactgcattttcttgtacttatctctctttcaactgtaactgtacgcatagatgctacattttgatcaaacttcaaagcatgaatgaaaaaaacaaaaaatatttttacagacttctgtatatatttgcaatggatatttaatgagtacaaataaagattcaaacatgcgcggtaaaaattaacatgtcatcttcatgtgtcaatgcttgttaaaaagataacctgataaataccagtatatgtaaagctaaaatatagagcacgaacgccgacctgagtagcataagcctctgctggctttcagttcggccagcagaatgataaggaagcctctgatgaccttcgtaatctgacaaactatgtaacttatcagaggagcctttactgaaacgattcctagcagcagtgttcgcctctgaattgctactctccgttcgtcgccatagcccattcaatctttcgagctccatttctttcagatgaatttcaccaagtaagccctcagcttgtgcctgtttaactgctagttgctcaattagaccatgcaggtgtttatccaatgtcttctccctttgcccaggggaaggctgtttaagtgcattttcctgaacttgtgcccatttcttctccaactcatgtacagcattctccattgaactcatatctttcttcttcttttccaattcatctagtaaagctgattctgcctccaatccagctttagaatttgccttcttctcttcctcccaaccatcagatacccaacttggctgcttcatattctccacctcagctttcagtttcttctcagtttcatccatctccttcaacttttccctcagtaaatcagcctcctgcaatttctcctttattttattctcacaatctgatattgcattttcgaacgcagcattctcttccttcaacgtcacctctctaagttgggcctgcaccacaattgcatttaagtgtcccaagttccaattgtatgaattgaatccctcaagttttcttctatttacaattaggcccctccatcttgatttcatccaatatttaactgaaagttcactgttggcgcgtggtggagtgggagtttaattggagggcgagggcggcgttggaggccagggagtgggcgtgggggggggggcctacgtagctga

SEQ ID NO: 1779 - DNA, 1500 bp, Glycine max
  misc_feature (15)..(15): n is a, c, g, or t
aactagtgatccccngggctgcagtttttttttttttttttttgagcaaaggaatagagaacattttatttctgatgacagaccaaaattacttccaagagagcaataacaattggagggacaaaccagtacataataattaactttgcagcacaaaccacactagctaaggaattatcatgagaagatgaaataaacttaattagggggcacacacatagatagaatacgaaggaaggttattgtagatgatgcattgatcaagtcttggaatcgatggccatgatagtgctgagattcatggggtgcatgtactcagtggtgcctctgaggatctgttggactatgattcgactagctttctctgatggatggaatggatcccaaaacgcgtaaaggtctctgttcggacacaagtttgaggccggtgtgcagagtccaaccccattgtatggcccttgcccacaacaagctatcttcgatgtaacaaatccataagctcgagggttggaaacgaaatccatgtgcatgcgttgggcattagcagcaatgaaaacgtcagcaccaagttcttgatttaatccgtttaacatttgaacgagttggggattgaataaggatgcagctctctgaagttccacgtcgcaatcaccagttctgcttctcgtcgctaattccgcaggaacacaccccattggtcctgtacccgttacaagaaccctacgtgcacccaaatcataaagcctccttagaactttgcggtactcagatatgagatagcgcacatagtcagggagagaaaattggcgagatcttgccgaatagggcaccaagtagtaattgttgacaaaatcattgcctccaagagtgatgaggacgagtgctctgtttactaggttcctggttccctccgcaccaatgtgtaaacttaacctttcctgatactcgtggaatagcttcagttgcttctgaatgtggataatgttcaaaaattgaattccagtatcattgagaatgccaattccagcggaggcaaaattggcaccaattaagagcttctctccaactagtagcgggctcaaatagggtagtgtaggctctaagccaagctccaaactaattaagtcagggatgtttaggccattagagaagcgtccagtgggtctgtgtgttgggtagtcaatgccatagggtggagcgtctgctctggctgtggttaccaagaaatcattgttaccactgtccacgagtgaatcaccaaatacgaagaaagcccttgttggttgagcagaaacagaacctagtgctacaaccaagcttattactaaacaatagccaaacaccaaaacactagtcatggctgcaaaacaggagtgaccactactgttgattgtgtatgaatatgattctcttaggtttgataactcgtggcttccgggggggggggggccgacctgaatttctagacatatgtgggggggggggggcctacgtagctga

SEQ ID NO: 1780 - DNA, 1082 bp, Glycine max
caatttgctgacgcaaagaaaaaaggaattggattgattcagctacgtaggcccccccccccggatgaatcattttgatccgaagccagccaaccttcccaagatcccctgtttgtatggcaaaaaggttctcttcttcaaatcctctgtttccgctttctttctggcgtagtgcaattcatgcgcggagaggggttcctttctcctagtctttgggcctgggttggaagcttttgggtcttcgggcttcttgtagaaagtggggaactttctcaaggggtccttgctggaacctcttccttcggaggcgctgcggaacagcaaaaagtcagtgagcctccatctcctggaagtcttagaaagcgagtcggctttgttgctctgcgattggttgcgttcctcgtcccacgtgtagtgagatattctgttacaaggagagagagaacgcgtgaccctactagaactcgcagtcctatctctccctcgtgtctcttgttcttcttcacttaaatctccctcttctttcttctttctcgtcgagaaggcttcgcgaatggccttcttgccttgggctatggaagatcgtttggcagggagaagtgggcttttagcagactccgaggaatcatcctcgctcagcggcttgattttgccgccgtcgaaaagctctgccgcggatcgagggctcttggattccccagtaacgaaaaaggcgaaggcatcatcatcgtgagccgcaagatcaaaatctttagaagggcttgagggggcgcttaggtaataaaattggccaaaacgcttgggagaagaaggagcgctgagatagggggaaatccttgcacgattgaaatcgaaggggtcgttcgaagagggactgtggctgctgaggacttccatgttgacctaattggcttagcaatagcaatagatgtgttatgtgtgattatatagggaaggaaggagtgagaaaagggattagattgttttgttgaccactcacagggccacgccgccttttaataccgctcggttacttcttatcaatacaattattttattctcataaaaaaaaaaaaaaaaaa

SEQ ID NO: 1781 - DNA, 1428 bp, Glycine max
  misc_feature (124)..(124): n is a, c, g, or t
gatggcaaggatagagatccagaggtataagatgttgacacagggctattatcatcacacatgtactcagagctcatggccgaagatggtgaagtcgattgactggttataataggcttaactnaaatcctagttgtcataccattccttcttgattgaaaagcaggaacaaggtcttcactcttcctagagattggactctcccatggcttggcctccatccagcgttccaacaagctatatcctaagctcttgttgcttgggttgttatgcttgacaggagtcatggccttagtggcttttgggtttggactagcacacagtcttgactgtgtggagagagagtatgccattgctctatccctcttgatggctccttcttgcctcatttgtagctttgctttaacttcatccacagttccaggaatatcacaccatccttgctcaatttgattaaaaggatcagcttggttgcgatgctcatcaagtaatttctgcacagctttcccttctggagaattctcacattccttgccctcacacgtgcttgaactcgaacaagagcctgcatgcacctcagagtaacagctgcttgcttcctgactagccggcctctaaaaatagcttgtagccttactactgccctcaaggccctcaaagctcgtctagccaagaaggctcgaaacaccgcctgaatgcggatggcagcccattcctgcttgatgagcttgaaatctttgggaaccatcacagccaccgcataagtaagggaagaatcagatgcagcagcagcaccaccaccaccaacattcttcatggacccttctgaagatgccctccatagcttccgcttcttcttactcttgttgtcaccacccttctcttgatcagttgaggtctttctaaaaggaagaagtgacttaaaccaccttcccgaagcacccattggagaaaagaaaccgttttgctgagcaaacggagcgagtaagaggagaggtagcttctgctgtgaagcactgtgaaagagagaaagtgttttttttcggcgttttagtttagtgtaagagagagcatggagccccgttctgcctttctcgcgcctccgtaaggcaaggttgagagagaagcaagttttgaaatttgaatttgtgttggtggaagaaaaagaccatcaaagtcaaatcataacggtaacctgatactcaaaaatcaaaatcaaaaactctcacctttttctttgtttatttcccacgcacgctccaatttgaccctatcactagctaaaccaccgttaatgaattaatacctcctttctcaaccctaacacctctctccttcggaaaccatccaacctgccatggtagctctcacaacggctcctccttgtcccgcgccaccggacgcgtgggtcgacccgggaatccggac

SEQ ID NO: 1782 - DNA, 2201 bp, Glycine max
cgtccactcctacctatatataccggctgcgcgtaaacggtttccggggatcgtgtcagaaatataaaagtttatttcctctgatcgtgtggtttctgagttctaagcactcacctctttcatacacgtttgttcgcttgttgagaagccatgggcgaggatttcgagttcccaagtgctggcaacatggaaatgcctgaggaggaagagtttgagagtccgatcctgaaggttggggaggagaaggagattgggaaaatggggctgaagaagaaattgctcaaggaaggtgaaggttgggacacccctgacagtggagaccaagttgaagtgcattatactggaaccttgcttgatggaaccaaatttgattctagccgcgataggggcacccccttcaagttcaagctaggccaagggcaagtgataaagggatgggatgaaggtatcaaaaccatgaagaaaggtgagaatgcccttttcacaatacccccggaattggcttatggagagtctgggtctcctcccactattcccccaaatgcaactctgcagtttgatgtggagttgctgtcttggacaagtgtgaaggacatatgcaaggatgggggaattttgaagaacattattactgaaggggagaaatgggacaatcctaaggacctggatgaagtgtttgttaagtttgaagctaggcttgaagacgggacagtcatttcaaaatctgatggggtggagttcactgtggaagaggggtatttctgtcctgctttggccaaggctgtgaaaacaatgaagaagggagagaaagttctcttgaatgtgaagccacaatatgcatttggtgagagtggaagaccagcctcaggagatgaaggtgccgtacctccaaatgcttatcttcaattggatcttgagttggtctcgtggaagaccgtgtctgacattaccaaggatagaaaggttctcaagaagactttgaaggaaggggagggatatgaacgaccaaatgatggagctgtagttcaagtgaaactgattggcaagttgcaagatggaactgttttcgttaagaagggctacgttgatgaacagccatttgagttcaaaattgatgaagagcaagtaattgatggacttgaccaagctgtgaagaacatgaagaaaggggaaattgcattgctgatcatacagcctgaatatgcttttggtccatctgggtcctctcaggaattggctaatgttcctcctaattccactgtgtactacgaagttgagctgctttcctttgtaaaggaaaaggaatcgtgggatctgaatacacaagagaagattgaggcagctgggaagaaaaaggaagaagggaatgccttttttaaggttggcaaatatgaaagggcttcaaagagatatgaaaaggccataaagtttgtcgagtatgattcctcctttagtgatgaggagaaacagcaaactaaggcattgaaaatcacatgcaatctcaacaatgcagcctgtaagttgaagctaaaggactacaaacaggcagagaagatgtgcacaaaggttttagagcttgatagtagaaatgtaaaagcactctatcggagggcacaggcatatcttcatcttgtggacttagatctagctgagatggatattaagaaagcccttgagattgagccaaacaacagggatgtgaagatggagtacaaaattttgaagcagaaggtgagagaacacaacaagaaggacgcacagttttacggcagcatatttgcaaaaatgaataaactagaacaagcaagaacagcaacagcaaagcaggagccggtgccaatgactattgacagcaaagcttaaatttaaatttgagagatatctctgtctgtggtcgtctctgcatagtacgatattccaattgttgtgtcgtaagtcttggtaacataaatagctttgctctgtatgtggtcgtctctgcatactagtaccctaatagtacgatattccagttttaagtcttggtaacataaatagctttgttcgtatcttgtgtgattttcatatgaagaatgcatatggtcttggttttcagttgttcaagctatgtatactgatggctaataagaactgaagtaaagcaagttttggcaattttaaaaaaaaaaaaaaaaaaaacaaaaaaaaaaaaaaaaaactct

SEQ ID NO: 1783 - DNA, 1196 bp, Glycine max
tcagctacgtaggccccccccccacttcttcgctggaaacccctttctctctcttaaatcttctcattcttcttcttcttctccctcccgccacctcacttaccctcttcctaaaccctagcctcgccggaccaccaacaccaccgcgtcaatctgacccaaatctccgcgtccttatccaccaacaactccggtgcaccacctagccagcgccgacaacatctgcggcgtaccaccactacgtcgtcaagatcagcacaaccacacctagcaccgaatccagccaacaacctgcggccccgaactttccgcaaacccaaggcccaccacctccgaccaaacaccgcgcgccctcgtcaccatcaaaactccaccaccatagcccacctcaacccaaacacctaagcgcccacatcaaaaccctcgtgctacccttcaccctcacctcgtttggcatcagaatagcaccgcacgtgccggggtcgagccggacgagggcggcaaagcctccggcgtcgccatgattggagatttctggtttgggggttagggatttcaaatttgggggtggggttctgactttgagtaaaaaatgacacatttacaggttttagagcttgatagtagaaatgtaaaagcactctatcggagggcacaggcatatcttcatcttgtggacttagatctagctgagatggatattaagaaagcccttgagattgagccaaacaacagggatgtcaagatggagtacaaaattttgaagcagaaggtgagagaacacaacaagaaggacgcacagttttacggcagcatatttgcaaaaatgaataaactagaacaagcaagaacagcaacagcgaagcaggagccggtgccaatgactattgacagcaaagcttaaatttaaatttgagagatatctctgtctgtggtcgtctctgcatagtacgatattccaattgttgtgtcgtaagtcttggtaacataaatagctttgctctctgtctgtggtcgtctctacatactagtaccttaatagtacgatattccaattttaagtcttggtaacataaatagctttgctcgtatcttgtgtgattttcatatgaagaatgcatatggtcaagctatgtatactgatggctaataagaaatgaagtaaagcaagttttggcaaaaaaaaaaaaaaaaaa

SEQ ID NO: 1784 - DNA, 1345 bp, Glycine max
  misc_feature (5)..(5): n is a, c, g, or t
  misc_feature (9)..(9): n is a, c, g, or t
  misc_feature (12)..(13): n is a, c, g, or t
  misc_feature (16)..(16): n is a, c, g, or t
  misc_feature (29)..(29): n is a, c, g, or t
  misc_feature (34)..(34): n is a, c, g, or t
  misc_feature (38)..(38): n is a, c, g, or t
  misc_feature (42)..(42): n is a, c, g, or t
  misc_feature (48)..(48): n is a, c, g, or t
  misc_feature (50)..(50): n is a, c, g, or t
  misc_feature (53)..(53): n is a, c, g, or t
  misc_feature (56)..(56): n is a, c, g, or t
ggtanatgngtnngtngccccccattgtngtgtnttcntttnggttgntntcnttngtatcaccataaaaacttgtactgaaccaataaaaaataatctcaccagacatctgcatacaataacatgttttaacagtagcaaattcttattcctagcacaagcacgatatcataaactataaattgccgataaattggcatcattgtcatgactctagaaagttaaaaataataaagccaaacacatacactaccaagactcaacaatctgtcctcggcaaagaaatcatagaaaaacatccatataactggtaacgcataaatttcccatcatcagtacctcctggggtagcggtccataaaccgacccgaagggcactcatatgccaggtgaccacgacctccacaattgtggcaaatcatcaaggggcccatgcaatccctactcatgtgacctaattgctggcagttcctgcaaacaacatctctatagccaccaccgccaccaccacgagcaccaccgccaccaccgctgcgatctccaagaacattggctttcggacactgtctagccacatgcccagaaacattgcacaaattacaaattggatcattaggacaatcacgtgccaagtggcctgtcttcctacagttgttgcatgccttctcattcgtacattcagctgcaatgtgcccctgcttataacagttgttgcacaaccttaagtcccctggaggcattggaggggctgagcattccctagcacggtgtccagctttaccacaggtgtggcaaataccctcatttggacaactgctggccatgtggccaggttctttacagttccagcacagtgactttgtcgtacattcagaagcaatatgcccagggaggccacagttgtggcaaattgcgacattagggcattctcttgcataatgaccaggtctcttgcagttcttgcacagattgtcacggctgaaaccccgacgtgaatctctcctgtaaggtgcatcacgataggaaaatcgatcagagcggatcttacggtccattgggctcctgcttctgctcctgctgcggctgtctgaactcattttcaacttttttttctttcctaccctctaccacaaatgatcagcaaaaccacctccaccacaaccaacaccaccagccactgcctccttcctgagcgctacggtagaaacgctcaacggaatcggcggtttggcgaaaatatgtatgataggtagcagatgcaacgcgctattagcagcagcgcagccgcaaagttgttttttttttttttccgggggggccggggcctccgacgcggatgactcga

SEQ ID NO: 1785 - DNA, 1487 bp, Glycine max
tcgagtcagctacgtaggccccccccccctcaccaaatcacgctctctaattacatttctaatctcattctccttctgttcaaacactctctctcatggcatcagataagaagattaggatcggcatcaacgggtttggaaggattggccgtttggtggccagggttgcccttcaaaggaatgatgttgaacttgttgctgtcaacgatcctttcatcaccactgattacatgacatacatgttcaagtacgacaccgttcatggccagtggaagcattttgatgtgaaggtgaaggactctaagacccttctctttggtgagaagcccgtcaccgtttttggaatcaggaaccctgaggaaattccatggggtgaggttggtgctgattatgttgttgagtcaactggtgtattcactgacaaggacaaggctgctgctcacttgaagggtggtgccaagaaggttgtcatctctgccccaagcaaagatgcacccatgtttgttgttggtgttaacgagaaggagtacaagccagagcttgacattgtttccaatgctagctgcactaccaattgtcttgctcccctcgccaaggttatcaacgaccgatttggaattgtggagggtcttatgaccactgttcatgccatcacagctactcagaagactgttgatggtccatcaaacaaggactggaggggtggaagagctgcttccttcaatataattcccagcagcactggagctgctaaggctgtaggaaaagttcttccagcactgaatggtaaattgactggcatgtccttccgagtccccactgtagatgtttcagttgttgacctcactgtcaggctagagaagccagcaacctatgagcaaatcaaatctgctatcaaggaggaatcagagggcaaattgaagggtattttgggttacaccgaagatgatgttgtgtctactgattttgttggtgataacaggtctagcatatttgacgccaaggccggaatttctttgaatgacaactttgtaaaacttgtttcctggtatgacaacgaatggggttacagttcccgtgtgattgatttgattgtccacattgcatccgtggcttaaagaattgagtctgagcttggatatcatcgctacaccgttccaaatttttatcttaatcgagtttattttagtgtgaattcggaataaacactttgtgttgctgtgagagatatcattgaaaaacagtgcaatatgttgagttggtagacggccttataggtttttcctctcgtaagggacgattgactattctgtttcgttatcataatcatctagtataagcaacattttgttttccacgtctctttgttataattaagttaataatataatattgttaacatattttgatatttattatcttttataatcaaaatagttcttgtggctattttatttagaataaatataagacttttttggaaaaaa

SEQ ID NO: 1786 - DNA, 1456 bp, Glycine max
attcccggaccccttccctcaccaaatcacgctctaattacactttctatctcattttcgttcggttcaaacactctcatggcatcagacaagaagattaggatcggcatcaacggatttggaaggattggccgtttggtggccagggttgctcttcagaggaatgacgttgaacttgttgctgtcaacgatcctttcatcaccactgattacatgacatacatgttcaagtacgacaccgttcatgggcagtggaagcattttgatgtgaagctgaaggactctaagacccttctcttcggtgagaagcccgtcaccgtttttggattcaggaaccctgaggaaattccatggggtgaggttggtgctgattatgttgttgagtcaactggcgtattcactgacaaggacaaggctgctgctcacttgaagggtggtgccaagaaggttgtcatctctgccccaagcaaagatgcacccatgtttgttgttggtgttaacgagaaggagtacaagccagagcttgacattgtttctaatgctagctgcactaccaattgccttgctcccctcgccaaggttatcaacgaccgatttggaattgtggagggtcttatgaccactgttcacgccatcacagctactcagaagactgttgatggtccttcaaacaaggactggagaggtggaagagctgcttcgttcaatataattcctagcagcactggagctgctaaggctgtaggaaaagttcttccagcgctgaatggtaaattgactggaatgtccttccgagtccccactgttgatgtttcagttgttgacctaactgtcaggctagagaagccagcaacctatgagcaaatcaaagctgctatcaaggaggaatcagagggcaaactgaagggtattttgggatacaccgaagatgatgttgtgtctactgattttgttggtgataacaggtctagcatatttgacgccaaggccggaatttctttgaatgaaaactttgtaaaacttgtttcctggtatgacaacgaatggggttacagttcccgtgtgattgatttaattgcccacattgcatccgtggcttaaacagttgaggcggatcttggatatcatcgctaaaccgttccaaatttgtatcttaatcgagtttattttagtgtgaattcggaataaacacatgtgttgctgtgtgtgatatcattgaaaaacacagtgcaatatttgtatttatatttttgagtttgatagacggccttaggtttttcctcctcttgtaagggacggttgactattctgtttcgtcatcacaatcataatataagcaacattttgttttccataaaaaaaaaaaaaaaaaaaaaagccaggcctgttctctcaaagtaatggccaataactagtatatacatgttagctaaaactgtacagtccccacaatata

SEQ ID NO: 1787 - DNA, 853 bp, Glycine max
ttttttttttctggtgttaaaatgttgttgcttcgtttttgctcatgaaaagtcatccattacatgcatcatgggagtcaacaagagtagtttgatgggacaatattgaacactgcatcctcttatctaaccaaaattgttagatggataatatatataacaaaaataagtgtgcttttgtccttacaatgaaaattttttcacctttttgactccctccaagttctacatttacatgcaattaaaataacaaattatgacaggataatacctttatgttctcttggaaaatatttattaacagccttccaatgccaaaaacttctaaaggtgctgataactaaccagacctcaggcgattattttgttggcaccagacgaatttgcatctttcgtcacagtatctgcgagcgtggcacgtggaggaggcggggcttcgccatagattgctttgagcctagccagaggaaccactgcagaatcagcggaggcttcagcataaagctgctgtttccagtcccacaatgtctttctaatggacttgttggatttggtaagagactccttctcatcctgtagagcttcaatggtcttttgctgattcatagatcttacgccgagtgttgcaaacgacgcaagcagacaaacattgatcactgcgttgctgtttacagctctggtagctatgtccactattcgattaacaaactccatttctttccccccaattcaaatcaaacccggaaattggcggcggaaccagcgagcggcagagaacgagtgtgttggagacggagacttctactttatcatattttttcgtccccccttctgtcgtcttctcgcagccgta

SEQ ID NO: 1788 - DNA, 1636 bp, Glycine max
agttttttttttttttttttaaagtagaaaagtcaatatcggattattaactatccaataatggaagtgtacctagacttttcaacaattctttcaaagactgcatttcagatgctcttctgttagtgcacaacagccagaaaataaatgggataaagtgatagacagaaatgcttaggagaaactgttctatttcttaaaagtaagttggatcaaggaaagggaagttcacatctacattttgaaagaaccactgcttcccatacaagacacttgaatcatggttacagcttactgagttttgtggtttccattgccacttctattaatttctgtaactaccaacatgctttgagtacgatcagaagaatgggtttctatccatgtttaaataagtataaacatctgagtcggttttcaaggacaaataaatgaataatcattttatctgcactgctccattgctcaaacccgtgttctagataagcacttatgaagatggtcactacgttaatatgattgagctccgtgaaaaccttggcatcaagtttaggaaccacagatctggagtgcttgctgcatgaagattgctatgatactgcccattgatatgttgatgacattgactgcatcattgttaagccatttaaatccttccttctcttgaagtgcagcaccaattatgctctcgccaagattagcaatctgagcagctagtacacatataattgcttcatgtgaaccaacctcacccatgagaaaactgacaagtgcaagaactatggatgctaaaattcctgccaatgttccttcaacactaacagccccttctgtgcctcttgggactatcttgaaagttgtaactaggtacgttgtttttccatatgccttcccgatctcacttgagacagtgtcactcaacttggtacagaaactggcaacaaacccaagtctccatagccgagaaaatgcctctcccccaacaccaaaaattgtgaggaaagcacaaatgcaaccagcagcactggatccaataacactgcccggaccccttcttcctctttttttctcagcaaccccctgagccactttctgtgccattttgacctttgtagcagcagtaccaataacaaagtacgtggcaacaaggaagaacccagaaggcccaaaagcgcgccaagtgagcgttccgagcagaaacgcagcaccgatcccggaaagagacaacccgctgaccaaaatcggagaccccaagaaaaagatcagcgcgttgctgagaagcgcggactgccacgtagcgggggacgattggacgagggccagtgcccctccaacggcatcttggatgcgcgaggcgtgcatggtgcgagggaagagagggcgagggttgaaagaagtgggttttggagagagagaggaaaggggaaatgggtggaaagaagagggagaagaaagggaagggagtgagaaagtgtgaagagttgaaaaagccataaatttgaaggcggaggggtggcgtgaatgcgaaggggaagggagactggaaagtgggagagggttactccatgatgttgcggattccatgggatgggtaagtgttgctcagtgtcaccttcactgcaacacctaaaatcac

SEQ ID NO: 1789 - DNA, 933 bp, Glycine max
ttttttttttttttttttagcatccatcccacaagtatgggctcagtaatgcattcatccgagaatttatgacaaaagaatggaaaagtagctctaaataatgcccgatgaactaactattttcaagcttgaaacatccaatcacagtagaataaaaatctatggcagatatgcaaaacagtatctaaatatccttcggtgttcacagctatattaaaatcatgaaccatctacaaccttaggagtaatgatccatgtattaactaaagatataatataatcctcagcttttgatgctatgattgctatctattttgtttgactgcaggcaaacgataattctagcaaccttgtgcaagtagtttcagacatctcagctcacagcttggaaggctttgggaagatatctggagtaaatttctgagcagcactcaagcttcccttaatcttcatcgcacctctcatgaaagcaatctgtggattcatcttccccaaggcaaccttaacaaagtcctcgtccttaaatgaaaaagatgcatcaggctttcctccttcatatggccctttagtgacctctcctttcctgagatcaacggtgtagacgacctcgtcgattccaagtttcttaggagcaatttgaatctgataaacgagtccaatttttttggtgacttgtttgcctgagtcggtggcgaggtgctgcttcatctgctccattatcgcgtcggatttcaagttcgaagaagaatcagccatggcttccgctgcgcgtcacaccaaacaaaacctagcagtttttgattggtttattggtttgttattcgtatttattgagttcgtgtgaaggttgggaacccatctgatttgaactatctgtttttataatcctctctttatttctctgtttcgttacgttacgttacgttacggtct

SEQ ID NO: 1790 - DNA, 1085 bp, Glycine max
catgtatattgacaatgcatttagtcagaaaacacgattcctaacatccatcccacaattattggctcggtgagaatttatgacaaaagaagggaaaagtttctctaaataatgcacgatgaactaactattttcaaacttgaaacatccaatcacagtagaataaaaacctatgacagatttgcagaagagtatctaaaaatatccttcagtgttcagagatatattaaaatcatgaaccaccaacaaccttaggaatgatgatccatgcattaactaaagatataattataatcctcagcttttgatgctactatgattgctatctattttgtttgactgcagccaaacgataattctagcaaccttgtgcaggtagttgcagaaatctcagctcacagcttagaaggctttgggaagatatccggagtaaatttctgagcagcactcaaacttcccttaatcttcatcgcacccctcatgaaagcaatctgcggattcatcttccctaaggcaaccttaacaaagtcctcatccttaaacgaaaaagatgcatcaggctttcctccttcatatgaccctttggtgacctctcctttcttgagatcaacggtgtagacgacctcgtcgaatccaagtttcttaggagcaatgtgaaactgataaacgagtccaattttattggtgacttgtttgccagcgtcggtggcgaggtgttgcttcatctgctccattatcgcgtcggatttcaggttggaagaagaatcagccatggcttcacaccaaacaaaggaaacctaacagtttgggtttggtttgatctgttattgagttggtgtgacaggaaccatcttctgatttgaactatcgagtaacttctctttttataatccctctgtttcgtcacgttacagttttgtgcattgaaaaccgttcgattagaagagtgatgtatttaatgcttgtgagaataggataagattgggttcaggcccatctgccgcacgcgtctcaatgtggatcagatcagacccatactctgttttaaaacagactagtatgtgttttatatggcttctcctttc

SEQ ID NO: 1791 - DNA, 872 bp, Glycine max
  misc_feature (9)..(9): n is a, c, g, or t
cggtccggnaaaccaccagaaactctcactagcttagtttctatatatgcgttatttgtctctgagtactttttctctcttgtgcattacctttgtggtcatggcagcctccgtggatcccctagtggttggtcgcgtgatcggcgatgtggtagacatgttcattccttcagtcaacatgtccgtttactttgggtcgaagcacgtcacaaatggctgtgacatcaagccatccattgccatcagccctcctaagctcaccctcaccggcaacatggataacctctacacactggttatgactgatcctgacgcacctagccccagtgaaccaagcatgcgcgagtggatacattggatcttagttgacatacctggaggaacaaacccatttcgcggaaaagagattgtttcatatgtgggaccaagaccacctattggaatacatcgctatatctttgtgttgtttcaacagaaaggacctttaggtcttgtggagcaaccaccaactcgagcaagcttcaacactcgttattttgccaggcaattggacttgggacttccagtggccactgtctacttcaactctcaaaaagaacctgctgttaagaggcgctgaatctagctatattgtaaccatcagtgtctctcttgagatatgcatggttggaatatacttttaagatatcagaactatataaaatctatgactagtgcgtaaataatgcagggagagggtgtgtgtaaagtaatatagttgtccaagacatgagtggtgccgaccatttccccggctttgataactttttttctctatatatatacctctctttcactctatcaaatatataaagttaatctttattaataaa

SEQ ID NO: 1792 - DNA, 1569 bp, Glycine max
gggatggtatactatatgccatggttgttgaaaaatttctgcttgatacaatttgttgtcttaggtctatcattaatgagttcctttgccctgataggttaggattcacgcatgacattttcgtctaagtgcttaaaagactcagcttgatccttgctgctcaaaattgcatcttgaacttgaacaggaaaatcatgtgcagaaggatcattggtacaaggctgtattaaaaaggctaaaggggttccaaaaaatttattggacaacaaaatctacactttgggaaaactaacactgtacaatgtggctccaactcaatttttggggcttcattaacagatatcggctttgaaacttaatgcttttcaagcattcgaagtgctcaaggcaatactgccataatgagatataacatgatatggttatcaccattgcttttttccctttttctttcgcttgctactactaccactggcagtggcagtggcacccgcaccaccactactactgccaggacttttcattccatttccagatttgggagatgggctctctgttgcagtaccactaaaattgtcaaatgcaccagtctgtactgcattctgtaaccactcaaagaattcttcctcagtcatggtttcttcgatgttaggtgttggcatacgcccacctctttgacctgaactagttcctttgccagaattatgcttggacattaaatttgtgttcacatgaaaacttggcttatgagtattcgctggacatctcatgccctgacagatataccattcggtggcatcatatatcctgctaccagcacacacatatgctgaaggagcatcaaccttctgcaataagccaaaaagaaatggttgggaagattgttcaacccatccatcaccatccttagcttgatgaaaatcttggcaatcctggcaccatcttgcccgagacttttgtttcttggtgtgtatccagacatgaaagccaccacaccttttgcaggcaattcgccttgaatcaccaaatgggtcctcaccatctgcatcagaccgtgcaaatcctgaaggaaagaatccatgcctaccattcttacgagaagcatcattaaatctacgaaatacactcaaaatctcctctctccttagctcatcatcataagcttttcgctttaacgaatccattagaatctcatatgcattttgaagtttcttaaaggcttctgcagccttttcattacccatatttttatcaggatgtaccaacactgcctttttcctgtattcccgctttagtattgaaacatcaatattttgataccgcatgaatcccagtgctgcataatgatcagagcagttcaacaaacggacaacttcatcttcagaagttacatcagaatcaaccccactagttgaagggatgccagcattgcgatctgcagatggtccctgtccattttcagaggaagaagcatgtgtcggttcatcactaaatcctggttcatgcattccagctctatgctcaaaaggattggatctactctgttggggggggggcctacgtagctga

SEQ ID NO: 1793 - DNA, 1930 bp, Glycine max
tcctctagagcggccgccttcttttttctgtgccccctttttgatatgctatctctatcccgatgagccgaaaccaaagcttttattttctgttgagtaatcgttcgagtaagtcttgaatgagctcctcgaaaacttgatgtaaataaacgaatttttgtccttcgtttccgagctatatatcctcgtttaattctggtcattgaataattgagactttgatgaataactatttgatttttcagttattcttttcttcttactagtctattaataacaaaaatggattcttccaatgtataaaaaaaaaattccaatggctcttgctactataacccccccctccccgcttctcgctatcgatcttttttttctaaatattcaacctcaaaataataaattgtattgatactagatatcaaaaaacatagtaagtaatagtaaataaattaggacatatataaaaaatgggtgggttccatcgtttctatgattttttttagaaacgggcaggtcctttctatacaccggagcctttctttcttttcatttttattaatttaattaatgttattgttaacttgtacagttcacactctttggctctacccatccaatatttagtttagtaagtagattttttcacaatgaaatctagttatacagtaacggtatttaattatgaaaatttgctgggtagctgaccttcttattccgttcgtccaaaatccatcaaaattcattcattaaggacatactttatctttaattgaaatagtattttctccgcttaacgggtaactttatatttgttttgttaccgatgggaaagtccttctcatcttaaattgtaaattaagactattgggtttgcaccaatcgaaaccataaatttgatacaagatagaagaatgtaaagaatgtatatatataagttaagatagtctgaatgggaaaactacattcacactatcttaaccgatcaacaatactgaaaaaatgaaattggttttttcttcttagtatatgatctgaacgagtcgcacatacaccctggtacacgttcctcggcgctgagggcatccccgaagagctggggattttgtgacgtttcggattggctgtcttgtgtttctaataagttgtttcatagttggcatagtaagttgtaatatatatataatgagctggtttagatctatcctaaccgtgaattacttagattctatattacttatattctattaatagattaactaatagatattaatagattaactaatagagatattatattaaaatgaaagtaagaagattcaaaaatgaaatttcaaatcctgtatttttttagaataatccttgccacttattttttattcaacggctacaagatctacaattccgtaagcttgggcttctgctgctgacataaaaacatccctttccatgtcttcggatataacccataaaggtttgcccgttctttgtacataaacccttgtgatagtttcacgcattttcagtagctcttccgcttccaggataaattctcccgtttgtgcctcataaaaagaactagcgggttggtggatcattaccctgattttataacttaataagtatttcccttatcttgataaagattttgataatgatttctcctatattggtaaagattatccttattcccaaataaaggtaaaagggataaatacaaataagaaaataaaaaaatgggcaaaaaaaataatattaaataaccgtacaagcattttctgcgtattgatgcatacggcttttccatccctgcaattcccggcccgactcttccgtggatagagtattttctttgatgaatttttttctacgtttacgaatttatttttttttcatcaaagaaaaacgaagtacaaaatctaccgggtctttt

SEQ ID NO: 1794 - DNA, 731 bp, Glycine max
ttttttttttttttttttaattatgactaattgaccatttatataattaaacctaattttaactgcatgtctaatagagggaatagggcaaattgtccatcatctttttgttcacagtgctggtacattacttatcaaatgaattgaaagacaacggaaaaaatggcatcaccaaaactcaacctcaaaatcaatatgcattcttaatcttggggttcattgttcttgattatcaaccctgtcagtaatgttccctccaggagtttctacattactttccttaaaaccaagttcaccgaggtcttgctttgccatcaagttcttctccatgcgacactgcaggtatttttttgagaattgcctgcatttttcagactggtgcccagcagtctttagacaattgagatattctattttctcgaggtcacacaaatgcatgtggtccaatggaaatatccccttttcgggaggcactggacggagccccctattgccaccaaatgcaccacctgcggcactcatttctagggtttcatgcggttgcagaatctcagaaagcagttactttcaatttcagctggactgaaataattacgctgcaagttcgatcatttcacctgccgctaagttctgtagctgctgccggagcaggtggggttctcgcccgcccaggatgaacacgggaaggagagagagagagagagagaaatgaataaaaagtgtaaatgcga

SEQ ID NO: 1795 - DNA, 1571 bp, Glycine max
gtgcaagtgtgttcactgcagatatgccatagaaaaaatattagtaatagtgtaatccatcaccagagtactttctttttaaaagattactgatccaaaaataaattaaaagacttgaaaagtatcaccgagctatatcaattatcctgttttctcttctatattgtacttctgcaggagtttttgcttgtgcctaacagtcagcacttgatgctttagtattcaatacacgcactgtattgtgcgaaattctatgatatcctccggaaatttaagggttttcttctacattgagacactcttccatggtgtgctcaaactcatttaacccttggttcaaaaaacagttgtaccaaaacccttggatttctaaagatatcctagcaaccctccttataatattaagtagtctgtcgcccgcccgtctggttctttttggtttccatgggttgttagtcttaggcattaaacaaataatctgtatcaagcatctttgcagataacaagtcaatcaacaagttttaatcggaggaaaataaaatatagacaaaattcttgttgcagggattacatttaagtaaatgaaaaaagttacacaggattggcatgaaccaactttcagaacacgagaggaaggacaggaaacctaacctggagggtccagcactaattaatcctcaataatgtctacataacctatttctttttgtggaaacaatgacctaaattgttgcatacgactaacatatgaagtttcccaagaacgagattcagcattacaatatcttgaccactgcaaagcggtgggaggtaacactgagtcagccttcaaaacaacctgtacaaagtgacatttatgcacaaacccaatggaaataagacggtaacttgactgagatagtggtggtcgtcctctaagagggaaaaaagtcatgcactcttgtaaggataaagtgaccaggaccacgttatatcttgaggcaattacatagcccatatctggtatggtcatccaactagcaacagatgcctgcttgccaacatacaaagattgcctcaattcagccactcggtcattgctaccaaagagtttggcataattatcttgccactgttgaagctctctaattaaatcctgacggactagagcccacgattcctcacccataccaagttgagctgcaacagcacgataaccacaatttgaatctcctttcacatcaataatgtcttcaataaatggatggatctcaaccggaaattggtccatcattggcagaactctcctgcgtttagactcatggactggtttctgagatgaagggagagattttgtgatatcatgggtagggtgcaatgcatgaacatgctcccaatacgaaggatcaaatttagttgatccatcacttttcaaccgtggaccctctagagcatgctttgtccctacctcttcaagaggtggacacttggaaattttaacaggaaatgctatttcatgcaatttagccattagtataattttcccagcataatcaagttcctgaaatcggggggggggcctacgtagctga

SEQ ID NO: 1796 - DNA, 2232 bp, Glycine max
cagagccaactattgttctattctcataaaatttgaacatatcgcaacagaacctaagcaaatcctcccagccactaacaccacaattcatcataacttaaatatacacatgagctgaatttcctcgacccgaataaagaatcccgtaagaccagacatgaatatgataacaaattttttacgtcattccagattccaagccaaaccatgacttcacatcctgggtctcgatccatttttccatctgatcccactcgcagttttcaaccattaaagtaaagaaacgagtaaagtcaaacatttcagaaaaccacatataactcaaccaacaaaataacacacaggatgcatacagaaaaaataatgagtgggaaatttcaaaactggaaaactaaaccaacaacccagttttcatgtaaaaataatgcatcatgtaacattctcctagtgaattactccctgatgctgcatgcatcaaatttcaacagtgccaactcagaacaagaaaacatgtcctactaggataatttatagaataagattgcaaggcattgttttctccatgtaacaagaaaacgcttttcacgtttcaaggtttcaagccaatatacatcagggagaaagtctaaacaaaagtttaggaatatggatattgatccatatttaaattacatattaggattgtgcaatttgatgaaacagacctgataatgacatactcaatttttttgctcccgattagagctcttggatgttatactctgccatttgctcagtatcagcaatggtgtgacatatacagtagcacactcgttaattcctaatgttgaatttgtgggttcaaatcctggctgcataattaaattgcaacaattcgttttttctatttttgacaaatctacatcagcaaccatgtaccccgttttgtacttcactatgatctgataacttgttgcacattgcaggaaaaatagtggcgtttttttcccgatttagcattgtccgaaagtgtcttcttcattatctctggatagactgatagtacataacacaaaccaaaactaatttcactgcaatcaaaatttcattgggaatactcagaccaaaaatttaattttgttttagcctcttcattctctcaagagcaccaagccgtattccattatccttatcttttgcagcatctacttctccattattttcattctcatctctctttctaatcaaaccaccaaacacagcagaaggaacatctttttgtgcaatttcaatcttatcatcatcatcatcagaatcactttcttctggtaactcaatatcctcatgatttgcactagtttttacccctctatcaagctgagattccactccagcactcacaaacccaaccttcctatcttttgtcactgtattgtcaactgctggggctaattgtctttctaaagcagccatttcgtcctcagggattccagcctgtttcagtttgtctttggcctcatcaagattcacagtttgatccttctgcatcagatactcaggcagtataaaatgtgtctggctgtagcttgcagagacacttcgcttaatacgaagcatttctctgaaagtatcttcgttcccatgctgaacctcaaactcgtgccacttattccaaaattctggatcagatcgtggatctgcaaactgagaggcaaaaacaaatattccacgggcccggtcaatttctcccaaacttttttccaactcagcatacttcaaacacatggttttgacatccttgtctggaagaccagattcaattgcctgttcatagatctcccttgttttgggtacaccaaatatctcagctgcacgagcaatatatatttcatacatgcttaacttctcattgttaggaacagccttagttgcttgatcataaaccttcatagctcgcttcgctaatccatagtcctcctccagcttggcatattgcaggtaaagtggtttcacttgatcagctggggccgattcaactgcattttcaaatagttctcttgctctctccaacttattctttcccggtcgcctcgcaggttgagtgggatatgtaacccatatgtctttaacatgtgggtacttaaatatctttacacctctttcataaactttaaaagcatcttcaaagtatttatgttcctccaggaagtatgcataattgattattatttgtggtgtggctattcgtaaatc

SEQ ID NO: 1797 - DNA, 2263 bp, Glycine max
  misc_feature (20)..(21): n is a, c, g, or t
gtattaaagttgataacacnngtgaagtgtattagtaataaaaaagtataaataacaacaacctaaattaaaacacaagtccaattttcgtaaacaaaatgagcccagaagcccaatttcctaataaacaaaaagagtgtgaataaactttaagcacccccattattgttttctgcactcccattatttttttaatgtgcacaacccagtctgggtttttaaaaccagccgggtcaccgggttttcacaaaattggccgggcttggccgggccatcccgggtcacatgcatgagcgatccaatagtgaaactagtcccggttggactggtccgatcggccaggccgaaccgggtatgatcgagatgattttattatttatttgaacaagttctattatgatgttagaaaagtaaatgtgaatcttttaccctttttgaaatgcttttatttaaatgtgttttaaaacttttaattaattccgcattcctattccttttattattagtacatatatgtgtggggtagagggtgtcacaaagttcctctccaatatattagttaatatccataaagtcctataattgctccctgctttggacatgttgagttgccaagttgctgaagttatgtgatcttccagaatactcctttataagtttaaagaagaaggaatcttctttctctagtaactttgatggttcatcatactcagcaactcttccatcactgagcaccaaaaccaaatcgctatcaataactgtgtggattctatgagctattgtgacaacagtcctatctttgaactcttggcttatgatgttctgtatcaccccatcagttgcagaatccactgaggctgttgcttcatctagtactaatatgctgcttctcttcagcagggctcttccaaggcaaaataattgcctttggcccacactccagttatcaccattttcaaccactgggaattccaacttctcttccttggcccttactaggtgacctagctgacatttatctagagcctcccacacttcaatgtcagagtattgctgcagtgggtccaggtttcctctaacagtgccttcaaacaaggcagggtcttgtgggataatgctaagccttgaccttaagtcatggagacctatcttgcatatgtccacattgtcaattataatgcttccttctcttggttcaacaatcctgaaaatggcttgtatgagtgttgattttccactaccggtacgtcctacaacaccaactttcttccttccaggaaatgtgcaagtgatgtttttcaatacagatggtagatgttcggcataacgtatctgcaaatttttgaaacatattgttccagtttctggccagttgctaggtggtctgctgtcttcaatcacaagaggtgcttcacttgttatatttgtatattgaaggatcctttcaactgatatcatcttgttttctgcattgcatatgttccatataactgaagcttgcaacacattcagattgatcccatatgttactgccaacccagcaatacttggattgattattccttcagggaggctcactagcatgactagtgagaaggcaaaaacaaaatttgaaagtaaattcaatctgaaagaaagccattccattgcagacacattatgaaaccatggccttgagaagccatccacaaggagaagatttgtgtatatgaaacggccttcctgatcgaaagctcgtattgatgctgctcctgctaatgattctgaaaaatggtggagaattggagtgatttgtatctgtgctaagcgagccagttctcttgctgttggcgtataatatcgttggtaccatatgcagactccagttactggaatgaagatgacaatggcgggccaggccccctcgcacctcactccaatagtgcctagaatctgtattattgagaaagcacaccatcctattctgtttgccatttccaagtctagcacactttgatctgtggaagccctgttcaatattcttccagttggtgtagaatcaaaaaatgccatgggggcacggagcacactatgcaacatctttgtgaaaagtgtctgtgctgtccaaagtccagcatttaacaccatcatggctcgcagcaaaacacaaaatgaaccagcaactgagagtgccatataaataagtagtatgaaattcatgtcaaatataggcgtagcatcactactagtgggacaagcccagctcgagcgaattctagcttcg

SEQ ID NO: 1798 - DNA, 802 bp, Glycine max
aagctaacaaaataaagcgaaatctgaaagataataataaacgacaacaatgtcaatatgtaaaacaaaaagctctcggtgcaaattaaaatctcaaattccgatctgatacacatagatgctgatcgaaaaaatgaaaaatctaaaaatgacctctcaacaaaagtcgtttcaattggtaatacagtagtaaattaatacggtaattaacttatgttatgatcctatcatcctatggtaagggtctagtcctggaatcccgttttagcccaaatcgcgtttcgaaccctactgagatcgcgtcctttgagagtcctcccaactccttcgtgcaccgagaacgaagcgattctcgtcctcgccagaaactcgtgcggaggcactctcccaactccatcttcctcatcgctccgcgcttcgtcgtcgtcgtcgtagttcctcctctggttccgtccgtactcatcgccgagaatcttcgaccagtccggcacgttcaccggaagcgacgccggagcaccgacgcgggcggcagaggaagaggagtagttgtgaaatctggaggagcgtacggatttggcaagttcgggagagttagcgcgcgcggagttgtagagatcggattcgtggaattcgaaggtggaatcggagaaagaatctgtgtccatggcagggagaaagcgataggttgctctacgaatgttggtggccatgcgaatcgcactttggataatctttgttagttgtggagtttgaacgttctcaattgctctcccccttctgtcgtcttctcgcagccgacgag

SEQ ID NO: 1799 - DNA, 1183 bp, Glycine max
gggggggtcaaatattttggggaacgttttacgaagatgtttcaagtgtcatttcactttaccttatggcataagttaatgtttaaagtgtcagggattcaaaccttttttctcatacagctaagaaacatagaacagccataacagaacaagtatcaataagaatgaatttaaactaggaaatgctaaaattcaaaaagatgcatattgtattttttgatacacccgagcaaagcccctaggaccaatatgctaccatgcagaaggagaattctacgtcccattggaggaaggccttcaccattggtgctgccatatttttcttcttctcttcttcaaatttatctcctggtctatcttcttttacttcctctatcggtggttcttcttgcaccaaagaacttgtccttattgggtccactagttgttccaaacttgagaggcacaatttgaggaatgtatattaaatttccaggaaagtttcttttctcctttgggatttttcgcaactgcggcaaccagtatgcaacatactcaccttcagggtcatacgtttgtgcttgttttgggatgctgaaataacgatcttctctgggatcattcccaactcctgatccataagtccagtttccataattagaacatggatcataatccaaaagacatgtctcaaaccattctgctcccatgcgccaatcaatgcccatatcacgaacaagaaatgaacacacaatctgccgtcctcgatttgacataaatcctgtagttgataattctttcatattggcatctatcagaggatacccagtacaaccatctctccaggattcaaacaaattcttgtcttggctccagttgcgctgaactttcctaggaccacctaaatggaaaagcgaattcccatatttcactgacaaaaacctaaagtaatccctccatatcaactcgaacaaaacccagtaggtagaactatttgctagtctatcattctcatatctcttcacctcttcatatatgaaacgaggagacaaacttcctgaggcaagccatggtgagaatttggtagaataatcaggccccaacatcccattcctggtctctttatataccctcagcaagtccttcttccaaaagtattcatatactctgctcaatgctgcagtttcaccccccacaaacttca

SEQ ID NO: 1800 - DNA, 1166 bp, Glycine max
aatttatcatatagatacaaaaggcagctaaaatgctagcccatttttcaaggatataacataacagggtttttcttgcctttcttgtcacttaagctttaacacgaatgcatcttattacaatttcatgcgtattacccttccaaaacatgacaggttctaaggattgaaataaaactgcattatcttaattcttaggtagtaataagctacattgaaacaacaaatctagttgacgacacaacagcagcaaataaaagaatacacatgtagatactaattatgacaaatcatgaatcataaaaaatgtccaacaagatgaagatccatgtcaatttttaagtgggttcattctctccctcagatagtagagtttggcccttctcactctcttcttgtcaagcacctttatctcctttatgttaggtgaatacagagggaataaagattcaatcccaaccccagccacctgcctcctaattctgaatgtagtattgagtccagcattacgccttgcaataacaatgccttttataatagagacacgcctcttattctcaggtacttccactttgagttgcacaatataaccaggctttatgtcaggtatctctctttgccctctcacatcctctacagcctccttgtctaaaatctgcataatgtgcctggcagttttgtctaatctcttaaatttaatgcgaggaggaacttcaggctccagcgtcgaactatcttgagaagaagaatcaacagaagttgcctctgttgacataaacctgctagcaaaaggcggtacaacccccccagcctgctgatacaagcccagtccagagcttctcagcaccgatgctaaaccattaccggactcaaattgtgagaataattttgtaatggcgaccggataaacgccagtggaaaagtttgggacagagaatggctgggaagggatcgaagcttgaaattccggcggagatcgagggaggaatggtcggagcatagatgatgagagcctgcgagaagccataaccgaggacgcagagagagatagaaggggaaaagccctgtgttagggtttatggcttgcgcacgtgcctccagactccggggggggggccctacgtagctgactggaatgggtcggtaaaaaaccggttctggacccg

SEQ ID NO: 1801 - DNA, 1111 bp, Glycine max
tcgtttgaaaggacctctggagaggtgagtgcaatttcccctaaattttataatggggtccaagtttgaaaaacccaagcagaagagtttaaagagattggtcaaacacgatagaagaacacacagcatcaataggttttacagctaagatattttcatataacctgtaataattctaaactgcaaaaagcattataatctgcgcccacagctaaaatgagtagaaattcagtaaatcctcctttccttagcccgcttccgggaattgctacccttaatcttccacttttcattcccagctggtcgattttgttcttcaatttctcgaaccttccgcttcctataggctgcaaggttttgatcagaaagcagctcatctgcaagcgttgctttcctctccttctttgttaatctgcctgagaaaaagtccaacggagaatctacaactgttccaacctggaaatatttgggaagtgtcttcgatttggaatcacctttcttgtagtgccgctttggatcaagggcagccctcaactttaataacttcaaatctttctgcaactcaggggtgatggtttgggccggcatattgaaccaatttttcccagcagtatctttagcttgctttctcagtaacttgtttaattttctgggatcgtttggagggacgaaaaggccatcaaccagttctgaactggatttcctaacagtgctgcttgatgcctcagtttgaggtttggtatgagacccatcagtggctttgaatgatgatggaataggcaactgtggttgccatgataacccaacaactggtttgtgtgctggcattcctcaggatgagattcccagaaatctcttagccgtacccgaaacaacttcttcagcgacactctcccacgttgagggggcaacttcgcgccggattatgacagtgccaccagtggaggcggtggctggcttgcgatgtgagagagggagtgagcgtcgagggttttgagtgagggagggtagttcgacgtgttgtgctgtttccccccaaatcaaaacgacgccgttttggtgaataaggaaaaagtacaaataatttgcgtgtgaaaagaaaagcaaaact

SEQ ID NO: 1802 - DNA, 1180 bp, Glycine max
  misc_feature (21)..(23): n is a, c, g, or t
  misc_feature (25)..(27): n is a, c, g, or t
ccgggtatcgattccgactannnannntagatactacgagttgtgtttctttgtggtagcaaagaaataaagctgtcaactgggtcatgacccttttaaatagccttttccttttcccacataaaaagcccattttgtttttgtgcaatgggcaatggggtaagtaatagaataacaaaagttccataattcataaacctttgacatgatgaaggggcaatagcttatgggtattatggcctcatgcttatgctaatgccaataaagttaaaagtatgttcatataataggtaaacagtgagaaattaatttatgctttatagtaaatggagttgggtagtttgaatgttctcttggccattggaagtccatcaaaagtgctccattgatctcccacaataccccatatgttgtaaccttcatcaaccaattgttgcctcaccatggaatggtattttttcacttccaccaattcatcatcaaaacccctcaatgtaagcctagtccatccatggtatccaacactcacaaggttgtctacggtgggagatcttaggttttcctttcttgaagaaatcagaaagattttgaaccctttgttcttgatttcatggaagagctcgagtgtgtgatcaagagctggtgccttgcttttcttcatccattcttctaaagatgttacgttcagcttttctcccccaaaaccatgcttcttataataaggaattgtggacaaaagggtctcatcaatatcaaaaatccaggaatctttgccatcatcttttaaagtgcagaatccactcatgtagagcctaatctcctccactgccctcacagaatcaacattgtattgagatgaagtcatgtacttcttcacatggtccacacattcttgaggcacaacactgaaccctctaatgttgtttagttcaacatttatcctccaactctcgcagtagttcttcaagttgtctccaacaaccccttttctcaatctttgattcaagatgttccattctggacgattcactacttcaacactttttccccattttgggttcaatatgttccattgtggactcaccaagccaatgaagaggcctgccatgattagtgagagtgccaaacatttggccatttgcacaaaagagatgaagagggagagggattgaagagttgt

SEQ ID NO: 1803 - DNA, 2126 bp, Glycine max
ctgggttctgtgtgttttttttttttttttttttttggggctcataaattcctgttggcatcagcaacgtacaaaattactaattgctgattccactaatactgtttacatgcaggcagcaacttaaaaaaaaaaaatggaaattaacataatagtttgggagggggtgggtgatcattgtcaaaacaaatctcccaaaattttattcctactctctacacattgctaatgtcccagaacaaaactagaggagacaccaccaccaaaatatatacaaaggagtttgtttgtttgtttctatcttgatattatgaactcccaggattcatgaaagagaaattgacctgattgattccattgcaaatagagaaagtttgatatatatttttatatatgtcttcctttcctcatgttttcttccacagcttggtatttaacaaacgacacaagcattaggattctcttccatgctttgaacatagtagtatgtggtcatgtggggattataagccctataagccttgaccagctctaaaactgggtctggtggagggggtggtgcctctttcttcttctcctcttccttcttctcttcttctttctttggctcttccttcttctcttcttctttcttaggctcttcctttttctcctcttcctttttggcttcaccctctttctttggctcctctttcttctcttctttctttggctcctctttcttctcgggctcctttgctggacctactgagagtatgtctgtctgccaatacttgcggagtttgctcacaacattcactggatcaactgttcctatcactgttaatttcttctccttcatgtccatagagatggcatcaatccctgaaagtgttgaaactgttttcagggccttctgctttgccttgtcatctggcaaatctaacttgagtacaaatttcttcatgtttttattttatccctctatgttttttagagggatgttgttgtgtgtgcagatcaaaggcagagaaatgtgaagaaaaaacttggagagaagtgagaagaagaaaaggggatgttagctagaatgagaatgggagatgagatgagagagtgcaatacgaaatcgaataatgctctctatgttgaaaaagacagagagtgaggagttggaaacattttaataccggaaaatccgaaattgcagaataggagagagaaaaagaaaaagaagaacgagggggaaaacggtggttctgcatctgcaactcctaataataatggaggaggagaagaaattagtaaagttgaagcattagtcccttcaaatttggacacttccttcactcccaaggatcttattagtcctccaattcagcatgcttacccatatccaccacaggtgtattatccacctcctccagcatatggattaagctataacacagcatatcctgtctccagtactgcttcatattatgttggtgctcctatcatgcccatgcatgcttacactactccatactctagactgccaccacctcctccaccatctgatccaatcaagcactatgttgaggatgagtatgaaagtgatggatattgctccattatgtgacaaacacacaccaaagtggaggatgatgtactagctagctagtgttattacttattaatgatagtactcaggttaagtggaggggttgaattttgtaatatgctcaacaaaattagaaatattaaatatggggacaaaaataaaaaaaagagggcatgtgcaggtatggggggggtcttgaatactttgtctttgtttagcatgatctctctctttcctcttctttttttttcttcacttgttaagagtacaaagcttttggggtttgtcaaagaaaggccagtagccttgtaatgctctgcaatttgtaggtccggaaatcttcctttccctctctatcttatgtgtaaagtatctttataagtaccaacttttttttttctcttttcatatttggttagtagttacaggctggtaaatgattttgttaattctcatgcatgcaaatcagctagccaggcaactagtcttagctttgcagtcaccgaacactgaatcttatatataaataattacttcctatggg

SEQ ID NO: 1804 - DNA, 966 bp, Glycine max
  misc_feature (21)..(21): n is a, c, g, or t
  misc_feature (856)..(856): n is a, c, g, or t
  misc_feature (875)..(875): n is a, c, g, or t
tcaattattatagaataaaanattagaaaatatcataattaattataacgcatttggtatgtcttcatccctaaacaaagacacgacatagtactctgtaacaaaatggcccaaatatttaatatggttgcatctaatataataattacaataacattgtattcactcattttgagagtaatttttttatactcttatcacatcatcatgtacgaaacacattcaacaagtttgaatatcacaatcatgataactattaaaaaaattgtaattctgcaataagattataagattatataatatgatttaaaaaatagtgctaaaatattttactggacaaaaataattaaattaaactcgtgaaaataactatatatatagatctctgctccaatgtcacgtgacaatgattggaggttgcgtcagcaatcaggttaactatcactcttcttcaccagatcttaaaatttggtgacattctccagatttgggcattcccaaaccagaaatttagatatcatagaatatttagaaagaaaaagggtgaacaatgacttgccaggcatcaatccctgaaagtgttgaaactgttttcagggccttctgctttgccttgtcatctggcaaatctaacctgagtacaaatttcttcatgttttttattttatccctcaatgttttagagggatgttgtgtgtgcagatcaaagacagacagagaaatgtgaaaaaaaaacttggagagaagtgagaagaagaaaaggggatgttagctagaatgagatgtgagatgagagagtgcaataggaaatcgaattatgctctctatgttgaaaaagacagagagtgaggagttngaaacattttaataccggnaaatccgaaattgcagcaataggagagagaaaagaaaaagctagggagaggaggaaaacatcaacaactatgaagatgtagtactatgtaa

SEQ ID NO: 1805 - DNA, 854 bp, Glycine max
  misc_feature (846)..(846): n is a, c, g, or t
acgttaaaacatataatttttttttggatacgtaatcaaccatctttttttttctggtaataatctaaaaacgatttatttttcaagtatgaaaaacatatttaagcctaataataataataataagcagtcgattcattgtatgctgcttgagagaacataaatttaagggccggggaggcccatcaaaattttaagaagcttttacatttgatacgattttctgtatatttcttgtattgaagcaatgtaaactctatttccattaacacgatttgacaaccagaagggctatgctgcgcacaacagtaattatattcgggagtccacttttgaagattatttacgtcaagctagtgtccacaggatagctccctagcactcgcaagaatgtagcaaactcctttagatgcctcagggcattctgtgcactctgctcagccattgatgcttcaaaatcaacatagaaaagataatcaaagtacttggaattgttgctatcatctgctcgtagaggttggttgcgcaaaggacgactttcaatctttgtaaggttaatctggcgcaaagcaaaaacagcaagggctttgaaaagtatcccaggaccctcttctaaagaaaatactatgctagtcttaaatcgcctatcagtgccaggaatcataggttctcgtgctaacattaaaaatcgggtgacattatcactatcatcctgaatgtcttgatcaagtatattcaagccatagatctttgcggcagcagaactagcaactgctcctgcatcttgtagtttgtggtaggcaccctgctgtcctcctcccgcagccgtccgcacccgtgggcctnacaatcca

SEQ ID NO: 1806 - DNA, 1230 bp, Glycine max
gaagatagttgactttgattatatatatgttcattatatttattctccttccctatattgatgagtatggaggagagtgtggattttgggttgaacatggagatgattatggggctcatgatgctcctcatcctcgtcatagcaataattgtggtgaccgtgcgtggcctgcacgcgccacttgcgcgatgcggcgacaaagacttgggccagcctggtgaatgggctccctgcagggccttcctttctgtaccttttgattcccaacaagaagagtgccaatgccaaagccaacacccctgccagcactcctagccccactccccacccaacattgtcctgaagatatatgacaacaaaaacagaagcagttgagccagccacaatccccaagtaccaccagttgaagaatgagctcttggcatccttctcctcaggcgtgtcctcgtcgaactgatcggcggcgaaggtctggacgcagggcttgtgacctccgtcgccgatggcaaggacataaagtgccaagaaaaaaaggaatttgtgtttgagtgccgacactgaaagtgtcaagaaaaccatgcccacgaaataaatgactgaggacaagagtatggtgttgaagcgacccagataggaatcagctatgaagccaccaagcaaagggaagagagaggaggcaccaacccatgtgttcacatctttggctgcttgtgtgattggttcattcaaaacattagtgagatattggatgagattacttgccaacccttgataagcaaatctctcagcaaattccacaaatatgatgaagatggcagcattccaaccaccctttaagtttgtggggtgatggaggatgagggaatttctcttggtgttgctactactaccatcagccatggtgagaagttgaaatttttttgaggtgagtttggagagtgttgtggggaatcaagtttggggaggctccatggggggaattgggctttatataggctgaattttgagactcttgtgttgttgttgttgttgttggggttgtgggtgtgagtgaacacaagcactcaactttggtgtaggagatttggaaatggttggcacctttttttctacctctgcatcactctagtttggcagtttggctttttttctcccgtccgaagctccgaggcttatcgtggcggcgtgccatgcgttacgttcatagttattgctatagttgcactaata

SEQ ID NO: 1807 - DNA, 1203 bp, Glycine max
  misc_feature (1138)..(1142): n is a, c, g, or t
tttttttttttttttttttccagaattaaattatatattaactctaatgattttatacaatgcttaagaaagccttcaaatatttatagttttaactaaatataactagttttaaactattagcctctctctctaagatgcaactaagattactatttattggaattacaatgttaatctatacttaactctcatcttggacttggtatgtttggcattcgctgcatatatcagaagccaaacagtaattttttttcccctcacactccaggtttgtatttcttgtggctagaaccctgttggtcactagtttgatgaccctcatcaacttttttgtacacataaacaatggcaagccacacataaacacacaaattaacagcactcaaccctgccaagacccaatagaagtaatcaaggtgtgccctattgaggttgtttcctagccacttctcaccagcccttgatgtcacaccctccacaacaactataacaatgttgccaacaaagctcccaacccccacaatgctaatgtatgctgcagcccccaaactcctaagtgcctcaggcatttggtcataaaacaactcttgtagccccacaattgtgaatgcatcagagatcccagtgatcatgtactgaggaagcagccaccaaatgctgattggtaacactgcttttgggtcatcaattaggccactctcttttgcaacaccaacccttttggcctccacaagtgctgacacaaccatgttaaggattgacaagaaaagtcctaccccaattctttgtagcactgttatcccagtgggtttccctgtgattttccttgctagtggcacaaagacacggtcatagaatggcacagcaaagagtattgtgactccaactaggccttggagcgatgctggtgggacttggaaatgtggtcctatggaacgtaccattgtgccaatgcgcccgcccacgcgtccgcgcacttgagcttgtacaacagtgaacattaagcaacttagccatattggaatcaaacgaaggacaagcttcacttcctcaacttgtgtcactgaacatagcctccaagggtctcttgtcttcgtcttggcatcaatttcatctatgatcgctgccttgtccnnnnntctgttgcaattaaatttcgttttagcaatgatgtggtaatagaaagtgtcaactttgaag

SEQ ID NO: 1808 - DNA, 1201 bp, Glycine max
ctcgattgggaaaaatttcccatggcctttttttgggtgggtgggtggggggaaattgtttgtactggtggaaaagggaattatgtttcttcatttgataaattgtgttgaaagaatattaaaatttgaatatagtttttacactgcttttgtatcttattcatctccgtgcttttgatccaagtaatacaaaattgaggaataacttatggaattaagaaaccaacttgtcccaagagagctgttttgccattcaatgactaggaaaacttcaattcgtcttttctctacccttagattttgccaggtgaggaaagactgtcagaatgttttgggcaagtagatcttgcctggtcaagatcccaattactggggatatcccagaggcttgatacttgggtactacgagcagatgtcgaagtccaacttgcctgaagagggtcattgcttttgctactgacatgctctctagcactgtaaagggagttgtattggtaagaggatgtagatcaacaaacatttccatttcctcactggtcacagccacctcttcaatacttccttctctctcagccagctctacccaggtaaatttctctctcacttcccattcctctgttctccttctttctttaaggaaccacttcttctttagtgcttggatgagatgtgctcttagaatcagtccatgcagttctgttcccccattggcctgtcctactactggtggtactaccccatcgtccataacagggaaagcattatgtgtagtgtttttcaagacatctactattttggctaccttttctactccatggagggtaaccactgatggctttacatcaacaagctcacccacagtgagatttctcatccatggctcaggatttgcatccatgaaaggaaggcctttcaagtgcagtataatctcatagatgcttgggttgaaactgtctccaacagttttggctattaggaggacaatcattgttattggtagtaggagaagattgttggtgagttcaaggaagatcacacaaagggatacagtcatcctcatggaacggggggggggggggcctacgtagctgaccgcaaacagcccttggtcaatgtttgtatgaggtcccatgtagatgccgagaaggcggccataacctgagcccataagaatgattgggaggaagagcccagatctggt

SEQ ID NO: 1809 - DNA, 2008 bp, Glycine max
tttttttttttaatttctttttttttttttttttttttttttttttttctaaataaataagccatttatgactttattaaaaaaaataaaattattaggtatgcactatgacgagtttgattttacaaaatcttcaagcacacgtgaggaaggacagatttccagacacactaaaagagcccaaaacagccatcctctctatagtccaaacaaaaacatcaatgggtgggaacatgaatatataaatagaaaagaaaattgtgcaaaaagaacaaaaaaaaaaaaaagaaaagaaaaagggtatgtatctatataatgattatgggaaacaaaacaaaataaacaaatataaagtaaaagaacatctttaactcaactcaacatttcttggttgaaccattttttttttcatttgtgttttctcatccccttgtctttgttgtcaggttcaaaccttgggaggtttagtaatgtgttcacacgcgacactccttcgagagcagaccactctatttctgcatcagtatctatttcctcttccttatggttgtggttgtggttgttgttgttatcttcattgttttccctgcaagttcctgaccttgccagaccagtaggtgcaggaacatctccgttgtcgccattgtggacttggatacctgaactaggttgttccttggacttgatgacattggaagcactacacactttgtgcgaatccgagtccagaaagaggcaaaccacggcacagtcgtccactttggaggttggatacttgtacctccatgagcgaaccgctgactcgaccagcgcccgtgcggccgaggcacgccttggcgcggctgccacgatgtccaccacttctttgtttgagagaacatcccaaatcccatctgttgccaagacaacaaattcgtccttctcagtgagtcgtctgtatgacacttcgggaacagatatcaggccaaaatctttaagacaaaaatctccaaatgcccttgccatggcaaggccaggtgagtcattgtttggcaaccagactcgagcaacttcaggttcatcctgaagagcaaaaacacgccctttacatttgcgaattctctcttcttcggctggaagattgggttttagatccacagttaactggatggcaacaagagaattgtctttctctcttgtacccagcacagctctagagtcaccaacatttccaataataagatcatgtccctgcttaaccagagttactgctgttgtcccactacagaagcaatcaatactttggtgggtcttcagttctctatccataactttgaatgccttcaaaaaggaatctttaagtgtctgaaagatttctgggtgtttttctgtttcctcggcatcaacagataccctggattcatcatcagcagatgcaaatgcagcctcttctgaattcatgcttcctgcagtattaacgctaatctccttgaggacttcttcaccagatgcactttgttcccaatggacattcagttttagaggaagagaatccctcactcttttcgcaaccatgtgaccatatggaccgtggccatcaaaaactccacagaaaatagtatcttgtctagaacaaaagttctcccaaacaaccatggcatcctggttggtacccttcttcccttgttgagtgaacaaggatgcaacttgggatgagccattgaggaagatcctcccagggatcctatgtagaggctcattcctccaatactcaaatgaagaggttcttgatccaagcctcttcttggagttgctcttgctcttcctgaaagatgatgaatttggtgaattggggtgagggctcctgctttccgcagagaagcaggaccccatcttaagggcccttagaatgccaagaatgcactccacaccactcgagcacccactttcttcccttgaaggatccgtcacaacccttttgagaataaccaacaaaaatcaaaacctttcacaatccacacaacaccac

SEQ ID NO: 1810 - DNA, 802 bp, Glycine max
gtacaaaattttcccgaatgccaataaatgataggaactgataattgttaatgtttgtacaattttttgcagttgtcaaaacggcaactgaatttacaatcagtcactcaatgcttgttactatacctccccacaccgtccttacctccattgaaccaggtgttagtaatttcctacttattttcagctatttctttttcaactttgcttaaatggttacaagtatacccctatagtaccaattttttatgtacacaataaacaccccgagagccctcttcaatgctggcagaagcattgttcaagatgacaaatcgtcagattcaaagaccaagagtttatgcgcagctatacctcattcatctctcaaacagatgccatgtcgtttccgccaggaatagtatctcaatgccgattgttctaaagacgggctccggcagtacaagtaaatgatccaccgagaacccaggcagagaaacttatcaagaggacaagatacatgtaaaaactatccctaggcactacaaagcttccagagttatcgacgccttggtgaaaacagaaagtacaaacggtgcttcttcaccggggtgtatagtagtaggaactatagtatatccctttggctcaggttccaaaaccatttcacaggatatttctcgtgaattaacatagtctgtcccaccaactgattcatgtaggtatatattgaaagcagcacgtctgccacgagtttttagtatcctcattccaatgtaaaacatctgtgaatcatggctggattgataatttctaaaaccag

SEQ ID NO: 1811 - DNA, 2633 bp, Glycine max
ccacgcgtccgcctttctttcactcacagagacctaaaagcacaaaaaacaaaaaccagctcgtgcttgtactttgcgcgatgaatctcctttgaagaaaacagaaacttcaaaaagcacattattttctcttttgaacacactctgttttttttgttgtttccatgaaggaaggtgaaaaggtattggatccgcagctatggcacgcgtgtgcaggtggcatggttcagatgccgcaaatgaactccaaagtcttctacttcccacagggtcacgccgaacacgcccacaccaacattcatctgaggcttccaccattcattttatgcaacgttgaagcagttaagttcatggcgaacccagaaaccgacgaagtgttcgcgaagctgagtttgcttcctctcagaaactcggaactcggtgctgactcggacggtgctggtggtgatgacgtggcagaaccttcttgttgtgaaaagcctgcgtctttcgctaagactctgactcagagcgacgccaacaatggtggggggttttcggttccgcggtactgcgcggagacaattttcccgcgtctggactacacggcggagccgccggtgcagacggtggtggcgaaagacgtgcacggcgagacctggaggttccggcacatctaccgagggacgccacgtaggcacttgctgaccacagggtggagcagtttcgtgaaccagaagaaactcgtggctggggattccgttgtgtttctgagggctgagaatggtgatttgtgtgttgggattcggagggcaaaaaagggaattagcgagggttcaggttcaggttcatcatctgtgtggagttcagcttctgggtctggaaatggaaattgtgggattgggccttatgggcctttttcttttttcttgaaagaagaaaacaagatgttaaggaatggttgtggtgttggtgggaatttgagtggaagggtgaaagtgagggctgaggatgttgttgaagctgtgactcttgctgctagtaacaagccttttgaggttgtgtattacccaagagccagtactcctgagttttgtgttaaggcttctgctgtgggggctgctatgaggattcagtggtgttctgggatgaggttcaagatggcctttgagactgaggatgcttcaaggataagttggttcatgggaaccattgcttctgttcaggttgttgaccccatccgctggcctaattccccttggaggcttcttcaggttacttgggatgagccagatttactacaaaatgtgaagcgtgttagcccgtggcttgttgagttggtatctaacattccactcattaatttcacacccttctctccaccaagaaagaagctgcggccacaacacccagacttcccccttgatgttcaatttccaataccaatgttttcaggcaaccagcttgggcctaacagccccttgtgtggtttttcggataatgctcctgcagggatacagggagccaggcatgctcaatttggaaaatctctatcagatctccaccttaacaataaactgcagttggggatgcttccaactaatatccatcaacttggagtgtataatgagatttcaaatggtaacatgatgaccaaccatgataagagcaaagaaagtttatcatgctttctgaccatggggaaatctaccaagagtttggagaaatctgatgatgttaagaaacaccagtttttgctttttggtcaaccaattctcactgagcaacaaatttctagctgttctggagatgtgttgtctcaccgaaaaagatcggtaagtgatgataaggacaaagcgaagtgccttatggatgactcgcaatctacactctcacagcagttttcaccaggaaaagcatcttctgctgagttctcttggcaacttggcttggatactggtcattgcaaagttttcttggagtcggaagatgtaggaaggaccctagacctatcgctgtttggttcttatgaagatctgtataggagacttgccatcatgtttgggattgaaaggtctgagattttgaaccatgtgctctaccatgatgcagctggtgctgctaagaaaaccggagaagaacccttcagtgacttcatgaagacagcaaaaagattgacaattctgacggattcaagcagcaaaaacattaaaagggcctttattacaggaactcgtaatggtgaacatggactagatgcatcaaacaaaacaggccctctgagcatatttgcttaaaatatgctatagatagcatctgagacattgttgagatctgagtagttgaaggacagtcctaactctatttacctctgcaaagactgaacatgagctgaatcttttatcatggttgttactattgtgtactaaaaacaatatctatcaaggttggcttagttgtttattagtgtacaaataatgatgccattatcatggtcaactgttattgtaatattaaccaagatttggaccccatttggcaacttgcttcttttcttttccttatttttttgttcattgtgctctcacactcacatgctgctgcctacgtgtctccacgtcaccagtgctcaataaattgtgcaaagttggtat

SEQ ID NO: 1812 - DNA, 1860 bp, Glycine max
ttttttttttttttttttgctctcccataaaattataatatattcaataatatcaatataaaaatcgttattacacattttcttatgtattccctagttcacacgcacatgtaaacttttttttttttttaattctctctttttatctaaggatacagacattgtgtttttctaatcaagaatccctttctagtttctatccttatggtgaaactctgaatcctttgatgcactacggcaaagtttataacattaaaccatgcattatgctgcctgattagattaaaaactaaaaaaaggggaagataccaaaccaaatgactacaggccaggcggtttaaatagaggaacaggattgaaaatgccctctacgtctatgggtaattcaaggacacggctaagggctgctggagttgatgtcttgcccttccaagtgttaaaccatggacctcctccaacttctagtgctgccatattacttgaaacgtccaatatgatcttccccttgctgccgtcatatcttcgttcccacatttgtaattttagatctccgaagcatgtatctttacaagcaggggccaagccggcttctgctgttggagcacgcaatgttgtacctggatcctctgttgttgcttctatttcaaccacatatctgccattgtctgctgacataaaccaataaccccaagtagtaacttcccagttaacaacaccattccatggcacaaattcataaaaaattccaccataatgaattccaatcaatgcagcattttcaaaggtctcggcaattccaggaatttgcctcaatccaccagctgctgtaagagcaatttctccactagccccttcaaaaacattacattgaacccaaaaccattttcttgggaatcctccaccccagttcttttctgaataagaaggagcgttatcaaactcaatcctcttgccatcccactctatccaacctgttgacagtccaccagccatgcatatttgccaatgtggttcaaaaacaggaaaagctgcaagccacccagcagtagacttctgcgtggaaccaacatcaccccaaccatatacaggacgcgtactatactcccaacgagctgtctttactgtctctacataatttgaccttccatcatcgcgaataaaaccttgatgccaaaggggactgacttgaaaaccttccagcactctatcattaaattcctgaggaggaacctccttgtttggaggtttagaattttggttgggcacgaaagtgttccccaacattagttcatgcctacttccccagaagaattgtgattcaggagaaaattgacaaatatatttgtcatcggcaccgagaatttgagcaccgacaccagtaaacctggagccgtattgggccacttcgagcggcgtcagtggtttacgaaaggatgggctctcgacggagtacatgaagcaaaaactctgcctccgttccggaatggaaagtttgaagtaccaaccctcgaagaatttgcgagtagtcccatcgaaatggtagccgctgtgaggagttcgaaggtgacgattgggaggagtaggggagtaagtaggtttgacagaagttacaagttgttccttttccttgttatcaatgggaacggtgtctgagaagaaactgcgagctaggaggcgcgttgaagagggaaagtggagattgagagaaggaagaagagggagtgagggagacaaaagaggagactcccagagcttggcttccatggcaatggcaatggcaatgtaggaaagcagaacaaaacggtgcgacttagttgttagttaattgctttcggctaactcaccagtgccactcaaaac

SEQ ID NO: 1813 - DNA, 901 bp, Glycine max
acggggtcaagatatggtctattccaaatatatccttctctcttgacatttcattcataggctaattccagttccggcaacatacaatctcacttcttttcatcaccatctcaccctgctaatgatgggcaaatgcaagtaatcatcacatgcatttgattcatttgaacgactagtgactactgaaaacaaattttgatgttcgtcatgctaaatagcatcgagaatatatagggtaatatgtaaatcatgaaacattaaaggagtaattcatgatgatagtcagatggaatgaaaagagttagtagtttggtcatttatttttgtgcaattgctgcaaccaataacaaaatgagaacatgcacagctgaaatgttcaatcctgcacttctggcttctttgcagtgcctttaaggtaccaccccaaagccccaagaattgttacagtaccagctacaactgcataattccggtacttgtcagttgaaactctgtcggctgttgttccagcatgtcctgagctactaggtttggcatcagttactgaaccccccgagcctgcttcgggttgaggacccttgcgagcaagcttctccaacttctcttgctcagctttcttaaagtaagcattttctgcagccttttcctcctcgctcagtatttttccagaaccactgctaaatagccttctagatccgtaccttgcagccacacgtgcagccattgcagttagttaaatgttttcctcttcagactcagttcagtggagagcccagagagggttagcagaagcaatgtgtgagtcgtgtttgttcttgaggcgcttaagagttgggggggggggcctacgtagctgacgcaaatacggcaccgtttcgaattgctcccgataactatgatt

SEQ ID NO: 1814 - DNA, 1758 bp, Glycine max
tcgagcagctacgtaggcccccccccccccccttctccatattgcagaagggtgtgatccagttaacaaactttactactgcgacttgtccaaacttcctaatgcgctggaaggctttcggaatggaaattctctcctcccatttgccaaacttattgataactttgatgcacagtatgaagccattgccaatgatgacaccgtgtttacatttttaactaataaagatgctccaaaatataaaatagtccgagtagatttgaaagaaccaactgcttgggctgatgttctccaagagtctgaaaaaggtgtactggagtcagcatgtgctgtaaatggcaaccaactgatagtaagttacttgagtgatgtgaagtatcttctacaagtaagagacttaaaaacaggatccttgctgcatcaattaccaattgagattggcagtgtttctgaaatttctgcacgacgtgaagatagcgtggttttcattggctttacaagcttcttaactcccggtatcatctaccagtgcaacctaggaacagagattcctgatatgaagatatttcgtgaaattgttgtccctgggtttgatcggtctgaatttcatgttaaacaggatttcgtgactagtaaagatggtaccaagatcccaatgttcattgttgccaaaaaggatattactttggatggttcacacccatgtttgttatatggatatggtggttttaacatcaatattacgccatatttcagtgtcagtcgcattgtactcacaagacatttaggtgttgttttcagcatagcaaatattcgtggtggtggagaatatggggaggaatggcataaagcaggctcccttgcaagaaagcagaattgctttgatgacttcatttctgctgctgaataccttgtatctactggttacactcaacccaaaaagttatgcatcgaaggtggaagcaatggtggacttcttgttggtgcttgtataaatcagagacctgatttatttggctgtgctctggctcatgttggtgttatggacatgctacggttccacaaatttaccataggtcatgcttggacctctgattatggttgttcagacaaggaggaagagtttcattggctaatcaaatactcaccattacataatgtccggagaccgtgggaacagcatcatgatcagtcatttcagtatccatcaaccatgctgttgacagctgatcatgatgatcgtgttgtgccactgcacacattgaagctattagcgaccatgcaatatgtcctctgtacgagcttggaaaaaagtccccagacaaacgctataattggtcgcattgactgcaagtctggtcatggagctggtcgtccaacacagaaaatgatcgatgaagctgctgaccggtacggttttatggctaaagtgttggaagtgcattggattgaatagaatccacttagtcacaggttagagagaacaatggattatttctttaagacgatacccttgaaccattttatttctctgtttttcacttctaccaagaaaatacattgaacatgagattgtcagaaaagtggccagtgggggttagatttgaagttactaatgctaacgccccgatggatttgtcaatcatttaattggcattaggttcactaaagtctgttaaaatatgttgcctaaatattgattcttaaggaattgttatggtatataaggatattataggagtgcggttactcattaga

SEQ ID NO: 1815 - DNA, 910 bp, Glycine max
tttttagtaaaaaattaatggactttatgatggtttttttctttctaatttcttaatttcataacactgcactgcagcaaaacctgaatacatgtacagtatgaaagagcatccagctttgtatacataaaaagtataatcctgcaacactgtatgagaatgacataaataaaaaatatttacaaattgaagaaacaaaataataaagaagaagaaactctggaattaaaaagaaattgaaataagcaacgactgaacgagatggcggtgagtgaatgggttgcggctgcaattgacgtatatgtgatgtatccactatctttgattaatcatgaatgactagctgttgaggttgtatcaggatccgatgataattgtcttatagtttggtcacacggactgggttcgatcccgatacagaaacattcaacaaaaactagttgttaaggttgttggttcctttgcttggtccagatggtggaaccggccccttcggaagcatgttcaggatcattggcccgtatttccctccggcgagtctcgttcccggcaacgccagcattccggcgaccctcgtgtggccacatcctgacacgtgtcggggtgctggctcctccggcaccaccaccctgtcgctgggaagcgcgaggttcaaagaaggctcagtggctgcaaggctgaaatagttattttcatcattcaagggcctagcagatgatgatgtcagaaacagaaacactagcagcagcatcgctgcaaggtggtggtttgccattaatgactagtgaggaaattaagctgaaaataatgagaagggtttatgaagagagaggagaatttgagagaagtaggggaaggtttgtttaaggatgtaaattaatgcgcgcgccggggtcgaccgggaatccgg

SEQ ID NO: 1816 - DNA, 906 bp, Glycine max
tttttttttttttggggcaacaatgcatcatatattccacaccaaagcatatatagaaatgcatgaaagattactaattccagagaatattcaataccaaagcatatatagaaataaatttttttaaaaaaaaatcccaaaaggaaaagtttgacaacacaaattgtaaaatcatatctcaacaagttaacaaaaagggtctccaaaccaaaaaccaacacaaatgttttcatcctctactcttccaatattgttcccttctcgctgacataaataccatcaagaaacttccggatatccttgttcttaacatgacatttctggttaatgagagcacatgacctagaaacaagttcaatgtcgtttccatccaagaccaattcatctttgaccttttcagatctaacaaccgacacgccctcaagcatgtccactttcctcaccttcttctcgccgaggaaatttctgatctcgatggacttgctgttgttgccaatgctagcgttgatcggaaaatgagcgtacacgaatctcattttgtatcggtatcccttggtgacgccggtgatcaaattctcaacgtggctgagggcggtgcggatggcggcggaggttttacgagaaccaaaccaagaatcaatcttgagcttccttttaccgccatcgtcggtaataagttggaagtccaagttcagatggtggaagtctcgcacgagttttccacgagggccctcaacctcgataaccttagcgtgaaccttgatgctcacgccgtcgggaatattcatggtctcagacgacaagatcgtcttcattttgcgtctctgttttacactcctaggacttctgccacagtgcctcctcccaactgctgcagaaaaacaacgggggggcctacgtagctga

SEQ ID NO: 1817 - DNA, 1914 bp, Glycine max
ggggggtttttggggaatttcccctttttggggccccccccggccggccctttttttttttttcctggttttttttttttttttttttttttttttttttttttttttttttttttttttttttttttttttttttttttttttttttttttttttttttttttttttttttttctaaggcaaaataaagcaattagagcctttattcaagcagagcgataccaattgctgctacttaaaatgttaaacgaatcgatgatttaacactgctgcaaatgttaaacgtatcgatgattaacaaataacaatacatttataagctaaccgactaacgtattctacaaatacatctgctcaatctcaaaggagtcattcaaattgggccaatcttacaatttaaacaatatcttttgttaaatagtatcaatgcactcaaattgatgagatgccaactaaaccattccgcaatccgcaaaagattcttcaagatctgcctcctaatagttccaaaacgtcatcagtttggcatatatgtcgaagtgtcaatttgttcaggaagctcctttatgtcaacctcaaacctagattgcacctgattaagaacctcagagtcagcagtagaagacacaaaagtaattgcaagacccttcgtgccaaatctaccagctcttcccaccctgtgcaagtaagtatcagcagaatcaggcatgtcatagttaataactatattaacacgttctatgtcaatcccccttcctactaaatctgttgccacaagaatcctttgcttcccttctttgaagcccttgtatcgtttcaatctctcttcctgtgacattgcagaatgtatgcagatagatgggaagttacactccacaagcaacttgttcaactcagcagctctgcttacacttttgacaaatataacaacttggttgaagtccagagcatcgagaagatcattcaatttacgattcttttctgtctcttgcaatttgatatagtgctggacaagaccatgaagagtcaatttggcctcatcatcgacataaatttccatgggatcttgcataaatttcttgcaaacaggtcggatctctttactgagtgtagctgaaaacatcatcacttgcttatcgtggggagtcaatttgaagatctcttgcacatctcttctcatatcaagtgattcgagcatcttgtcacactcatcaagtataaaatgcctcacattctttaaaccaaggtccttatctctagccagagcaagaatcctcccaggtgttccaacaacaatatgtgggcattcattcttgagcaattctttgtgaaccttgatgttgacaccaccatagaaaacagcagcctttatatcaggaagatatgtgctgaacctctcaaattcatggcaaatctgataagccagttctcttgtgtggcaaagaacaagagctgcaacttgaccaggaacaggatcaacttgctgaagtgtagacaaaacaaaaacagcagtctttcccatcccagatttcgcttggcaaatgacatccattcctaagattgcttgagggatgcattcgtgttgcacttctgaaggatgctcaaatcctgaatctacaatggctcgaagaagctctggtttcaacaggaagtctcgaaatcccgaactatggatgccaacataacccttcttgccagattcagtaacgggtttagcggaatcgggagctttttcttcttcttcttcgtagtcgatgagctcttcctcgtaagcctcagtgtccttcaattctcccatcctatttcctttgaagacgcaaaacttgttcaaattctaaaagaaaaggaaaataaaccctagatctggttctgggttttaggaagagcaacagcgactcgcctacgtagctgaga

SEQ ID NO: 1818 - DNA, 875 bp, Glycine max
tttttttttttttttttttttttttttttgatcgtagctcgctgtcaaagccaatatgataatcatttaattaaagattttctgttgtatttagtgttttatcataatacacacaggaccagtcagaatatgataatctaataatgcagagatgatgaagtaatgaaaacctggagtatacaatactacaaaacaaattcactcgtcatccttgtatggatactcttctgggacatgcttgagaagttttacctgcaactcaaacacatcatcaccgcgaagcacatcacgaagccaagttacctcagttttcattgacaccatatctaaggctcctctgatgactccacttaagatgttgcaatagtacaaaccttggcagttgtcaggaagctcaacaaaatctaccaaaggattatcctccaaaacaatactacaacatgttccatcagcatcccaattggtcacagatgcagtaacaccgaggaacattttaaaaccaacctttgcaataacatcagtcgtctctctgaaatcgttgcatctggagacattagacttggctaaaaactcatcaatcaaacggattccaatattgtaacccatttgatcaagctgcttgttaacctcctcagcctcttccagatccgtgagcaattgacgcacaattgcgccatacgtcaaagtaaacagctccgcattgacgcgttcgacgttggcgaatatggcatcaccggatcgaggagcgacgggaggcatcgtcggagtttagtctggtttgctgcgatctgcgtagtgatgacgagtgaagcaaaagatgcgtctttggatcaatgctcacaggcccagcgggctgacactttaaccatcaattc

SEQ ID NO: 1819 - DNA, 1267 bp, Glycine max
tttttagagagcctcgtgcactggcccgcaattatagtaacttagttttattattattattattaacataaaaaaacaggaacttcataaagggataattccacaattcactcataatgaatttttttttgtattcttttagtaaatcaaaactaaaaccaactacacatgtcaaactagtactggaaaactgtttactagtactggaaaactgttttctgtgtgaacgaatgacaaattaataaccttgcgggcattgtattagtaaaagctaaagctcacgatgtttgcaatcacttccaaaattgccatcacgcagagcacatcatttagaagacgtgtcttgccatgtgctgccaagagcaaccccatgattcttaatgatttgaactgcctgtaggagaatatcttgttctgcggagtataattcatctttgcgcatatgtttgaggttgtatccaagagtcaattctgcatatgaactttctatacgggataagaaacagtagggaacatctttccctaagaaaacctttgcatttgatctgagcatgcttttcacatcatctgatatcgggggaatcttacttaaatcctcagtttgcagtggaattttggtaataatggcaagatattcagcacgggacttgttcacaataacctgactagaaaaaaatgagtttggcacaatgactgggaacttctccgaactcagcaatgatgtggaagtaagacccatttccaccacttgaccctctattgagccagcttttattgtatctccaattgaaaagggctttgaaaactgcatagataaaccactgaacacattgccaagaatgtccttggcagcaaaagcagtagccacacctcctataccaccaacggtcacaacagattgcacggccacaccacaagcctcagccaaagccattataccaatcacaaatagaccaatagatgagattttgtctagagcaagcactttctccttatcaagcccaagtaaactttgactagacaacgtccgtgcaaaaacatttgttttccatctatgcaaaaaccatacaaatgaaacaatcactgcacccctccaaacgggagcaagatattgtgaggttatagttgttggagccaccataacaccaatttgtgagaatgcaatgaaggtaactaaatatcgcactggatcctccatagcaccccaaaagcttttctcataaggaactggctccccagccacgcttgctggcaatagagaaacagg

SEQ ID NO: 1820 - DNA, 1330 bp, Glycine max
ttttttttttttttttttttttttttttttttttttttttttttttttttttttttttttttttttttttttttttttttttgggaagtgcatttatcgaattaattaccaatgatatgggggtggggtggtactggatggcatcgacagattgtatttctgctactccaccaagtaccaacttgagcacacaatctatagtttttcatcaattaaataagccagtcaatcaaattttatacattttctgagttccttcctcatgctgtattaaacgactgccacaaattcctgaaatgtaaacataaataaggttttttggtattgggcatacatcatacactttaaaataacaactatagtattttgcaaacgggaaaggaatgtcttgggggggcttttttcggttacatgggaaatacctttcagatggaaaaaagaaatagcatttgtaaagtgttctctacttagttaacctgatttacacagattccagcctgtcacttgtgcagcacacctttccttgccattttcggtttcttttgaatgtgattcttctgtttctccagtgcttcataatctgtcctctccctccacttactcttgcgtagttttataggacggtttccaacatacttaccattcatttctttaagagcaccagcaaggtcagaaggattggcaaagctcacaaatccataaccttttgttttaccagtccgcttgtctctgacaactcgtgccatgttaaaggaaggaaatcgtgaaaatgcttttgagagaacatcatcattcacctcgttaccaagatccccacagaagagccgataatcatcttctggccactctgcaaggataggatcctcccaagcgtggccagcagctttgcgaggaaccgctttctttttggcatcggttttgtgctccacgtcgctgcttgcaatcgctgccttgacattctcgagagcctccggcgttattatctgcgcatccctctcaaataactgctgtgcctgatattgcggcacggcggagtatacgccgggtacaggggcgggcgcaacggggccgacgactggaggagcggggatttgcacggagggggcggcgacgtagggcgcagcgtagtgagtggttgcgggttgctgaaggtgaaagggaacggggaagtaggaggaggaggaggaggggtttgaataggcgaactgcgattgcgaagctgaggaggaagacggtggtgtcgtcatggatcgcaacgatcactgtgcaatgggagaggaagggaggatttgggaatcaaaggcttaaggcagtgtttggatttgatagg

SEQ ID NO: 1821 - DNA, 1227 bp, Glycine max
ctcaactatttgtccatcatcatcctgcagcagatagctcatagctccatgcaaaaccccaacctctcccttcgttaacgttgccgcgtgcttgccactgtccaggccaaatccagcagcctccacgccaattagcctaacatctttgtcatcaacaaattcattgaaaagtcccatggcgtttgaacctccaccaacacatgcaatcaggacatctggtttccctccccacttctccaaagcttgctttctggtctccttgccaatcacagcatgaaactctcttaccatcattggatatggatgcggcccagcaacagaccccaaaatataatgagttgtctccacattagttacccagtcccttatagcctctgatgtcgcatccttcagtgtagcagtcccagaatggacgggtctcacctcagcaccaagaagacgcattctgaaaacattgagagcctgcctttccatatcctgtgcgcccatataaataatgcattctaaaccaaatcgagcacatacagtagcagtggcaactccatgctgacccgctccagtttcagcaataatgcgttttttgcccaacctcttagcaagcaaagcttgagcaacagcattgttaattttgtgagccccggtgtgattgagatcttccctcttcagataaatgtgaggcccttcaccattaggcctcttgtaatgctccgtcaacctttcagcaaaataaagaggactctcccgtccaacataatcttttagaatcccagctagttctttctgaaactcttcatcagcagagagggaataaaaagcagcctcaagctcagtgagagcatgcatcagagtctcagggacatacttccctccaaacttgccaaacctcccaaacgaatcgggtctctgaagcagaaccgacccattatccattttgctatgttcctccaatggcacaacagagtaagggtctttggtgagagagcaagacacagaagaagaagaagaagaagcagaagaagaagaaggggttctcaaagatgcaaactttgacatgtttgagagcaaatgggaaaatgggtggtgtggttctctaggaatgggaagcacccttgaggagttgatacctgtaaatgggattgaagcagccatgtgttgagaggtctttactttttcttttttcctttttatttttgattccaatgggatttgatttgaagctgcgctgcg

SEQ ID NO: 1822 - DNA, 1555 bp, Glycine max
aagaatacaaacttgctccaccttttattctgaacaaaattggcaaaaaaaaattttttttttttttttttcgggtagggactccatatatacatgcttggtaaatatttacatatatgttagttgcttagtcagaacataattggatacataaaatatgtctccattatattgtcatatgaacttcgcattgctcacttcactagaggccagagggaaagtgaccattcaatgaaataccaactgcaagccatttgaatattcagaatcggcagaccccgggtgcttctgttttgctcattgcaagtacttcttcatattttgaagcatgtacaaagccccataactctacttccttcacttcaaagtcttgagaatttgcaaggcaaggattcccatacgtttccgagactgaacttgaaccattcaatagatcaccatccaaataaagcgcaaaatgacctcctccaccaattgctatgtagtcagtgttgcacagtgtgaaaaagcggtttactcctgttggacgatatataacaggctgaccagagatatttgtgaaaacaaatgtcttgtttgttccctggtattttttcttgctggatgatctgagaggtgcttcaactaagctgccaaatactgctccttttttatctccaacaaccagcaaactcaatccaggccaaagcatgcttctccggtaaagagtggaaagtgatataccatgcctccaagtgctgtacaacaacagccatttccttccgtgaataagaggcggaagagaaacatagagaacgttccgtatactatctgaaaggagaactgaaggttcagaaatttctggaagatcaaccaaaggcacagtcacaggttcaattctcctcatctcaacaccaccagaaaccttagaaccatgcccatcatccaatttcatttcaacattatccctgcgatcctgatggcgaaatccaccaattctgcgaatagccttaccaattgattgcttgcttctagaaatcaaactcttcctcccaccattttccttcagcgatgatgagtctggtaaagggttgtgatcaggtgcagcagatttattatcatcactctgcacgcgtgagtttgcattatctccagtgtcagaggaagacaataaggaatagaggaacgcagtgaaggacgaagtatcaggcccatcaactaaaccacggttaccctcttcatcatttgtctctgatccacctacttgtccggaaggaggtgtaggtgttggtgctggtgggtgttgtttggaggttttgggattggaagtgtcggaatcggagatggggttgagaaggacagaaacaaggtgggtggctttgttgcgcaaagattgtctttttcccatttctacttatggaactccaaacctgctaacttcagaaacatgggatttttttgtccttgtttctatggcacatttgaggacaagataacttcagtggtggtgttctttgtggatgtgtcgcagctttcagattcctgagcaccccggggggggggcctacgtagctga

SEQ ID NO: 1823 - DNA, 945 bp, Glycine max
catcatctgctttaagaatacaaatgtatatataaatttgctccaccttttattctgaacttttttggcaaaaaaaaagaaactatttatatatgtgtaggtactccaatatatacaggcttggtaaatatttacatatatgttagttgcttagtcagaacataattggatacataaaatctctccattatattgttgtcatatgaacttcactagaggccagaggaaaagtgaccattcaatgaaatgccaactgcaagccatttgattcacacatcaggtaaatattcagaatcggcagatcccaggtgcttctgttttgctcattgcaagtacttcctcatattttgaagcatatacaaagccccataactctacttccttcacttcaaagtcttgagaatttgcaaggcatggattcccatacgtttccgagactgaacttgaaccattcaatagatcaccatccaaataaagcgcaaaatgacctcctccaccaattgctatgtagtcagtgttgcaaagtgtgaaaaagcggtttactcctgttggacgatatataacaggatgaccagagatatttgtgaaaacaaacgtattgtttgttccctggtattttttcttgctggatgatctgagaggtgcttcaactaaacagccaaatactgctcctctcgtgccgccgaccaccctgacgggaatatctagcaatgagaactaatccaagattggaaaaagtagtgccaatccatgatatagcatgggcattaccatgatgaggttgtacaattttccagcttaaacttgtttaactagtaaacaaacaagctgggtcaacatagagacaccataaaaccactgcatgctactgttaattacagcatcaaaactactactatttacataatattcaagcaccatttagcatttgaccttcctttttat

SEQ ID NO: 1824 - DNA, 1402 bp, Glycine max
caatcctcatccaatcacttccttttctgtcttcaacagtatcttcccacattaaataccaactgtgtagtatagtactacttcaatgttaactatgttcttctttttttgttctcatctccacaccatgtcctaatctttctgcaccatcgttctccatttttggctttacaaaaccactgtgtctgattaagggttctttaatatttccaatatttcttgtagtgaaaaagttgttagctaaaagaagaccaagtttttggtgttgtagaaggaagagaagaattaacatgaaaattcagtgtgacgtgtgtgagagagctccagcaacagtgatttgttgcgcggatgaggctgctttgtgtgccaaatgtgacgttgaagttcatgctgcaaacaagcttgcaagcaagcaccaaagacttcttcttcaatgtctatcaagcaagcttcccacatgtgacatttgccaagacaagccagcattcatattttgtgttgaagacagagcactcttctgtcaggattgtgatgaaccaattcattcagccggaagcctttccgcgaaccaccagcgcttccttgctactggtatccgagtggcctcgagttctaattgcaccaaagacaatgaaaaaagtcactcggagcctcctaataggagtgcacaacaagtttctgcgaaaattcctcctcagcaagtgcctagcttcacatcctcttgggctgttgatgacttattggaactaacaggctttgaatcacctgagaaaaaggaatctctgcagtttggagagctggaatggcttacagatgtgggtattttcggcgaacaatttgctcaggaagccttggctgcagctgaagtacctcagcttcccgaaactcataacagtagcagtgttgcttcatacaaaacctccaaatcctacatgtcccacaaaaagcctaggattgaagtcctaaatgatgatgatgatgatgagtattttactgtgcccgatctcggctaagtacgtggcttgccatatgggatggtgcatgcatgattggaaaagattaattatgggaaaataattgttttttttaagctctattagtaaattgtcaaaaaagaatattattttcccaaaaaaactattccattcagacatgttgatatgttgtatattcaattattatgagaacgataattttcacaagttgtgtggagttgattaagtattgtacttaaggtgtttttttgctggatagcatagaatccatgcctttggggaataaattttccttgtccttatgcttcatacactaggggggattctcccacggtcacatcttccccaatccccctcgaatttgagacggttaattccattttgtttgcaaaaaaaaaaaaaaaaaa

SEQ ID NO: 1825 - DNA, 1495 bp, Glycine max
gtactttgttgatgcttccacagccacacacaagtttgacaagttaaccccactaatccgtgttgtttttctattttccttacagaaactgatatgcaacatccaaatccttatctttgcatccccaccagctcttaatcctcatccagacacttccttttctgtgttcaacagtttcttcccacattaaataccaactgtgtattgtactacaaatgttaactatgttcttcttctttttttgttctcatctccacaccatgtcctaatctttctacaccacatcgttcttcatttttggctttacaaaactaccgtgtctggtaaagggttcgttaacatttccagtgaaaaaagttgttagctaaaagaagaccaagtttttagtgttgtagaaggaagagaagagttaacatgaaaattcagtgtgatgtgtgtgagagagctccggcaacagtgatttgttgtgcggatgaggcagctttgtgtgccaaatgtgacgttgaagttcatgctgcaaacaagcttgcaagcaagcaccaaaggcttcttcttcaatgtctatcaagcaagcttccaagatgtgacatttgccaagacaagccagcattcatattttgtgttgaagacagagcactcttctgtcaggattgtgatgaaccaattcattcagccggaagcctttctgcgaaccaccagcgcttccttgctactggtatccgagtggcatcgagttctaattgcaccaaggacaatgaaaaaagtcacttggagcctcctactaggaatgcacaacaagtttctgcgaaaattcctcctcagcaagtgcctagcttcacttcctcttgggctgttgatgacttattggaactaacagcctttgaatcacctgagaaaaaggaatctctgcagtttggagagctggaatggcttacagatgtgggtatttttggtgaacaatttgctcaggaagccttggctgcagctgaagtacctcagcttccagtaactcataacagtagcagtgttgcttcatacagaacttccaaatcctacatgtcccacaaaaagcctaggattgaagtcctaaatgatgatgatgatgagtattttactgtgcctgatcttggctaagtgtgtggcttgccatatgggatggtgcatgcatgattggaaaagattaattatgggaaaataatttgttttttctttttttaaaagctatttagtaaattgtcgaaaaagattattgttttctcaaaaaaactattccattcagacatgttgatatgttgtatattcaattattcatacttcactaagaacaacaattttcacaagttgtgtggagttgataagtattgtacttgaggtgttttttttgctggatagcatagaatctatgcctttggggaataaattatccttgtccttatgcttcaaatttgctgggggaaaaaaaaaaaaaaaaaaaaaaaaaaaaaaaaaaaaaaaa

SEQ ID NO: 1826 - DNA, 1580 bp, Glycine max
ccccactcttccttattctgatacgtaggatctttcaccctttcaccaattgcaccctcctccagtcacttccttttccatggcccaaacactttctccctccatttattacctaccactgtcactatgaatgctctcttttgtttttcaccttctttttttttttttgtgtgttcatcttcaacttcatcctaaccttttacacatcatattttcggcttagaacaaccaaaagcaagttcacattgtcttgtcttttcgggtagtggctgtagaggaaacactcctgttttgtgcgcatattgatattggaatagtctttctctgaaccccatttttgcaaaaaggaagaaagagaaagagagagagagagagagagaagagatatacactgccaagaagaagaacatgaaaattcagtgcgatgtgtgtgagaaagccccggcaaccgtgatttgctgcgcagatgaggcagctttgtgtgccaaatgtgacgttgaagttcatgctgcaaacaagcttgcaagcaagcaccagaggcttctccttcaatctttatctaacaagcttcccagatgtgacatatgtcaagataagccagctttcatattttgtgttgaggacagagcactcttctgtaaagactgtgatgaacctattcatttagccagtagcctttctgcaaaccaccagcgcttccttgctactggtatccgggtggctttgggttctaattgcaccaaaggcaatgaaaaaggtcacgtggaaccatctaaaccaaaagcacaagaagttcctgcgaaaattccttctcagcaagtgcctagcttcacatcctcttgggcagttgatgacttgttggaattaacagactttgaatcaccagacaaagttcagaagcaatcccttgagtttggagaacttgaatggctagcagatgtaggcctttttggtgaacagtttcctcatgaagctttagcggcggctgaagttcctcagcttccaatgactagcagtgttggctcacacaaagcccccaaatccttgttgtcttacaaaaagcctaggattgaagtcctagatgaagatgatgatgagcacttcaccgtaccagatctcggataaagcacatggtcatgtaaacaattgcctgaatcagtaggcagtaggttgacgagttgtatatgcatactaggtgcagatgttaatgaactcttcaatgtgcctggtctagctgaagctcaggaccatgaggactattgcatgaatctgtagattgatgagctgtatatgcatacttctcttaggacagtaagtaatgaagtatgttaactagcttgtggagttgataaatatctcattttaggagctatgaatggtttgatttttagaatatagcataaattaaaccttaggggattaaattttccttgctctttgtgatcatcactgtttacatcctataggtgctcacaccacacaacaatccacgtgaacttgaatggttaattatgtatgcttgtgttgaagatcattctggcctaatagctacgataaggcacgcgccactacttgtagtt

SEQ ID NO: 1827 - DNA, 1194 bp, Glycine max
  misc_feature (4)..(4): n is a, c, g, or t
cttnaagtagacaataaaacttggaattcaacatttacaaatttgatgtataaaatctatatcgagcagcagaaaccaaacttgtaattacgacatagctgtgttgacgaagattttactatacaagctatttacatgaaaacagtgggggaatgaagccaaaatataccctacacaaaactgcacattagttcttctatcttcaggttgacttaatcctgtccaagttatacactttaagaatacaatgaacatcctcaagaaaaggaacaagcagggaaaccaagatctgcattttctcctttagggtttcacagttttcatctttttccttgaggagatccatgaaagttttactatctggcactagttttttagccactctgaaagcggctgacgaaatccatccatgccatggtgacaaggttacatcataacattcttgaactatttgctccatatcctttttaggatcgttttctagtgattgtaacaatgctgaggagaaatccagggacctagtgagccaaagaaaggctttactacaactagacctcttccttgatttgcctttgctagcttctgatttcaatatttcaaccaaatttgaattcattgagggattcaattcatgcatcacttccaacctcttaatattctgggaaacgtcttgtctcaaaacggccatcgttggtcctatcttatcaagaacttgtagaaccaagtgacatagagacaggaaaggcttggtggggatgtgagcaatcatgacatgatttccttcaggtttgactataaccagcatagacaactcttcaattgcagatttaatctctgatctcttctccatatctctgctcctcttcatttcccttattgttaccttccctcactctccctcttccacttctcttatatacaaacatatatgttatgttatgtatatagcttccaataccatccactgggattttataaatacctctagctagcttgaaaccttgaacttccaactgtaattaattgtttcaattatatattatacttgctcccagatagagatagatagaaagagaaatttacaaaattttgatcaagtggttcaaccaaggagtgaatcttgctttgcccaccgtgccaattatttaattgttcttcacatctggtaaaacagctagtttggcctcaactctt

SEQ ID NO: 1828 - DNA, 1485 bp, Glycine max
  misc_feature (56)..(56): n is a, c, g, or t
  misc_feature (200)..(200): n is a, c, g, or t
  misc_feature (261)..(261): n is a, c, g, or t
ccgtggttttaggggcataaggtcgttccaaaccatcccagggcaaacatcaaagntcccattccaatcaaagaaaccggcccataatttcaatgaaagagggaagcgggatttcccagtccatgaaacttgttgcagtaagggtttagcttctaagggatcagaaatgtggccagctagaattccaacgagcacccctncacatcaaaataaagtggatagagttcctgatgtcccactagatagatatttcccatcaantgctgtgtgctaaacatagaatgggagccaatagagaaacgtatatgcgaccaattgggcaaaaaacagacacagagcaaaaggagcaaccccaggaattttccatgcctctatgaacccaactgcttctttctcctcaactggagtctcttgccttaacagaggctctgccgcttcttctccgcttttaataggacaactgaattcatcttcctctcttgctcctacagactcgggtgtgaccggcaatataaggaaaaccaccaaaccaacgaaagcagtcattagtcctggcaccacaaaggaccaaccccatccatagctcaacatggcagaagcaatcaaagaaccggcaatgttcccaattgaagtgtgagcattccaaattcccatgatcaaccctctcttgctcttcccaaaccagttacccacaacagcaactacggacggccatccagtggattgaaacaacccagcaatcatttgaactattaaataatagtagaagttgtggatgtttccccagtaccctaccccaaacagtgaagtaaacaagccagttcctatcatccccaccgttagaaagatcctcaaattacacctatcaccaaaatgtccagaaaagtacattccaaaagcatacactgcaagaaaagcaacatccaattgaccaagaagggatgtcccatctgatccattaaagggcgcccaaccatctccaaggttggaagaaagtctctttgatccatttgactcagtgaaattggttggcctaaatggaaagaaggtcaagcctgtagctgctgattggggatcaaggacactctttacaatacttgtggtttttctagtggcatggtaactagcataagcaaaaaatgtcacaatcagaacgatggcttggtgggttttgaaggagagaggacctccatttaagtactgtagcaatcgagtcccaatgagcttgccacaacttctctgagccaacacttctggtgtcgaacccatctacgtatgtattataacagctgcaacaaagaggaagaacttgagcttccccttatatagaatataacccacaagcaaagtggagctaagtaatggcttatgctctgcttgttttgtctttctttttttcaaaatctgggtttgaactttgaaagagtttcaccaccgttgcgttgaagagtttgcgtgcgtgcgtgtttgatgacagttgcttac

SEQ ID NO: 1829 - DNA, 1774 bp, Glycine max
caggctttcccctttaggtttcgcgcttttatttgtgtggaaatttgggggggaaaccaatttcccccgggaacaattttggccatggtttcgccaaagttgaaattaaccctcccttaagggaaccaaagctggggttcccccgcggtgcggggcgctttagaactagggattccccacggctgctggatcttttttttttttttttttcaaactcactagataagcttcattcttgacctccaaacaatgtggtcaatttccaaaattcaaaggctacaaggaattcttgaatagcttgtgtgtagggatgatactatgctagaattggtaatttggtaattgggtatatcacacaatgtacaaacagacaacatctcaatctgctcactaatattatgaaggataaaagttgaagatgccctctccatataaacactgttgggcatgcttctctttaatttaatgaagtgaagctgtgaatgagaatttataggcactcctacactacccatacagcaacataacattactgtgaccctttaggtttattcttatacattgaatgaacagtcttgtgctctattataccttgactcttcaatctttgtggccacctcagacactactagcctggtcaaaagcagccctgcaattaaagctgctgccatcaacattgtgaaaacagcactccagctctttgcagatatgtaacctgttagtaaaggtccaactgcagcccctatagaaccggttccgtcaatgattgctgtgacagttgcaagagctcgtgaattacccttcaatgatttatgtgttcccaggtcagctgaaactgcagtagttataagagcataaggtccgttcacaaacatgccagtgacaaacatcaatgctccatttacaatcaaagaaacgtgcccataacttcgatagaagaagagagcggggattgcacagtacatgaaacttgctgcagtaatggctctagcctctaagtgatcagaaatgtggccagctagaattccaccgagcacccctccaacatcaaataaagtggatagagttcctgatgtcccactagatagatatttcccatcaattgctgtgtggctaacatagaatgggagccaatagagaaacgtatatgcgaccaatttggcaaaaaacagacacagagcaaaaggagcaaccccaggaattttccatgcctctatgaacccaactgcttctttctcctcaactggagtctcttgccttaacagaggctctgccgcttcttctccgcttttaataggacaactgaattcatcttcctctcttgctcctacagactcgggtgtgaccggcaatataaggaaaaccaccaaaccaacgaaagcagtcattagtcctggcaccacaaaggaccaaccccatccatagctcaacatggcagaagcaatcaaagaaccggcaatgttcccaattgaagtgtgagcattccaaattcccatgatcaaccctctcttgctcttcccaaaccagttacccacaacagcaactacggacggccatccagtggattgaaacaacccagcaatcatttgaactattaaataatagtagaagttgtggatgtttccccagtgggggggggcctacgtagctgacccgaggggggccccggtcccaattcgcctaaaaggggagcgaatacaatcccctggcccggcgtttaacaacgtcggactggaaaaaccttggggtacccaattaatccccttgaaaaatc

SEQ ID NO: 1830 - DNA, 2494 bp, Glycine max
  misc_feature (1944)..(1944): n is a, c, g, or t
ggctaatccctgttgttcaatttatatcagaattagtattacaaccttgttcaatatttggacacctagcaaattaaatgaaactacatcaaaacttagtaaaagaaaacaaaatattcctcgagagaagaatgcatcatcagagtgcaccaattaactgataagccaattgcctatttacaactagttactttaagaattacgtggaacatcacaacattatgcacaggtataccattcatagttcccaaaaagaataaaggaactgtgattcttcttaggcacccttgtttgtccttgtcccccaccatcattgcttgagtataataatgtaaccaatggactttggatcatggccattgatatgaatccactaccgacacaaacttcttgaacaagctccattttgttgcataattgagaggagaatcaggtaacagtactaaaacctgtgaaagtggatcacaccttgaaagccactcttgccaattagctactgcttctttatgaacacacaggctaagataatattaaggagactctttatgcctcacagagcctttgcactcggaggcataataatgaatacaataagtccccaatgcagcattagtaaacaacaaggagactcttgattagttaagagtttctagggaaggtggatatgtattatagtacattgtgctaatcttgttgagctaagggaaatgccctggtgaaaaattagagggcaaaactatattggattatattaagctttctatcatcttcaaataaccaagtgcagttgaaatcatcatcattcatcatcatgtcttgctcttatattttctttgaggtttcaaatcaaccacaatcacactgatgttatctttgcttcctttctgaagggcgcggtttgataggtattctgctgctgcttgtgcagcaggatcaattccctctcccctttctgaagagggttgttccaagccatttttcttgtaccagagaattattcgtttccgagcgaggtcacacacctcctcatttgtcataacatcccacagaccatcgctggccagaatgagacactcatcgtcttttgtacggggaacgaacgtaacttctggttctggaataatccatggcttcaaatatctatcgccaatagaccttgacattgcaagaacaccaaatacacgatggccattccattgaatcacctttcctccagctgcctcaattcttgcatattcatcgtctcggttaggtttatggtccactgataatgccatgggttctttgccacgacatagaaccgctcgtgaatcaccacaatttgcaactatgatatgagatgcacaaataacagcaacaacagcagtggagccaacagtttccggggcaacaggttcattattaaattgccctccaacttcagcattgacctttaagaaacaattggtgaaagatttttcccactgatcttgacaaccatccttcatacttccactgatcataacttcctttccaatttctatttcctcagtccaaggccaattggatacgatcacgacaatagtttgcaacctgagagccaccatgaccatcatagactccaaacaaatgggtcatctgctgattaaaacacttgtttattccatcaataacccgatcaccaattagcatgtgaataggaattttcagaaactgaggtacagttgcaactgcatcttccatctcaggtcttcttccacacatagatatgaatccataaagtggggtataatccaattcaaaaacactccgaccaactgttccactcacccctttttcctgaggcaactgatgaagatcaacagcagaagactttgggccagatctaactccagactcttcttcaaggctcactgccacagcaagaggatcagtcataatatcagtgtcgacatttgactcccntaaatcaacagcctcggcaacaatattgacagcacagatgctcttctctacatctgtggaacacggtgtcccaacatctgaagtagcatcaaaacagaatgactcctctccacacacactactgttctcactgactaccgaaagagaacacgagctatcaacaaactggtcaccttcaaacgacaacgaatcctcctcaatttccatggttaactcttcatcaccagcaaccaaagtgcttctattttgtgatatcatatccaacataggactctctccttccctatcttgaattggtggtatgacttccgcaataccaacttcatcctccaaattgccactatcatgacaatcatctgaacctactcttaatggcactgcaaccgcaaaggacatctcctccatcgaaatccctatctaggtaggacaaaaagttaccctcccacccctcaactatcacaaaacctgtcatacttcaactaaatttgcacctgcttttctgattgaatatgaccttagaatgtgaaagggtggccggacgcgtgggcgc

SEQ ID NO: 1831 - DNA, 897 bp, Glycine max
tttttttttttttttttgagcaactcaaagagacatgaaaatggccatgatcttattttattttatttttattttttccatgttgaaccttcaaaactataacgatcaaatattagtttattacagaaagagcaaatgaatatagcccttagttgatgacaaaaaaaagtatccgctaggtgctatatatgttagtacatgccatggaaagatcttccatgtgtggcattctaaaaaattttccgccttacttggtaattgccaagttaactgatcagcagcttcaataacaagatgaatggaacttcacacactgactgaatccaattatgaagctatgtccggagtttgtggcagtctgtatgaagtcaaaaggtgattcaattcaatgggattagcttttattccatcttgttatggaaattaaaacagtaggagagatggtccagctgtgtcatatttaatcagcaaagcaagtcagcttttataggatgaccagaagaaccaacgttagtagaagcccactgattccacgattaatgcacacaagttcaatccatcgtactttggtccctagtgaaacgaagatacaaacgacatgagtgaagaacgcaaacgacaaagccgtccaaaacgacacgactccggcgaaggtgagtccagttcgcggcggcgatcggagaattactaacaagttatcaagactcgaatatcgagatatgagaatcgagaaaagacaattgcaatcgccaatagctcgaagcgcgtgtttaatgtttacgacgaattgacttgtgaaatatacattattaaattaaatattaatcaataagatattttagtaacataatgcttctttgttttgtgcttcagtaaccacaaaatctccgtgccgga

SEQ ID NO: 1832 - DNA, 1531 bp, Glycine max
gagagagagagaacttgtctcgtttttttttttttttttttggcacaacagtagattttatttcaagctcaatcgttcagaattcttgggaaagatggcagaaatatcaaatatactgataaacaattaataaccgacatgtattcatgagcatctggaaaggtagaagggtgagaaagaagagcgagccaggatcaatgataattcaaatttgacccatctgtaaatcatggtggaggtgtccgccgcctccggacacggcgaggtctactatcagagcctccatctgaagattcatttgcatcatcagatccagattgtccgtcataattttccccccaaagtgtagtagtgggtctccttattcgcatttggagtgtcgtacccctggacatggaagcaggctgaagaatgaggaaaaacacagccagcagaccaccatcatctatgggatcatcaaccccaaatgaagtttgaagtgtgctaaggaggtcgccaagatccctctggcgctccaacctcctccagctacgctgacgctctgggtctactgcagatgggcgctcaagaggatgttcaagtcttgcatgcttcctaagatctgggtatgtgccactgaagttgcaagtctcacaagaacagctccttgatttttcattcatgaaatgacgagccgcctccactactttccactcttttatttgccctctgcatagagggcatactaactttgattttgcatcattctcacaggataaggtttgcattgtaaccaaatcctcacttctgtcttccggcacatcaattctactttggacagtcccctcatttctgtcttccggcacatcaattctacttcggacagtcccctcatttctgtcttctggcacatcaattctactttcaaccgtgtctgaaatttgactttctacttgaggaatggttgatgaggtgtctgcaaatgacttgcagaactgatcaagacaatttgagtggcgataactagtgttgcacatgtaagggcggcatcccttctcatgggatgaacatatgaggagaactgcattgtgagggtgttccatgcacactggacacctagcttcttcccattctttaacattctcctctgactctttaagagcagatcttccaacacgactagagctacttgggtaaggtgatgctctgctactttcatgtgacaaagatctatcccttctctcctttggcatttcgaattgtcaatattttaaaaatataacaagtctccaccacccagaggaacaattgaagcaactagaaacctcttcgatcttcttccaactcaaatccggaagaaaaaatatggaagtactgaaaaccctgaaaattctgagaccgttgagttactctagttctgctttttaatttcttcaactgagacaaacgcgagggagatctcgatcgatcttcctctatttttcttgcgtttttccctttttcttcttcttcttcttcttctgggcgggcgcgggcctacgtagctgaagct

SEQ ID NO: 1833 - DNA, 588 bp, Glycine max
tgatcaagacagtttgagtggcgataactagtgttgcacatgtaagggcggcatcccttctcgtgggatgaacatatgaggagaactgcattgtgagggtgttccatgcacactggacacctagcttcttcccattctttaacattttcctctgactctttaagagaagatcttccaacacgactagagctgctagggtaaggtgaggctctgctactttcatgtgacaaagacctatcccttctctcctttggcattttgaattgtcaatattttaaaaatacacaaagtctccaccacccagaggaacaatccaagcaactaggaacctctttgatcttcttccaactcaaatccggaaaaaaaaaaatggaagtgctgaaaccctgaaacgtctgataccgttgagttagtctcgttctgctcttgaatttcttcaactgagacaaacgcaagggagatcttgatctatcttcctctttttttctttgcgttttccccttttcttcctcctacttcttcttcttctccctctcctccttcacttccacccccttctgtcgtcttctcgcagccgtcaccgcgtgg

SEQ ID NO: 1834 - DNA, 1630 bp, Glycine max
tttgttttttaataaatacatcatggtcaaacactgtatgatcgatctccactgttttgtttaccctctctacaaatgagtccctaccagtatcaacactcttcccaaagctaatgtttcttcaaagcatagaccaccctaattcgtatcctcaaatgtcagttatcactgtccacgtatatctcagctttattacaaccaaatatagtgtacaatccatctcgtgtattcacaaggttctgtgctgctttcaatcatgtttacagccactgcccaagaaaatctcgcgttacccgatcccgtttttttttcgcttttttatcatttaaacttggggaggggaatcaggctctgaaccacaaagggaagcatatgacattgtatcttccttagatatagccacaaagttcagaggtgcagtagacaatcttctcatttccttaaaatatccattctgacggccagagtaggaccgcggtgtcagtagttcagatgtcgttccaccacttaaagagttacggcgaggtgtaggaggcatagatccatttccatttgcacggtaactattagtctttctaaagctgttattttttcttggactaggtttagaaccatacatggcttccttttgatttaggagtagatcttgcatcttcttaaggtccctatgtcgtctcttatcttcctctttctgttgtctggccagtttataatcgtccaaaattgacaccaaacgtaccccatcatatagaaaatgagtcttcttttcatcttcccaggctagtgttttgtttataagattgtcaaccatagctggaattttgcttatagttattctagcgcgttctgcacgtttaagattaatgtgagcgcctcgcccagcacagtatctgttgtcatcttgattatattcgtcaagccaattctcctcttcacacgcagcaaaccacttatcaatcctatctgttacttcttttctgctcaaagcttcatcttttgcctttattatctgtgcttcaatgttggctaatagctcagaaggatccaccagtccagaatctattaatgcactagctttctcggctgtagtacttgtatctggttcagtatgagtcaatttacatatttcctctaactctgacctcttcttaaaaacaagttctttcattctgcttgcttttagtttggcaagcctgtccacttctgccgaagccttctctatcatttctgttgaaagaacacctcgttcagtgatttctgattctgaggttccaacaatagaagtaatcttcataaaacagtttctctcttcttttgatgagtccatcaaattccaaagttcaaatagtttagatacaacatccttcagcttctgaattctagttttcctttctatttttaacttgagaatggcctgctctagaccttccaatgtgctattgctaatattagttgattgttccacctgagtcccatgcaaacttggatgtacatcacccacagtctggcccggacccgtcccaagcacactacaaagagaatgcacctcattcacacattgcaagaccttttgaaggcgatcagacttttctttttgaagtgttcggagatgcgtttgatacgaaagaat

SEQ ID NO: 1835 - DNA, 1123 bp, Glycine max
ttttttttacacggttgttcaagagatatcatcagttacatgatttttatttcataactactgtgacattataatacatcacatgcaaaccaaaactgaatgctaataaccaccaagtttacatgacgaaggcagtatctctaacatcaagttacaagaaaacatgaatgaaaaatagaatcaatggctctgaatagcaacattgataaattgaacacgtgaaatcacagacatgacactcatctccatatttcttcctgaaagaaagatgctaaatagcatatggaacaaattttctccaatggctaaggaacaagttacctgacttagataactgcggcagtcgaaacctgtgtttttctttataaaaatgagtaaatctgtgtattactttgttttattcccaatctggaacatggaaaatcaaaattggttctgaaacagctctgcccatgccaaacactccaatagatagcccaaaagcagggcagaagttctacatttccataaacatcagatagcgtgcttactttcccccgtcctgaatagatccaaattacatttatcattaccccttgttctgtgcaagctttcattaccaaggtaacccttcattgccaccaagcttcacaataatatttcttgacaacatccatcatgcctgcattaaacatgattcttcttttgtaggaattggccaaaatggtgatagttcaacaacttttcctataataatcagcgttggtgacaccagctgagcagatgtaattttctcgtgaaggtcctttagttcagcaaacaccgtgcgctgatgaagtgtggttcctcgctcaatggctgcagctggggtctgaggggacagaccatgatgcattagcttctgtgcaagtgaagggaaggtcgccaagcccatgtaaaccaccaaggtagaatccggatcagcagcattttccgatacaaagagaggatcggatcctcctttccttgaatgccctgtgaggaatctcacactatttgcaatgccacggtgagttaatggaattccaagctctcggacgcgtggggatgcagcagttatacctggaataactttcacttggataccttgctgttgcaaaaaatc

SEQ ID NO: 1836 - DNA, 1394 bp, Glycine max
gggggggggggcacctaaaaggagttaaattatgacccaggtctagtcatctcagggatgaaagcaagaacacacagtatgcatttcctaaaaggacaccaatggtcgacctgttaacagacttgctcttgtcaagagaagtcattccccaattcaaatttacaggcttggaaattcaaataaaactttatcacgcaataataagtaatatgtaatttacaatgggaaaaggttgctaaagtagtgggaatatcagttgttacaaattaactaggaagttggaacaaaacttcagtcatgaaattaatttccgcatgatagtgctaatggacattgcgcgttatcagtccctcaaatatagtatagaggtccttgttttcaggcccaaataactcattagctttctgtagtgtttcctctttagtttgtttatgagaattcagttccttaacatttgccaaaaatgcaccaaactgctcataagataaacgactcctaacttggcgaaaaaactcttttccatccacgcgtgttcgtccagtttgtgaccctactgaagacctatcatcaaacattcctcttgaggttgaaaaggaaattgcatggcgccttggagacacaggcttagatgatgttcttgttggggataccaatgcagacatactaggaggggaaccagggggagtaattcgaggggtgctagtttgagatgctaagaggagattatgtgatgctcgagattttgagccatcagactcacgatcctctgctaaataatttcccatatcagaagtgtttattcgcatcgaagatgttctagaagaaagcgttgaagatgcatcatcatctccaaattgcgatgtggaagtgaaacttgcttgactgtgtaacttagctgcagtgtccgccgttccttcagaagtatcttcatcctcgcgaagtgatttcataagcgtctttctgaaagtctccaacttggagacatctctggtgagctttctcactgtgttggaaagcgaagcgttctccttcagcaaattctccttgtcttggtcggctcgggctagcttatcggcggcttcggagagagcggcgtcgatggactccacctgagactggagctcggcgatgagccggttcctatcggcgagttcggcgcgtagagcggacgactctgattggagcgcgtcgacacgtgtcgacagcgcaacggaggtgatcttgcgggccacatcgagctgctcgtaaggatcggacggtagaacatttagcaactcctccggaagatccaccttcgaaccactcgattcactcaccagcatcttcctcttctgctcctgtttcttttttcttttttttttttttaattttggttatattatatagtacaattc

SEQ ID NO: 1837 - DNA, 1278 bp, Glycine max
  misc_feature (28)..(28): n is a, c, g, or t
  misc_feature (31)..(31): n is a, c, g, or t
  misc_feature (63)..(63): n is a, c, g, or t
agggagcgccggtatcgactccctatanggncgatgggtacggggcccccctcggaggtgggncgggatgataagcttttttttttttttttgtcacactagaagcaaatttttgtatattccaatgagtaaccaacatctgttgcttaatcaatatgatttgagaataacaatctactgttgagacatactcaacttcagaggttaatagggaaattgttgtttacttcttggatatccaagataccaacgattttttatgaaatcaataggcacccctagtgctcttcctttctactttatcaccaacaaaataaacatcacaatatcctacaagatcaaacttagaccttttcttaaaccaaagaccatgattagtagttccaacaagatatcttaagatccctttaactgcaataacatgagaaatttttggataagactgaaatcttgcacaaaggcaaacggcaaacacaatatctggtctaccagaagttaaatatgataaggaatcaatcatacctctatactccttttatgaaatatcataacctttctcatccttgtcaacgattgtggaacgatgcataggggttgccataggtttggcttcatccattctgaacctttttagaaggggcttcatatatttctcttgatggataaaaatcccatgaactttctgaatgatttgaagtcctaggagaaactttagctcacctttcatactcgtttcgaacccactcttcattaactcagaaaactcctttcacatcctttttgaggttgcaccaaagattatgtcatcaacatagatatgaataataagaaggtttcctttttgagcctttctgaatagtgtggtgtccgttattcctctggtgaatccatttgaaactagaaatgaacttagcctttcataccaagctattagagcttgtttcaaaccataaaaggctttgataagcttgtacacatgacaaggtctttatcttcaaatcctagtggttgcttcacatacacctcttcatttatgaatccatttagaaaggcattcttaacatccattaggtacagtttgatgtgtttgtgtgcagtataagctaagagtattctaatggcttcaagtattgttactggtgcaaaggtttattcatagtcaattacttgttgattgtattcttaaacaaccagtctagccttgttttaaaccacttctcctgcttcattgagcttgtggagcgcgattttgtgcgacggaggggggcgcgcgcgatt

SEQ ID NO: 1838 - DNA, 1485 bp, Glycine max
gcacgaggttatctgtttcccgccatatatccaataagctttaaccatgtctgcctttgttggaaagtacgcagatgagcttatcaagaatgccaagtacatagccacacctgggaagggcatcttggcagcagatgagagcactggcaccattgggaagcgcctatcgagcattaacgttgagaacattgaggccaaccgccaagctcttcgcgagcttctcttcaccgctccagatgccctccaatacctctctggtgtcatcctctttgaggaaactctttaccagaaaacctccgatgggaagccttttgttgaggtccttcaagagaacaatgtcatcccaggcatcaaagtggacaagggtgttgttgagttggctggcacaaatggtgaaaccaccactcagggattcgactctctcggagctcggtgccaacagtactacaaggctggtgcacgcttcgccaagtggcgtgcagtcctcaaaattggcccaactgagccctctgagctttccatccagcaaaatgcacagggcttggcacgctatgccatcatttgccaggagaatggccttgtgcccattgttgagcctgagattttgactgatggggctcatgacatcgccaaatgtgctgctgttactgaaactgtgcttgcagctgtttacaaggcactcaatgagcagcatgtccttcttgaaggaactcttctcaagcccaacatggttactcccggctctgatagcccaaaggtaccaccagaggtgattgctgagtacacagttcaagcactccgcaggactgtcccagctgcggtgccaggggttgtgtttctgtctggtgggcaaagtgaagaagaagctaccctcaacctgaatgcaatgaacaagttggaggtgttgaagccatggactctctcattctcattcgggcgagcactgcaacaaagcacactcaagacatggggtggaaagaaggagaatgtcgccaaagctcaagaggcatttctggcaagatgcaaggccaattctgatgctactctgggaaagtatgttggtggaagcggaagtggcttgacttctgagagtttgtatgtcaagaactacaagtattaaacttctaaagagtgtgtttgtttctccttttgaaaacgtcaatccatgcttttggttcagtcacgttgaggtctataagaaagtatgacaatggagaaacaagcatactctaaatggacttggggactgattcggggtggtctggcatatgtatgatacagcctaagaagcatttgcttctgattaacatgcttatttttgggttacatatttttacaaatatcagttattatgttataggagccaattttaatgtcaaatggtgatggtgcgtaccactaaaaaataattgttggagtgaggctggtatatattgtcagaaacagttatattatactttataaaatgtgcaattacttaacaca

SEQ ID NO: 1839 - DNA, 1072 bp, Glycine max
tttggggccaagaatgaaatgcactactttgtagaaacatgagagttttataatttagatgttgtggaataaagctaaacagaacatgctcaattgaatttgtctgttcaaaagttcgtgtttcgatttactactcctcacttcgtgaagactacgaattttgactgcaaaatttgcaagaaccacagcctattaaaatacatcattatccctgtgatggaaacatgaaatccgagtatgagttcgtccattactatctcttcacaatcttccggtaccactcgagcatttttcaagtacaccgcagacgcttgaatgctccacacactaacctttaagcacgccttgaggttgttgcatcttttcctttctcggcttgcttaaggctcttgctgaattctcgggcactcgtggattgaagaggaggtggatcaaaatgaatggagcgaacagacatcttggcgatctcggcgacggcagcgtctctgacctcagcgacatcgctcgtcaaatcctcataggcagcctcgaaggcctcttgccagaaccgcggcaacctcacactgcgactgttggtgtacacatcccacatgtgcctcacaaccttctccctctcctccatttcaagaacatctaggtcgtcgtggatgggagtgtcgatgtcgttggaaagggaattgagagtgccggaccagcggagcgagacggtaccggtgaacatggaccagaacgccagaagcaagatggccgctaacgcccagaatttgtacctgccttttccaaacagactcgaatccaagttttccttctttgtaaccgcggtcgtcgtcggaagcccgtcctcatccttcatttcgatctaattgatgatgggtcgattattccggtaacgcgatgatgatggtttggttcactgcggcttcaacttcatcggttcaggaattgagtccgatctggtaatatagcgaatcggtgttttgtttgtgtttctgatgaaagggagagggaaagggacagtgatattactcagatacactgcgatgcgggggggcggcctacgtagctgactcga

SEQ ID NO: 1840 - DNA, 1108 bp, Glycine max
agtacaagaatttgcgtaccgctgttttcaaactaataaccttacaaacatatctcttacagttgaagggctattaattccacactttccaaataaattctttgaagtgaacagaagagttcaaagagctaaacactacaaatatacgcatttactttagcaaatgagtgaacgataaacattatcaccctaacgagtaaacataggaaacttcaaacttaactacagtttagtggagaagaataatataatatcatgtatgtatgcgacaaactaggcaagaaatgtttattcatcatatcagcaccataatccatcgttcaaaccttggacgtaattctgaacgagtaatccaggaaaagataaaaaaaagaacaaaatcagcagctccatcaaaagcttcacttttttatcactcatctactctattgtgtgggaatggaaccaccagcagccttgatttgttgctgcagactgaataagtactgtagagcgttcttcagtagagagtactcctgttgcaactgtgatagacatctcatacatccttcctggttcttagcctcacaaaaagctctgaaggtggcgcacacatttttaactctagcagcaccaatactggcactgcttcccttgtactgatgagcatgagcatctatttgtttgaaatcagctggcacttgttctagacaacgtgccatgttttttaggagattctcagaatcatcaaagaacatagtgataacctcaatcacaaaatctggagtgctctcatcttgcagtttctgaagctggctgaactgatcatccaaaaaaccctgttgaaacatagcggcttggtgttcgcgcagcttcctctgcagctgagcgacatccatggtcattttctatgatgtcagatcgatcttgacttgaaattgaaaattaaaaggagtttctttctgttcttctgtgtgtctcagaatggaaattcctgaatcccgatccttaatttgaccactcagtattactacaccttctgcttcttgtcgttacaaatgcgtctctcccctcccccctcaaaactcggacaccccttccggacgcgtgggtcgaccggttattccgg

SEQ ID NO: 1841 - DNA, 1378 bp, Glycine max
  misc_feature (87)..(87): n is a, c, g, or t
  misc_feature (91)..(91): n is a, c, g, or t
  misc_feature (258)..(258): n is a, c, g, or t
  misc_feature (265)..(265): n is a, c, g, or t
agttaacttccctgcgatatgtttaatagcccttattcttcgacattgtgagccgacatccacatggtgacgacgaagtagagtccntgcnttcactatagtagtgaccaatggacccggtcctttgtcgagtcttgcttccaccacatatgcttgagcaggcccatcaattcgtgctttaagatccatcatatcagcctgaagtagtagagcttcttctaggttatccagtccaattttttcagttgctgaaacctngacaacntgaacatccccacccatctcctccagaagcaagccctctgaagcaagctgcattttaactttttcagaatttgcacctggtttatcacatttgttaattgcaactacaattggtacattagctgcttttgcatgggacatggcttcaagtgtttgaggcatcacaccatcatctgcagcaacaaccagcaccactatatctgtaactgctgcacctcttgcccgcattgcactaaatgcagcatgaccaggagtatcaagaaatgtgattgatgctcctgacggcatgaccaccacaaaagcacctatatgttgagttatgccaccggcctccttggctgccactgatgtttgacgcaaggcgtcaagaagagaagttttgccatgatcaacatgacccatcactgttacaactgcaggacgtggtaaaatttctgcaccttcagctgaatgtagcctcttcacattgatgccagcctccattgtgacaagttcagcaatatccatgctgagaagctcaaactctgattgaaccttttcgccaacattagtgaggatatcctgcaaagaagatactgatcttccagtgcgctttgccagttcaacaagggtcatgccttcaaatatttctattgttttatcaggattagatttggtagctggaacattacgacaggcataaggagctccaacaggtagctggtttctaccaccccttttcacatataccctctttgcggtctgcaaacctaatggtccatcacttctcgcccagacttgtgaactagcatggaagcaccgtattccacattctttagtctccctgccaaaaccagccactcccagagatgataggttgatgaaatccggcacacatcttgctgatgcacaaacagattgcacagtaaagatggatgcaaaatttgatcctgccacatgtctaaatggtgttgtcgacaaagctctagtaaaattcatatatattctcttctttccaagctcgcgccacgccattcataagcatgtagctgtaatagacgcgattccggtgatttacaaaaccataagggcgtgaggaacgacaacggcctttaccaccgccataggcttatca

SEQ ID NO: 1842 - DNA, 2596 bp, Glycine max
  misc_feature (1778)..(1778): n is a, c, g, or t
  misc_feature (1820)..(1820): n is a, c, g, or t
  misc_feature (1824)..(1824): n is a, c, g, or t
  misc_feature (2564)..(2564): n is a, c, g, or t
aaaaaaaaaaattaaatatctcaattttaaaataaaaagattaaaattacaaatcaaacaaaataggaagatgataattacatttaagcttaatttaaaaacccggactattgttcctgcaaagcacatgtcaaaaaatactagtataactactaggcgtttcaaatagtgcctcaaaatttaatcacactttcttttagtacaacaaaaattacttactctaataatccacccatacgaggttattttgttggctcagtgtaattgttctcacaaaaaatgtgtgttgaaggatcatcaactaacttgatcagcactcaattcgaacagcaccactttcggacttaatgaactggggcttccttatgacctgttccaagcactgaataacgtctccaatctggaaatcataccaattgctgattactactccacactcagttccctttttcacagtatccacatcctgtttctcccgcttaagagatgtacaaagtccttcaaacactacttccccacttctaagaagcctcagggttgctgatcttgtcacagaaccatcgataacacgacaacccgctatcttaacatcaggccccttggacttgctccctttgatttcaaagatattcagcacttctgcttgcccagcaacatgggtttcagaagtcccaggggccctctctattatcaaattgcctatgtcttccaagaggtggtaaattacacggtgcagaactatcttgataccggcacgagctgcttcctgactaagagcagtaggtggactttttacattgaatccaactatgcaagcaccacaagcttgtgctaagtctagatcagattgagaaataggcccagcgccaacatggacaacatttacgaaaacctgagcactatttaaagttttcaatgcatcagtgacggcttgaacagttccctgaacatctgcttttactattactggcatttcaacccaccgcggaacctccttggaatcatctgaagtagttggcttgtcctgtatcatcttattcctaagcctgttctcctcatatttcctttgcctaccagaactaagcattctagctcgctcctcagaatgaacaacaataacatcatcaccggccattggcagccctcgaagcccttcaatctcaacaggcatagcaggtgttgctcgtcgagttaacttccctgccatatctttaatagcccttattcttccccattgtgagcctacaaccacatgctgaccacaaactagagtccctgccttcactatagtagttaccaatggaccccgtcctttgtcgagtcttgcttccaccacatatgcttgagcaggcccatcaattcgtgctttaagatccatcatatcagcctgaagtagtaaagcttcttctaggttatccagtccaattttttcagttgctgaaacctcgacaacctgaacatccccacccatctcctccagaagcaagccctctgaagcaagctgcattttaactttttcagaatttgcacctggtttatcacatttgttaattgcaactacaattggtacattagctgcttttgcatggggcggggcggcctgcgttgctggcatcacaccatcatctgcagcaacaaccagcaccactatatctgtaactgctgcacctcttgcccgcattgcactaaatgcagcatgcccaggagtatcaagaaatgtgattgatgctcctgatggcatggccaccacaaaagctcctatatgttgagttatgccnccggcttccttggctgccactgatgtttgtcgctaggagacntatntaaaagttttgccatgatcaacatgacccatcactgttacaactgcagaacgtggtaaaatttctgcacctccagctgaatgtagcctcttcacattgatgccagcctccattgtgacaagttcagcaatatccatgctcagaagctcaaactttgattgaaacttttcgccaacattagtgaggatatcctgcaaagaagatgctgatcttccggtgcgctttgccagttcaacaagggtcatgccttcaaatatttctattgttttatcaggattagatttggtagctggaacattacgacaggcataaggagctccaacaggtagctggtttctaccaccccttttcacatataccctctttggggtctgcaaacctaatggtccatcacttcttgcccagacttgcgaactagcatggaagcaccgtatttcacattctttagtctccctgccacaaccagccactccctgagatgattggttggtgaaatccggcacacatcttgctgatgcacaaacagattgcacagtaaagattgatgcaaaatttgatcctgctgcatacctaaatggtgttgttgtcaacgctctagtaaaattcatatatattctcttctttccaagctcacgccacgccattcataagcatgtaactgtagatagacgcgtttgccggaatcgtcacaagcccgtgcccagggaaggtgacggaagtagttacaaactgtaatagacncgattgcagtgattaaaaaaagcatggatgcg

SEQ ID NO: 1843 - DNA, 1161 bp, Glycine max
  misc_feature (884)..(884): n is a, c, g, or t
  misc_feature (930)..(930): n is a, c, g, or t
  misc_feature (969)..(969): n is a, c, g, or t
  misc_feature (991)..(991): n is a, c, g, or t
  misc_feature (1004)..(1004): n is a, c, g, or t
  misc_feature (1008)..(1008): n is a, c, g, or t
  misc_feature (1020)..(1020): n is a, c, g, or t
  misc_feature (1050)..(1050): n is a, c, g, or t
  misc_feature (1076)..(1077): n is a, c, g, or t
  misc_feature (1079)..(1079): n is a, c, g, or t
  misc_feature (1081)..(1081): n is a, c, g, or t
  misc_feature (1100)..(1101): n is a, c, g, or t
  misc_feature (1124)..(1124): n is a, c, g, or t
  misc_feature (1146)..(1146): n is a, c, g, or t
tttttttttgaaattttatgacattttatccatttaggaatctccttattattattattatttatggtctcattattattttcataattacaataaaagttttttttaatttaaggttttttttttttttttttgggtgtaacttataattctaatacactgactattgttcttgcaaagcacatgtcaaaaaataactactaggcgtttcaaatagtgctcaaaatttaattacactttctttcagtgcaacaaaatatacttactctaacaatccacccatacgaggttattttgtcggctcagtgtaatgttataaaaaatgtgcgttgaagaatcatcaactaacttgatcagcactcgattcgaacagcaccactctctgacttaatgaacttgggcttccttatgacctgttccaagcactgaataacgtctccaatctggaaatcacaccaattattgattactactccacactcagttccctttttcacagaatccacatcctgtttctcccgcttaagcgatgtacaaagtccttcaaacacaacttccccactcctaagaagcctcagggttgctgatcttgtcacagaaccatcgataacacgacaacccgctatcttaacatcaggccccttggacttgctccctttgatttcaaagatattcagcacttctgcttgcccagcaacatgggtttcagaagtcccaggggccctctctattatcaaattgcctatgtcttccaagaggtggtaaattacacggtgcagaactatcttgataccggcacgagctgcttcctgactaagagcagtaggtggactttttacattgaatccggctatgcaagcaccaccagcttgtgctaagtctanatcaaattgagaaataggcccagcgccaacatggacaacatttacnaaaacctgagcactatttaaagttttcaatgcatcagtnacggcttgaacagttccctgancatctgcttttantatnactggcatttcnacccactgcggaacctccttggaatcatantgaagtagttggcttgtcctgtatcnncntnctccagagcctgttactcnncaagtttacctttgcatagccancggggtatgcattactagcgtnaatacttctagaatc

SEQ ID NO: 1844 - DNA, 851 bp, Glycine max
ttttttttttttttttataccaaagtcaattttcttttctgtttttttttttttctttttcatccataaaatttttgatgaaaagtttatattacaagagtactcagtacaagtggcagtctattctactctacgcgtatatgtatgtatgtagctatacatatacgtagtatcatacaaactctaacgactaactaactagtgattaattacttatatgcaaagaaaggcgcttcaataaccgcgtcttctctcattcactcgagcgagtcgactcagtgactcactaccagcactgatccgtttcccagttccgacgcgtgtaaccggagaacaccgccgccgtcgacaacggccgttgtcgccggaataggctccgatcgtagttagcgcgcttgtcgggatcagaaagagtagagtacgcggcgtggatcttcatgaattcgtcagcggacgaatttttccggtcgatggccgccacgtcggggtggcagactctggctagtcgccggtacgcggccttgatttcttggttagaggcgccagcggggatgccgaggatatcgtaaagcgaagagcaagaggagttcagataggaaggtctcggttgctccgtccaggaagagcgagcttcagcggtggcagtggcggtggcgaaggcgactattggccgggatttgacgcggcacgacggcgaagccatggcgttgccggagaagttaacggcgggaagagacgctggaaaggacacggaagaaatcatgtttgctgcttgctatattgggagcttgtgatacgttgtcgtgggagaaattgggaaggaatggcggacgcgtgggcggacgcgtgga

SEQ ID NO: 1845 - DNA, 825 bp, Glycine max
cctagggcctttttttttttttttttcaccaaagtcaattttcttctgtttttttccttttccttttgttcatccataaaattttgatgataagtgggagagagtaagtacaagtggcagtctattctactctacgcgtatatgtatgtttgtagctatacatatacgtagtataatacaaactctaacgactaactaattagtgattaattttactatatgcaaggaaaggcgcttcaacaaccgcgtcttttcccattcactcgagcgagtcgactcagtgactcactaccaacactgatccgtttcccagttccgacgcgtataaccggagaacaccgccgccgtcgacaacggccgttgtcgccggaagagcctctgatcgtagttggcgcgcttgtcgggatccgagagagtagagtacgcagcgtggatcttcatgaactcatcggcggatgagtttttccggtcaatcgccgccacgtcggggtggaagactctggccagtcgccggtacgccgccttgatttcttggttagaggcgccggcggggatgccgagaacctcgtagagcgaagagcaagaggagttcagatacgaaggtctcggttgctccgtccaggaagagcgagcttccgcggtggcggtggcggtggcgaaggcaactataggcctggatttgacgcggcacgacggagaagccacggcgttgccggagaagttaacggcgggaagagacgctggaaaggacacggaagaaatcatgttcgctacttgctatattgcgatccgttgggatatggaaattgggaatggaatgttagt

SEQ ID NO: 1846 - DNA, 2171 bp, Glycine max
  misc_feature (55)..(55): n is a, c, g, or t
  misc_feature (75)..(75): n is a, c, g, or t
gggagtgaaatatattggaaatattgaattaataaaagtgatttggtaggtaaanaataagaggtatgagaccgngcccatattaaaactcaaaattccacaaacttcttctcaaccgaacacacatgcacactatattttcacacaattctcttcctttcttctcttttcagtataactaataagaaaatttatagataacttaaaagcaaaaaatgcaggaaaaaaatttaaaagtgtaaagtactttttgaagaataaagcttgatccctatgttttatttttacaccaagtattattaattttgttttatttatacctttttatatcttcttcgaacactacaacatgtgtgtgctttaacaacactagctacaaaatatccttaaattgttggtgattgacacacttggcacatagcttctaaaggaaatttccttggcacagtgatcccttttccttcagtcatatcaatttcttccttactagttcgtttccactcaaaacattgaataaataaagcactactataaattttattttacatatataagttcttcaaaaacattataagatgtttatgcttttaacagcactagaagttataaatatccttaactgtcagtgattggcacacttggcacatagcttctaagggatatttttttgacacagtaagtccctttccttcagtcatatcaatttcttttttagtagtccttttccactcaaaacattggattaataaggccagagttaagctcagtgtgcgttgagccaagttagctccagggcaagccctcctccctaacccaaatggaagtaacttgtttgcttcactttcattctcaaacctctcaggcttaaagtgtgttgggtcactccacaacttgggatctctatgaatggcccaagcattcaccaacaaaattgtgttttgtgggatattatattctcctatggtgcaatcttctgaagacaaatggggtaccaacattggagcagcaggatgcaaacgaagtgtctcataaacaatgctttgaaggtaagggagttttggaatgtcaggctcatctactagacgatcttgtcctatatgagtgtctaattcattttttgccttctttaatatttctggatggtttaataaattagacattgcccattctaaagttactgctgatgtatctgttcctgcaagtagcattaccagtgcaagtcctttgatgatttgatcggtgtaatattcaggttgtgattgctgttgagcaagaagatgatctatcatagtattggcacgatgctttccattacgatgctgatcaatgagtccttgtaaaaacgcatcggttctcttactaatcctctttagtctcttctccaaaccatcaaaatcaaaccacctaagcaaagccaagaagtccccagggttattagcccctcctaacgtcaccaactctttaatgatctctctaaattgccttgcttcctgtacatcactcacatcacagtcttcaccatagtacctcttccctgacaccatcctcattatagtgttaaatgtcatctccgaaaacctggatttaagttctactttggtgaagccattgcgcgagtcccgagcaagcttttgcacgagcctcatgatctcgtccctccgattttccaagaaggagtttatccggtgggtggagagaacctcgagcgccatgatgcggcggaggttgcgccagtggtcgccgtagggggaaacggcgacggtggtgttgttgtaccctatatacttgccggtgaggaagtgagggcggttggccaagacgatgtcgttcttggtgaagcattcttgcaccgcgagcggcgacgaaacgacgacgacaaaacgggagccgaaccagagggagaaaatagggccatatttttgtgataaggcatggaacgtgcggtggaggggttgcttgagttggtggaggtttccgattatagggaaagaaaatggtcccggaggaaggtttttgaaccttcttgtttggatcaagaagtttatggagaggaaaaggatgaaggcaaataggaggaagtaaaaaggagtcatgcttgaagcttgagagtgaagtgttgtgtttggttgattgtggggggggcctacgtagctactcgaggggggcccggt

SEQ ID NO: 1847 - DNA, 1160 bp, Glycine max
gaaaaaaataaggattttccactcctctttactaaccaacaaacggaagagaagagatacaaaaaaaaagtacactcccacaaggctaattaacatcactatttcacaagtacaaacaatgaattaattaacacataccacactatttccacatcaagaaaaccataaaatcatcacacaactacatcaacctataaatgaaatgagaaacaggtataaaactaaacaaaaggaatgaaactgagaattatcatccaagaacacccttaatcacatcaactagctgaaggcttgcagttagctgaggaaagtgccctttggtgtctacaacctccaatgtaactttccctttaattttgctctccatgtaaaccgctgctttgtgtggaacaacaatgtcactggaagtctgaatgatggtgcatggagtttcaactttctcaagtatatctctgtagtcactatagaacacagtcttggccaaggaagctggaacttcagctctcatttttttcaagcactctctgaatttgttaacggatggctcatcatttggatccactactagtaaggagaaggcagaaacccagttctcataattgaactctatgttcttcaataactgctcaatatctgagctagtaaagcccccctcatagtcatctgtattaatatacctgggagaagcaccaaggagaataagcctcttaaagagttcaggcctcttgatggaggctaagcaaccaatcatgccagacatggaatgaccaacaaaggtgacagctttgaggtccatctgatccataagagtgatcaactcatctgcaaaagcttccaaggaggtatacttcaaagggtcatagaggcttggatccttcacagctccagaaaagggccaatcaaacagcacaacccggtagttttcagcaaaggagggagtgatcttctcccagatggactggtctgttccatagccatgagcaaagactatggtttcactgcctgatccttggcttctcacattcaaagcagtagaaagccactttttctgtaacatctttgggttgttgttaaagtttggttccataagaaggaagattaaaggcagagaagtagtgaaagagagctagctatctaactataccagaatggacgcgtgg

SEQ ID NO: 1848 - DNA, 929 bp, Glycine max
  misc_feature (919)..(920): n is a, c, g, or t
  misc_feature (923)..(927): n is a, c, g, or t
tcgacccaggcttgacccacgcgttcgagagacacgaattgcagtcccaggcgcagttacctgttctgttattgagtcaaagggtgtgagtgagtgtgagcaagatgggttctttggcaaagaagggactcaacaattacgtcaaacagctccagcaacaccctttgagaaccaaggtaatcactgcaggggtactatcagcgatcagcgatgttgtgtctcagaaacttactgggatacagaaacttcaactcaaacgtcttcttttcaaagtgattttcggagctgcttatcttggaccctttggacacttttttcatttaatactggataaaattttcaaaggaaagagagattcaaaaactgtggccaagaaggttctgattgaacagttgacatctaatccttggaacaatttgcttttcatgatttactacggattagttgttgaaggacaaccttgggtgaatgtgaaagctaaagttaagaaggattatctatcagtgcagtatacatcatggacggtctggcctgttgtggggtggataaatcacaaattcatgcctcttcatttccgtgttgttttccaaagcttagtagcatttttctggggagtattcttgaaccttcgagcacgatctatggcattgattaaagcctgaagcaaagaagattactaggacactgttactctttccagagtagtttgcatcagttaaaacaaatcaaaagaagatctgctgttcaaattaatgtgttggcaagatcttttagtttgtctgactatttagacatgatcaatttgtagtgctaggaatatggaagtttgtgaatgttaatttgagtatggatgaacgatgatcaaattgattttgaatgaaattaattttgaagcaatgtgattcaaaaaaaaaaaaannccnnnnnag

SEQ ID NO: 1849 - DNA, 680 bp, Glycine max
tataaatccatggcagataggtctattcgttctgcatagcatgcaccaactagctcagcatatgtgttgcagttgggccctgaagcaataggttccatgcgtgccattatttgctcacatgcatccaaaaccgctgctccatacatatcagaacttgcagaagctgctgttgctgaagcattaggaaccttgtcggtactagtatctgatatgaagacagaactaagagggatgttgaaagctgaagcagcaatttgggcaactttggtatgcaaaccttgccccatttctacacccccatgggtaactaaaacagttccatccgtatagacttgaaccagagcacctgcctggttcataagctttgttgtaaaggatataccaaacttattaggaatcatagcaatgccacgcttcctccagcggttgtgactattgaattcgtcaacttctttgcgtgcctttgcaaagtcacaggataacttaagttcattccacagtggggctagtgtgctgtactgaactatctggccataatgcagaatggatccttctccttgaaaattaatttcccttatcttttctggactcatcttgagttccacagcaatcctttgaatccagttttcagcaatgagcaatccttgaggaccaccaggtcctcggttagcagtgttatt

SEQ ID NO: 1850 - DNA, 1265 bp, Glycine max
  misc_feature (1264)..(1265): n is a, c, g, or t
ttttttcttgtgatagagccagtaagttgacattgcttttattgtcaattgctacatcataagttggagattctctaggtttttggacgacttatacattgtgagcattcccttgttgataataagagttgtgttactcatacaataattcataaacattattttctgtgtctatttctcttcatcacaaaatcttgtacaaactgctgtactgtcaagtggaaaccactcacaagaaaatgaacaagtgaataagcagagtatcaaacactaagtttgggatggaaatctgagttaacaaacgacgataacaattcatctaaacaagccattcgaattctctcaggagttgctggactgtcaagtggaaaccactcattgtgccccatttcagatcgtgctgctatgatggcatccttgatggcaaacaacacagcagatgctaggaaaaatggaggctcaccaacagctttagatgaatggatggccttaacatttggatgacccttcaggagtgagacattaaatttgaagggaacatcattcacagaaggaattttataagctccaggtccacatgtgtaaaggcacccagacgggatccatttatgtgcttcatctccccatttaagttcttctaaagctacccaacccaaaccttggataaaagctccctcgatctgtccaacatctatcgctggattcagcgaataacctagatccaaaaatatgtttgccactctggtgtgaaaatctccagtcagagtgtcaatttcaacctcagcaaacgcagccccataagtgaaatatctaaaaggttttcctttgcctatcgtccaatcaaaaccaatatcaggtgtaatataaaatccatgggcagaaaggtctattcgctctgcatagcatgcaccaactagctcagcaaatgagttgaagttatgctttgaagcaataggttccatgcgttccattatttgctcacatgcatccaaaaccgctgctccatacatatcagaacttgcagaagctgctgttggagaagcattaggaaccttgtcagtactagtatctgatataaagacagaactaagagggatatggaaagctgaagcagcaatttgggcaactttggtatgcaaaccttgccccatttcgacacccccatgggtaactaaaacagttccatctgtatagacttgaaccagagcacctgcctgctgctattgagaaaatatgaaagtacaccattattactatctaatcnn

SEQ ID NO: 1851 - DNA, 1676 bp, Glycine max
ccaccattaaatttacccttgggtatgtataaagtcgtatcaaaattatcatacagacttcctccccaattaaaaaccatagatactttaaatagtgtgtgcctaaactttcttaaactgagtaattctattcagatctttcccttaccacattcacctgatttaaatcactcttaatttcaaacggcaagtataacaacatactgataggatagaaagatatatagtgtttaagtttcttaggtattacaactttatttccatcgccacaaaaatagctagttgatgtaattggtagcaaacttgtgtgtttctgttctctatcaactttagtccttgttgaccttttctagacaacttggatgaaggtcatagtcacagacatcacaagagaatgtccagaatttgccttgctttttacaggaatcacatacatatgctttggccatatccaatttcagtacatgttcatgcttcacatcctcaacctgcggaggcaaagcctctccttcctttctcagagctgcttcaaggtctcttatccgcgattcggtgaatgggaaagcttctgcaccatatgaggagaccattaactttccattcacactaattactttgccatctggtccaatgagaaccaatgcaggaatgccctttacatcgaagattcttcgaaggtcatgccttgtcctgtcctcatatgggacagcaagccatggcatagtacttttgttgacattgaattcctcaaggtccctatctgttgagattaaaacaatctcaaagcagtcgccttttgccgccttgagattgttgtatgcatctgtaagttggacagtgaaagcgcagcaaggaggagaccaataggcaccaaaatacaggcctatggttttaccagctagttcagatagtggcacctttctatcatctccagagatgagaaatttgcctccttcgtgtcccaataattcttccaagtctgcttcctcgcgcttccttatatctatgcctttcaattcctcatgcctcttccttgtgaaaggaaatgcatcagcaccataatcctcaatgcatccaatcaagtcttcttcaatggttatgccatctgaacaagatggaacgaatgatgggattcgatcaacttggtatctgtcaatcagtcttctgtgcaaatttaaatcaaatggaacagctagccatggcatattcttgaagtgttctttaaatccatcctcatcacggtcaaaggagatgaagataatctctagatttattcgcctctttctcagtgtttcataaagttcaacaagacggggaacgaaagctctgcaaggtctgcaccagtttgcagtgaaaaataggcagataattttcccattgcattctgacacgggtaccttcccttcacaagataaaaggaactcaacaccttcagctgcaaatatcttcagaatatcacggttgtcagtatgtgtggcttcaaaatttaaccctgccatcggaactgaataaaacagatgtgctctctttttataagcttccttgagaccttgcagctacagctgaagaataacaccagcggatagagagagagagaagaggaagaggttgagtctccaagacgaaaggagatgatgaagcggggggggggggcctacgtagctgataaatctcgt

SEQ ID NO: 1852 - DNA, 1370 bp, Glycine max
caccagattgactaaaagctgcgaatcaacgtggaccactcaccttcttgtctttcccctttcatctcttcaattcaatactcacacacaaagttccctcctctccaaacatggcggcaattttctcttcttcactcttcgcttcctcgcctcttcccaaaccactttcttcctcctattctcgaatccataccgctccacaacttttcagggctcgatcttctctccttcaggataacgagaaaaaagtgatcgtgcatgattccttcccctccaaaacctctcctcttcacaccgctgataaatcaactggtggaaactcaattaacacctctgcgttcgagaaacggattatcaaggtcgaacaatcggtcaatatctttcttacggattccgtgataaagatacttgatactctgtaccatgatagacactatgcaaggttttttgtgcttgaaactattgcgagggttccttactttgcctttatgtcagttctccacatgtatgagagttttggttggtggaggcgggcggactatctgaaagtgcattttgctgagagctggaatgaaatgcatcatttgctcatcatggaagaactaggggggaatgcttggtggtttgaccgctttctcgctcaacatattgcaatattttattatattatgacagttttaatgtatgcagtaagcccaagaatggcatatcacttttcggaatgtgtagagagtcatgcatttgaaacttatgacaaatttatcaaggtccaaggagatgaattgaaaaaaatgccagctcctgaggttgctgtgaattattatacaggagatgacttgtatttatttgatgaatttcaaacttccagagttcctaattcaagaagacctaagatagagaatctgtacgatgtatttgtaaatatcagagatgacgaagctgaacattgtaagacaatgaaggcttgtcaaacccatgggaacctccggtcacctcattcatatgcagaggatgatgacagctcagtctgtgctcttgaagcagattgtgaaggaatagtagactgtataaagaaatctgttgcttctaatccagctaaggtgaagtaagataagtggcccaatacatagtacattcatttaataagattgtaggcagggaataatgattggaggtagtaaatagttgaaatttggaaaaggttgctctccggtgtaattgtctttatagaaagtaaaggtgtattcacccttaaattttctaagatcaagatcatgaaatatcttatagtgacaaccttctgttaggttaaatgttcataccacactctgaggattatcaaagaaaataatattttggagattgtctat

SEQ ID NO: 1853 - DNA, 2845 bp, Glycine max
  misc_feature (2832)..(2832): n is a, c, g, or t
ccacgcgtccgcattcccagaggacaatttacaatgtctactctttctggtattgcagctttttctttctttgttgcttgtatctaataatagtaatatgtgaagccagcttcggaccaagttatgaatactccaaatactgtaataacagtaatggaaactacacagccaatagcatctaccaaaccaacctcaataccctcttatccaccctcacttcccacacagaaatcgactatggtttctacaatttctcgcatggccaaaactcagacaaagtatacgcaatagggttatgcagaggagatgttaagccagacgaatgtcgcagctgcctcaacaattctagagtgagtctcacacggttgtgtccaaagcagttagaggcaatcaattgggaagagaagtgcatgttgcgctactccaaccgcgcaatttttcacaccatggatgcttctttttcgtatcatatgaacaacgtaaacaatgcaacggatgcggaagagttcaataaagtgttgggtgagttacttagaaatctgagtgacaaagctgcatcaggtgactctcgtcgcaagtatgccgcggatactgcagtctttgcgaatctccaaaccatatacggtcttgtgcagtgtacgcctgatttgtcaaggcaagactgcggtgactgcttgcattggagtttggcagatttcggaaatgttttcaaaaacaaagttggtgctgtagtgcttagaccaagttgtaatgttagatatgaaatctaccccttctacgatgaacctacaccatcagcatcggtaccactttccctaaaagaaaagggcaactcactgcgaactacaatcgccatagttgtgcctaccgttctcgttgttgttgctttgctcattttcattagcatatattttaggaggaggaaattagcaaggaaaaatcttctcgctgatgaagacgatgatgaaattgaattggctgaatcattgcaattcaacttggacacaataaaagttgcaacaaataacttctctgactctaataaactcggagaaggtgggtttggagctgtttaccaggctctctaatggacaagtgattgctgtcaaaaggttgtcaagcgatcctggccaaggtggcgtggaatttaagaatgaagtccttttactggccaagcttcagcaccgaaatttagttaggctacttggttttagtttggaagggaaagaaaagctacttgtttatgaatatgttccaaataaaagccttgattacttcatatttgatccaacaaagaaagcacgactggattgggatagacgatacaaaatcattcaaggtattgctcgaggtcttctttatcttcacgaggattcacgattgcgcattatacatcgtgatctcaaagcaagcaatgttctcttagatgaagagatgattcctaaaatatcagattttggtatggcaagactgattgttgcaggtcaaacacaagaaaatacaagtagagttgttggaacctatggatatatggcaccagaatatataatgcatggacaattttcaataaaatcagatgtcttcagttttggtgtactagttcttgagattgtaagtggccaaaaaaaccatggtattcgtcatgggaagaatgtggaagatctactaaactttgcatggagaagctggcaagaggggacagttacaaatattatagatccaatattaaacaatagttcacagaatgaaatgataagatgcacccacattggtttactctgtgttcaagaaaatctagccaacagaccaaccatggctaacgttgcactcatgctaaatcggggtccccccacgctcccgctacgtaggcccccccccctttttatggatagtgcaactacaagccttccaaacatgtcatgggaagttaattcagggacaacacgatcgaatcagtccacaaccaaatcagctcacgactcagtaagtgaggcttcaatttctgagctataccctcgttagattctggtcatagttaggggtgatatatgcatttgtcgtcaatgttattaatacatgttttggaacttgtaatttatttgtgcaaagtatggttacttaaatagaccatagaacttaattgtttcagtcaactaagacagaaacatgaaatataaatgaatggagtattggtcttaaagtgtatggtttggttattatgctatccgtgctgcttggtgttgcttccacagctacaacgaaaagcaccttctatggaaataaatattgcttttaatggcaattaaaatggccataaaatgttttactagcaattatatattggttggcgtggacgtgggtggtggatcttcgtcacactctcagagaagggaagggagtgttgatttcatctctaagcttggtcctaattcgggggtgcagcttcagctggttgcaagtgttccgcaaggtctcaaatctatgctccaagcagatgctcatggaactagtttcctaagactgtaattctgttttttcttttcttgtttttcctccacttaccaaaaaaagatgtttggttggcgtatgcagttttacaatggctagtagaagtaatttggttaaattattcttttagtctgcataaattttatcttttagtttcatcttgatccttgttgttaagaataacttgaaattacacgactttaatgtgtgttatgctttatgttttagtttatatacatatactatttttaaaaaaaaaaaaaaaaaaaaaaaaaaaaaaaaaaaaaaaaaaattaaaaaaaaaaaaaaaaaagatttcctgcnagcccgggggaac

SEQ ID NO: 1854 - DNA, 1356 bp, Glycine max
gcaccagtttcagggcaggctctccgatggacagatgattgcagtcaaaagattgtcaagagaatccagccaaggagatacggaatttaagaatgaagtgcttttagtggccaagcttcagcaccgaaatttagttaggctacttggtttctgcttggaaggaaaagaaaggctactcatctatgaatatgttcccaataatttccttgattatttcatatttggtaggtcttaatgagtgcataattagactgttgctctatatttcacttcaggttcaggacaaagactaaatattcacataccactaaaactcatggctgtatatgcagatccaaccaagaaagcacaattgaattgggaaatgcgatacaaaatcattacaggtgttgcgcgaggccttctctaccttcatgaagattctcatctgcgcattatacatcgtgatctgaaagcaagtaacatactcttaaacgaagagatgaatccaaagatagcagattttggcatggcaagactggttttaatggatcaaactcaagcaaatacaaatagaattgttggaacctatggatatatggcacctgagtatgcaatgcatggacaattttcaatgaaatcagatgtctttagttttggtgtactggttcttgagatcataagcggccataaaaacagtggcattcgtcatggggagaatgtagaggatctactgagcttcgcatggagaaactggagggaggggacagctgtgaaaattgtagatccgtcattaaacaacaattcacgaaatgaaatgttgagatgtatccatatcggtttgctttgtgttcaagaaaatttagctgacagaccaaccatgacgaccattatgctcatgcttaatagctactctctcagtcttccaattccttctaaacctgcattttatgtgagcagtagaactggaagcatttcagccacgcagtcatgggggtatagttcaggggaatcaagatcaagagaattaacaattaaatcagctcaagaagcagaaaatgagtttactgatccataccctcgctagattttgctcatggaattgatattcattcaccatcgatgtcctggagttcatgtaatttgttcatgtaatgtctttttgtttgaataatccaaactatctctttgtttaatcttgagactgaaaaatgtcatatgacctccagctggtcttgaagtgtatactatcatatcactaacgtatttctttagcaatgatgttaaaaatctagtttcccggattccccttgcattgagtctttgtacacacaggatcaaaattcaaaacaaccactcaatctgtttattgcaaac

SEQ ID NO: 1855 - DNA, 2427 bp, Glycine max
tttttgtaaatttcaaatgacaattttatttttgttttgattgactatgtatacgaagatatcaaatgaggatttatatatataaaactaaagcaccttataatcttgaataacatcattaactaatttgagtacatccttatttttcatttcatacagtttgttttttaacacatcagggtcggtctaataaggaaaggtctgggtagcctacacaagattctaggttttaaccatgttaccagtactattgatagtttgatacattcttacttttctatttcattcaatttgttatttaacccattagggttggcttaatgcagtgtctgggtagtctacacaaggttctaggttttaaccttgttaggactattgtacaacaaaaagaaaactataaattcacactcttttttttcactttaaaagaagcttaacaatagtaacgtagagactgttaaccccgagctgaagtcgaactactgcttagacagcattatgatcatcaattcccctcatttggagttcactgatgttgattctggagaaaattttagtttcgggtttaatgccaacactaacttgttttgatttctccttgcacttactgatggccaagaatagaactcgatacagaacaatcatggcaaacatgatagcaagatcaacccacttagagtgacccatttgcacgtgccaagtgtcagctagaacttccgaagaaaatggcaagtcttcaaattcattttttaacagtccttggaaagcataggtgaggaaggaaatgtagtagaaagggaatttccacactggtttgggaagatcatttggaagtcgatagaatccacttgttaaaatcatgactccttcaattcctccacatacgatcacgcccatgacatagtttggaaaaacactcccaacaaccatcataaggctctcaacccaagtcacggtagcaaataaaacagaaataaggaatacaaagttatcaactcctttatgtagtccagaaagataagtaaccacagctcccggaatgattgacatcaaaaaattgtaaggaacagcagagaatatgttgcttatgagaaaagccgtaataccgtagtgcccattcagtctctctcgcttaaacaccttcatttcctcgattaatggagagattccaccaacaagtgtcatgaaagtcacaactgaaacgaaaaaacaaagcagcgatcctctatccataatcgatcgcaaatccgggccgccactgtgataaaagatagagcccacgcttaaagatatgaagataaagacaactaaacgtgcccaataattgtttgtgtcacgatagatttgcagtgaagctcttcttataaggattaggcactgagtaatgaatgcagcgtggattttcttcttcttcccacatgcaccgaagtcggtttcactttttgcgatttcactctgaacatgattgctaaattcagaagatttataagaattgacaaggattttagttgcttcttcagtagtaattccttcatcagcatcctggttgaaatctttgtttatgatccttaagtagtgatcagaaggattatatagaggtgggcaaggaaaaccatttgaagcaaaaaactgatttgcatcagaggcaggaccaaaatatactgtctctccggaagagagaagaaaaaggtcatggaaaagttggaaaacttcactgctaggttgatggacggaagcaacaatagtcctttgaattccatccctttgaattagatttgcaattccactcataacataataggaagctgcactatcaagtccactagttggttcatcaaggaagaggagttttgggtgtgttagaatctcaatgcaaatgctaagtctcctcctttgtcccccactgaggcctttacaattccaccctccaacccttgtgttgatggcatcttgtagacccatttctctcagtgtcatatctgctcgttccttcttctcttctacagacatggtgtttggaaattggagcatagctgagtagtataaagtttccccagcggttaaacatgacagcatagcatcatcttgtgttacatagcctgatgttccataagccagttcttgtttgtggccattgattagaatcttccctgtttgctttatgtttgatgtcaatcttcctgctaaagcatcaagaagtgtggatttgccactgccagaaggaccaattatagccaaaagtctccctggctgggcataacctgtaagcccatgaagaattagttttcggttctttccatttgtaacagtagcttccaaattctcccatgtcagcgtaatgtcattctgttctcccatttcgatgagactaatttgaggggggggggggggcctacgtagctgacttatttataaatgaaattatcg

SEQ ID NO: 1856 - DNA, 1279 bp, Glycine max
ttttttttttttttttttcaatataaatggcatttttcttttttcttttgatagaagcaagtctctagtaggttttttttttttgaaaaaagtttctagtagataacatcatttccttacacaaacattttcaattaaaaaattattaaaatataacttaatgtggaggcaaccgcgactaatgttcaagaccaaaaatgtggagacattctcgggaactcaggaaaacaagtattactttgaactctaaaacaaaacttggtggtgaactgctaagatagatatccaaacagacttgtcaacaaaattgggcaaatttgagatgttaagtgtagcttccaatcgaaaaacctcagttatgcccagaaacactatgatagcttgatcttctttcaaggtccttcattgttattcagagcttgcaataatttcaactgaattaactgtcttccattgtcatcagctaatgatcatcttgttcaaaaactcagcttgctcgggaaaatactccatcaattcatcctttgtcacccagacatgatcctcacattttccaatgttgaatttgtttttagcaataacttgagacttgaagaagaatctcttaaaagatgtggatctagactggtcttctgtaggctgaacaaccgtatgggccattggagcatttccaacaaaatatgtattagaaagatctcctaagactgacttcaatgcagactctgcacacttgcgcatgttgtcctcggattcataaactttctcaggaaaatgccacacaggcttcccgcttggagcaccatatgcaataccatagaggagaaggtatagtcttctatcaagagctctttgtaatgaccttcgatcattgtttttgtcagcttcagtgactcgtggtgctggcacatagtcaatctgataatcacctttcccccttgcatcagatttgtctagaaattcatcaggatatctgcgttgatattgttgtcgccatcgaaacgagaattcttgaaatgcatagactacagggtcaattttgggaatgaccactggcagtctctcaaagagcacagaagcaacaaggttctcagagcttgtgctgaaccctcgctttgtcaagagaggtcgaaccaatgacatcttcatcgttaagcaaagaatggaagcgtatcagcccgcaatatcattccattcttcgggacaatatgagatagctgttgcagcaatggcaactggagaagtgaacaagggttttgggggggggggcctacgtagctga

SEQ ID NO: 1857 - DNA, 1130 bp, Glycine max
  misc_feature (2)..(2): n is a, c, g, or t
  misc_feature (6)..(7): n is a, c, g, or t
  misc_feature (12)..(12): n is a, c, g, or t
  misc_feature (18)..(19): n is a, c, g, or t
tncaanntaacntactgnnaggcaaccggtactactgctcaagaccaaaaaattgggcgacattctcgggaacacagagaaacaagtgttactttgaactctaaaacaagactagttggtgaactggtaagatagatatccaaacataattgtcaataaaattgggcaaatttgggatgttaagtgtaacttcaaattgaaatcttcagttatgcccagaaaaactatgctagcttgatcttctttcaaggtccctcactgtcatttagagctaatttgcaatagtttcaactaaacaactatcctccattgtcatcagctaatgatcatcttgtttaaaaactcagcttgctcgggaaaatactccatcagttcatcctttgtcacccagacatgatcctcacattttccgatgttgaatttgtttttggcaataacttgagacttgaagaagaatctcttaaaagatgtggatctagactggtcttctgtaggctgaacaaccatatgggccattggagcatttccaacaaaatatgtgttagaaagatctcctaagactgatttcaatgcagattctgcacacttgcgcatggtgtcctcagattcataaactttctcaggaaaatgccacacaggcttcccgcttggagcaccatatgcattaccatagaggagaaggtagagtcttctatcaagagctctttgtaatgaccttcgatcattgtttttgtcagcttcagtgactcttggtgctggcacatagtcaatctgataatcacctttacccctagcatcagatttgtctagaaattcatcaggatatctgcgttgatattgttgtcgccatcgaaacgagaattcttgaaatgcataaactacagggtcaattttgggaatgaccactggcagtctctcaaagagcacagaagcaacaaggttctcagagcttgtgctgaaccctcgccttgtcaagagaggtcgaagttgaaccagtgacatcttcatcgttaagcaagggtatcacccggcaatatcattccattcggaacaatatgaggtagctgttgcagcaatgggaactggagaagtgaagaagggttttggaagtaggggagagagctcgagcc

SEQ ID NO: 1858 - DNA, 1667 bp, Glycine max
  misc_feature (20)..(20): n is a, c, g, or t
cgagtcagctacgtaggccncccccccccaaaaaaggcaatgaaaactctagcagcccttaagattttggccacacatctctgatcactcgttgatctatcatccttcatcgaccaaccagtctccaaagttagtgagtgagagagtagcagctagcaatggagatttctgccctagcttcttctgctactccaagaccttctcttacaactccttccacttctccacacactgtagtcaccaccaccttcagcaaacctcaactgagacgctcccacgtagcagtatcacttcctacctcaaccaccatttcactgctcgctctcttcgcccctccaagcgaagccaaagccgctgtcagcatcgccaaagaccagattgtctcatctctcacccaagtggagaaaacgctggatcaggttcaggaagtgggttcgggtgtgctggacacggcacagcgtattgctgaagtgatagggaacgctttgaagcctggcatcgaaacggcgttgccaatagttcagcaggccggagaagaagctttgaaaattgcttcccctgccatctccgaagcttccaagaaggcccaagaagcgctccaaagctccggtgttgatactgaacctgttatctctgctgctaagacagtggcagatgctgcacaacaaacaaccaaggtgattgaagttgccaagccaatagcttcctcaaccgtcaaaaccatatcttcttcagaccctactgtgattgctggaacagcaggagcactatttgttgcttacctcctaattcctcctatctggtctgtcatctcgtctaatcttcgtggttacaaaggagacctaactcctgctcaagcccttgatttgatatccacacaaaactacgttttgattgatattaggtcagagaaagataaggacaaggctggtatccctcgccttccctctaatgctaaaaacaggatggttgccattcctttggaagaactgccaagcaagctcagagggcaggtcaagaatgtgaagaaattggaagctgaaatagtcgctttgaagatttcatatctcaagaaaatcaacaaaggcaccaatgttgtgatcttggattcgtactcggacgtagcaaaaacagttggaagaacactaaccagccttggttttaagaacacatggattgttgctgatggattctctgggaacaaagggtggttgcagagtagactaggaacagattcgtataacttctcgttcgcagaggtgctgtcaccgtcaagggtcatccctgcggctgtgagaagttttggcacaaccagccaatctagcacgaagcttcttcctggggctgaataacttttttcttcactaaactcttgtgcaaatagaaattcactcttgtgcatgctcgagtcatcgaatatatttatttgattatttcatcaatgtctaaatgtttatttccaaccttttacctttgtgggtgtttcgagtggctgcggctacatgctcttccctaagttgcaacgaccgaggagaatgccaaaaggttgtagttgttatatatacttgtattggatgctttggccgaggatgtttaggcgtctgtttggtttaatgttggaagacttaaatgatcattgaataaaaaattctaaattcttacttctc

SEQ ID NO: 1859 - DNA, 1129 bp, Glycine max
  misc_feature (964)..(964): n is a, c, g, or t
  misc_feature (1033)..(1033): n is a, c, g, or t
aatgtttgggactattttcttatactgaaccatgcttcaagagctgtacagtggaaatgaatcctaagcctatgttttgctataaatttaatctgtatcatacaaatatttctaataatcagatacacagcattttccctggcttggccgctctttccaaggattcttgataaaattattgcagcttcaaatgattttaaagtgcagtggtttaatgcttaaaattccaaatacagtgaataaccacagtaccaaaaattagtaataaccacacatacagccaacacaacaataaaaattatgatagcacatgtggttatccaacttattcttggaatcaagtttaaagccaccacattttaaatttttgaaagtacgttattctaccaagaatccccgtccctaaataaaataaaaactatttctataccatctactttaaccacatacggcccataaagaattatttacatttttctaaagaacgaatgatttaaattcttacttcaactacatcgccatctctgagttttgtgttgggcagtactagctgtccattaatcaaaaccagctttccctccaaaccaactctttgagctgcatcagtagcagtgctaccggcctttagcctcaaaatttcaccatgaggccaacatataattaccacttccccaagagaaccatgaagatcataaagctttgcatcatgctttgcttgcatgaaacttacttcagagcgcaattgctcttcccaagagagcattgttctcaaaaggttcaccttgttattgatgccagcttctacagaagttgatgcaaccaagtcaaattttgaccgagatgttatccagtccacttgcctgccctcaaacacagcagatacaacagccccagcttccgcgttttcctgctccgtcctcttgctaacctggatgaatgttgggagtaggcgcccaaattggtnttgcatctcgacacagtgtgtacttctctagacaagtaaaccaatccccatgccctggttcaaaccacnattcatcagacacctttttgtaaagtcgtgcataagcttcccatcgcttaatctggaaagatcttctgtcagctactgcttcagaagctgctagcc

SEQ ID NO: 1860 - DNA, 1162 bp, Glycine max
cccacttccaaccatgattatgcaatttatatcggtagagaagaaaggggaaaaaaataaatggaattcaatatcgcaaattcggcgtaggacttgaataaaaacagaactctagatgaaaagaaacgtcaacattaactataaatcctaatcactaggaagattgattatatcaataaacagacaaactagaattctatatggagagtgctggggggatcctgattcttttgttgccgtgccttatttcttagccttcagtctagctgaagttgcttcagcagcagctttagctagtgttgttggcttgattgcgctcttggggttgagtgccttcccaagtttgaacacagcccaagctgtcccaatcgcatgccctgctgcgtcaaggccttcatttgtaacatgtgctgcttcctctccatatttatgcgaaactaggccggtggtcacaactgatgaagtggacatgacattccttccagctacttctgcagcatccaaaaccttattgaatccatccatggtagcaaggacaatttcccctggaagaaggctaaagaacttctttccagctttggagttgactacagaacttgtgaagaatccagacaccttgacaaccccagagaggacaccagtggcaaccttctcagacatcttggtcaacttcttaacccttttgatgctctccagtgcctgaggactaacctgggagtgtgaaccaggctccaacctcttcttcaagaaatcattcccccacttcaacctgtccacagtcacatccccagcccacagaatccccctaaccacttgccccgaccctgctgcaatccatctcgcgaaactcccactgtaatcctccacgtttggcgccaacgtcgtccagtatgccccagaacgctcctccaccacttccttcctctcttccgatccttgtaactcctccggcgatgtctccgtcgaaactgaaccatccaaaacttcccaacctccaacccccttcagtttctccttcgacagaaagctgtacttgtccagaacctcgtccagttccctcagcaccctctcttgtcccttcgccgccaccgttaaaccgtaattcaacacctccaacccccttcagtttctccttcgacagaaagctgtacttgtccagaac

SEQ ID NO: 1861 - DNA, 818 bp, Glycine max
tgtccacagtcacatcagcagctcacagaatccccctaaccacttgcgccgaccatgctgcaatccatctcgcgaaactcccactgtaatcctccacgtttggcgccaacgtcgtccagtatgccccagaacgctcctccaccacttccttcctctcttccgatccttgtaactcctccgccgatgtctccgtcgaaactgaaacccatccaaaattcttcccaccctccaacccccttcagtttctccttcgacagaaagctgtacttgtccagaacctcgtccagttccctcagcaccctctcttgtcccttcgccgccaccgttaaaccgtaattcaacacctcgaatcccttctcctccccgtgctcctgtgggacctggaccgtgaagaagtagtgcgactcatccagcttcaccgccgacacgtctttcgccaacggccactgaacctgatcgccgacgcatgccagaaccgccaccactttgtcgccttctccgagggtcgatatggtgaggtcgcccgaagcaaggtgcacgctggaatccttttctatcagatgcagaatcgcacccgggaccgtgaccagaacgttttccatggcttcttctgtagtcgtgtttggctcttcccaaatgagattctctgttgtttccactgagggataaatggaagaagaagaagaagatggtgcggggatagagaagggagaattagcgtctgggtttgttgaatcgactcgtgggtagaatgaactttgttgaaaaaacatgcctttgaaatgtgattgattgtgaattgtgaagtgacgcgcccg

SEQ ID NO: 1862 - DNA, 1418 bp, Glycine max
cggtcgtttgccttttttttcttttctttttttttttcttgttggtgtccttgtttcgttatccttaaaattattgaactagaggcactcaaaattactaccaaacatgcgattgtagcaagattgaggcttatgtacccgattcattgaaagaataaaagcaatatctaaagcagtattctttggtgttcattgtttacagactgttagagagcaacaataacatgtgtaaacgtaataaactacgtatatgattccacaatttcgtggttgccacgaataattctgcttttatcacccccaccccgaaaatcaatttgcaacaaaatttagtaatttaaaagcggcagagccgactaatgcaactatcttctgcgctttgattctttccgcatctctgctacatagttctccagatttgatttctcccataagcgtctgagcacaagatcttcctttgttgcttcatctatatttctccatctatcgagaggaatactgagggatctttgtgtcagataagaagcatcttccaaggaataagggtactttttcactttgtatctccaaaaccaacaggcagtccacaacagcagcttgcctaaggtatacggtaatagaacaaagcggacgccaagaagtttccatacagagggcatttcagctccagttatctgcagatcgagttctttgctaaggtcttcttccgttttcttgtccatattcttctgactcttcttcttgtttgtaacccctccactgcgttcaagttccaatgcccttagtttatttttatatgcaggtgtcttcttgaccatggctacagcctgattataccttgttgattgatttagatattgaaaacctgaaagaataagaagaaggccgaccaacacagcacggggatccgtcttgtgaccatagtaagcccgataatagcgtgcagtattataaaacacctcctccggatgtgcaattgcataatcatattgctctcgcgtggcctcatccttcaaaatctcataagcattggcgacttttacaaacagctttcgcgattccggatcagggtttttgtccgggtgatacttcaaggagagtttgtagtaagcttttttgatttcggaagcattggcactttgagtaaccccaagtagatcgtagcaatcatcttcgtcgcagtagattgcgcgcgaaggggagatggtggatagaaagagaaccaacacaaagaatgggatggcggttgcgcgccaccggatcggtaccggcggcggatccatttcgccgaagtcggtgatgaggctttttttcttttccctactttctctctgttgaccaaaactccagacacgaatttgcactcttgccacaaaccccgatctaattcggggcttcttcaattctcccagaatttt

SEQ ID NO: 1863 - DNA, 1642 bp, Glycine max
ttttttttttttttttttgaaaaaggatagtagttttttttattcttgaacagatatttatttaattttagggtacatagggtactactctgtcgttactcgtagtagtttttgtaaaggtatgattcttatttttagacacatgatcatgatagggacctaattaagcgggtctcctactatttttgtgtcttcaattctgcatctctaagcattctactaacccgacaatcaatacctaaaattctgccccatttctccaagtaactctgttccaatatcacataccaataaataaccacttaattcaaagttgaaacagagcagagtagttgtttccttcattttatttcatttctgaaactcaaggacagtgtagaaatggtcaacatggaaggctctgaaacgagggaagcctgcatcaatggctaattgcctgaactgttcttcagtcctgtgcttccctttggctctatagattgtcatcacaaaaatgtcaccttcaagcaaagccctcgttctgtgactctcgtctgagtgctctggcagcactggctcacatgctattagtttgcctccctcagggagtgccttgtgacagctctgcattatgtgcttgcattcttcatcagtccatgttgttagcacccacttcatgaagatagcatctccttggggaataaacttgaacatgtcaccacccacatgggttacaaatgggatttgtggggctttggccacaacttcaggtaggtcaaagttgatcccttctttgatggtggggtgtttttccaagatcatacgaaggcaatctccaccactaccacccacatccacaagcttctccacaccttggaagccatcatagccctccaacatggccctcatgaagggcactgacacccctgacatagccctcaccattaggtcattcatctctggctgcttcagatagtacccatatgctggctctccattggccatctcgaagggctcctttgtagggtccactactgcctcgtgcaccaatggccacgctcgcatcaacgcatcctggtggtgttggagcacgtaatgtgcgtatgacaagccttgttcatcggtgacgagcgttttgccaacctcagtgagggagtagttccgttcgccggcggcgaggtgctcgcggaagacgccgtagctggcaagcatacggaggagccgctggaggttctcggcgtcggcgccgtcggcgccggggaggatgcgggggaggatctcggaggcggagaggggggcgttggcgccaccttgccagagggcgtcggcgacgttgaggcgaacgacggcgtttaacgccatcggtacgcttatcatgttagcgagctccataatggcgagcatcgcttgctttcgctgttccgtgctctcctctttctccatcgtcttcttctagtgctgttcgatttggttttcgagtctggggggggggcctacgtagctggctcgaatttataggaccctgtattgttgtgagtttgcaaagtatggtgattgaaataatttaattagttggatttggaacttataaaaatattaatttataattctgacaactgacaaatagagtttgcaagatatataggtatgacatgctaaaaat

SEQ ID NO: 1864 - DNA, 2010 bp, Glycine max
cggccgcccttttttttttttttttttttttttttttttttttttttttttttttttttttgagaacaagatatttttaaaatgaagaatatatatatacatggcttatatttgtgtttcctatttatgtacaagggacactgattacaatccctaagggccacctgacccaaatgaatgattgatgaatggaaaaatgtccagcttatgaaagccaaaatctaatagaaggcttgcacatgttagtccacctttaagtttcattaagtatgttaaaacttctatgcatgtagtcgatttcacctagcaagataaggttttagttgctatatcaagttgaacgaacccacaagatctatagacttcccatgcttttgaaatataaattccactccggaacacctatctaactcttctagaggtatttacatattttccgctgaaacaaattcaggcatgacatgcttttaatttctgcaagaactttaatgtctccgtataagaagggtctaaacggctcactggtttacaagaatttatatgatctgttgactccaatacaactaattccccaaatccaggatatgctgactcaattggtacaatttcagttcgaaaggcccatccaccataaccttcaactattggagttaccttggtctcacaaaagctgaggacatcaagcaaccctttcttatgaaggtgacgaatatagtcattaagctctatcagtcttgaagatccacttcttagctctcctattgttggagcaggacgaagcacaaagcccattcgccaaggcatatctgcaagtttgctaccaaaatgcgggcagctataaaaaacaattcctattgtatttttcatgagattatcaaatctttcttcctttgctttatgaagaatctgcttcacaaccaggccacccatactgtgagtaacaaaaacaacaggtcgattcccaattcctgcagcaacaagcttctccaatagcatagaactaacttcctgaagaggcaagctagctccagaccattgtgtgagattagtcttgtattttagggtaaacatccgagcctcaggaaaatcactggaaagccattcaccaggccaaaaggttccaagctttcctgcttcctcatcaatcttctccaccaaaggtgatgaagttgaggatttctcctcagctatacgccaagttttgtaaggcccaccacgtagaccatggacaaaaactatgtctagtggagggcaatctgcggcggggggcctattagttgaatcattagaaatagaaccgttgctgtcattcacagattctgttccatcccccatttcagtagaagtaaacagagatatctcctctgagaaagcttcttgttgatctgtttctttgggacatttccagtggggaagatgagaatttatcaagaatatcatgtcatcataacgaggacaagagttcctataatttggtacaccaccatcagaagggcctcctcttccactttcagattttccattaggctggtcattgcaaaacatatttaaaagtgctgccctggcatagctttgcattttaaggtcactgcaacctggaatccgcccattagcacaatcatcaagccatttgcaccaagtttcatcagctgtgataaccttcttgactctgggaagcagtgagaggatggtcaataaccgagctgcatgcttgcggatatgagctgtaggaggaactcggacactagctggatcatttacatctgatatagccggttccccatctacatttgatatccgctccttcccctcatgtgctctagatgatgcatcataagcctcaatagcagccagtttctcataatcatcactcaataaaaagcgcctcagcaaacataaaatcccaaaatcaactatcatgtcctgacacacagaatcttcagcacaaacttcagtcaaagctttaattcctttcagggttgccaaggcagaatctccgcagtgcatgca

SEQ ID NO: 1865 - DNA, 655 bp, Glycine max
tcgagttcagctacgtaggcccccccccacacaaaaccaacattgtttcctataacaacttgaagagatattttcaaccatccatacttcgattttctcaaccattaatcaagtaactctctccatatacaacagcacttttccaaggtttaccacatcttgaagcagctacgtacaaagcaccatgagttctaaaagcataaatattcaaaatgctctttgttatactacaaggcctgctccacggagcaataactccaactcttcatcctcagggactcaattgccaactattcaaaaagtcttttcaaggaggtatgagaagaagaattaaaaggaactatcttcactggagacttattatttcctagtttaccctaatttgttggttcatttgtttattatgtaattgattatataggttctgtgatgatgagtaatatttttcatgtaccacgactctcaattaaaaaaaatgttcagcggcttacccaaaaggcaggcatacagttgaagatgaaaaaaaaaagacagcacagaacagaacatgatgcaaggtcatccataatatagcatgggtattaccatgatgtgtttgtacaatttgccagcttaaacttgtttaactagtaaataatcaaagttggacatgtcc

SEQ ID NO: 1866 - DNA, 1356 bp, Glycine max
attaactagtactcgagtgttggagggttcatttctcggataggaagtggaagtgagagtgacgaggagagccaccaagcagaactgcttcaggttgccaactattagctcactttcatagtgaaagaagaaaattggtggattggcactaaacatcgtttctgttggaaagacaaatacccactgatctgtctttattcgcttctgagaccaattacttagatggaagaagagagccaaataacaaagggaaaatatgctgctgatatttcttccataaaagaagcacatgccagaataaaatcattggttcataaaactccgcttctgtcctccagctctctgaatgctatgtcaggaaggaagctctactttaaatgtgaatgtttacaaaagggtggagcttttaaatttaggggagcctgcaatgctgtgttttctctcaatgatgaagatgcttctaaaggggttgtaacacacagcagtggaaaccatgccgcagcattggctttggctgcaaaactacgggggatcccttcgtatattgttattccaaaaaatgccccaacttgcaaaattgaaaatgtaaagcggtatggtggtcaggttgtctggtctgaagcctctgttcaatcaagggaagaaattgccaacaaagtgtggcaagaaagtggtgctatctttatacatccatataatgatggacgcatattaagtggccagggtaccatatccttggagattctggaacaagcaccacaaatagatacgctagtagtacccataagtggtggtggtttgatatcaggaatagcattggctgccaagtccattaacccagctattcgtatttttgctgctgaacctaaaggtgctgatgatgcagcacaatctaaagcagctgggaggataatacgattgcctgagaccaacactatagctgacgggcttcgagcatttcttggagatttcacatggcctgttgtacgagatcttgttgaggaaattataactgttgaagacagtgaaataataaaagccatgaaactgtgttttgaaattcttaaggttgttgtagaaccaagtggagcaattggccttgctgctgttctatccgatactttccagaaaaatcctgcatggaaggattgcaaccatataggaatagtagtttcaggaggcaatgttgatctggccatgctttgggattctttgaacaaaggaaagtgacttctttttgttttgcttatgtggaccttcattgttctctatgtgagtgtaaatgatccaatttgtatggacaagtctattccattccttttagttaacttgttgggttgaaaaaaaaaaaaaaaa

SEQ ID NO: 1867 - DNA, 1080 bp, Glycine max
gccctttcgagcggccacccgggcaattttgcgggtatttgtgagtgtgtgagagagagagcgagcagtttcagacacagagagaggggtttgggattggagggattgacgctgcgtctcttcctcttctctttcgatccatccctcattcctaatcctccaatccaaccacctcagcctcacactcacatatacacatatctgaacgcgtatcgtccctcctatggcttcaaagcgcatcctcaaggagctcaaggacttgcagaaagacccaccaacttcttgcagcgctggtccagtagctgaggacatgttccattggcaagcaacaataatgggtcctgctgatagtccttatgctggaggtgtattcctagtcactattcacttccctccggattatcctttcaagcctcctaaggttgcctttaggactaaggtgtttcacccgaacatcaatagcaatggtagcatttgtcttgatatcctgaaggagcagtggagccctgcactcaccatctctaaggtactgctttctatctgctcattgctgactgatccaaatcctgatgatccacttgttccggaaatcgctcacatgtacaaaactgaccgggccaagtatgaggccactgcacgcagctggacccagaagtatgccatgggctgatttgtgtttggataatgtatattgaaatggattgcatctatgaaaacttttgtgggtttgcttttcacttcctgttttctgggtaagattatgtttctgttatgaggggctagggaagggaggtgtcttaatttgataaaaaaaataactgtgttcaacaaccactgtgatgtttttatcatgatgcaaacgcatgaacaggatgttatttgtgtcattgctgtgttgtaacttcctctatgaagtaatgtagaaatagtcatatgaagcacaaaaaaaacccaaaaaaaaaaaaaaaaaaaaaaaaaaaaaaaaaaaaaaaaaaaataaaaaaaaaaaaaaaaaaaataaaataaaaaaaaaaaaaaaaaaaaaccctataaaagcccaatattttaaccatttaaaaa

SEQ ID NO: 1868 - DNA, 984 bp, Glycine max
atttttcccacgcgtccggagcgagcgagcgagcagtttcaaagagaggatttgggattgggaaggcgagggattgcgctgcgtctcttcctcttctctttcgattcatccctcattcataatcttccaatccaacaacctcagcctcacactcacacatacacacatctgaacgcgtatcgtccctcccatggcttcaaagcgcatcctcaaggagctcaaggacttgcagaaagacccaccaacttcttgcagcgctggtccagtagctgaggacatgttccattggcaagcaacgattatgggtcctgctgatagtccttatgctggaggtgtattcctagtcactattcactttcctccggattatcctttcaaacctcccaaggttgcctttaggactaaggtgtttcatccgaacatcaacagcaatggtagcatttgtcttgatatccttaaggagcagtggagccctgcactcaccatctctaaggtactgctttctatctgctcattgctgactgatccaaatcctgatgatccacttgttccggaaatcgctcacatgtacaaaactgaccgggccaagtatgaggccactgcacgcagctggacccagaagtatgccatgggctgatttgtgtttagataatgtatattgaaatggatggcatctatgaaaacttttgtgggtttgcttttctcttcctgtttttctggggtaagattatgtttgttatgaggggatagggaagggcggtgtcttaatttgataaaaataactatgttcaacaaccactgtgatgtttttatcatgatgcgaacgcatgaacaagatgttatttgtgtcatggctgtggtgttactctatgaagtaatgtagaaatagtcatatgttttaaaaaaaaaaaaacaagaaaaataatctcgtcttacgaaagcatttttttgaatgccagtaaaattaattggttcttcaaaaaa

SEQ ID NO: 1869 - DNA, 1658 bp, Glycine max
  misc_feature (122)..(126): n is a, c, g, or t
  misc_feature (158)..(181): n is a, c, g, or t
  misc_feature (228)..(232): n is a, c, g, or t
  misc_feature (279)..(283): n is a, c, g, or t
  misc_feature (298)..(302): n is a, c, g, or t
atgaagtagatgtttattttgtattcgagaaccaaagggcaaagggagggtaagttcagcgttacagcttctcttgtaacagaaagagagtaagaatatatatcaccaccgaagcagcaagnnnnncatcgcctaatacttgaagtctaaatactctnnnnnnnnnnnnnnnnnnnnnnnntctgtctcttaacaataagttgcttctttaaggcttaagtactagannnnncttccacggactgtgcaaacccagtcaagattctaattttcttcttnnnnntcagctggcacttannnnnttggtaaaataacatagtagcctcctcataatacagcatattctaaatacaaacgccagtccaatcagcatatgctggctgcatgcttgtccacataagacatgacagattaataccaagtgagcatcaagaggtggaggatagttgtcagctactgtgtcaatccaactgaatatcatattatgataaccatatggcttgccagacatgctccgtgcatattcccatgcagcagtcgagttgaatcttgcacgcagctctggatgcaggggaagcaaggctatctgtgggttggaattatctttaagagctaatgtccaccattcatgccagggaattaccactattatttcttcacccttttcattctcatgcccagattcaccaacccataaatttccaatttcatccttcaagcaaactgctgtatgaccagcaaatgcaccagttacccacttttctagtgtctcaaaacctccccacctaccacggatctttgacacagctaaaaaatctccagaatgaacatctgcaggatcaatagttgcacgccaaggctgaatgcgcttctcaaatgtagctcccatgtgtttctttaggaaatctaagttggcattctgaccccatgcagtgttcgagaatagaggcaaaacatcaaccagagaaaggagcgttcccagcatccccgatggcatgagaaacacagaaaccccatgccgctttacatattccaactctgcaggatcttcccatgaatcaaacttcaaagtatgttctcgcgcagagaaatagtaatcccatgtaatcctataaggcgttgcaaatacatacagatccatgcaggtccaactgtgtgcagcttctgtcttgagacggagcacggcaccgcccaagccgtcggcgtcgtcgtggccgggggcggtgaattcgagggaggcttgattatcgtaaaagcatgcggctctccactgaacggaatcgttatcgggagggacggcggcgacgaaggaagggagcaagtcgacggcgctgtggaggttgttgaggagcggccaggagattccgtgggggagaacggggagaacatcgttgactcggaaggggaccttgagcgcgtgtgcggaacctaggaagagaatgatgaggagcgcgtggagggaagagggagacatgaattttgaagtgggagagtggtggtggtggtggtagttagtaattagaggattatacaggggaatatctggctagttacgtattcaaatggaactgattcattaattcaaccgccgatgccttgcattgcagttgcaccaccagttctcttgttgtacaactacaactatcacttgcattcca

SEQ ID NO: 1870 - DNA, 781 bp, Glycine max
ttttttttttttttttttaccaaatcatacgcgataatcaaattttatttccaaagaaagaaaaaaggtctctccaaactccaattcagaaccaagagttcaaaccataattagaattatcttcactgacatgtttcctgcgttgagatagtagaacaacgtagttcatcacgaaacataggtaattatcctcctacaattgacataatttaagtctataaaacatcacaccatcccagcaatataaatttgttatatacaatgtcccttagtcaacttgacaaggcaaaggcgaagttccgtggtgcactttccacaatagcaaactattaggtaccttgagatcatggataacaggcaaatcagaaaatggaaatgccggagaagagactaacatttcaagggcctgtcataagttggaggaagggaaggacagtgctcgttcatattggcataaggatccaaggtgttatagccaggcaattccatcctatattcaccaagaatctggcagaatggatgccgatcgttctcattgttgcaccatcttggtagacgtgtttggttatcctcaaaaatcctaagcatgtatgcatcacgaattgtgaattcagttacttgaatggagctagaaatagggccgaatattccagccgctttatacattgaaagaataaaggcaacacatgttgttgatttcccatcactgtacacccattcctcgagccgaattcgggcttgcgattgatcaaaagctataccacgcttctcagtctcaatt

SEQ ID NO: 1871 - DNA, 1038 bp, Glycine max
gggaacaaatccagtcatatattgcattcatgcgttcacacttttttttttttctttttgccacgaaataagtaatgtattataatactaactcttcaatcatattcataccagcgcatcacatgcatatctaggaataaacaattacatctgttgctcttaatcaatcttaattgccacatctatcactgaatgtagtaacattactttccattaataaaacaacaggacagctattattttaacttgaaacctactattttttaagacgaatggacttaaaattaaagagattagaagagaaagacttcaaactcaacctccaaaacaaacctatattataaagagcaacttcaacctatttcactcaaacatgcaggacagacacgttgtattcgacaattgcaacaccagccttagcatcatgcacatgtgtcttaagcacagaagaaccccttgcatatttgaagatcccactacccccaacaattggcatttctttaacactctgcaacatagggttcctcccaagaatgctgagggtgctgccattgtaaatgccctcagtgaagaacaaattcgttaccatgagtatcgcaggttcatgttgcgaagcctcagcatatattccctgacatcttccaacaagctttgaagttggacttggtccttcggttagagggtcatccatcatgtaaatagtcccaaaaccagaaatggacgccttaggaggctcaacaattttcatagcagtcgggtgttcccccattttgttgttatggaaataaaagtggagttgggtgagtctttccacgggttttgtggatagagacataggagactcttttgtaaacacttcactatttgctggtaaggaacctgacatgataaccatgaaatgcaaggaaaaaaggagacacacaagtgaagccatatcggtacaatttttaggtatcttcttctgtcgtcttctcgcagccgtaggcccctggggtcttcccgcggccgtacccttcggcgcgtgggcggacgcgtggg

SEQ ID NO: 1872 - DNA, 1178 bp, Glycine max
cggccgcccttttttttttttttttttgtcattaaatttaattaaataattttttatttaaattcttactttacaaatacaaagttttcaagaatagctgcaataaccaataacactaataattattaaaatgatattaattttttatattagaaaaactggaaaaggaaagttgttacaatgactattaacagaggaaccaaattaatttataattgaagggattatttttcaatttttgattgccaaaaacttatttgttcgttttttttttttttaggggactaaattaattgatccatttttatttattttttgtttaacccaacggatataaaatattttcccacagtgagagttctgtgtacgtctccctgccttctagcctctacttaatacaacatgcacgacgactgctgctgcttaaatttaaaacctactcacttttcaagagggatatcctcttaaggaccttaaaaacaccgaaaataaacctacataaagcttcaacctatttctcaaacatgcatgacagtcacgttgtattcaacaattgcaacaccaccggtgatgtcatacacatatgtcgtaagcacagcagaaccccttgcatatttgaagatcccagtacccccaacaattggcatttctctaacttttataaatgtagggtttctgccaagaatgctgagggtgctgccattgtaaatgcccaaagtgaagagaaaatttgtcaccatgagcaacccaggctcatgttgtgaagccaaagcgtatattccctgagatcttcccacaagctttgaagttggacttggtccttcagttagagggtcatccatcatgtaagtagccccaaaaccatgaatggaccccttaggaggcaaaacagttttcatagcagttgggtgttcccccgttatgttgttatggaaatagaagtggagttgggtgagtttttcttccacgggttctgtggatggatactgttttgcaaacacttcactagttgcgggtaaggaacttgacatgataacaatgagatggaagccaaagaggagatacacaactgaagccatcttggtactacttttcggcatcttcttctgtcgtcttctcgcagccgtacggacccgtgggcgtctcgcagccgtcggacgcgtgggcggacgcgtgaa

SEQ ID NO: 1873 - DNA, 845 bp, Glycine max
  misc_feature (11)..(11): n is a, c, g, or t
gagttgaatanccgacaaatacggaacataatactgaacaacagaatcactttgatcaagcaccaaaggcactccagctccgtacgcactccactccttaaaagactcccacagatcactcagtgcaaaataagactgatactccacatcgcaaaacttccatccctctcatcgttgtcttggagaaatactgagccggaactgacggtgttgtggactccaagaacctatcgatgttactgacagactctacggacggagaaagagttggtttcagagattggttgagattgctatcgctattgctgttgttatcctcagagacatcgattttgctcttcgaagctaaatccgtgttttcaggttcattgttcttggctctgtgactctgtttgcgctgattctggctcttccgcgtcttcaccggaatgtaaaaccgatcatcgccgcgaacgccgccgaattgcagtgcagttcccagcattttccaatcgttttcagaactgcgttctactcctccgttcggtcgccgagaaaacggaggaaatgagaaaattggtaatcgcagagaggatcaataaaataaggaagaagagaatcggaataggtgatagaagacgaagaaaagaaaacgaggttgaaggcaaagggaagaagacaggcagaggaagaagaaaagcttcaacactcttctttgcaacgaaacagaccgagagtgcatagaaggtttggtggagattctgtcattttccgttttcttggggtgtttaactgattctgtgaagttttggggttgcttattgaatttgttggactttccttcaagagagtgaaaaaaaaagact

SEQ ID NO: 1874 - DNA, 2277 bp, Glycine max
catttacgataccaaatactccactgttgcaaggaatccgaaaaataattttcacactgtttctcaatacaagtagtttagatttatcaatgtgcgaaaagtcgaaaactacatgattgatatcatacgttctctactgagtattccaccatcttcgagctaattatgaacatctctaatagtacaagaacatgtataaacatcgtaagagtgtaaaacttattttgaaacagcaaaatattgtacacttacactacaatctctcctcaccagagcaacaacatgttcatcagatatagtaccaaaattgggccacgcaacacagcaaagtctctgtaattcacccattttcttctaaatcacaagatccgtaaatattttatctctagaaattaacgtgatctcaaccattactgaactgaaaatgctcgtacagtctggcttaatccccacatatccttcctgtgaacttgtttgccatactccactctggttttatatttagtttttctctcatttcattaggaccctccaattatctgatagtttttcctccatataaaacattttttctttctttttctttttcactttagcaatctctatgaattcattgcttcatattggcttcatctttttgtgctgcttaggcatatcacaagaatccacaattaggcagtcctcgcgccatcacaatctctacagatggatggacttttatcaagtttgcaccaagcaatgaacacagaaattaaggctcagttttagccaaaagcaggaaagacatgtcgtcttatgcagttcatctatggtatgtgccatgtgatttaaagaactgaaaatccgggtgatgaacctgaactagccttaaccagttatcggcagcctgcaagagggaactcacttgttgagattcactaactccttttttcatccaaatagacccctttaacttataggaagccattgcaaaagtaggcatagaaatctttggtacaacatccatctgactgggataaaccagtgttggagcatgagtacgaccacttcctgtcaagggtgtatggagtgtatggtacgttagaaagcacccatctaaatcttttaaagttggacctgtgggtattcgatatataggataccatgccacagacacccaactgactggtaataaatcacagcttctcaatgacttaatggtaggatagtggcgtgcaagatcttgtatcttgtcagccaatggttcacgactataaggaggatcttgttcaaaatactcgaatagtagatcttgaggattcccagtttcactatcatcacttgaaaatccttcttgcactgtactgcatttatcatgcatagatagtgtgtccattttcagtgagacaccacctgttagatgctgactacttctttgtgtcataaattcagtcctttttccatattcataatcactacttccttcactacatgaatctctgtagtaatcaccctcactgtcttcactggtgtaccttggctttgcacttgacttctcagcagagtgagcatagagttgaatagctgacaaatagggaacataatactgaacaacagaatcactttggtcaagcaccaaaggcactccagctccatacgcactccactccttaaaagactcccacagatcactcaatgtaaagtaagactgatactccacatcgcaaaacttccatcctctcatcgttgtcttggagaaatactgagcaggaactgacggtgttgtaaactccaagaacctatcgatattactgacagcctctacggacggagaaagagttggtttcagagattggttgagattactatcgctcttgcttttgatgttgctattgttattgctattttcagagacatcgactttgttcttcgaagctaaatccgcgttttcaggttcgttgttcttggctctgtgactctgtttccgctgattctggttcttcctcgccttcaccggaatgtaaaaccgatcctcgccgcgaacgccgctgaattgcagtgcagttcccagcattttccaatcgttttcagaactgcgttcttctcctccgtttggtcgccgaggaaacggagaaaatgggaaaattcgtgatcgcagagaggatcaataaaaaaggaagaagaagaaagagtagcgaatcggaatcggtgatagaagacgaagaaaagaaaacgaggttgaagacaagacagaggaagaagaaaagaaaaggcgtcacgcgtggcctttcccgtggg

SEQ ID NO: 1875 - DNA, 1825 bp, Glycine max
cccgccccgccgtttcttacaacttattcaccactcgttcccgttactccccagcaaccataattattttttttgacaagcagctcaagaaaaatctgcaaagaataaaacaagaggaggaaatgcaacttacttgttgatataaacttcagacagagcgagttgttgtaaagctagccttgttgcagccatggccacccacgcggctctagcttctacaaggatccccactaacaccaagttcccatccaaggcttcacactctttcccaacccaatgcgcctcaaagagacttgaggtgacagaattctctgggctaagatccacttcatgtgtgacatatgctaacgatgctagagaatcttccttttttgatcttgtagcttcccaactcactcccaagaccaatggatcatcaactcctgtgaggggagagacagtggccaagttgaaggtggcaatcaatggtttcggacgcattggtagaaacttccttcgctgctggcacggccgaaaagactcaccccttgaggtcgttgttgtcaacgacagtggtggtgtcaagaatgcttcgcacctgcttaaatatgattccatgctgggaacttttaaagcagatgtgaaaatactggacaatgaaaccatcactgttgatggtaagcccatcaaggttgtttcaagcagggaccctcttaagcttccttgggctgaacttggaattgacattgttattgagggaaccggagtgtttgtggatggccctggggctggtaaacacatccaagcaggtgccaagaaagttattatcactgctcctgcaaagggtgctgatattccaacttatgttgttggtgtaaatgaaggggactacactcatcagatctctaacattataagcaacgcttcctgcaccacaaactgtcttgctccctttgtgaagatcctggatgaagagtttggaattgtgaagggaaccatgacaaccacacattcctacacaggagaccagaggcttttggatgcttcacaccgtgacttgagaagagccagggctgcagcactgaacattgtcccaaccagcactggagctgccaaggctgtgtctctagtgttgccacagctgaagggcaagcttaatggaatagcgctccgtgtgcctacacccaatgtttcagttgttgaccttgttgtgaatgttgagaagaagggtcttactgctgaagatgtgaatgcagcattcagaaaggcagctgagggtccactgaaaggtgtgttggacgtgtgtgatgttccacttgtgtctatcgacttccgctgctctgatgtttcctctactattgactcctccttgactatggtcatgggagatgacatggttaaggtggttgcttggtatgacaatgaatggggttacagccaaagggtggtggatttggcacacctagtagcaagcaagtggccaggggcagctaaagcagggagtggagacccattggaggaattctgcgagacaaaccctgctgatgaggaatgcaaagtatatgaatagaggagagcgcctttttctgatttgatgattaccattaccagcagcaaaccatttttactctttgccttgtgttaacgtatcatgtgaaaaagaaggaaattgttcgttcagacggtgtctgaggagagattttcaaagtttaacattatctgcagccaataataaattttggcgtgactgaaattcatgaatatcgcccatatattgattgatatggtatttcttaattcttgtaaccaaaaaaaaaaaaaaaaaagcttttaatcaaaaaaaaaa

SEQ ID NO: 1876 - DNA, 1210 bp, Glycine max
ttttttttttttttttcttgtgttttgggatttgagaatgtgcattggaattctcaaaaatattttgcataatagcctgctataagcattaagcaatgcataatcaagtttatatgcatgaatctgctaagataacgtgaccaactacagaactccaatctgcatttaactcttgatacagaagttgaaattatttggaaaaatttaaattggaaaaaaaggctttaaatgaatttaatcagctattctggataggaactaatggcatttggcctccgtatatatctgggagttgactctcctctatctcttctagcaatgttgatttcagctttttgttctccacgaatactatctttttcttggtattatcatcaatgaaagggtaaatcattttccaaattttcataaacatataaggtgcatgtacaataaccatcttccccaatctttcagggtagcaatcctgcaaaatggatagagcattaaggtatccacgaaggtcactgtttgcgtatgcccatcctttaatgtctgcaatggcaagaaacttttcttgtcctggtggcatccttgaacaaagcttctcaagaacaaacaccacataccgtttgaaaccatcggcaccatttttgctttgaaaatgttttgcagcaaaggtaacaactataggtcgacccttcttgtcgagtccttgcgtaaacaccttgtcctgtgcaatatcttcggcaatctctgacggtgatatgcaaccatttggaacaaatgaacgcttccatttcaagtacttaaggaacattgccgaagccttctccacatccaaactacgagcccgcaagaatcttctcatcatcaaatcattttcttccttggaagagggatctcggctttcaacaaaggctctcatgagacgaattttggtgacttcggcttcagtgctgtctttcaaagcgtcatcatcttcttttgctgtgtcatgtttggatttggaatccaattctgatctcaggggctcggggctcacaccctccattctcttgaatctctgcctcaactcaacactcaacacgaatttctagcttctgactaataacaatgacaagcaaaatgtgtttttattttttggctattaaatgctgataaccttttggtggtgactttggtggttcgtattgacgggagtttcgcgcgcgcggcgtgggcgcacgac

SEQ ID NO: 1877 - DNA, 1823 bp, Glycine max
  misc_feature (52)..(52): n is a, c, g, or t
  misc_feature (88)..(88): n is a, c, g, or t
  misc_feature (182)..(182): n is a, c, g, or t
gcggccgccctttttttttttttttttttttgctactacaaagatcagtgantatcatcagtgcagaattatagtacaaaaggccgcnccgtccggaataagtataataagtagcttttttcacatggaagagaaggtagtagactactgtttcaatggcattggagcttgcaccagtatgntgaaaaagtggagccaaatcctgccaactcgcaatccaaagcacttgtaattttgcttgcataacatataatgggaacagcttaaaggcccaaacttctggggaagaaaaacgtgaaatgaagatcaaatcggacagaatctttttatactgaatcacatcatttgttgatgaaggtctgctgcctgctgtgccagttccaccatcatagcctcatcgaagaacttatttatgctcacatcctcactcattccctttctacgtcttgtcttcaccataaactcacgggcaagatgctgaataggtgcgggttcaagtgggcgcaaaacaatgcttttatccagaggatctccaggaacaatagcccaatgatcaaaaactgacatgcaaaatgcttgaccttgtgtatgatatctcaagtctgtttcaaatccaaaagattctatcacgggcaaaaatgccttaacaatataagctggggtgccaggctgaggaacatcagcagtaacatgtccacgccttcgagataatacagtgtaaattgcagatacacaatctattggtgtttgaatccccacgcgtggtactggttccataagacgaggagtagccatgaggaaagctgaataggccactcgtctagctgttggaatgatctggccagacccccgatgaagtgactctgtagcaatctttgcatcaacaatcttgaatttaacatttctgatgggctcatcacagagaggcccttctcgtgcaccccactgaaatccctgaacaatggaatccttcacggcattcatcagatccttgttaacttcagttggaagggtgtcatctaacagaatattgggaccctgcttatcagggccaaatgcccagattgaccgtgcagcaagaagatcccagtcatatttagtctggaaaaagtcacctagtttctttttactccagtcagtgctaacaacaccattctctatgtcctctgcaagacctctttctagcggctcagcaaccatagttattttattcttcttgtttggtgtttcggcaaaacatttcattgaggaagattcaacaacagtttcacaaaatgagacaacaggatctgctaccttgacttctacttcggaatagagctctctcaggtccttcataattgaatccaagtacagctcaccagtccctaaaatagtgtgctccccagattcctcaaccttagtaactgcaagaggataactcttgcttattttcctcaggccctccaccatttttggcaactcacttggatttaatggctcagtagctgtttttaccactgacagtgtattggggggggggggcctacgtagctgaacatcttcatcataatccacattacaaagagtggcggttttcatgattgaagcatccacgccttcaattagaacccaagaaccgggaggagcctcagctactggcatcctatcacgagcttgatacacccacaacttagttacttcttttacagtcatgtcctcctcatcatccggcgagtatccttctcctagaacacgtacagcctgtcctgtctgtatcttaccactataaactctaccaaaggcatcaaacacactgcaatcggatttgggatacaatttgg

SEQ ID NO: 1878 - DNA, 1685 bp, Glycine max
atgtcattgatcgaccatcttaccaggccaatgatcatatcatatatagccaacaagggtcgttatttaaatagcactccacatatatttattcaatccttacacatcgcttttgcctctaaaatcaggtacaacacacatgtcatatcattattacatatagagaagcattgatacatatattaattaacttaagaaagccaaaccatgtaattactgaaagcacatgcacctgagagcttactcaacaagagtacatgttactaattcttcatacatgtccagccattgcgcctgccgctttggctggacatgcatgccattaaacttatcctcatcagcctcctatcaccgaaattgaagcgttgtcgcaccggattcatggtcctgtcacatgtgcttgctggtggtggcgcgggcctgctcccaaactggcctggcccattttgatgggccttgttctcatattcacgcaattttgcagcttctttcatcaacaactccatggcctcgtcgatattattcgttgccttggttagttggatcccttttcttggtgaatcactccagcctgaagcgggttttgatccaccgtgcttgttgtggtagttgccgtagtcaccctcatgatcatagttgccatgtcgagttggacttgcacttccactaccatagcccccaccatatccatttttattaacggaaatacctgtgggcttgggcttgggcttgcccccttctccgttgttgtagttatcatagttgtcaccatatccactattataaacgggactgccagtgggcttgggcttgggctttggcccttctatgttgttgtagtcaccaccatatccactattataaacaggactgacagtgggcttggacccatctttgttgtagtagtccccatagctatcataatcatgatcatagggacttgtataaccgtcatggttaattggcttgggtgcaccatagtcaccaccaataactactattataaacgggactgccggtgggcttggacatgggcttgggcttggggccatttttgttgtatccatcataagcatgatcaaagttgttcttcttggcaggacttgtataaccatcatggttatcaaaattcttagtgttacctccatataaaggcttgttcccttccttgttgttgccataaccaggaccatcatgtttattggcacctccaattggcttgttggttccgtagtcagcatagccgccattgtaaggttttggctgcgaggagtggcgccaatcaggtgaagtcacgtgaccggaggaccttggtggactacggttagcttcattgtgcaccttggtgaggaagtcatcaaatttacgtgggcttgtttgatgtggatgcttcccttcatcgtcatcatggtcgttgtcactctcgtcctcataataaggcctgctagcaactggaattatttttttcttggtaacgatcccgtctgagtaaccattaccgttactaaatttggggacgtagggagcaaatggctttgcaccagtttcaatgtttctcacattgctagtgttgtaggtggatatttgagcgcttcggtatgcgtaaccatactgagccatgcttcttacttctcaaacatacacccacctctatctttttcttcttaacttaaaacccttctctt

SEQ ID NO: 1879 - DNA, 1514 bp, Glycine max
caattaggattaataaaattcccaccttctgtgtctgagcaaacacaaacaagaatatagaagctggttggttttcaggaagacaaatttgaaggtttttcccttttttttgtgaaaatcttaaaattgttcaaagaacaggggcaaaaggataataagagattaaaaaaaagcaacatatagtgcacccaatgcaagcccggccatccctaattataaaatgggatggaagactacagaaaggcctaaaatagcactaacttaagattaattggcgttgatgccacctcttcagtctctaatataatatcgttcatgtcgctgaaggattgagcaacttttctaatgactacagtaaaccgtctactctgatttttgctttgattttcttgcacttgatgctcgagaacttgtacacctccccacaaatttcagaatctcgtcaattagaatgaccggaagtgcaacaaccaaaaccaaaagccactcgttgaagctcagaggcacgataccaaatacttgggctaagaatggcacgtacaagatcaaaaagtgcagaccaaatgatactgacattgccaaaagaagccaagggttgacccaagggggcattgtcaaaaggcttccatcttcagatagggcattgagagagttgaacatttcaatggctaccaacacagaaagtgacagtgtcatagctttcactttaccagttgaaaagtaatcacaggggttatcaaacgtgatagttttagcaccagcagtgaatggagaagcagtgaagttctgccatgaggagcattgaccccagttggcaagttgggtgtaagtcacaagactatgtccatccccactaaggtcaataccaaagaaggaaccatgtgtataccatatgatgaagataccaactgtagctaatccaacataaatcccaataaccagatagcggaataaaatccacaaattaattaatgagtcatcactgtgacgaggaggctttttcattatatccttatctggaggattaaatcccaaagctgttgcagggggtccatcagtgacgagattgacccacagaagctggacaggtatcaatccttcaggaatacctaatgcagctgttaaaaatatagaagcaacctcgccaatattggaagagatcatatacctgataaaggccttcatattattgtagatagatctaccctcaccaacagcagcaacaattgaactaaaattatcatctgccaacaccatatctgaagcttcctttgccacctctgtccctgcaatgcccattgcaataccaatgtctgcaagcttcaaggcaggagcatcattaacaccatccccagtcatggctaccacttccccttcctctttcagcagcctcacaatttcttgcttgtgcctaggttcagcccttgaaaacaaagcccaccaggctgtctcagataggtctttttatcacgcagttccataaaatctctaccagttaaacttttagaactaat

SEQ ID NO: 1880 - DNA, 1486 bp, Glycine max
agagagagaactagtctcgagtttttttttttttttttttgtaatagtaaattactgcaactttcgattaaaggcagaaataggaaaatttacacttccagtagtacaaccaaagacatagccatagctgcttacaaaggatatgagtaagcaaacaatgcttctaaataatcccattagggaacaaaaaaaaacaaaaacttctcctatactaatggcgggtggtgcaacagtccacctcctccaatttaataggtcacagatataaaaattccctctctaccagctttcagcagcaaaaaggttgaaaaagctttcaaaaatgaaaataaaaataccccaataataaaaaaaggccccaagaattaggaacccccatttgacccaataaaaaatgatcaagagccaatttaaaataagcccttaaccattttgcgatccaatttgaccccaccccctcctcctccaccaagtagcatactatattaataccttagtatactagtcttttttttggagtcatatactaacacttaaattgagaaattatagcatatactatatgtagtgtatctaaatatttggaacttcaacttgtgaacaattattaaggccctctctagcggaattgagcaccagtgtaggtttggccaaaggaccaaccagcaggggcaacattgtaggacacagctgtacggccatcactggttgtgaccttgaatgagaggctttggccattgagatagttgttgctttgccaattttgaccccagtttctggacattggcatccaccctgttcttgaccccttgatggccacaccatgaacatccccagcacctcctacgtttgttatgaggaccaagttgaagtaggagtggccattgattgtgaaccttatgcctccccttctcctgcagggtacccttctgtaggaaacaggcacaattcctgctctgtattgtgcaatgcgaaggaaaacaggttgagagaggtcaaaatggtgcattggagggttgcaccaccctcctgcattgtttggtaaagcattgtttggaggacagaaattggtggcagtgaccataatggagccagggaggcaccacctatggtcattcacacaccttatctcatagcatgagccacaactaagaccattgttgaacaaagcagtgctcaaagcagcagtatttgttccataaccttggctgtagaggtttccatatccacatgccccacccattgttcctgaggcatcacttcctccatagaaggtggcatgtgcattaacccagccaccaccatatccgtagccataggcagaggagaacattgagagaagccccaccaagagcaaacaaatttgagccatttttcttttgatgaagaagccttttcaattggagaagtggtgagaggacaatgtggagtagatgagtgtgaagccccttctgtcgtcttctcgcagccgtactcgagccgaatt

SEQ ID NO: 1881 - DNA, 1783 bp, Glycine max
cggtacttggttctcctcttccgcccactgtttccttcatcttcttcttcttcttctatctctctacaacacacttttttaagtgattcgttcgcagaaacatggcttcttcgtttctatccgcagcttcgcacgctgtctcaccctcttgttctctgtccaccacgcacaagggaaagcccatgcttggaggcaacactttgagatttcacaaaggacccaattccttctctagttcaaggtctagaggtcggatctctatggctgttgcagttaatgtatctcggtttgaaggcatacctatggctcctcctgatccaattctcggagtttccgaggcgtttaaggcagacaatagtgatgtcaagctcaatcttggagttggggcatacagaacagaagaactacagccatatgtgcttaatgttgttaagaaggcagagaatcttatgctggagagaggggataacaaagagtatctcccaattgagggtttggcagcatttaataaggcaactgcagagttgttactcggagcagacaacccagcaatcaaacagcaaagagttgccactgtccaaggtctttctggaactggttctctgcgactaggtgcagctctgatagagcgatattttcctggggcaaaagttttgatatcagctcctacctggggtaatcacaagaatattttcaatgatgctagtgtcccatggtctgagtaccgatattatgatcccaagacagttgggttggattttgagggcatgattgaagatataaagtcagctccggaaggatcttttatcttacttcatggatgtgctcataatcctactggtattgatccaacacctgaacagtgggaaaaaatagctgatttaattgaagaaaagaaccacattcccttttttgatgttgcttaccaggggtttgctagtggaagccttgatgaagatgcagcttctgtgagactgtttgtggcacgtggcatcgaggttcttgtagctcaatcttacagtaaaaatctcggtctctatgctgaaaggattggagcaatcaatgtgatttcatcgtcaccagaatctgcagcaagggtaaagagccagttgaaaaggattgcccgaccaatgtactctaatccaccggtacacggggctaggatagttgccgatgttgttggaaacccagttctctttaatgaatggaaagcagagatggaaatgatggctggaaggataaagaatgttagacagcagctatatgatagtattacttcaaaagacaaaagtggaaaggattggtcattcatacttaagcagataggcatgttctcattcactggcttgaacaagaaccagagtgacaacatgacaaacaagtggcacgtatacatgacaaaggatggaaggatttccctggcaggattgtcgttggctaaatgtgaataccttgccgatgctattattgattcatatcataatgtcagctgaaactcaattagatatttttggtgagtgttatacccaatcggagcgattggcatacatgaaaataatttagaataatttatgtatgcattaagtgtgtacatatgtacctcaaagtaccctaggaaattttttaactttgaaacaagttgactcaaagtattgatgcgtaatgagtcaggttctcagacttaaagctagttgaatcgaagtactgatgcatagtgaggatgtttatcatttcaaaaaaaaaaaaaaaaataaatcatggtaacaatagtttcgttaaaagt

SEQ ID NO: 1882 - DNA, 1317 bp, Glycine max
tcagcgaaatcaaatgaaagaaattattaactctctgcttccagcctgtaaagaacctgatattgattctggtgtcccatttaaagctgatgcaatcattgccaatccccctgcatatgggcatacccatgtggcagaggcacttaaaattccaattcatatttttttcacaatgccatggacgccaactactgaatttccgcatcctctatcacgtgtaaagcaacaggctggttataggctttcatatcaaatagttgactctttgatttggcttggaattcgagacatgattaatgatcttaggaagaaaaagttgaagctacgaccagtcacatatttaagtggctcacaaggctctgaaactgatgttccacatgcatatatatggagtcctcatcttgttcctaaaccaaaagattggggaccaaaaattgatgtagtagggttttgctttcttgatcttgcgttaaactatgaacctccagagtcccttgtaaaatggcttgaagaaggagacaaacctatttacattggatttggtagcctgcctgttcaagaaccaaaaaagatgacacaaataattgtagatgctttggagatcactggacagaggggcatcatcaataaaggatggggaggtcttgggaatttggcagaaccaaaggactctatatacttattggataattgccctcatgattggcttttcttgcgttgcaaggctgtggttcatcacggaggtgctggcacaacagctgcggggctcaaagctgcttgcccaacaaccatagttccttttttcggcgatcaaccattttggggtgagagagtacatgctagaggagttggtcctccacctatcccagttgatgagttttcacttcccaagttggttgatgcaataaaacttatgctggatcccaaggtaaaggaacgtgcaatcgaacttgcaaaggccatggaaaatgaggatggagtgacaggagctgtgaaagcattttttaagcagcttcctcaaaaaaaatcagagtctgatgcagatccgcaaccaactggttttttctctgtaagaagatgttttggttgttcctgattcaaatgcagtttattaaaccccactttttggtaattaatagtgtaaatcacaaatagttactgcatctataggatgtgctggacttgtcaccctgtcatgtgattgtataatttcatgcatgcttgtatttgtactatttaacttgagattcagtttgtatgtaaatttactgttgcttttaattgatattaagtgctcggcctatataaatcctcaaa

SEQ ID NO: 1883 - DNA, 862 bp, Glycine max
attgcaatctctttactggtcatagatagcagtagttcaattgagaattcctcacaaaacttaaaaaaaatgaagagaattccacacaaaagtaaaggagatttcaaagcaaatgacttttcagtctcaggttacaatcaacgacaatcacacgaaacacaatagaacaacataacacacttgtgcccaactcacgcctagtcgtggctgatgcactttattcagcttttaacatatgaaattgatggaattaagggtcaattaagccccataatacatcaatttttatttcttagatagcattagtagagtaaaacatgagcttaatttgatgatttagttgtgcccctgagtaaggtaagcatcaatttttttgctaaccacaacagccagttgcaacaaggtatgagcgtcaggaatgtggtcctcttgtttctcgtattccattgcccaaagcactacgctgccctttccttttggagtaacttgcaaattagacttgaagctcttgtagagtcccagcacgtcaccctctatgaccttcattgtcattttgttattttccttgtctatgccttcaagcacttgcttggctacacaaactgttccctcatgtaaatagttccaggagacgattgatccctctttgccccattcacctttatgaacttcaactgactgaatattttctggtgaaatgttggcaatagtgtgtggcttgttgcaaaaaacatcatagaactgttcagcagaagccttgatctgcaggctagtttccaccttttgaagttgagagtatgccatatttgcttcactactcttaagaaggtatacaaaatatcggacgcgtggtccacccggt

SEQ ID NO: 1884 - DNA, 1607 bp, Glycine max
tttttttcttttcttcattctacctcaacatatctttcaccttctaaccatacttttgtttttctcgatttccaaggaacttttggattcttagctgccaccctcatatgatatttcttgaaaccttgtgttaaaaattgtgtccttttgaacttcaataaaaatttgatttttttttcttagtttcatacccacatacccattgttggatttgaactagttttacttgcctcatggcccttcatataagcagcggttgttttactgtgatgtgtaactcaagagttcacagaataagagctgttgcttcagagggttctgctactcttaatacagttgtggaggagaaggtgaaattgggtggctctgatttgaaggtatcaagggttggaattggagcttggtcttggggtgataccacttactggaacaattttgaatggaatgataggaatgagaaggctgctagagctgctttcaatgccagtattgatggaggtctaaccttttttgacactgctgaagtctatggctctgggcttgctttaggagccgtaaattctgaggttcttcttggaagatatattaaggaaagaaaagaaaaggatccagacgttgagattgaagtagcaaccaagtttgctgcactaccgtggagatttggccgtcaaagtgttctcaatgcccttaaagattccctttgtcgactaggactgacttcagtggatctttatcagcttcattggcctggagtttggggaaatgaagggtatattgatggtctgggagatgctgttgaaaagggacttgtgaaggctgttggtgtttcaaactatagtgagaagcgactccgtgaggcttatgagaaactcaagaagagaggtattccattagctactaaccaagtaaactacagtctcatctaccgggtccctgaagaaaacggcgtaaaggctgcctgtgatgaacttgggattacaataattgcatattcaccaattgctcaaggtgctctcactggaaagtacactcctgataaaccaccaagtgggccccgaggcagaatttatactccagaattcctaacaaggctccaacctttgctgaacaagatcagtgaaataggagagaagtatgataaaactccaacacaggtatccttgaactggctggtagcacaaggcaatgttgtcccaattccaggagccaagacagcagaacaagctgaggaattcataggtgcacttggctggagactaactgatgaagaggtagctgagctgcgtagtttggcttcagaaattaaacctgttattggttttccagttgaaaaactctagaatatagcatgcaccttctaaatcaaatgtaaagttgtactgtctctgtatattgatatagctcttgttattattaattatttattttacaaaatacataatatggttcttttatatgaattatttaaaggtttacttgctttatttaatttcttaaaaaaaaaaaaaaaaaaaaaaaaaaaaaaaaaaaaaaaaaaaaaaaaaaaaaaaaaaaaaaaaaaaaaaaaaaaaaaaaaaaaaaaaaaaaaaaaaaaaaaaaaaaaaaaa

SEQ ID NO: 1885 - DNA, 948 bp, Glycine max
ttaaatctgaatgattaatgtttatttagcttcattttttttttttttttgtgggtgaaaaataaataggccatgagatcaattgtaaagcaccaaagccgctattcttcaatggaaataaaatacagtatcatttccaaaattcataaattttagtattttccccaccaactactccatttatcttccaaaacaaaaaacctcggatctaatgatggcattgcttaagaaataaggaaataaagcattactaccaaatggacctacttacgggtggccctgcacacgaaccaacatctgctgcttcacaaacaacttgattagcttagcttgtactacctttatgttcaccagtattaccctgatttggtttcccaccacaacaaaagaagtgtggaagcctagcacgaccacaactcttgcataggacaatcacaggaataggtttcagagcttttggtccattccttattcctcttttatggggagaaaccttgcgttttgggacagccatgagctccatggagcccccataagagaaacttggggaacaaaactcgggcaaaacggattgcggcgaccgaaccccaagatcaatgcttccagctaaaggaggagattggggcaccgaatgaataaacctattgaaccctaaaacgctgctcaatctccatctggtgctcctcacaattgcgagcctcgctgccatagcagattaaaactgtggaggaacttcgatgctcgtaattgctgattggattaacagaagttaattagtgcttggaagaatggagtgagtatcgagaacgtgcattagtttgaggtggtgttcatgattgctgcaaattaagtgccactctccaaaccctaaacttcagtggaggattttttttttggcctcatttttgttcgaatttatcagccaggtaacggggtaaacacaaaaaa

SEQ ID NO: 1886 - DNA, 1862 bp, Glycine max
ttttttttttttttttttgatacgtgactccataaactctacattttttttttttggtgggtccattaactctacatagtgactgtgtacaagtcgtcttctacagttctactagatcaatcaaccaaagtaaagggacatatgtaaaccataaatggatttaactgcacactcttttaccatattcttttaaacatactctatgttattatcttgaagtttagaagaaaatataaaattatgtaagattcatttcttattaaatgaattttttacataattttattaatttcagtaaaatgaaacgttgctatttctcatgtaacatttcccatggcatccgagtggaggttgttgatgctccatattctcatgcgatgagctgtttgctccacctccttggaccagttggtcttccaaataatgactaagaggactaacatttgaagaatcctgccacacatggtgcctccccagagacccttgacccctaaatgttgattgaaaccaaggaaaattccaatggggagtccaacaatgtaataacatgcaaggtttatgtaaccaaccataacttgccatccactccccacggccacgcctgacatcacatgtgaagcactattgataaccattgatacgccaagaaggtatgctaaatcagcaacagctcgaatcatatccttactgttggtaaagatcttggcaaactcatctttactcaagaaaatgacagtcatgaaaacaatgccgaggaggagagactgaaacattgtcacgcagaaagagtatatggctgctcttggatgcgacttgccaagtatataggagacacgaatacttatggcagcacttattccaagaagcagcatcgagtgccaaccctgaacattaaagcaaatagaataggaaccaacatcaatcacaggattgtctagtagaccagcaaggagaataatgcatgtactataccattggtctaagcaactcataacagatgatgcaaggcttaacttagcaaatgaccacaaatccctaaatgccatccatgaaaatccagtccattcttccttacaccaaccaatggtatacacaaccaaagccgcagcataaacccaccctatgatattagtcaccatggctaagccagttgtaccccaaccaaatacatttatgaagatgtaaagcagcacattttgtatgaccaaaacagcaagtgctatgcaagtaataactttaaccttgatctgggactgaagaaatgtctgaaagggaaaagctattgcacaggaaaacatgtagggaattacttgtatagaatatcttccggcaagatcagctatttcttggtcttggccaataaaatttaagattggtgtggcgtatacataaataggtaagaggattatacaagtggcagtaagtataatccatgatctttgaacataaatacatgttgattgaatttgccctgctccataagcttggccacatagtgtaaccaatgcagatgacataccaaacaacaagtaaaaatagagggcactgatgacaccttggtaaacagagatagaagagagttcaatgtctccaatatggccagcatagatggaagttgaggagattgtgagaaactgaaacagtgcagacagtgccatagggaatgctattctccatatcttcactgtttctgtccacaaaacaaacttaacatccttcaagcttttcaccggcaagtagtcagattctgaagtgaacttttcggtcactaaaggtgtctccatttgaggagttcttcccttaacactcagtttctgagactgaaaatggggggggggggcctacgtagctgatgtcgtctt

SEQ ID NO: 1887 - DNA, 2237 bp, Glycine max
  misc_feature (2217)..(2217): n is a, c, g, or t
tttttttttttttttaagggaatgatagttgcaatttcattaatcaataatcatgaattatttcaatcctaccgcaaaatatacaaaacattcgccttaaggatttagtcaccacaagtaaagctgacggtactggatgttgatctttaaggatctgtatatttataaattgcatcacccaaacagtagaaacccagattaaaactaaaatgccacatccgtctgtgtattgtgattcatattttaattttaataaactaaaaacttcaatagcttgttttgtgtagcaaattgcatcaaggcatcagattaactctaaaaacaaagcttcttgcttgttggttaggccaagttcatccaatgtcgcggcgctttctccatcactaaaagcacgcctaggatatggtctcaccagtctgtaactgcctggtttcaccaccctaccaatatctatgtagtcaaacagagactgtagcctatcagatcttaggaatcgacgtccacgacgattgccatctggcatttttaccatcaagtttacagcattatcatcatctgaggatggttctggtggtagtgagacttctttggctgctaattttgtttccaattcctgttcttcctgtaatttcctgcgagagtcttctgctctctgtctttcctcttcacgagcagcctcagcttcctccatggccttcaattctttttctctgtctgcttgtaacgatgcaagatattcatcatcctgctgttcccttatcaagcgttgagctgccagtgatggtgaaggaggacgatattggggccggggattgaaacccctattttgcataaactcatgtggtgcataaccatagtgatacccagtcccttctggaattccaccaaacattgccgcttctagcattactgcttcatcatgctcctctgaagaaatgccaccccactcatctgggaaggaatttccattatgatgaggattactgctatcctgtgttgcagtcactgttgctgtgcttggtagtgtgctagcctcagcaagttcaacatctttgcccaatcctgtggatcccgaagacatatgtctagatctattcctaaccagtggctgctcctcaacatcttcagcttcatcatgaaatgacaagcttcctgcctgtaatcttccatttgatgtcacttcccctagtccagcctctgatgacttagatggccctgctgttggtgatccagaatctcccccgtgtactcgcaatgctttttcttgctctgctgtcttcagggacaatgaaactgcatgggcaagctcaggatcctccaaatatgattgccttggctgtgatcctgattcacttaagtcaatttgcctgtcaagtttgtgatttctataattttcctcagcctcctgtttagaagcctcaatggctgcacgaatcatttcttcttctatgtcattgctgtaatctggcaaattctcagattcaggagcactaggtctaacactgctattgagtgaagtatcagccaagatcttttgtgtttgctcatcttgatgtgcaatctgtgcaggtggaatatcgtcatcatcttcatcatcaattatgacagtcccatggatatctggaccatgggcatcgacagttccagtgacatcttcaatggatggaacatggccagcttgaggagtggattgactgccatccttaacctctataggaatctcccttacctctcttggatgggtaacaaatggtgcctcgattgttgaatcaaaacgtgtaccaaatatacctctcccaattgttggatcaagaagagaaaatggattaacatttgctgctaaagctggaagtagtgatggaattctgggaattcctgcatcatgctgatcatctatatccatgaaatcatcttgaggaaatacggcagagctgttgcgagagccggtcgttagatttctgtctccttcactaaaatgtgcattgactgcttcattgagattaccgccatgctcctctaatttttgcagcgctactgcttctgtcaagccagtgatgctgacgaacgtctcgactgcctcctgattaggcctcgccattgaaatcgaaattgtatggaacagaaacgcacgcaactgcaaaattcacaaccttttttgggggggggggcctacgtagctgatttgtttgataaaacaaaaaagaaaaaggggggggnggcctacgtagctgactcga

SEQ ID NO: 1888 - DNA, 1764 bp, Glycine max
ggggataatgcttactatgggtaattgtttattgacattttcttatttgattttttttttttttttgtgaacattgcacaaatagttaacacgagtaaagagtatatagaccaggaatctcagaatggtttagagaaaaatataaattccaccctccatatattatacccaaaatcattgaccccaaataattatgatcactattcatgtaaaaattatgaggaacattaattatctctaatctccttttgttagatcaaattccctcccatccagcttttgaacatctgaagtgcagcttttggttgatccataggaaccaagtgcccagcttcatataccttaaggaaagaaagaggtccatagctattcagagaccctgcttctgcaccatcaacaacaaatttcactgtaggagatgttccaaatgtcttttggcctgaccactccatggcataaacccaccttgaattcccaagccaattgcatatgagatcttcttcccctgcatacacaagcaacttgattccatcctcaagaagagaaggaatccccacttccaagtttttcatccaatcttgccccatagcattatacactgttgtactgcatgaaacatacgtcaaatcttccgccacacctaaagcactcttcacattctgcaggtttaacaacgtctccacgtccttcaagtcatagcacaattctcctacacatttctttctgatgtcatagtaattaatgtcaccagcaatggtcatgatactattgaatatgctatcacaaatattaaatgcagtctcacaactttgcccaccttgagtttcgcaagttttagcagcttgttcacaatcagggatcgactggctgatttggtcgtgttcagcctttgtaattattccgttgtctaatgcaaaatctgggtatgcttggtactgaattgcaggatttgttaacccattaccaattgcaaaacccttgaggttgatatgaattccttcattttctttatttccttggttaacccgggatgcaagagctggaacatagtgtccagcatatgattctccggtaatgtaaaagtcattcttaacaaattcaggatgcgccttgaaaaactcctgcaagaaatcatataaatcattgctaatgcctacttcatcattacgaatgtcactagcatcagaagagtaactaaaacctgtcccggtaggttggtcaacaaataaaatatttgatgcctggtcccaaccgaaatcattccatacaagggacaagttgttggcgatgtgaaaagggccattttcataaaacaaggccaattcacctccacaccctggtcctccagtcaaccatatgacaactggatcatccttgttgctccgtgattcaaagaaaaagtagaacatccttgcagctttggaattaggaagtgaatagtaacctgcatgatgaccaaggtcttcaatagaaggtccagaatcaccaagaaacgagaacttcttctccacgatattccctgggacaaaaccattagcaaggtcatcacctttaacaatgtttactgggtcctttggagataggttaaggcttcttatgagcttttctgctcgtgattttggtgggttattgacacggtcatgggtgaggcgagaagttgcataggaagaagaaagtgaaacaaagaagagcaacacaaggaacaaagaaactttggatagggttaacgttgatgatggtgccatgttgtaatttgagtttgtt

SEQ ID NO: 1889 - DNA, 1125 bp, Glycine max
  misc_feature (3)..(4): n is a, c, g, or t
  misc_feature (6)..(8): n is a, c, g, or t
  misc_feature (10)..(14): n is a, c, g, or t
  misc_feature (16)..(16): n is a, c, g, or t
  misc_feature (19)..(19): n is a, c, g, or t
  misc_feature (21)..(21): n is a, c, g, or t
  misc_feature (23)..(23): n is a, c, g, or t
  misc_feature (27)..(32): n is a, c, g, or t
  misc_feature (37)..(39): n is a, c, g, or t
  misc_feature (42)..(46): n is a, c, g, or t
  misc_feature (49)..(52): n is a, c, g, or t
  misc_feature (55)..(62): n is a, c, g, or t
  misc_feature (64)..(64): n is a, c, g, or t
  misc_feature (66)..(66): n is a, c, g, or t
  misc_feature (68)..(77): n is a, c, g, or t
  misc_feature (79)..(80): n is a, c, g, or t
  misc_feature (84)..(84): n is a, c, g, or t
  misc_feature (87)..(87): n is a, c, g, or t
  misc_feature (90)..(95): n is a, c, g, or t
  misc_feature (98)..(99): n is a, c, g, or t
  misc_feature (102)..(103): n is a, c, g, or t
  misc_feature (107)..(115): n is a, c, g, or t
  misc_feature (117)..(117): n is a, c, g, or t
  misc_feature (119)..(119): n is a, c, g, or t
  misc_feature (122)..(122): n is a, c, g, or t
  misc_feature (127)..(127): n is a, c, g, or t
  misc_feature (129)..(131): n is a, c, g, or t
  misc_feature (135)..(135): n is a, c, g, or t
  misc_feature (139)..(140): n is a, c, g, or t
  misc_feature (142)..(142): n is a, c, g, or t
  misc_feature (144)..(146): n is a, c, g, or t
  misc_feature (150)..(150): n is a, c, g, or t
  misc_feature (153)..(157): n is a, c, g, or t
  misc_feature (164)..(164): n is a, c, g, or t
  misc_feature (168)..(168): n is a, c, g, or t
  misc_feature (171)..(172): n is a, c, g, or t
  misc_feature (174)..(174): n is a, c, g, or t
  misc_feature (176)..(178): n is a, c, g, or t
  misc_feature (180)..(182): n is a, c, g, or t
  misc_feature (184)..(185): n is a, c, g, or t
  misc_feature (187)..(187): n is a, c, g, or t
  misc_feature (189)..(191): n is a, c, g, or t
  misc_feature (193)..(193): n is a, c, g, or t
  misc_feature (195)..(197): n is a, c, g, or t
  misc_feature (199)..(201): n is a, c, g, or t
  misc_feature (205)..(206): n is a, c, g, or t
  misc_feature (208)..(209): n is a, c, g, or t
  misc_feature (211)..(212): n is a, c, g, or t
  misc_feature (216)..(216): n is a, c, g, or t
  misc_feature (218)..(219): n is a, c, g, or t
  misc_feature (223)..(226): n is a, c, g, or t
  misc_feature (228)..(232): n is a, c, g, or t
  misc_feature (234)..(239): n is a, c, g, or t
  misc_feature (241)..(241): n is a, c, g, or t
  misc_feature (244)..(245): n is a, c, g, or t
  misc_feature (248)..(248): n is a, c, g, or t
  misc_feature (250)..(250): n is a, c, g, or t
  misc_feature (252)..(252): n is a, c, g, or t
  misc_feature (254)..(256): n is a, c, g, or t
  misc_feature (264)..(267): n is a, c, g, or t
  misc_feature (272)..(274): n is a, c, g, or t
  misc_feature (277)..(278): n is a, c, g, or t
  misc_feature (280)..(280): n is a, c, g, or t
  misc_feature (282)..(282): n is a, c, g, or t
  misc_feature (290)..(290): n is a, c, g, or t
  misc_feature (294)..(294): n is a, c, g, or t
  misc_feature (297)..(300): n is a, c, g, or t
  misc_feature (303)..(303): n is a, c, g, or t
  misc_feature (308)..(308): n is a, c, g, or t
  misc_feature (318)..(319): n is a, c, g, or t
  misc_feature (321)..(321): n is a, c, g, or t
  misc_feature (324)..(326): n is a, c, g, or t
  misc_feature (328)..(328): n is a, c, g, or t
  misc_feature (330)..(330): n is a, c, g, or t
  misc_feature (332)..(332): n is a, c, g, or t
  misc_feature (334)..(334): n is a, c, g, or t
  misc_feature (339)..(339): n is a, c, g, or t
  misc_feature (348)..(348): n is a, c, g, or t
  misc_feature (354)..(354): n is a, c, g, or t
gtnnannnannnnnanatnananatannnnnntaaannnaannnnnaannnntannnnnnnncntnannnnnnnnnnannaaanagntannnnnnganngannaaannnnnnnnntncnacnagaanannntatntaannancnnntaanaannnnntacactntaancgnnanannncnnncnnanannnanannnannnactnnanngnnccananntaannnncnnnnnannnnnncngtnntanananannnaaatgtannnnataannnttnnanangtaaaaantatnccnnnnacnggcanggggaatttnncnaannnangnananaaagntgagctacncaaggnagaattcatatcattcaatatattctggtgattggagaagatataatgcattgagaacttaaatcaaaaccttaatgaccaaaactccaaactagaataaaggttaaacatttaacaaaaatacaaattgtaaaattctcagcaaacaatacttaatttttccttgatgccatctactaataagcaaacataaatcctagaatatgcatcatcagttctcaaaaagatgttcaatcaggcagcaaccacaattcgcccagcaacttgatcaagatcccttcgaccactagatgtgattttcctacctccttttgtatcaatctcaacaatgctcatgttttgcaattgttgcagaatgtgtcttgcaatagccccactgctcttgcagaaatgtgggggacggcttccatttctcttgcttccaccatagatcctctggaaagccccaacaccaagaccgcctctcaaataaatctttcttgccattgaggcagccctaacataataccagtcaggatcatatggagccaattccttaaattttgctgtttttacaatatcagtccactcaggaagctccatcttgccggaacgcttgagatgggaggcgtaagccttcacgaaatcgtgaggcgaaacatccttcacggtcctcgcggttgccattgatgaatcaaagagaaaagtggttatctcagaaactcaatttctctctccgcagtgcgtaggcgaaagggccccggctccccggctgcccccggccccaattgg

SEQ ID NO: 1890 - DNA, 3893 bp, Glycine max
cccagattactgtactccatgtttgttgttagaaacccattcatttattgcacaatatctgtaaagatattctagtgtaagaaataatttcaaggattaatttattcaattaacataatcacacgcttgttttttttttttttatgaattttcaaggcatcatatattaatggttaaaatgaattatttaaaaaagtcattatttttcagattcttttaagttaaaagaattatttcctcgcaggtattatattttcatttattattcacgaacgaaattgaataaaactaatatttttgccgacaccgaatattttatctgtaaattttataaatcattatttttttttaattaaataatcaccacaaaacgggccaacactttaaccacaacttgagacagaatgcaacggggataaaggaacgttaaaagaaacactactttcgaaccgggccaagtgtagaaagaaaagaaaaacaccattaacatgatcaacagcatgaaagtcacaggtcaagcattcaatttaagtgatacttgctacgtaacatgctgaaagagtagctaataagacaaagaaaagactgaaatcacgaaatcggctccttcaccatacaagcaattcctggacacatgactgaataataccaagtcacattgaactcgttgaggcacaaaattaagaaaagaccaatgatctcagcaaacaattcttttggttttgctaagacaccaagtgcagttgtgcagagcctgcaggcatgaatagtgtctgcggacaagatgaagcagcagctattacgtattccacgccaattcctaactttatattgccctgtctttttgagatgcactacaaactcttaataccacgtaactacaagatttacgaaactgtttgtcacaggcatattttacaccttttgacttgtatagcctagcagcaaatagtatcagcaaaaacacttccattttctctttctaaaatagcatccctgcatccttttctgagccaaccctcacaataatatcgaacccctgcatcatccatcttattcctcgggaatatccaacacagtagcaattggcacatttgtgaaaccagatatcccatcggtagttaaatctggccagaaatactgctttctatcaaacttggagtccaaagccaccaaacattatgttaaagcaatcattcacttacatgtgaaagagaaactcatgcataatcagaatctatccaaaaatcaatcaagctaaatgtgacttacacaacttgtaaataagaatatttcaagaacctagcattacatgtaagtgaatgatagtagtagtatattggaagaaaaaactataattggtcctttatgaaaagctttcctcgttaaaaaggattgattctattcagcattgtctgatgaagttcattatggtaaacagtgagcatcacaaataattttttaattaaaaaaagacactcattaagagaagggaggataaataatcaacagaaacaaccaataaaatatacaaaatcaattgcatgaaattaactaaaagtagcttcagtacatagtaatcattagttctcctcacaaattcacaggttctttacatgctaattaggacaacactttggcatacactttaatccctagtacataaatgaacctgcaaacctaaggatctctcttactattttttgaaagacctacccaaccaaactctaccccagaaaggaaaaagaaaaggaagaaaagtcaggtcctagccttatggccctcattaatgtccatgagatttgacaacgaagaacaaaaccactagtcctccccaatctttcattttaccaacacatacaaattagaaagaaaaaaaaatagcgacaaaataaaagtaaactgctaacctacgatctacaaataccaacatttacgcattaaaaagttgtagaattcattttactctggccttcccatcaaaagtctattcagatgaacaacttaagctaacatgggacagacaaattatcatctccggaagtagtctctgagcttgtcccaactacttgattcttgctttcatccttctcatttaagaccacgtcatttgtgttttcatctgttgctccttgacttgttgattcttcatttctgttcagcatttcaaaatcatcactctctttgttatccataacatcattatcttttgcaaaaaaattatctgtcaaacactgttgtgtcactacttcatcctgctgctcatccttctccttcacttcatcaaacacacaatcatcccccatttcatgacctctgatctcatccttcttcgcaatagcctcatttggaacagacccttccataaaaatatcatctacaccttcagcctccaatacgccatcattatccaacttagcaccagcctcaacatttccaactctcccactttccggcagcgagtcagccatctcaacattgttctcaattcccagaactggaacatccgatccaccctcactctcattatcagatccattctccacaacttcctcgttcacatcctccacagcttgattctgcctctcaagaaacagcaacctccttcgcagatcgcccaactctctctccatcaggaaaaggcgctccttcaaagtcaaattctcctcctccaattgagctatatgggaatcctgatcatcaaccctattctcgagcacattattatactcaccgccatagttcgggtatatcatctcaaaccggctcaaatcatgatccagcctcctctccacctccacatgttcctccacatcactctcactggacccaccgtcctcctcatcctcataatcatgaacatcagcctcattcccgggcgatcgaagtctaatcaaacccttcatcgacccatatccatcaacaccccactcctccttcgccatatcccctaacacctccctcgacggcgacaatataggcgtgggaagcactgcgggggtcacagggcaaggcgacacaagcgatgctatgccaccggacttcttggcacgaataataaacgacgtcgtattcctaggggcataaggagcgaatctattattaaacttcttcttaggataaaacttacgcgcttttaagcgattttgcgattgcaactcgtgcaacgttgggggctggtaaccaacgacgggggggggggcctacgtagctgaagcgattccacttggaatgggtttttccattcttctagggtcctggcgttggtcagttaccttcttccccttccagttactccagtagttcggtttcatagggttctgaaacttcatgttagggtccagaggaggatgctgagaccaacccttgttgtatccacgattcatcatcggaggctgaggctgagaatggttcatcataatctgcgatgtcttcatttgaggctgctgcgcttgctgattgtgcgagagcatctgaggcttcacctgattcataacctgaggttggttcatctggttcaaattcataatcatctgcgattggtcgttcatcttaacgaaaccctaggcctaacggttcgggctataaatcgttacgatttctaacgaacggtcaagaataaggtagtatcgccgatcgcgaaaaccggcaccggtaaagagagaccgaaaccctaaattccttttttttttctctgaaatatattcggaagggagaatattagatttagggtttgatcttaagggaatcgaactacggctgaaatcgtattcctctttcgagattttcacgaatctgagagaaaacccccaagttcttgattttcttttttttttttctcgaaaattctggttattatcgctgaagattatgcttctgtccccttctgtcgt

SEQ ID NO: 1891 - DNA, 3042 bp, Glycine max
gcgagcggccgcccttttttttttttttttacgttaacagcttcattcattctttaaaattaaaacattatattaatatcaaaattctatacagattaatacttaactagtattttaagatccttattaccaggaacctaggctattgaggagtttgttgagtccattacatgaaattatgaaaaactatgttccacttatgtaatgagaacacattacccctaatcacatgttacttgttgccaactataaggtgaagggtcaagggagtctattgattgatcagaatacacaagttataataaatcttctatactgtctttgattctcacgaataaaaaaaaaacttaaagtcaatctttttcacatatctcaggaattagtgatcaatcctgaggaagggtaaaattatgccatctctgacacataatagcattgaccaatatcataataacagttatcaaattagtactactagcttaagagctaattaagttgcatctgatattgtttcctctgtagacaagttttgaactttttagtacttcagagttaaactttcatattcctatcttaatcaacacagaaatcttaatttgttcaccccttcttttcaaatgaaagcctattacattcacacaggtacactccatccttcaataccatgccagaaaagaagtcgatagccccaaaaaaaattaaataaatattacacaatttacactctcaactagctattataattaaggggggaaaaatgggttacagatattgaaggatgccatttcaaagcagcatcacctctgggagtatcaacagcagttgaggacacaaatcgattcagtacccgttgcttacacttccttcccagaaaaaaattgtcattctatgaaaatttaaccttttctgatgccatggtagctgcaagcctcttccagtagcaaaatcacaatatgcatcatgccaacctaatactgcacctattggaatacagctgagcatccttgaatcacaaggactcacatgaaattcaacttgaacccacaatcccttgcttactactgtgattcaacgacccaccattttcttcgcaattgagaaaattaagctttggtggctgagttgaactgaatccattggccttgacagattcggggcttccctcacttgagtttgtggcccttgttggctcggagttcttactggatgggttatttgaagaaacaggttgttgcaacagttccatgcatttcaaagccggaacatctcctttacaatatctgcgccacatttgcctatatgttgactctagaccaaggataaatttagctccatcgcagagaggggacttagacatgagctctcgaagactcattctcaaattttgtagtgccgaaatatcagaggccaacttcacagccaattttacatattcatcttcatttttggcaatcaaattgcccagaccaactttgctaaggagactaacaccaacattgtgtgcatgcactgaaccagccattgtaacacatggaactcccatgtataaagattcacaagtcgtggttgttccagcatatggaaatgtgtccaaactgatgtccattagagaataagcttgcatatgatcatggttaagaagaataaggggcagaagatcaactcgtagtggttcaagacctaacttctctagtgttgaaagaaacctctgtctcacactatcacagcaaaacggtttacatttcaccacaagacgagaatttggaattgcacatagtatctttgcccagacctgcagtaccttgggtgtaatcttggcaagattgttaaaactaccaaatgtaacgaagccattggaaagagcaggagttggacaaacaggaccagcctcaggggaaggagtgtaacaaaggaagcaatccggtaatcgaactaactcttcaacatgcttctgcctttgtttcgggagggtctgcctgagaatcagttattctataatcaattgtaggcaatcctgttgtattgggataaccaatccaagtcacctgaacgggagcaggtcggcatgccatcattcccagcttattgtttgcagtgtgaccagtaagctctattaaaatatcaacttgatcttctctaaccatgtcggcaaccttcttttcatcagttccataaatatctttccagatcccacccttctttaagactttctctctaaaccggatggtttttgcatctgccttgacaactgctgaataaacaaccactttataattggtatagtcatgatagagaaggggagcttctatgaaatatgacacagaatgtgtaaaataatcaggagagacatatcctatcacaagaggccgttcaggatcttttgagttgtcccatgatgtgaactgtgaatatagtctcataaatcgcctaccccagtccctgtgagcctcaaaaagtttgtcatcatttccttcatctatgtaattcatcgcaagtaaacggttctggccagcatttcgagaatcaggatcaatcttaagacattgctcataagcattaattgctagagcgatatcaccagcatccctgtaaagaactcctaggttattgtatgcttctgcatatgttggatttgcgattatagctttctcaatcatactcgccgcagcatccattttaccctggacagtgtatacaacgccaaggttgtttaatgactgtgaaaagttaggtttgattcccaaagcaagctggtaacattccactgctttgtcaaggttgtcacgatctttatatataacacctagattcttacaagcttccgcacaatgcggattgaagtggaaggcaagttgatagaacacaatagccatatcaaacttaagcatctcaccataagcaaccccaagattatacatagcatcagcataatgccaattataatacaaagctttcttataaaaagccacaccatggtcaatgtcaccctccaatttaacctttgttcccaaatctgtcaaagctatagccatattattcttt

SEQ ID NO: 1892 - DNA, 1077 bp, Glycine max
ttatttttttttaaaaaaagccagcctcctgcaaattggcaatcgaataagtggtacatgttttaaaaggttccatacaagagcaacaatattacaatgattggaattctccgtctttccacagtccaataattcgatgttatcgtactccatagaatctgcgcctgaaagaaccaaatcctcacttatcaaaatactacctcaggagcccttcctacacattccagtcaataacatttaatataatagtttatatctcgtaaagaaacattccccactcgagcattttacgacaaaagagctcacagacatcaaagcattgttttgaacaatattaatgcttccccttccatcatcagtattacaactatgaactcttcaagcttttatacggaccacaaatgaacatgcaggaaggtttgatatatccgcagaaactgcacaaggaattcccaagttggaaagagctcctctaatgatcccacatgggaagtaaagatgcatgctcattgcttgtgctgccttgctttcagctgtaggtgaagtaatatcttcaactggactaacattttcagtggatggatcaattgacatccgtgcaagccagcgaaatttattatcttgcaatacaaatgtacccctatggtttgtcttcaagttgtcaatctgcttcttaaagagctcagaccagaaatccttgcagatgaacttgatggcctccagatgatccgtgaaccgaggccgatccatggtatacctttcagagagctggtgaccgacctgatatccaatggcctcgatccggcgtgcggcgagttcaggcttgtttgcgtagaatcggttgcaatagcacgccaccatctccgtcaataagctatcaatgcaactctctgatacttcccgaaccattctctctctctctctctctctctccctccctcgctcgattgcttgctaatctatggaaaatgaaagaatcagaatcactatacactctgaatctgattactcatactatactcatcgtccttgcttcccttgcctcaccccgatctggacccgggtcgtacgcgtggg

SEQ ID NO: 1893 - DNA, 1565 bp, Glycine max
ttgttgtttgtatgaattttttgctctgctttttattcagaaacaggaaggcaaatttcattattttacaataaaattgaaataatttggatcaaaatgacaaccacggggtacacccattattgtaaataaatggctggaataataacacatctactatgactatctacgtcctgattaaacacgggggcacaatgcttcacatttaaacaacatcggtacaataatcccctatcctctaagacccaaatcctgattggactagtttccaatacctcatattatgaatatagtaattggctacaccggtccattcgttggttgaaaagattcgtcttcgtacgcaccatgatccatgcctaatcaagcttgacattagaatatagaagcgtgtcccttgtaagcggcatattcatgaggtagcatatccccataaaggttgaaatgagcaatattattcctgttacccaagcaagggttctcctaaccagcaccacttctggcaatgttgcattcactgcatttgtttctgccaaccatcgagcatacggatggtgaggagtaaagatcacatcaaacttcttgcccgactcttgagtagtggccacatgacagtatataattccaacaatttgacctttgtatgcttcttgcaatgaactaaatatctttgtcatagttgcatacaacaattcaactccatgctgagcaatactttcagtttcatattgctcttgcaaaaccttaatgccattaaagcatccagttaacaactcagcaggaccctttgcactctgtgataaattgtcatgcatttgaattgctctttggacattatgtgtgagagacataagacctacgatgaacttcctttctgctttctttgacatatggagattcactgaggcaccatttgccaatggaatggtaagcactccatttaatggctcaagggcatcaggagcatatgacccacctatcaaagaagaaaaatcactaatttctttgtcagtccagtcttccagttgttcatccaaagaaaccacagaaacatcagtttcatctggaagttgaatgccaactttatctgaatttgtactccaaaatgaattgctgaacattggattatcctggacaatttttccaagagcattgattccatttacttccagcaaaaacacagcacggggcctcttgaatgggttaggaattagaacctcattcaacttggatgagctggcagcagaaaaggtggaaggaggtgcaaaaccaagcaagactgacacagcagcaccaacttcttgaagcaacattgaaggttgctcatcgttggatgatctagcgcgaaggaattgattactggagctatcgacgaagaagacggaaccagaagcctcacccttgatttcaggagagaataaagagacaatgaggagaaggctccaaatgacggaaacgcgaaactccatcgcagagacagagagagagagagatccagaggttccacttcagcaacgtgcttcgttacttctcggaggggggggcccctcgcggcgctctcgcga

SEQ ID NO: 1894 - DNA, 1662 bp, Glycine max
ttgtgtgttctttggccaatttttttttttttttttttttatgaaaacaatgctctgctcattatttagaaacagaaatgatcattattttacaatagaattgaaataatttcgatcaaaatgataaccacggggtacacccattatggtaaatggctggaataataacacacctactatgaccatctacgtcctgattaaacacgggggaacaatgcttcacatttaagcaacatcggtacacaataatcccctattctctagactcaaatcctgattggactagtttccaatacctcattatatgaatataattggctacaccggtccattaaacacaagtaacaaaagctataacaataatataatcatgcacacggattagaggcatcaagaaaaagactcccccaattacaagcttcagcggcagaccggttctccttcgttggttgaaaagatttgtcttggtgcgcatccatgcttaatcaagcttgacattagaatatagaagggtgtcccttgtgagcggcatattcaggaggtagcatatccccataagggttgaaacgagcaatataattcctgttatccaagcaagggttctcctaaccagcaccacttctggcaatgttgcattcactgcatttgtttctgccaaccatcgagcatacggatggtgaggagtaaatatcacatcaaacttcttgcccgactcttgagtagtggccacgtgacagtagataattccaacaatttgacctttatatgcttcttgcagtgaactaaatatctttgtcaaagttgcatatagcaattcaactccatgctgagcaatacttccagtttcatattgctcttgcaaaaccttaatgccattgaagcatcctgttaacaactcagcaggactctttgcactctgtgataaattgtcatgcatttgaattgctctttggacattacgtgtgagagacataagacctatgatgaacttcctttctgctttctttgacatatgaagattcactgaggcaccatttgccaatggaatggtaagcactccatttaatggctcaagggcatcaggagcatatgatccacctatcgaagatgaaaaatcactaatttctttgtcagtccagtcttccagttgctcatccaaagaaaccacagaaacatcattttcatctggaagttgaatgtcaactttatctgaatttgtactccaaaatgaattgctgaacattggattatcctggacaatatttccaagaccattgattccattcacttccagcaaaaacacagcacgaggcctcttgaatgggttaggaatcagaacatcattcaacttggatgagctggcagctggaagggtggaaggaggagcaaaaccaagcaagactgacacaacagcaccagcttcttctagcaacagtgaaggttgctcatagttggatgatctggcgcgaatgaattgattactggagctatcgacgaagaagacggaaccagaagcctcacccttgatttgaggagagaagaaagagacaatgaggagaaggctccaaatgacggaaacgcgaaactccatcgcagagagagagagatccagaggttccacttcagcaacggggggggggctgcctcgctgagctgactcga

SEQ ID NO: 1895 - DNA, 1375 bp, Glycine max
tttctttttcctttttggacaaaaataagaacattttattgaacaaatactgtttgcaataatcaaaagctatactgaaaagcaaaaaaagaaggaaaaagctaaactatagaaaaaaaggggaaaaaaatacaaactgtctagctaccctatcaaccattagtggatcaataaattagcaagcaaatccttatgaagtactgtaaacacctaaaagcttagttttattttgggtcatcctccaccagctgaacgcaattcctcgagagcaaccttgatctcattctgcaccaattccaaacgtttggaatacacttccagctccagaatctgttgcttcctccacttctcatccatcgccgtttccccaacaatccccaaattcattaaactcattggcattggcatttgcaagggattcaatgcgaaccctcttcccaatcccatgccaccagtaccacacgccaactccttcaacaccggcgacacgcaactcctcaccgtctcttcaatcaaaccctgtaagttaagcctactattacaattctcattattattattattattactgttactattgcaattattatctctattcaacgttgaaccgtcgttcaactcgcgcttctgaggccgcgaccgcttccgcgaaataggcatcttcgccgaattgccgaaattagggttagtgatgatttcgtcgtcgtcttcgacgggaccggtgattggagcggtgttgctccagatcctgcgcgagatttcgaaggtggctcggtcgtgagggctcttgaaagagacttccttgccggagctgattttgttgaggacgttgcggtacttcttcttcagccttcggagcttctcgacgagctggttcttgttgaagccgagttggagcttcgacttgatttggtcgtagaacagggcggtgtcgttgtggtgagaggatcctcgctgcgccgtgtactccagaaaaccctgcaagagcccgatctcgtcctcgtctgtccacagacgctggaacagtcgccgcgaatcgtccagcgcttttttctcctcgattagctccgtgcgcagcggtttcggcgaggaatccgcgacggaggagatcggaattaacgcggtgtcgagcgtttcggaagcgggcggcgcgacggcgatgacggagggagggggttcggtttcatcgtcatctaagacgtcgtcgtcctcctcctcctcttcatcctctggagtttcgtcgtcgtcgtcgagatcttcttcgggaaaaacggcgtcgtttagatcggattccatgggagtgagtcggttaggcaaagagcgcggtggggtgctttgctttcacggggtttgttttgttagtgtctcttttgac

SEQ ID NO: 1896 - DNA, 1819 bp, Glycine max
aacaatccattgaatcataaaaatacgaaagatatacttttaagaacaaagtgctcaggaagaacgttgcacaatggagaacccactactttcgcatcttttacaacatatatataatggtacaaagccatcactccgcaccaattatttcaatctgttctgtacatgtatgagaccattgaaatttaaaggaacataaaaacggctaaaatataaaataaaacatttttattttaatggacaagtgctctaccgaatcagcgaaagctaaaaccgaaaagaaaaacactagttaccacttacaagttactacgactagctaacttctaagctatgagtatgaaccaaccattgatggataaattaccaagcaaatccgtatgatgaagtgaacacgaagagcaagaagaactccaatcactcgctacaaaaccaaaaacaaactataatcctcctcctccatgtgaccgcaactcctccatagctgccttgatctgatcctgcaccagttccaaccgcttcgaatacacttccaactccaatatctgttgcttcctccatttctcatccaccatttccccaccgccaaaactcaaattcataaaaggcatagggttcaagttcaacgaaaaccctctccctccaaacgctcctcctcccatggcccctgccatcaattccttcaacaccggcgacaaacaactcttcaccgtctcctcaatcaaactcggtatgttatttccataaccactgttacagttattattgttagtaccagcagcagcagcagcagtagtgttagtagcagcagcagtagcagtaggtgtagtattgctaatacaattatgatctctgttcgacgcggatccgtcatttggctcgattttcaccgccgatcgaggccgagagcgtttcggtgttttcttctccgtggaattcctgaaaatcgtttcattcttaagaattacagggctaaaattaaggttagggttggggctacggctagggttgatttcgtcgtcgtccaatgaattgtcgccgactggagtcacgttgctccagatcttgcgcgagatttcgaaggtggcttgatcgtgagcgctcttgaaggagaattccttgcccggagcaaatcttgttgaggacgttccggtacttcttcttcagccttcggatcttctccacgagctgattcttgttgaaatcgagttggagcttcgacttgatttggtcgtagaacaaagcggtgtcgttgtggtgcgaggatcctcgctgcgatgtgtagtcgaggaacccttgcaagagctcgatctcatcctcatcggtccacagccgctgaaacagccgccgcgagtcatccagcggcggcggcggctttttctcctcgattagctccaggcgacgccgcttcggatcggatgagtcggcgaggacgatggtggcggtggtggcggtggcggtgggcttcgaaattggagagccaccgccgccgttggagacggcggaaccggggacggcgacggtgacagcgagagcggtggagggagagggcacgttttcttcgtcgtcgtcttcttcgtactcttcgtcctcctgagactcgtcgtcgtcgtcgtccatgtcttcttcgcggaaaacggcgtcgtgttgctccgaagccattgagagagctttggtttggttagcggttaggccaagcaaagcaagagtgggctgagtcacgggtttttagttattgttggactgactcaatcaaactcacctctacttcgctgctggtaatgggggaatcccaagctcgagccgctcgagccgaatt

SEQ ID NO: 1897 - DNA, 1043 bp, Glycine max
cacaagatgaaccagggcataacagaattttcataaaataaaatggtatcgaaattaagtatgcttttgctttgcctaaaaaaaagtccaatgttggggagggaagaatagaaatacaaaaggaacaattttcagtgtttaaacacctttttttctatttcccatcgtattccgtagttctttgcttctcaagagttactttacacgctgcagtgtcctaaattatgcaaaagaatctcaagttatgatttagacttgtgggggttggaaatactttcttccttatccaataaccattattttggcactagaatatacatgaattatatagtctcacttttgaaggcaaccaagggagcttcttgctacaacctcactatttccttcataagagcaacaaaaaagattgactacagaattagtgcccatttgttgttttcacagccaaattgttatctgtcctattttgatgggctgtctgcctgtgattaatatctttcctgagacattgccatagtgcatcataatgaagaagaccaacaattctcctcttcatttctctactgtgatctacaccacgtttaaccactggtaattgcttaatgcccttggcctccatcaactctttggccatagccaaactagtatttggatagcaggttaaaattcctcgctcttgtccacgataggtcatccctcgagtacaaacagaggaaacgaggcatgtgtttgcatccaaaatccctgaatcgctcttcaaagtgtcattagacttctgggacagacaccttttaacgtcaccacatgtcaatattccttctagaaaatcttctttatcaactaccagcacacacttctgctggctgtcatgcatgcatttcattgcatctttcagagttaaagatgacaaaaccttcagatattgttttgacatggcccgggaaacctgaagattgtccagaagcagttccgtatcaattggttcaagatctgtgccatctccaacaatactgagttctgggggggggggcctacgtagctga

SEQ ID NO: 1898 - DNA, 1167 bp, Glycine max
gagctcactattcggcgggcgccttttttttttttttttttattttaacaaagccttattccccttcttaacattatcacaactctgttgctagaaaaaagagagcaattcgtttgtggactaatgggtatcccacaagcctcacaataatacagatatagtgaattcccacacatagatgtaaattccctttctaaagggaaaaaaaatagggggaatcaccaacttctatgtgatctactatctattattatttttatatactatgatttggctcaattcttctggatcctactcctcaaaaaagttgagctctaccctccaaagatgctacactatttacagaagcagatttggcatctcctttgcagttcatagaaccaagaactcgcttattatcacgataatgaccaagttgtttttgaccagagagacgatttacaagtctgtctagagcttccttcatccaccagtgttgacaaacttcccttgcttctgtgacgctcatccatattctttgacgaacgttttgctctggccagaactccaattgttcttgaacaagtaaagggaacatgtagccttcatagaaagtgtcatgagtcttgctcttgaaactccatttgcccaatttacccccaacaatgcctcgcaccccagcttcctccatggtttctctcaaagctgcctccttttttgattcgtctaattcccagcctccctttggaaatagcatcccttttcctttctgggaactaataaccagaacttccaattcatcagaaacaacatccaaggaagtcttctccccaatcttaaatctgtacggtatgcatcccacaacttggcgacgaccttttctataacgttgcaactccctaccggtacgagaaaccaatgccgcaacattttcttgggaaaccacagccaccattttcttttcttttttttaaatttttaccttttctaaggatgtttgaaacaaagagtttaaggaacaagagaaggaacagaaacaacaacaacaacaaacgaaagcaaattgtgttcagtagatagcatcggggggggggcctacgtagctgacttttaataatggtaaccggttagagagagagtgtgtgtgagtgtcctcacaggagagagaaaataattttgttttatttt

SEQ ID NO: 1899 - DNA, 1049 bp, Glycine max
tgtttcgaagaaggatattcttttattcaacaagaggtgctcatcacaaaatgctaaaattttaaaatccacgtaagaagtgctcttattttatgtgactagcgtaagtgagaatacaaaaaatacttgtgatgaccaccgaattcatcataaaattgcgaccaaaattgggtgtagttctcagaataagcagagagactcccctagcaacaatttacactcatgttagataattgactagacaaaccagatccaccaccatccaaatcccttttctttggcttcagtgatggaggtacccagttaccaataatatcagcatcagcatgttcatgatcatcataaccaatgacatcatggctaggctctttacgactcacagagagccacttggcttgcatgtatgaagcggttctccatggtggcacgtggagacccttctctcttaggcactgtttggcagcagaacatagcagggaaattatcttgcacagtttgttctcagtcccaaccaaaatcactgggaccgagtctgtcaattccttgtagttttgtgttggcctcgcaacttcaaattgggacctaaagtctatatctactatcagcctcgtaggtttaccacaattctggtcatcctctattatcacttcaatatactcgtactcaccagcaggacaacccatagaggtggcccaagaggtgtggcatacagaagcatcaaggccatccattttcatcctcataacaagccatctactgagacttgtcgtcttctccgcaccctttctacctctcatatgcttcaatacacacttcaataccttagcctcacatgctgtatcaccatcactccttagaatatcctgtagaataaaatattgagttcggtggtttaaggtgtggcaatttgaggaagtggaacttgtgggggatgttgattcggattctataaaatcttgcaccatttgtaccaactcgtcttcctctaaacttcccatctgttttaatttctcttctctactatagtcaaagacaaagagaagaagaag

SEQ ID NO: 1900 - DNA, 2941 bp, Glycine max
gatttgttgaatcaacacggacgtctggggagtcaaattacgggtctgagtcatcattaggggtgtttccaagggtgtcacaagagttgaaggaagcactggcaacgctgcaacagacatttgttgtctcagatgcaacaaaaccagactgccctatcatgtatgccagcagtggtttttttactatgactggctattcttcaaaagagattattggaaggaattgtcgatttcttcaggggcctgagaccgacaagaatgaagtggccaaaattcgggatgcaactagaaatggaagaagttattgtggcagacttttaaactacaagaaagatggaactccattctggaatcttctcactgtcacccccatcaaagatgaccatggcaatactatcaaattcattggaatgcaggttgaggtgagcaagtacacagaaggcatgaatgaaaaggcattacgaccaaatggattacctaaatcattaattcgttatgatgctcgtcaaaaggagaaagctttgggttccatcactgaggttgtccaaactgttaaggacccaaaatccattattaatgataggaatggtgatactgctaccatgcctgaagagcaagagaaattcaattttgattttgttttgccaaagtctgctgatattgggaatacaagcacacctggtagacaagcttctccactgaatatccaacgcatgagttctagtcaagataagagcaagacatcatcacgatcaggacggatttctttcaagggtttaaaagggagatctccgagttctgcagaggagaagccaatatttgaacctgaggttttgatgactaaggaaatagagtggtctaacaatttggagcattcactaagagagagggacataaggcagggaattgatctagcaaccacattggagaggatagaaaagaactttgtgatttctgatcccagacttccaggcgcccccggctcgagtgcatctgatagctttcttgaacttacggaatatacacgagaagaaattttgggacgaaattgtcggtttcttcaaggaccagaaacagatcaggcaactgtttccaggataagagatgctatcagagaacaaagggaaatcactgtacagttgataaactatactaagagtggaaaaaagttctggaatttgtttcacttgcaacctatgcgtgaccaaaagggtgaacttcaatacttcattggtgttcaactagatggaagtgatcatgtagaacccttaaaaaaccgcctgtctgagacaactgagcaacaaagtgctaagttggtgaaagccactgcagaaaatgttgatgaagctgtccgagaacttccagatgccaacttgagaccagaagatttgtgggcaattcattcccaacctgtctttccacgacctcacaaaaaggacaatccttcttggatagcaatacaaaaggtagctgcaagagatgaaaaaattggcctgcaacattttgtgcccataaggccgttgggttgtggagacactggcagtgttcatttggtggagctcaaaggtacgggtgaactatatgcaatgaaggcaatggaaaagtccgtaatgctaaatcgtaataaggttcaccgatcatgcattgagagagagattatatcattattggatcatccttttcttccaacactatacacctcatttcagactcctacacatgtatgtttgattactgacttctcccccgcgcgggagtcggttgccttgcttgacaagcaaccaatgaagattttcaaagaagaatcagcgagattctatgcggcagaggttgtcattggtttggaatatctccactgtttaggtataatttaccgtgacttaaagcctgaaaatatcttacttcagaaggatggtcatgttgtattagctgattttgatctatcatatatgacatcttgtaaaccacaggttgtgaagcaagcgatacctggtaaaagaagatcacgaagtgaaccaccaccaacatttgttgcagagccagttacacaatcaaactcattcgttggaactgaagaatacattgctcccgaaattataactggagctgggcatactagcggtatagattggtggacccttggtatcttgttgtatgagatgctctatggtcgtacaccattcagaggaaagaatagacagaagacattttccaatattttacacaaggatcttacctttccaagcagcattccggctagtcttgcggccaggcagttgattaatgcactactgcaaagagacccaacaagtcgtataggttcaaccactggtgccaatgaaatcaaacagcatcctttttttcgtggaatcaattggcctcttatccgcaacatgactccacctccattagatgttcctcttaaattgataggaaacgatccagtggcaaaggatataaagtgggaagatgatggagtgctagttagctcgattgatatggatattttttgacagtttgcactgtttactcaggatcttaatttggtcagcatcttatctgattcatgctgcaacagtcggagtctaagacaatattcaagtataatagtgtctattgatttggttatagtcaaataccatcatgtgatcttccaatagacaacttcaaacaaaatctaagttgtgtaggaatagcagaaaagtagaatgtacattgaataaggacgttttctgaaagaaacaggcatcctagtcaagcacatcgacaatacatcaataacatatacttttgtagatggcttaaaagaatcgtacatgtaatcaaatttatttattaacagtctaataatcctagtgtagtttgtagggcgtttaagttcacgggcctaatgattttttatgccaatattagtgagaaagagaaaatgggaatatttcgg

SEQ ID NO: 1901 - DNA, 1554 bp, Glycine max
ttttttttttttttttgcttataataagggagggggggtccaatactggccggactaatttggcatgttattgttgtttcaggtaacattaatacatacatacaagcagcaaatgtcacagactaggtctcaaatctcaatctaccttttccacttatttggtgctcccagactcatcatatgcccatactaccataggacacaatttttcataaaactaaaaaaccttaccttctccaactccaacaaccctggtcaaaattaaaagacaaaccgctctgaaacaagccaaagtgagtgatacaatcacttttatggtgctgtcgactgattattctgcaaaccctcttccctctctgactccaccaccttctccttctcagcaatcaaagcaacctcattctccttctgctcccccccaacactctgtgccccagtcaaccttgccaacaccacaaaagacattcccccaagaacattgttcacacacctcagcaccaacactgaggacttgaaagctaaagggttaagcaccctctccaacatgaactcaactccattcaaagtctggtacctaagattgctgctaatccccatgtgagcagcccaagtgagagcattcaaaatggttggtggaggcttgttgggggtctcaaatgttggatccatcttcttcctcatcttgattaacccatttgaaagtgtggttccaacaagtcctgcaccaaagccaacaacagaaaaaatggtccctttgtacaccaaggttcctaacctatccaaaagggaaaatgcaccaggctcaaacatgtgactcttggggcatgaggcaaatagggctggcaggtttgatgctgatgatgtcatggtaggtgccaatagatacatgagagtgaaattcagaatagccccaaccaccaaagttgaaaagacaaagtcaagttcattcaacccaaaattaggccttgaagccatgtcacctaatacacaagcactcacacccaccaactcctccatcaaaaccttgaaagggaattgtggatcagcagcaacccttgatctccaaccgttcagaaaaagacccaaaattccaagagatgaatctttggattttccttcatcatccccccagctttcacctcctccaccgccgccaccactgccaccaccacgtccgaccccatctccgccggcgcctccggcgaaggaaagtttcaacctttggggcaaatgaggcaaattggtgagatacagaggacggttctgaagcttaggtggtggtggtgatggcgatgatgggaaagaaagaacatggttttgaccagagagtggtgacaaacgcaacatagccatggctgccatttgatctggatctggatggtgtggtgatgagagaacaaatgctggctgcttgagagacagaagaaccaccgaaaacgaaggttaaacttaaaccttcagcggaaaaaaaccctttttatatttatatatgatatatgatagtttaggaaattagaagctaaaaacacaaacactagtgactagggtaattta

SEQ ID NO: 1902 - DNA, 1952 bp, Glycine max
tttttgcctttcctttaactcatcaagaaagattgatttaaatttatccgaatgggttataggtaataacaaaaatgcattcacatattcctcatacaaatttaggaagacaagcacgtgcatgaatacctaaattgacaaacatatcgtacagtatatatgatggtttagatgtactttaaaccagagatatattgttgcctagtaattagatactgggccagggaatatataactcctaatatacccaagatcttaatcttgagtacatctgtacaagcaataggaagcagattaagaggcaaagttatccacggggatgagtcactctgcttcgtatggctccacacgtacctgttgaaaagtatatgactggggaaggtaagaatgaggagggccaaattcttcaccacataaatccagtctggcccaccgatttgaagaccccatccactatttccttgccaaacatcttcccatgttctgtagagggcagttataacgaagtaggccgagatgacaacagtaacaggaaaatatctatgtttgtccccaaaaccagtaacaaaatccgaatcttgattaagcagcagcagaataggagccaggaaaaatatagagcggtttgagccaccagtaaggttaacattcaggactagacatatggcaaagcacaatactgtggcaacattgccaacagcaggcatccaggctccatcagcagccatcctcttaattgtaaaggagggtgctgtagtagtccgacgatgctgcataaacctcatccttggcaggaaactagcagatgcactttgaccggaatgattttgcctaattccacctgaatcaataaccttctcccgcaaaattgaagcaagtttatactttatctccaaggctataagcatgaagattgctgcatatagaccaagaagggatgtccgggcaccctctattgccagcaatgttgtaagcttcttctcctcctcacccaaatttcctatctcactatcttcaagaatatttttaattctcagctggccctccaaaagataagtaacaggaaagagagctacaagtagagcaaatacccagggcaaaagctttgtgcttgtagcagatggtagatgagtgaagacaacaaaaacagaggcacaaaccatagtgacaacaatgagaacatgcagaatgccagcccagagaaagtattcagcagcaatgtagataccaagggcaacccccatagcaatggagtaaaatgtccgtaattcaacaatgtatttaatgggtataatagatgtaatggaagctagagtcagcaaaattgcaataataagaagccaagaaggccaggtaggcttgccagctatatagccataaattgagatatcatcagtagagtgacgagcagtcttgattaggtttgattggtaagtcaatgacacaggaagaggtggctgcattaaaataaaaagtagaccagttgccactaccagcactagacatcttttggcagacaaaacatgagagaaatgaatagcaacaattggaacacaagccaatccagtcaacagtatgcagaagcccaaaagtaaaccatctgaaggagaccttccattccaccactggagggcttcaaaaattgtttcacggcaaacccacgcggccgcccccgcgtccccccccgcggcataaccttgccatggtttcatcctagaagttgttttggatctatccctgtaaagaagcaatggaggagaaacagccaacaagagaactgctgaaacccatacaacggactttgatgaaataaacaacatggccagctttgaagaaaagaggcaagtcaaaatccaaactgcttttcctccaattcgatgatctacagatagccttctcaccaaagccaaacccaataaagttgtcatcacaaccatatagctaggatacat

SEQ ID NO: 1903 - DNA, 1882 bp, Glycine max
tcgagtcagctacgtatggcccccccccccacttcactcaattaactcttccgttccttctttctttatcatcaccagtgttccatatttcagagaaaatggctttatcatctccctctctagtgttcaccgtacagaggtgtcaaccggagctggtggctcctgctaaacccactcctcgcgaagttaaacccctctccgacatagatgaccaacagggcttgcgtttccaaattccattcatactattctatggtaatgaaccatcaatggcagggaaagaccctgctaaggtcattagagaggcacttgcgcaaactcttgttttttactacccttttgcgggtaggattagggagggacctggtagaaaattggtggtggattgtactggagagggtgtcatgttcattgaggctgatgcagatgcaacacttgatcaattgggtgacacacttcaacctccattcccatgcttcgaacaactcctttatgatgttccaggctcggagggagttattgactgtcccctaatgctctttcaggtgacacgtttcaagtgtggtggttttgccctagccgttcgcttgaaccacactatgagcgacggagccggcatagcactattcatgaacacattagctgaaatggctcagggagcaactgaaccttccgttccacctgtgtggcgccgggagcttctacaggcaagagatccacctcacatcacatgcaaccatcgtgaatacgagcaaatcccaaacaacatggaagggatcatcccttcatacgagaacaagatggttcttcgatctttcttctttggagcctccgacatagctgccctacgtcgcttggttccccactaccatagaaaatgcaccagtttcgatctcatcacggcatgcttctggcgctgtcgcacaaaagcattggagatagatgcagacgaggatgttcgcatgatggtcatagtcaacgcacgtgctaggtttaatcctccattacctgctggttactacggcaatgcctttgcataccccgcggcagttaccaccgcagggaagctttgtgaaaatccatttgggtatgcagtggagttaataaataaactgaaaggtgaggtgacagaagaatacatgcattctgtggcagatctaatggtgactaatggaagatgcttgtttaccaccgtgagatcttttattgtgtcagatttgagacattttggtttcaaacaaattgattttgggtggggtagggcattatatggtggagtggccaaaggtggggctggaccctttcctgcagtattctatctgatggcacataagaatgcaaaaggagaagaaggcatattattaccaatttggttgcccgccaaagctatggacaagtttgcaaacgagttagatcacatgctaattgggaaccaaaaccaacctacggatccacatccaattttttacgcgtctaccttggaaaatattaagtggacacccaaaaagttgattggcacccagtgagagagatacaagagagaaaaaaaaaaatataagtattataaataatataatataattaataagaaggagagaaatggtgagtgtttgaaaaaattgagattcaatatcataacttgtctacctttgtagtttgtagaatgtctgtgttttctaagtatttgaaggactttaagttttcttacgtgtatcttctgtttatataataattattgatattcaaatagttggggtgatagaagtgtacatacctgcgatgctattaatttgaaattaatagtgcatatgctcatcatgaacttattattcaataaaattaatgccaattacttgggaaagcaaaaaaaataagcaccttt

SEQ ID NO: 1904 - DNA, 533 bp, Glycine max
gtgcggcgctcaggcggcgggaaacgacaaaactaagtacatgtttggaattgtttcacagtgggttggggaaaatgggttccaaggctatgctcgttcttgttatgttcttggcttctgccctcattctttctgctgaagttgcccccaaaaatttggatgagaattttgatgcaaagcatgtaggtgttgtggatacaaatgaggtagatgaaaaaaaagatggttatgttagttggcgaagtggtgttccattgcgttgtgctcatccttgctgttattggtaccatggaaggtgtttaaagtactgctgcggtcctcctcctccaaaacctcataactaagcaggaacttatgctaagactagttgttgcaatcacagtcactatgtataaataaagagcagtgcaggaactggcccttgtgtatttgatgtttcatcacttcttgtgttttctaatgatatttttattgttgacagaaaaaaaaaaaaaaaaaaaaaaaaaaaaaaaaaaaaaaaaaaaaaaaaaaag

SEQ ID NO: 1905 - DNA, 1545 bp, Glycine max
ttttttttttttttttttgagaaatgacaaagttatccatatattcactacaaaaaaccaacattagtagcaaacagtccttatcgcttgaggtttgtataaacctgaatttttgcagaacagattgactttggtgagagatcttatctcaaaaaatcaacattaggaaaaagaatagtcctattgtgaactgtaagatacctcccctactttctttcttttttacattggtaggaaaaacacccatttttgcaaacaatataattagtccaccaacataatcattaatcaaagaatatatcctacactagctatatattatattatgtgcaatgatttagctcacttcactgctgtattgttggggtttctgaacctttttgctggataaagttagatttgaacatcaacacgggttctgatgggcttgagcttaattcctaaactctctggggagaggagttctggtgctatgcatgaatggctagtggggcttgctggatttgaaccgttgcttgatgaggaagcagcatgtgtttgtctgtggtagccaaaacccattaagaaacgctcaagtggtgttatcatggaatttgggtgctcttctgtaactaatgagccacaagcctgaacctcaacaagtgcgcagattttgtggttcatttttgagctcatgtacacagattcagcatggaatggactactctcacctgcaaatataagtgttttacattgcaagtccttcagaccctcagtgaggtcgtgccgtccttcggcaagttagtattatatctgattctgctccctgaacactgcacctaagttctttgctgaagtaacgctgcagaagacattccttcagtacaccgcacataccatagaagtataataaattcattaagaccttgttgtaaagccattcagtccatgaaggagatttgcaaataggtgaaacaagaatcaatccaagcactcgttctttgtatttcatagctaatagagtgaggacataagcaccagctgttacacccaagcacagaacctcccttagcccaaagaaatcaagcacttctgcaatctggtcagcaaggtcatccacgcagagcaatggttcatctgaagaaatgacatcagcccccaactgcaataactctcatgtcccggagcatcaatgtgataaatgcagaagttatgaagcaacaaagaagctgcctctgggcagaacaacagaccctggaaacaagagacataattgagagccacgtctgggtaggttattagagcgggtttttctcgatccccacaaacaagcacagacatggagcctttacttgttttcaccgtgcattcctttcctcctaaaggaatcaaatcaatgtcaatggagacagagtcgcttgactcgcccatgtctccgctctatacatcaacaaatgctcacaccgcttaatactgatattcacgaagaaactcttctcttctttgttcttggttcttactcttccttcctattcgttcggggggggggcctacgtagctgagccg

SEQ ID NO: 1906 - DNA, 1486 bp, Glycine max
tgttttttttttttatttttttttttttggggggagatcttatctcaaaaaatcaacattaggaaaaagaatagtcctattgtgaactgtaagatacctcccctactttctttcttttttacattggtaggaaaaacacccatttttgcaaacaatataattagtccaccaacataatcattaatcaaagaatatatcctacactagctatatattatattatgggcaatgatttagctcacttcactgctgtattggtggggtttctgaacctttttgctggataaagttagatttgaacatcaacacgggttctgatgggcttgagcttaattcctaaactctctggggagaggagttctggtgctatgcatgaatggctagtggggcttgctggatttgaaccgttgcttgatgaggaagcagcatgtgtttgtctgtggtagccaaaacccattaagaaacgctcaagtggtgttatcatggaatttgggtgctcttctgtaactaatgagccacaagcctgaacctcaacaagtgcgcagattttgtggttcatttttgagctcatgtacacagattcagcatggaatggactactctcacctgcaaatataagtgttttacattgcaagtccttcagaccctcagtgaggtcgtgccgtgcattaattgcttggagaaatcgcatgacattcaaaccttgcctttcatccaaaagccttcggcaagttagtattatatctgattctgctccctgaacactgcacctaagttctttgctgaagtaacgctgcagaagacattccttcagtacaccgcacataccatagaagtataataaattcattaagaccttgttgtaaagccattcagtccatgaaggagatttgcaaataggtgaaacaagaatcaatccaagcactcgttctttgtatttcatagctaatagagtgaggacataagcaccagctgttacacccaagcacagaacctcccttagcccaaagaaatcaagcacttctgcaatctggtcagcaaggtcatccacgcagagcaatggttcatctgaagaaatgacatcagcccccaactcatgtcccggagcatcaatgtgataaatgcagaagttatgaagcaacaaagaagctgcctctgggcagaacaacagaccctggaaacaagagacataattgagagccacgtctgggtaggttattagagcgggtttttctcgatccccacaaacaagcacagacatggagcctttacttgttttcaccgtgcattcctttcctcctaaaggaatcaaatcaatgtcaatggagacagagtcgcttgactcgcccatgtctccgctctatacatcaacaaatgctcacaccgcttaatactgatattcacgaagaaactcttctcttctttgttcttggttcttactcttccttcctattcgttctcccctccggccctcctcgcgcccccg

SEQ ID NO: 1907 - DNA, 1945 bp, Glycine max
ccgtaacatgatgctcacaaatcacatgcattaatgtgacacggaactaacttgtcgtacataatatatatatatgttccggaacaaaaataaccttatatatcaaattaattccatctttactattgactgaaaatatcatatttattactgtatctgttagctagtactcgtaccgggtaattcctgccgacagaagaaatatgataaatttagctaatttttaatattaaattcatttccttttgattgtacagtatgtatatgatccaattgagtgcgtgggaacatacatgcatagataatacacaaacaagcatacacacaaaaatgatatattattggaaaagcaagctagctagcagaaatgtttaattacaaattgataaaagaagagagtatatataaacctagtgaaacatgggatgataaatgtacataatcatgcatcttattcatgtaacccttcaaacatataattaattgcaaagagctccctcaatgacgcaaatcacatggcatgtttctggtcatctaatcgaacgaccatgatcaaatctcagaaggcagcatgcatgggtcgttggatgtctcccatatcgaacttattattggtggttcggcgaggggacaaactttgtccccacaattgtttctctttctcatgtgaccgaccacttccccttacttgatctgtcattgctcccacttaacctctcttttttttccattcactttctctctctctatatatataaagccctttctattccatattcctaacaattcaattcattcatccttcactactacaccaaattaatagaaattaaagatatatcattccacaacacaaattaaagttagtgagacgtacccttattatggccaaagaaggtcttggacttgaaatcactgagctaaggttgggtctacctgatgcggagcatcaagtaagtgtagtcaataagaaaaatgagaagaagagggcattctcggaaattgatgatggtgttggagatgaaaatagctcctccggcggaggcgaccggaaaatggagacgaataagagtcaagtggtggggtggcctccggtgtgctcttaccggaagaagaacagcatgaacgaaggtgcttcaaagatgtacgtgaaggttagcatggacggtgctcctttcttgcgtaaaattgatttgggtctgcataagggctactcagatttagctttggctttggacaagctctttggttgctatggaatggtggaggcgttgaaaaatgcagacaattctgaacacgttcccatttatgaggacaaagatggtgattggatgcttgttggagatgtcccttgggaaatgtttatggagtcatgcaagaggctgaggattatgaagaaatcagatgcgaagggcttcggtttgcaaccaaaaggatctttaaagggattcatagaaagcgcggcaaagtgaaagattatgttaggcttctaattaatgtcgtgcacattttgcgatcatcaatccaagtttatgtgttatcgttttcttatatttgaggaaaaacatgcatttttagtttgatatatgaattatcagacttttgtttatgtcaagttattaatgaatgacatataggaccctatataaataatagggaaaactcgtcgttttagattaattaatgctttgccataaatgtttgtttatttgcattcagttgcagtacaagttattgtatcagtatactgttttcttactgattccaatttgttaattacttcacctaaactctcctttttttccttttcctttttaaatagttgatatagtaaaccgccatatcaagttattcacgtaaaaagagactaaagtaaagaatttaaataataatgagaaaaatacaagtatgttttattttatttcttataatatatagcattgct

SEQ ID NO: 1908 - DNA, 1790 bp, Glycine max
  misc_feature (1747)..(1747): n is a, c, g, or t
ttttttttttttttttttgatagttagagaaatagaaaaaaatatgatgattaagataatgagtattactccttttacaatccttttcctttggccaccgtaactactacttctgtatgtgacaaatttcttgtgtaaaaagcagtacgtggagagtcactgctaatagctaattcaatttaaagatcagcttcatctgagctcacagagaagatatcaataggagtattaatgcaatcataaactcctttacgtcttgatctaccattttgtgattcttttgaatgatcgagatatagaacgatcactgtaatatcatcatgaaaatggcgccttagacctttatctgttttccttagatccccatacctcatttctcttttctttgcaacctcttctagtgcagctctcgccaatcgttttgcaattcctattctgggacttctggagatgatttcaacagccgcttcatcagttaaatgctcccaaagcccgtctgatgcaaagatcaaaaacagatcatctgccttcaatttacgcgccaatatcgatggttcagctgtcattacaggtctcctcaagtatagtggacatacaaattgttggaacagaggattagtgtcaaattctggtttctttaggtaaacatctcctattgatcttgagacctgaataatgcccttgattcgccaaactccacgagtgcaaaccacaatgtgtggatcatcagggtgaagagcttcaacctcctttctaacattctccactccaacattatgatcagtggacaaacgctctgccaccacagcaccagcaccacaattcacctctccttccaacgctttccgacccaaaaccgccctcgaatccccgagattagcaacataaagaactccctttgaaatcgctcccagaagacaacacgaacccacggaagctatctgtggccgcgcaatccatgattccctcactacacgcaaaaactcatcttccgttgcctcgaacgccttctttataacttcctccgacaaaccaccctcctctgttgtgaatttgcgaaggaaggagaagaggtggttggtgatgaaacgggaagcttcaggaccaccgtgaccgtcgtatacaccaacaaaggttgcggagggagaggtaaatacttgtgcttggtcttccaaggatgaattagcttgcaccactgcaattgagtagttccctgaagcgtggggcttaaggtctgtgtgccagaggaggccgtcgtcgttgcctccaccaccgaagcacatcttcagtggcttgcggcacagctccaacatccttaatgctctgtctctctgttgtgttgttcttcggtgtggtatacgcggtgggggggggggggcctacgtagctgactcgaggggggccccggtacccaattcgccataatgcgagccgtagtacatttagctgcccgtcattttacatcttcatgactgacaaaaccctgagctaaccctgctgactcgacttgcagaacatccacctttctacagtctgtgtagtatcgaagaagaccgaaccgatcgcccttctcaatgttgcacagctgtatggccattggaaatagccagcgctgatatattggaaaatgcgcgttaattgttgtaagctcagtcattttttacccagtggcctaatcgagagatgccttagtatacatgatggaccgagatggctgagagtggctcaaatgggacgaatccattanagaagcgtgacccagcgcgaggtcgaaacgtatacaggtaaac

SEQ ID NO: 1909 - DNA, 1534 bp, Glycine max
ttttttttttttttttttgaataaaattcttctgcattaaaattgatatcgtttagtaacatgtaacaatcttttctcaacttgagaatcacattcttattgctagataggggtaataaattaaaaatgtgtaggaacaattttcaatctaggctttcaaatgtgacacaagataacaaaatgcaccaggcattagaaatgtgttgtcttcatgcacttgatctgcattgaatcctctgccctttaattagcatcatgatggtaaccgttaacgttggaaggatcatattcatagggttgcaattccaggtctttcacctcatccttctcgctatcctttattgcctccatgaccgtgccttcaacttcaacaacgtctatcttattcatctctttgttctttccccacagaacaaaatacagccccaacactatcagcagagaccctatgacagtgccaacgtataattgctcgtgaagaaaagcccagctagcaacagcaatgatgacaagcagcaaaggggagaacacagacacatagagaggacctttcctctcaatggtccacgcaaggagcacatacgctagcgcagtagaaatagtccccgcataaagagcagaggttagtcttatagtactgtggagtgaccaagctgagacattgtgttcagcagccaaggcaatgaccacacactgaatgcttgccatcaaacacatgtagaaagtgctagtgtaaggagctggatagctcttgctcatgtttttttgaactatgaaccatactgcccaaacaagagcactaacaatcacagcaacagggcccagaagatggtttcttccaccaccagaagaagaggattctctttgcatgttttctgcatatctccagtgaatctttgattcacctagaccaagtacttttccatggtaaaatgataaaagcactgctccacccacactaaggactgtccctaaggccttcgctacccctgccctagtcttgattctcaaatactcttgtctggagaggacagcaagaataaaagtgaatgctggtagcaagttgtttagtgcacatgcaattgtaggggttgaatatttaagccccaagaagtatagaatctgatttcctgttactcctgttaaggaagatagtaatatctggaacgcaatgtgctttgtcattcggggagccgtactccgttctaaccaaaagcgaagggagcaagggaaatagttgcaaaaatttggcgataagcaacgagaacaagagggtgcatgccagattgtattgcaagctttgaggtaatattcatccctgcatagcccaattgtacaataatcatggccaacagtggaataacactactcgccattaattctctcttcaaagtaaaggttctttcttttctctgctctgccttcggaatttggagacagctttttagagaataatgggtcttgatcgacaatgtaactggacaaaggatgagaaatgaaatgtaggggggggggcctacgtagctgagtacgc

SEQ ID NO: 1910 - DNA, 661 bp, Glycine max
  misc_feature (650)..(650): n is a, c, g, or t
gaagattttgtggtcctagctagagggttcggttctggagaggatagttgagagtttctgaaagggtgatctgagtgaagaaaaaatgtcaacaatggacttgaggcaagccttggctggacttctcactctctctatgttcatcatgctgggaaacatgatcaagaaggaccattttgattccatgtatgatgttaatattgaagctgcaccagcatcccagaatgcctctgaagtagtcactgaacaatcccttgcaacggtttcacatgtaagcaaaaagtctttgatggaaaatggaaaaggacttaaaccatgtaggaacccccttgcacttgaagaggcaccgcaatctgaaggtttcatcacattctccttaacaaatggccctgagtatcatatctcacagattgctgatgcagtggtggtagctagaatcttgggagccactcttgtgcttcctgacatcaggagtagcaaatcggggtatagcatgagccttggagatatttatgatgttcagaaaattattaataggctagatgggttggtaagagtaactaggacactgcctgtaaccaatggaaatccaccaatagtgaaggtacctaacagggtttcacaagactatattgtaaggacagtgaagncaatatacaaa

SEQ ID NO: 1911 - DNA, 1620 bp, Glycine max
ctctatctagcaatattattctctcctagcattgtgatggcaccatttgctgattgttttggaccaaactttaggaaactgtggctcaatgtagttcatcgcacactagaaaaatcaggtccagcattcataaaatggggtcagtgggcagctacacggcctgatctctttcctcgagatctgtgcactaagctttcagaacttcataccaaagctcctgagcatagttccacccgcccgaagaaaactatagaaagagcatttggccgaaaaatttctgaaatttttgacaattttgaagaacttcctgttgcatctggaagcattgctcaagtgcaccgtgcttcactaaaatgtcgttatcctggtcagcaggcaaagccactattggttgcagttaaggttagacatcctggcgtgggagagtcaatcagacgggattttgctattattaatttggcggcaaaaatttcaaagttcattcctgctcttaattggttacgattagatgagagtgtacaaccatttgcgggtttcatgatgtctcaagttgaccttgctagggaagctgcccatttgagtcgctttatttataatttccgtagatggaaggatgtttcgcgccccaagcctgtctatccacttgtgcacccggctgttttggtggaaacatatgaaaagggtgaaagtgtctcatattatgttgatgatcttcaaggacatgaacgggttaaatctgctcttgcccacattggtactcatgcacttttgaaaatgcttctggtggacaacttcattcatgcagatatgcatcctggaaatatccttgttcgagtgtctcagaacaagtctcgaaaacggctcttcaaatcaaagcctcatgtagttttccttgatgtaggcatgactgccgaactctctggtagtgatagagtaaatttactggaattttttaaagctgttgcccgccgagatggccggactgctgcagaatgtgccctgaacttgtcaaatcaacagaactgtccaaatccggaggccttcattgaggaggtggaagagtcatttactttttggggcaccccagaaggtgatattgttcatcctgcagagtgcatggaacaattacttgagaaagttaggcgtcatagagttaatattgatggcaatgtttgtactgtcatggtgacaaccttagttcttgagggttggcagcgaaaacttgatcctgggtacaatgtgatgcagacattgcagacattgctacttagagctgattgggcaaagtctctttcgtacacaattgacggactcatggccccttagggaggaggaagtttctttctttgttgaggctctctcttgagaaacaattttgactaacataaaaacccaaaacaaaaacatctgtcctaagggctctctcacatttgtttttttatttaatttttttaaagatttatcccttgtatttatcttggttaatttccaagttatttttgtgagcgtcacagtttacaacaaaaatggaagtagaaacaataaaacggtgaatatatctcctctcccttctttactcgcaggatgaatgaacgatatagttagaccctaaaaaaaaaa

SEQ ID NO: 1912 - DNA, 1368 bp, Glycine max
  misc_feature (11)..(11): n is a, c, g, or t
ttttttttttnttttttttttttttttttttggaaaaattagatagataccccaagaaatatgcttacgaagtctgtagattaaattaaaaagtttaataaaaaacaatgcaaataatttggctacagctcacccaacatatgggcagtaaaaatgaagatgaagaaagcacgtcaaaatgtcaaattacacgaagcaaattctacatttacggcaaaaaaaaaaaaggcaacagataaaaaagcaaattcttttcttttttaatttcctttttttctctctttttgaactcgttgtctaccttatggatccacagcttatggatgaaaccttgcaaacgccagctgatgtggtgagtggaacatttttgtagcatgccaccagttcctcatttgtgtgcaaatcgacttgcaatgtttcccaaactttcttctttgggtttaagagttcatcaggattaccttcatacccagggaatgtaattctttctcctggttgagcagaactgggaggctcaaccaactcaaccttggtgtgatcaccatcggaagcagcaagaaccattgcttgagatttaatgcccctcatggttactggctttaggttgcaaagaacacagacctttcggttctgcatttcatcgagtggtataaatttgacaagcccactgacaacagttctggtctgttcttcaccgacgtcaatctcttcaacatatagtgcatctgcatcaggatgtttttgagcttttattatgaggccaacccggatatcaagccttgtgatggtaatatctggttcagcagcagctttatttttggcttcatttgatgattttcctggttttttctttccattgccatctgaaactttcgttttcttcagttgctcagcaacattctgagcttcggcctctgcacgcacaatcctatcagcttgacttcctgcgaacttcttcctgtagaactccacctcttcatctttcagttccctgaacaatggcttgggtgttccaattttatgaccagcacttatgatatcccagggtctttttaccctatcaacatctcctttatcatcactaagtgaaacatgtgtatccgcaggcaaatttagctgcttaaatacttcaagagtgaaagatgggataaaaggttctaacaaacaagcaagaagatatacaatcccagctgcagttttcatgacaagagagcagagagatttgttttccttgtagaggcgccagaattcagcttcctgcagatatgcatttccctcgctggatatgctcattggggggggggcctacgtagctgatttaaccttctccattgcttggggggggggggcactacgtagctgactcga

SEQ ID NO: 1913 - DNA, 1350 bp, Glycine max
cccacgcgtccgtacggctgcgagaagacgacagaaggggcagcaaaagacatttgaagcgccgtcgtttcaatctccatcgtcgccttgaaaagaaaaaccctaattacaagaagttgaaaaactaagtggaataagagctgaaaaaccctaataacaatgggaggaaaatgtccgcacaggaacgtgaagaagagaagatattctcacaagaccgcgcggcgaaccaaatttgagctgaaaggggacgacatggtttatgcgcagctcaacaaacccgatcaagagagaccccctttacccgtcgacgaagatttgcctgggatgggccagtactattgccttcactgcgatcggtactttgccaatataactgtgagggatgagcactttaagaccaaacgacacaagaagcgtataaaacaaatgatgggtcctgcaccacatactcaacttgatgccgatttagcttctgggatgggtatgccagacaatggaccaaagctaatgtctatgtaacttcttttttggtagtgggtgggacgattgtcttgggagctggtgttataaagatatatagtatttgttatttttcttcttttttgttactagtgcttgttattctattctaatataagcaatattatattttgaatgctatattttttgtttagaaaaaaaacccaaatttaacccccttgttttgaatcctatcctacattctccccatgtttatatttgaagattgattagatttatagaaattctttttgagttttgaggctactcatgtttttatttatgggctttcagatgtttaaacacataaagcagttggccactgtgaaaggaacatatcttgcttttaattgggatatgataattgagtgaaattgaacagaatactagtaaactcgagcttgtttagataaattatattatattgagcttgagatttaatcattatgaaatttatccttcatctaggctctgtaacaaaaagggaaataaccacgatggaagatcggtatagatcatggatgggaagtggttaatgaagtcatgcatttgattagctcgtattcagttcaatgacttgtgtatagtcagaattgcttatatcaagttaaaaaagacaacttctgaagtaattgtagctcaataataatgtcttcattgaaaatagggtgtttgtgggatttctctttttgctagaatctttagatgaaaaatgcatacagttacgaatagtttagcaacttttcaccccctatatattggtgttggggttgtttagaaattgagttacaataagattggagaccaaggtaacgtgttaaaagatcaatc

SEQ ID NO: 1914 - DNA, 728 bp, Glycine max
aatgcagacccacatagagaaggctttttacagtggacatgcttcgtatagagtttctcattcgactagatatcttgatatatgggagccagccacattggccattacgagggaaggttacagtatcaaatgcagtggacaaagtggagttgtaatcacagaaaaattttcaccgtccaccactgttatgattccatatggacatacttcagagtttattataattggttccagtggtgatgaacaccttttaaagacagatttcagtggtgctagagacactattgtgctcactttgagattattcatcctgaggaggcctggggagaaaagaagagtaaagaagaagggattattcttttaacaggtgagggaatgtcaggactgcttggctgaaaatctctgctgtgcgtggaatgtgcagaccaccgagatggggattgggagtagtgttttgtgtgctatctaaattttgttccttttcatattctataatagggcagagttagcttgagctgtaattgtgaatttatgcaatcatatttttttttttctttttcaatgtttagcaattttttgtagctcgtttccttgccatgtaagtccattgttgtactgcatgctgctcttgtcattttcttgcaatgtgcctgcattcacatggttccccccacttttattaactaaaatggtccagaggaaaatgatatagttgtcgtttgtatttc

SEQ ID NO: 1915 - DNA, 1646 bp, Glycine max
tcgagtcagctacgtaggccccccccccgttttaatttcactcacctaacccagctccctcccaaaattgataaaacatcttgctttaggagtttagggttagttcctaagtgagaacactgttttctccttacaaggatattaaatatgaaaaataagtccttatgctaactgtgaatgtgagtggagaaaattcctgtttcggtaaaatcctacttctgactaaaatagttggttcctgcctcagcctactattttgagaaatactatacatttcagtcaattataatatttggtttttaacccttttgattggtaaggttcattgcaattatgcaggtcaataccattggaagagcgctcacgggcagtagcatttgtttttggtggtttgagtgttggaagtgttatggggcttcttttggctcctccccttatccaaaatcttggttgggaatccgtattctatatatttggactcttggggattgcttggtttttagggtttcaagttcttgaaggaggtgaaacacaattaaatgcagaatctctttcatatcaagataccatgacacaatcatggaaaacttctctgagagaactgaatggctctttgaaggaagtaccatggaaggcctttttccaaaatcgtgctgtgtgggctatgatatatgctcatttctgtggtagttggggtcactataactgtctatcatggcttcccacattttttagtgaggagctgaatctaaatctgactgaagctgcatgggtgtctattcttccgcctctggcttcaatatttgtgactggtcttgcagcacaattagctgacaacttgatttcaagaggagttgaagccactgtggttcgaaagatctgccaatcaattgcatttttgtcccctgcaatctgcatgactctttcctcgctggatctagggctaccgccttgggagattgtggggattctcacaagtggtttagccctctcaagctttgccttatcaggactctattgtacccatcaagacatgtcgccagaatatgcaagtatacttctgggtataactaatactgttggggctgttcctggaatagtgggtgtagccctcactggttatcttcttgattcaactcattcatggagtatatcactatttgcgccatcgatcttcttctatgtgactggtaccatcgtatggttggcgttcgccagcagtaagcctcaaagtttttctgagctaaactgattcaagttccaatcattcattattctgagcatagcctagaaacttaagaaaccttcatgcgaagcagaattttgacacgggggtataatggtatatccgcttgatatatgcatatcagataatttaagtacaaagaaatgatagtataggcacattactgtatgtattcttatttttttgaactgtagcttattagtatattgcagtattgtatatttttaacagattaatgtatggtggttggtcaccaaaaaatgtattgacgtgtttaaatccttgaaagtcaagaatcagttttcctccaccaactgttggcgctctgctggtccttctgttgcaagtttcaaccagaaagtgaccgtttcaataatcttacattttaaggcattcaaaa

SEQ ID NO: 1916 - DNA, 1400 bp, Glycine max
ggagtcccgaggtgggtgtctctagaacagtgagcccccccccctaatggtggacagagaaatacagatactactattcttattctactactagtctccaaggaaaggagatcactatccaaaccattctcactttctcccttcaatgccactcttcttcctttctctttgagagactgcacacaaatttctactgtttccagagcgacaatggatccggcggccatgatgaacgccgccgccaacacggcgtcatatcacctgtcagagatctggcacttcccgcctcccaacgcgccagacgcgctgggcctcaggagggcccacttcgccccgggtccgacccgacatgccgtcccgggtcgcgacctggctagcatcgcccccaagaagcgccgccaagccgaggaggaggaggtggaatccactaggggcgcttccaccaccaatgccgtggatgagggttgtggtgatggaaaacgggttaagacgagtgagagtgggaaaggtgaaggagaaagctgttcaggaaagcctgcgaagcaaagcggtaagccaccttcggagcctccaaagcaagactacattcatgtcagagctagaagaggtcaagctactgatagccacagtcttgcagaaagagctagacgggagaagatcagtgaaaggatgaaaattcttcaggatttagtcccgggttgtaataaggttattgggaaagcattggtccttgatgagataattaattatatccaatcacttcagcggcaagtagagtttttgtcaatgaagcttgaagcagtaaattcaagaattgcccccggaatcgaagtgtttcctccgaaagattttgatcagcaaacattcgatacaactggcatgccattcgcttctcaagctacaagagactatagccgaggctcatcaccggagtggttacatatgcaggttggagatggttttgaaagagcaacgtagtctttgaaatcacatcacctgacaataaatgcatataggatctttaatctctctatcagagctcccataaatcatatactcaaggtgttgttgctaagtcctatagacacctcattcttgttttctacaagagaggcatggagctgttatttgtttccacgggatcacttcagttagtacgcaagtaacaacatttgttagtgtgttggaaaatggattcatttacccaatatgtagtttagtatgctgatactcttcataacctttaaaatgattgttattattcttgtaaaagaatgctgcttgtcctgaatacataaaggcttacatgttgtgtaatagtgtcaacattgttgtttgtatgtgaagctatgttgaataaattaagcccatgtgattttgtcaaaaaaaaaaaaaaaaaa

SEQ ID NO: 1917 - DNA, 2207 bp, Glycine max
gcaaaaggttgttattgcatcaggagttaccgcagaatgtgcaatcatttcatttcaggatagcagtccctctctatccagcacaatatattcaaggaaatggaccactgggaccacacctgctctagtagctgcaccctttgcattgtgtcgattgtcaaaataattttactttgtaagcttaaggaaatgtcacatggacctaccaagatatatacaatcatgttgaattcaaactaaagctgaaaaaccagcagtttttcaggtgtctaacatctgaagcttgaattttcaacagctgctagatgctgtgtctgaaaatggtttggattggattataacccgagctcctgaagcaagcctttcttcaattttaatcacctcctcctcttctttaaatgagtctatcctcttcgattgtttttttcctgtggaaggttcagtgatccttttgctgctaccattagatgttactggggatatgcctgagccatcaattctatctgatgagttccgaggtccatcagaaacaggagatctcatggattcacttcggggatgcttggtcaatgaagccttaattgatcgaggaatgcattttgaatgtcctgaggatgattcctctttgtcttcttgtggtttctggtctttaaatgtcctctcatcattgtaggaagaagagcgtttcagaacattgtgtccatctccctccttcagtttagtctcaactaagcttccactaaaatattctttgtcttccaatctgagactcatcagctttggattctcggctaagcaatcaaactcccccaacacaaaagaagttgagaacagcggggaaggaaattttgaactggaaaacctgggcttataggaaggaataaggccaaaactatggtttttcactgatattgagccacatgagatcagttgcatcagcaaatttgaagctttcatcctcgtgttggtcggcatatgcatgccctcctcctccagaatcctaaagctgttcactttactagcatcagctctaatcagagattccaaagtttcagccttccccacaaaagatgaggaacttgaagttgagggaggacgagaaacggcatccctacagattcgtggagtatctttcacttggggagcttcagcttgacaaatttcatgacattcggattctaacgacccatcctccgttgatacaccccttgtgcaagttttctgagctctggatctgttgtccttttcttctgtctgagttgaagcatcggccaatccatcagttttataaattttgtactctgtcaatgccaagcttagagcatcactcttttcagctctagactctggagaaacatcagaggaaccagtgtgtggatcttgggaaagctcgtcatcttgggagattcttgtctccttcccattcatgctagaagaggatgagccctcatccaggctccgagaagaagctggccccggcaacagcttcacactttgtgttttaacattgctaatgggactgaaacgatctgaatttgattcgtcaaagagctcagaacccttgagaacatactcatttccatgagctggtagaattatatcatcttcacacagatcatgccacacaaatccactcttgcggccccgcgggtgcaagaccatgaatacaaggaagccatgcctctccctctcaacacattaagtctatcaatcacatctctcaagtatagtccatctggtgaagaaagtgggacctccatgaaatgagggtgctctagctgccggtttcgacaaagatagtaaatcacgggtaccttcaaactctggtggtattttggtgacttctctgtccacactttggccctctcaggactcacttgccggttgtacttcttcttcatcctcgcttccattcccacatgcaaaaaaaaaacacacacacacacaaacacaccacccctaaaacttcaatctttcacgattcctcaacttcaaaaccctgtcaaagagaaccccatttccccattagcttcattccgtgcaaaaacgcaactgggtcggtaagaagaagattttcagattttccaccaccatcacttggaaaaaagaaactgaattagaagctgggagagtgaaaaatacaaagtgaaacgaaagcgatggaagagagagagagagagagagagagagagtggaaggggatgaaa

SEQ ID NO: 1918 - DNA, 2679 bp, Glycine max
  misc_feature (1979)..(1979): n is a, c, g, or t
  misc_feature (1999)..(1999): n is a, c, g, or t
  misc_feature (2162)..(2162): n is a, c, g, or t
ttttttttttttttttttttttttttaaaaaatattcatgtaaatgaatcaatgactttcttgaaaaccattaactacaatcaataatgtttactcaatgtagattacaatttgcgtgtttcaccatcagaactctccaaattccaacattgccaggaaaaaaggaaagacaaaaaaaactatatatttaaagagacccaaggagaaagacaatggaacccgcatctaaattcatgcacgcagatatacaaaatacacaacaatgaatagacaacacccaaaagccacaattttttttcttccccatgaacctgctagtcttgaacggcatcaattgctttgcctgtcctggcttgtgagattcgatttgcataaatggtgaccaacttcaactgtgtgctgttaagcccttgcaaatatggcaagaatgctttcccaagcatgatataaatatccacgagacagaaaacaacggtcttccgaacatctgtactctggttaccaaaagcttcgaaaagggcaggcagaaacgagggtaactgagccattagttcttcctgagaaagccgccccacaagctttgttaagcaatttatgcaaataacgagtgttttctcatcctcggtaaccagcagagggacaatgacacttaaacatctgaatggatcatactgagatagaacaatggtcaggcagtgctctgcttcattcgagaccttaggaatgatatcttttgtaacatgaagcagcttctcaattacaatctcaacagagttctccatggcacctttctggtttttaagcatttcaactatcagtgaaagagcaagctctttgactgaggaatctgaatcatccagcacctcaagcacaactgtcaaaatctgattgaagtacttggtccaaacagaatgatcatttgttatagaagcttcaaccaattgttgaagagcagtccgtttacttgaaatagggcttccatcacccccactgcatatcatatgaagaatttgaggaatgctgggtcctgtgtgtgtcatggtgttaatttttacatcttcagctgagtgatgattaagttccaattcagaaggatgctctttgtcatttgcatagccttcagcaccatttaaatgctctgatgacatcaaaccgtttacatctagacgaggagttgaaagaccctctaagctcacgctactgtccatgtgtccatgttggctagtttgagagccaaagttttgacccattggattgacggcataagcaagatccttagtttttgaaccaaggctgccactattaggatcagtctcaaaattatgatacagatgttcccgagtttcaccagaagatgcttgaccaagactggcttttatcagtgttgaatcttgggaactccatttcctgccaccatcaccatcaagggaaccagcagaatacttaccaaggtaatgagctttcctagagtaaccaacatatccatcttcagaggatgttcccacaacatcagatggatcataggaagacttagaacgttgtttctctttcttgttttgcagatagtttattaggtctacttcaatgcgaggggtgtattgtttcaatgctcgtctcaaggaattttgttcttcacctgacagacctcagaatgaaattaagaacagcagtcgaatcaaagtgagagtacactgatataatgcaggtaatagctgcttctttaagctttgtatttttgtcattgaccaaaggggttaacttagcaagccataattttaggatgccaatattcgcagcaccttctggattcatagcatgtttgttaaaggaattgatagcaaattcaataacagccaatttagcctttggagacctttgttcatctagtgagcgtaataatgcaggtaagagagaatctcgacccgtagttttgctgaccacttccaagagtgttgaacacggctgcctgacaagttctntagggtcaattaaccgaganaacacatggggtaatttctttccatataaccctcaaaaggctttcggcatgctggaacaatatctgcaagtgttgaaagagcagcctgtgcaactttatgatggggatcatccaagtgctggaaaaacaacctcctttccttctcaaaattctgaacaacttnctagagttcccttcggaccttgctgcaacaaagaatgaagataattaaaggcagcaaccctagcagaccaatcggaacctgaactaagtccttcactcaaagcttcatgaagagatgctggtccatccgcaaaattggacatctctccaagagatagctgattatcatcaaaactcctcctgccagcagacatgcgtccagccacattctttctcaatagtggtctctggaaattaggcacataactattatgagattccctaaagtttccatctctataaggggcatccaaatactgtctatcagtgttggggttcatatatcgcctagtctccctcatatcatggttatcatcgagagaacttctttcttgtctttcagatgcccttttactcgaatatgatgataaaggctcaataccaacattactacgataggataacttggcagaatctttcgaagcttgaatctgagtgattatgtcagacaaaccgagaccaccatttcggttactacc

SEQ ID NO: 1919 - DNA, 1537 bp, Glycine max
taagaaagcagctaaagccgacgaattttcatctgaatgaacgcctaatcgtgtgtggtatcaattgattttcttgtccttgcctgtgagatacgatttgcgtaaatggtgaccaacttcaactgtgtgctgttaagcccttccaaatatggcaaaaatgctttcccaagcatgatataaatatccactagacagaaaacaacggtctgaaggtgggcaaatagtgtggccatgccccgtgcccaagcatgatataaatatccactagacagaaaacaacggtcttgcgaacatcagcactctggtttccaaaagcttcaaacaaagcaggcaggaaagaaggtaactgagccatcacttcctcctgagagagcctccccacaagctttgtcaagcaatttatgcaagtaacaagagttttctcatcctcggtaaccagtagagggacaataacacttaaacatctgaatggatcattctgagataaaacaatggtgaggcagtgctctgcttcatttgagaccttgggaacaatatcctttgtaacattaagcagcttttcaacaacaatctcaactgaattttccatggcatctttctgatttttaagcatttcaactatcagagatagagcatgctctctgattgaggaatctgaatcatccagcacctcaagcacaactgtcaaaatctgattgaagtacagagtccaaatagaatgttcattggctatagacacttcaactagctgttgaagtgcagtctgcttgcttgaaatagggcttccatcacccccactgcatatcatatgaagaatctggggaatactgggtccagtgtctgtcatgtagtttacgttcacatcttcagctgactgatgattatggttcaattcagaaggatgttctttgtcgggtccaaagtcttcagtaatatttaaatgttctgatgacatcagaccattaacatccagatcagatgatagaccttcaaaattcatgctactgttcacctgtctgtggctagtctgtaagccaaagttttgacccattgaattgtctgtgtaagcaagatctttagttttgaaaccataaactcctctattagaatcagtgtgttcttcagtttcatcagaaactgcttggccaatcatgcctttaatcagggcagaatcttgggaactccacttcctgctaccatcaatatctagtgaaccagcagcatatcttccaatataatgagctttccttgacaaaccaacatatccctcttcagaggatgctcccacaacatcagatggatcataggaagacttagaatgtcgctctttcttgttttgcagataattcatcaagtctacttcaatgcgaggggtgcgctgcttaagggctcgtctcaaagaattttgttcatcaactgacaaactaagaataaaattcaaaactgcagctattacatgcattatatcagtatactctcactgtgattcatccgcagttttgaattttgttcaccaacatacaaaccggacgcgtgg

SEQ ID NO: 1920 - DNA, 1457 bp, Glycine max
tcgagtcagctacgtaggcccccgaccacgaaaataaggtggaaggaggaatggcaggaatacacgattacacagagtagagagggaggggagggcaaagccaaaggggtttcgttgtgttgtgttactccgccagcggtagagatgagctcagccgataccttcaatgcgagttctgctgagtctgtcaaagaacctgttatagggtcaagtctagaagtaaaacaggatgatgctgaaataaaagctcaagttgatgccatgtgggaacaaatgaataaaggagtatctaataagaccctcaacaaatttacaagcaagcctaattccacttccaagaaaactgcaaaaaagtcatcttctaactggatgtcttatttgggtttggcaccaacggcaactgaatcccttgggcaaggtgcttccaagaatggacctggcgtgctgcagagcagtactagtgatgaagtcaagaagcttgctgctgctgctcttgcagcagtgaaagatgatgctgccatagctgcctcaagcagggggaaacttgtgattactgaggttcgggactttgctggtcaagatattgaagttaaaaagcttgtagattctgactcaaaggaggcaatggaaagagccaaagctcctccactttctgcagtggatgctgtccttgaacaaatcaagaagaaacagaagctcagtgtactggataagaccaaaaaggactggggtgaatttaaggaagaaaagaggctggaagaagagcttgatgcttataagaagagctctaaccagtatctggacaaggtttctttcttacagcgagcagattaccgtgagtttgagcgagagagagatgcacgactggctttgcaatccaggaagcgaccagataatatgcaagaggatgactgaaggtagttgaagactctgagttattactaccttcggggaattatgtatggttttgtagtgagttgatggtgcaggtgctatagttcctgggaaggtcttggtctctggataggtaaaagacctttgatcacattaatggggtatgaatgatgcattttgaggtttgagatttgaaatgcttttcaatgacatggtacttaacgtgggaggtaaaaatagggggctagagagaaacagctgtcaattttagactgacattattatagtttattccgttccttgagagcctcaaagaagcattcactactcgctgaaggtagtttcaaagaactcattttgtgtctgtccattatttggttgtttgaattcctctaaagtaaatattgggacacgattttcttgcaaagcaattcgaacttagtttcaagacagaagagatcgtgtgcatatgcgaatcctataagaaaacaactaccgtgagttttatatgctgttttttttttcggtagctaaatagttattttattttattgtcttcccag

SEQ ID NO: 1921 - DNA, 1822 bp, Glycine max
  misc_feature (17)..(22): n is a, c, g, or t
  misc_feature (1725)..(1725): n is a, c, g, or t
  misc_feature (1815)..(1815): n is a, c, g, or t
aaattaaaaaacaacannnnnnaacacactcttatagtctgtcttttgtctcctctggttttcgtcttgtccgtctaaacctttgtgcacactttaagaatttaaatatagcaactgtactacaagtaatttctctaaactgatgtaaaattggaagaagaaaagatctagcaatgtttaatggtggctcagtttcattagttacagagtgaatcggagtcctaactcaatgagcgagtgtacttttgctgtgggcacatatcaggaagtggttcttcagtttggaatctaaagacaattgaaaacagtagctggaccagcccaagaacaaattgcttcaaaatctaacatgacaacatcaagggtatcagttatccagcatgtgaaaccttgatggcttcatacttctcacctaccgcaccgcctttttgtttttggaactctatataccgcatagtactggctaagaaagcattggcagctggatctggagttgtggtgtcgctctgcatttcattcataattaactcaattaagccctggatagccgcaacggtgacttgtaggtttcccttctcaaagaagtaaagatacttgttcaatatctcaatgaagagcattactgatccggtgctacctcgtgctgcatttgccatttgttgggctgcatttgcaattcttaaagcccgcttaagacataataggaccctctctccatctttcatgttatcatgatcatcaacccaaaacagatgtgagcatgcatacacagctctgcattgatctggcttctttaaaagctttgctgaataccctgtggccttgtgagttaaagtatccctgttttcaacaccaaagacgtgcatcctttgaagagtccctattattaaatggatagctgtgatctgtgctctggaatcagaaatttcttcttcatatagaatataagcttgggtgaaaaattcataagcaacaggctccaattcacagtcatttgcagcctcagcacattgcaagtacaactgcaatgctaattctggcgccaggacacctgacaaagtctcgatggtctgatttaaaagctgaaaaattttctttggtgttgttgatgcatcatctccaaatggattttcttcttgaccttgcaactgtctgaccaactttaaagaagaaaaaacaagaggtggaacagtgaaaggcagacgttttggtcctccagtcagtatgtgcttcctcacagtatcaatgatcttaaacatttcttctggatcatcattataaagcatctggattagacgggaaacagagttctgctcctctttgaaatcatcttcatccagctcatcattagggatcccatcagaatccttgataagcccctttatcagttcaaacaatgcttcaaccttttctgaagtagaaatgcgtgttccgtttttcataatgctttgaataatgacagttgccatgaccttagtagttcgaatgggggggggacctacgtagctgactcgatttgaaagcttcaatgcaatcataatatcattatatttctctagcggagcacttaatagagcaacaatctgcttagttgccctgttgtcctcaattttccccttgccagagagttttttcacacatgctcccaaaacttgatctgcataatcaagtcgatcagggtggacatgaagagtgaaggtgagaagggacgaatataaagttacnactccacgtgggcatgtcaggctgtgcctctatcacccttgccatggcttgcttaatttggaaaatgcttccacttgtaaaaactctgcnacacgtc

SEQ ID NO: 1922 - DNA, 3000 bp, Glycine max
cggccgccctttttgtttttgttttaatgccacgcaaaaggaaaatagggtcatttaactcaaatgtaaacaagcattgtaattccacttatagaacgtagatttgaccaaaaataatccgaatctcagataattcacccattaccaatttttccagcaaagaatcccagcatcaactctcacccacgacgatttttccaggtacaattcaaattgttatacaaaacgtagagaccagacaaaatcaacaaaaattaagcagagcctgtgttctctggtttgtcagtctccattggttcagcagatgctggtggtggggctggattagcattgtcccctgccttttcattagtactggcattaggattctcctcaggtggttgttgttgctgctgctgtggctgctcaccaccctgaggaggtggggttgctggtgcttctggtgtagctggcttgggtggtggtggctttggtttcatcataattggcttacagaacctgtcaacagcttcagctttctttcttatgtcagctgacaaaagtaccggggtgacatatttcggaagagagtcctgttgctgttttttctccctgagccagttctcagcttccacacattcatttaagaccttttgtttctcattgatgtcaatgtgatcgaatttgggatcatttgacattgcagcttctctataactatttatacaatagacaagttgatctattactgtacccctctccatgtattctttgtaacgctcttcaattggatcaccttgcttcttgagttcttctagcttggcaatgtatacacctttagtttcatcttcaccatcctcatatagccagtcttctacctcctgaagtttagcagtaaatgattccctctctgaatcaacgacaaactcttggtatttgtcattaagcttgtttctcgtgtcataaacataagcctctactgcatttttcttatcctttgtttcctccatcactctatcttgcaaagccatttcaaactccttctctacagctttctggacatctgcagctgccattgccccataaactaactccaccacaggaatgtttattttcttaacttttttctttggagcctcaaccttggtatcagtatccatttgcacaggcttatctcctgcctcaggggtcccattttcggacccaggggcatcagcagttgccttggaattagcatcttgcatgttaacatcattgtcattggtgctaggaggtgcagcaacattggcaggagcttcatcagtttccatcttggtattttctcctgctggttctttggaaactggaacctcaatttcttcctcttccagcagagttgcagattcgacagatacaattccatgaagattcaaccgaactttcactttaacttttgctttttcagttattgtagattggaaaggtccaatagtatatgtgctgatctttgcaggtgtttgcaattcactcacatcatcatattgaacatcaatagaaaaggttcctgacctgtagatggtcagtgccttgacacttggtatgggatttcccttggggaaaacaagggtactttgtttattatctggtccactttcctgtgcatcagaacttggagctttccacgagagagaaattgagaaaggaaagctttcgttgacctgaaactcccgtactttaaaagttggactgagaattgcacactgcaatgcacaacccctggcaacacactcactagcattcattgtccgcctaggctcctttttgaagaactctgtcaatattttgtttatagctggtacacgagatccagaaccaaccacctcaaccatgtgcacattctcgactgtaagacctgcctctgcaagtgccttctccaaaggtcccttcacccgttccaaaattggaagacttagttgctcaaactcatcacgcttgataaagcctctgacatccttctcatccattaagcactcaatgttcaaaggggcctccggattagcactaagcaccttcttcagcttctcgcaggcagccctcaacctcagacaagccctggcattttggaatacatcaatcttgtactcctccttaaactttgcagcaaaatgattgaacagaacctcgtcaaagtccctcccacctagggacctatcatatgattgggacaacactttcagctgcccctttttaaatccagcaatgcatacttgcatgctagcatgtccaacatcaacaaaggcaacattcagttgatcattttcaggaagatcggtcttataaattccataagccaatgcagttgcagttgtttcatgaaacagacgaagtggatgcaaaccagcaatagtagcagcatccaagaccgccctcctctgaagatcagtaaaataaagtggaattccaatgcagcaatcaacaacggcagcattcagatttttctcggctatttctttaaggtttgataacatcattccaaatacttgggtgggtgtaaatgttctagcttcacccaagtaccgtgcatgaattaatggatatccatcaggtccttcagtgacaacaaaagggaatgtcttcaggtctcgctgcaattctggatcagaaaactgtctaccaattaacctctttatctgagagatggaattcttagggttcatcatagtagaagcagccccggctgtcccaaggaaccgctgtttgtcaccaaagcatacaattgcaggtgtttcacgctttgactcatcgttgagcacaacgtcgatccccctttgtcttgcgacagcaacaatgcagctctcattaccaaaatcaaatccaaccacgctcatttttgcttgatctcagccaaaaagaatatcaggcgaagcgatcgaagaaagagagaagagagggttttgaagggttctggaacaatcttgaaaagattcaacaaccgcagcccacgcgtccgcggacgcgtgggtcgacgcgggaattccggac

SEQ ID NO: 1923 - DNA, 1744 bp, Glycine max
aatgccacgcaaaaggaaaatcaggtcatttaactcaaatgaaaacaagcatcgtaattccacttatagaaaatggtacacatataataatctaaaaacctagagaacgtagatttgactaaaaataatccgaatctcagggaccataattcacccattaccaatttttccagcagaatttcagcatcaactctcacccacaactatttttccaagcacaattcaaatagttatgcaaaatgtagagaccagacaaaattaacaaaaattaagcagagcctgtgttctctggtttgtcagtctccattggttcagcagatgctggtggcggggctggattagcattgtccccagcattttcattagtactggcattaggattctcctgaggtggttgttgctgctgctcaccaccctgaggaggtggggttgctggtgcttctggtgtagctggcttgggtggcagtggctttggtttcgtcataattggcttacaaaacctgtccacagcttcagctttctttcttacgtcagctgacaaaagtacaggggtggcatattttggaagcgagtcctgatgctgttttttctccctgagccagttctcagcttccacacattcatttaagaccttttgtttctcattgatgtcaatgtgatcaaacttgggatcatttgacattgcagcttctctataactatttatacaataggcaagttgatcaattactgtacccctctccatgtattccttgtaacgctcttcaattggatcaccttgcttcttgagctcttctagcttggcaatgtatacgcctttagtttcatcttcaccatcctcatatagccagtcttccacctcctgaagtttagcagtaaatgcttccctctctgaatcaatgacaaactcttggtatttgtcattaagcttgtttctcatgtcataaacataagcctcaactgcatttttcttatctttcgtttcctccatgactctatcttgcaaagccatttcaaactccttctctacagctttctggacatctgtggctgccattgctccataaactaactctaccacaggaatgtttattttcttaactttcttctttggagcctcaaccttggtatcagtatccatctgcacaggcttatctcctgcctcaggggtaccattttcggctccaggggcattagcagttgccttggtattagcatcttgcatgctaacatcattgtcattggtgctaggagttgcagcagcagcagcagcatcagcaggagcttcatcagtttccatcttggaattttctcctgcaggttctttgtaaactggaacctcaatttcttcttcctcttccagtagagttgcagattcgacagatataattccatgcacattcaaccgaactttcactttaacttttgctttttcattttttgtagattggaaagggccaatagtatatgtgctgatctttgcaggtgtttgcaaaccactcacgtcatcatactgaacatcaatagaaaaggttcctgacctgtagatggtcagtgccttgacacttggtatgggatttcccttggggaaaacaagggtactttgtttattatctggtccactttcctgcggacgcggccttcgacgctgccacgtgccggaaattgagaaaggaaagctttcgttgacctgaaactcccgtactttaaaagttggactgagaattgcacactgcaatgcacc

SEQ ID NO: 1924 - DNA, 1554 bp, Glycine max
aaaataaacgcaagtattaaacgggaaatgaacattataattcattcatcgtctaaaaatcttatacaaataatctatatataaacctagagaaagtaactctggccaattccaaccacattgtcgttttttcttctaaactctttcgtgaaaaaaatcaggattccaaagaaccaccataatattaattaaaacttaggttaccaaccaaccgagagggttctacttacaccaaatatccaaggagccacactcactgtcaacccagcaaaattctcttttgcttatacaaatagtagagacttgagagcaaaccaacaacaaaaaaattaggcagagcctgtgttctcagacttttcagtctccattggttcggtagatgctggtgcagcctgactactgctattcccagcattctcattactgttgacatcagaatccccctggggttgctgttgctcatcactctgagaagatggggttgctggtcctgctggagtaactgcctttgttggcttctgtgttgtcataatcggcttgcagaacctatcgacatcttcagctttctttctcatttcagctgacaagagtacagggttggcatattttggaagtgagctctgctgctgctgctttctcattaaaccacttctcagcttcaacacatttatttatgaccttctgtttctcgttaatgtcaatgtgctcaaatctaggatcatttgacattgcaacttgtctgtaactatttatacaatacacgaactgttcaattatagtacccctctccgtgaattcttcgtatcgcccatcaattggatcaccttgctttttgagttcttcaagcttggcaatatatacacctttagtttcatcttcaccctcatcataaagccaatcttccacttcctgaagtttagcagtaaaatcatctctctctgaagcagtgacaaactcttggtattcgtcattaagcttgtttctcatgtcataaacataagcctcaactgcatttttcttgtcttttgtttcttccatcacacgatcttgcaaagccatttcaaactccttttctagtgctttctggacatccacaggcaccattgctccataaactaactctgctacaggaatgtttgttttcttaacctttttctttggagcctgaaccttggtatcagtatccttttgcaaaggcttatctccaccctcagggatgccattttcaaccccagaggcatcagtactagcctttgcaccttccatattagcaccagtgtcattggaggaaggaggtgcagcggcctcagctgggacttcatcgatgtccatcttagtattttcccctgctgcttctttggggggggggccctccgcgcttgcctcgtccaggagtgttgcagactcaagggatacaattccgtgcagattcagacgaactttcactttaacttttgccctttcaccatttgtagtttggaaaggaccaatagtatatgtgctgatcttaacaggtgtttgcaacccacttgcttcatcatataatacattaac

SEQ ID NO: 1925 - DNA, 860 bp, Glycine max
ctaaagtaataatggaaatggatgaaagccaaattcatttttaaatgggattttagactcttgaaatatacctgtccttaagatgtggctaaatcctaatgtttctattaacaaagttacaaatgcttacaataatattgtatataatatatccataaaaaataggcccatacaggtaaatgaattcggtggacaccaaaatcacagaaatgtaactttttttatgataatcactatcatatcaaccccatttatttctgaagtaaatgacagattataggggttgctaaacaaatctaaatacagaaaagaatgtaaaacatataacactccaagtggaagacaaacccaaatcatatcaacacaagtaaaacactatggtaattggttgacgaattcccaattgaacttgtgaggacctgaattattggtcaccggggggtgtggtgatggggatgtggatggcacagggattaatggtgggacagaatcaaacaattcccaatttgtggtaactacaactcctgaggtggaattccttgagggttgttgttgttcctgctcctgaattggtgctaaggccaatctatgatgtccatttgaatgcttttgttgttttttctcttgaactggtccctgcctttgcccatttgaatgcttctgttgaggctgcactggggcatggcctccattgctactaggcatggaattcttaactttcagcacatccagagtttcaacatacttttgaactctttttaccttcaaaattaatgtctcactaccattattagcaaatgcaatttgagatgtactaataacacaaaagtgagcaagtctatacattacctgcattttcc

SEQ ID NO: 1926 - DNA, 1421 bp, Glycine max
tttattctcaaagcaataattttttgttcttttttttgccccgttcccttttttttttttttttttcttaccaaaacaaaaatgtggctaatattaatgtagattgacagctatttcaatccttactgcatttacagcaaacgtggcacgtgtgcccccaagttgataattaacaaggaaaaagcccttacattaaaaacacaaaacaatagcgaaattcaatagtttctatatttctctatcaaagcctactgaaataatacccagaagaatatacgtcccaagtcaagaaacatcaacatctgccagcatgagctttagacagtctgcttcctcgttttcaaaatggaacaaagaaagggaaaagatgaaaagagccatcagcatatcagtgcaactgcctcactgtgacactgcatccatgccgatactagctgtattatgttaaagcagagactgcttcatatccatctgactcaattgcttctaccactgatatgtcgcctgtccttgcaattttccctttgtccataacatggacatgtgtaggattcaaaagatccagaatccgtctataatgagttatcatcaacaaggacttttctggggtgagaatcctattaactgcattcgcaacatccctgagcgcatcaacatccaaaccagaatcaatttcatccaaaatagccaagtccgcccccaaaaccgcaagctgcaagatttcattgcgcttgcgttcaccgccactaaacccttggttcacattcctattgagaaagtcaggcttcatgttaacaagctgaagcttctccatcaggtaaggtaaaaactcgattggtccaacctcatctcgaccaagttttttcattcgagcattgtaggccatggcgagaaacagatcaatggaaacaccggggatttcaacaggggattgaaaactcatgaagagacccgcaagagacctttcttcaggttccatctcaagcaaattctcacctttgaaaacaacactgcctccggttacttcataatctgggtgccccacaagaaccttggcaaaagtgcttttgccggaaccgttttttcccatgatggcgtggacctctccttggttgacggtgaggttgacgccgtggagaatgtcgacgttggattcgacaatcttggccctcaagtcattaacttggaggaggggagtggcggcgctggccacgcagacgcggtggttgacgcggcggagggtgggttttggggatcgtcggagagggttaacggtgggagaacagtggattagtagggataacgccatcgctgcactgatacgtagagaatcccttttcttttgctctgattcttttcaatgttttgtcttggggtttcaccccatccaaggggggcctacgtagctgacgtcttctcga

SEQ ID NO: 1927 - DNA, 1423 bp, Glycine max
accaaataaacagtgaatgttaactcctgatgacctgcaatgcaagggtgggtatccaaattttttttttttttttttcgggaataaatagccgtttttttatttttgtgaacaaggagatgctagatactttcttagtcaacttgacaagagattataaaacaatcagcataaacactaagcacaataaacaatcagaatgttttcactgtctgaggaaatttacagcagcccaaatggggaagatcatgataatgccttcaacttgtctgaacattcgtcatgatctgctggtgctttgaagttcttcactgatttacccaagacatttaaaacagcaacacgctgtaattctttagcttcctctaatgaaagctgaattgatctcttctctaactcaacagcatgcttgctaagttcaactgaggacagggagcgaagcatttggatatattcttcttgatctgattggtccaatttcctcaaaaacatctgcaattgttggtatcgctcttcccagtgcaaattttttaatccctttggattaccaatggtagtagggccagaagaagctgtcacataattggactcaactggtgctaacttcatggcagatttcccaagagaaataggaactgaaggctttccagatgagttcattgaagaagccataggaaaaggtgcaaatgctgggaaacaagaaacctttggttcctttaactgaggtggctcctttgtctgagattttggttgagcagtctcctctccacaacaaagctgcctagaatgtggacaataagcatcaatacttggattttcaaaagcagtgcccttgctcaattctgcttcagattttctacggacatacacaagatgtccatttgcagcattattgcttggagattgttggagatggtgattcaatgggtagtcagacaagggtctcttggtgccagaaactctactagaatcagtaccaagatccttatccttgaaaaatgaagagcttccaacagaggttggcaccatgattttattatcattttgcagatctctcaatgctgtcttcttcacagcaacagtcagttgtttatcacgattaggcaagtccattttacaattgcccagactatactcacaaaatttagaagctatactttgttgaatcatctccagctgtcctgagagagagaagtctagaacatgatcggttgaggtgactgtgacggcgaggatgagcaaggcggcgagtgaacggaaggaaaaggttagagcgagttgacctccgtcactgctcctcccgtccaatcggtacttctacttaaatttccaaccaacattatttacctatctccgactctagagccaaatcaacaagttttgggtggaaaacggggggggggggcctacgtagctgactcga

SEQ ID NO: 1928 - DNA, 1405 bp, Glycine max
aataaaatcaaaccaactctctccgatttccataccataccacactccttcttccaccttaagctgcgcagcttcttcactctctctcattctctacgacgccgtttccaagcgaccattaccaacgcttcctcgagcttccaaagctgctcagagaggttttgtgttttctgaatggcaaccgcaccggctcatgctccggtgaagtcgcagcctctgcacaacttcgccctccccttcttgaaatggggcgccagcggcaagaacaacaccaccaccaccgccgctcaccaccaccgcttccgccgcccctccgatcacgcctctgaacccgactcctccgaccccgactcccgcccccaccgcctcggatccagaaccgcgcgcaaccggttctcactccctctcaaaccacctccaccaccaccaccacaactgcacgaagccgaacacgacgacgcagacgacgccgtgcagaagccatggaacctgcgccctcgcaagcccgcgctcctccccaaggccgcactcgagatcggcaccagaccttcccgaaaccaccaccacgccaccaacaacggagaattccacgacggcggcggcggcggcggcgacaacaacaaccccgcaccgaagtcgctgcggctccgcgggttctcggacacgccgtgcagtgtgaagaaagagaagaggaaattctggatcgctctctcccgtgaagagatcgaagaagacatcttcgtcatgacgggctccaggcccgctcgacggcccaggaagcggcccaagaatgtccagaaacaaatggatagtgtgttccctggcttatggttagtagggataactgcggatgcttacagagtcgctgatacacccgccaagaggtgaagagaatttagggaaggtcttggagattggaggtacagaggcgtgggattttgtaaagagtaaaacgaaaatgttggattggaaatttggaatttagaaacgaaccatgatgatgattatgaatttatgatgatgatgatgatgatgctaatttccttggttgtgttgtttttgcggcacactagggttttagatgcaaggggcggctttagttgatttttagtagtagtagtttatatatcgctgtaaggaaaggaaaatatatatcaaatcagtatatatagattaattaatagacttgaatgcgatgctatgataatcttttcagttcaaagctttttgttgctttttttctgatgcatcaaatggttttccatatttgacaggcttagggtagcaagcttgtagttaattagccaaaatcatcggttcaatttggaggcactgcttctgcatgcttactccctagcacccgaaggggaaagagaaccctgatgaggttggaattcactgcaag

SEQ ID NO: 1929 - DNA, 862 bp, Glycine max
gggtcgaacttatatttggactccaaatatgtattctttgataatgatggaaagaatttgaaaacagacttcattacaaaccatgttacttacaatagtaatatatttatcaaagcaggagaagattacatctgctgggaagaatataaaagaatgaaattggtatttctataaaattgtcaatttctatacaattgtttttacagtgaatttactgctcagacaaataaattcatccttatcaccatctgcttcaagaggaaatagatgggataatacaactccaatgttgaaaggaaacacatgtcaagaggatgccaccttgggtacctccaaccatttccacaccatcagcaaaccactctcatctccagtgaagaagaggccaccaggacctaactcaatcaatgccacatctttcttggcaaacaaacgtcccctctctgaaaatgatggcaattcatacatgtgaactgaattgtctctgcacgaggaaaataatattggctttccctctgcatcaggcatcccaaaaagtgaaacaacaccattttcttcggtgtgtgtatatatcacttccaaagatcctgcttcaatgcaagcccagactttaattgtgcggtcagatgaacttgacaacagatattgatcccaacagataagggatgtgactacgtcagtatgatcatttagtgtcattgtacactgtaatgtatccatgtcccagacctttatgctttggtccatggacccggagtacagcatcttgcatccaaccgccagacgaaccactgctgtagtgtggccagtgagtgacgcaaccagttcaaaaggagaatcggctttagagcttcctctccaa

SEQ ID NO: 1930 - DNA, 1017 bp, Glycine max
gctttttttttttttttttttaaccaagaaaaacatcatatacattatatcgaagaggtgacacacgacttgcttgtagataaaaagaaatgaagaagtaacagatggaaatcgatgaatatttagatttaagataccttctaagggaatccaagagcttttaacctacaaaagaatggtacacctgacatgattgaagaattccgaaatcggaaaggtttttaagaaatttcggaatcgaaggaacctgcaaccttagcatatctctctactctacagcataatggctagaactacccaagaaaattttcccatatatatgactaccaatttcttttccattcataagaattagtagtcacaccaagaaacgttaatagtgcacccaacacgttttccataggttttctattggacagagccttcaaaatgctctcttggcctgtacattgttcagatttgtatccccaacacatatagtaagagagaaaggtcgtctcaactcattccacatagattgtcagtgcaagaaacatcctcggacggcatcatatttagatctggtatcaagaaaaaacttttcccggtggttgattctatcttgtttggcctagattctgatgcatgtgaatgagtatcatcttgaatgggacgtatgagggcctccgaagatactactattctctgatggggttgaccagcaagcacacactgcggttcaacagatgttgaacttggattgttctgatgatattttaatcccacatcaagcttcattctcttcagactctcatttttagctctctgtgcctcaaaatttgcatttacagttgctatttcctttttcagatatatgctttcctttagaagggagctctcctcttcctttaattctgcaaaggtcttttttcttctgcacctcttggtagaagcagagttgccagtgtatccacttgtagcagtagcctaaaaatttgtttgggtcatcaaagagggggggggggcctacgtagctga

SEQ ID NO: 1931 - DNA, 1477 bp, Glycine max
aaaacaagaaatgaaggcgcttccgttggtttttttgaataaaaatataaaattgtatattgattttagattttagataccttctaagggaatccaagagcgtttaacctacaaaagaattggtacatctgacatgattgacgaattccgaaatcggaaaggtttttaagaatttcggaatcggaggaacctgcgaactttttagcatatctctctactctacagcctaatggctagaactacccaagaaaattttcccatatatatgactaccaatttcttttccattcataagaattagtagtcagatcaagaaacgtttctagtgcaccacgatattcattggttttctattggatagagccttcaaatagctctctgggcctgtacattgttcagatttgtatccccaacacacatagtaagagaaagaggtctcaactcattccacatagagcgtcagtgcaagaaacatcctcggacggcaccatatttagatctggtatcaagaaaaaactttccccggttgattttatcctgtttggcctagattctgatgcaagtgaatgagtatcttcttgaatgggacgtatgagggcctccgtagataccactattctctgatggggttgaccagcaggcagacgctgcggttcaacagatgttgaacttggattgttctgatattttgatcccacatcaagcttcattctcttcagactctcatttttagctctctgtgcctcaaagtttgcatttacagacgctatttcctttttcagatatatgctttcctttagcagggagctctcctcttcctttaattctgcaaaggtcttttttcttctgcacctcttggtagaagcagagttgccagtgtatccacttgtagcagtagccttggatacggcggcgtgatggtggtggtggcggctggagtcttcgtaactgtcggcgccggcgctccaagagaggggcgtggtggggctgcatctggtggaaacggcggcgtcgcatcgggagacggcggcggaggttagccttgatcttgagcgcggctgtttgactccccaggagaaaggtaaaagctgctggtggtgagatttgtgtaaaacggtaccttgcttgaggcgtagcagaagctccaccacaacggtgtcatcctccatcgccgcacgcacccactcgtcgtcgttcaccatcttggccgttcaacactcatcaaagggaaataatctagcgtgagtattgaagagagagagagagagagagagagagagagagagtggtggcggaggtattggaggaaaagataaagagtggaatgagcataggtttatatactagtataattttagttttaataataaaaagaaaaaatgagcgaaggggtgaggatattgtgtgggggtgaggaaggaggaaggtggaagatggagtagattcgagtcgggggggggcctacgtactgactcga

SEQ ID NO: 1932 - DNA, 1658 bp, Glycine max
ccacgcgtccggtgacgtgtgacgaggcccatcatcaattcatcgtatttttctcccttttgtatatatgtatatttctctctgtgtgactcttatgatctgttgattttgggtactttttcgatgtttcctatgtaattcttcatggtccaaatttgagcttggttttcctgttctgagctaattatcagctatccttttgccatttgtttatcttgtttgcatttgtgtgatgaattaagatctttgtcatattaaagtgttttgtttttattttaattttttttgctcatcattttgtgctcatggtggtgaggtttaacccttcatgtctcaccctctctcataatcctcaccacactacatatttctctaagcaagtgacagttaggagcagttatgggaaacacatgaaaaggggtggccttggaagaaggcctcagatagtgtcttcagttttggggaacagtaacactgaaggggtgagtgtgtttgtggtgtctgacttgcacactgactatgctgagaatttgaagtgggtggagtgcttgtctaatgtgaagcacaagaatgatgtgcttcttgtggcaggtgatgtggctgagacatgttccatgtttgttgtgacaatgtctcttttgaaagagaggtttgagcatgtcttctatgttcctggaaaccatgacctttggtgccgtcgcgaggggcaaaattatgttgattctcttgaaaagctgaataaattgcttgatgcgtgtgagagaattggagtggagacaaatccaacggttatagatgaaataggaatcattcctttgttctcttggtaccatgagagctttgacaaagagaaggacataacaggctttcgcatcccgtctttggagatggcatgtaaagatttctatgcgtgtaagtggcccgagggactttcaaatggagatatgtcactggctttatattttgatgccatgaatgataaacaaatagatgtgataaaggagattcagatggcatgcgatcacatcattaccttttcacactttgttcccaggcaggaactttgtccagagaagaggatgttgttctatcccaagcttccaaaaataattggttcagactctcttgaagatcgaataaggtctattcatggtgctgagggaaggaaggatgcgtcgtcttgtcatgtgtttggtcatactcacttctgttgggatgctgttgttgatggtatcaggtatgtacaggcacccttagcttacccaagggaaaggaagagaagaatgaatggaggtgaaaattggctaccgttttgcctttatgctgacaacaaatttgctgatagactcaacccttgctattggtctgattattactctgccaaccccaggacaccccataatactaaacttgctccttgggtagccagattttataagcaaacagaaactgtggatgtatagtattcactattgactttattgagctggttttatttgttgataagacattcctatattgtgttgtcttttttacattaaatcaataaataacatgagtcattttgcaaggtgaaagttgcacaaacacaaaaaattaaaaaaaatataaacaaaaaaaaataaaattatcattattattaaaacatatttatatat

SEQ ID NO: 1933 - DNA, 789 bp, Glycine max
tcgactatcagtacaagattagtatagttactccaagtattaaaatacataagatcgagacatgtggcccataaataaaataggaggaagaagttagaaaactataccaatcatgatagatgccaataagtcctctctcatatatgacacccaatgtacttttctcagctatagtaggcacaacattcatgacccataacttggatgattgaatagcagcagcaaaactacccaatccagcattcatatccataatgttgcgataccttccagtatccagcagtctgttaattttcttataagcatttacatgctttttccactttttgttatcttcttgatatgtctcaactgaaactccaggaacagagccactagcaattctaggagggatggcatatagcctctctggaaatggcttataatcaccagaaactttaggacttggagtaacgcagacctccattttcttataccagacatcattagcatctgtcgattcacagaattttacactagattcttcttgtctgctacgacatgattcagtgtctagagttttttgccaaatggcaatttcagaattctcagacttcttctcccagcaaaggagcttagcagtctcttcaatctttctttgttcttcttcaagatcctccttaggtctctgccaggctttgtaattaatcttccaattgattggaggacccgaaagcacccaataaccaccaggtcttagaactcgcgcacccgccgtcatatcattccatcatttgctccggacgcgtg

SEQ ID NO: 1934 - DNA, 2541 bp, Glycine max
tttttttttttttttttttttttttttttttttttttttttttttttttttttttttttttttttttttttttgtttgtttactttgtaatcccaccaaagagccaaatgccataattaggatggctaaaaaaaatgaagtgtccacaatacaatgaaatacattgggccaatagagattacaactcaattaagaataataataaaaaaagaactttttcggtgtacaaattaaaacatttaaataaggaatataatataattaattaacaaaggagagagaccgtgttttcttcggaatgtagtaatgtccaagataactaactaagaccaaaaaatggcaagtggcatgcataaaccttaagcatagctttgtagctttcttcatcaataaattaacaacataggaaaccttaggtaagtgacaatcgtgcaaaactccatcaaacccctcttctgtgccacagttgcaaattgcaatgaccaattgagccacaatatgaattctgtgaagatcgtatagagaaatgtactggcagccaaaggccaagccagttcttcaactttgatatagtggcttattgtgttgatgtggaattagtaacccaatactgcttgacagcaacaagcaccttctcaggaacaagaggaccatcctcatggtcaaccattttagtgtcccatctcattcctccaactattttctttaccttaattagcacatctacttcgtcgcggaatatgacagcaccttctggtcgcaaaatccggtccatctccagaagtatatcttcggccttgcatttatccttgtacagactaaagacaccatgggcgtgaataaggtcatatgtccttggatatgttgaaaaggcttcacaccaatcatgatagatgccaataagtcctcgctcgtatatcacacccagtgtattcgcctcagctatagtaggcacaacattcatgacccataactttgaagaatgaatagctgctgcaaaactacccaatccagcattcatatccataatgttgcgataccttcccgagtccaacagtctattagttttcttgtaagcttttacgtgttttttccactttttgttatcatcctggtatgtctcagaggaaactccaggaactaagccactagcaattctgggaggaatggcatatagcctgcttggaaatggtttaagattcccgccagtaactttaggagtgggagtaatgcaggcctccattttcttataccagacatcatcggcatctgaggactcgcaaaattccacactagaatcatcttttctcctttgacatgattcagagtctacaaccttttgccaaatggccatttcagccttctctgacctcttctcccagcaaagttgcttagcagtctcttcaatctttctttgctcttcctcaagttcttccttaggtctcagccaggatttgtagttagccttccaattgattggaggacccgaaagcacccaataaccaccaggccttagaactcgatcaacttccatcatataaattccattatttgctccccaaggaatcaaacagcgagaacaatgagccatatcaaaggctctagaaggataaggcaactttatggaccccaaaacaccaataatagcagggacacccctttcaagagcaaactgtacttgtgcttcatgattgtcccttggtgcaaatgacatggcaacaacatttctgctccaaagatatgcaccccaactggcaaccccacaaccagtgtcaagtgctgtcctcactgttccattagttataggtatcacagatgcaatttgatcaatatatttatcagcaccttgaggaaattgggttccgccaccagggaatttgaacacatttccctcgtattggatccaattctgaatagccttctcaactgtaaggctcttgtagggagcattagcatacggaacataatcacggctcttcggccatggaaatggtgttacataccccttgggtgcagggatcatacactgcaacttctcttcttctggggggcagtgtctctctctatagaccatgttttctctaggaaaggtcatggcacgcttttgatcttgacagggagtgtaatcggtatagcgagcagcacatggctcaaataccttaggctttgaatcagcttcatcaaattcgttaacttctccaccatggtgggaatcaaaacttaaatttggaactatattacattctgctttagtcttagtaatctccaatgctatgctatctccctttccgaaaccacttctctgccatgcgcctaatatatagaagaaacagcatagaccaactactataaagatctgcacagaacttctagtcctaccatcagctgaacttggttttgccatttagaaccatatgaaggttgggcggacgcgagaagatagttgtgaaacaagcttcagatctgctccagtgtcaagcttaagctccataagtttaacttatttctttaggctctccaacaaggaaaacataagcattt

SEQ ID NO: 1935 - DNA, 1783 bp, Glycine max
  misc_feature (153)..(164): n is a, c, g, or t
  misc_feature (184)..(188): n is a, c, g, or t
  misc_feature (317)..(321): n is a, c, g, or t
  misc_feature (581)..(585): n is a, c, g, or t
  misc_feature (1040)..(1040): n is a, c, g, or t
  misc_feature (1095)..(1095): n is a, c, g, or t
aggtacactacctcgaaaatataatatatttggccagtcaatattagaagcaatgttatatattttactgctcaaatcaactatgcaaaacatgtcaaaacgccactttgtccatttcccatggaagagattatttaccaggcagcatttggnnnnnnnnnnnncttacacaatggaggttcannnnnctccctttgctcgtagcattcgttggaagtgggtttgcggtaaacggcagcaccaactttgttcagtccatccttgttgatagtcacaagctcccaacaaatggacttagttagcgaggtcatttctannnnncaaaattacaacaggtcagtgactattactaagttaattatcttctcaaaatcaaagatatgtaatcctacccttccatatctctacatcttcctcaagcttctggtacacaggagtagcagaccaaacaaaataacctcctggacgcaaaactcgattcaattccaaaagcaacatgccacctggaaaagagtttcacatttctaagtaactatggttaacacaaagctaagccattatgaagattcaatatgaattgnnnnntccaaattcgagagaagtgttagtaagaccaaccatctagatgccaaggtactctacaacgtgcacaatgtacaagatcaaagacactgctgggaaatggtagcctttgagaacccatgacagcagatatggcaggaatccctctttcaagagcaaactgtacttgtgcttcatgattgtcccttggtgcaaacgacatggcaataacatttctgctccaaagatatgcaccccaactcgcaacctgagaaaacaacctgacatgagaatatattgctaaaaactaatgaagcaagcatgaagctaactatcagatagcatatacaagaacaacaacggagatttgacaaaattcatctgaaattaaagatggcaaacataccccacaaccagtgtctagtgctgtcctcactgttccatttgttataggtatcacaggtgcaatttgatcaatnatattatcagcacctgaggaaattgggttccgccaccagggaatttgaacacatnttccctcgtattggatccaattctgaatagccttctcaactgtaaggctcttgtagggagcattagcatacggaacataatcacggctcttcggccatggaaatggtgttacataccccttgggtgcagggatcatacactgcaacttctcttcttctggggggcagtgtctctctctatagaccatgttttctctaggaaaggtcatggcacgcttttgatcttgacagggagtgtaatcggtatagcgagcagcacatggctcaaataccttaggctttgaatcagcttcatcaaattcgttaacttctccaccatggtgggaatcaaaacttaaatttggaactatattacattctgtgttagtcttagtaatctccaatgctatgctatctccctttccgaaaccacttctctgccacgcacctaaaatatagaagaaacagcacagaccaactactataaagatctgcacagaacttctagtcctaccatcagctgaacttggttttgccatctagaaccatatgaaggtggggcttgaacactggtttggagatctgggattcccaagagagaggagttaaagaaagagaaaaaaattgacaaatgttttttttttttttctgagcaccaaacaatgatgaattagccttatccttgatgtaataataagtgagcggacgaa

SEQ ID NO: 1936 - DNA, 1615 bp, Glycine max
tcagctacgtaggccccccccccatgtgtttatattaatttgtgccacttattatataattacttcttcccccgagggttatttgggatttggcttgatcttagaaaaatctatgtttcttttgttttgaattcaatactcagtgctttgattgtgcattttgcatcagaagcaggcactgctgagtcacagtatggaggccaaaagctcaaaccagataaaagaggaaagcaatgattccaattatgataggaaagctgaaataaaagcatttgatgattcaaaaactggtgttaaaggtcttgtagattctggtgtgaaaaagatcccacgcatgttcctttccggcatcgacataactgaaaacgtagccagtgactcgaacttgagtattcctgtcatagacctacaagacatacataacaatcctgcactgcataatgaagttgtcaccaaaattcgaagtgcatgccaggagtggggatttttccaagtgatcaatcatggaattccaattagtgttatggatcaaatgattgatggaatccgaaggtttcatgaacaagatactgatgtcaggaaacagttttactctagagatttgaagaagacaattctatacaattccaatactagcctgtacctagacaagtttgctaactggagagactcacttggatgttctatggctcctaatccacccaaaccagagaatttacctacagtatttagagacataattattgaatactccaaggaaattatggcactgggttgtacaatttttgagttattgtcagaggctcttggccttaatccatcttatctaaaagaaatgaattgtgctgaaggacttttcattcagggtcattactatccaccttgccctgaacctgaattaactttgggcacgtccaagcacactgatagttccttcatgacaatagttctacaaggccaactgggtggtcttcaagttcttcatgaaaaactatggtttaatgttccacctgtgcatggagctcttgttgtaaacgtaggagatattctacaacttataacgaatgacaattttgtcagcgtttatcatcgggttttatcgaatcatggagggccaagagtttcagtagcaagcttcttttcgaattcgcatgatccagcaaaaggtgcatcaatggtttatagtccaattaaggagttattatcagaagaaaacccagcaatctatagggacactaccataggagagatcatggcacaccattttgctaaggggcttgatgggaactctgccttgcagcctttcaggttgtgaaatgaacagattaagacctagaaaataacgatgctctcctgattctcatggaggtgcttgtaatgtgttatttctgatgccttttattttcttaattttcttcttcacacaacaagcttcaaattaagaaaccttctgggcagacatatgctcatctgtctcatcctaggcttcttagcttgtgttgtaacgaataatttcgtgccattcaagaaaaatatgtaagagattccattagaatggatatgacttaacaaaggatgataggacaagttttaaatgaaaaaaaaaaaaaaaaaa

SEQ ID NO: 1937 - DNA, 1661 bp, Glycine max
ttttttttttttttttgccagagaagccatttattttattaaaagatttacaaaacaaatacaagaacagaatttgacataaaaataaaaaatacaacagaataatcttacgtgtgtgtgatacactatagatatatagaagcattgaagatggccataaaaaaaaacaacggacttcatgtccctaaaacccaacaggttcagtacatccaagataagtcttgcctgaaagacacagactttgcagctccttggacacctctttcagaaatttgaggacaatcttcaatggccaagaaatctaacttcaatgatccaacaagcggctttaatccatcatcagagatccccaaacacttgcttaaccgtaaaatgcacaatctgggaaactgactcacaagctgtagcccttcatcgctaatctcttggcatttcacaagttcaagtgattcaagatactcagcggagcaaagagcttccattccaacatcattgaaggaataaacatgatcaagagcaagctgccgaaccaggcacctttgaatcaaacaaagtattccacttaatgtgaatgaggaggatgaagggaactccccatcagaaaaagatatcctcactgattcaagtttggagcagttttgagccaaggccttgagactctcatccgtcaatctcaacggattattcaccaaggaggggagtgaaaaatcggatggaactctaagtgaaaccgatttaagttcacttgatctttgggacaaacaaataatgtcaaagtccctcaccccaacacacatgtctaggtgaattttctgcaagttcttgcacttactcaacacgcaagcaagccctctcccgggactgatgatgcaattgaccaggctaagttcaagcatgttcccacaagggacatgctgcttttgccaccgatccacagacaaccggtcataaaccttcatgtatcggtagttagcatccacttcaaactgcaaccttgtgagtttctgccaaccagggccaagcttaattaagtccccttcaccaatggccctgcaattcttaatggagagatcctcgagccttccgagcttgccaagatattcaagccattccacactgctgacattaaggcatctgataaggtgaaggctggagaggttcttgcagcccacaacaagagacagaatgccacagccagtgatccttggtgtgaaattcaaccttaaagatgagagcttggaagaagaagccaagtaacggagaccaacatcagtgatgaatgtgcagtagctcaaggagagatcacagagtagagggcagtgattcgcaagaatgagaaggcccttgtcatccaattgttttcccaatttggacatccatccagagtatgtaatctccactttggacaagttctcaaaccttatgcatagacagctcaaagcttcatctgcaggatccattccacacccaacccttatacaattcctttctgcattgtccaaataataaagccgtttacaaacaagagaaacagcatttctatcacttgttttctttatcctactcaatatctcccatactatgtgctctggtatgttatccatcctctgctcttcacaacatggatgcctgacaaaggaaggaaggaaagccgccgaatt

SEQ ID NO: 1938 - DNA, 1944 bp, Glycine max
aaaaaattggccagagctctaacagcacaacggtatttcattcacatcacttggctactggaccttccaagttaaaaagcgatatattatgagtatcaaactgaagcatgtatatccacttcaaaacaatttcccttttactagtcgtatcaaacctataattctacccacaagggtagttaatctaaaaggtaagttacaaacaataaatgagaccgatcttgttgattttgaatcaacaagtttccatgctccgtactatgagggaaagactcaactaagatctacctgccagtttgatcacgtcagcactgacatttttgatatcttataatcccaaaacagctcacttctgccaatccagaacaactgtagccataaattacacttcttggagcttcatcattaggtagcccaatacacgccagcaagaatcagttccatcatcctcagcagcacaaaaaattgtttgtccatttctgctaggttttaccatttccaacaacaacaatgacaacataactagcaaaaggtcacatcccgaatgttctgttgtaaagatccccagaatttggcatccgaaattttgaatcatcatatcctgaataaaatttattgaatccaagtctttcatttctcaaaagctcagccacacccaaaccatttccactctgcacctcattccacccatcccattgcccatttgacaagactgcatttgtagactgctgcagagacagctgttggaatgggcctagattactgacttgggattgatctaaccttgaagaaacagcataggaatcgccaagttgagaaaaagtattcccaatttcagaaaatctaaggttttgctgtggtgcgagagatctttgcatcaataattgtagtctggcatcattttcgaagtaatttaattgtggcatgaaattagatcgaatgtccagtgccgggctgttcagtgcaccttgaagtctccctttgccaactgccaaaatagcagggtccataaattcaatgtcccctgcactaccaaggtttccagctgaaggtgtctgatatgaatttctcaagagggaagaatggtcaagcaaagaattcccagaaatggaatcaaaagcctgctccactctctcatgggaagaaaaaccaggtggtggcaacctgcttggaatggaaaatcctggcggggctgaaacttgtgctcttgagatggcagaaaacttattagaagatgcaatggaatgaccactgaccatattctcagcttcctcaaagttactggtagaaaatccatttgcaatgcccaacttatccatatacaagtctctttctgcacaattcaggaagactgtacggtttggccgttgatggctgacaccataagatgcatgtggatcaaacatttggattttggattcctcctgccttgcaaaagaaaaccttgattgattgttactgtgacctttccaagaactagatttgtttaaaggaccaggctggttatcagtattgtcacccaacaacttcgctaaattatgaggtgatgttagtgagtcatcccaggtatcaaagtccatggacaatatattagaaattatactactttcacctttatccctagcaatatcatgtccagaattaactgcttcaccaactaatctttgaatgatatgcccatttctttcatcatgaagcagaccataggagctgctgctgaccaatttttcagggtgaccattacataatatattggatgcatgtaacatagattcatctcgaactctatcatcagcacggacgcgtccggcgtcccgggcagtacaaggttcaccatgctgcagaagacaagggctagaatggtttgatgcttgcaggaatctggttgactttggaaaataagaacgacaaacaacttctggatccttgagtctttgattatca

SEQ ID NO: 1939 - DNA, 1724 bp, Glycine max
aaaaaggagtttacagagggagcgaaggggtaagagaaattaccaccgcaacagttgaggtgtgttaatttctgacatccaaaacgaaacaaaaccccatcactgaactgagaaagaggctaccaacagacaccacctattttatgcctttgttcttcttctctcgacaatggtggataaaccaatgagcattcatcgaacccggttcccattctcgatcaccaagctcctcttctggtcgcttatcctactcagcttcattgtgctcttcttcttgggatctcccccgtcctccgcttccccttcccaccgccggcgctccctccgcggcggcgactgggagacctccgttcgcgaatccgccaagtccaaatccctccgcgtcctggtgaccggcgcagccggtttcgtggggacacacgtgtccatcgctctgaagcggcggggagacggcgtggtcggaatcgacaacttcaaccgctactacgaggcttccctgaagcgcgcccgcagcaacctcctcgcacagcacaaaatcttcgtggtggaaggcgacatcaacgacggctccctcttaaagtctctcttcaagctggggaagttcactcacgtgatgcacctggcggcccaggccggtgtgcgctacgccatgaagaaccctaagtcctacgtccacagcaacatcgcgggcctcgtcagcgtcctggaggcctgcaagaacgcgaacccgcagccggcggttgtgtgggcctcatccagctccgtctacggcctcaattccaaagtccccttctcagagaaagaccgcacggacaggcccgccagcctctacgccgcgagcaaaaaagccggcgaggaaatcgctcacacttacaaccacatctacgggctttccattacagggctgaggttcttcacagtctatgggccctggggtcggcccgatatggcttactttttcttcacaaaggatatattgaaagggaagcagatatctgttttcgagggtcccaatggacgatcagttgcgagggactttacttacattgatgatattgtgaagggatgtttgggggcgttggatactgccaacaggagcactgggagtgggccggcccagttgcggctctacaatctgggcaacacttctcccgtggcggtgagtaagctggtgaggatattggagaagttgctcaaggttaacgccaacaagaaactcttgccaatgccgcccaatggggatgtttttttcacccatgctgatattagcttggctaagaaggagcttggctacaaccccaccatcgatttggaaaccggcttgaggaaatttctcgattggtatatggactattattcttcctcttcctctctgcccaagagggcttggtaattttaattctaaaccacactcaattcaattagttttatttcattgtttgcatcaacatgaactgaaataccatagatcgtggggtggctgcactactttgcaggctatacctaccaatgtctctttctgggtaccgcacgttgaatttcactacggattcatttcatctccccttattttataatacttcttttctatggaaagtcattgctgctctacaatcttcttagctctaagcttgattggaacgtatatgtttgttgatcaataatttaagacacgactctttccaagttatattcttttatgcagctcagtttaacttttaaaa

SEQ ID NO: 1940 - DNA, 1594 bp, Glycine max
ttttttttttttttttttgacaaaccaaaggaagaaaccagatcaattacgggtcatttgagtcaatcttttttataaatcaaaatttacactagactcccgtaactttcacctgactttattctactttaatgccttccacaaacattttccaccatagtcttagttatgtatgcctgaagattaatgcattggttttgtatgttaaccaatgcattggaaggagatgttttacactatcatccttagcaacattttctcttcttatttggggcttaagtcccaatgttgaaaaaaccctaccttaaatccacgagtcacctaaacaaaaattgatggctcataatggtatacaacaccctttcacaatgttattcaaaattgtgcaccctctttgcagagatgagtgtattttgtagaagcattgctatggtcattggaccaactcctccaggaactggtgtaacagcagaggcaattcttatggcttcttcataacaaacatctcccaccagtttgtaacctcgggggctatttggatcctctaccgggttgattccaacatcaataatgactgcaccaggctttatccagcttcccctcaccatgtttgcttgcccaacagcagcaatgataatatctgcctgtcttatgatctcttcggggttactggttctagaatggacaatactgacagtagcatcttccctttgaagcaagagagcagctggcattccaacaatattgctccgaccaatcacaacagccctctttcctttaatagaaacattgtatctgtgcagtagctctatgcatccctttggtgtacaaggaacaaacagaggttctcttccacgcatggcaagacgaccaatatttaacggatgaaaaccatctacatccttctcaatcctgacagcgttcaagatgttctgctcattcatatgcgaaggtaagggtaactgaacgaggatgccatgaactgaaggatcatcattgtagcctgcaatatagttcaaaacttcttcttctgtggaattctcaggcagatttgcttccaaagaattgattccaacagattcacaagccttcttcttgttacgcacataagttgcagagtccttcctatccccgacaagaattacagccaacccaggaatcacaccaatggattctctcatcctggagacttcagccgttatctcatctctgatttgctttgctacagattttccatcaatcaccttagaagaagaatctgtagccataacagcaacggaggcaacatgagaagaagagaatccgagagaggtgggacccagacccacttggcggtggaggcggaaaacgagagaagaaggtttagaagagtagcaatgggagtgagtaaagaacaccgaagaagccattgagattcggtgattcttcaaacagcgattcaaaaagctatacgttgtgcttcgttgttctattccctctgtttttgtttttgtacaaaaacacgcgacgctaggattctccgaagtgaaaacttactttggggttttcaggggacagattctctgttttttggggggggggcctacgtagctga

SEQ ID NO: 1941 - DNA, 1211 bp, Glycine max
ttttttttttttttttttttttttgaaagagaaagagaaattttgtgttatataaaaggcaggactgcatgatccactggttgtggttcttagatctttggcagaaggaggtccccaagtaagaaattttgttccctttcatcctctaaggcggcccctcttttgttttttttgttttaaaatccttcggcgaaaatcattttattgcttgctcaaacttaacattcaattactctccataatcgaagattagaaacaacagttataaattaaacatacaataaccaaagcgatcgatcacatcttaaagctcacatcactcaacaccaaattacgacgatcccaacctgctgagcgcttcttgagccacattcaactgtggctccaactccaaagcctctttataagctttcttcgcttcctctcccatcttgttcccttcgtaggtttcccccaacatgcaccacgccttcgcgtttcgcggactcagcttcaccgactcggtcaaatcagccagcaccgagtcaacgccgcgccgctcgctcatcgcgatcttcagttccgccctcttcagaagcgcgtcacctctctcgtcctccgcgagcgaacccgctgcgagtggagacaacgcggcgtcgagcgcatcgagcgcgttggtgcggaagccctggaggtcgagcgccatggacttgaggaggtgcgaggcggcgtccttggggtcgagcgcgatggccttctcggcctcggctagggcttgtttggcgagggaagttgcggaggaagcgcttttggatcttctggcttgggcgaggagctgcgcgcctttgacgaaatggcgcttggcttgcacggcccgtgggttcgggggacggtggcggagcttggcgtagaggttttgagggatgccgtgcatccagaggaagctgaaaatcgtgagcgagatgaaaacgacttgtaacgccacgtcgcggatcattgctttcttctcgtcgaactccattttttttttttggtttctccgatctacagatagatgagatgaatttttgacgtgttgaggaagggctcagttgtgtagtgaagctcttgttccgtcagagactttatgcataccgtagccgccttccttcctttgacttaccccctcctttttccccctctttttttacgcagccggtacggacggcgtgggtcgaccccgggaatttccg

SEQ ID NO: 1942 - DNA, 946 bp, Glycine max
atccgatcccacttttgttagcccaaaaatcaagaaacccttcacacaaaccccaccaccaaccatgtccaccaaactactcctaaccctaatcctcatctcttacaccctctccaatgtcataggagaagaaacaggctttgtgggcacactacaccccaaatccttaggtcttcacaagaaacaaaccctaagccacttcaaattctactggcatgacatagtgagcagtggagccaactccacctcagccacaatcatcccaccactccccaaatacaacacaaccacttccttcggcatggtcaacgtcatggacaaccccttgactctgggccccgagctgggctccaagctcgtgggccgggccgaggggttctatgccctaacctcacagtcccagatcaacttgcttatggtcatgaactttgccttgtttgaagggaagtacaacgggagcaccataactatcgtggggaggaacgctgttagtgaaaatgaaaaggatattcctgtggttggtggaagtggggtttttaagtttgctaaaggctatgctcatgccaagacctacttctttgatcccaagactggggatgctaccactgagtacaacatctatgtccttcattacgagtaaaccattgatttgcattgctctctcaaatatcatcttttctcttaaagattgtttttattacaataatgaaattgtatcagtagtctctaattaaaatattcaatatccatcaattttgtccttacggttgtatattttaataatcgtaagcgactcatttgaagaattttttttctatcaataattgagagattatttagtatgatttctaataattaagagattgattggttatgtaatttttttatttaagcctaattatgagaggaaataatccttagaaatggagttgatgatttatagtgt

SEQ ID NO: 1943 - DNA, 1267 bp, Glycine max
  misc_feature (18)..(20): n is a, c, g, or t
  misc_feature (34)..(36): n is a, c, g, or t
atcataatacattttttnnnatggaaacctggcnnntgtggaggtatcgagtgactggtatttgtgccaataaactaaaagttgtcaaaaaaaaaaagcttgatttttgtagttggtttgtaaaattctactttttgttgtataaaaggcaatacaagtaagtagcaaaggatctctcttcaattcttccttttttgcagtggcttgaaagtgagcttcaatgaaagtaggactgtatctgcatggtccagtggcagaaggaggtcccccaagaaatacaagtaagaaatttttgtttccctttctattgctaagatctcgcattttaacgtagtgtagaattataatcctttggtgaaaatcatttattgcttgctcaaactcaacatccaattactctatccataatcgtagattagaaacaacagcacttataaattaaaagcgatctcatcttaaacctcacatcattcgatagctcggttacgatgatcccaacctgctgagcgcttcttgagccacattcgactgtggctccaactccaaagcctctttataagccttcttcgcttcttctcccattttgtttccttcgtagcactcccccagcatgcaccacgccttcgcgtttcgcggactcagcttcaccgactcggtcaaatcggccagcaccgagtcaacgcgccgctcgctcatcgcgatcttgagctccgccctcttcagcagcgcgtcgcccctctcttcctcggcgagggaccccgcggcgagaggggacaacgcggcgtcgagcgcgtcgagcgcgttggtgcggaagccctggaggtcgagcgccatggacttgaggaggtgcgaggcggcgtccttggggtcgagcgcgagggccttctcggcctcggctagggcctgtttggcgagggaggttgcggcggaagcgcttttggatcttctggcttgggcgaggagctgtgcgccttggacgaagtggcgcttggcttggacggcgcgagagtttggaggacggtggcggagcttggcgtagaggttttgagggaggccgtgcatccagaggaagctgaaaatagtgagggaaatgaaaacgacttgtagcgctacgtcgcggatcattgctttcttctcgtcggcctccattttttggcttctcgtcttgctcacggatctgcggatagattgatagagatataaatagatgatttcagaacctctgcttctggttttgctcttcttcttgttttgtcagagactttat

SEQ ID NO: 1944 - DNA, 945 bp, Glycine max
  misc_feature (36)..(36): n is a, c, g, or t
  misc_feature (891)..(891): n is a, c, g, or t
accatctgtatgtatgttggctcttatggaaaacanttataaccggaaataaataaataaaaaatccatgtgacgtctcataattcatccatcacgtttcttataattggtaatgaccagagcttctttcttttctacaggatcatacataagaccatgattgcatgaaaaaaccctctcatcaattttttttttttataatatagtaaaacttgtttttttttttttttcaacttatttaaccaaaatacttatggaacgaacaagggttgaatacaacaattgtaacaacatggggtaatgcccacaatggaagatgatccaattgaaacgtcattatccaacaacaatacatacagatccagccagagaaaatactgaatgatttatgagagctgaaatcatctcctctccagcgtccaactagtgattcgcattcttaagagttgcatctgtttatacagaaagttattcaccctcactcaatataggtactatgagcggtttcatctgtgctagatatacaatcgcccacatcatccagcagcatgttgttgcagtaagaaccaaagttaggtgaaatagattagcggaaggtcctctgttgaaacaaattctggtacaaagggacgccacaattccaatcactgcgaaaattagcgtggttacagagaaccccataacggatcctaattcctgcgatacacaaacaaaatttgagaacgtgagagtgaaaacgaaacgacacaacacaacccttagttccgtaatgcgtcgtcgtattagtgatctgaagcttcttagcaatttggtttcattttaggtcccgccccgcgcgtgccccccgctgtattgaacattatctgggtttcttgggccccgtttaccagnttttgctatttacactcaccatttactattaaataaacaaaagttctcgagccg

SEQ ID NO: 1945 - DNA, 690 bp, Glycine max
atttcattcagctggtagtgaccaaagcgaattgtgtacataagcgcaagagtttcacaaacatgacccgttctgcttcttagacaaaacgtacttctctttcatcaacttatttttcaccaaaatacatatttggtatcattatccacggacatgtgaaatgaatgaatgctaaatacaacatccgtaacacgaccaatgccaggtagcaatagaaatgccaactggaatgccattatccaacaagaaatacatacagctccaccctgaaaaaatactgaacaactcatgatagccaaaatcaaattcaatccagcagccaatctgcgatccatattctctaacttacaaggagctacatctgtttaaagaattattcgccctcgttcagtataggcacaatgagtggtttcatctgtgccagatatacaatcgcccacatcatccagcagcaaattgttgcagtaattaccaaagtaaggtgaaatagattggcagaaggtcctctgttgcagcaaattctggtgcagaggcacgcgatgattccgatcactacgaagatcagcgtcgtcaccaagaaacccatgtcgattcgcttcccttccagatcccgatcagagaaaacgaattcctctgaactctgaagcagagatctcagggtgctctgaatcgatcaccttgcgcccccgc

SEQ ID NO: 1946 - DNA, 1232 bp, Glycine max
taatttttttttttttaatataatattgatttttaaatatatattaccaaagattcgattattggtaattaatcatcacttacaaattgtagccatatgatcaagcaacatactctcttattataataataatttattgtgatagggtaggcataacaatttcaagacacatataactacaacacatactctagctttaagtagtgtacttcaagtaagatttagctatgcgaccacatgctccgttagggtagaaaccaccaggaacatgttcatcacctcctccatatattatcctcaatatttcctctggagttctaggatatgatagtgaatctttgtcaccagcgagaatgttgtctgtgacactaccctcagcaccttgcactctaggcaccacaagaccctcgtctttcacacctgcatttcctagcttgttcctaagcattgaaatgcgatctgtaaactctgccacagtcactttgtatggttgcaccaatgatgcttggcgttcatacaacaatgttcgaataactgcatcttgcccggactctactcctagaagccctgcaacaagcctcttggaagtagcattttgcagcagtggattggcaccaacataaccagtgagaccaacatagggaatcacataagatgctaacagatagttgatcgaattagcataggggtcaaagggaggaacaagaggtctcccaaatgcactattcattacttttgcaaaagatgctgtgcttagatcaagtaacggccttgggaaccctctcactgtgctctttatggccctcaagtgtccaacttcctgcaaaccaaactgcaagatgatatccctgatgaggttctcaagtctggccaatctggcaccaatgggagggggtcctccctcacttaaatttggagcaaccacatccaatccatgacccaaggaaccaaataagaaaaactcagcctccaagtattctaaatttaagggaaattctaacagatcaacatctgattctgaagctgatgcacttgcaatgaacacagaagaagaagaatattcttgaaaaaggagggggaggactagagaggctagcaaaacaacaatagggactctgcctctagaaatttgaggtgccatgttttgttttaggttcttttttccaaagtgatgatgcatattctacgggggggggggcctacgagacttgactcgagggggggcccggtac

SEQ ID NO: 1947 - DNA, 1784 bp, Glycine max
gaaaggttgaagaattatttagaatgataaaagccatgaaaacagtgagttacttaccctcttgtgtgtgaaatgacgaaaccctaggagaaggagagtaataaagaaagaaatatgtggtgtaagcaagcaacatggagtgtccacttccgcttcttccactgaacaatcataggaagatagcatcaccttgtcgtcagcaagggcagcatgcacagaaaagtccagctcacacattcctccacgtgtcacaaacccatttccctctaaaaagacaggacgcaccatgcgtccttgtattatacgtccccttgtcctgcccctgcccctataccatagaacattagtacccccacacacacccctcctctatctttcactattattgccacacaaatcaattaactgaatgcttagagagagaaagaggagaaggagtagtgataaggtgatcatagagcatattataagagagtgaaaactaatggaggttggcctcaagaaggagaacatggggtttgaggaaactgagttaaggcttggactgcctggaaacggaggcactgaagaagtgctcatcaggaagaggggtttctctgagactgaaactggtcatgaagatgagtctgccaccactgtggatttgatgcttaatctttcttctaaggaggccgcaaccactgctgctgctgctgcagatccaactgataagcacaagactttgcctaaggagaagacccttctgccagcagatcctgctaagcctccagccaagacgcaggtggtgggttggccacctgtgcggtccttccggaagaacatgttggctgtgcaaaagagcgttggagaagagagcgagaagaacagcagccctaatgcaagctttgtcaaagttagcatggatggagcaccttaccttcgcaaagtggacttgaagatgtacaagagttaccgagagctctctgattctttaggcaaaatgttcagctccttcacctttggcaattgtgaatcccaaggaatgaaggatttcatgaatgagagcaagctgaatgatctcttgaacagctctgattatgtcccaacctatgaggacaaggatggtgactggatgcttgtcggtgatgtcccatgggagatgtttgttgaatcatgcaagcgtttacgcatcatgaaaggaaaggaggctattggtcttggtcttgcaccaagagccatggcaaaatgcaagaacaggagctagactagtcgcacaattcatgacctgccccatcctttgtaattgtggtgcccagttggcttagtaactaaagtaaggataagctgcagcagacacggatggacattgcagggtgttgaattatagttaatttgtgtatcattatggtttgttataatatttcaaacaaaacaatgagatgcatgtctaattaagtactaattatgaacaggaacataatgactctcaatcatgttgttagacttggctttcttatatatctttgcttgttctgtgtgagtgcttgcttaataataattttaagatgtgtttgtctgttgtagttgtagcgacatgttatcatgctttacatttaaaattgtcttgtaaaggttttccttatcattatgagattccttggtattaatcatttttcatataataacaaaattgtatttattacatttacgttagtttttgttgtgatcatcaagagccgaatatatagtactggaaatgttccctgaacatggtggatgggaaacaagaacatgtgcgtgttcat

SEQ ID NO: 1948 - DNA, 1339 bp, Glycine max
tcagctacgtaggccccccccccgtattaatgccaacctcacccaaacttaagggctccccacaacgtaataacgtgcctgcccctatacctcaccccacttactattattattgtacaacacaaccaggtccctgaatgctttttagagagagaaagagtaataataataaagtggaagaaaaagaattaggagagtgaaacaagaagaagaagaagaagaagaagaagaagaagaattgagaagatggtgtttgaggaaactgagctgaggctgggactgggactatgtctccctggaaatggaaccacggcaacaactgaagctgctgctgcggaattaggagtgaggaagagagggttctctgagactgaaactgatgaaacagccaccgttgatttgatgcttaacctctcacccaaggaagctgctgctgctgatggtgcagatccacgtgagaagccaaagacttcgccgaaggagaagacccttctgcttcccgatcccgccaagcctcctgccaaggcgcaagtggtgggatggccacccgtgaggtctttccggaagaacatgttcgcagcccaaaagagcagcggcggagaggaaagcgaaaagagcagccctaatgcaagctttgtcaaagttagcatggatggagcaccttacctccgcaaagttgacttgaagatgtacaagagttacccagagctctctgatgccttgggcaaaatgtttagctccttcaccattggaaattgtgaatcccaaggcttcaaggatttcatgaatgagagcaagttgatggatcttttgaacagctccgactatgtcccgacctatgaagacagggatggcgactggatgcttgtcggtgatgtgccatgggagatgtttgttgaatcatgcaagcgtttacgtatcatgaaaggaaaggaagctattggactggcaccaagagccgtggagaaatgcaagaacaggagctagactagtagttaccagtccaaaatctgctccatcatcattagcggtgcctagttgacttagtaactgaagcaaggttaagctgcagcagacacagagggagagagcagggtgttaaaaaatatagttaagtaaatctgtgtatcattatggtttgttatataatatatatttcaaacaaagttgtgagatgtcgtaagtataaattatgaacacaaacgataatgactctaaattatgttgcaagactttcttatttctttacttgtgtgcttgcataataataagtttattaatttgcttgtcaaaaaaaaaaaaaaaaaagcggccggttttttttttttttttaaaaaca

SEQ ID NO: 1949 - DNA, 1272 bp, Glycine max
tccaccacctcctcctccaaagaagaaaccatactactatcactccccaccacctcctcaccctatacctcacccccacccactattattattgtactacaacacaatcaagtccctgaatgctttttagagagagaaagagtcataataaagtgaaagaaaaagaaaaaggagagtagtgaaacaagaagaaaggagaagaagatggtgtttgaggaaactgagctgaggcttggactgagactaggactccctggaaatggagccgcgccaacaactgaagctgctgcggaattaggagtgaggaagagagggttctctgaaactgaaaccgatgaaacaacctccgttgatttgatgcttaacctctctcccaaggaagcttctgctgctgctactactgatggagcagatccacgtgagaatccaaagacttcgccgaaggagaagaatcttcctcttctcgatcccgcaaagcctcctgccaaggcgcaagtggtgggatggccacctgtaaggtctttccggaagaacatgtttgcagcccaaaagagcagcggcggagaggaaagcgagaagaacagccctaatgcaagctttgtcaaagttagcatggatggagcaccttacctccgcaaagttgacttgaagatgtacaagagttaccctgagctctctgatgccttgggcaaaatgtttagctccttcaccattggaaattgtgaatcccaaggcttcaaggatttcatgaatgagagcaagttgatggatcttctgaacagctccgactatgtcccgacctatgaagacagggatggcgactggatgcttgtcggtgatgtgccatgggagatgtttgttgaatcatgcaagcgtttacgtatcatgaaaggaaaggaagctattggactggcaccaagagccgtggagaaatgcaagaacaggagctagactagtagtaatttccagtccaaaacctgctccatcatcgttagtggtgcccagtagatcgacttagcaactgaagaagcaaggttaagctgcagcagacacagatcgacagagcagggtgttaaaaatatagttaattaaatctgtgtatcattaattatggtttgttatgtaatatatatttcaaacaaagttgtgagatgtcttaagtataaattatgaacagaaacgatataataactctaaattatgttgcaagactttcttatttatttacttgttgtgtgcttgcataataataagtttaataatatgcttgtc

SEQ ID NO: 1950 - DNA, 2655 bp, Glycine max
gatttttcacgcgcctcccaaaaaaaatcattcaatagagatacagaaccttctcaaaaaatgagacggtcatctctagtgagtgcccttcttatagcaaacattctcatggcaacacgccttaccctcactcttcctttctctcgctccatctctccactcttatctcgttccctttcacaactcaaacaattcccaaaatcccacccttgtcccctctggtcctcctccttctccttctgcctccacacactccgcaagtccacttcccctattcgcgcctcttcttctttttctccctccatggctgcttcttctccgctaaacgacgccgtcgaaggcaatcctcttctgcagaacttcgacttcccacccttcgatgtcgtcgagcccaaacacgtgcgacccggcattcgcgccctcctcggcaagctggaaagtgaattggaggagctcgaacggaacgtggaaccgtcgtggccaaagttggtggaaccgttggagaagatcgttgaccggttatctgtagtttggggcatgatcaatcatctaaagtctgttaaggatagttcggagctacgttctgctattgaagatgtacaggcagaaaaagttaagtttcagcttagactgggtcaaagcaaacctatttataatgcattcaaagccattcaggagtctcctgattggcagacactcagtgatgctcgaaaacgtattgttgaaagccaaataaaggaggcggttcttaatggagtttctcttgaagatgataaaagagaaagttttaacaaaattgaacaggagctggaaaagttatcacaaaagtttggggagaatgttctggatgcaacaaagaagtttgaaaagctaatcactgataagaaggaaattgaaggattacctgccactgctcttgggttggctgcacagagtgcagtatccaaggggcatgaaaatgccaccgctgagaatgggccatggataattacattagatgctcctagttttattgctgttatgcaacatgctcgcaaccgttctttgcgtgaggaaatctaccgtgcatatgtaacacgtgcatctagtggagatttggtcagctacgtaggccccccccccattttaaagctaaggttggaaaaggccaagcttctaaactacaataactatgccgaggttagcatggcaaccaaaatggcaactgttgataaagcagaagaacttcttgaaaagcttcgcagggcttcctgggatcctgcagtgcaagatattgaagaccttaaggaattctccaaaagtcagggagcattggaagctggtgatttgactcattgggacattaccttttggagtgagaggctacgtgagtcaaaatatgatattaatgaggaagaactgcgtccctttttctctctgccaaaggttatggatggactctttaaccttgcaaaatcactttttggcattgaaattgagccagctgatggtctagctccggtctggaataatgatgttaggttcttctgtgttaaggattcttctggtagtccaattgcgtatttttattttgatccttatagtcgtcctgctgaaaaaaggcaaggtgcatggatggatgaagtctttgctcgtagtcgtgtgttatcgcgcgatggtacctcagcaagattgcctgttgctcacatggtgtgcaatcaaactcctccagtaggaaacaagccaagtctaatgacattccgtgaggttgagactgttttccatgaatttggtcatgcacttcaacatatgcttactaagcaagatgagggtctggttgctggtattagagggatagagtgggatgctgttgagttaccttctcagttcatggaaaactggtgttaccatagagaaactttaatgggcattgcaaagcattttgaaactggggagagtcttcctgaagaagtatatttgaagcttgttgctgctaggacatttcgagctggctctctaagtcttcgacagttaaaattcgcaagtgtagatctggaacttcatacaaaatatgttccagggggacctgagtcaatctatgatgttgaccgcagagtttctgagaaaacccaagtgattcctccattaccagaggataggttcctttgcagctttagccatatatttgcaggtggatatgcagctggatactatagttacaagtgggctgaggtgctgtctgcagatgctttctctgcatttgaggatgctggattggataatgacaaggctgttaaagaaactgggcgaaagttccgggagaccattcttgctcttggaggtggcaagccaccactagatgtttttgtgcaattccgtgggagagaaccaacaccagatgcattgcttaggcacaatggcctattacaagttgcagcttcgtgatagatcgatagagttggccacttttatagtcaataaatgggactcgtacttacctaagaatatggggcctcatacttttttttcatatgtagttttttgtcatgttttttaacttaatttttccatatttaaaggaatctaaattttgaaattcgttattccgtgattaactttttaacatttattcttttatcatttaaaccaacactttatctacccatttttttttat

SEQ ID NO: 1951 - DNA, 1369 bp, Glycine max
ttttttttttttttttttttttcacactcctaaacaagcacagccttagttgaaacagacaacactcactacaggccaagaatgttaaactacaattcaaatagagatgtctactatccctagaattcaaatttaataaagatatcaacagcagacttgaaagaatttgttaacggaaggaaactgccaaaaagtaaaacctagggagttaagaatggtttgacattccaaccaaagaaatagacttcctttgtcaagaactaaaaatccaattatttgagctatacatatgtacgtgaacatatgtacacactgacatgtatataccagctaccattgcagaattcaatgctattataaatgagatctgacaatctcatcgaggtgcaagtccaggatttgggaaacagaatccagcaatgtagcttcacttgtgccaggaagaacagaatccagggctgcttgtactacttcttctatcacagattccttgttcaaggattccctgcacatcaggcttccaatggcaaaaggggtcaatcctctctctacccctttcttcaaaagcatggttgagatcctaagagtgcgggcacattcaactggcagatcccatccatgaaacttcaaaagggcaatgtcttcttcagcatccagtgactttatgtagtcaatagtttctgaggagtatggctggcgagcttgaggccagtaaagccattcaaaggtgcaatcttcaaaacttgtgggcaagcagtatccatgatcaattggaatcagaacagactggttgttgtcctcctctttgctgatcaaaatattcccagcatgcctatctgcatttgccagtcttatgtccaaaacagtaattttatgtacctcctttactgggaaagcccccgggcccatatcttcacaacttccactattttctgtgaacatttgcaaggagccaatcttaggagtcaattctcggggatagttgaatgctttatgcaagcacttaaccatcaatgttgggggaacaccagcaaagcccttcccatcaccaaataatgagtggcgctggcgcccactcaatggatggtctagaacataggctgcaacttccctgaatgctccttgaccaactcttgtacccttttttaagccttcgccatctaatgacaaaggaagacctcgagggttattcagagccattggctcttcatcaataggcttaaaaacagacacatacttttgccccgctgaatcaatcataaagtaagcccctcctgtaccctctgcagatctgattggatatttgccactgccaagtccatcatatgtagagttcaccatattccaaatagctggagccggacgcgtg

SEQ ID NO: 1952 - DNA, 1175 bp, Glycine max
ggatcccccgggctgcaggaattcttttttttttttttttttcttttttttttttttttttttttttttttttttagtttttaaacacttgaaacatcaagctataattcaaaaggtataaaaggtttttgtcttcaattacagagttaaaggtaaaggtaacttaatgaaagaatttgtgaaatgctagaaaacactagagtcaagacctaggaagtcattactgtgaaataatgtaaaaacaaccatttgagctataaatatgtactgggaacacgattatacagacatttatataccatcttctatgacataaattaagaaatggaacccgtgatctcatcaaggtgctggtccatgatttcggaaacagtatccagaaatgtggcttcacttgtgcaaggaagaacagaatccagagctgcctttacaattccctcaatcacagactccttgttcaaggattccctgcacataaggcttccaatggcaaagggggtcatccctctcttcactcctttcttcagaagcatggttgagatttgaagagtgcgcgcgcattcaactggcagattccatccatgaaacttcaaaagggcaatatcttcatcagcatccagtgactttatatagtcaatgatctctggagagtatggctggcgagcttgaggccaataaagccattcgaaggtacaatcctcaaaacttttgggcaagcagtatccatgatcaattggaatcaaaacagcctggccattttcctccactttgccgatcaaaatattcccagcatgtctatctgcgtttgcgagtcgcatgtccactactgaaattttatgcacttccttcactgggaaagccccagggcccatatcctcgcagcttccattattctctatgaacatttgcaaggagccaatcttagtagtcaactccccgggatggttaaatcctttatgcaagcacttaaccataactgtcgggggaaccccggcaaaacccttctcatcaccaaataatgatcggcgaccactcattgggtgatccaaaatataagctgcaacttccctgaatgctccctgaccaactgttgttcccttctttaagccttcaccgtcttctgagaaaggtaaacccctagggttattcacagccattgctcttcatgggggggg

SEQ ID NO: 1953 - DNA, 1231 bp, Glycine max
ttgatcacaaaaaagaatctcttaatggagagcttgaattgcaatattgaatacaaatacattttcatttcatttttcacaaaaaaagaaggggcaaaaaatcaggaatgatacattttctgtggaacaaatctgcacaataaaggggagggggaaagagaagggttaaaaaaccacccaagaaacaaaaaagactgtaacactgtttttgattaagagaccatgtaggagcgctatctgagtgttacatgtttcttgcatcctctctcgtcatgtaggtattatcaagaagaaagagttctactttcaaactaactccatgaggagtggatccccttctgccattattctgataagctttataaagtcttgctcacttgatacactcaatggatgaacagcagggactttggcagaataaagagtggtggaatttgcagggggattttgcttgtagatcattctatcaagaacggggtcaaaattctgaggagaatctagggagacaaagaacataggaattgcaaccttctgatggatttctaggtcccccacaaggttaacaagctcaacaaaatcgctgataaggcgctgaggaacatagaacaactcagaactgcatattaggaggttcttgtcattgtcacttgtttctttgtaactgacttgaaagtgggctggcatcgtgctaacaaccttctgtaccattcttgcttgttgtgataaccaatctgagtcctcaccatttgttaatatagaagaccatgactccgataccttattagtgatccaaagtttagttttatctgcttgtagtaagttccagtaattaagaatggtattatcctgaacgaacaaaaatccttctgcactgctaaattgatcaaaaattttgggcaggtacctgtatgcatagtccaaatggccctcccctacaacaagatcaacatccttcttttcggacaaaataactacagatctgaatatcctcccatagagcaacctccattcaagggcagttcgttccaccggcccattgcaatgcatgataagcactacatttccaaaagttttcctccaccggattaaattagaaatctcataattcactgttcccgtttcttcaataccaagacgcttccatgccaacttttgtggcacaacctctttctgatccccatgaccaatatttgccttcggacgtcccaactccaacgacatcaacttcggc

SEQ ID NO: 1954 - DNA, 1040 bp, Glycine max
gtccaatcaaaattaatcataagagtataaattgaaggatgcagttatagtctttcaaataatatagctgatcagaaattctaaagactaggattgtccaatcaaaattaatcataagagtataaattgaaggataggaacattaacatatggtaccaaaaattcccagacccaacaaatatacgagacaaggaataaatatcagacattatgggtacccagtacttggtgattgccactggacaccaaccaaaacttcgactctgcaattgcgacacctcaaaaacatggacaagaaagaaagaaagaaccgtttcattataaaatggcttattgttgttgctaaggctgcctctgttgtttgttgatcagatctattaggtagtaagatgaagatttcatagagggaaaaatagccgcaaaattctgtattattttcattcagtctcttaagaacttcaaagccaaaatctgtacttatcaaagaggcctaaacaaggggtgtctccatctctcaggcttcatcctccagttactttcactgtttcttggcttcaacaatcggtctatttcaattcctgattgaaggcaagattgcagcctcttcaaatgtccacagcattgcttgtgatcgaagcaatcactgtcgctaatattattgccttctgaatgtgtgtatctttcatatggtgactgccacttggcttgcagatatgctaaagatctccatggaggaagtggcatagaattctgtttcaaagaagatctagtagcttcttccattattccaagaaattgtttcagccttgtaaaggaacccacgtaaaaaaaaggaagtgaatgcagtatcctatcataagaatcaacagctctagctatttcaaagtggcttcggaaatcaatatcaacaatcaaccgctccgagcttccagaattattgtcgatgataatatcaatatattcatgatcacctccagggaccttgccactaccctgccatttagatgcacaaacaccagcatcggggccagaaagtctcc

SEQ ID NO: 1955 - DNA, 1622 bp, Glycine max
caaaaattcgactctgcaattgcgattttttttttttttttttcagaaaaaaggaaagaaccgtttcattataaaatggcttatttgttgttgctatggctgcctatatgaacctgtcgtttgttgatcagacttattaggtagcaagatgaggatttcatagagggaaaaatagccgcataattctgtattattttcgttcagtctcttgttaacttcaaagccaaaatctgtacatgtcaaagaggccttaacaaggggtgtctccatctctcaggcttcatcctccagttactttcaatgtttcttggcttcaacattcgctctatttcgattcctgattgaagacaagattgcagcctcttcaaatgtccacaacattgcttgtgatcgaagcaatcactgctgctaacaatattgccttctgaatgtgtgtatctttcatacggtgactgccacttagcttgcagatatgctagagatctccatggaggaagcggcatagaattctgtttcaaagaagatctagtagcttcttccattattccaagaaattgtttcagccttgtaaaggaacccacatagacaaccggaagtgaattcagtatcctatcatatgaatcgacagctctagctatttcaaagtggcttcggaaatcaatatcaacaatcaattgctccgagcttccagaattattgtcaaccacaacatcaatatattcatgatcacctccagggaccttgccactaccctgccatttagatgcacaaacaccagcatcataaccagaaagtctcatcaacttcacaagataaaacctgatacagctagcataacatggaccagaattcataacttgaaggttggtctcattcattgaccgtatgagggaatggacaactgaaagcaagtcactctcatgttgagccactgacagcttacagatctgaatcctctcggcgagttgagcgaaatcagaatgtccagtatcgctatcactgctacaccaagactctgcgccactacttccattttctaaaaaatcgctaaccatgagcgccaaatcatgctcgctctcgtggctgaaaccgccaccaatctctcgtccgccgccaactctgacccacaaatcgccaccggtggccacgcaaatcctacaatccatcccttctccttctccttctcctccaacgacgtcgtttcgatcaccccaagtccccagcttctctcaaaccaaacgacaccgttttctgacaatcaccaaagtacaacaacacagtcgaaattcctcgtacacccacgattcctctgcctcgaattcgacaacccaattgaacgcgcggtccaattcagcaaaacggatcaaaatttcaaattttttttttgtttttgtttgccaacaaattttaataaaaaaaactggggggggggggcctacgtagctgctcgattttatgtttccgtgtactgacgtgaatttagtcgcgagaattttttgaagaattgaaaaggggaaaaaaatatgaaataataatgaaaaaggaaaagaaaaagaaaaatttggcctttcgatctagagggatgaagaaggttgattggcaaatggaaaatgattcctttg

SEQ ID NO: 1956 - DNA, 1640 bp, Glycine max
ctggcgaaacaatagtcgtgtgatttcggtgtcgcagtgataaggggtcagaaattcaaaagactattgtagttgacacaaaattaatcataagaatataaatcataagaatatatattgaaagataggaacattaacatatagtaccaaaaattcccagacccaacaaatataagaggcaaggaataaatatcagacataatgggtaggtatccagtacttggtgattgtcactggacaccaaccaaaaattcgactctgcaattgcgacacctcaaaaacatggacaagaaaaaaggaaagaaccgtttcattataaaatggcttatttgttgttgctatggctgcctatatgaacctgtcgtttgttgatcagacttattaggtagcaagatgaggatttcatagagggaaaaatagccgcataattctgtattatttttgttcagtctcttgttaacttcaaagccaaaatctgtacatgtcaaagaggccttaacaaggggtgtctccatctctcaggcttcatcctccagttactttcaatgtttcttggcttcaacattcgctctatttcgattcctgattgaagacaagattgcagccccttcaaatgtccacaacattgcttgtgatcgaagcaatcactgctgctaacaatattgccttctgaatgtgtgtatctttcatacggtgactgccacttagcttgcagatatgctagagatctccatggaggaagcggcatagaattctgtttcaaagaagatctagtagcttcttccattattccaagaaattgtttcagccttgtaaaggaacccacatagacaaccggaagtgaattcagtatcctatcatatgaatcgacagctctagctatttcaaagtggcttcggaaatcaatatcaacaatcaattgctccgagcttccagaattattgtcaaccacaacatcaatatattcatgatcacctccagggaccttgccactaccctgccatttagatgcacaaacaccagcatcataaccagaaagtctcatcaacttcacaagataaaacctgatacagctagcataacatggaccagaattcataacttgaaggttggtctcattcattgaccgtatgagggaatggacaactgaaagcaagtcactctcatgttgagccactgacagcttacagatctgtgtcatgatagtcagggaagttgttaaaatatctgttgatgtagaagatagactagaatgttttagagaataagaatgctttattcaagatgatacgtaggttctacatatcatccacatgtataaagtatagagtatagactcttgatcgactttgcggagactattccctaggataataataagagatgcaacttccttaatctaatacccgtgaacactaaatacattgaaacatgagataactgaacatactatttcctaagtacattaaatgtcattattctcaacaatatcttttatccaaagtaaataattggtaggaaagcattcactgatacagtaaaatcataaaacggcaattctattactttggagtcaattttctgttttttcttcattttgtttccctgtaaaatccgggggggggggcctacgtagctga

SEQ ID NO: 1957 - DNA, 2640 bp, Glycine max
cggctcgattcttcgctcaatcgaggtcttctcgatttccttctctataacacaacgctctcttctcttgcaaccaaagtacttgttccagtgtctactctactcaaaaaggatttgggacatcatgtgcagtgattcgaaaagtaaactttcttccccaaccctcgtcgtcatggagaatagtaacattcagaagcagaatctggatggtctctacaactcggttttgcttgaattgtctgcatctgatgattatgaagctttcaaaagagaggtggaggaaaaaggcttagatgtgaacgaggcaggcttttggtacggtagaagaattgggtcaaagaagatgggatctgaaacgaggacccctctgatgattgcttctttgtttggaagcgctaaggtgctcaattatattcttcttcagaaaggaggaggtgttgatgtgaacagggtctgtggttctgatagggccactgctctccattgtgctgttgctggtggctccgaatcctcacttgagattgtcaagctcttgcttgatgctggggctgatgctgagtgccttgatgcgagtggcaacaagccggttaatctgattgctcctgcctttgattctttgtccaaatcgcgaaggaaggctttggagatgttcctcaggggtggtggggaaagagatgaactcatgagccaggagatggagctacagatgttttctgttccagagaaaaaagaaggaagtgataataagaaagaataccctgttgatatatcgctgcctgacatcaacaacggtgtatatggaacagatgagtttaggatgtacaacttcaaggtgaagccttgctcaagggcttactcccatgactggactgagtgtccattcgttcatccaggggagaatgcgaggaggagagacccacggaaatacccttacagctgtgttccttgccctgagttccgcaaagggacctgccagaagggtgattcctgcgagtatgctcatggtgtttttgagtcctggctacatcccgcccaataccggacaaggctttgcaaggatgagacgggctgtgctagaaaagtatgcttctttgctcacaaacctgaagagctacgccctgtgtatgcttccactgggtcggctatgccatcaccaaaatcctattcagctagtggacttgacatgacagcgatgagtccattggctcttagttccacatctttgccgatgccaactgtttcaaccccacccatgtctcccttggcagcagcttcatctcccaagagtggaagcatgtggcagaacaaaataaaccttactccaccatcgttgcagctccctggtagccgactgaaggctgctttgagtgccagggatctggagatggagatggaactgctcggtctagaaagccctgctcgccaacaacagcagcagcagcaacaattgatcgaagagattgccaggatctcttccccatctttccggagcaaggaattcaataggattgttgatttgaatcctactaaccttgatgacctgttagcatctgctgacccttctgtattttctcaactacatggactttctgtgcaaccttcaacacccacacaaagtgggcttcagatgcgccaaaacatgaaccacctccgtgcgagttatccatccaacatcccttcctctcctgtgaggaagccctcagcttttgggtttgactcatcagctgctgtggcaactgcagtgatgaattctaggtctgctgccttcgcaaagcgaagccaaagtttcattgatcgtggagctgcaacccaccatcttgggctgtcttcagcttccaactcttcttgcagggtatcctctaccctttcagattggagttcccctaccgggaaactggattggggtgtaaacggagacaagctgaacaagctgaggaaatctacttcctttggattcagaaacagtggggtaactgcatcccccatagcacagcctgaatttggtgctgagccggatgtctcatgggttcattcattggttaaagatgttccctccgagaggtctgagatatttggtgctgagaagcaacaatatgatctcagtaaagagatgcttccaccatggatggagcagctgtatatagagcaggagcagatggtagcatgagctagggctgccatggcaatgcttcttggttattctgacaaagtttatttatttatttaattattttattcatttgaaatgcttctactatccaatattacacaatattattagggataggatgacatatgttgcaaagaacaaagttcaggttaatccagagattcaaacgggagttccaacttctagatcagggaagacttggagaaacgttgaacaaaggatgctgaattttttttattgtataatataaatttataacccccttttctctaccgatggatgtattttctctggcaagtggaccccaaagtggttgtcattgattaagcagcacaattcttttttatataaaattgttatgccatttgatcaatgcttatccatcattattagaagtactttcaaggaaatttctcgtgtgactgcttattggctattctttcttatttaaatacttgatttcttgtgac

SEQ ID NO: 1958 - DNA, 2655 bp, Glycine max
ggctcgcgcaatcgaggtcttctcgatttccttctctacaacacaacacaacacaacgctctcttctcttctcttgcaaccaaattacaacttgttccactctctactactctataaggatttgatttgggacatgtgcagtgattcaaaaagtaaactactttcttccccaaccctcgtcatggaggatggtctctacaacaactcggttttgcttgaattgtctgcatctgatgattttgaagctttcaaaagagaggtggatgaaaagggcttagatgtgaacgaggcaggcttatggtatggtagaagaattgggtcaaagaagatgggatctgaaaccaggacccctctcatgattgcttctttgtttggaagcgctaaggtgctcaattgtattcttcttgagaagaaaggaggaggtgttgatgtgaacagggtctgtggttctgatagggccacagctctacattgtgcggttgccgggggctctgaatcctcacttgagattgtcaagctcttgcttgatgctggggctgatgccgagtgccttgatgccagtggcaacaagccggtcaatctgattgctcctgcctttgattctttgtcaaaatcgcgaaggaaggccatggagatgttcctcaggggtggtggggaaagagacgatgaactcatgagccaggagattcaagagagaaaagaagcaattagtgataataagaaagaataccctgttgatatatcactgccagacataaacaacggtgtatatggaacagatgattttaggatgtacaacttcaaggtgaagccttgctcaagggcttactcccatgactggaccgagtgtccattcgttcacccaggggagaacgctaggaggagagacccacggaaatacccttacagctgtgttccttgcccagagttccgcaaagggacctgccagaagggtgattcctgtgagtatgctcatggtgtttttgagtcctggctgcatcctgcccaataccggacaaggctttgcaaggatgagactggctgcgctagaaaagtctgcttctttgcccacaaacctgaagagctacgccctgtctatgcttccactggctcggctatgccatcaccaaaatcatattcagctagtggacttgacatgactgccatgagtccattggctctaagttccacatctttgcctatgcccaccgtttcaaccccacccatgtctcccttgacagcttcatctcccaagagtggaagcttgtggcagaacaaaattaaccttactcctccatcgttgcagcttcctggtagccgactgaaggctgctctgagtgccagggatctggagatggagatggaactgctcggtctagaaagccctgcccgccaccaccaccaccaacaacaacaacaacaacaactgattgaagagattgctaggatctcttccccttctttccggagcaaggaattcaataggattggtgatttgaatcctactaaccttgatgacctgttattagcatctgccgacccttctgtattatctcaactacaaagtgggcttcagatgcggcaaagcatgaacaaccacctccgtgcgagttatccatccaacgtcccttcctctcctgtgaggaagccctcatcttttgggtttgactcatcagctgctgtggcaactgcaatgatgaattccaggtccgccgcgtttgcaaagcgaagccaaagtttcatcgatcgtggagctgctgcaacccaccaccatcttggggggatgtcttccccttccaacccttcctgcagggtgtcctctaccctttcaggttggagttcccctaccgggaaactggattggggcgtaaatggagatgagctgaacaagctgaggaaatctgcttcctttggtttcagaaacagtggggtaactgcatcatcatcatcatcccccatagcacagccagaatttggcaccgagcaggatgtctcgtgggttcattcattggttaaagatgttccctccgagaggtctgagaagcaacaatatgatcatctcagcaaagagatgcttctttcaccatgggtagaagcaacaatatgatcttcttcagtaaagagatgctgctttcaccatgggtggagcagctgtatatagagcagaagcaaatggtagcatgagcagcaagggctgctgccatgacaatgcttcttggttattctgacatagtttgtttatttatttatttaattattttattcattttgaactgcttctactatccacaacattacacaatattatagttagggataggatgagatatgatattgcaaagaacaaagttcaggttaatccagagatttgaacggagagttccaacttctaggtcagggaagacttggagaaacgttgaacgaagaaggatgctgaattttattttattttattgtataatagtataatttattccccccttttctctacgggtggatggatgtattttctctagcaagtggacctcaaagtatttgccattgattaagcagcacaattcttttttatataaaaattattatgccattttatcaatgcttatccttttttacaagttctttcaagggaatttttctgtgggcgccgctcgcgat

SEQ ID NO: 1959 - DNA, 1018 bp, Glycine max
  misc_feature (6)..(6): n is a, c, g, or t
agcggnctccctttgtttttgttcatgcttcaaaaaaggggaaaagtcattaatttattagcgaatattttctcaattccacaaatatatagttgtataataatactattctataatacaacattgatttgggcaaccgaaaggctaattaattaactacttaggcatgaatttcttcttaaaccacctcttgagcattatttgcagcctttgatgaacgaagtgtatattgacttgccatcactgcatcatccaatattagataaaacgactccttcccaattttctcaacaaacttggatattataagcttctccatcacctccagccttgggtttacgaacaaaaccttaactccattctttcccaatattttaattaactcgtccaatcctttaatagcagttgtgtcaatggctgtcactcctgacaaatcaagtatgatgtgctcaactacatctccagtagagctttcctcacttcgaatatacctcataatcctttctttgacgtatatagaatttgcaaagtaaacgggagaaccaagttgtacaacaagaactcctgggtatgttgatacattatattgctccgtgtctctatataaaccaatttcaggtaactttccaagcttgcatggcgcaggtctagccacatataaaagtgctctaagaacgccgagaccaacagacagcatgagaccaacgtccatgcttataaagatgactccaaggaaggcagccatgcaaataacaaagtcaaacttgtcaactttgtagagatggatgacttcttcgtaatgaatgagcccaagcatggcagaaataataatagctgagagagcaacaagaggggtgaagccaaatagtggcgccaaaaattgtagtgtgagtgccattactattgcctgtaccacgtttgccatagcagtcttacaccctgcattgtaattcactgcggtcttggaaaatggtccactagtcaagtaacatgaagtaaatgaaccgaacaagttcat

SEQ ID NO: 1960 - DNA, 2676 bp, Glycine max
ttttttttttttttttttaaccaaaaagataaaagaattttacgattagaagtggactttggtatggaaaactacatactccttaaaaggataaatgcagttagatactatacaaataaaagtacagaaatgatgtaccttgtccactgacagttaaattacaaggtgctttctgttacataaatatgatgcctagagaaagcagaatgtcattcttactaggagggatgcgtttaaacgacatacaaattagcctctgcaacttacagattgtgacattttacaaaaatatatacattaagacccagaataatcaataggatgattattatacaagtgccacttcaaaaactaaaactgaacagctaaaccctatctccaaaaaattataaatgaaaagccatatatggctagaatcggggagaaatgttgaaaatattatcccaaccctgcagataccagccaaactaccaccgaatggatctttacaactatatctgtcattcctacatgaggtttcagaaatctgactgcataagcttcattcgaggttttatgctgacatttgcaaagggttttgtctgttctacatggacataatccctggtcttgagaaccagagtttcaaaaaacatccgagatgcttccttccgtgttttaccaactaataaattgtcaagatgcagctccttccttccatgtagatcttccttatcaaacacagtctgcagatacttggcaacagccctggtcctggaagaccatccactattttcaaggttagttccttcagcacatgattgataatcatcatcatcaattatctcatcatcaccaacattcaaaaaccctgtgtcattagcaatcatgtcattttcatcattctgatctactaaaggactcctaatttcagggcacattgtactttgtagttcagcttcctgacagacagggatttcttcatctttcaacaaactctctttttcatctaatccaagtgcttcagattgtaagcaatctactttagcattttcaataaatatgcagtcaggccttgcatccttgtcatcacaatccatgccagaagcaacaatttgatcctcatttaactgccctagcaagctgtttccattttcctccaatggtaggtcaccattaaaggaagcctgaatattagtaaattcataaggggcgggggcccccgtagccgaggatgcatataaatcattggcttccacgccatctgtttgaacttgtgttccagtttccatgctacattcaatagcacctactccatttctatcactttgatcctccacaaagtcatcctctagaatagggattgtattcaaattctcagcatttggaatgctcaatatatttgtgtggatagaatcaacaagatcattggttttatccacgcgagacagtgatgcggcaaaatcatttttgaagacttcagttaaggatgaagattcatgcccagggccaacagagcaattccctgcttcagaaacttcaatatttgctctgacattgttcaattcaacattttgagaactgtcaagctcctccacatgagaaataatatccatgtgcccatgagcatcaatatcacgagatcccaagttaacctcagactgatgactctcagacaaaacaggtacctcagtaggttgcacttctgcatcttcttggggttggactgccataggttcattattaccctccaccacttctgtaggttgtacttctgcattttcttggagttggactgccataggttcattattaccctccactccatcaatttcaatttcagtatctgttctagaatagcactcttgatcatttgttttttctacggaagaactatctaaaccataatcaaaaaccttgattccagtcagatcaaatgtctcatttcgcagaatagtcaaatcagtagacaaatccgtaaatattggttcatggaaaatttcatcctccaaaaattgtctttgaatcattaaaatctcatgacgagtgcaaggagcttttttccgtatgcgacgaatgtcttccgtatttgtcaattgttggcgtattgtatcgccatgcaagaccatcatatcatccatatgcaccttcctctttaaggcactagtacgtggtgcagaagcagaacgaacacgcttcattgatgctatttcaggggctgcaggactgggcttcattttcaagactgaagactttctaccaactaatatggatgacagtagatcatcatcatcgggaacagactcagcagttctcttggattgagctcccccgtaagattcaatcaaatccatactctgccccgtgccagtactttctgtgtagctacgttttttaccggagatgcatttttctcctgcagcacctgtatggccttcagttgcaccctgattgtcaggagtagatgccatcagcaaatcatttgcttcaccatcatgttggtaagctgagagcaacttttcaggctctggcatgtcagtagcagcagatctgttaatactttctactttattactaaatatctgactctcaagttgcatatcagttttccctgaattaggtgtttctttagatacagaaggctccatagtctcttggtaacttaaagcaggatttgaagcatcacggacgcgaggg

SEQ ID NO: 1961 - DNA, 1198 bp, Glycine max
tatgccactatggttccttcggaacaacatttcacagcttgatgcttcatttgttgttgttgctgctgctgctgcaacaacctttgctgttgctgctgctgctgaaagaagtgatagtgatttgatgaaccctgctgtgtgaggtgaagaggacttttcccattggagctcaattccaaagagggttgtccaagagagagagaattcttaatggttgaaccatgttcctgaactgaattgtcagggtagctggtttggggaaagtatagattttttttggagtgatggttgttgttgctgttgttggttaaggttttgcaattggggttgtctaagaagatgctttggtgggaagaggggatttgagggtttttaagtttcctcactcttgcatgacccaaaccattgtgaagcatggaaacaaccttcttgaacctcaccacagtttcaccggtttccaccattaaattcctatgctgaacctgatcccttggttgagacaacaaactcagaaccctatggcagctttcaacagctactctattagcttgctcaacctcctccatgttagcctctaaaaaatttataaaaaaagggaagaaaaaagaaaccagaccaagaaccaaaccaaggaacaccagaatactaacaaaccaccccacttatccacaaacatatgagacattcagccttatgtggcagaccccgcgacccagatgaaaaaaatcccattttttcaccagacaaggagccataaaaacaggatttcaggttaaagtctcaaaattttaaatcatgaagaaaaaaaggcatgttttttggaaacaaggaacaaccttggaatcagaacaaactgagggtgcctcacaagttgcagcaaaacctccttcagaaaaaaaaaacgaccgaatttcccagtgaaaaagaagaagaaaaaaagcatcaaagcacagaccttgatggactcggggtggtgctgttaaaccctagattcttcttcccacggttttgagactgaaaggtgtgaaagagaggactttgcttcccttgagaactcacacaacacaaccatcatacacaagaatacaaagcttccaactttagactatatacatattatataattaattaaagtcctaagcaggaagagaagaaccaaaatactattattatattttgtttgtagctcttgcgagag

SEQ ID NO: 1962 - DNA, 1580 bp, Glycine max
tcgcgatctagaacgttctagatcgcgagtgtcggcccctttttttttggtttttcttttttttttaccatttttcaaaggcattttcattcatttagaaaaccttgagatgtttataacaggcttaagaaagatgaaatagttcttacgaattgaaactagctaattttacagactttgttcatttaatcagtgatcctcatcctcaccctctaaataaaacggctggttagccaaactatccaaaagacaaaatctgcgccaacaatatccatcatccctgcttgtttgcatcacttaaaatatgtacagcagcatctcaagccaatcacagagaggttttgacaaattgaatgatgggcttgatctggttaagctctccacatagttcatgcatttgcagattgtgttggtaacttggggtggttatgttcgccttcataggtaacaattagcatggtaggctcttccaagcacctctcaacatgcttccttgcaggacaccctctcatgctgctgcacttataatatcccctagggtgaggagagcccttgattggcttctgcccatacttcctccacgaataatcatcaggagggatatctgcaagtttgttgctgatagcgggcaccttaattgccctcttcactctatgtttcctcttcttagagcaatggcatctagcactgctcccacatttcaagcttccctcatcacctctggcagaacactttctcttgtgctgctgggaattctgatcagaagagtgtggagctccgattaaatggaaggcacttccatccaagttagccacacttccatctatgctcaaggaagagataaaagacctagtggatgacattgttggtgtgcagctagtactgtcaaaattcaggtttatgccactgttgttccttcggaacatcatttctgcttgatgcttcatttgttgttgttgttgttgctgctgctgcagcaacagcctttgctgttgctgttgttgctgctgctgaaagaagtgatagtgatttgatgaagcctgctgtgtgaggtgaagaggacttttcccattggagctcaattccaaagagggttgtccaagagagagtgaattcttaatggttgaaccaagttcctgaattgaattgtcagggaagctggtttggggaaactgcagatttttgaagtgatggttgttgatggttttgcaattggggttgtctaagaagatgctttggtgggaaaaggggatttgagggtttttaaccttcctcactcttgcatgacccataccactgtgaagcaaggaaacaactttcttgaacctcaccacagcttccccagtttccaccattaaattcctatgctgaacctgatcccttggttgagacaacaaactcagaaccctatgacagctttcaacagctactctattagcttgctcaacctcttccatattagcctctaaaaaaacttgggggggtgctgctaaaccctagattcttcttcccacggttgagactgaaaggtgtaaagataggactttgcttcccttgagaactcacacacggacgcgtgg

SEQ ID NO: 1963 - DNA, 831 bp, Glycine max
  misc_feature (57)..(57): n is a, c, g, or t
actggacttgtccgcccgaagtccatgggccctcccaagcccgccagggccgccggngccgccttggctctgcggaaaaggaagaacaggccccccgaatggagtaaggggaagagcaagttgcctatgatgttgaacaagctgttgggggattcgccctcggcgacggaaatgtcgacgccgttcatggcgaggatgtcgatgaggtccgggtcattggggacaataacggaggcgcgacggccgtcaatggcggttagctggagggcggaaccgtctttgctgaacctgactcgctcgactttacccttcttgacggcgttcaagaactcgctgtagcgccagttggtgccttcggggaggtcggaggaggcttgtggctttggagctgtgaggaggaggttctgtgagaaaggggaggatgagttggaggggtttaattggctctgttgggcttcaattacagggggaggggtgacgttatcagcggcaagggcttgtggggtcacagagaggctcgcggaggaaaagataagggcagctagagcagcttgtgaattgtgagcatttaagatgcttctcttgaaaaggaattgtagcggagtagatgatttggttgttttgggggttgggggtgagacaagaaccttccttccgatcaaggcgctggtgcccaaggccattggaactggaatcaatcactttgctctagattttcgattttgaaacacaccctcaccgtttcatacaaagcgtctatatatgccctacttgctggattctatgccatagatttttcctggtcttctctcgcgtgtacgtgctcgagcc

SEQ ID NO: 1964 - DNA, 1076 bp, Glycine max
ccacgcgtccgaaaatccttcaggtgcattctagaggaaaagcgcttgcaaaggatgttgattttgaaaaaattgctaggagaacccctggattcactggggctgatctgcgctatttgatgaatgaggcggctattcttgcagccaggcgtgacctcaaggaaataagtaaagatgagatatctgatgcgcttgaaaggatcatagctggacctgagaagaaaaatgctgttgtctcagatgagaagaagaaattagtagcctatcatgaggctggccatgctctagtgggtgctttaatgccagaatatgaccctgtagccaagatatcaattattcctcgtggccaagctggtggtctcacattttttgctcccagcgaagagaggctcgagtctggattgtacagtagaagttaccttgaaaatcagatggctgttgccctgggtggaagggttgccgaagaggttatttttggccaggaaaatgtcaccaccggagcatcaaacgacttcatgcaagtttcacgagtggcaaggcagatggttgagagatttggattcagcaaaaaaattggacaagttgccattggtggacctggtggaaatccattcttgggtcaacagatgtcatcgcaaaaggattactccatggcaactgcggatgtagtggatgcggaagtgagggaactggtagagagagcatattctagggcaacacatattatctcaactcacattgatatccttcacaagcttgctcaacttctcatagaaaaagaaactgtggatggtgaagagttcatgagtctattcattgatggaaaagccgaattatatgttgcataatcatacacgcaagtcacagaattatgtttgtactataaaatacgctctgacttgtacactgtaagaatcaataattattttatcaaattcaaggagaaaaaacaattagcacagcagcttacgcaataaataaataaaaaatatggttctacggctgagttacactttcgcatgttcaactgtatacaaaggatttactgctaaaataacagaatgttatgaacctat

SEQ ID NO: 1965 - DNA, 2013 bp, Glycine max
agcaagcttgtgaaggatatcaatgtgagttgagataatatgtgttgccctagaatatgctctctctaccagttccctcacttccgcatccactacatccgcagttgccatggagtaatccttttgcgatgacatctgttgacccaagaatggatttccaccaggtccaccaatggcaacttgtccaatttttttgctgaatccaaatctctcaaccatctgccttgccactcgtgaaacttgcatgaagtcgtttgatgctccggtggtgacattttcctggccaaaaataacctcttcggcaacccttccacccagggcaacagccatctgattttcaaggtaacttctactgtacaatccagactcgagcctctcttcgctgggagcaaaaaatgtgagaccaccagcttggccacgaggaataattgatatcttggctacagggtcatattctggcattaaagcacccactagagcatggccagcctcatgataggctactaatttcttcttctcatctgagactacagcatttttcttctcaggtccagctatgatcctttcaagcgcatcagatatctcatctttacttatttccttgaggtcacgcctggctgcaagaatagccgcttcattcatcagattctgcagatcagccccagtgaatccaggggttctccttgcaattttttcaaagtcaacatcctttgcaagtgcttttcctctagaatgcacctgaagaattttaactctgccggcaacatcaggtctatccacagtaacttgcctgtcgaaccggccaggcctcaacaacgccgaatcaagaacatccggtctgttagtggcagccaaaacaataacaccagaattgccagaaaagccatccatctccgtcagaagctggttaatagtctgttccctctcgtcattcccacctccgagccccgcccctctctgcctcccaacggcgtcaatctcatcaatgaaaacaatgcacggcgccttccccttcgccttctcaaacaaatctctcaccctcgacgcaccaactcccacaaaaagttcaacgaactccgaagccgcgcacgagaaaaacggcaccccagcttcccccgccacagccctcgccagaagggtctttccggttcccggtgggcccaccaaaagacaccctttcggaatcttcgcgcccagcgcggtgtacttatcgggattcttcaagaaatcaacaacctcttgtaattcaagcttcgcttggtccgcgcctgccacgtcagcgaagctcacgccggtctcggggacttcctggaacttggacttgttccgcccgaagtccatgggccctcccagcccgccaggcccgccgggcccgccttgggctctgcggaagaggaagaacaggcccgcgaatgcgagtaaggggaagagcaagttgcctatgatgttgaacaagctgttgggggattcgccctcggcgacggaaatgtcgacgccgttcatggcgaggatgtcgatgaggtccgggtcattggggacaataacggaggcgcgacggccgtcaatggcggttagctggagggcggaaccgtctttgctgaacctgactcgctcgactttacccttcttgacggcgttcaagaactcgctgtagcgccagttggtgccttcggggaggtcggaggaggcttgtggctttggagctgtgaggaggaggttctgtgagaaaggggaggatgagttggaggggtttaattggctctgttgggcttcaattacagggggaggggtgacgttatcagcggcaagggcttgtggggtcacagagaggctcgcggaggaaaagataagggcagctagagcagcttgtgaattgtgagcatttaagatgcttctcttgaaaaggaattgtagcggagtattatgattgggttcgtttggggggtggtgggtgagacaaggacgttccatccgtatgctaggcgtgtgtgcccgaagcccccattttttttt

SEQ ID NO: 1966 - DNA, 1547 bp, Glycine max
  misc_feature (8)..(8): n is a, c, g, or t
caatcccntgcatgatcgttagctaatctttttttttttttttttttgtcaacaaagctctaatattaattatatctaaatgcagatattctctaaagatgaaactgtggttacacttccatatttttttgccactgaattgaaaatttttcttaaatcctcctttactttgctatctgcgaatatatgctcaacagcattccttgatagctcaaacatttccctccttcccagcccaaatgaatcagcagcaattttgtattccttggagagacaggtagagaagactcccgagtcatcagtacacagggctaaaggatgttttgcgttgtacaaatgagcaaagtggtgaacatctatagatggaacagtcattgtcctaacgtttgatgtcaagcaaatttcaaccggaatgttcgacgacttcagctgtctccagtgttcatcctcaaagaaacaagcatgtccaatcctttggggacggaagtcaagcatattttttatctcctttgaattaggtaactcgccacaatgaagtgttacataaagaccttgttctcgagcaaatttcaatgctggcaagtatgtggtccaatcaccaatacttggatttccagagaggtcaattccaactaccccataaggcctcatttccagtgcaagcttgacagtgtccattgcagcttctgttgtctcccttctgtcaatgctcaagagaagcctaacaaagattctttttctcgcatgtccatcaatagccggtgcaggagtaaaaagagtctttgaatcttcacaatgtggaatgaaatccacatcaactgaagtaattgatcttagacctttcagtacagcttcaacataagagcgtttgctcattcccacagaatcatttctctttggagtagtcctcaactccagatagacaacattctctgatgcaaaatcctcaataacttctctggtaattcttgcaacagtgttgtgatcagtggtgagaatgtggattaggtcgaacagcttgaaaacttcttccactgaacggttatatttgaggatgatatgctccacttcggaaaaattaatggcaccctttccaatcaaagccttagtgagttcaagaagtgtggagtctcggatggatccattaaggtgagcatgcagttcaatctttggcattgacacacaccactccatctcttgtttttctctttgctttggtaaatggtagaaaatgctatgttaaggagtgaatgaatgaatgtaactgaaagacaaaaacggtgggtttggttgcttatgtatatggctcacgccaaccgatagcgccactgccttttgattctcaatgtcccgtctctatttttattttttttttaatttctctctaataaaacataaataagccacggatatactccctccaagtaaatttaactaccaagaatatagattaaggaatccgttcataccattttattcaaaagaaattcctaaaatatgttttatagtagagcttgtagaataaaaataaataatttatggaaaat

SEQ ID NO: 1967 - DNA, 1205 bp, Glycine max
accaatcatcatacaattacaaatgctttaattttgtagaaccttcactcttctgatggatcaatttcctattcgtcttttttttgtcacatctctcctctgttgcccatttctgctcattgctcaatctccaagtccaattatctcccgtatcagtgtggtaggagctgtttattgtgattcctgctccaccagcactttctctaaacagagctacttcttgcaaggtgttgaagttcacatacagtgcagatttagagcaacctcaccaaaaactagcgagcagataagcttctcagtgaatagaaccacagaccaatatggagtgtacaagttggaaataccatcagtggacggagttaactgcatggatggttcggcaattgtgtcactctgccaagcaactttgataagtagctccacttccacttgcagtgtcccctttctcaagagcacaacacgtgagatatcagtcaaatctaaacaagataacctgtgtgtatacaccttgagtggtctcagttacaagccacctcaaaagaacactaccttgtgtggacatgatcagcaattgcaattgccaaattctctcaactcctcaaaatgctacttcccttggcctcagctacctttgccatcaatgccaccaataccatctctgcctttccctttcccacaatttcctccaaccacttcaacaacctttcccccccctccattcaatttgcaagaccctacaacatgggtacctcgtatcccttccctttctcatcctccacctgcttttaatttaggggacccctccacttggatccctcatattcctccctcacctcctaatataccacaaccacaacaccaaagtccctagaatttgctactcttgtatggaagcatgtgattgagcggtggagaacatagtacagaaagtagaaactactccgaatagcgcaattccgtaaactcaactttattggttggttgctcacgtcacgtgtatgctttgctcctgagtcaaaactcaaaaggaaagcagctcacagcgggaataatatgtcgagtgatcacaaaaagggatcataggattttacttcaaccaagatatgttggttggtagtacagtaacttgatgtccaactttgtataatttatttaaagcataatatcatggttaattgaacgtgtttgtaaaaaaaaaaaaaaaa

SEQ ID NO: 1968 - DNA, 1247 bp, Glycine max
accataaaaagattcgtcagacattatattcagacaatttaaaagaggtttacgacaacataatttcaactattttttttttttttttgccaaattttttgactttcacttagaaccgatgatagattataaaataaagaacaaattataataacacctattgagatttaatctaattacacatacacccccgttgtctgaagacattactttgacccttgtgtgatggtgttaaacaaacgttaactttcaaagttcatttacgaaaatgtcctcctcagatatccggaaatccaaaattgccattctcagtgatgactaaatttcggacaacttgctccactaacatcctatttaccactaacatattcgagaaggtgccgatcaagctcaaaatgtcgagaaagaagcccctttgtaattttagggtgaaaatatgcagcttcaaaatccaactcaggaaagcgggcaacttcagctgcattctcaaataagataaatgttggaagctggcccatgcttccacttagagatattccaaatctttcagcagcattgggaaagagaccaagatcaactattccaaatgataaatttttgcttgaatatgtaattgagagctcaggaaactgctgacttgagcgaatgcaagcaggtgaatatgaagaacggaattccaccagccacaatcttgtagttgttccctctgtcagcaggctttccaactgcaacggtgttagcttgctagacgtacctagtccttggaatggaggttgttgtgttaacatatgtatcactaaaaatacaagaatataccaaacggctaagcggcgatccattgtaaaggctaggagaaaaagacaaatcttggccaggaaaagcacatcagctataaaggcttcccatgtttcttcttttattcccttgatgaaagccaatatcgcgaacactagcagtgtttgtatttcgcgacgaaggagatggtgagtgagatgaggcgctaagatttgggttgcggagctgcgaacgacgaaataggagaagaaggttaagaaatggaagaggtagtaaggttctgagaccattcgattcagccactgcgtcaccggaaccgtatctttgctactctcctttcccatctctctcgatctaaacttttcgtctccctctcgatttcagtcgttgctttcaactacgctctcataatcatagatagattttctagtatttttcgattaggatgttct

(The sequence listing continues in the following parts.)
